United States Patent Application Publication US 2025/0215492 A1 - sequence listing, part 4

SEQ ID NO: 47299 - DNA, 120 bp, synthetic construct; identical to SEQ ID NO: 28543
  source 1..120: mol_type = other DNA

SEQ ID NO: 47300 - DNA, 120 bp, synthetic construct
  source 1..120: mol_type = other DNA
aatagaccaataacaggctctgaaattgtggcaataatcaatagtttaccaaccaaaaagagtccaggaccagatggattcacagccgaattctaccagaggtacaaggaggaactggta

SEQ ID NO: 47301 - DNA, 120 bp, synthetic construct
  source 1..120: mol_type = other DNA
acagattcaatgccatccccatcaagctaccaatgactttcttcacagaattggaaaaaactactttaaagttcatatggaaccaaaaaagagcccgcatcaccaagtcaatcctaagcc

SEQ ID NO: 47302 - DNA, 120 bp, synthetic construct
  source 1..120: mol_type = other DNA
agttagaaaggcaatcattaaaaagtcaggaaataacaggtgctggagaggatgtggagaaataggaacacttttacactgttggtgggactgtaaactagttcaaccattgtggaagtc

SEQ ID NO: 47303 - DNA, 120 bp, synthetic construct; identical to SEQ ID NO: 28544
  source 1..120: mol_type = other DNA

SEQ ID NO: 47304 - DNA, 120 bp, synthetic construct; identical to SEQ ID NO: 27757
  source 1..120: mol_type = other DNA

SEQ ID NO: 47305 - DNA, 120 bp, synthetic construct; identical to SEQ ID NO: 27723
  source 1..120: mol_type = other DNA

SEQ ID NO: 47306 - DNA, 120 bp, synthetic construct; identical to SEQ ID NO: 28734
  source 1..120: mol_type = other DNA

SEQ ID NO: 47307 - DNA, 120 bp, synthetic construct; identical to SEQ ID NO: 28735
  source 1..120: mol_type = other DNA

SEQ ID NO: 47308 - DNA, 120 bp, synthetic construct; identical to SEQ ID NO: 28736
  source 1..120: mol_type = other DNA

SEQ ID NO: 47309 - DNA, 120 bp, synthetic construct; identical to SEQ ID NO: 28737
  source 1..120: mol_type = other DNA

SEQ ID NO: 47310 - DNA, 120 bp, synthetic construct; identical to SEQ ID NO: 28738
  source 1..120: mol_type = other DNA

SEQ ID NO: 47311 - DNA, 120 bp, synthetic construct
  source 1..120: mol_type = other DNA
tctacggaccggcttccagcaccgacgcccacgcaggatgatgacatcactacagctctacggacccgcttccatcaccgacgcccacgcaggatgatgacatcactacagctctaggga

SEQ ID NO: 47312 - DNA, 120 bp, synthetic construct
  source 1..120: mol_type = other DNA
tcaaactcccacatttcataacctatggacaaccaacttgacacattttggtatatttcctttctgtcttttttttttttgagtcagggcctcactctgtcacccaggctggagtgcagt

SEQ ID NO: 47313 - DNA, 120 bp, synthetic construct
  source 1..120: mol_type = other DNA
gtggcgcgatctcggctcatcccaccgtcacccgggctggagtgcagtggcgccatctcggctcatctcaccgtcacccgggctggagtgcagtggcacaatctcggctcatcccaccgt

SEQ ID NO: 47314 - DNA, 120 bp, synthetic construct
  source 1..120: mol_type = other DNA
ctcagcctcctgagcagctgtaaccacaggcgcatgccaccatgcctggctcacttaaatcttctgtagaggcagggtcttgctatgctgcccaggatggtcttaaaccccttggttcca

SEQ ID NO: 47315 - DNA, 120 bp, synthetic construct
  source 1..120: mol_type = other DNA
attttacagggggggaaggatgaagtgagtttctctgggaggaaagggagcgatgtaattgatgatgtattttctacatgaaaatgggaagactgtaaggaacaataccctgagtcccag

SEQ ID NO: 47316 - DNA, 120 bp, synthetic construct
  source 1..120: mol_type = other DNA
tgttgtgagcgctgcccagcttgcctgaccccactgccatgtgggtgagtggagtcctgtgggtgtggagccctgtgggtggggagtcctgtgggtgagtggagtcctgtgggtggggag

SEQ ID NO: 47317 - DNA, 120 bp, synthetic construct
  source 1..120: mol_type = other DNA
ggtggggagtcctgtgggtgagtggagtcctgtgggtggggagtccttgggtgagtggagtcctgtgggtttggagtcctgtgggtagggagtcctgtgggtgagtggagtcctgtgggt

SEQ ID NO: 47318 - DNA, 120 bp, synthetic construct; identical to SEQ ID NO: 47317
  source 1..120: mol_type = other DNA

SEQ ID NO: 47319 - DNA, 120 bp, synthetic construct; identical to SEQ ID NO: 28720
  source 1..120: mol_type = other DNA

SEQ ID NO: 47320 - DNA, 120 bp, synthetic construct; identical to SEQ ID NO: 28721
  source 1..120: mol_type = other DNA

SEQ ID NO: 47321 - DNA, 120 bp, synthetic construct; identical to SEQ ID NO: 28722
  source 1..120: mol_type = other DNA

SEQ ID NO: 47322 - DNA, 120 bp, synthetic construct; identical to SEQ ID NO: 28723
  source 1..120: mol_type = other DNA

SEQ ID NO: 47323 - DNA, 120 bp, synthetic construct; identical to SEQ ID NO: 28724
  source 1..120: mol_type = other DNA

SEQ ID NO: 47324 - DNA, 120 bp, synthetic construct; identical to SEQ ID NO: 28725
  source 1..120: mol_type = other DNA

SEQ ID NO: 47325 - DNA, 120 bp, synthetic construct; identical to SEQ ID NO: 28726
  source 1..120: mol_type = other DNA

SEQ ID NO: 47326 - DNA, 120 bp, synthetic construct
  source 1..120: mol_type = other DNA
atctgctcaattttgctgtgaacctaatattactcttaaaaaaaagtctattaaaaaaaatccgataggggaagatggcggctgctcctttggaggagcgggattgagaggatcggggtg

SEQ ID NO: 47327 - DNA, 120 bp, synthetic construct
  source 1..120: mol_type = other DNA
ctcagcctcccgaggtgccgggattgcagacggagtctcgttcactcagtgctcaatggtgcccaggctggagtgcagtggcgtgaatctcggctcactacaacctacacctcccagccg

SEQ ID NO: 47328 - DNA, 120 bp, synthetic construct
  source 1..120: mol_type = other DNA
tgcccggccgcccctactgggaagtgaggagcccctctgcccggccactaccccgtctgggaggtgtgcccaacagctcattgagaacgggccaggatgacaatggcggctttgtggaat

SEQ ID NO: 47329 - DNA, 120 bp, synthetic construct; identical to SEQ ID NO: 28729
  source 1..120: mol_type = other DNA

SEQ ID NO: 47330 - DNA, 120 bp, synthetic construct; identical to SEQ ID NO: 28730
  source 1..120: mol_type = other DNA

SEQ ID NO: 47331 - DNA, 120 bp, synthetic construct; identical to SEQ ID NO: 28731
  source 1..120: mol_type = other DNA

SEQ ID NO: 47332 - DNA, 120 bp, synthetic construct
  source 1..120: mol_type = other DNA
tgcgccactgcactccagcctgggcgacagagcgaaactccgtctcaaaaaacaataaatagctctccctctcccctctcccctctcccctctcccctctccccacggtctccctctcat

SEQ ID NO: 47333 - DNA, 120 bp, synthetic construct; identical to SEQ ID NO: 1490
  source 1..120: mol_type = other DNA

SEQ ID NO: 47334 - DNA, 120 bp, synthetic construct
  source 1..120: mol_type = other DNA
acatcgtagagctttcttactttctcacaactccttgagacactttttttactgtggtttccttccccagcccatatttggttctcatgaaaacagaagctccgtggagaaagcgaagaa

SEQ ID NO: 47335 - DNA, 120 bp, synthetic construct
  source 1..120: mol_type = other DNA
gctttctaaactgcaatttcctcatctacaaaaggacaatcacaacaacggaacccaggggacaggactgcatcaactacaaccagacggcgtagacggcagcacacggccctcggcaaa

SEQ ID NO: 47336 - DNA, 120 bp, synthetic construct
  source 1..120: mol_type = other DNA
tatatttgcttaatatttagcagagtccactgtcaatgaaaaaagtacatcgattaattccaaaggccatggagggaggagccaagatggccgaataggaacagctccagtctacagctc

SEQ ID NO: 47337 - DNA, 120 bp, synthetic construct
  source 1..120: mol_type = other DNA
aagcgagaagggaagtttagagaaaaaagaataaaaagaaatgagcaaaacctccaagaaatatgggactatgtgaaaagaccaaatctacgtctgattggtgtacctgaaagtgatggg

SEQ ID NO: 47338 - DNA, 120 bp, synthetic construct
  source 1..120: mol_type = other DNA
cacacaataataatgggagactttaacaccccactgtcaacattagacagatcaacgagacagaaagtcaacaaggatacccaggaattgaactcagctctgcaccaagcggacctaata

SEQ ID NO: 47339 - DNA, 120 bp, synthetic construct
  source 1..120: mol_type = other DNA
tcaatagcttaccaaccaaaaagagtccaggaccagatggattcacagccgaattctaccagaggtacaaggaggaactggtaccattccttctgaaactattccaatcaatagaaaaag

SEQ ID NO: 47340 - DNA, 120 bp, synthetic construct
  source 1..120: mol_type = other DNA
cccaaggtaatttatagattcaatgtcatccccatcaagctaccaatgactttcttcacagaattgaaaaaaactactttaaagttcatatggaaccaaaaaagagcccgcatcgccaag

SEQ ID NO: 47341 - DNA, 120 bp, synthetic construct
  source 1..120: mol_type = other DNA
gggatctagaactagaaataccatttgacccagccatcccattactgggtatatacccaaaggactataaatcatgctgctataaagacacatgcacatgtatgtttattgtggcattat

SEQ ID NO: 47342 - DNA, 120 bp, synthetic construct; identical to SEQ ID NO: 31584
  source 1..120: mol_type = other DNA

SEQ ID NO: 47343 - DNA, 120 bp, synthetic construct; identical to SEQ ID NO: 31585
  source 1..120: mol_type = other DNA

SEQ ID NO: 47344 - DNA, 120 bp, synthetic construct
  source 1..120: mol_type = other DNA
ggaccaagaatgaaactaagaaaaactagaatacctggtcaaaataaagaaaatatctgttcagtttgaagtcaggtagtgtgatgcctccagctttgttcttttggcttaggattgact

SEQ ID NO: 47345 - DNA, 120 bp, synthetic construct
  source 1..120: mol_type = other DNA
tctttggttctgtttatatgctggattacagtaaccaaaacagcatggtactggtaccaaaacagagatatagatcaacggaacagaacagagccctcaggaataacaccgcatatctac

SEQ ID NO: 47346 - DNA, 120 bp, synthetic construct
  source 1..120: mol_type = other DNA
tgatgagttcatgtcctttgtagggacatggatgaaattggaaatcatcattctcagtaaactatcgcaagaacaaaaaaccaaacaccgcatattctcgctcacaagtgggaattgaac

SEQ ID NO: 47347 - DNA, 120 bp, synthetic construct
  source 1..120: mol_type = other DNA
cacgactgctgatacccaggcaaacagggtctggagtggacctctagcaaactccaaaagacctgcagctgagggtcctgtctgttagaaggaaaactaacaaacagaaaggacatccac

SEQ ID NO: 47348 - DNA, 120 bp, synthetic construct
  source 1..120: mol_type = other DNA
aaactaagcttcgtaagtgaaggagaaataaaatcctttacagacaagcaaatgctgaaagattttgtcaccaccaggcctgccctacaagagctcctgaaggaagcactaaacatggaa

SEQ ID NO: 47349 - DNA, 120 bp, synthetic construct
  source 1..120: mol_type = other DNA
tgactactgggtacataacaaaatgaaggcagaaataaagctgttctttgaaaccaacaagaacaaagacacaacataccagaatctctgggacacattcaaagcagtgtgtagagggaa

SEQ ID NO: 47350 - DNA, 120 bp, synthetic construct
  source 1..120: mol_type = other DNA
atcaactgggcttcatccctgggatgcaaggctggttcaatatacacaaatcaataaatgtaatccagcatataaacagaatcaaagacaaaaaccacatgattatctcaatagatgcag

SEQ ID NO: 47351 - DNA, 120 bp, synthetic construct
  source 1..120: mol_type = other DNA
actatactacaagcctacagtaaccaaaacagcatggtactggtaccaaaacagagatattgatcaatggaacagaacagagccctcagaaataacactgcatatctacaactatctgat

SEQ ID NO: 47352 - DNA, 120 bp, synthetic construct
  source 1..120: mol_type = other DNA
gcactattcacaatagcaaagtcttggaaccaacccaaatgtccaacaatgatagactggtttaagaaaatgtggcacatacacaccatggaatactatgcagccataaaaaatgatgag

SEQ ID NO: 47353 - DNA, 120 bp, synthetic construct
  source 1..120: mol_type = other DNA
gtttcctgactttttaatgattggcattctaactggtgtgagatggtatgtcattgaggttttgatttgcatttctctgatggccagtgatggtgagcattttttcatgtgttttttggc

SEQ ID NO: 47354 - DNA, 120 bp, synthetic construct
  source 1..120: mol_type = other DNA
cacgatattgattcttcctacccatgagcatggaatgttcttccatttctttgtatcctcttttatttcattgagcagtggtttgcagttctccttgaagaggtccttcacatcccttga

SEQ ID NO: 47355 - DNA, 120 bp, synthetic construct
  source 1..120: mol_type = other DNA
agaccaataacaggctctgaaattgtggcaataatcaatagcttaccaaccaaaaagagtccaggaccagatggattcacagccgaattctaccagaggtacaaggaggaactggtacca

SEQ ID NO: 47356 - DNA, 120 bp, synthetic construct
  source 1..120: mol_type = other DNA
ctttgtctcattgatctgtctaatgttgacagtggggtgttaaagtctcccattattattgtgtgggagtctaagtctgtttgtaggtcactcaggacttgctttatgaatctgggtgtt

SEQ ID NO: 47357 - DNA, 120 bp, synthetic construct
  source 1..120: mol_type = other DNA
tagtcccatatttcttggaggctttgttcgtttctttttattcttttttcttttatgcctttttctattgtgtttttttatttggaccatctatacccttcctatttaccaatttaaaat

SEQ ID NO: 47358 - DNA, 120 bp, synthetic construct
  source 1..120: mol_type = other DNA
aaaaattgtgtcactcccacccgaatactgcgctttcccgacgggcttaaaaaatggcacaccaggagattaaaacccgcacctggctcggagggtcctacgcccacggagtctcgctga

SEQ ID NO: 47359 - DNA, 120 bp, synthetic construct
  source 1..120: mol_type = other DNA
atgaaatgaatgaaatgaagtgagaagggaagtttagagaaaaaagaataaaaagaaacgagcaaagcctccaagaaatatgggactatgtgaaaagaccaaatctatgtctgattggtg

SEQ ID NO: 47360 - DNA, 120 bp, synthetic construct
  source 1..120: mol_type = other DNA
acattaataatgggagactttaacaccccactatcaacattagacagatcaacgagacagaaagtcaacaaggatacccaggaattgaactcaggtctgcaccaagtggacctaataggc

SEQ ID NO: 47361 - DNA, 120 bp, synthetic construct
  source 1..120: mol_type = other DNA
ccaaaaagagtccaggaccagatggattcacagctgaattctaccagaggtacaaggaggaactggtaccattccttctgaaactattccaatcaacagaaaaagagggaatcctcccta

SEQ ID NO: 47362 - DNA, 120 bp, synthetic construct
  source 1..120: mol_type = other DNA
aaaatggccatactgcccaaggtaatttatagattcaatgccatccccatcaagctaccaatgactttcttcacagaattggaaaaaactactttaatgttcatatggaatcaaaaaaga

SEQ ID NO: 47363 - DNA, 120 bp, synthetic construct
  source 1..120: mol_type = other DNA
cctcagggatctagaactagaaataccatttgacccagccatcccattactgggtatacacccaaaggactgtaaatcatgctgctataacgacacatgcacacgtatgtttattgcggc

SEQ ID NO: 47364 - DNA, 120 bp, synthetic construct; identical to SEQ ID NO: 31587
  source 1..120: mol_type = other DNA

SEQ ID NO: 47365 - DNA, 120 bp, synthetic construct; identical to SEQ ID NO: 31262
  source 1..120: mol_type = other DNA

SEQ ID NO: 47366 - DNA, 120 bp, synthetic construct; identical to SEQ ID NO: 31263
  source 1..120: mol_type = other DNA

SEQ ID NO: 47367 - DNA, 120 bp, synthetic construct
  source 1..120: mol_type = other DNA
gcactccagcctgggcgacagagctagactccgtctcaaaaaaaagaaaaaggaactagacattcaacaaatatctgaagaacaaataaacaaaccaaagcagaagctgagtagaatgtg

SEQ ID NO: 47368 - DNA, 120 bp, synthetic construct
  source 1..120: mol_type = other DNA
tcactatgatattggctgtgggtttgtcatagatagctcttactattttgagatacgtcccatcaatacctaatttattgagagtttttagcatgaagagttgttgaattttgtcaaagg

SEQ ID NO: 47369 - DNA, 120 bp, synthetic construct
  source 1..120: mol_type = other DNA
aaattgacaaatgggatctaattaaactaaagagcttctgcacagcaaaagaaactaccatcagagtgaacaggcaacctacaaaatgggagaaaatttttgcaacctactcgtctgaaa

SEQ ID NO: 47370 - DNA, 120 bp, synthetic construct; identical to SEQ ID NO: 26532
  source 1..120: mol_type = other DNA

SEQ ID NO: 47371 - DNA, 120 bp, synthetic construct
  source 1..120: mol_type = other DNA
cttatatctccctctccctctccctctccctctccgtctccctctccgtctccctctcccctttccatggtctcccctctccctctctttccacggtctccctctcatgccgagcggcag

SEQ ID NO: 47372 - DNA, 120 bp, synthetic construct
  source 1..120: mol_type = other DNA
ataaaaaccttagaagaaaacccaggcaataccattcaggacataggcatgggcaaggacttcatgtctaaaacaccaaaagcaatggcaacaaaagccaaaattgacaaatgggatcta

SEQ ID NO: 47373 - DNA, 120 bp, synthetic construct
  source 1..120: mol_type = other DNA
tgtccacatctttctgattcatgatgggaaagctattatgacctttcacattcgaacatgtcattttgttgtgtaaatttggtgggtggggggcagaagggctctattacctttatccct

SEQ ID NO: 47374 - DNA, 120 bp, synthetic construct
  source 1..120: mol_type = other DNA
aaaggctctagttttcagttgattgcagaagtattacagtaattctacacaccaaagaatgccaaaagatagaaagtcaactatctgtaaaagccaactcagatttcaccttgacacatg

SEQ ID NO: 47375 - DNA, 120 bp, synthetic construct
  source 1..120: mol_type = other DNA
agtgttgacagtgcttggcagacaatacacactaaacatctccttaaccatttccactgatgccccctaacaggagtgtggtatagaagcactaggtgtaggaacaatctgatatttttt

SEQ ID NO: 47376 - DNA, 120 bp, synthetic construct
  source 1..120: mol_type = other DNA
acttcgcaatatgtcacagacctcatagatctcaatccaaaatttctagtaaacataaggatctcattatttcaaagctttatctatgacacagtttcctggcctgatccccagaatgtt

SEQ ID NO: 47377 - DNA, 120 bp, synthetic construct
  source 1..120: mol_type = other DNA
tgaattcccgaagcataaatctaggacaagaggcaaccaatgtaatgatgcacttgacatgccctcacagactcttctgagaactgtagtgtaactaacttaactgcaattgctgagcag

SEQ ID NO: 47378 - DNA, 120 bp, synthetic construct
  source 1..120: mol_type = other DNA
ctgaaagtggtagggatcatcctatacctgaccagagtggcaaaaaaagagaatgggtatgtgtagaagcaaacaggaaggtagttcaagtttccttatcttaagaaacgagtgtaccac

SEQ ID NO: 47379 - DNA, 120 bp, synthetic construct
  source 1..120: mol_type = other DNA
caacctcctgaatagctgggactataggtgcatgtcaccataccaagctaatttttttttttttttttttttgtagagatggggtttcaccatgctgcctaggctcgtcttgaactcctg

SEQ ID NO: 47380 - DNA, 120 bp, synthetic construct
  source 1..120: mol_type = other DNA
agctggaggcatcacattagccgattttatactaaaaggctataggaacctgaacagcagggtactgttataaaaacagacacatagaccaatggagaatagagagccaagaaataaagc

SEQ ID NO: 47381 - DNA, 120 bp, synthetic construct
  source 1..120: mol_type = other DNA
tacatatacaccatggaatactatgcagccataaaaaccagatggagctagaggtcattatcctaagtgaactaatccaggaacagaaaaccaactaccgcatgttctcacttctaagtg

SEQ ID NO: 47382 - DNA, 120 bp, synthetic construct
  source 1..120: mol_type = other DNA
catctttctgcaccttgagatgtataaggctgggggtcccttgaacaagatattcctattctatgcttttggttaacacttactgtgtaattactggtgctccacaggtctgttacctaa

SEQ ID NO: 47383 - DNA, 120 bp, synthetic construct
  source 1..120: mol_type = other DNA
aatgtaggggctggggctggggctgtctggttggccactattaagcccggtacctagaacagtgcctaggagctcaatatatatttattaaacaaatagttaaatatttactttaagggt

SEQ ID NO: 47384 - DNA, 120 bp, synthetic construct
  source 1..120: mol_type = other DNA
taaaacaaatttacttctttcctaatcagttggggtagccagttaccatgtaataataacctactgcgtatgaggcactgtgctatgaacagaacagaagaaagaggctatttccatttt

SEQ ID NO: 47385 - DNA, 120 bp, synthetic construct
  source 1..120: mol_type = other DNA
caaggtgaacaactttcttccctttaagtattataaataattgctaatttacatttctctgttttgctccttgacagtagactcaaataaaagaaaaatacaatttttttctaatatata

SEQ ID NO: 47386 - DNA, 120 bp, synthetic construct
  source 1..120: mol_type = other DNA
tcatctgcagactttctcagacttatttgaccatgcaacttttatagcttctgtttagtgggtctacacatgaaattcgttgtaagaaatatcaaagaatgtccagatcctccaaaaaga

SEQ ID NO: 47387 - DNA, 120 bp, synthetic construct
  source 1..120: mol_type = other DNA
gcactgaaggaaagggtcagaaacattactgaataaagtataataatcaatgaccacttaatcccaatagctccctagaagggacagatttagaaggaaagcgaagacaatgaaatcaag

SEQ ID NO: 47388 - DNA, 120 bp, synthetic construct
  source 1..120: mol_type = other DNA
tatgaaaggctgacactgaacagatacaggactaaagtgcttctgattcaagccattaaggctcttaggttaaacacactcatgcctctgatactccatcatgagcctaaaggaaaagac

SEQ ID NO: 47389 - DNA, 120 bp, synthetic construct
  source 1..120: mol_type = other DNA
taagcaacagttcaaatacgtaatgtccctagaacaatctaagtagacagtctgttattttctttcttccaaatcttgtcataggtgagcataagatggtatctgcttcatccagctttt

SEQ ID NO: 47390 - DNA, 120 bp, synthetic construct
  source 1..120: mol_type = other DNA
gatgaaagcagttccattacaggaatcacttctccagtaagcattggaataatactctgaccctgcacaataaagtgacatgaagtgaagaaaatcacgtaatatgagagaagctgggca

SEQ ID NO: 47391 - DNA, 120 bp, synthetic construct
  source 1..120: mol_type = other DNA
tagaatcaaactgaaaattcagtataacacatcacaaatgtaaagtgtctcaaatatggatggtccctcatttattcactaccaccaccagtctcatcagttttgtgaccaacttggtta

SEQ ID NO: 47392 - DNA, 120 bp, synthetic construct
  source 1..120: mol_type = other DNA
tgaaagttaccccattcctggggaccctgcttattgaccagcaaataaggactgggattctttgggtaaagggaaatcttttcttgttaagtcagacctttacacagaataactgtctct

SEQ ID NO: 47393 - DNA, 120 bp, synthetic construct
  source 1..120: mol_type = other DNA
gggtttaagatatggaaatcttcctccagtttattctgtacacctccataaaagctccattaaaggcttattcgtatgtctccaaggccttgacaaatgtagccatcaaccttatacaga

SEQ ID NO: 47394 - DNA, 120 bp, synthetic construct
  source 1..120: mol_type = other DNA
aggctcccaagaagaatccagggtctaaaagtttctttatttgtctaagctttagcttttcatctataatgtggagctaccatttcgtaccttccacagttaatatgaagatgacaggta

SEQ ID NO: 47395 - DNA, 120 bp, synthetic construct
  source 1..120: mol_type = other DNA
tacatactaaagctcatagaatagacccgcagtattcccaaatatccagtccatgtgcaattctagtatgactggagatttggcccctaacccatagcaactaaaaaggagaaaaacagg

SEQ ID NO: 47396 - DNA, 120 bp, synthetic construct
  source 1..120: mol_type = other DNA
tcaagcctttgaatttaatgagaaaacagacatgaggagaagaacataaacgctcacatccaagacagaacccagggctcttggtccccttgctcaacttgtacatcttaatccacataa

SEQ ID NO: 47397 - DNA, 120 bp, synthetic construct
  source 1..120: mol_type = other DNA
aaactgttaagataaatttggtgtagcttcagcgtactgtgtttatagtctacagtggtgtacagtgttctaggccttcacattaattcaccactcactcactgactcacccagagcaac

SEQ ID NO: 47398 - DNA, 120 bp, synthetic construct
  source 1..120: mol_type = other DNA
taggaatgtaatctgaattgaaatggtaatgacactactgctgtcataactaacaacagcaaactggaggccaacataatgaattaagttaacatacaaccataaaattatattgcaaac

SEQ ID NO: 47399 - DNA, 120 bp, synthetic construct
  source 1..120: mol_type = other DNA
ggtatttagaaaggtggttggtccactgctattgtagtgaaaattctacaatcataaagccctcacttcttgttttttagagacagggtctcgttttgtcatccaggctggaatgcactg

SEQ ID NO: 47400 - DNA, 120 bp, synthetic construct
  source 1..120: mol_type = other DNA
tgatcctttgtacaaaagtagaagtaatgccagacagattacgtacccttgttgtgaacaactggtgcatggcaactgtttgaatagaaatttaccaactgccacaaccaggcaactact

SEQ ID NO: 47401 - DNA, 120 bp, synthetic construct
  source 1..120: mol_type = other DNA
tagaggcgaaagcccgacacccagcttcggtcagagaaatgagagggaaagtaaaaatgcgtcgagctctgaggagagcccccgcttctacccgcgcctcttcccggcagccgaacccca

SEQ ID NO: 47402 - DNA, 120 bp, synthetic construct
  source 1..120: mol_type = other DNA
atcccacggtcccctgcaaagtcatcgcaattttgcctttacatgtaagaattctctcaagcatgattttcacactggggaatgtcatttttgctagttgcaatatgtggatgagttgtt

SEQ ID NO: 47403 - DNA, 120 bp, synthetic construct
  source 1..120: mol_type = other DNA
agtagacccttggttggggggcttggggggaaagaaaattgtagggtagggtacaaagttgcagttacgtctaatacatctagagatttaatgtacaacatgaggactagcgttaataat

SEQ ID NO: 47404 - DNA, 120 bp, synthetic construct
  source 1..120: mol_type = other DNA
ccccacatttcttctccttgcttccctagtagatgttctccatgaggattccaccccagtaacaggcttctgtctggacatccaggctttttcatacatcctctaaaatctaggcagagc

SEQ ID NO: 47405 - DNA, 120 bp, synthetic construct
  source 1..120: mol_type = other DNA
aattactattttagagaggcagtatgacaactgcctgaccatcatctgatggttgcctgacattcctggtgggtggtggggacttctctcttaccccactcatgcctgattagctaccta

SEQ ID NO: 47406 - DNA, 120 bp, synthetic construct
  source 1..120: mol_type = other DNA
tgccttccttttagttatgcaaatttatgcagcctgcttgacttcctctcctgagaacgagcttttctttactaccacatggccaggctgcaaaatttacaaacttttatgctctgcttc

SEQ ID NO: 47407 - DNA, 120 bp, synthetic construct; identical to SEQ ID NO: 32624
  source 1..120: mol_type = other DNA

SEQ ID NO: 47408 - DNA, 120 bp, synthetic construct; identical to SEQ ID NO: 32625
  source 1..120: mol_type = other DNA

SEQ ID NO: 47409 - DNA, 120 bp, synthetic construct; identical to SEQ ID NO: 18289
  source 1..120: mol_type = other DNA

SEQ ID NO: 47410 - DNA, 120 bp, synthetic construct
  source 1..120: mol_type = other DNA
actatttgatccagcaatccagaggaaaagaagtcgttattcgaaaaagatacttgtgcacgcatatttctagcagcacagttcacaatcgcaaaatcgtggaaccaacccaaatgcccg

SEQ ID NO: 47411 - DNA, 120 bp, synthetic construct; identical to SEQ ID NO: 18290
  source 1..120: mol_type = other DNA

SEQ ID NO: 47412 - DNA, 120 bp, synthetic construct; identical to SEQ ID NO: 18291
  source 1..120: mol_type = other DNA

SEQ ID NO: 47413 - DNA, 120 bp, synthetic construct; identical to SEQ ID NO: 18292
  source 1..120: mol_type = other DNA

SEQ ID NO: 47414 - DNA, 120 bp, synthetic construct; identical to SEQ ID NO: 18293
  source 1..120: mol_type = other DNA

SEQ ID NO: 47415 - DNA, 120 bp, synthetic construct
  source 1..120: mol_type = other DNA
gataagaaaggaaatctaaaaattaacataaaaaggcagagatagaaattgagtgcacagaaaggatacatgttgcgggaagtcagggaccccgaatggagggaccagctgaagccatgg

SEQ ID NO: 47416 - DNA, 120 bp, synthetic construct
  source 1..120: mol_type = other DNA
tgtgatattttgttaccttgtaaaacatgtgatctctgtgacccataccctaattgtacactccctccccttttgaaaatcactaacaaaaacttgctggttttgcggcttggggggcat

SEQ ID NO: 47417 - DNA, 120 bp, synthetic construct; identical to SEQ ID NO: 18294
  source 1..120: mol_type = other DNA

SEQ ID NO: 47418 - DNA, 120 bp, synthetic construct; identical to SEQ ID NO: 19873
  source 1..120: mol_type = other DNA

SEQ ID NO: 47419 - DNA, 120 bp, synthetic construct
  source 1..120: mol_type = other DNA
aaggtgcattttgacatacatgctccgttcaaaaatgtatatacacaaacacacacataaaactataagcaggccagatgcagtggctcacacctgttatcccagcactttgcgaggcca

SEQ ID NO: 47420 - DNA, 120 bp, synthetic construct; identical to SEQ ID NO: 33499
  source 1..120: mol_type = other DNA

SEQ ID NO: 47421 - DNA, 120 bp, synthetic construct; identical to SEQ ID NO: 22061
  source 1..120: mol_type = other DNA

SEQ ID NO: 47422 - DNA, 120 bp, synthetic construct; identical to SEQ ID NO: 22062
  source 1..120: mol_type = other DNA

SEQ ID NO: 47423 - DNA, 120 bp, synthetic construct
  source 1..120: mol_type = other DNA
aaaaaaacaaaaacaaaaaactctgacagtaacaagtgttgcaaagatggatggagataaattgaaaccctgggccaggaatgatggctcatgcctgtaatcccaacacttggggaggct

SEQ ID NO: 47424 - DNA, 120 bp, synthetic construct
  source 1..120: mol_type = other DNA
tggatcacttgaggtcaggggttcatgaccagcctagccaacatagtgaaaccttgtctctactaaaaatacaaaaattggctgggtgtggtggcagatgcctgtaatcccagctactcg

SEQ ID NO: 47425 - DNA, 120 bp, synthetic construct; identical to SEQ ID NO: 13718
  source 1..120: mol_type = other DNA

SEQ ID NO: 47426 - DNA, 120 bp, synthetic construct
  source 1..120: mol_type = other DNA
atagatagatagatagatattaaaattgaaaagcaccactgacatccttttacagctggcttacctcaaagtctatcagctgcaggtcagctatcagtgtcactagcaggccactgctgt

SEQ ID NO: 47427 - DNA, 120 bp, synthetic construct
  source 1..120: mol_type = other DNA
catctaggaagtgaggagcgtctctgcccggccgcccatcgtctgagatgtggggagcgcttctgccccgccgccccatctgggatgtgaggagtgcctctgcccggccgagaccccgtc

SEQ ID NO: 47428 - DNA, 120 bp, synthetic construct
  source 1..120: mol_type = other DNA
cccacctcagcctcccaaagtgctgggattacaggcgtgagccactgcatccggcccagtaatcttttaaaccacactcattgtctaattttgctagcaattcaatataaactttatgct

SEQ ID NO: 47429 - DNA, 120 bp, synthetic construct; identical to SEQ ID NO: 4968
  source 1..120: mol_type = other DNA

SEQ ID NO: 47430 - DNA, 120 bp, synthetic construct
  source 1..120: mol_type = other DNA
aacctccataatgactctgtggtttccctggaggaggtaagtgagaattttcgtttgtttgtttgtttcctgagatggagtttcacttttgtcgcctaggctggagtgtaatagtgcaat

SEQ ID NO: 47431 - DNA, 120 bp, synthetic construct
  source 1..120: mol_type = other DNA
ggtggctgccgggcggagacgctcctcacttcccagacggggcggctgccggttggaggggctcctcacttctcagacggggcggctgccaggcggagggtctcctcacttctcagacgg

SEQ ID NO: 47432 - DNA, 120 bp, synthetic construct; identical to SEQ ID NO: 18907
  source 1..120: mol_type = other DNA

SEQ ID NO: 47433 - DNA, 120 bp, synthetic construct; identical to SEQ ID NO: 18908
  source 1..120: mol_type = other DNA

SEQ ID NO: 47434 - DNA, 120 bp, synthetic construct; identical to SEQ ID NO: 22680
  source 1..120: mol_type = other DNA

SEQ ID NO: 47435 - DNA, 120 bp, synthetic construct; identical to SEQ ID NO: 22681
  source 1..120: mol_type = other DNA

SEQ ID NO: 47436 - DNA, 120 bp, synthetic construct; identical to SEQ ID NO: 19859
  source 1..120: mol_type = other DNA

SEQ ID NO: 47437 - DNA, 120 bp, synthetic construct; identical to SEQ ID NO: 7677
  source 1..120: mol_type = other DNA

SEQ ID NO: 47438 - DNA, 120 bp, synthetic construct
  source 1..120: mol_type = other DNA
accagggagagcagaatgactcctatcactgcagatagtcagtcccaagatgagtctacataaacaaaccttcctaaaataactctctgtctccctctctctcttttttttttggaacag

SEQ ID NO: 47439 - DNA, 120 bp, synthetic construct
  source 1..120: mol_type = other DNA
caatgcctgggcttttgcacctcagggcatttctttttcttttttttcttgagtctcgctctgttgcccaggctggagtgcagtggcatgatctcggctcactgcaggctctgcctcccg

SEQ ID NO: 47440 - DNA, 120 bp, synthetic construct
  source 1..120: mol_type = other DNA
tgctgggattacaggcgtgagcctctgtacccagccttaaaaaaaacaaacttttttttttagagacagcgtcttgctatgttgcccaggctggtcttgaactactggcctcaagtgatt

SEQ ID NO: 47441 - DNA, 120 bp, synthetic construct
  source 1..120: mol_type = other DNA
tcaggctcaggtgattctcatgcctcagcctccggagtagctgggattacagtttgtgcaaccacgcatggctaattttttttgtatttttagtagagatgaggttttgccatgttggtc

SEQ ID NO: 47442 - DNA, 120 bp, synthetic construct
  source 1..120: mol_type = other DNA
tttttttttttttttttttttttttttcatgttccccaaagttctccaaaaatggctgagttaattcaaatcccttggctgtgtggtttgtctgctccctgcctcccacccgagagcccc

SEQ ID NO: 47443 - DNA, 120 bp, synthetic construct
  source 1..120: mol_type = other DNA
aggacagaaatcataattgaaacaaaaacagaagccgggttaaaggaaagtgaaaggtcgggcggcacggcccagaactcaaatatgatccacaaccgaggagcaagcagctgcgggcgg

SEQ ID NO: 47444 - DNA, 120 bp, synthetic construct
  source 1..120: mol_type = other DNA
cacggaggctgaacgcttcatggggctggtgtctgagatggtctgggggaggggacaggccggtgggctggggtcagcagctagcaccaagtggtcccggtccttcctgccccattgtgg

SEQ ID NO: 47445 - DNA, 120 bp, synthetic construct
  source 1..120: mol_type = other DNA
cggtacatacactgaggttattcccacgtggccggccccttctcctctgtcacagccccatgggatggtgcacacagaaaaaacagaaagaagaaaataaatataaaaggcaagagggag

SEQ ID NO: 47446 - DNA, 120 bp, synthetic construct
  source 1..120: mol_type = other DNA
acatgtgtgcatgtgtgagtacatgtgcagtgtgtatatgcccacgtgcacacacgtgtgtgtatgcaagcatctgagtaggcgcacagctgcacatgtgtgtgcatgtatgttgagcat

SEQ ID NO: 47447 - DNA, 120 bp, synthetic construct
  source 1..120: mol_type = other DNA
ggtcctggggaatggggcagagagcagtgtgtggacaagggtggggtggtgggacggtggtacccagaaggcattgcgacatccccagtatacacacacacacacacacacactctctca

SEQ ID NO: 47448 - DNA, 120 bp, synthetic construct
  source 1..120: mol_type = other DNA
gtgggactatccacctgctcctctcccacccactccttttttctggtcccatttgttttttcttttctttctttctttctttttttttttttttttgagacagagtcttgctgtgtcccc

SEQ ID NO: 47449 - DNA, 120 bp, synthetic construct; identical to SEQ ID NO: 19572
  source 1..120: mol_type = other DNA

SEQ ID NO: 47450 - DNA, 120 bp, synthetic construct
  source 1..120: mol_type = other DNA
tgcaatgctgagggagaccccagggctgagaggaagaccctgtacctgttacatgtaatcttaacttaatagggtccttggggagaggcttaggctggacggaggctagctcttaacatg

SEQ ID NO: 47451 - DNA, 120 bp, synthetic construct
  source 1..120: mol_type = other DNA
ctctccatgaaggatacagttcccaaagagcgtcagtacaatgaaatagatggagaacaccatgccgccctgcacgcccccctgagacttgatcccgtcgtacatgacctcgttccagtc

SEQ ID NO: 47452 - DNA, 120 bp, synthetic construct
  source 1..120: mol_type = other DNA
cctcccaaagtgctgggattacaagtgtgagccatcacacccagccagggacatacattaatgatcactaactaaacatagttttgttgctttattaattgacattcaccaagggagaga

SEQ ID NO: 47453 - DNA, 120 bp, synthetic construct; identical to SEQ ID NO: 19573
  source 1..120: mol_type = other DNA

SEQ ID NO: 47454 - DNA, 120 bp, synthetic construct
  source 1..120: mol_type = other DNA
aaactccatctctactaaaaatgcaaaaaattagctgggcgtggcggtgggcatctgtaatcccagctactcagaggcagaggcaggcgaactgcttgaacccatgaggtggaggttgca

SEQ ID NO: 47455 - DNA, 120 bp, synthetic construct; identical to SEQ ID NO: 19574
  source 1..120: mol_type = other DNA

SEQ ID NO: 47456 - DNA, 120 bp, synthetic construct; identical to SEQ ID NO: 19575
  source 1..120: mol_type = other DNA

SEQ ID NO: 47457 - DNA, 120 bp, synthetic construct; identical to SEQ ID NO: 19576
  source 1..120: mol_type = other DNA

SEQ ID NO: 47458 - DNA, 120 bp, synthetic construct; identical to SEQ ID NO: 33274
  source 1..120: mol_type = other DNA

SEQ ID NO: 47459 - DNA, 120 bp, synthetic construct; identical to SEQ ID NO: 33268
  source 1..120: mol_type = other DNA

SEQ ID NO: 47460 - DNA, 120 bp, synthetic construct; identical to SEQ ID NO: 33269
  source 1..120: mol_type = other DNA

SEQ ID NO: 47461 - DNA, 120 bp, synthetic construct; identical to SEQ ID NO: 33270
  source 1..120: mol_type = other DNA

SEQ ID NO: 47462 - DNA, 120 bp, synthetic construct; identical to SEQ ID NO: 33251
  source 1..120: mol_type = other DNA

SEQ ID NO: 47463 - DNA, 120 bp, synthetic construct; identical to SEQ ID NO: 33252
  source 1..120: mol_type = other DNA

SEQ ID NO: 47464 - DNA, 120 bp, synthetic construct; identical to SEQ ID NO: 33253
  source 1..120: mol_type = other DNA

SEQ ID NO: 47465 - DNA, 120 bp, synthetic construct; identical to SEQ ID NO: 33254
  source 1..120: mol_type = other DNA

SEQ ID NO: 47466 - DNA, 120 bp, synthetic construct; identical to SEQ ID NO: 33255
  source 1..120: mol_type = other DNA

SEQ ID NO: 47467 - DNA, 120 bp, synthetic construct; identical to SEQ ID NO: 33256
  source 1..120: mol_type = other DNA

SEQ ID NO: 47468 - DNA, 120 bp, synthetic construct; identical to SEQ ID NO: 33257
  source 1..120: mol_type = other DNA

SEQ ID NO: 47469 - DNA, 120 bp, synthetic construct; identical to SEQ ID NO: 33258
  source 1..120: mol_type = other DNA

SEQ ID NO: 47470 - DNA, 120 bp, synthetic construct; identical to SEQ ID NO: 33259
  source 1..120: mol_type = other DNA

SEQ ID NO: 47471 - DNA, 120 bp, synthetic construct; identical to SEQ ID NO: 33260
  source 1..120: mol_type = other DNA

SEQ ID NO: 47472 - DNA, 120 bp, synthetic construct; identical to SEQ ID NO: 33261
  source 1..120: mol_type = other DNA

SEQ ID NO: 47473 - DNA, 120 bp, synthetic construct; identical to SEQ ID NO: 33262
  source 1..120: mol_type = other DNA

SEQ ID NO: 47474 - DNA, 120 bp, synthetic construct
  source 1..120: mol_type = other DNA
gtatgcatgtgtgtgtcgtgtgtggtgcatgtgtgtgatgtgtgtctgtgtgtgatgtgtgtctgtgtgtgtgtgtggagagggagatttatcatgaggaactggctcatgtgatcacag

SEQ ID NO: 47475 - DNA, 120 bp, synthetic construct; identical to SEQ ID NO: 33263
  source 1..120: mol_type = other DNA

SEQ ID NO: 47476 - DNA, 120 bp, synthetic construct; identical to SEQ ID NO: 33264
  source 1..120: mol_type = other DNA

SEQ ID NO: 47477 - DNA, 120 bp, synthetic construct; identical to SEQ ID NO: 33265
  source 1..120: mol_type = other DNA

SEQ ID NO: 47478 - DNA, 120 bp, synthetic construct; identical to SEQ ID NO: 33266
  source 1..120: mol_type = other DNA

SEQ ID NO: 47479 - DNA, 120 bp, synthetic construct; identical to SEQ ID NO: 33267
  source 1..120: mol_type = other DNA

SEQ ID NO: 47480 - DNA, 120 bp, synthetic construct; identical to SEQ ID NO: 33271
  source 1..120: mol_type = other DNA

SEQ ID NO: 47481 - DNA, 120 bp, synthetic construct; identical to SEQ ID NO: 33272
  source 1..120: mol_type = other DNA

SEQ ID NO: 47482 - DNA, 120 bp, synthetic construct; identical to SEQ ID NO: 33273
  source 1..120: mol_type = other DNA

SEQ ID NO: 47483 - DNA, 120 bp, synthetic construct; identical to SEQ ID NO: 12587
  source 1..120: mol_type = other DNA

SEQ ID NO: 47484 - DNA, 120 bp, synthetic construct; identical to SEQ ID NO: 12588
  source 1..120: mol_type = other DNA

SEQ ID NO: 47485 - DNA, 120 bp, synthetic construct; identical to SEQ ID NO: 12589
  source 1..120: mol_type = other DNA

SEQ ID NO: 47486 - DNA, 120 bp, synthetic construct
  source 1..120: mol_type = other DNA
tcatgacccagtgggaaggaatgtccttttgataatagccgtcctgataagtgtgcagtggtattgatttgcatttccctaatgactagtgatgtcgagcatcttttcatgtgcatattg

SEQ ID NO: 47487 - DNA, 120 bp, synthetic construct; identical to SEQ ID NO: 12590
  source 1..120: mol_type = other DNA

SEQ ID NO: 47488 - DNA, 120 bp, synthetic construct; identical to SEQ ID NO: 12591
  source 1..120: mol_type = other DNA

SEQ ID NO: 47489 - DNA, 120 bp, synthetic construct; identical to SEQ ID NO: 12596
  source 1..120: mol_type = other DNA

SEQ ID NO: 47490 - DNA, 120 bp, synthetic construct
  source 1..120: mol_type = other DNA
tcctcctccttcttcttccttttcttcttcttcttctcttccctcttcttttttcaagacaggatctcactctgtcacctaggctggagtgtggtagcataatcatagctcactgtagcc

SEQ ID NO: 47491 - DNA, 120 bp, synthetic construct; identical to SEQ ID NO: 12597
  source 1..120: mol_type = other DNA

SEQ ID NO: 47492 - DNA, 120 bp, synthetic construct; identical to SEQ ID NO: 12598
  source 1..120: mol_type = other DNA

SEQ ID NO: 47493 - DNA, 120 bp, synthetic construct; identical to SEQ ID NO: 12599
  source 1..120: mol_type = other DNA

SEQ ID NO: 47494 - DNA, 120 bp, synthetic construct; identical to SEQ ID NO: 12600
  source 1..120: mol_type = other DNA

SEQ ID NO: 47495 - DNA, 120 bp, synthetic construct; identical to SEQ ID NO: 12592
  source 1..120: mol_type = other DNA

SEQ ID NO: 47496 - DNA, 120 bp, synthetic construct; identical to SEQ ID NO: 12593
  source 1..120: mol_type = other DNA

SEQ ID NO: 47497 - DNA, 120 bp, synthetic construct; identical to SEQ ID NO: 12594
  source 1..120: mol_type = other DNA

SEQ ID NO: 47498 - DNA, 120 bp, synthetic construct; identical to SEQ ID NO: 12595
  source 1..120: mol_type = other DNA

SEQ ID NO: 47499 - DNA, 120 bp, synthetic construct
  source 1..120: mol_type = other DNA
ctttttttttctttctttctctcttcctttttctttctttattttctttctttcccttccttccttccttccttttctctctccttccttcctccttccttccctttcccctttcccctt

SEQ ID NO: 47500 - DNA, 120 bp, synthetic construct; identical to SEQ ID NO: 12577
  source 1..120: mol_type = other DNA

SEQ ID NO: 47501 - DNA, 120 bp, synthetic construct; identical to SEQ ID NO: 12578
  source 1..120: mol_type = other DNA

SEQ ID NO: 47502 - DNA, 120 bp, synthetic construct; identical to SEQ ID NO: 12579
  source 1..120: mol_type = other DNA

SEQ ID NO: 47503 - DNA, 120 bp, synthetic construct; identical to SEQ ID NO: 12580
  source 1..120: mol_type = other DNA

SEQ ID NO: 47504 - DNA, 120 bp, synthetic construct
  source 1..120: mol_type = other DNA
accaacaatgtaaaagtgttcgtatttctccacatcctctccagcacctgttgtttcctgactttttaatgattgccattctaactggtgtgagatggtatctcattgtggttttgattt

SEQ ID NO: 47505 - DNA, 120 bp, synthetic construct
  source 1..120: mol_type = other DNA
tctttgagcaattgtgaatgggagttcacttatgatttggctctctgtttgtctgttgttggtgtataagaatgcttgtgatttttgtacattgattttgtatcctgagactttgctgaa

SEQ ID NO: 47506 - DNA, 120 bp, synthetic construct
  source 1..120: mol_type = other DNA
caaacacctctacgcaaataaactagaaaatctagaagaaatggataaattcctcgacacatacactctcccaagactaaaccaggaagaagttgaatctcttaatagaccaataacagg

SEQ ID NO: 47507 - DNA, 120 bp, synthetic construct
  source 1..120: mol_type = other DNA
tcccattattattgtgtgggagtctaagtcaatttgtaggtcactcaggacttgctttatgaatctgggtgctcctgtattgggtgcatatatatttaggatagttagctcttcttgttg

SEQ ID NO: 47508 - DNA, 120 bp, synthetic construct
  source 1..120: mol_type = other DNA
catcactttcaggtacaccaatcagacgtagatttggtcttttcacatagtcccatatttcttggaggctttgctcatttctttttattcttttttctctaaacttcccttctcacttca

SEQ ID NO: 47509 - DNA, 120 bp, synthetic construct
  source 1..120: mol_type = other DNA
gttttttaagccggtctgaaaagcgcaatattcgggtgggagtgacccaattttccaggtgcgtccgtcacccctttctttgactcggaaagggaactccctgaccgcttgcgcttccca

SEQ ID NO: 47510 - DNA, 120 bp, synthetic construct
  source 1..120: mol_type = other DNA
aaacaacaatgtgatgagttaggaatgaatcagaagcagacgagggacatttaaaacctcttagattacagtcccaccaacagtgtaaaagtgttcctatttctccacatcctctccagc

SEQ ID NO: 47511 - DNA, 120 bp, synthetic construct; identical to SEQ ID NO: 12581
  source 1..120: mol_type = other DNA

SEQ ID NO: 47512 - DNA, 120 bp, synthetic construct; identical to SEQ ID NO: 12582
  source 1..120: mol_type = other DNA

SEQ ID NO: 47513 - DNA, 120 bp, synthetic construct; identical to SEQ ID NO: 12583
  source 1..120: mol_type = other DNA

SEQ ID NO: 47514 - DNA, 120 bp, synthetic construct; identical to SEQ ID NO: 12584
  source 1..120: mol_type = other DNA

SEQ ID NO: 47515 - DNA, 120 bp, synthetic construct; identical to SEQ ID NO: 12585
  source 1..120: mol_type = other DNA

SEQ ID NO: 47516 - DNA, 120 bp, synthetic construct; identical to SEQ ID NO: 12586
  source 1..120: mol_type = other DNA

SEQ ID NO: 47517 - DNA, 120 bp, synthetic construct
  source 1..120: mol_type = other DNA
cgtcatttaacatgaggtatatctccaaatgctctccctccccccgcccccaccccacaacaggccttaatcatcgcagtttgtcttcagttgttactaaaccccttcacatatagtacg

SEQ ID NO: 47518 - DNA, 120 bp, synthetic construct; identical to SEQ ID NO: 24335
  source 1..120: mol_type = other DNA

SEQ ID NO: 47519 - DNA, 120 bp, synthetic construct
  source 1..120: mol_type = other DNA
ggaagcattggcatgtcttttgtagccatggaaactaacccttcaaagagagagaagctcttctatcctcaaacaaggagatacagtgaaaggaaggcatatttcatactcagatgcctg

SEQ ID NO: 47520 - DNA, 120 bp, synthetic construct; identical to SEQ ID NO: 24336
  source 1..120: mol_type = other DNA

SEQ ID NO: 47521 - DNA, 120 bp, synthetic construct; identical to SEQ ID NO: 9088
  source 1..120: mol_type = other DNA

SEQ ID NO: 47522 - DNA, 120 bp, synthetic construct; identical to SEQ ID NO: 9089
  source 1..120: mol_type = other DNA

SEQ ID NO: 47523 - DNA, 120 bp, synthetic construct; identical to SEQ ID NO: 9090
  source 1..120: mol_type = other DNA

SEQ ID NO: 47524 - DNA, 120 bp, synthetic construct; identical to SEQ ID NO: 9091
  source 1..120: mol_type = other DNA

SEQ ID NO: 47525 - DNA, 120 bp, synthetic construct
  source 1..120: mol_type = other DNA
tttttttttcttatctttttttttttttttgagatgaagtctcactgtgttgcccaagctggagtgcagtggcacaatctcgtctcactgcaacctccaccttccaggttcaagcgattc

SEQ ID NO: 47526 - DNA, 120 bp, synthetic construct; identical to SEQ ID NO: 18285
  source 1..120: mol_type = other DNA

SEQ ID NO: 47527 - DNA, 120 bp, synthetic construct; identical to SEQ ID NO: 18286
  source 1..120: mol_type = other DNA

SEQ ID NO: 47528 - DNA, 120 bp, synthetic construct; identical to SEQ ID NO: 15788
  source 1..120: mol_type = other DNA

SEQ ID NO: 47529 - DNA, 120 bp, synthetic construct; identical to SEQ ID NO: 15789
  source 1..120: mol_type = other DNA

SEQ ID NO: 47530 - DNA, 120 bp, synthetic construct; identical to SEQ ID NO: 15790
  source 1..120: mol_type = other DNA

SEQ ID NO: 47531 - DNA, 120 bp, synthetic construct; identical to SEQ ID NO: 15791
  source 1..120: mol_type = other DNA

SEQ ID NO: 47532 - DNA, 120 bp, synthetic construct; identical to SEQ ID NO: 15792
  source 1..120: mol_type = other DNA

SEQ ID NO: 47533 - DNA, 120 bp, synthetic construct; identical to SEQ ID NO: 15793
  source 1..120: mol_type = other DNA

SEQ ID NO: 47534 - DNA, 120 bp, synthetic construct; identical to SEQ ID NO: 15794
  source 1..120: mol_type = other DNA

SEQ ID NO: 47535 - DNA, 120 bp, synthetic construct; identical to SEQ ID NO: 23819
  source 1..120: mol_type = other DNA

SEQ ID NO: 47536 - DNA, 120 bp, synthetic construct; identical to SEQ ID NO: 23820
  source 1..120: mol_type = other DNA

SEQ ID NO: 47537 - DNA, 120 bp, synthetic construct; identical to SEQ ID NO: 23821
  source 1..120: mol_type = other DNA

SEQ ID NO: 47538 - DNA, 120 bp, synthetic construct; identical to SEQ ID NO: 23822
  source 1..120: mol_type = other DNA

SEQ ID NO: 47539 - DNA, 120 bp, synthetic construct
  source 1..120: mol_type = other DNA
gtgtcacaggcctggagattttaatgtcctgcaggtgggagtggccctaggccagacaggcactgaccaggcctttttgaatgacattagaagctccatccaatcatgcctcttgctggt

SEQ ID NO: 47540 - DNA, 120 bp, synthetic construct
  source 1..120: mol_type = other DNA
ttccaaaggtacaaaagcaaagaccccgacaggggtgctggagcccaccaatgagcaaaattccagatcatctgagggcaactcaaccaagatccacagaaaggggaggatggagggatc

SEQ ID NO: 47541 - DNA, 120 bp, synthetic construct
  source 1..120: mol_type = other DNA
ttcttagatgcacagaagggactgacccaggaccctgcagggttggccaagggctcgtcctctggtagcaggcgtctctgtctcttctgggaactccctttcatagtggacactgaaatg

SEQ ID NO: 47542 - DNA, 120 bp, synthetic construct
  source 1..120: mol_type = other DNA
tctgtgattatttggtcccaatcatatcacataacatatcacccaacaagacgacaacccccttcagggcagggcccagggctgatgcttctgtatttccacgttaccttgcaccatggt

SEQ ID NO: 47543 - DNA, 120 bp, synthetic construct
  source 1..120: mol_type = other DNA
attggcgttggcattgttggtattggcacgagccagggggttggtgcgtggatcttgtgggaagtcctccaagaagacaggtgactccatctcttccatctctatctcagcaaactggag

SEQ ID NO: 47544 - DNA, 120 bp, synthetic construct
  source 1..120: mol_type = other DNA
gcctcttcctcaatggtccgcagccctgcctggggatgacgaagggactcagttatctctccagcccaggagaggagaccagaaccactttttctttttttgagacagagtctcactctg

SEQ ID NO: 47545 - DNA, 120 bp, synthetic construct
  source 1..120: mol_type = other DNA
tggatccttttgctataaaggacatttactgggacagcaaatgaaatttgaatggggtctgaggattagaatgtagtaatgtattagcctggcatggtgactcacgtctgtaatcccagc

SEQ ID NO: 47546 - DNA, 120 bp, synthetic construct
  source 1..120: mol_type = other DNA
caacctcccaaatagctgggattacaagcgtatgccaccatgcccagctaattttgtaattttagtagagatggggttctaccatcttgcccaggctggtctcaaactcctgacctcaag

SEQ ID NO: 47547 - DNA, 120 bp, synthetic construct
  source 1..120: mol_type = other DNA
gcatgcaagcaatcctttgtcttgctgacttggtcactgggcactttccatcctgaggttggatgcccgtgggatctacctaaggcatttatggaggatctggtccgttctcagattccc

SEQ ID NO: 47548 - DNA, 120 bp, synthetic construct
  source 1..120: mol_type = other DNA
agccctgaggggcatgaggactttgtgcccatggcctggggtcctccctctacttcttcccacagttcttaagagcaatcttgagctctgagaatctggcagaatctgtgccagaaacag

SEQ ID NO: 47549 - DNA, 120 bp, synthetic construct
  source 1..120: mol_type = other DNA
gataaccaggtctggaatccagacctcattttccctatcagtatctttcttaggttttggtcaagttaataggggcccttgggctatattaatagaagtagtgggtgtagatcaaaggag

SEQ ID NO: 47550 - DNA, 120 bp, synthetic construct
  source 1..120: mol_type = other DNA
ataaatgaagggggaaggagaagcccactcatactgaataaactggagagtgactccctgtgagacggtaggaagggtctaggatggagggcccagcacagagcctacagattggactca

SEQ ID NO: 47551 - DNA, 120 bp, synthetic construct
  source 1..120: mol_type = other DNA
atggtaaggaggtcagatcttcatgttcactgtgtagctcagtgtgagctgggcctcagtttcccctctgtgctgcagccctcatggggtgttacaagcaggagctaaactttagagaag

SEQ ID NO: 47552 - DNA, 120 bp, synthetic construct
  source 1..120: mol_type = other DNA
atctgacctctgtctcttgcttcatggggatgagatgggaggaaaatgcagcacttcactcagtggaggagcccagtgcaaaataaagctgtgggaccacttgttcaaaatgatgaatat

SEQ ID NO: 47553 - DNA, 120 bp, synthetic construct
  source 1..120: mol_type = other DNA
ctctaacttggccaagatccatgctttggcctgggcccgcctgcctctcacctgcatgccgatgacagcgtagatgaagaagagcatgacgatgagcagagccacgtagggtagggcctg

SEQ ID NO: 47554 - DNA, 120 bp, synthetic construct
  source 1..120: mol_type = other DNA
tcctcaaaggccttgtgcccaatgaactgtcactaaggtcctttgccagcgatcacagttctctctggactgtgtttccatctgcatagagggtgccagagagaacccgcactccatctc

SEQ ID NO: 47555 - DNA, 120 bp, synthetic construct
  source 1..120: mol_type = other DNA
tgggagcaatttcttcctgtttactcccttgggccacacttcatgagaagcccttgttctgcagccctgggtcaaaagaagtcattgttttatcttccaattatccacaggtagactgat

SEQ ID NO: 47556 - DNA, 120 bp, synthetic construct
  source 1..120: mol_type = other DNA
aaaccatggaggcttttgggatactatttcccagcaaaaactgagtgtggatggaaatacacaacacacacacacagacagacagacagacagacacacacacacacacacacacacaca

SEQ ID NO: 47557 - DNA, 120 bp, synthetic construct
  source 1..120: mol_type = other DNA
tcccctacagtttagtttgttcgcaacacagcagccacagtgattgttttagaactaaagtctgttcacacttaaaccctccaaagggttctcatctccctcagaataaaatccaagatc

SEQ ID NO: 47558 - DNA, 120 bp, synthetic construct
  source 1..120: mol_type = other DNA
ccatgaagccttctctgaccaccccacccagagacgactttcctttccgttacagctcttgcctttgatagtgtagtaggtacacccattgtgtccccctggtatctgagttacctctct

SEQ ID NO: 47559 - DNA, 120 bp, synthetic construct
  source 1..120: mol_type = other DNA
gttcttcagaaacttcagagcaggcgagaatgtaagagaagctccaaggaagaggcgcccagagtctttctgtcattgtcaattctggctgcatgaagatctgcctgccctgtgtctgaa

SEQ ID NO: 47560 - DNA, 120 bp, synthetic construct
  source 1..120: mol_type = other DNA
aaatctacttccttgtaagttttcccagggatctcttacccttttattagaaagtggatgaaattctacctcttccacaaaaccttccaggtagtttgggaggatctgatggctgcctcc

SEQ ID NO: 47561 - DNA, 120 bp, synthetic construct
  source 1..120: mol_type = other DNA
aggcagatggtgttgagcatgatgagggcaaacatcaggtattcaaagtaggaggaggtgacaatgtaccacacctggtactggtatgggtttttgggaatgtagcacctcagtgggcgg

SEQ ID NO: 47562 - DNA, 120 bp, synthetic construct
  source 1..120: mol_type = other DNA
tctcaacaatcaagttacgggacaggagttaggtcggcgccaggaaagaccagacccaatcctggaatggccctgcctttcaagaggttgccccatctatccctaatcaatcagtattaa

SEQ ID NO: 47563 - DNA, 120 bp, synthetic construct
  source 1..120: mol_type = other DNA
catgttgtcatggaaacaggatagaaaagtgggctctgggagtgaacagtggaaggggggagggaaggcaggcatctgaaaaaaggagcccaagcccatctcttcctctcagaggcgtga

SEQ ID NO: 47564 - DNA, 120 bp, synthetic construct
  source 1..120: mol_type = other DNA
aggatggctaggtcttaaagaggctaaatcaggcttgagatccacggattctggtgcagttccttcaaagacccagatagggaaactgcctcggccaaggacacagcactagttgaagac

SEQ ID NO: 47565 - DNA, 120 bp, synthetic construct
  source 1..120: mol_type = other DNA
tggcttgtaaggccctcagctctagcagaggccctggctcaagtatggaaaacatactccatacatgtttgttgaatgaatgaatgattgtaagatgatgccatttcatgtctaagactg

SEQ ID NO: 47566 - DNA, 120 bp, synthetic construct
  source 1..120: mol_type = other DNA
cacatgaccctctgctaccatttcagtagtgttagaagcccattgactgtttctgagattatcattgggctgcttttgtggaactcaaggtgctatttaaatgtaacgatgtcttactgg

SEQ ID NO: 47567 - DNA, 120 bp, synthetic construct
  source 1..120: mol_type = other DNA
aaaacactcccaccttccccttccctttcctccagccgtgagagtgtgcccgactccagggcacagccacccctgctatctggaccatgctctcatgggtgtgtcatgaagcagaagaca

SEQ ID NO: 47568 - DNA, 120 bp, synthetic construct
  source 1..120: mol_type = other DNA
tgctcccctctcagcttctttgatatattctctaataatctcccatgcctttgcacaaatgcattttgcccttaaaatcgaacagggttgaaacctttcccagcattcagggacctatat

SEQ ID NO: 47569 - DNA, 120 bp, synthetic construct
  source 1..120: mol_type = other DNA
gagtagttgggattacaggtgcctgccgccatgcctgcctaatttttgtacttttagtagagacagggtttcatcatgttggccaggctggtctgaaactcttgacctcaggtgatccgc

SEQ ID NO: 47570 - DNA, 120 bp, synthetic construct
  source 1..120: mol_type = other DNA
gcagtcagagccattctgtgccccagcctgtgccgttcagaaggagtggagtgggcagtcctatccctgaggaactgaactctaagaaactctgatgcttgtagccacatagaggataca

SEQ ID NO: 47571 - DNA, 120 bp, synthetic construct
  source 1..120: mol_type = other DNA
atcttcctcgtcatcccctgtggggagagagagaggaattaggggtgtcttcccatgctttgctatgcccatggcttctgtgctcagagccctcctaggagcccctgcagccagtaagca

SEQ ID NO: 47572 - DNA, 120 bp, synthetic construct
  source 1..120: mol_type = other DNA
agagacacatttcacgcttaatcgcagagaccattaattcttcgagttagcatatttgcatctttcccccgccttcttacttcctccacctatgcccagtttgttaatttcattgcacat

SEQ ID NO: 47573 - DNA, 120 bp, synthetic construct
  source 1..120: mol_type = other DNA
agacttgtatacccacgtgtccctgtgcttcttgaaaactgagtccttggcagtgaggcacatagctggcactcaataaatacttgctgagttacatgaaagtaaaatgtatgggttttt

SEQ ID NO: 47574 - DNA, 120 bp, synthetic construct
  source 1..120: mol_type = other DNA
ataactctcctacctccccaccctaccccacctgtaccctgtggtatgaagggaaccatggattggaagagcccctagactgcctctaacatccccacctgaggtgctcaccttggcagt

SEQ ID NO: 47575 - DNA, 120 bp, synthetic construct
  source 1..120: mol_type = other DNA
ccaacttgtctctgttcttgcccccagggaaggatctcagccacccccatgtgcaggttacagaagtttgcccactgaggtgggtgtcaccatgtcagggaccctgatcattgggttaca

SEQ ID NO: 47576 - DNA, 120 bp, synthetic construct
  source 1..120: mol_type = other DNA
ctaggctcactgaccttactgggcttttaattcctcccagctgtagccaaacaaccctgtgagtctctaatctttttggcacaaagaattatcctacagctgtacctgcatttgctatgt

SEQ ID NO: 47577 - DNA, 120 bp, synthetic construct
  source 1..120: mol_type = other DNA
acagagcgagactccatctcgaaaaacaaaacaaaacccctatcccagtgatctagaagcttattgctgctctctatggacaagaaattggactgtgggctcaccatttccctgttctct

SEQ ID NO: 47578 - DNA, 120 bp, synthetic construct
  source 1..120: mol_type = other DNA
ggggctgcctcactgctggaagaccctggattcatggctgcatgcccactctctccttcctgcagagcacttgtctgtttgtaatttcacgctggttaatatgactattgattaacttta

SEQ ID NO: 47579 - DNA, 120 bp, synthetic construct
  source 1..120: mol_type = other DNA
tctgcccagactggagtgaagtggcacaattatggcacactgcagcctcgacttcccaggatcaagtgatcctccccactaccggcatgcaccaccacatccagctagttttttgtattt

SEQ ID NO: 47580 - DNA, 120 bp, synthetic construct
  source 1..120: mol_type = other DNA
ttccctctatcttctatcctagctctctcctccctgtcaccgtcaaactcccgaaagttgtctatattgctctcttcacttcttcaccccctgccctgccacatttgctcttcacctcat

SEQ ID NO: 47581 - DNA, 120 bp, synthetic construct
  source 1..120: mol_type = other DNA
attaaccattttctcagtaggtggcactactagccatttatctgcataggtcacaaacctcaaaatcacccctgactcctcttggtgggcactgttcacatcatctccacatttggtcat

SEQ ID NO: 47582 - DNA, 120 bp, synthetic construct
  source 1..120: mol_type = other DNA
gttcacaagctcgctgctctggctttgggtcacttctttgtttctgccactaaaagacttccttttcattccaggaaacatcattcttatgccttatgcagcagtgttacttgtttgtag

SEQ ID NO: 47583 - DNA, 120 bp, synthetic construct
  source 1..120: mol_type = other DNA
cgcccggcctcaggtattttttttatagcaacacaagaatggcctaacacaaggcccccatgagcaaacacatgtgttgccactctcttagtcacatgcaaagttcttacggcttcctga

SEQ ID NO: 47584 - DNA, 120 bp, synthetic construct
  source 1..120: mol_type = other DNA
gctctgaggcgatagacagggtgttgagggcaacgatgagaatcaccagccaatagaagaccttggacttcacgatgtcatggcacttccagcgaaagatgcggttccactgcctccaat

SEQ ID NO: 47585 - DNA, 120 bp, synthetic construct
  source 1..120: mol_type = other DNA
cacctcatatgtgctaggcactcttctagtccctgtggtgacagtagttaacataaacaaccccattatgtaaaaaatcaaaacaaaaacaaaaaaatcctggcacgtgtgtgtgtgtgc

SEQ ID NO: 47586 - DNA, 120 bp, synthetic construct
  source 1..120: mol_type = other DNA
tgggaagagctctggtcacacctggatcttaccattttgagccattttgctttaggcaagtcactcaccctcaaaggactaatgttggacttgctcagtgggcctgattgcaaggtatga

SEQ ID NO: 47587 - DNA, 120 bp, synthetic construct
  source 1..120: mol_type = other DNA
aaatgcacaaaataaaaccatagcatgacaaagaagccagttacagctaggcttcacttaatgactgggatgcgttctgagaaaggcattgttaggtgacttcatctctgtgcagacatc

SEQ ID NO: 47588 - DNA, 120 bp, synthetic construct
  source 1..120: mol_type = other DNA
acaacaaccctatgagatagatactgaaataattcttaggtggcagatgtggaaattaaggcacagagaagttaggtaattaggtaaagctcacacagccaccaagcagtagtgcaggga

SEQ ID NO: 47589 - DNA, 120 bp, synthetic construct
  source 1..120: mol_type = other DNA
ccagttgatttatttaaagccaagatttttcaaatgaacaacgtctgtgaccccggacaagtcacctaacatctctgagcattattcccaaccatctaatggcgataatgacatgggctg

SEQ ID NO: 47590 - DNA, 120 bp, synthetic construct
  source 1..120: mol_type = other DNA
atgaagggagatggttctgcaggcgcgggcccagacccacccagtaaaggacgtcagtccatccctccatggtaatgcactggtacacggtgagcatggagaagccgaagttgtcgaagt

SEQ ID NO: 47591 - DNA, 120 bp, synthetic construct
  source 1..120: mol_type = other DNA
agtctccttttgtgttcagagattagattggctcatcagaactggaacaccctgccttacccatatttatctatttaccatgtaggctcaatgctctgaagatggaaaggagaggacatt

SEQ ID NO: 47592 - DNA, 120 bp, synthetic construct
  source 1..120: mol_type = other DNA
agctctctgaggtcctcagtaatttatatgagagaaaaggggtcctgaggccaaaaagtttgagaactgctgcttcagctcaaatatatctgggcttcaatgtaggttatttctggaaac

SEQ ID NO: 47593 - DNA, 120 bp, synthetic construct
  source 1..120: mol_type = other DNA
ggcctaggggagagacggcaaatacgggtgcatcaactaacaaatgatctgatcatgcttatctggggaatttcacttaaaaggattctgacatcaagttcatactcagtgaaaagagta

SEQ ID NO: 47594 - DNA, 120 bp, synthetic construct
  source 1..120: mol_type = other DNA
atggtaatgctatgggtagagatatgttccttctaaattcatatgctgaagccctaacccctagcacctcagaatgtggttgtatttggagacagggtctttaaagaggtggttaagatg

SEQ ID NO: 47595 - DNA, 120 bp, synthetic construct
  source 1..120: mol_type = other DNA
aagaagccgtaggcaatgatcttcatggcggcttcaatcgagaagacaatgaggaagaaatactccagcttctcctgtgggagcaaacgtggtcacagcatgcctctgtgctctctgagt

SEQ ID NO: 47596 - DNA, 120 bp, synthetic construct
  source 1..120: mol_type = other DNA
gttaccctatccttggccccatcacctttccccctcttctgggcccaggtgagagctatttctaactgaggaagcaagtctctcttgtcaggactccaggctgaaactgctctccttgca

SEQ ID NO: 47597 - DNA, 120 bp, synthetic construct
  source 1..120: mol_type = other DNA
taaggaaaaagtgtaagggaggagagtgaagtcaaggcagcatttacaatttcaggttgctgcaaccccagagggatagacagaagtggggttgaggcaaggaaaaacaggacctgaaat

SEQ ID NO: 47598 - DNA, 120 bp, synthetic construct
  source 1..120: mol_type = other DNA
acactgtgttctattggtttccattatgttctattggttttcacagagctgttgtttgatgtcatgtctgtgggtggtcaccagggcttggcttcgacccacctcacactcagtatgttt

SEQ ID NO: 47599 - DNA, 120 bp, synthetic construct
  source 1..120: mol_type = other DNA
cccttagtgacatatggtcccccgacacagatgaaaatattttgggctcagggcttctgcccttgctgttctctctgcctgcaatgttcttccccagatatcctcatgactcactttttt

SEQ ID NO: 47600 - DNA, 120 bp, synthetic construct
  source 1..120: mol_type = other DNA
ctttattattaaatgtccccttcaaggaaattctcatccttccatagacaagcctctaactggtgctccctggggccaaacttagctggaggttggcgtggtgtgtgacccctgatgcac

SEQ ID NO: 47601 - DNA, 120 bp, synthetic construct
  source 1..120: mol_type = other DNA
cttttgtttttcaaagcctgagaatcactgcagctttgggaagtctcaggggtagagctcacagtttgaaggtgtggcaggatctgggaggaggccctgggacccccaagaaagcaggac

SEQ ID NO: 47602 - DNA, 120 bp, synthetic construct
  source 1..120: mol_type = other DNA
cagattacaaagggctaacgcagtaatagaagaatgaatgaatctctttagcctagaaagcggatactctcaatagtattaatgtcataatacaagctcatccaagcgttttacatttct

SEQ ID NO: 47603 - DNA, 120 bp, synthetic construct
  source 1..120: mol_type = other DNA
actctttgcaacattaactcctaacaagtccaaaaaaaaaaaagtacaagaagaaaagaaaaagcatcccccctcctccatcagcatatgttgagatgaagccctcacctctctgcccca

SEQ ID NO: 47604 - DNA, 120 bp, synthetic construct
  source 1..120: mol_type = other DNA
gtgccaggtcagacacgaggttgttgcactcatggatataacagtcctgaaaagaaagatattgtggaccagcctgaccaacatggtgaaaccctgtctctactaaaaacaaaaaaaaat

SEQ ID NO: 47605 - DNA, 120 bp, synthetic construct
  source 1..120: mol_type = other DNA
ctgccctgccctgccctcgaggagagcaggcaccatctacttaagaaaaatctaaattatccagaacttggaaataaagcaaagaaaggatgccatatctttgtaatatcatgttggagc

SEQ ID NO: 47606 - DNA, 120 bp, synthetic construct
  source 1..120: mol_type = other DNA
tgcagtgatctaacctctctgcgctgtggtttactcctctgtacaaatgagaaaaataaaagtacctgcctcatgggcattcagtgtgataacacatataaggcattagaacagtgactg

SEQ ID NO: 47607 - DNA, 120 bp, synthetic construct
  source 1..120: mol_type = other DNA
gccagtttggcatgtgccaaagtgaggaaacctctgtcataaaatgcttggacctgcaaatccaattacccatcagtggacacaggcacctgtatcaccacacatctgaagttgaactca

SEQ ID NO: 47608 - DNA, 120 bp, synthetic construct
  source 1..120: mol_type = other DNA
tagaggcagggagatggcagaagtcaggaccttttgtgagccaaggttccaagcttgaggtgcatgtgccattgtcccaatggacttcacttacaaatcataaattcaaagataaaatta

SEQ ID NO: 47609 - DNA, 120 bp, synthetic construct
  source 1..120: mol_type = other DNA
aatactgtctctatgaactctaggcctaacccaaggttttgcaactccagcccacaaactaaagaaaaacatacacaggaccacgtgaaacagttaagggagccaattttgtttcaggat

SEQ ID NO: 47610 - DNA, 120 bp, synthetic construct
  source 1..120: mol_type = other DNA
tataagagggcttcccctagaagtctttctgccgtcacccatcaccttggcaacacagcctgtacaagagcaggttctggctaggtgtggtggctcacacctataatcacagcactttgg

SEQ ID NO: 47611 - DNA, 120 bp, synthetic construct
  source 1..120: mol_type = other DNA
ctgaccttactaagcctcagtttccacatctgtcaaatggaaccactttatgagttggttgtgaggattaaatgaatttactctcatcaggtattagcacagtgcctgggaccaatgagt

SEQ ID NO: 47612 - DNA, 120 bp, synthetic construct
  source 1..120: mol_type = other DNA
atccacagaggcttacccagataaatggcatgggagggtaagggttgatgcagggtaaggttgagaactcactgagtaggactgggaaggagagatggagagatgaatgctgaatttcca

SEQ ID NO: 47613 - DNA, 120 bp, synthetic construct
  source 1..120: mol_type = other DNA
agagttttctcaaagaggccatcgcatctttttttggtccctatcctattctaaaatgaggctggtgcttcaaaaacctagtggcaccccatgataatgtggatttgggcacacatggga

SEQ ID NO: 47614 - DNA, 120 bp, synthetic construct
  source 1..120: mol_type = other DNA
tcctagttgagtccatggtgatatataattattgccatgatagatttataattatagttcaaggaaagtaccataataggaaaatgttattttggtgggggggggggggggtggtggtct

SEQ ID NO: 47615 - DNA, 120 bp, synthetic construct; identical to SEQ ID NO: 29657
  source 1..120: mol_type = other DNA

SEQ ID NO: 47616 - DNA, 120 bp, synthetic construct; identical to SEQ ID NO: 29658
  source 1..120: mol_type = other DNA

SEQ ID NO: 47617 - DNA, 120 bp, synthetic construct
  source 1..120: mol_type = other DNA
ttactttaaccagggataaattcttagaaactcaaaaaggctcctggcatagaattataagaagatccacgcggcactattcacaatagcaaagacttggaaccaacccagatgtccaac

SEQ ID NO: 47618 - DNA, 120 bp, synthetic construct; identical to SEQ ID NO: 29659
  source 1..120: mol_type = other DNA

SEQ ID NO: 47619 - DNA, 120 bp, synthetic construct
  source 1..120: mol_type = other DNA
ttttctaaattagtagcatccttttacatctggtattttttttgtcactaccccactgcattccaccacttcgctgcagcattcacagattggaacattaggccaaatggaggttagggc

SEQ ID NO: 47620 - DNA, 120 bp, synthetic construct; identical to SEQ ID NO: 29660
  source 1..120: mol_type = other DNA

SEQ ID NO: 47621 - DNA, 120 bp, synthetic construct
  source 1..120: mol_type = other DNA
caaacaaccccatcaaaaagtgggtgaaggacatgaacagacacttctcaaaagaagacatttatgaagccaaaaaacacatgaaaaaatgctcatcatcactggccgtcagagaaatgc

SEQ ID NO: 47622 - DNA, 120 bp, synthetic construct
  source 1..120: mol_type = other DNA
tttgaatgaaaatattgtgtctcatcatcataccgaaaggaaacttcttgcaaaaaacgacatgagagagaaagagagagcaagaaaactcaaaggagatgagcccccagtcggccaggc

SEQ ID NO: 47623 - DNA, 120 bp, synthetic construct
  source 1..120: mol_type = other DNA
gaaggaggaaggaattgaagggagggggaataggtgaagggaagggagaggaggtggagggaggaaaggggaggggggaaggtgaggggaggggggatggtgagggtggggggaagggga

SEQ ID NO: 47624 - DNA, 120 bp, synthetic construct; identical to SEQ ID NO: 24303
  source 1..120: mol_type = other DNA

SEQ ID NO: 47625 - DNA, 120 bp, synthetic construct; identical to SEQ ID NO: 24304
  source 1..120: mol_type = other DNA

SEQ ID NO: 47626 - DNA, 120 bp, synthetic construct; identical to SEQ ID NO: 24305
  source 1..120: mol_type = other DNA

SEQ ID NO: 47627 - DNA, 120 bp, synthetic construct; identical to SEQ ID NO: 24342
  source 1..120: mol_type = other DNA

SEQ ID NO: 47628 - DNA, 120 bp, synthetic construct; identical to SEQ ID NO: 24343
  source 1..120: mol_type = other DNA

SEQ ID NO: 47629 - DNA, 120 bp, synthetic construct; identical to SEQ ID NO: 24337
  source 1..120: mol_type = other DNA

SEQ ID NO: 47630 - DNA, 120 bp, synthetic construct
  source 1..120: mol_type = other DNA
tgtccttcacccactttttgatggggttgtttgtttttttcttgtaaatttgtttgagttcattgtagattctggatattagccctttgtcagatgagtaggttgcgaaaattttctccc

SEQ ID NO: 47631 - DNA, 120 bp, synthetic construct
  source 1..120: mol_type = other DNA
cacccatgatttgactctctgtttgtctgttgttggtgtataagaatgcttgtgatttttgtacattgattttgtatcctgagactttgctgaagttgcttatcagcttaaggagatttt

SEQ ID NO: 47632 - DNA, 120 bp, synthetic construct
  source 1..120: mol_type = other DNA
atcctgttattggtctattcagagattcaacttcttcctggtttagtcttgggagagtgtatgtgtcgaggaatgtatccatttcttctagattttctagtttatttgcgtagaggtgtt

SEQ ID NO: 47633 - DNA, 120 bp, synthetic construct
  source 1..120: mol_type = other DNA
agtctctttgtaggtcactgaggacttgctttatgaatctgggtgctcctgtattgggtgcataaatatttaggatagttagctcctcttgttgaattgatccctttaccattatgtaat

SEQ ID NO: 47634 - DNA, 120 bp, synthetic construct
  source 1..120: mol_type = other DNA
ctctaaacttcccttctcgcttcatttcattcatttcatcttccattgctgataccctttcttccagttgatcgcattggctcctgaggcttctgcattcttcacgtagttctcgagcct

SEQ ID NO: 47635 - DNA, 120 bp, synthetic construct
  source 1..120: mol_type = other DNA
agtctcgtggtgcgccgttttttaagccggtctgaaaagtgcaatattcgggtgggagtgacccgattttccaggtgcgtccgtcacccctttctttgactcggaaagggaactccctga

SEQ ID NO: 47636 - DNA, 120 bp, synthetic construct; identical to SEQ ID NO: 24344
  source 1..120: mol_type = other DNA

SEQ ID NO: 47637 - DNA, 120 bp, synthetic construct
  source 1..120: mol_type = other DNA
gtgatgatgagcattttttcatgtgttttttggctgcataaatgtcttcttttgagaagtgtctgttcatgtcctttgcccactgtttgatggggttgtttgtttttttcttgtaaatgt

SEQ ID NO: 47638 - DNA, 120 bp, synthetic construct
  source 1..120: mol_type = other DNA
tggctctctgtttgtctgttattggtgtataagaatccttgtgatttttgtacattgattttgtatcctgagactttgctgaagttgcttatcagcttaaggagattttgggctgagaca

SEQ ID NO: 47639 - DNA, 120 bp, synthetic construct
  source 1..120: mol_type = other DNA
atgtgtcgaggaatttatccatttcttctggattttctagtttatttgcgtagaggtgtttgtagtattctctgatggtagtttgtatttctgtgggattgctggtgatatcccctttat

SEQ ID NO: 47640 - DNA, 120 bp, synthetic construct
  source 1..120: mol_type = other DNA
atctgtctgatattgacagtggggtgttaaagtctcccattattaatgtgtgggagtctaagtctctttgtaggtcactgaggacttgctttatgaatctgggtgctcctgtattgggtg

SEQ ID NO: 47641 - DNA, 120 bp, synthetic construct
  source 1..120: mol_type = other DNA
tttccatcttggttccattctccccatcactttcaggtacaccaatcagacgtagatttggtcttttcacatagtcccatatttcttggaggctttgctcatttctttttattctctttt

SEQ ID NO: 47642 - DNA, 120 bp, synthetic construct
  source 1..120: mol_type = other DNA
tttacctaagcaagcctgggcaatggcgggcgcccctcccccagcctcgctgccgccttgcagtttgatctcagactgctgtgctagcaattagcgagactccgtgggcgtaggaccctc

SEQ ID NO: 47643 - DNA, 120 bp, synthetic construct
  source 1..120: mol_type = other DNA
gcaactccaagacacataattgtcagattcaccaaagttgaaatgaaggaaaaaatgttaagggcagccagagagaaaggtcaggttacccacaaagggaagcgcatcagactaaccgga

SEQ ID NO: 47644 - DNA, 120 bp, synthetic construct
  source 1..120: mol_type = other DNA
catacttggaagtaaagctctcctcagcaaatgtaaaagaacagagattataacaaactatctctcagaccacagtgcaatgaaactagaactcaggattaagaatctcactaaaaaccg

SEQ ID NO: 47645 - DNA, 120 bp, synthetic construct
  source 1..120: mol_type = other DNA
ggccagcatcatcctgataccaaagccgggcagagacacaaccaaaaaagagaattttagaccaatatccttgatgaacattgatgcaaatatcctcaatcaaatactggcaaactgaat

SEQ ID NO: 47646 - DNA, 120 bp, synthetic construct
  source 1..120: mol_type = other DNA
tactttaaagttcatatggaaccaaaaaagagcccgcatcaccaagtcaatcctacgccgaaagaacaaagctggaagcatcacgctacctgacttcaaactatacaacaaggctacagt

SEQ ID NO: 47647 - DNA, 120 bp, synthetic construct
  source 1..120: mol_type = other DNA
gttagaatggcggtcattaaaaagtcaggaaacaacaggtgctggagaggatgtggaaaaataggaacacttttacactgtgtgtgggactgtaaactagttcaaccattgtggaagtca

SEQ ID NO: 47648 - DNA, 120 bp, synthetic construct
  source 1..120: mol_type = other DNA
cattaggtatatctcctaatgctatccctcccaacttcccccaccccacaacaggccccagagtgtgatgttccccttcctgtgtccatatgttctcattgttcaattcccacctatgag

SEQ ID NO: 47649 - DNA, 120 bp, synthetic construct
  source 1..120: mol_type = other DNA
aggttgcctgttcactctgatggtagtttcttttgctgtgcagaagctgtttagtttaattgtatcccatttgtcaattttggcttttgttgctattgcttttggtgttttagacatgaa

SEQ ID NO: 47650 - DNA, 120 bp, synthetic construct
  source 1..120: mol_type = other DNA
tggtttgtagttctccttgaagaggtccttcacatcccttctaagttggaatcctaggtattttattctctttgaagcaattgtgaatgggagttcactcatgatttggctctctgtttg

SEQ ID NO: 47651 - DNA, 120 bp, synthetic construct
  source 1..120: mol_type = other DNA
tattcagagattcaacttcttcctggtttagtcttgggagggtgtacgtgtcgaggaatttatccatttcttctagattttctagtttatttgcatagaggtgtttgtagtattctctca

SEQ ID NO: 47652 - DNA, 120 bp, synthetic construct
  source 1..120: mol_type = other DNA
tccttgttaactttgtctcgctgatctgtctaatgttgacagtggggtgttaacatctcccattactattgtgtgggagtctaagtctctttgtatgtcactcaggacttgctttatgaa

SEQ ID NO: 47653 - DNA, 120 bp, synthetic construct
  source 1..120: mol_type = other DNA
tgcccttaacattttttccttcatttcaactttggtgagtctgacaattacgtgtcttggagttgctcttctcgaggagtatctttgtggcattctctgtatttcctgaatctgaatgtt

SEQ ID NO: 47654 - DNA, 120 bp, synthetic construct; identical to SEQ ID NO: 24338
  source 1..120: mol_type = other DNA

SEQ ID NO: 47655 - DNA, 120 bp, synthetic construct; identical to SEQ ID NO: 24339
  source 1..120: mol_type = other DNA

SEQ ID NO: 47656 - DNA, 120 bp, synthetic construct
  source 1..120: mol_type = other DNA
gaatggaaaataggagtatgactagacagaaaatagtagggatgacaagtttttttgggggcacagtctaagttggtccggtgtctggaatgagactggggcctaataaaaaggagcatc

SEQ ID NO: 47657 - DNA, 120 bp, synthetic construct
  source 1..120: mol_type = other DNA
atatgggaaaatggggtgaatatcaggtggatcagagagacacagtcgtgggggtcaggtgtggtatcaagaataatgtgggaggccggattgaagtccgggccaggaacaatggtaatt

SEQ ID NO: 47658 - DNA, 120 bp, synthetic construct
  source 1..120: mol_type = other DNA
gatttggttaggtaaaggaaaattacagtcaaagggggtttgttctctggcgggtaggagcggggggtcgcaaggtgctcagtgggggtgctttttgagccaggatgagccaggaaaagg

SEQ ID NO: 47659 - DNA, 120 bp, synthetic construct
  source 1..120: mol_type = other DNA
aacgccacaaagatactccttgagaagagcaactccaagacacataattgtcagattcaccaaagtggaaatgaaggaaaaaatgttaagggcagccagagagaaaggtcggattaccca

SEQ ID NO: 47660 - DNA, 120 bp, synthetic construct
  source 1..120: mol_type = other DNA
aaaatggctcaactacatggaaactgaacaacctgctcctgaatgactactgggtacagaacgaaatgaaggcagaaataaagatgttctttgaaaccaatgagaacaaagacacaacat

SEQ ID NO: 47661 - DNA, 120 bp, synthetic construct; identical to SEQ ID NO: 47645
  source 1..120: mol_type = other DNA

SEQ ID NO: 47662 - DNA, 120 bp, synthetic construct
  source 1..120: mol_type = other DNA
tactgtagccttgtagtatagtttgaagtcaggtagtgtgatgcctccagctttgttcttttggcttaggattgacttggcgatgcgggctcttttttggttccatatgaactttaaagt

SEQ ID NO: 47663 - DNA, 120 bp, synthetic construct
  source 1..120: mol_type = other DNA
ctataaatcatgctgctataaagacacatgcacacatatgtttattgtggcactattcccaatagcaaagacttggaaccaacccaaatgtccaacaatgatagactggattaagaaaat

SEQ ID NO: 47664 - DNA, 120 bp, synthetic construct; identical to SEQ ID NO: 12570
  source 1..120: mol_type = other DNA

SEQ ID NO: 47665 - DNA, 120 bp, synthetic construct
  source 1..120: mol_type = other DNA
aggagcgtctccgcccggccgcccctactgggaagtgaggagcccctctgcccggccaccacccagtctgggaggtgtgcccaacagctcattgagaacgggccaggatgacaatggtgg

SEQ ID NO: 47666 - DNA, 120 bp, synthetic construct; identical to SEQ ID NO: 12571
  source 1..120: mol_type = other DNA

SEQ ID NO: 47667 - DNA, 120 bp, synthetic construct
  source 1..120: mol_type = other DNA
aatcagttaatactgcaaaagagctttcgcaagctttaatgtttaggcaaatcagtaggcatctcagtaaagcgcactctggttgaacaggtatgggctggaacctgagactatgtgttt

SEQ ID NO: 47668 - DNA, 120 bp, synthetic construct
  source 1..120: mol_type = other DNA
ctaccactttcttggaataggagatgggaataaaagcaggcgaaggcatccttggaagaattgaggcgagggtggggacaggggttgtgtttggagaagttgctgctgtgatggtgaccc

SEQ ID NO: 47669 - DNA, 120 bp, synthetic construct; identical to SEQ ID NO: 3419
  source 1..120: mol_type = other DNA

SEQ ID NO: 47670 - DNA, 120 bp, synthetic construct; identical to SEQ ID NO: 10105
  source 1..120: mol_type = other DNA

SEQ ID NO: 47671 - DNA, 120 bp, synthetic construct
  source 1..120: mol_type = other DNA
catcctctccagcacttgttgtttcctgactttttaatgatcctcattctaactggtgtgagatggtatctcattgtggttttgatttgcatttctctgatggccagtgatgatgagcat

SEQ ID NO: 47672 - DNA, 120 bp, synthetic construct
  source 1..120: mol_type = other DNA
ggcgccattgcactccagcctggtgacagagcgagactccaccttaaaaaaaaaaaagaaagaaagaattatagtggagactattaaagagcttgagtgtatccatgttgttgggtctac

SEQ ID NO: 47673 - DNA, 120 bp, synthetic construct
  source 1..120: mol_type = other DNA
gaggctgtgctcatcacgcttgtgtgcacaaagcactgggcagacacacccagtgcagaaaatctttgaccaagaggtgaccaaaactgataatattacatcttcgctatatatatatat

SEQ ID NO: 47674 - DNA, 120 bp, synthetic construct; identical to SEQ ID NO: 21678
  source 1..120: mol_type = other DNA

SEQ ID NO: 47675 - DNA, 120 bp, synthetic construct; identical to SEQ ID NO: 21679
  source 1..120: mol_type = other DNA

SEQ ID NO: 47676 - DNA, 120 bp, synthetic construct; identical to SEQ ID NO: 21680
  source 1..120: mol_type = other DNA

SEQ ID NO: 47677 - DNA, 120 bp, synthetic construct; identical to SEQ ID NO: 21681
  source 1..120: mol_type = other DNA

SEQ ID NO: 47678 - DNA, 120 bp, synthetic construct
  source 1..120: mol_type = other DNA
aaatgtccatcaatgatagactggattaagaaaatgtggcactctcaccttctaaaattgatactgatgtcaagcaaggttggggaaagatgattcattcactgcacagcctcagccctg

SEQ ID NO: 47679 - DNA, 120 bp, synthetic construct; identical to SEQ ID NO: 21682
  source 1..120: mol_type = other DNA

SEQ ID NO: 47680 - DNA, 120 bp, synthetic construct; identical to SEQ ID NO: 21683
  source 1..120: mol_type = other DNA

SEQ ID NO: 47681 - DNA, 120 bp, synthetic construct; identical to SEQ ID NO: 23778
  source 1..120: mol_type = other DNA

SEQ ID NO: 47682 - DNA, 120 bp, synthetic construct; identical to SEQ ID NO: 23779
  source 1..120: mol_type = other DNA

SEQ ID NO: 47683 - DNA, 120 bp, synthetic construct; identical to SEQ ID NO: 23780
  source 1..120: mol_type = other DNA

SEQ ID NO: 47684 - DNA, 120 bp, synthetic construct; identical to SEQ ID NO: 23781
  source 1..120: mol_type = other DNA

SEQ ID NO: 47685 - DNA, 120 bp, synthetic construct; identical to SEQ ID NO: 23782
  source 1..120: mol_type = other DNA

SEQ ID NO: 47686 - DNA, 120 bp, synthetic construct; identical to SEQ ID NO: 16360
  source 1..120: mol_type = other DNA

SEQ ID NO: 47687 - DNA, 120 bp, synthetic construct
  source 1..120: mol_type = other DNA
agcccagaaggcagaggttgcagagagctgaatcaagccactgcctccagcttgggtgacagagggagattctgtctcaaaaaaaaaaaagaaaaagaaagaaagaaagaaagaaagaaa

SEQ ID NO: 47688 - DNA, 120 bp, synthetic construct; identical to SEQ ID NO: 4029
  source 1..120: mol_type = other DNA

SEQ ID NO: 47689 - DNA, 120 bp, synthetic construct; identical to SEQ ID NO: 18472
  source 1..120: mol_type = other DNA

SEQ ID NO: 47690 - DNA, 120 bp, synthetic construct; identical to SEQ ID NO: 18470
  source 1..120: mol_type = other DNA

SEQ ID NO: 47691 - DNA, 120 bp, synthetic construct; identical to SEQ ID NO: 18471
  source 1..120: mol_type = other DNA

SEQ ID NO: 47692 - DNA, 120 bp, synthetic construct; identical to SEQ ID NO: 19967
  source 1..120: mol_type = other DNA

SEQ ID NO: 47693 - DNA, 120 bp, synthetic construct
  source 1..120: mol_type = other DNA
gagttgccccaggctggtcattggtggagttgccccaggctggtcattggtggagttgccccaggcctggtcattggtggacttgccccaggtctggtcattggtggagttgtccccagg

SEQ ID NO: 47694 - DNA, 120 bp, synthetic construct; identical to SEQ ID NO: 47693
  source 1..120: mol_type = other DNA

SEQ ID NO: 47695 - DNA, 120 bp, synthetic construct
  source 1..120: mol_type = other DNA
attggtggagttgtccccaggcctggtattggtggagttgccccaggtctggtattggtggagttgtccccaggcctggtcattggtggagttgccccaggcctggtcattggtggagtt

SEQ ID NO: 47696 - DNA, 120 bp, synthetic construct
  source 1..120: mol_type = other DNA
ggtggagttgccccaggtctggtcattggtggagttgtcccaggtctggtcattggtggggttgtcccaggctcgtcattggtggagttgccccaggtctggtcattggtggagttgtcc

SEQ ID NO: 47697 - DNA, 120 bp, synthetic construct
  source 1..120: mol_type = other DNA
attggtggacttgccccaggtctggttattggtggacttgccccaggtctggtcattggtggagttggtcccaggtctggtcattggtggagttgtcccaggtctggtcattggtgcagt

SEQ ID NO: 47698 - DNA, 120 bp, synthetic construct
  source 1..120: mol_type = other DNA
tgccccagttctggtattggtggagttgccccaggtctggtcattggtggacttgcctagggctggtcattggtggacttgcctagtgctggtcattggtggacttgccccaggtctggt

SEQ ID NO: 47699 - DNA, 120 bp, synthetic construct
  source 1..120: mol_type = other DNA
gcctggctctgttatttaccgtgtatcatatgtaaatatcgacagaaacttcaataaactttatttcaaacacgtctccgcctgcccggagggaagggattggatagagggggcttagtc

SEQ ID NO: 47700 - DNA, 120 bp, synthetic construct
  source 1..120: mol_type = other DNA
ttcttcttttaatttttcctttttagttgaagagaggttgagagatttattttttcctaaggagaggaaactgtgggggaccatttggagtgatggaatgacaaaagccagaccggaggg

SEQ ID NO: 47701 - DNA, 120 bp, synthetic construct
  source 1..120: mol_type = other DNA
ttattattattattattattatttttgagaaagagaagcagtggagccccgagtggaaggagtttctggagctgaggcagggattttgggggggggggggcggggactgggggaggtacc

SEQ ID NO: 47702 - DNA, 120 bp, synthetic construct
  source 1..120: mol_type = other DNA
ggagaaagagagatagacgaagtcaggcctaaagggggtagggagggagggaaggaggaagggagaggaagggagtgaagagaagagaaacctggaagattgaagaaaccaggcagaaaa

SEQ ID NO: 47703 - DNA, 120 bp, synthetic construct; identical to SEQ ID NO: 3380
  source 1..120: mol_type = other DNA

SEQ ID NO: 47704 - DNA, 120 bp, synthetic construct; identical to SEQ ID NO: 12371
  source 1..120: mol_type = other DNA

SEQ ID NO: 47705 - DNA, 120 bp, synthetic construct; identical to SEQ ID NO: 12372
  source 1..120: mol_type = other DNA

SEQ ID NO: 47706 - DNA, 120 bp, synthetic construct; identical to SEQ ID NO: 12373
  source 1..120: mol_type = other DNA

SEQ ID NO: 47707 - DNA, 120 bp, synthetic construct; identical to SEQ ID NO: 12374
  source 1..120: mol_type = other DNA

SEQ ID NO: 47708 - DNA, 120 bp, synthetic construct
  source 1..120: mol_type = other DNA
aaaataccaccaggcctgccctacaagagctcctgaaggaagcactaaacatggacaagaacaactggtaccagccactgcaaaaccatgccaaattgtttttttttgtttgtttgtttt

SEQ ID NO: 47709 - DNA, 120 bp, synthetic construct
  source 1..120: mol_type = other DNA
aatttttgcaacctactcatctgacaaagggctaatatccagaatctacaatgaactcaaacaaatttacaagaaaaaaacaaacaaccccatcaaaaagtgggtgaaggacatgaacag

SEQ ID NO: 47710 - DNA, 120 bp, synthetic construct
  source 1..120: mol_type = other DNA
ttattttatttttattatttttttattatactttaagttttagggtacatgtgcacattgtgcaggttagttacatatgtatacatgtgccatgctggtgcgctgcacccactaactcgt

SEQ ID NO: 47711 - DNA, 120 bp, synthetic construct
  source 1..120: mol_type = other DNA
tagtttcttttgctgtgcagaagctctttagtttaattagatcacatttgtcaattttgtcttttgttgccattgcttttggtgttttagacatgaagtccttgcccatgcctatgtcct

SEQ ID NO: 47712 - DNA, 120 bp, synthetic construct
  source 1..120: mol_type = other DNA
cactaaatgcccacaagagaaagcaggaaagatccaaaatttccttctcctgcctaattgccctggccaaaattgacaccctaacatcacaattaaaagaactagaaaaacaagagcaaa

SEQ ID NO: 47713 - DNA, 120 bp, synthetic construct
  source 1..120: mol_type = other DNA
ctcaccactcctattcaacatagtgttggaagttctggccagggcaaaaactttttttcttttgagacagagtcttattctgtcacccaggtcacacaggctggagtgcggtgacgagat

SEQ ID NO: 47714 - DNA, 120 bp, synthetic construct
  source 1..120: mol_type = other DNA
tgtattgtcacattacttcacagaagttcaaaagatccaggatacaggtactctcttctaacttatttaagaacaatgagaacacatggacacaggaaggggaacatcacacaccggggc

SEQ ID NO: 47715 - DNA, 120 bp, synthetic construct
  source 1..120: mol_type = other DNA
ggattaagaaactcactcaaaaccgctcaactacgtggaagctgaacaacctgctcctgaatgactacagggtacataatgaaatgaaggcagaaataaagatgttctttgaaaccaagg

SEQ ID NO: 47716 - DNA, 120 bp, synthetic construct
  source 1..120: mol_type = other DNA
caatagatgcagaaaaggcctttgataaaattcaacagcccttcatgctaaaaactcgcaataaattaggtattgatgggacgtatctcaaaataataagagctatctatgacaaaccca

SEQ ID NO: 47717 - DNA, 120 bp, synthetic construct
  source 1..120: mol_type = other DNA
cacgtgaacccaggaagcagaggttgcagtgatcccagatcgcaccattgcactccaaactgggctacagtgcgagactccatctcaaaataaataaataaataaataaataataaataa

SEQ ID NO: 47718 - DNA, 120 bp, synthetic construct; identical to SEQ ID NO: 24469
  source 1..120: mol_type = other DNA

SEQ ID NO: 47719 - DNA, 120 bp, synthetic construct; identical to SEQ ID NO: 24470
  source 1..120: mol_type = other DNA

SEQ ID NO: 47720 - DNA, 120 bp, synthetic construct
  source 1..120: mol_type = other DNA
ctgatggtcttaaaaaatggcgcaccaggagattatatcctgcacctggctcagagggtcccatgccaacggagtctcactgattgctagcacagcattctgagatcaaaccgcaacaaa

SEQ ID NO: 47721 - DNA, 120 bp, synthetic construct
  source 1..120: mol_type = other DNA
ggaagaaagggtatcagcgatggaagatgaaatgaatgaaatgaagcgagaagggaagtttaaagaaaaaagaataaaaagaaacgagcaaagcctccaagaaatatgggactatgtgaa

SEQ ID NO: 47722 - DNA, 120 bp, synthetic construct
  source 1..120: mol_type = other DNA
gagacaaagaaggccattacataatggtaaagggatcaattcaacaagaagagctaactatcctaactatatatgcacccaatacaggagcacccagattcataaagcaagtcctgagtg

SEQ ID NO: 47723 - DNA, 120 bp, synthetic construct
  source 1..120: mol_type = other DNA
caaataaactagaaaatctagaagaaatggataaattcctcgacacatacactctcccaagactaaaccaggaagaagttgaatctctgaatagaccaataacaggatctgaaattattg

SEQ ID NO: 47724 - DNA, 120 bp, synthetic construct
  source 1..120: mol_type = other DNA
aaactactttaaagttcatatggaaccaaaaaagagcccgcatcgccaagtcaatcctaagccaaaagaacaaagctggaggcatcacactacctgacttcaaactatactaccagccta

SEQ ID NO: 47725 - DNA, 120 bp, synthetic construct
  source 1..120: mol_type = other DNA
ccatttgacccagccatcccattactgggtatatacccaaaggactataaatcatgctgttgtaaagacacatccacacgtatgtttactgcggcagtattcacaatagcaaagacttgg

SEQ ID NO: 47726 - DNA, 120 bp, synthetic construct
  source 1..120: mol_type = other DNA
gcagcctggaagctccaactgggtggagcccaccacagctcaaggaggcctgcttgcctctgtaggctccatctctgggggcagggaacagacaaacaaaaagacagcagtaacctctgc

SEQ ID NO: 47727 - DNA, 120 bp, synthetic construct
  source 1..120: mol_type = other DNA
atctagaaaggcaggccaacgttcagattcaggaaatacagagaaccccacaaagatactcctcgagaagagcaactccaagacacataattgtcagattcaccgaagttgaaatgaagg

SEQ ID NO: 47728 - DNA, 120 bp, synthetic construct
  source 1..120: mol_type = other DNA
gactttaacaccccactgtcaacattagacagatcaacgagacagaaagtcaacaaggatacccaggaattgaactcagctctgccccaagcagacctaatagacatctacagaactctc

SEQ ID NO: 47729 - DNA, 120 bp, synthetic construct
  source 1..120: mol_type = other DNA
ctgaatagaccaataacaggatctgaaattgtggcaataatcaatagcttacccaccaaaaagagtccaggaccagatggattcacagccgaattctaccagaggtacaaggaggaactg

SEQ ID NO: 47730 - DNA, 120 bp, synthetic construct
  source 1..120: mol_type = other DNA
ctcaaggaaataaaagaggatacaaacaaatggacgaacattctatgctcataggtaggaagaatcaatatcgtgaaaatggccatactgcccaaggtaatttacagattcaatgccatc

SEQ ID NO: 47731 - DNA, 120 bp, synthetic construct
  source 1..120: mol_type = other DNA
aagaagccatttatgcagccaaaaaacacatgtaaaaatgctcatcatcactggccatcagagaaatgcaaatcaaaaccacaatgagataccatctcacaccagttagaatggcaatca

SEQ ID NO: 47732 - DNA, 120 bp, synthetic construct; identical to SEQ ID NO: 24471
  source 1..120: mol_type = other DNA

SEQ ID NO: 47733 - DNA, 120 bp, synthetic construct; identical to SEQ ID NO: 24472
  source 1..120: mol_type = other DNA

SEQ ID NO: 47734 - DNA, 120 bp, synthetic construct; identical to SEQ ID NO: 24473
  source 1..120: mol_type = other DNA

SEQ ID NO: 47735 - DNA, 120 bp, synthetic construct; identical to SEQ ID NO: 24474
  source 1..120: mol_type = other DNA

SEQ ID NO: 47736 - DNA, 120 bp, synthetic construct; identical to SEQ ID NO: 24475
  source 1..120: mol_type = other DNA

SEQ ID NO: 47737 - DNA, 120 bp, synthetic construct
  source 1..120: mol_type = other DNA
cttccccctccccccaccccacaacatgccccagtgtgtgatgttccccttcctgtgtccatgtgttctcattgttaaattgccacctatgagtgagaacatgcagtgtttggttttttg

SEQ ID NO: 47738 - DNA, 120 bp, synthetic construct
  source 1..120: mol_type = other DNA
ccttcgcccactttttgatggggtttttttttattgtaaatttgtttgagttaattatagattatggatattagccatttgtcagatgagtaggctgcaaaaattttcttccattctgta

SEQ ID NO: 47739 - DNA, 120 bp, synthetic construct
  source 1..120: mol_type = other DNA
gtgcaatctgatattttcatacagacttttgattttttaatatattatatataaaaccatgaagaccacgaatcctccccaaactcctttccccctccccggggggcctggaggagagat

SEQ ID NO: 47740 - DNA, 120 bp, synthetic construct
  source 1..120: mol_type = other DNA
cagacagaaggagggacaggacttcgagactgagggatagaggacaagggtagggggacgaggagccagacgggggggttcagagacgggcggacagagggacgcagagactggacagaa

SEQ ID NO: 47741 - DNA, 120 bp, synthetic construct; identical to SEQ ID NO: 5114
  source 1..120: mol_type = other DNA

SEQ ID NO: 47742 - DNA, 120 bp, synthetic construct; identical to SEQ ID NO: 24375
  source 1..120: mol_type = other DNA

SEQ ID NO: 47743 - DNA, 120 bp, synthetic construct; identical to SEQ ID NO: 24376
  source 1..120: mol_type = other DNA

SEQ ID NO: 47744 - DNA, 120 bp, synthetic construct; identical to SEQ ID NO: 24377
  source 1..120: mol_type = other DNA

SEQ ID NO: 47745 - DNA, 120 bp, synthetic construct; identical to SEQ ID NO: 24378
  source 1..120: mol_type = other DNA

SEQ ID NO: 47746 - DNA, 120 bp, synthetic construct; identical to SEQ ID NO: 24379
  source 1..120: mol_type = other DNA

SEQ ID NO: 47747 - DNA, 120 bp, synthetic construct; identical to SEQ ID NO: 24380
  source 1..120: mol_type = other DNA

SEQ ID NO: 47748 - DNA, 120 bp, synthetic construct
  source 1..120: mol_type = other DNA
gccaaaatgttcttacccgccacctccagttaccaaatcccagcagcattttctttttttttttttttttaacttttttttttttatactttaagttttagggtacatgtgcacattgtg

SEQ ID NO: 47749 - DNA, 120 bp, synthetic construct
  source 1..120: mol_type = other DNA
cactttttgatggggttgttcgtttttttcttgtaaatttgtttgagttcattgtagattctggatattagccctttgtcagatgagtaagttgcgaaaattttctcccatgttgtaggt

SEQ ID NO: 47750 - DNA, 120 bp, synthetic construct
  source 1..120: mol_type = other DNA
tggctgtttgtctgttgttggtgtataagaatgcttgtgatttctgtacattgattttgtatcctgagactttgctgaagttgcttatcagcttaaggagattttgggctgagacaatgg

SEQ ID NO: 47751 - DNA, 120 bp, synthetic construct
  source 1..120: mol_type = other DNA
gtgtttgtagtattctctgatggtagtttgtatttctgtgggatcggtggtggtatcccctttatcattttttatcgtgtctatttgattcttctctctttttttattagtcttgctagc

SEQ ID NO: 47752 - DNA, 120 bp, synthetic construct
  source 1..120: mol_type = other DNA
ttgttttccatttgcttggtagatcttcctccatccttttattttgagcctatgtgtgtctctgcacgtgagatgggtttcctgaatacagcacattgatgggtcttgactctttatcca

SEQ ID NO: 47753 - DNA, 120 bp, synthetic construct
  source 1..120: mol_type = other DNA
aatgtcctcccgtagctcagagtaatttgatcgtctgaagccttcttctctcagctcgtcaaaatcattctccatccagctttgttccgttgctggtgaggaactgcgttcctcagatgg

SEQ ID NO: 47754 - DNA, 120 bp, synthetic construct; identical to SEQ ID NO: 29985
  source 1..120: mol_type = other DNA

SEQ ID NO: 47755 - DNA, 120 bp, synthetic construct
  source 1..120: mol_type = other DNA
cttatttccatgccccaacctcttatatctctgcaccccaatcccttatttccatgccccgacctcttatctctgcgccccaatcccttatctctgtgccccaatcccttatttccgtgc

SEQ ID NO: 47756 - DNA, 120 bp, synthetic construct
  source 1..120: mol_type = other DNA
tccaccctataatctttttatcacctcccctcctcacacctggtccagcttacagttttgttccctgactagccctccccatcctgcccagcaatttactcttaaaaaggtggctggagc

SEQ ID NO: 47757 - DNA, 120 bp, synthetic construct
  source 1..120: mol_type = other DNA
tgcatgcagtggctgccactgcattaatacttttagaggccctcaaaatcacaaactatgctcaactcactctctacagttctcataacttccaaaatctattttcttcctcatacctga

SEQ ID NO: 47758 - DNA, 120 bp, synthetic construct
  source 1..120: mol_type = other DNA
aactactcatacacgccctgctcttgtttacactgccggtttacactgtttttccaagccatcacagctgatatctcctggtgctatccccaaactgccactcttaactcttgaagtaaa

SEQ ID NO: 47759 - DNA, 120 bp, synthetic construct
  source 1..120: mol_type = other DNA
cttaaatatatatgcacccaatacaggagcacccagattcataaagcaaggccttagagatctacagagagacttagactctcacacaataataatgggagactttaacaccccactgtc

SEQ ID NO: 47760 - DNA, 120 bp, synthetic construct
  source 1..120: mol_type = other DNA
caagactaataaagaagaaaagagagaagaatcaaatagacgcaataaaaaatgataaagaggatatcaccaccgatcccacagaaatacaaactaccatcagagaatactataaacacc

SEQ ID NO: 47761 - DNA, 120 bp, synthetic construct; identical to SEQ ID NO: 29980
  source 1..120: mol_type = other DNA

SEQ ID NO: 47762 - DNA, 120 bp, synthetic construct; identical to SEQ ID NO: 29981
  source 1..120: mol_type = other DNA

SEQ ID NO: 47763 - DNA, 120 bp, synthetic construct
  source 1..120: mol_type = other DNA
gaatcaataccgtgaaaatggccataatgcccaaggtaatttatagattcaatgccatccccatcaagctaccaatgactttcttcacagaattggaaaaaactactttaaagttcatat

SEQ ID NO: 47764 - DNA, 120 bp, synthetic construct
  source 1..120: mol_type = other DNA
agaaattgaaatcaaaaccacaatgagataccatctcacaccagttagaatggcaatcattaaaaagtcaggaaacaacaggtgctggagaggatgtggagaaataggaacacttttaca

SEQ ID NO: 47765 - DNA, 120 bp, synthetic construct
  source 1..120: mol_type = other DNA
tccttacaccttatacaaaaattaactcaagatggatcaaagactcaaatgtcagacctaaaaccataaaaaccctagaagaaaacctaggaaataccattcaggacataggcatggaca

SEQ ID NO: 47766 - DNA, 120 bp, synthetic construct
  source 1..120: mol_type = other DNA
aggtgggaattgaacaataagaatacatggacacagggtggggaacatcacacactggggccttccagggggatggggggaggggggaggaatagcattaggagatatacctaatgtaaa

SEQ ID NO: 47767 - DNA, 120 bp, synthetic construct
  source 1..120: mol_type = other DNA
atccatgagcatggaatgttcttccatttgtttgtgtcctctttttatttcgttgagcagtggtttgtagttctccttgaagaggtccttcacatcccttgtaagttggattcctaggta

SEQ ID NO: 47768 - DNA, 120 bp, synthetic construct
  source 1..120: mol_type = other DNA
ttctttttcttttttttttaattatactttaagttctaggttacatgtgcacaacgtgcaggttagttacatatgtatacatgtgccatgttggtgtgctgcacccattaactcatcatt

SEQ ID NO: 47769 - DNA, 120 bp, synthetic construct; identical to SEQ ID NO: 29982
  source 1..120: mol_type = other DNA

SEQ ID NO: 47770 - DNA, 120 bp, synthetic construct
  source 1..120: mol_type = other DNA
atgtaatgaacctgcacaatgtgcacatgtaccctaaaacttaaagtataataataaaagaaagagctctccggtccgtgcctccaagatgacaaagaaaagaaggaacaatggtcgtgc

SEQ ID NO: 47771 - DNA, 120 bp, synthetic construct
  source 1..120: mol_type = other DNA
atgaggtctaagagtcttcctggaaccgcatgtgactgggagacagagagagagactggatgattgaggctactgtaatctgttccttttagatcatttattcaatacatggacattctt

SEQ ID NO: 47772 - DNA, 120 bp, synthetic construct
  source 1..120: mol_type = other DNA
ccagtgcagcgattcctcagggatctagaactagaaataccatttgacccagccatcccattactgggtatatacccaaaggactataaatcatgctgctataaagacacatgcacacgt

SEQ ID NO: 47773 - DNA, 120 bp, synthetic construct
  source 1..120: mol_type = other DNA
tacgcgaatcaataaatgtaatccagcatataaacagaaccaaagacaaaaaacacatgattatctcaacagatgcagaaaaggccgttaacaaaattcaacaacccttcatgctaaaaa

SEQ ID NO: 47774 - DNA, 120 bp, synthetic construct
  source 1..120: mol_type = other DNA
agtctgatctttgacaaacctgacaaaaacaagcaatgggtaaacgattccctatttaataaatggtgttgggaaaactggctagctatatgtagacagctgaaactggatcccttcctt

SEQ ID NO: 47775 - DNA, 120 bp, synthetic construct
  source 1..120: mol_type = other DNA
gggggtataagtgtagttgtgttatatcatggatatactgcatggaccatctgggcttttagtgtacccatcacccaaatagtgtacacgtacccaataggtagtatttcatccctcact

SEQ ID NO: 47776 - DNA, 120 bp, synthetic construct
  source 1..120: mol_type = other DNA
tttacattttttaatttaaaaataactggggcaatcctcatggtggacgggaggcaggactagattgcagttctgactaggatggacagagcagtgtgtggaggctcgcgtcatgaattt

SEQ ID NO: 47777 - DNA, 120 bp, synthetic construct
  source 1..120: mol_type = other DNA
ccctacctgatgggccttccctatccacccctggtagctgaagacaaagggcatatattcttgggagttctagggccctgctcaccaccggttccttttctctccatactacacagctga

SEQ ID NO: 47778 - DNA, 120 bp, synthetic construct; identical to SEQ ID NO: 16911
  source 1..120: mol_type = other DNA

SEQ ID NO: 47779 - DNA, 120 bp, synthetic construct; identical to SEQ ID NO: 16912
  source 1..120: mol_type = other DNA

SEQ ID NO: 47780 - DNA, 120 bp, synthetic construct
  source 1..120: mol_type = other DNA
tggcctatgcctcctagtgatcatttttactatttttttctttttaaaattgcggttaaaacacataaaatttggctgggcgcggtggctcacgcctgtaatcctagcactttgggaggc

SEQ ID NO: 47781 - DNA, 120 bp, synthetic construct; identical to SEQ ID NO: 29731
  source 1..120: mol_type = other DNA

SEQ ID NO: 47782 - DNA, 120 bp, synthetic construct; identical to SEQ ID NO: 21865
  source 1..120: mol_type = other DNA

SEQ ID NO: 47783 - DNA, 120 bp, synthetic construct; identical to SEQ ID NO: 21866
  source 1..120: mol_type = other DNA

SEQ ID NO: 47784 - DNA, 120 bp, synthetic construct
  source 1..120: mol_type = other DNA
atcattctcagcaaactaacacaggaacagaaaaccaatcattgcatgttctcactcataagtgggagttgaacaatgagaaaatatggacatagggaggggaacatcatacactggggc

SEQ ID NO: 47785 - DNA, 120 bp, synthetic construct
  source 1..120: mol_type = other DNA
tccccgagtccccagtgtccattatatcacttttctacctttgcatcctcatagcttagctcccacttgtaagtgagaacatttgatatttggttttccattcctgagttacttcacttc

SEQ ID NO: 47786 - DNA, 120 bp, synthetic construct; identical to SEQ ID NO: 30074
  source 1..120: mol_type = other DNA

SEQ ID NO: 47787 - DNA, 120 bp, synthetic construct
  source 1..120: mol_type = other DNA
gcgaaggtggcaggtcgggcgggcagtggagaatgaatgggctggagctggccggtggcgcacattgttccggccgggtgttgaggggcgcagtcagcgcccgccacctccccactttgg

SEQ ID NO: 47788 - DNA, 120 bp, synthetic construct; identical to SEQ ID NO: 4569
  source 1..120: mol_type = other DNA

SEQ ID NO: 47789 - DNA, 120 bp, synthetic construct; identical to SEQ ID NO: 4570
  source 1..120: mol_type = other DNA

SEQ ID NO: 47790 - DNA, 120 bp, synthetic construct; identical to SEQ ID NO: 19837
  source 1..120: mol_type = other DNA

SEQ ID NO: 47791 - DNA, 120 bp, synthetic construct; identical to SEQ ID NO: 29265
  source 1..120: mol_type = other DNA

SEQ ID NO: 47792 - DNA, 120 bp, synthetic construct
  source 1..120: mol_type = other DNA
gaggaacattccccaactcactgcccccattcctttttgcttctagtctggagctctggaccaagaccctggtcttggtcaatttttaaataatttctcaacaatgtaacttgtagatct

SEQ ID NO: 47793 - DNA, 120 bp, synthetic construct
  source 1..120: mol_type = other DNA
ggaaggaaggaggaaggaaggaaggaaaaaaggaaagaagaaagaaaaaggaaggaaggagggaagaaaggaacgcaggcagacaaggaaaaaaagaaaaagaaatgaagaaagggagaa

SEQ ID NO: 47794 - DNA, 120 bp, synthetic construct; identical to SEQ ID NO: 29259
  source 1..120: mol_type = other DNA

SEQ ID NO: 47795 - DNA, 120 bp, synthetic construct
  source 1..120: mol_type = other DNA
agcctccaaaaaatatgggactatgtgaaaagaccaaatctacgactgattggtgtacctgaaagtgacggggagaatggaaccaagttggaaaacactctgcaggatattatccaggag

SEQ ID NO: 47796 - DNA, 120 bp, synthetic construct
  source 1..120: mol_type = other DNA
acaggagcacccagattcataaagcaagtccttagagacctacaaagagattagactcccacataataataatgggagaatttaacactccactgtcaacatcagacagatcaacaagac

SEQ ID NO: 47797 - DNA, 120 bp, synthetic construct
  source 1..120: mol_type = other DNA
gactaaaccaggaagaagttgaatctctgaatagaccaataacaggctctgaagttgaggcaataattaatagcctaccaaccaaaaaaagtccaggaccagacagattcacagccgaat

SEQ ID NO: 47798 - DNA, 120 bp, synthetic construct
  source 1..120: mol_type = other DNA
ccaaatcatgagtgaactcccattcacaattgcttcaaagagaataaaatacctaggaatccaacttacaagggatgtgaagacctcttcaaggagaactacaaaccactactcaacgaa

SEQ ID NO: 47799 - DNA, 120 bp, synthetic construct
  source 1..120: mol_type = other DNA
tcatcactggccatcagagaaatgcaaatcaaaaccacaatgagataccatctcacaccagttagaatggtgatcattaaaaagtcaggaaacaacaggtgttggagaggactgttacac

SEQ ID NO: 47800 - DNA, 120 bp, synthetic construct; identical to SEQ ID NO: 29260
  source 1..120: mol_type = other DNA

SEQ ID NO: 47801 - DNA, 120 bp, synthetic construct; identical to SEQ ID NO: 29261
  source 1..120: mol_type = other DNA

SEQ ID NO: 47802 - DNA, 120 bp, synthetic construct; identical to SEQ ID NO: 29262
  source 1..120: mol_type = other DNA

SEQ ID NO: 47803 - DNA, 120 bp, synthetic construct; identical to SEQ ID NO: 29263
  source 1..120: mol_type = other DNA

SEQ ID NO: 47804 - DNA, 120 bp, synthetic construct
  source 1..120: mol_type = other DNA
tgatgagcattttttcatgtgttttttggctgcataaatgtcttcttctgagaagtgtctgttcatgtccttcgcccactttttgatggggttgtttgtttttttcttgtaaatttgttt

SEQ ID NO: 47805 - DNA, 120 bp, synthetic construct; identical to SEQ ID NO: 29264
  source 1..120: mol_type = other DNA

SEQ ID NO: 47806 - DNA, 120 bp, synthetic construct
  source 1..120: mol_type = other DNA
cagtatgatattggctgtgggtttgtcatagatagctgttattattttgaaatacatcccatcaatacctaatttactgagagtttttagcatgaaggttgttgaattttgtcaaaggct

SEQ ID NO: 47807 - DNA, 120 bp, synthetic construct
  source 1..120: mol_type = other DNA
caattttggatcttttgaatgtgtttgctcttgcttttctagttcttttaattgtgatgttagggtgtcaattttggatctttcctgctttctcttgtgggcatttagtgctataaattt

SEQ ID NO: 47808 - DNA, 120 bp, synthetic construct
  source 1..120: mol_type = other DNA
taccagtcatccttatatccaatggggatcactaaagttcattccttctgtgaaattgattgaagtaatgttcgtgcctgttaatttttcccgacagcagctcttcctcctcttcctcgc

SEQ ID NO: 47809 - DNA, 120 bp, synthetic construct
  source 1..120: mol_type = other DNA
cgagatcacgccactgtacttcagcctggcgacagagcgagactccgtctcaaaaaaaaaaaaaaaaaaaaaaaattcatgtcctaatccctggaacctgccaatattaaccttacatgg

SEQ ID NO: 47810 - DNA, 120 bp, synthetic construct
  source 1..120: mol_type = other DNA
catgtgatggtcccacttcagcctccccagtagctgggactattacaggcgtgagccatactgtccctggctactaggccttcattattgatgtgacatatgtaacaacttttcaaaaag

SEQ ID NO: 47811 - DNA, 120 bp, synthetic construct
  source 1..120: mol_type = other DNA
agcctcccaaagtgctgggattacaggagtgagccaccgcgcacagcctagactcccatttcttaaaaaaaaaaaatctggatgtggtggcttgtgcctgtagtcctagctacttgggag

SEQ ID NO: 47812 - DNA, 120 bp, synthetic construct
  source 1..120: mol_type = other DNA
agatttttctccctaacctgccatatgactttagccctttcctgcatgctatggagaggagcagcggtgtggaaacctcaagtagtggctagagtgaaaaatgatggtgcaaaaagtgat

SEQ ID NO: 47813 - DNA, 120 bp, synthetic construct
  source 1..120: mol_type = other DNA
tttcttttctttttttttttttttttgagatggagtctcactctgtcgcccaggttggagcgctgtggcacaatctcggctcactacaacctccacctcctgagttcaagcgattctact

SEQ ID NO: 47814 - DNA, 120 bp, synthetic construct
  source 1..120: mol_type = other DNA
ttagctgctctcaatttctttccataatgcatcaccgtagaataaccaacccacaaccattctttttttttttttgagacggagtcttgctgtcacccaggctggagtgcagtgatcttg

SEQ ID NO: 47815 - DNA, 120 bp, synthetic construct
  source 1..120: mol_type = other DNA
gtgaggggatcacttgaacccaggaagtggaggttgcagtgagctgagatcgggccactgtactccagcctgggtgaccaagcgagactccgtctcaattaaaaaaaaaaaaaaagtgtg

SEQ ID NO: 47816 - DNA, 120 bp, synthetic construct
  source 1..120: mol_type = other DNA
tgtaattccagcactttgggaggccaaagtgggtggatcacctgaggtcagtaggtcgagaccagcctgtccaacatggtgaaaccccgtctctacaaaaatacaaaaaaattagctggg

SEQ ID NO: 47817 - DNA, 120 bp, synthetic construct
  source 1..120: mol_type = other DNA
cccaaagtgctgggattacaggtgtgagccaccgcgcccggctctaattttgtatttttaatagaaacggggtttctccatgttggtcaagctggtctcgaactcccgacctaaggtgat

SEQ ID NO: 47818 - DNA, 120 bp, synthetic construct
  source 1..120: mol_type = other DNA
ttaaaaacgtaaaaaacatttttagttcacaggttatataaacacaggcagtgggccaatttggcccacggccaaggtttactgagtactgaaggattcaaaacacaggttgaggccagg

SEQ ID NO: 47819 - DNA, 120 bp, synthetic construct
  source 1..120: mol_type = other DNA
ccaaaatccaaaacactctggtcccaaacatttcagataaggtatccttaccctgcatgagggcaacattaatggtgaataaataacttcttcaggaacacaacagactggtacagttgc

SEQ ID NO: 47820 - DNA, 120 bp, synthetic construct
  source 1..120: mol_type = other DNA
tcagcctcccaaagtgctggaattacaggtgtgagccagcgtgcctggcccatacaacttttatttcacacacctggaagtttttgttcttaatataccactgttcttaattagttaatt

SEQ ID NO: 47821 - DNA, 120 bp, synthetic construct
  source 1..120: mol_type = other DNA
atggacactaaactttctttctttcttttcttttttcttttgagacagaggctcgctctattgcccagactgaatctctgctcactgcaacctccgcctcccaggttcaagcgattctcc

SEQ ID NO: 47822 - DNA, 120 bp, synthetic construct
  source 1..120: mol_type = other DNA
tcaaaaaaaaaaaaaaaaaaattagccaggtgtggtggcacatgcctgtaatcttagctacttgggaggctggaagcaggagaatcatttgaacctgggaggcggaggttgtggtgagca

SEQ ID NO: 47823 - DNA, 120 bp, synthetic construct
  source 1..120: mol_type = other DNA
ctgcctcaatctctcaagtagctgggactacaggcctatgccaccatgctcggctaatatttgtatatatatatattttttttcttgagacagagtcttgctcggttatccaggctggag

SEQ ID NO: 47824 - DNA, 120 bp, synthetic construct
  source 1..120: mol_type = other DNA
tgagaaaaagtacccactaaccttttccttctgaggggcatggcccttgatcctcaaatgcacttgactagtgtctattaagaggggcaattttggtaatgcctactaataacacattca

SEQ ID NO: 47825 - DNA, 120 bp, synthetic construct
  source 1..120: mol_type = other DNA
caaggaaaggagccccttaagttctacctttgccttaatgtcttcatctgtaaaacgggaataaaagcgttttggctgtgccacaactacctagagaggttgctatggaaatgtaacatt

SEQ ID NO: 47826 - DNA, 120 bp, synthetic construct
  source 1..120: mol_type = other DNA
aggttgcaatgagccgagatcacgccactgcactccagcctaggtgacagaacgaaactctgccaaaaaaaaaaaaaaaaaaaaaaaaaggcagggcgcggtggctcacgcctgtaatcc

SEQ ID NO: 47827 - DNA, 120 bp, synthetic construct; identical to SEQ ID NO: 11480
  source 1..120: mol_type = other DNA

SEQ ID NO: 47828 - DNA, 120 bp, synthetic construct; identical to SEQ ID NO: 11481
  source 1..120: mol_type = other DNA

SEQ ID NO: 47829 - DNA, 120 bp, synthetic construct; identical to SEQ ID NO: 11482
  source 1..120: mol_type = other DNA

SEQ ID NO: 47830 - DNA, 120 bp, synthetic construct
  source 1..120: mol_type = other DNA
ctaagctcgtcagaaaacttcccagcttttgaaaagctggggaagaaggggaatttttcttcctgaaatagcctgagtagaggggaggatgtaggagtgagtagcgtgtttgaaagaaca

SEQ ID NO: 47831 - DNA, 120 bp, synthetic construct
  source 1..120: mol_type = other DNA
attttactttattttgcaaaagcaataaatgttatttagaaacccttttaaattgcaattaagggccgggtgtggtggctcacacctgtaatcccagcaccttgggaggcagaggcaggt

SEQ ID NO: 47832 - DNA, 120 bp, synthetic construct
  source 1..120: mol_type = other DNA
agcctccagtgtcggtatcaattggcacttgttcatggggagggaaactctgtggacgagagaggttgggtatctgctacagggctgaagttttctatatatatatatatatatatatat

SEQ ID NO: 47833 - DNA, 120 bp, synthetic construct
  source 1..120: mol_type = other DNA
ctgttgatttcatacacaaaactgtaatatttccagcctgctggcttatcctagaggtcttggacttgacagccctcacaattgtgtgagccaattcctcaaaataaatcctcgattcac

SEQ ID NO: 47834 - DNA, 120 bp, synthetic construct; identical to SEQ ID NO: 10075
  source 1..120: mol_type = other DNA

SEQ ID NO: 47835 - DNA, 120 bp, synthetic construct; identical to SEQ ID NO: 10076
  source 1..120: mol_type = other DNA

SEQ ID NO: 47836 - DNA, 120 bp, synthetic construct; identical to SEQ ID NO: 10077
  source 1..120: mol_type = other DNA

SEQ ID NO: 47837 - DNA, 120 bp, synthetic construct; identical to SEQ ID NO: 10078
  source 1..120: mol_type = other DNA

SEQ ID NO: 47838 - DNA, 120 bp, synthetic construct; identical to SEQ ID NO: 10079
  source 1..120: mol_type = other DNA

SEQ ID NO: 47839 - DNA, 120 bp, synthetic construct; identical to SEQ ID NO: 10080
  source 1..120: mol_type = other DNA

SEQ ID NO: 47840 - DNA, 120 bp, synthetic construct
  source 1..120: mol_type = other DNA
atgttgagaactttatcttctgagggactgagtgtattttgagatgtgacctgatttctctggaatccccacttgagggctttatgttttcacagatggagacttacaactgtaccagag

SEQ ID NO: 47841 - DNA, 120 bp, synthetic construct; identical to SEQ ID NO: 10068
  source 1..120: mol_type = other DNA

SEQ ID NO: 47842 - DNA, 120 bp, synthetic construct; identical to SEQ ID NO: 10069
  source 1..120: mol_type = other DNA

SEQ ID NO: 47843 - DNA, 120 bp, synthetic construct; identical to SEQ ID NO: 10070
  source 1..120: mol_type = other DNA

SEQ ID NO: 47844 - DNA, 120 bp, synthetic construct; identical to SEQ ID NO: 10071
  source 1..120: mol_type = other DNA

SEQ ID NO: 47845 - DNA, 120 bp, synthetic construct
  source 1..120: mol_type = other DNA
actgaagcccacaggccagccacctctttttatgaataaagttttattggaacacagccatgcctgttcatttgcttattgtccatggctacctttgcactataatggcagagtggaata

SEQ ID NO: 47846 - DNA, 120 bp, synthetic construct
  source 1..120: mol_type = other DNA
gtcaggcagagatgctcctcacttcctagttgggatggcggccgggcagagacgctcctcacttcttagatgggatggcggctgggcagagacgctcctcactttccagactgggcagcc

SEQ ID NO: 47847 - DNA, 120 bp, synthetic construct
  source 1..120: mol_type = other DNA
ttctaacttgcctgtctttgacttttggactatttagaagtgagttgtttgctttccacatatttgagaataatctacataatctgatattgatttctggcttaagtaaattacagtcag

SEQ ID NO: 47848 - DNA, 120 bp, synthetic construct
  source 1..120: mol_type = other DNA
taagattagggagtggtgatgactcttaacgagcatgctgccttcaagcatctttttaacaaagcacatcttgcaccgcccttaatccatttaaccctgagtggacacagcacatgtttc

SEQ ID NO: 47849 - DNA, 120 bp, synthetic construct
  source 1..120: mol_type = other DNA
cacctcgggaggccgaggctggcggatcactcgcagttaggagctggagaccagcccggccaacacagcgaaaccccgtctccaccaaaaaaatacgaaaaccagtcaggcgtggcggat

SEQ ID NO: 47850 - DNA, 120 bp, synthetic construct
  source 1..120: mol_type = other DNA
aacaacatggatggaactggagatcatcgtgttaagtgaaataagccaggcacagaaagacaaacatcgcatgttctcacctatttgtgggatctaaaaagcaaaacagtcgaactcacg

SEQ ID NO: 47851 - DNA, 120 bp, synthetic construct; identical to SEQ ID NO: 10074
  source 1..120: mol_type = other DNA

SEQ ID NO: 47852 - DNA, 120 bp, synthetic construct
  source 1..120: mol_type = other DNA
ttccatgttctgttggattcagaacatggcacattgtaggtgggggccacttttactgagctttcctttaaatatgtctatagagtggttagaagtttgatttgttctgggacccactct

SEQ ID NO: 47853 - DNA, 120 bp, synthetic construct; identical to SEQ ID NO: 29111
  source 1..120: mol_type = other DNA

SEQ ID NO: 47854 - DNA, 120 bp, synthetic construct; identical to SEQ ID NO: 29112
  source 1..120: mol_type = other DNA

SEQ ID NO: 47855 - DNA, 120 bp, synthetic construct
  source 1..120: mol_type = other DNA
actgtcacctccattactaccaccaccaccatcaccactatcatcaccatcactcccatcatcactaatgtcaccatccatcaccagcatcatcacaatcatcaccaccaccaactacca

SEQ ID NO: 47856 - DNA, 120 bp, synthetic construct; identical to SEQ ID NO: 29114
  source 1..120: mol_type = other DNA

SEQ ID NO: 47857 - DNA, 120 bp, synthetic construct; identical to SEQ ID NO: 29115
  source 1..120: mol_type = other DNA

SEQ ID NO: 47858 - DNA, 120 bp, synthetic construct; identical to SEQ ID NO: 29116
  source 1..120: mol_type = other DNA

SEQ ID NO: 47859 - DNA, 120 bp, synthetic construct
  source 1..120: mol_type = other DNA
ttactaattctgatacaacacttaaaaaatcagcaggtagtatatgcggacagtaatttttcttttttttttattatactttaagttttagggtacatgtgcacatcgtgcaggttagtt

SEQ ID NO: 47860 - DNA, 120 bp, synthetic construct
  source 1..120: mol_type = other DNA
gtgtttgagttcattgtagattctggatattagccctttgtcagatgagaaggttgcgaaaattttctcccattttgtaggttgcctgttcactctgatggtagtttcttttgctgtgca

SEQ ID NO: 47861 - DNA, 120 bp, synthetic construct
  source 1..120: mol_type = other DNA
ctcctgcctgattgccctggccagaacttccaacactatgttgaataggagtggtgagagagggcatccctgtcttgtgccaggtttcaaagggaatgcttccagtttttgcccattcag

SEQ ID NO: 47862 - DNA, 120 bp, synthetic construct
  source 1..120: mol_type = other DNA
ttattagtcttcctagcggtctatcaattttgttgatcctttcaaaaaaccagctcctggattcattaattttttaaagggttttttgtgtctctatttccttcagttctgctctgattt

SEQ ID NO: 47863 - DNA, 120 bp, synthetic construct
  source 1..120: mol_type = other DNA
tgtcttttaattggagcatttagtccatttacatttaaagtgaatattgttatgtgtgaatttgatcctgtcattatgatgttagctggttattttgctcgttagttgatgcagtttctt

SEQ ID NO: 47864 - DNA, 120 bp, synthetic construct
  source 1..120: mol_type = other DNA
tctttgcctttggtttgaatgtcctcccgtagctcagagtaatttgatcatctgaagccttctctcagctcgtcaaagtcattctccatccagctttgttccgttgctggtgaggaactg

SEQ ID NO: 47865 - DNA, 120 bp, synthetic construct
  source 1..120: mol_type = other DNA
aatgcagaaatcacccgtcttctgcgtcgctcaagctgggagctgtagaccagagttgttcctatttggccatcttggctcctccccccagtaatttttctaagtaaacttgttgtaaaa

SEQ ID NO: 47866 - DNA, 120 bp, synthetic construct; identical to SEQ ID NO: 26944
  source 1..120: mol_type = other DNA

SEQ ID NO: 47867 - DNA, 120 bp, synthetic construct; identical to SEQ ID NO: 26945
  source 1..120: mol_type = other DNA

SEQ ID NO: 47868 - DNA, 120 bp, synthetic construct
  source 1..120: mol_type = other DNA
gattttgacgagctgagagaagaaggcttcagacgatcagattactctgagctatgggaggacattcaaaccaaaggcaaagaagttgaaaactttgaaaaaaatttagaagaatgtata

SEQ ID NO: 47869 - DNA, 120 bp, synthetic construct
  source 1..120: mol_type = other DNA
gcaagttggataaagagtcaagacccatcagtgtgctgtattcaggaaacccatctcacgtgcagagacacacataggctcaaaataaaaggatggaggaagatctaccaagcaaatgga

SEQ ID NO: 47870 - DNA, 120 bp, synthetic construct
  source 1..120: mol_type = other DNA
tcaaagcagtgtgtagagggaaatttatagcactaaacgcctacaagagaaagcaggaaagatccaaaattgacaccctaacatcacaattaaaagaactagaaaagcaagagcaaacac

SEQ ID NO: 47871 - DNA, 120 bp, synthetic construct
  source 1..120: mol_type = other DNA
ccttcatgctaaaaactctcaataaattaggtattgatgggacgtatttcagaataataagagctatctatgacaaacccacagccaatatcatactgaatgggcaaaaactggaagcat

SEQ ID NO: 47872 - DNA, 120 bp, synthetic construct
  source 1..120: mol_type = other DNA
aaaaaccctagaagaaaacctaggcattaccattcaggacataggcgtgggcaaggacttcatgtccgaaacaccaaaagcaatggcaacaaaagccaaaattgacaaatgggatctaat

SEQ ID NO: 47873 - DNA, 120 bp, synthetic construct
  source 1..120: mol_type = other DNA
tgtcctttttagggacatggatgaaattggaaaccatcattctcagtaaactatcgcaagaacaaaaaaccaaacaccgcatattctcactcataggtgggaattgaacaatgagatcac

SEQ ID NO: 47874 - DNA, 120 bp, synthetic construct
  source 1..120: mol_type = other DNA
gctacaataaacatatgtgtgcatgtgtctttatagcagcatgatttacagtcctttgggtatatacccagtaatgggatggctgggtcaaatggtatttctagttctagatccctgagg

SEQ ID NO: 47875 - DNA, 120 bp, synthetic construct
  source 1..120: mol_type = other DNA
aggtttgtcaaagatcagatagttgtagatatgtggcattatttctgagggctctgttctgttccattggtctatatctctgttttggtaccagtaccttgctgttttggttactgtaac

SEQ ID NO: 47876 - DNA, 120 bp, synthetic construct; identical to SEQ ID NO: 26946
  source 1..120: mol_type = other DNA

SEQ ID NO: 47877 - DNA, 120 bp, synthetic construct
  source 1..120: mol_type = other DNA
ctgactttttaatgattgccattctaactggtgtgagatggtatcccattgtggttttgatttgcatttctctgatggccagtgatgatgagcattttttcatgtgtcttttggctgcat

SEQ ID NO: 47878 - DNA, 120 bp, synthetic construct; identical to SEQ ID NO: 26947
  source 1..120: mol_type = other DNA

SEQ ID NO: 47879 - DNA, 120 bp, synthetic construct
  source 1..120: mol_type = other DNA
acaatgtgcagatttgttacatatgcatacatgtgccatattggtgtgctgaacccattaactcgtcatttagcgttaggtatatcacctaatgctatccctcccacctccccccacccc

SEQ ID NO: 47880 - DNA, 120 bp, synthetic construct
  source 1..120: mol_type = other DNA
cctgttcactctgatggtagtttcttttgctgtgcagaaactctttaatttaattagatcccatttgtcaattttgtcttttgttgccattgcttttggtgttttagacatgaagtcctt

SEQ ID NO: 47881 - DNA, 120 bp, synthetic construct
  source 1..120: mol_type = other DNA
ctttatttacttctcctgcctaattgccctggtcagaacttccaacactatattgaataggagtggtgagagagggcatccctgggagacagggttttgagagcaactggtctgaccaaa

SEQ ID NO: 47882 - DNA, 120 bp, synthetic construct; identical to SEQ ID NO: 17366
  source 1..120: mol_type = other DNA

SEQ ID NO: 47883 - DNA, 120 bp, synthetic construct
  source 1..120: mol_type = other DNA
gactccacgttctttagttttgagagttagatgggctctccttgctcctcaagcttgcagacagactatattgtgggaccttgtgatcgtgtaagttaatacttaataaactccccttta

SEQ ID NO: 47884 - DNA, 120 bp, synthetic construct
  source 1..120: mol_type = other DNA
gatcgcaccactgcactgcagcctgggtgactgaacaagactcatctcaaaaaataaaaataaaaaagattaacacatccccttaggctgtcaattcttaccgtctctgggacagaacat

SEQ ID NO: 47885 - DNA, 120 bp, synthetic construct; identical to SEQ ID NO: 13289
  source 1..120: mol_type = other DNA

SEQ ID NO: 47886 - DNA, 120 bp, synthetic construct
  source 1..120: mol_type = other DNA
cagatttacccctaagaattgtatattttttaatgctattgtaaattttatttaaaaaatttttagctctccctctccctccccctccccctccccctgtccctctccctctccgtctcc

SEQ ID NO: 47887 - DNA, 120 bp, synthetic construct
  source 1..120: mol_type = other DNA
ggccagccgccccatccgggaggtgaggggcgcttctgcccggccgcccctactgggaagtgaggagcccctctgcccggccacgaccccgtctgggaggtgtgcccagcggctcattgg

SEQ ID NO: 47888 - DNA, 120 bp, synthetic construct
  source 1..120: mol_type = other DNA
attcaccagtaagccagctaggcctagaattttctttgtgggaaagtttttaaactacaaatttctgactttttaatgattgccattctatctggcgtgagatggtatctcattgtggtt

SEQ ID NO: 47889 - DNA, 120 bp, synthetic construct
  source 1..120: mol_type = other DNA
tccttcacgtcccttgtaagttggattcctaggtattttattctctttgaagcaattgtgaatgggagttcactcatgatttggctctctgtttgtctgttattggtgctggagaggatg

SEQ ID NO: 47890 - DNA, 120 bp, synthetic construct
  source 1..120: mol_type = other DNA
aagctcctatgttaaatttaattaattaattaatttttttgagacagggtcttgctctgtcacccaggccagagtatagtggcatgatcatggctcactgcagcctcaactttctgggcc

SEQ ID NO: 47891 - DNA, 120 bp, synthetic construct; identical to SEQ ID NO: 20506
  source 1..120: mol_type = other DNA

SEQ ID NO: 47892 - DNA, 120 bp, synthetic construct
  source 1..120: mol_type = other DNA
ttttaaaatacttcattttttagaacagtgttaggttcacaggaaaattaaacacaaagtacagagcatcctcatgaccccctcctcccacatgtgtacagcccccccccccattatcaa

SEQ ID NO: 47893 - DNA, 120 bp, synthetic construct; identical to SEQ ID NO: 20508
  source 1..120: mol_type = other DNA

SEQ ID NO: 47894 - DNA, 120 bp, synthetic construct; identical to SEQ ID NO: 20509
  source 1..120: mol_type = other DNA

SEQ ID NO: 47895 - DNA, 120 bp, synthetic construct
  source 1..120: mol_type = other DNA
ctttctttcttttttttttttttttttttgagacagggtctcactctgtcacccagattgtagtgcagtggcctaatcttggctcactgcaatctccacctccacaatggctcaagcaat

SEQ ID NO: 47896 - DNA, 120 bp, synthetic construct
  source 1..120: mol_type = other DNA
cacaggcacggggaaggacttcatgtctaaaacaccaaaagcaatggcaacaaaagccaaaattgacaaatgggatctcattaaactaaagagcttctgcacagcaaaagaaactaccat

SEQ ID NO: 47897 - DNA, 120 bp, synthetic construct
  source 1..120: mol_type = other DNA
agttagtgggtgcagcgcaccagcaagtcacatgtatacatatgtaactaacctgcacgttgtgcacatgtaccctaaaacttaaagtataataataataatagtaataataataaaaaa

SEQ ID NO: 47898 - DNA, 120 bp, synthetic construct; identical to SEQ ID NO: 33141
  source 1..120: mol_type = other DNA

SEQ ID NO: 47899 - DNA, 120 bp, synthetic construct; identical to SEQ ID NO: 33142
  source 1..120: mol_type = other DNA

SEQ ID NO: 47900 - DNA, 120 bp, synthetic construct; identical to SEQ ID NO: 33143
  source 1..120: mol_type = other DNA

SEQ ID NO: 47901 - DNA, 120 bp, synthetic construct
  source 1..120: mol_type = other DNA
aagaaaatgtggcacatatacaccatggaatactatgcagccattaaaaaaaaggatgagttcatatcctttgcaaggacatggatgaagctggaagccatcattctcagcaaactaaca

SEQ ID NO: 47902 - DNA, 120 bp, synthetic construct
  source 1..120: mol_type = other DNA
tcaaggtcacccgtgaggaagcgaggtgacttaagaacattctaacagcaaggtaacccagttctaagctttttgtcgttattctttcttattgtaaaatagtgcacgcacacacagaga

SEQ ID NO: 47903 - DNA, 120 bp, synthetic construct; identical to SEQ ID NO: 9148
  source 1..120: mol_type = other DNA

SEQ ID NO: 47904 - DNA, 120 bp, synthetic construct
  source 1..120: mol_type = other DNA
gtgagatggtatctcattgtggttttgatttgcatttctctgatggccagcgatggtgagcattttttcatgtgttttttggctgcataaatgtcttcttttgagaagtgtctgttcatg

SEQ ID NO: 47905 - DNA, 120 bp, synthetic construct
  source 1..120: mol_type = other DNA
cattgaatctataaattaccttgggcagtatggccattttcacgatattgattcttcccacccatgagcatggaatgttcttccatttgtttgtatcctcttttatttccttgagcagtg

SEQ ID NO: 47906 - DNA, 120 bp, synthetic construct
  source 1..120: mol_type = other DNA
cccctggtagaatttggctgtgaatccgtctagtcctggggttttttttttggttggtagacttttaattactgcctcaatttcagaacttgttattggtctgttcagggattcgacttc

SEQ ID NO: 47907 - DNA, 120 bp, synthetic construct
  source 1..120: mol_type = other DNA
tatgtacatgcacacatatatgtgtatatatacacacgcacatatatgtgtgtacacacacacgcgtgtatatatgtgtgtacacacacacgcgtgtatatatgtgtgtacacacacacg

SEQ ID NO: 47908 - DNA, 120 bp, synthetic construct
  source 1..120: mol_type = other DNA
tgttggacatttttatcctggacaagttatctcagctctccaggccttggttttctcatctgtacaaggggtataataataagtgtcgtaaggattaaatgactggatgcagggaaggtc

SEQ ID NO: 47909 - DNA, 120 bp, synthetic construct
  source 1..120: mol_type = other DNA
acccacacactctcccacccacccatccacctatccacccatccatccacccacccatccacccatccatccatccacccacccaccaactcatccacctacccacccacccactcatcc

SEQ ID NO: 47910 - DNA, 120 bp, synthetic construct
  source 1..120: mol_type = other DNA
tagacctgtgctattcaatatggtggccaccagccagatgtggctactgagtcacttgaaatgtggttgatcagaaccaagatgtgctgtaaatgtaaaatatactcagggttccaaaga

SEQ ID NO: 47911 - DNA, 120 bp, synthetic construct
  source 1..120: mol_type = other DNA
aacccactattggatgaatagggctttactgaaggatgggtgggcgggtgggggatagatggggagccaggtatgaatggacagaacaggtgtgagtggctgggtaaggcctccatgggt

SEQ ID NO: 47912 - DNA, 120 bp, synthetic construct; identical to SEQ ID NO: 7028
  source 1..120: mol_type = other DNA

SEQ ID NO: 47913 - DNA, 120 bp, synthetic construct
  source 1..120: mol_type = other DNA
ctagtttacagtcccaccaacagtgtaaaagtgttcctatttctccacatcctctccagcacctgttgtttcctgactttttaatgatcgccattctaactggtgtgagatggtatctca

SEQ ID NO: 47914 - DNA, 120 bp, synthetic construct
  source 1..120: mol_type = other DNA
ggttccaagtctttgctatcgtgaatagtgctgcaataaacatacgtgtgcgtgtgtctttatagcagcatgatttatagtcctttgggtatatacccagtaatgggatggctgggtcaa

SEQ ID NO: 47915 - DNA, 120 bp, synthetic construct
  source 1..120: mol_type = other DNA
ctacatatggctagccagttttcccagcaccatttattaaatagggaatcctttccccattgcttgtttttctcaggtttgtcaaagatcagatagttgtagacatgcagcattatttct

SEQ ID NO: 47916 - DNA, 120 bp, synthetic construct
  source 1..120: mol_type = other DNA
tcatagataactcttatgattttgacgtacatcccatcaatacctaatttattgagagcttttagcatgaagggttgttgaattttgtcaaaggccttttctgcatctattgagataatc

SEQ ID NO: 47917 - DNA, 120 bp, synthetic construct
  source 1..120: mol_type = other DNA
atgttagggtgtcaattttggatctttcctgctttcttctgtgggcatttagtgctataaatttccctctacacactgctttgaatgtgtcccagagattctggtatgttgtgtctttgt

SEQ ID NO: 47918 - DNA, 120 bp, synthetic construct
  source 1..120: mol_type = other DNA
tacatttaaagttaatattattatgtgtgaatttgatcctgtcattatgatgttagctggttattttgctcattagttgatgcagtttcttcctagccttgatggtctttacaatttggc

SEQ ID NO: 47919 - DNA, 120 bp, synthetic construct
  source 1..120: mol_type = other DNA
tcacgtagttctcgagccttggctttcagctccatcagctccattaagcacttctctgcattggttattctagttatacattcatctaattttttttcaaagtttttaacttctttgcca

SEQ ID NO: 47920 - DNA, 120 bp, synthetic construct
  source 1..120: mol_type = other DNA
cttgtgccgccttgcagtttgatctcagactgctgtgctagcaatcagcgagactccatgggcgtaggaccctctgagccaggtgtgggatataatctcctggtgtgctgttttttaagc

SEQ ID NO: 47921 - DNA, 120 bp, synthetic construct; identical to SEQ ID NO: 7029
  source 1..120: mol_type = other DNA

SEQ ID NO: 47922 - DNA, 120 bp, synthetic construct; identical to SEQ ID NO: 7030
  source 1..120: mol_type = other DNA

SEQ ID NO: 47923 - DNA, 120 bp, synthetic construct; identical to SEQ ID NO: 7031
  source 1..120: mol_type = other DNA

SEQ ID NO: 47924 - DNA, 120 bp, synthetic construct
  source 1..120: mol_type = other DNA
gcccacagtccacagcaccatcagaacgggagcttctaaaacacatcactccatgttgttcccctacccaaaagtcttcagcacaaaaagcaactcccctagcagagctctctttgtgga

SEQ ID NO: 47925 - DNA, 120 bp, synthetic construct; identical to SEQ ID NO: 7032
  source 1..120: mol_type = other DNA

SEQ ID NO: 47926 - DNA, 120 bp, synthetic construct; identical to SEQ ID NO: 7033
  source 1..120: mol_type = other DNA

SEQ ID NO: 47927 - DNA, 120 bp, synthetic construct
  source 1..120: mol_type = other DNA
catgctgttctcaaactcctgacctcaggtgatccatctgcctcagcctcccaaggtgtgaagattacaggcatgcatgacctcatcttaacaaattacttccataaaggctcaatttac

SEQ ID NO: 47928 - DNA, 120 bp, synthetic construct
  source 1..120: mol_type = other DNA
tgctggattatgtttgttgatttgcgtatgttgaaccagccttgcatcccagggatgaagcccagttgatcatggtggataagcttttgatgtgctgctggattcagtttgccagtattt

SEQ ID NO: 47929 - DNA, 120 bp, synthetic construct
  source 1..120: mol_type = other DNA
ggctgctgggcggagacgctcctcacttcccagacggggtggctgccgggcggaggggctcctcacttctcagacggggcggttgccaggcagagggtctcctcacttctcagacggtgc

SEQ ID NO: 47930 - DNA, 120 bp, synthetic construct
  source 1..120: mol_type = other DNA
cttccttccttccttccttccttcctccctccctccctccctcctcccttcccttcccctcccctcgattccctctttttctattgattggagtagtttcagaaggaatggtaccagctc

SEQ ID NO: 47931 - DNA, 120 bp, synthetic construct
  source 1..120: mol_type = other DNA
gtatattctgttgatttggggtggagagttctgtagatgtctattaggtctgtttggtgcagagctgagttcagttcctggatatccttgttaactttctgtctcattgatctttctaat

SEQ ID NO: 47932 - DNA, 120 bp, synthetic construct; identical to SEQ ID NO: 7035
  source 1..120: mol_type = other DNA

SEQ ID NO: 47933 - DNA, 120 bp, synthetic construct; identical to SEQ ID NO: 7036
  source 1..120: mol_type = other DNA

SEQ ID NO: 47934 - DNA, 120 bp, synthetic construct; identical to SEQ ID NO: 7015
  source 1..120: mol_type = other DNA

SEQ ID NO: 47935 - DNA, 120 bp, synthetic construct; identical to SEQ ID NO: 7016
  source 1..120: mol_type = other DNA

SEQ ID NO: 47936 - DNA, 120 bp, synthetic construct; identical to SEQ ID NO: 7017
  source 1..120: mol_type = other DNA

SEQ ID NO: 47937 - DNA, 120 bp, synthetic construct; identical to SEQ ID NO: 7018
  source 1..120: mol_type = other DNA

SEQ ID NO: 47938 - DNA, 120 bp, synthetic construct; identical to SEQ ID NO: 7019
  source 1..120: mol_type = other DNA

SEQ ID NO: 47939 - DNA, 120 bp, synthetic construct; identical to SEQ ID NO: 7020
  source 1..120: mol_type = other DNA

SEQ ID NO: 47940 - DNA, 120 bp, synthetic construct; identical to SEQ ID NO: 7021
  source 1..120: mol_type = other DNA

SEQ ID NO: 47941 - DNA, 120 bp, synthetic construct; identical to SEQ ID NO: 7022
  source 1..120: mol_type = other DNA

SEQ ID NO: 47942 - DNA, 120 bp, synthetic construct
  source 1..120: mol_type = other DNA
cattccttgtggcccttctcctctggaccaacccctctgtccattagggccccgccttcatttgacccatcccaccctctggcctcacccactccaccttccattttgacccagctcctt

SEQ ID NO: 47943 - DNA, 120 bp, synthetic construct; identical to SEQ ID NO: 7023
  source 1..120: mol_type = other DNA

SEQ ID NO: 47944 - DNA, 120 bp, synthetic construct
  source 1..120: mol_type = other DNA
tgatgaaccccgtctctaacagaaatacaaaaattagccaggtgtggggtggtgcggggctgaaatcccagctagtcaggaggctaagacaggggaatcacttgaacctgggaggcggag

SEQ ID NO: 47945 - DNA, 120 bp, synthetic construct; identical to SEQ ID NO: 7024
  source 1..120: mol_type = other DNA

SEQ ID NO: 47946 - DNA, 120 bp, synthetic construct; identical to SEQ ID NO: 7025
  source 1..120: mol_type = other DNA

SEQ ID NO: 47947 - DNA, 120 bp, synthetic construct; identical to SEQ ID NO: 2728
  source 1..120: mol_type = other DNA

SEQ ID NO: 47948 - DNA, 120 bp, synthetic construct; identical to SEQ ID NO: 7027
  source 1..120: mol_type = other DNA

SEQ ID NO: 47949 - DNA, 120 bp, synthetic construct; identical to SEQ ID NO: 13044
  source 1..120: mol_type = other DNA

SEQ ID NO: 47950 - DNA, 120 bp, synthetic construct; identical to SEQ ID NO: 18542
  source 1..120: mol_type = other DNA

SEQ ID NO: 47951 - DNA, 120 bp, synthetic construct; identical to SEQ ID NO: 18543
  source 1..120: mol_type = other DNA

SEQ ID NO: 47952 - DNA, 120 bp, synthetic construct; identical to SEQ ID NO: 18544
  source 1..120: mol_type = other DNA

SEQ ID NO: 47953 - DNA, 120 bp, synthetic construct; identical to SEQ ID NO: 7493
  source 1..120: mol_type = other DNA

SEQ ID NO: 47954 - DNA, 120 bp, synthetic construct; identical to SEQ ID NO: 27512
  source 1..120: mol_type = other DNA

SEQ ID NO: 47955 - DNA, 120 bp, synthetic construct
  source 1..120: mol_type = other DNA
gggggaggggggagggatagcattgggagatatacctaatgctagatgtcacattagtgggtgcagcgcaccagcatggcacatgtatacatatgtaactaacctgcacaatgtgcacat

SEQ ID NO: 47956 - DNA, 120 bp, synthetic construct; identical to SEQ ID NO: 27513
  source 1..120: mol_type = other DNA

SEQ ID NO: 47957 - DNA, 120 bp, synthetic construct; identical to SEQ ID NO: 27514
  source 1..120: mol_type = other DNA

SEQ ID NO: 47958 - DNA, 120 bp, synthetic construct; identical to SEQ ID NO: 27774
  source 1..120: mol_type = other DNA

SEQ ID NO: 47959 - DNA, 120 bp, synthetic construct
  source 1..120: mol_type = other DNA
acacacacacacacacacacactcacatacagacacaaccacaccacacacacacatgaaaagggtctgttggagtgtggcatattacccagtcaaaatattttataacaagtatagctc

SEQ ID NO: 47960 - DNA, 120 bp, synthetic construct
  source 1..120: mol_type = other DNA
gtatggactgagcccaaggccctgaggcagggaggagctgtgagcatttcaagaaaaggtcaggagatttaagcccggagggaggaaaaagcaagcaaaatgagacacctgagatgctgg

SEQ ID NO: 47961 - DNA, 120 bp, synthetic construct
  source 1..120: mol_type = other DNA
tcgggggtctcgggggtctcggggcctgtctaggcagggatggggtcggatttgggtgcccggggctcacacggccgtgtggcggcgctcggagaagacacgcagagtgaagtcagcctc

SEQ ID NO: 47962 - DNA, 120 bp, synthetic construct
  source 1..120: mol_type = other DNA
cctctcattcccttagctccctctcccctctgagacctggccccccagccctactagccccctactcccctcccagcgccgccccctcttggccctgctcctccactcctcccctcctcc

SEQ ID NO: 47963 - DNA, 120 bp, synthetic construct
  source 1..120: mol_type = other DNA
cagaatgggtgacagagtgagaccccatctcaaaaaaaaaaaaaaaaaaaaaaggaaggaaggaaggagggaggagggagagagaggcctagggagagaagagactgaggagggatccag

SEQ ID NO: 47964 - DNA, 120 bp, synthetic construct
  source 1..120: mol_type = other DNA
tcagaccagggagtccaggcccccagccttccttcctcagacccaggagtccatgcctccagcccctcctccctcagaccccagagcccagaccccagccacactttacatggggcctca

SEQ ID NO: 47965 - DNA, 120 bp, synthetic construct; identical to SEQ ID NO: 4550
  source 1..120: mol_type = other DNA

SEQ ID NO: 47966 - DNA, 120 bp, synthetic construct; identical to SEQ ID NO: 20442
  source 1..120: mol_type = other DNA

SEQ ID NO: 47967 - DNA, 120 bp, synthetic construct
  source 1..120: mol_type = other DNA
aaaactggcacaagacagggatgccctctctcaccactcctattcaacatagtgttggaagttctggccagggcaatcaggcaggagaaggaaataaagggtattcaattgggaagagag

SEQ ID NO: 47968 - DNA, 120 bp, synthetic construct
  source 1..120: mol_type = other DNA
aaacaatggggaaaggatttcctatttaataaatggtgctgggaaaactggctagccatatgtagaaagctgaaactggatcccttccttacaccttatacaaaaattaattcaagatgg

SEQ ID NO: 47969 - DNA, 120 bp, synthetic construct
  source 1..120: mol_type = other DNA
gtgcctgattaaatgcctccctttctaggcagcagcccagacgcggcacagagagggcctgggagcttgctgcagcttcaggtgagtttgttcccaagccctgcggctcgtttatgggtt

SEQ ID NO: 47970 - DNA, 120 bp, synthetic construct; identical to SEQ ID NO: 15730
  source 1..120: mol_type = other DNA

SEQ ID NO: 47971 - DNA, 120 bp, synthetic construct; identical to SEQ ID NO: 3963
  source 1..120: mol_type = other DNA

SEQ ID NO: 47972 - DNA, 120 bp, synthetic construct; identical to SEQ ID NO: 15732
  source 1..120: mol_type = other DNA

SEQ ID NO: 47973 - DNA, 120 bp, synthetic construct; identical to SEQ ID NO: 15733
  source 1..120: mol_type = other DNA

SEQ ID NO: 47974 - DNA, 120 bp, synthetic construct; identical to SEQ ID NO: 3964
  source 1..120: mol_type = other DNA

SEQ ID NO: 47975 - DNA, 120 bp, synthetic construct; identical to SEQ ID NO: 9393
  source 1..120: mol_type = other DNA

SEQ ID NO: 47976 - DNA, 120 bp, synthetic construct; identical to SEQ ID NO: 9394
  source 1..120: mol_type = other DNA

SEQ ID NO: 47977 - DNA, 120 bp, synthetic construct; identical to SEQ ID NO: 9395
  source 1..120: mol_type = other DNA

SEQ ID NO: 47978 - DNA, 120 bp, synthetic construct; identical to SEQ ID NO: 9396
  source 1..120: mol_type = other DNA

SEQ ID NO: 47979 - DNA, 120 bp, synthetic construct; identical to SEQ ID NO: 9397
  source 1..120: mol_type = other DNA

SEQ ID NO: 47980 - DNA, 120 bp, synthetic construct
  source 1..120: mol_type = other DNA
gcccactttttgatggggttgtttgtttttttcttgtaaatttgttggagttcattgtagattctggatattagccctttgtcagataagcaggttgcgaaaattttctcccattttgta

SEQ ID NO: 47981 - DNA, 120 bp, synthetic construct; identical to SEQ ID NO: 9398
  source 1..120: mol_type = other DNA

SEQ ID NO: 47982 - DNA, 120 bp, synthetic construct; identical to SEQ ID NO: 15156
  source 1..120: mol_type = other DNA

SEQ ID NO: 47983 - DNA, 120 bp, synthetic construct; identical to SEQ ID NO: 15157
  source 1..120: mol_type = other DNA

SEQ ID NO: 47984 - DNA, 120 bp, synthetic construct; identical to SEQ ID NO: 12126
  source 1..120: mol_type = other DNA

SEQ ID NO: 47985 - DNA, 120 bp, synthetic construct
  source 1..120: mol_type = other DNA
gtggctgctgggcggagacgctcctcacttcccagatggggtggctgccgggcggagaggctcctcacttctcagacggggcggctgccgggcggaggggctcctcacttctcagacggg

SEQ ID NO: 47986 - DNA, 120 bp, synthetic construct
  source 1..120: mol_type = other DNA
tctagttttttttccacttggtgttaaagaggattttgcttgttttggtttttttttgagttggagtttcgctcttgtcacccaggctagagtgcaatggtgcgatcacggctcaccgta

SEQ ID NO: 47987 - DNA, 120 bp, synthetic construct; identical to SEQ ID NO: 35145
  source 1..120: mol_type = other DNA

SEQ ID NO: 47988 - DNA, 120 bp, synthetic construct; identical to SEQ ID NO: 24117
  source 1..120: mol_type = other DNA

SEQ ID NO: 47989 - DNA, 120 bp, synthetic construct; identical to SEQ ID NO: 9390
  source 1..120: mol_type = other DNA

SEQ ID NO: 47990 - DNA, 120 bp, synthetic construct; identical to SEQ ID NO: 9391
  source 1..120: mol_type = other DNA

SEQ ID NO: 47991 - DNA, 120 bp, synthetic construct; identical to SEQ ID NO: 9392
  source 1..120: mol_type = other DNA

SEQ ID NO: 47992 - DNA, 120 bp, synthetic construct
  source 1..120: mol_type = other DNA
ggtgtgcacatatggtgtgtggtgtgtttggtgtgtgtggtatgtaatatgtggtatgcatgtgcttgtagtatgtgtgctgcatgtgtggtataaatgtgtgtgtgatatatatgtgtg

SEQ ID NO: 47993 - DNA, 120 bp, synthetic construct
  source 1..120: mol_type = other DNA
cctggaagatgagagcccaagagttcagctttattgtgctgatttaggaattattgatttttaccattgcaccaagaatcaggaggccgtggattctgttgtgaactcactgtatgtcaa

SEQ ID NO: 47994 - DNA, 120 bp, synthetic construct; identical to SEQ ID NO: 9443
  source 1..120: mol_type = other DNA

SEQ ID NO: 47995 - DNA, 120 bp, synthetic construct
  source 1..120: mol_type = other DNA
taaaaagtttatttatggtttggctatagaaatttacctttaattgctgggcatggtggttcattcctataatcccagcactttgggaggctgaggtgggcagattgcttgagcctagga

SEQ ID NO: 47996 - DNA, 120 bp, synthetic construct; identical to SEQ ID NO: 12796
  source 1..120: mol_type = other DNA

SEQ ID NO: 47997 - DNA, 120 bp, synthetic construct
  source 1..120: mol_type = other DNA
tcaacgagacagaaagttaacaaagatatccaggaattgaactaagttctgcaccaagcggacctaatagacatctacagaactctccaccccaaatcaacagaatatacattcttttca

SEQ ID NO: 47998 - DNA, 120 bp, synthetic construct; identical to SEQ ID NO: 7947
  source 1..120: mol_type = other DNA

SEQ ID NO: 47999 - DNA, 120 bp, synthetic construct
  source 1..120: mol_type = other DNA
gagtcatcaccactccccaatctcaagtacccagggacacaaacgctgcggaaggccgcagggtcctctgcctaggaaaaccagagacctttgttcacttgtttatctgctgaccttccc

SEQ ID NO: 48000 - DNA, 120 bp, synthetic construct
  source 1..120: mol_type = other DNA
gatttatctaataaattttaactgaaagaatatttaagagttagataaaagggtgggcatggtggctcatgcctataatgccagcgctttgggaggccaagcccggtggatcacctgaga

SEQ ID NO: 48001 - DNA, 120 bp, synthetic construct; identical to SEQ ID NO: 7248
  source 1..120: mol_type = other DNA

SEQ ID NO: 48002 - DNA, 120 bp, synthetic construct; identical to SEQ ID NO: 23792
  source 1..120: mol_type = other DNA

SEQ ID NO: 48003 - DNA, 120 bp, synthetic construct; identical to SEQ ID NO: 23793
  source 1..120: mol_type = other DNA

SEQ ID NO: 48004 - DNA, 120 bp, synthetic construct; identical to SEQ ID NO: 23794
  source 1..120: mol_type = other DNA

SEQ ID NO: 48005 - DNA, 120 bp, synthetic construct
  source 1..120: mol_type = other DNA
gtatttttagtagagatggggtttcaccatgttggccaagctggtctcaaactaccaacttcagctgatgtgcccaccttggcctcccaaagtgtggggattataggcgtgagccaccgc

SEQ ID NO: 48006 - DNA, 120 bp, synthetic construct
  source 1..120: mol_type = other DNA
tggaggcttggtggggtgctagggacaggaggggacagcccttaggggtctgggagccctacctgaacctcttgatgttcttctcacacacccggatgaagagcacgatggggtagatgt

SEQ ID NO: 48007 - DNA, 120 bp, synthetic construct; identical to SEQ ID NO: 18574
  source 1..120: mol_type = other DNA

SEQ ID NO: 48008 - DNA, 120 bp, synthetic construct; identical to SEQ ID NO: 18575
  source 1..120: mol_type = other DNA

SEQ ID NO: 48009 - DNA, 120 bp, synthetic construct; identical to SEQ ID NO: 19863
  source 1..120: mol_type = other DNA

SEQ ID NO: 48010 - DNA, 120 bp, synthetic construct; identical to SEQ ID NO: 19864
  source 1..120: mol_type = other DNA

SEQ ID NO: 48011 - DNA, 120 bp, synthetic construct; identical to SEQ ID NO: 21917
  source 1..120: mol_type = other DNA

SEQ ID NO: 48012 - DNA, 120 bp, synthetic construct; identical to SEQ ID NO: 21918
  source 1..120: mol_type = other DNA

SEQ ID NO: 48013 - DNA, 120 bp, synthetic construct; identical to SEQ ID NO: 21919
  source 1..120: mol_type = other DNA

SEQ ID NO: 48014 - DNA, 120 bp, synthetic construct
  source 1..120: mol_type = other DNA
gcagggaagccgcatcacgacgcgcggctgcttgtgtggggcggggtacagggcgtgtccacgcggccgagcaccgcccccgccgtccccgcaccgcctcactcgaaagcagccgttaat

SEQ ID NO: 48015 - DNA, 120 bp, synthetic construct; identical to SEQ ID NO: 27527
  source 1..120: mol_type = other DNA

SEQ ID NO: 48016 - DNA, 120 bp, synthetic construct; identical to SEQ ID NO: 27528
  source 1..120: mol_type = other DNA

SEQ ID NO: 48017 - DNA, 120 bp, synthetic construct; identical to SEQ ID NO: 27529
  source 1..120: mol_type = other DNA

SEQ ID NO: 48018 - DNA, 120 bp, synthetic construct; identical to SEQ ID NO: 27530
  source 1..120: mol_type = other DNA

SEQ ID NO: 48019 - DNA, 120 bp, synthetic construct; identical to SEQ ID NO: 27531
  source 1..120: mol_type = other DNA

SEQ ID NO: 48020 - DNA, 120 bp, synthetic construct; identical to SEQ ID NO: 27532
  source 1..120: mol_type = other DNA

SEQ ID NO: 48021 - DNA, 120 bp, synthetic construct
  source 1..120: mol_type = other DNA
ttctatttgacaaaaccgccatcatcatcatggcccgccctcaatgagctgttgggtaaacctcccagacggggtggcggccaggcagaggcgccccccatctccctaacgggacggctg

SEQ ID NO: 48022 - DNA, 120 bp, synthetic construct
  source 1..120: mol_type = other DNA
tggagacagagggagagggagagggagagggagactggggaaagggagagggagggggagggggagggagagggaacctatttttaaaaaaggaaactaggcacaaaaatttaaccttag

SEQ ID NO: 48023 - DNA, 120 bp, synthetic construct
  source 1..120: mol_type = other DNA
aaatggaccacatatttggaagtaaagcactcctcagcaaatgtaaaagaacagaaattgtaacaaactgtctctcagaccacagtgcaatcaaactagaactcaggattaagaaactca

SEQ ID NO: 48024 - DNA, 120 bp, synthetic construct
  source 1..120: mol_type = other DNA
aagaaatggggaaaggattccctatttaataaacaatgctgggaaaactagctagccatatgtagaaagctgaaactggatccctatccttacacaaaattaattcaagatggattaaag

SEQ ID NO: 48025 - DNA, 120 bp, synthetic construct
  source 1..120: mol_type = other DNA
ttgtaggcacatggatgaagctggaaaccatcattctgagcaaactatcacaaggacagaaaaccaaacactgcatgttctcactcataggtaggaattgaacaatgagaacacttggac

SEQ ID NO: 48026 - DNA, 120 bp, synthetic construct; identical to SEQ ID NO: 13945
  source 1..120: mol_type = other DNA

SEQ ID NO: 48027 - DNA, 120 bp, synthetic construct; identical to SEQ ID NO: 13946
  source 1..120: mol_type = other DNA

SEQ ID NO: 48028 - DNA, 120 bp, synthetic construct; identical to SEQ ID NO: 13947
  source 1..120: mol_type = other DNA

SEQ ID NO: 48029 - DNA, 120 bp, synthetic construct
  source 1..120: mol_type = other DNA
atatgatttgcaaatagttcccccaatgctgtgtattatctttttcctttttgttttttttttttttttgggtgggggggacagtctcgctctgtcacccaggctggactgcagtggcat

SEQ ID NO: 48030 - DNA, 120 bp, synthetic construct; identical to SEQ ID NO: 33771
  source 1..120: mol_type = other DNA

SEQ ID NO: 48031 - DNA, 120 bp, synthetic construct; identical to SEQ ID NO: 6599
  source 1..120: mol_type = other DNA

SEQ ID NO: 48032 - DNA, 120 bp, synthetic construct
  source 1..120: mol_type = other DNA
tttgttttctgttttttttttttttttttttttttgagacagagttttgctcttgttgccccagctggactacagtggtgcaatcttggctcgctgcaacctccgcctcctgggttcaag

SEQ ID NO: 48033 - DNA, 120 bp, synthetic construct
  source 1..120: mol_type = other DNA
tgagattatgccagtgcactctagcctgggcaaccgagcgagaccttgtctaaaaaaaaaaaaaaaaaaaaaacaaaaatgaaatccttagcaggggatttcccaacactttgggaggcc

SEQ ID NO: 48034 - DNA, 120 bp, synthetic construct; identical to SEQ ID NO: 33765
  source 1..120: mol_type = other DNA

SEQ ID NO: 48035 - DNA, 120 bp, synthetic construct
  source 1..120: mol_type = other DNA
aagatgaataagttctagtgatctgctgtacaacattgtgtctatcattaacaatactgtattgtgcactttgttttttttttgaggcggagtctcgctttgtctcccaggctggagtcc

SEQ ID NO: 48036 - DNA, 120 bp, synthetic construct; identical to SEQ ID NO: 33766
  source 1..120: mol_type = other DNA

SEQ ID NO: 48037 - DNA, 120 bp, synthetic construct
  source 1..120: mol_type = other DNA
cccgtctgagaagtgaggagaccctccgcccggcaaccgccccgtctgagaagtgaggagcccctccgcccggcagccgccccgtctgagaagtgaggagcccctccgcccggcagccac

SEQ ID NO: 48038 - DNA, 120 bp, synthetic construct; identical to SEQ ID NO: 33767
  source 1..120: mol_type = other DNA

SEQ ID NO: 48039 - DNA, 120 bp, synthetic construct
  source 1..120: mol_type = other DNA
ctggcttttttttttttttttttttttttttgtatttttgtgtttttgcagagatggggttttgccatgttggccaggctggtctcgaactcctgacctgaggtgatctgcctgccttgg

SEQ ID NO: 48040 - DNA, 120 bp, synthetic construct; identical to SEQ ID NO: 33769
  source 1..120: mol_type = other DNA

SEQ ID NO: 48041 - DNA, 120 bp, synthetic construct
  source 1..120: mol_type = other DNA
tggcaggtggaggttgcagtgagctgagattgcaccactgcactccagcctgatgaaagagtgagactctgtctcaaaacaaaaacaaaaacaaaaacaaaaaacaatctttaaaactag

SEQ ID NO: 48042 - DNA, 120 bp, synthetic construct
  source 1..120: mol_type = other DNA
atctaagaggttaaggctctgatgaaacaccctttgctcctggctgggaccatagagctgcactatgaaaaatggggtacagaataaattctggtatgtcatgttggtagcacagaaaaa

SEQ ID NO: 48043 - DNA, 120 bp, synthetic construct
  source 1..120: mol_type = other DNA
gcttcaaagagaataaaatacttaggaatccaacttacaagggacgtgaaggacaaatggaagaacattccatgctcatgggtaggaagaatccaatatcgtgaaaatggccatactgcc

SEQ ID NO: 48044 - DNA, 120 bp, synthetic construct
  source 1..120: mol_type = other DNA
gaacagacacttctcaaaagaagacatttatgcagccaaaagacacattaaaaactgctcaccatcactggccatccgagaaatgcaaatcaaaaccacaatgagataccatcccacacc

SEQ ID NO: 48045 - DNA, 120 bp, synthetic construct; identical to SEQ ID NO: 33770
  source 1..120: mol_type = other DNA

SEQ ID NO: 48046 - DNA, 120 bp, synthetic construct
  source 1..120: mol_type = other DNA
tcatgtggatacattttttttctgaaatatctttttttttgttttgttttgagacagggtctcactctgttgcccaggctgagtgcagtggtgcaatcacggctcactgcagcctcagcc

SEQ ID NO: 48047 - DNA, 120 bp, synthetic construct
  source 1..120: mol_type = other DNA
ggcctctgcagcagcctctgcgcggtccctacgtcctccgccttcaccgcctgcaccagctcctgctccttccccatggcgcggccggggccgcagcgacgcggctgcgctcgtgagctc

SEQ ID NO: 48048 - DNA, 120 bp, synthetic construct
  source 1..120: mol_type = other DNA
gcaatttccctgagaaccgtttacttccagaagattggtggagcttgatctgaaggtatgtaattaacaacccttcttactccagagtctcatgcttgaatcttttcctttgcttcatgg

SEQ ID NO: 48049 - DNA, 120 bp, synthetic construct
  source 1..120: mol_type = other DNA
cttcgctgatttgagcaactcttgtctaaaatcaccctttccttctgaggtctaggaggtttttttgttgttgttttgttttgtttttgaggcagggtcttgctctgtcacccagggtgg

SEQ ID NO: 48050 - DNA, 120 bp, synthetic construct
  source 1..120: mol_type = other DNA
gtagcagtctgaagttaagatgtaacacacatacctcacggtaccttgctgtctttgggttgatagatcataaggataaccctgcctcccccagattgctttgtgtctaaaacttaaagc

SEQ ID NO: 48051 - DNA, 120 bp, synthetic construct
  source 1..120: mol_type = other DNA
attctggccattgggctttgaaaggaagctgcagttaagatcttttggttatctacctccttggatgataaaccaggagattctaaacctccttctcagcctctgatgctaatgagataa

SEQ ID NO: 48052 - DNA, 120 bp, synthetic construct
  source 1..120: mol_type = other DNA
aacatctgagggacagtctctgacacataggggtgttagtatgtggatgaaatcctcactgtttctggttgtggattatatctcgaagctggggtagttttcttcccttttcaatataca

SEQ ID NO: 48053 - DNA, 120 bp, synthetic construct
  source 1..120: mol_type = other DNA
cattcagtaaatgctcacttctgttggaatctgttgtgttttgtttttgtttttgtttttttttgagacgaagtcttgccttgttgcccaggctggagtgcagtggcatgatctcagctc

SEQ ID NO: 48054 - DNA, 120 bp, synthetic construct
  source 1..120: mol_type = other DNA
ggcctcccaaagtgctgagattacaagtgtgagccaccatacccggccacatattagaattgtatcatttcgttttcccttcatccattatttggttacccagtgatacagcttatatgt

SEQ ID NO: 48055 - DNA, 120 bp, synthetic construct
  source 1..120: mol_type = other DNA
ggttcatcttgtatattttctacccagtcctggaatctctcatttctcccaaaaatcctgacttcttttaatgagagatgtcatttcaagaccacaaactcgatgctggcatgctcattg

SEQ ID NO: 48056 - DNA, 120 bp, synthetic construct
  source 1..120: mol_type = other DNA
agcctcccaaagtgttgggattacaggtatgagccactgtgcctgcccagaattatttttatggtcagaagcattccaaacatttcccccctactaaaatagcttttaaatgatcaaatg

SEQ ID NO: 48057 - DNA, 120 bp, synthetic construct
  source 1..120: mol_type = other DNA
gtgaaacccatctctgttaaaaatacaaaaattagctggatgtggtggcatgagcctgtaatcccagctactcaggaggctgaggcaggagaatggcttgaatggaggtggaggttgctt

SEQ ID NO: 48058 - DNA, 120 bp, synthetic construct
  source 1..120: mol_type = other DNA
tttgttttgttttgttttgaggcagagtctcactcactctgtcacccaggctggagtgcagtggtgtgatcttggctcactgaaacctccgcctcccgggttcaagtgattcttctgcct

SEQ ID NO: 48059 - DNA, 120 bp, synthetic construct
  source 1..120: mol_type = other DNA
gtgatattttatacagatagaagcacagggcaaaagtcaaacctggctgccttaccacgtgtcagtacgctaaatatctgtgtttttctgagttcatttctccactgttaagcaagcgct

SEQ ID NO: 48060 - DNA, 120 bp, synthetic construct
  source 1..120: mol_type = other DNA
tcaagtgatctgtgtggggattacaggcgtgagccactgcgcctggtccaggactgagctttatatcagcagagttctagttttgatttttcttttctacaacctacctgtgtgtgatct

SEQ ID NO: 48061 - DNA, 120 bp, synthetic construct
  source 1..120: mol_type = other DNA
ctgttcttatctgtgggatgcaattagagccagctttagggacatataatctatggagcacagggcgtctgatagtaattccacagttcaagtacagagcttttgtttaatgctctgctg

SEQ ID NO: 48062 - DNA, 120 bp, synthetic construct
  source 1..120: mol_type = other DNA
caatcctcccgccttatcctcccaaagtgctgagattacagccatgtaccaccacgcccagccacataccatataatgaaaccaattttaccataggctcattgatataaacaagagttg

SEQ ID NO: 48063 - DNA, 120 bp, synthetic construct
  source 1..120: mol_type = other DNA
tttgctttccttaatgactagggctgtcgagcatcttctcatgtgcttttggcgatttgtatatcttctttagagaaatgtctgtccaagtcctttgttcattttctaattcggttgttt

SEQ ID NO: 48064 - DNA, 120 bp, synthetic construct
  source 1..120: mol_type = other DNA
taccccatttgctttattatttttgtgcatttactcacacttgctctctttctccctttctctccacacacacataatttttttctgaactttttgagagtaagttgcatacatcatggc

SEQ ID NO: 48065 - DNA, 120 bp, synthetic construct
  source 1..120: mol_type = other DNA
cttatctttggtacatgtggtatttcctcataattagattcaagctgtacgttctggccagaatatcacagaagtgatgtgtctttctcagggcatcccatctggaaatacgtcatgtcc

SEQ ID NO: 48066 - DNA, 120 bp, synthetic construct
  source 1..120: mol_type = other DNA
ctggccatgggcacagctttgtttagagagttgcaaatccattcccacctccccgctcccccagaagctctttattattttattttatttatttatttttttgagatggagtctcgctct

SEQ ID NO: 48067 - DNA, 120 bp, synthetic construct
  source 1..120: mol_type = other DNA
agcaacatctcctaatatgtttaaaaattaaatttatttttttctcagccccctgcaacttcagcctcccaggttcaagtgattttcctgcctcagcctcctgagtagctgggattacag

SEQ ID NO: 48068 - DNA, 120 bp, synthetic construct
  source 1..120: mol_type = other DNA
ctgaaggctgacggctgagagtcatagggggaagggggtgatggtgaatggggaggagggtacagaaaagacagggtcttagactttgttttaattttgtatttaattatataaaacatt

SEQ ID NO: 48069 - DNA, 120 bp, synthetic construct
  source 1..120: mol_type = other DNA
gcccaatgaccttttctgtggctgtggattagatatctgtccttccctgcatcaagtctagtttttgttcctcatcctaactgtgtgaaattcctatgtttcatgccctcctttcttttt

SEQ ID NO: 48070 - DNA, 120 bp, synthetic construct
  source 1..120: mol_type = other DNA
tgcttcacccctctgaagaataaagcagtttctttcagctttacaattctgcggttccaacatttagacgtgacttcccgtggagcattaccttctctcatggtgaggaggaatttatag

SEQ ID NO: 48071 - DNA, 120 bp, synthetic construct
  source 1..120: mol_type = other DNA
gtggctgaatttgtctcaggagggccttgagagaagcataattctccagaattagatgcgaaaattatcagtgaagaaatctaagtgcttggggaagatatttggagtctgagtacctct

SEQ ID NO: 48072 - DNA, 120 bp, synthetic construct
  source 1..120: mol_type = other DNA
atatatatacacacactcatatatatattcacatatatataaagatggcggtctcactgtgttgcccaggcttgtcctgaactctcaggctcaaggaattctcctgcctcagccacccaa

SEQ ID NO: 48073 - DNA, 120 bp, synthetic construct
  source 1..120: mol_type = other DNA
tgaggtcaggagttcaagaccagcctggccaacatggtgaaactctacctcaaccaaaaatacaaaaattatcggctgggcgcggtggctcatgcctgtaatcccagcactttgggagga

SEQ ID NO: 48074 - DNA, 120 bp, synthetic construct
  source 1..120: mol_type = other DNA
tgtaaggatgatatcatgtttctgagcctcttatatatccctggggagtcatcagtctgctaaagagtggcaagaatctttgactattcacaattctgaatagaggagagcatgtactgg

SEQ ID NO: 48075 - DNA, 120 bp, synthetic construct
  source 1..120: mol_type = other DNA
agatcatgtctcacttcacagccctgcagtgccctagactggctgaaaaacctaaactctttttcatccaggcctgccaaggtgaagagatacagccttccgtatccatcgaagcagatg

SEQ ID NO: 48076 - DNA, 120 bp, synthetic construct
  source 1..120: mol_type = other DNA
atgttaggtaaagaatcaggtgaaagatgtgctgggcagagggaatagcatgaacaaaagcatgggggccttttatttgttcgtttatttatcactcactcttacgtcctgagcacctat

SEQ ID NO: 48077 - DNA, 120 bp, synthetic construct
  source 1..120: mol_type = other DNA
gtggtgagaacctctaaaagcctctcttgtagctattttgtaatatacaacaccttactgattgatcgattgatttaaatatgggatctcaccatgttgccgaggctggccttgaactcc

SEQ ID NO: 48078 - DNA, 120 bp, synthetic construct
  source 1..120: mol_type = other DNA
cctgatctcaagtgatccacccacctcagcctcccaaagtgctggtattacaggcgtgagccacggcgcccagctgtcactgtggttttgatttgcatttccgtgatgattagtgatgtt

SEQ ID NO: 48079 - DNA, 120 bp, synthetic construct
  source 1..120: mol_type = other DNA
ctaagaccaatggataactctcatcctctaaaagttgagaaaactatgttgttaggcatggaggcatgagttagcagttcttgcaaactttatcggtaaataagaagttgcggacttcta

SEQ ID NO: 48080 - DNA, 120 bp, synthetic construct
  source 1..120: mol_type = other DNA
atgctcagtgagcctaggatattttgggcataaataagtgtaataagtagggggagggatcccactagtgtgtaaaataagagatatgtacctgcattgaggcgttctggttggttaccc

SEQ ID NO: 48081 - DNA, 120 bp, synthetic construct
  source 1..120: mol_type = other DNA
tgtctatttttgcttttgttgtctgtgcttttgaagtcttgttttaaaaatccttgcccaacccaatgtcatgatatgtttgccctgttttcttgcagcagcttcatagtttcaggtttt

SEQ ID NO: 48082 - DNA, 120 bp, synthetic construct
  source 1..120: mol_type = other DNA
attctagcctgggcaacagagcgagatcctgtctctaacaaaaagaggcaatttcaggaagtgatccctgccatgaacaaatcaaaacaggataatggtagtttcttggtggaggtaata

SEQ ID NO: 48083 - DNA, 120 bp, synthetic construct
  source 1..120: mol_type = other DNA
tggtatctgtggcatctgctgcatatttgttgatctaagacctggtacatggtacctggtgtcttttctaagacctggtgtgtggtttctacctcctgactgaaaaaagtttcttctctg

SEQ ID NO: 48084 - DNA, 120 bp, synthetic construct
  source 1..120: mol_type = other DNA
atactgggattataggcacgagccaccacacctggccagaaaactttcattattgaagacttggattgtagccttggttttggatgtctattctgaagacagagtaattggctttggttt

SEQ ID NO: 48085 - DNA, 120 bp, synthetic construct
  source 1..120: mol_type = other DNA
gagccaagatgacacaactgcactccagcttgggcaacagggcgagaccttgtttaaaaaaaaaattcaatattggggttggaacatttcagttgccattgacagaacacccaattcaaa

SEQ ID NO: 48086 - DNA, 120 bp, synthetic construct
  source 1..120: mol_type = other DNA
aacaccgccactttaagttccagttccctttctagcctcatgcatttcaaggaaatcacttcttttctaacagcgagcagccagaaagagaagagagtaaaatacagataagacagctct

SEQ ID NO: 48087 - DNA, 120 bp, synthetic construct
  source 1..120: mol_type = other DNA
gttgtaactgcaacagaaatagcaggacttaagttcctttgtgcgtaattccagctgactttattagcggcaactcagcactagcattacccctgacatactctgagtaagatctaattc

SEQ ID NO: 48088 - DNA, 120 bp, synthetic construct
  source 1..120: mol_type = other DNA
ggggtacacagttggtagagtgtgccctccaagatttcgtgaaacattatgcttgtctgtatttgtgtgtgcatgtctgcgtgaattttgagttcaggaataacaggtgatttgatcaca

SEQ ID NO: 48089 - DNA, 120 bp, synthetic construct
  source 1..120: mol_type = other DNA
tacctcatacaggtaatttttgtgccatacatgattcacagaaccttccagatctgatgctttctgagtgatctggtcaatttgttctcaacctggaattcttgggcccttaggtgtttg

SEQ ID NO: 48090 - DNA, 120 bp, synthetic construct
  source 1..120: mol_type = other DNA
ctcaactgatcctcccacctgaacctcctgagtggcagctggggctacaggcaggtgttttttaaaaatggaactcttttctttttttttttttttgagacggagtcttgctatgttgcc

SEQ ID NO: 48091 - DNA, 120 bp, synthetic construct
  source 1..120: mol_type = other DNA
actctgtgtttgtcacagatttttccccaccctttttcaatgagtgtatcctccatgtccccccaatcatgcatccagtaaactttgtcattactaccatctgtactttcactcacgttt

SEQ ID NO: 48092 - DNA, 120 bp, synthetic construct
  source 1..120: mol_type = other DNA
ccagcctgggtgatagagtgagactctgtctcaaaacaaaaacaaaaacaaaacctgagggatgagccacaaactgggaaatgatatctgccacgttgtataactgataaaggagatata

SEQ ID NO: 48093 - DNA, 120 bp, synthetic construct
  source 1..120: mol_type = other DNA
tcttttatgttgcttataaattaatatgtatattgtacaaatatacagatgcatgggggtgatgagaagtttagagtagtagttgcctgggatgggattgggtcttggggggacaggggg

SEQ ID NO: 48094 - DNA, 120 bp, synthetic construct
  source 1..120: mol_type = other DNA
caaattgctgctggcattcctccactctgaatgcacaattagaagctcagcactctattggataaggctgctatttcaccatttgaagaaccttcaaaaaggtctttagagacagggcat

SEQ ID NO: 48095 - DNA, 120 bp, synthetic construct
  source 1..120: mol_type = other DNA
agtcaaagttccccttttatttctctttgtgctcagtaggatgctgaaatttctggaaaagacaatggaaatcaggggcaggaagagaacagtgtggggtgctaaacagatctcagcaac

SEQ ID NO: 48096 - DNA, 120 bp, synthetic construct; identical to SEQ ID NO: 12324
  source 1..120: mol_type = other DNA

SEQ ID NO: 48097 - DNA, 120 bp, synthetic construct
  source 1..120: mol_type = other DNA
gcgactctcctcctccaaaggaacgcagttcctcgccagcaacggaacaaagctggatggagaatgactttgacaagctgagagaagaaggcttcagatgatcaaattactccgagctac

SEQ ID NO: 48098 - DNA, 120 bp, synthetic construct
  source 1..120: mol_type = other DNA
tgtcaccaccaggcctgccctaaaagagctcctgaaggaagcactcaacatggaaaggaacaaccggtaccagccgctgcaaaatcatgccaaaatgtaaagaccatcgagactaggaag

SEQ ID NO: 48099 - DNA, 120 bp, synthetic construct
  source 1..120: mol_type = other DNA
aacctgctcctgaatgactactgggtacataatgaaatgaaggcagaaataaagatgttctttgaaaccaacgagaacaaagatacaacataccagaatctctgggatgcattcaaagca

SEQ ID NO: 48100 - DNA, 120 bp, synthetic construct
  source 1..120: mol_type = other DNA
cagcatataaacagaaccaaagacaaaaaccacgtgattatctcaatagatgcagaaaagttctttgacaaaattcaacaacgcttcatgctaaaaactctcaataaattaggtattgat

SEQ ID NO: 48101 - DNA, 120 bp, synthetic construct
  source 1..120: mol_type = other DNA
ctgagacaaacaagcaatgcggaaaggattccctatttaataaatggtgctgggaaaactggctagccatatgtagaaagctgaaactggatcccttccttacaccttatacaaaaatta

SEQ ID NO: 48102 - DNA, 120 bp, synthetic construct
  source 1..120: mol_type = other DNA
tacaccatggaatattatgcagccataaaaaatgatgagttcatgtcctttgtagggacatggatgaaattggaaatcatcattctcagtaaactatcacaagaacaaaaaaccaaacac

SEQ ID NO: 48103 - DNA, 120 bp, synthetic construct
  source 1..120: mol_type = other DNA
gagctcaatgtggaaaaaagtggttaaaaactgaaagtggttgccttcatggaatgtgactaggtaatggggagggatagagaggggataaccttttgtataaggtcttctagttctatc

SEQ ID NO: 48104 - DNA, 120 bp, synthetic construct
  source 1..120: mol_type = other DNA
atggcccatccccaatgagccgctgggcacacctcccagacggggtcgtggccgggcagaggggctcctcacttcccagtaggggcggcccggcagaagcgcccctcacctcccagatgg

SEQ ID NO: 48105 - DNA, 120 bp, synthetic construct
  source 1..120: mol_type = other DNA
ggtggctgccgggcggagacgctcctcacttcccagacggggtggttgccagacggaggggctcctcacttctcagacggggcggttgccaggcagagggtttcctcacttctcagacgg

SEQ ID NO: 48106 - DNA, 120 bp, synthetic construct
  source 1..120: mol_type = other DNA
tgaagagcttcattttgagatcaagccccacgatgactgcacagtagagcaaatctatgagattttgaaaatctaccaactcatggaccacagtaacatggactgcttcatctgctgtat

SEQ ID NO: 48107 - DNA, 120 bp, synthetic construct
  source 1..120: mol_type = other DNA
ttttgaattaaagttagtttcattcagtcttttttttttggaaacagagtcttgctttgttgaccttactggagtgcaatggcgtgatcttggctcactgcagccgccacctcctgggtt

SEQ ID NO: 48108 - DNA, 120 bp, synthetic construct
  source 1..120: mol_type = other DNA
atacttcatttctaccaaaattacaaaaattagctgggtatggtggaacgtgcctgtaatcccagctacttgggagcctgaggcaggagaatcacttgaacaaaacacaacagaatactg

SEQ ID NO: 48109 - DNA, 120 bp, synthetic construct
  source 1..120: mol_type = other DNA
tgaatatgtgagacttgccaactagagggaagtttagagagcaaatcaacctcccatcccagtttcctaatatactagaaatgatggtgacacctgtacacatttcaagccctctccata

SEQ ID NO: 48110 - DNA, 120 bp, synthetic construct
  source 1..120: mol_type = other DNA
tgccaccttgtgctgtctgtatggtagtgggtgctgtgattttgttttcatcagaattgtttggagttgggctattcatcatcatcgtcatcactgtcatcattatcctcttcatcagaa

SEQ ID NO: 48111 - DNA, 120 bp, synthetic construct
  source 1..120: mol_type = other DNA
gcatgagccaccacgcctggcttggcccccattcttaagagattctatcttaattaagtatggctctaataatcctctgtgatcatccctttctgtccactgtttgcctgattgtatctg

SEQ ID NO: 48112 - DNA, 120 bp, synthetic construct
  source 1..120: mol_type = other DNA
gccgtcccatcacagtaactaggtcaccattggttaaaggtcttcaaaacagctgtgagcacttagcaaattgaagacttggccccagccttcaagcacttcaaataagcattaaataaa

SEQ ID NO: 48113 - DNA, 120 bp, synthetic construct
  source 1..120: mol_type = other DNA
gaagctatatcaacaaagctgtactgtatgcagtcttatatggccatgactttgttataattacccagtgctatgacattggtctcaagtgtcatggaagcctctgcctttgattcaccc

SEQ ID NO: 48114 - DNA, 120 bp, synthetic construct
  source 1..120: mol_type = other DNA
ttcatctctgatttttattacttagtaattcaggtggcctcagaacgatggtccccacccagaaaataaaagtagttctggggactgggaatggagtgatgaggggcagctctggagctg

SEQ ID NO: 48115 - DNA, 120 bp, synthetic construct
  source 1..120: mol_type = other DNA
tgccccaggggtgggatgattcctaagaaaagcagagaggagctttataagcttcaagaacacaaacttgttagctttaaaagcctaaaccttgaaggactaggagcatacaatttttgc

SEQ ID NO: 48116 - DNA, 120 bp, synthetic construct
  source 1..120: mol_type = other DNA
aatacaagtaactcaccagctacttgggaattcaattaactgtgctttctttgcacagtttttcttcttttgtctggagtctcagcaaacttgagctcctccctatggcctctgtttagc

SEQ ID NO: 48117 - DNA, 120 bp, synthetic construct
  source 1..120: mol_type = other DNA
tgtgtctgtcacaggagagggaaatatggtgccaccttggttatctgtagagatagaaatcatagtacaaagaccacaaggaggaattcctccaaaacaacttcagttactgtttttagc

SEQ ID NO: 48118 - DNA, 120 bp, synthetic construct
  source 1..120: mol_type = other DNA
taaacacacagactctggggccaaatgaccttggccaaggtcgtggatgtacccttagagtgtgacttagagcaagttatttaatgtttctctcctcatctttaaaacagagatgatgaa

SEQ ID NO: 48119 - DNA, 120 bp, synthetic construct
  source 1..120: mol_type = other DNA
agggggaagtactattcagagatgtgtaggctaatagttatctagacaaagcaagtagaggactattctctgcagttatcagaaaagcatcagttctcaaaatcagaagagacccccgca

SEQ ID NO: 48120 - DNA, 120 bp, synthetic construct
  source 1..120: mol_type = other DNA
gccacttccactgtctcctaccctctgaggtctctgcactcctaccaatgttgctgccatcttccttcctcgagtgcttgagatttttaagcccagtgtgaaagcttcaacatcagggaa

SEQ ID NO: 48121 - DNA, 120 bp, synthetic construct
  source 1..120: mol_type = other DNA
gagtttaaagaccttgcacaggttgcttaaccgctcccctttcatctcctcctctgaaagtggagagaacagctgccacatgacttctcaggcatgttgatataacgagatgctatcagc

SEQ ID NO: 48122 - DNA, 120 bp, synthetic construct
  source 1..120: mol_type = other DNA
gtgagctggggacattatttaacttcttcgtccctgtactttatcatctgtacaccggggaagatgataaaaacagcacctaacacgtcgggttgttgcaaaggttaaatatgttgatac

SEQ ID NO: 48123 - DNA, 120 bp, synthetic construct
  source 1..120: mol_type = other DNA
cttcctaccctgggtgaactcaagctcttggccatgaggatcatgtcagaactgctgggggaagaaagtggttggggcagctggatcactgggacatgtggttgttgctgctgtgtaatc

SEQ ID NO: 48124 - DNA, 120 bp, synthetic construct
  source 1..120: mol_type = other DNA
ctacataaagctcctagcacagttcctcaatactgttagttctttaagaagaactgtattattttcctggaggtatgatcttcttccttggggtggtggggttaggtgtttggttggggt

SEQ ID NO: 48125 - DNA, 120 bp, synthetic construct
  source 1..120: mol_type = other DNA
aggctacatattaaatgattccatttatatgaaatgtccagaataggcaaattttagagatagtaggtaattcctgcttgcagaggtgggtgagagagaaatgggagtgactgctaatgg

SEQ ID NO: 48126 - DNA, 120 bp, synthetic construct
  source 1..120: mol_type = other DNA
ccactggtgttgaaaagagtgaaaccagagaaaagttgtccaagttccaaaaacaaagttacccatccatttacagggtcatcttgcactttcaaaataagctgctcattttccccaggt

SEQ ID NO: 48127 - DNA, 120 bp, synthetic construct
  source 1..120: mol_type = other DNA
ttctgcataccaataaaactactgacatcagctggtctaaaaggctgagcaaggagctgacttatggaagaatgcagtttccacatcctcacgatttcatccccttacccagatcaatca

SEQ ID NO: 48128 - DNA, 120 bp, synthetic construct
  source 1..120: mol_type = other DNA
aaagcagctgtcagtctctgtttcaagaatttaccactggcagatagagtcagtgatacaccagattatggaggcttctgaatgctgtggacagatcctgaaactatatccaaatggatg

SEQ ID NO: 48129 - DNA, 120 bp, synthetic construct
  source 1..120: mol_type = other DNA
ctctggagaatttaattttacagatacgcatgtgtgtgcctgtgtgtgccggcttattacacaaatcgacagcaaccagaaggggagtctgaggtttcactgttttacatttgctattat

SEQ ID NO: 48130 - DNA, 120 bp, synthetic construct
  source 1..120: mol_type = other DNA
ctgctataacaacatatcaaaacctgggtagcttataaacaacagaaatttatttctcactgttatggaggctgggaagtcaaggcgccggcagatttggtgtctcgcgaggcctgcttt

SEQ ID NO: 48131 - DNA, 120 bp, synthetic construct
  source 1..120: mol_type = other DNA
agagatgcaaagaaaaatgcggttaaaataagcaggcttcctatttaaggtgcaatggagtgacctagatgcttgtctgggggtctctgaccccatcttgaaagtattttgttgttgcaa

SEQ ID NO: 48132 - DNA, 120 bp, synthetic construct
  source 1..120: mol_type = other DNA
tcctttggatggactgatttctgtttctccctttcaaggaaacaaagatgacactggagaggcctgtcctgccttccccctagttggagacttgaatgaggggctgactaggtctggtta

SEQ ID NO: 48133 - DNA, 120 bp, synthetic construct
  source 1..120: mol_type = other DNA
ggcaaatgtaagtgtggaatcctggattggattctgggccaggaaaaagagacgtttttcttttgcagtaaaggacattgatgggacaactggccaatttgaataatggtagtagacgta

SEQ ID NO: 48134 - DNA, 120 bp, synthetic construct
  source 1..120: mol_type = other DNA
gaccagtaaaacagtgtcaagttgctccctggttctgttcatccatcacttcaaagaattaaacagataaatacttccgtgttaattcctttctcctccttcccagccctcacaccaaat

SEQ ID NO: 48135 - DNA, 120 bp, synthetic construct
  source 1..120: mol_type = other DNA
tccactgtgttactgtgtggctctgatgatcaatgaacagaagctatagtcactgcaggaaattaactaagagcaattttgcctagtgagtagtaccaaagaggcttggattgatccatg

SEQ ID NO: 48136 - DNA, 120 bp, synthetic construct
  source 1..120: mol_type = other DNA
agcaggcctggaatgagaaacctgagggggaaaacaggaaatctcggattttgtaggttaaaactgcctttgttttatcatctggtgtatacattgaaagtcctttagggatatttaggg

SEQ ID NO: 48137 - DNA, 120 bp, synthetic construct
  source 1..120: mol_type = other DNA
attcagaagtaataacatccctgctagtcattactgatcaacaaagccatactactgagttctgtactgctggggtactaactaggttgttgctcttggcaggtctgaaatgttagcaca

SEQ ID NO: 48138 - DNA, 120 bp, synthetic construct
  source 1..120: mol_type = other DNA
agacattttctctctggattaaagcagccacatgttcagtgtgttgtcaaggcagaatggttgctgtttgcctgcacagctgctgaactcaggacctctgtttgtgaaatgatttcagag

SEQ ID NO: 48139 - DNA, 120 bp, synthetic construct
  source 1..120: mol_type = other DNA
gtcgtgtccttaatttaagtcttggaaatgctaagtaaaaatttcccagggatctcttcactgtctacctaccaccatcatggagtgctctcatcttgtatctcagagaatccctctctt

SEQ ID NO: 48140 - DNA, 120 bp, synthetic construct
  source 1..120: mol_type = other DNA
tatcttctccactaactttgtttagtcacagcaccctttggctccagtgtgatttaaaaaagaaagtgatttttcgtctcattgttcactcagacagagagaggaacaggtcagtgggcg

SEQ ID NO: 48141 - DNA, 120 bp, synthetic construct
  source 1..120: mol_type = other DNA
agttgttttttgcatttttgtgaccgcattagtgctttcttgtcccttgcctctcctggtttcagacctcaacaaagcacctccaggtccctctgagattccctaggatgtgttgtacaa

SEQ ID NO: 48142 - DNA, 120 bp, synthetic construct
  source 1..120: mol_type = other DNA
gtgccaaaaaccagctaggcagtttgcatatattgcttctttctctggagtaaagtaggacagagcattgactttgaagtcaggctggtctgagattatagcaagcttctcaattcagta

SEQ ID NO: 48143 - DNA, 120 bp, synthetic construct
  source 1..120: mol_type = other DNA
tggcacactctgggcccacacgtttcccatctcagtgtataagaagataatggtgggtcatcacttttccttggatgttttcataaatatccttacatcctctgacttagtcatctttgt

SEQ ID NO: 48144 - DNA, 120 bp, synthetic construct
  source 1..120: mol_type = other DNA
ttacttgggaaagagatttgtcctcaaaccttagttgtgagggtgatggtaattgtggtggtggtggtggtggttatgaataaatgctataagcctgagagtcaatgagcctgtgattta

SEQ ID NO: 48145 - DNA, 120 bp, synthetic construct
  source 1..120: mol_type = other DNA
ccagtcagacccctttcccactttctttgatgactcttttggcttctggaataggctcctgaacattgagttcccagcctccagcttactaaaaacttatcttagcattttctctccttt

SEQ ID NO: 48146 - DNA, 120 bp, synthetic construct
  source 1..120: mol_type = other DNA
tgaaggacactttagagatggaattatctgaattatgtccaatggcaaaaaaagaaagctcatcagtcaaagaaagagcaggccggacgtagtggctcacgcctgtaatcccagcatttt

SEQ ID NO: 48147 - DNA, 120 bp, synthetic construct
  source 1..120: mol_type = other DNA
tataagctcctagcataggccctagcatatgaaatgtgttaattaaatactattatcatgatgattcgtctaggcgggggaagacgccaagggtactgaaaggtgtgctctttatcctaa

SEQ ID NO: 48148 - DNA, 120 bp, synthetic construct
  source 1..120: mol_type = other DNA
cgatttttcacattctgtagccactgctaagcccatccctaccccaattttccactcatgctttccaattgactgcaaagctctccagctggtgaccataggagctaccaatgccaggga

SEQ ID NO: 48149 - DNA, 120 bp, synthetic construct
  source 1..120: mol_type = other DNA
atatgtaatacatattattcactatattcaccatgctgtacaatatatctcaaagaacaaaatcttatttctcctgtctaattgaggctttgcaccctttgatcattatctctccattcc

SEQ ID NO: 48150 - DNA, 120 bp, synthetic construct
  source 1..120: mol_type = other DNA
ctactgctggccatcttatagctaacttgagaatagtcagcttgaggacacaagcaacatactgaaaacacagttatctgtgatttacagagaaaaatggaggcagtgtctggattcgat

SEQ ID NO: 48151 - DNA, 120 bp, synthetic construct
  source 1..120: mol_type = other DNA
tacatggcccccaacagtttctagggtggcttaaagatcactttcccagtagagtagacagtgcaataatataggtgctccttagttttttgtgaatcctgaaaaacctgtcacagatga

SEQ ID NO: 48152 - DNA, 120 bp, synthetic construct
  source 1..120: mol_type = other DNA
attattgatctttgttcagctcaatttacaggtcttcactatcaaagtgagttctctgagggtaggatcattgtcttcttggtatcccagagccttgtacagaggctgtgtacatcagca

SEQ ID NO: 48153 - DNA, 120 bp, synthetic construct
  source 1..120: mol_type = other DNA
actgcaattgttgaggcacaacttgatagaggccaaaataaggcaaatggaaaagaaatgaagatgaaggagcaggttcacaaaatacctccactctcctataaacccccagggatcaaa

SEQ ID NO: 48154 - DNA, 120 bp, synthetic construct
  source 1..120: mol_type = other DNA
cccaagctggtctcaaactcctgggctcaagcaatcctctgcccttggcctcccaaagtgcccagacattcttaataactcattatcattgtatagtcctaaatagtttcctataattta

SEQ ID NO: 48155 - DNA, 120 bp, synthetic construct
  source 1..120: mol_type = other DNA
cctcccctctcatccttggtgataatgcccaactggggtttaaccttaaatttaaaaagcactgttaccctggaattattactattaatgctgtcttttgttggctgcttcagccgcaag

SEQ ID NO: 48156 - DNA, 120 bp, synthetic construct
  source 1..120: mol_type = other DNA
aagaataaaggaggcctatgtcctcaatatccaaacattgcgctcaattcccccactcctgggcttgtgaagtaggaatgcccattgggtgaatagacctgagatgtcttctcaaggttt

SEQ ID NO: 48157 - DNA, 120 bp, synthetic construct
  source 1..120: mol_type = other DNA
tgtcttaccttcccatgagcaaggtatgaataatccagtttttccacgtctttgtcaggacttcgtagcataaccatttttcattttagtcattttgacgggtatgtagtgctatctcat

SEQ ID NO: 48158 - DNA, 120 bp, synthetic construct
  source 1..120: mol_type = other DNA
acttggggagagtgacatatttactatgttgtcttccaattcatgaatatggtatgtctccatttatttgatcttctttggtttctttcatcagcattgtatagttttcagcctacaagt

SEQ ID NO: 48159 - DNA, 120 bp, synthetic construct
  source 1..120: mol_type = other DNA
ggcaggtaacaaataagcctacccccacccccacccctcattcagctttctcttatttcttttattttgcctgtaactaggcaacacttaagatgaaaggcatcatcagtgtttatgtat

SEQ ID NO: 48160 - DNA, 120 bp, synthetic construct
  source 1..120: mol_type = other DNA
tttgaagatttatgagtgggaggtgctatctcaaatgaactcgattcttttttcccgattccctggttaactaaatacagccaatcactgtcctgtgccatagatggagaaacagagcag

SEQ ID NO: 48161 - DNA, 120 bp, synthetic construct
  source 1..120: mol_type = other DNA
tagtccatcctagtgaatggggttgtctcttatcggttggttatatgcagcctctgggcattggtcagtgctcattctttctagaaacattaggatttgctttaaccattgctgattctt

SEQ ID NO: 48162 - DNA, 120 bp, synthetic construct
  source 1..120: mol_type = other DNA
aacctactgtgttaacaaaaatgtgtaagacacgtgtcagctccaagggccttgtgatttaaggaggtaggaaattcattaaaaaaaaatagctctagggccgggcgcggtggctcacgc

SEQ ID NO: 48163 - DNA, 120 bp, synthetic construct
  source 1..120: mol_type = other DNA
gtgcacattaatttatatgattctttgtctagcaattgtccatgttgtagcctgtaagctctatgtccacgtctgtttttctcccatgctatctccagcacctagcgtaatacctgaaca

SEQ ID NO: 48164 - DNA, 120 bp, synthetic construct
  source 1..120: mol_type = other DNA
aaggcttgaggacaggtgacatctttgggagacgagtatgaaagaaagccacagggtcaagggctggctgtctcagaaggaagagaaagaagcctaccctggaggcagagcggagctatg

SEQ ID NO: 48165 - DNA, 120 bp, synthetic construct
  source 1..120: mol_type = other DNA
agagaggctgttgattgtttttattggcattttggactatcacgttggtcaatgccaaggaaaagacccaagggaagatgctatgtattttttccaccccacaattctgagaggctatat

SEQ ID NO: 48166 - DNA, 120 bp, synthetic construct
  source 1..120: mol_type = other DNA
ctccctcaaactctccttgggaaaaagtttcacatgatactcagtgctttctggagccagagagatcatccctttttaaactaaccttcagtggaggttggtacacctcattttaaaaag

SEQ ID NO: 48167 - DNA, 120 bp, synthetic construct
  source 1..120: mol_type = other DNA
gcttcactcccttcataaatcagaggtgtgtggtcgggctaacagttagatatccgaggccagagtaattgtgtgtgttgtataggtagaagcaggtgagcatgtgagggagtacctgtt

SEQ ID NO: 48168 - DNA, 120 bp, synthetic construct
  source 1..120: mol_type = other DNA
gcgagactctgtctctaaataaataaataaaaaaaaacttatacctttgggaggaggtctacctcaggaatgttatgaataggtgtcctatttgggcttgcgcaataccgggggctttgg

SEQ ID NO: 48169 - DNA, 120 bp, synthetic construct
  source 1..120: mol_type = other DNA
ttcccctctccatccaaccatccagcaaacatttattaaattccaagtgccaagcaacagcccattggctcgcattagtcatttaggttcaacacatagtctagttgcacaatttaatgc

SEQ ID NO: 48170 - DNA, 120 bp, synthetic construct
  source 1..120: mol_type = other DNA
tccttttcaccttctgccatgagtggaagcagcctgtggccctagccagatacagatacccaatcttcaactttttcagacatcagaattgtgagccaaataaaccttttattctttata

SEQ ID NO: 48171 - DNA, 120 bp, synthetic construct
  source 1..120: mol_type = other DNA
aacatcataacatcttaatatcccacttccatctaccttcagggttcttagatttgccatctcttttggggaaagggctaatgtgccacagcaaccaaatagacgcatgtcttctctttc

SEQ ID NO: 48172 - DNA, 120 bp, synthetic construct; identical to SEQ ID NO: 7961
  source 1..120: mol_type = other DNA

SEQ ID NO: 48173 - DNA, 120 bp, synthetic construct; identical to SEQ ID NO: 7962
  source 1..120: mol_type = other DNA

SEQ ID NO: 48174 - DNA, 120 bp, synthetic construct
  source 1..120: mol_type = other DNA
ggtcctaaaactgagctctgaggtccttgcatgtctccttcctcttttccttctatagacgatttaagtggccataaaattgtttctatgtaagtgtgaagctcacccggaaaaagcttt

SEQ ID NO: 48175 - DNA, 120 bp, synthetic construct
  source 1..120: mol_type = other DNA
acccagctcccaaggcctgatttcctcagtttatcaactgatggggttagctgtattgtgtttagaatcctgatgaaatagtgagtgtgggctaaaagaagctagcatttgttaagtatc

SEQ ID NO: 48176 - DNA, 120 bp, synthetic construct
  source 1..120: mol_type = other DNA
ttctaaatcatatatgctgctttgttgatgaagaatacccaaggaatcagaactgccagctgtttaagtcagggttacagctatgaaatgaggggttcagagcaacctagatgactccca

SEQ ID NO: 48177 - DNA, 120 bp, synthetic construct
  source 1..120: mol_type = other DNA
ggccctagtgtgaggagctatgagtttctaattcctagaaattcctcaggtgtttcagcctggggatggcaactcctcactggagagggaaatcaacttaataggttgagatcaattttt

SEQ ID NO: 48178 - DNA, 120 bp, synthetic construct
  source 1..120: mol_type = other DNA
accgtgtaggtgttacgtacaactgccttcatctgtagtagctgtgtgaccttggacaacttagcctctctgcttcagtttccacatctataaaatggaattggtaactgtacctactta

SEQ ID NO: 48179 - DNA, 120 bp, synthetic construct
  source 1..120: mol_type = other DNA
gtcttaataactatccctgctttctcttttcttgcaacccacagagagaactgaaattccacattcagcacccaaggttggagatatacttttgatgtatttgggatagttttgctggat

SEQ ID NO: 48180 - DNA, 120 bp, synthetic construct
  source 1..120: mol_type = other DNA
acgtttggtcctcttcatttgaagagttaggacccacccctcattgttcacacatcccagctgtgtgacaagggcatctgattcacgtgaggccaaaataaagcagagttcagtatatat

SEQ ID NO: 48181 - DNA, 120 bp, synthetic construct
  source 1..120: mol_type = other DNA
ctgccattgtcatcatggcctgctctcaatgagctgttgggtacacctcccagacggggtggtggctgggcagaggggctcctcacttcccagtaggggcagccgggcagaggcactcct

SEQ ID NO: 48182 - DNA, 120 bp, synthetic construct; identical to SEQ ID NO: 24604
  source 1..120: mol_type = other DNA

SEQ ID NO: 48183 - DNA, 120 bp, synthetic construct; identical to SEQ ID NO: 24605
  source 1..120: mol_type = other DNA

SEQ ID NO: 48184 - DNA, 120 bp, synthetic construct
  source 1..120: mol_type = other DNA
atcgccacactgacttccacaatggttgaactagtttacagtcccaccaacagtgtaaaagtgttcctatttctccacatcctctccagcacctgttgtttcctgactttttaatgatcg

SEQ ID NO: 48185 - DNA, 120 bp, synthetic construct; identical to SEQ ID NO: 26917
  source 1..120: mol_type = other DNA

SEQ ID NO: 48186 - DNA, 120 bp, synthetic construct
  source 1..120: mol_type = other DNA
attgtggttttgatttgcatttctctgatggccagtgatgatgagcattttttcatgtgtcttttggctgcataaatgtcttcttttgagaagtgtctgttcatgtccttcgcccacttt

SEQ ID NO: 48187 - DNA, 120 bp, synthetic construct; identical to SEQ ID NO: 29418
  source 1..120: mol_type = other DNA

SEQ ID NO: 48188 - DNA, 120 bp, synthetic construct; identical to SEQ ID NO: 29419
  source 1..120: mol_type = other DNA

SEQ ID NO: 48189 - DNA, 120 bp, synthetic construct
  source 1..120: mol_type = other DNA
ttgttgttgttttgttttttgtgttttttttttttgaggcagaatctcattctgtcgcccaggctggagtgcagtagtgcaatcttggctcactgcaacctctgcctcccaggttcaagt

SEQ ID NO: 48190 - DNA, 120 bp, synthetic construct
  source 1..120: mol_type = other DNA
aagctttaaaaaaaaaatgctgaggctggaggatcacttgaggctgggagttcgagactagcctgaacaacatagtgagacacccctctctacaaaaagtaaaaaaaaaggccgggtgtg

SEQ ID NO: 48191 - DNA, 120 bp, synthetic construct; identical to SEQ ID NO: 29420
  source 1..120: mol_type = other DNA

SEQ ID NO: 48192 - DNA, 120 bp, synthetic construct; identical to SEQ ID NO: 29421
  source 1..120: mol_type = other DNA

SEQ ID NO: 48193 - DNA, 120 bp, synthetic construct; identical to SEQ ID NO: 29422
  source 1..120: mol_type = other DNA

SEQ ID NO: 48194 - DNA, 120 bp, synthetic construct; identical to SEQ ID NO: 29423
  source 1..120: mol_type = other DNA

SEQ ID NO: 48195 - DNA, 120 bp, synthetic construct; identical to SEQ ID NO: 29424
  source 1..120: mol_type = other DNA

SEQ ID NO: 48196 - DNA, 120 bp, synthetic construct; identical to SEQ ID NO: 29425
  source 1..120: mol_type = other DNA

SEQ ID NO: 48197 - DNA, 120 bp, synthetic construct; identical to SEQ ID NO: 29426
  source 1..120: mol_type = other DNA

SEQ ID NO: 48198 - DNA, 120 bp, synthetic construct; identical to SEQ ID NO: 29427
  source 1..120: mol_type = other DNA

SEQ ID NO: 48199 - DNA, 120 bp, synthetic construct; identical to SEQ ID NO: 29428
  source 1..120: mol_type = other DNA

SEQ ID NO: 48200 - DNA, 120 bp, synthetic construct
  source 1..120: mol_type = other DNA
tgtgttgtccagactggtcttgaactcctggcctcaagcaatcctctcacctcggcctcccaaagtgctaggattacaggtgtgagctaccatgcctggctaatttttgtatttttagta

SEQ ID NO: 48201 - DNA, 120 bp, synthetic construct; identical to SEQ ID NO: 29429
  source 1..120: mol_type = other DNA

SEQ ID NO: 48202 - DNA, 120 bp, synthetic construct; identical to SEQ ID NO: 29430
  source 1..120: mol_type = other DNA

SEQ ID NO: 48203 - DNA, 120 bp, synthetic construct
  source 1..120: mol_type = other DNA
tattttaggtaaccatggtagttttgttttgttttgttttgcttttgtttttggagatggagttacactctgttgcccaggctggagtgcagtggcacgatctcggctcactgcaacctc

SEQ ID NO: 48204 - DNA, 120 bp, synthetic construct; identical to SEQ ID NO: 29431
  source 1..120: mol_type = other DNA

SEQ ID NO: 48205 - DNA, 120 bp, synthetic construct; identical to SEQ ID NO: 29432
  source 1..120: mol_type = other DNA

SEQ ID NO: 48206 - DNA, 120 bp, synthetic construct
  source 1..120: mol_type = other DNA
ctaatttttttgtatttttagtagagacagagtttcactgtgtgagccaggatggtctcgatctcctgaccttgtgatctacccgcctcagcttcccgaagtgctaggattacaggcatg

SEQ ID NO: 48207 - DNA, 120 bp, synthetic construct; identical to SEQ ID NO: 29433
  source 1..120: mol_type = other DNA

SEQ ID NO: 48208 - DNA, 120 bp, synthetic construct; identical to SEQ ID NO: 29434
  source 1..120: mol_type = other DNA

SEQ ID NO: 48209 - DNA, 120 bp, synthetic construct; identical to SEQ ID NO: 29435
  source 1..120: mol_type = other DNA

SEQ ID NO: 48210 - DNA, 120 bp, synthetic construct
  source 1..120: mol_type = other DNA
agtctttctccagtcgcacctcctctgcacgctgaccgccatgtcttgtcctctttttctttttttttgagacagagtcttgctctgtcatcccggctgctggagtgcaatggcgcaatc

SEQ ID NO: 48211 - DNA, 120 bp, synthetic construct
  source 1..120: mol_type = other DNA
aggaggatcactggagcccaggagttggaggctgcagtgagctatgctcacaccattgcactctagcctggttgacaaagtgagacccagtctcaagaaaaaaaaaaaaaagtgggaaga

SEQ ID NO: 48212 - DNA, 120 bp, synthetic construct; identical to SEQ ID NO: 29436
  source 1..120: mol_type = other DNA

SEQ ID NO: 48213 - DNA, 120 bp, synthetic construct; identical to SEQ ID NO: 29437
  source 1..120: mol_type = other DNA

SEQ ID NO: 48214 - DNA, 120 bp, synthetic construct; identical to SEQ ID NO: 29438
  source 1..120: mol_type = other DNA

SEQ ID NO: 48215 - DNA, 120 bp, synthetic construct
  source 1..120: mol_type = other DNA
gggacacgcagtggggtttcctcggcgttgctttggttttgcccttaaaacgggtccaagtgtcctcccagagcctccccggtcttccggtctttctgcccactcctccctcaaagttgg

SEQ ID NO: 48216 - DNA, 120 bp, synthetic construct; identical to SEQ ID NO: 7053
  source 1..120: mol_type = other DNA

SEQ ID NO: 48217 - DNA, 120 bp, synthetic construct; identical to SEQ ID NO: 7054
  source 1..120: mol_type = other DNA

SEQ ID NO: 48218 - DNA, 120 bp, synthetic construct; identical to SEQ ID NO: 7055
  source 1..120: mol_type = other DNA

SEQ ID NO: 48219 - DNA, 120 bp, synthetic construct; identical to SEQ ID NO: 7056
  source 1..120: mol_type = other DNA

SEQ ID NO: 48220 - DNA, 120 bp, synthetic construct
  source 1..120: mol_type = other DNA
cggcctcccaaactgctgggattacaagcgtgagccactgcacatggcccaattcagtgtttttaaatatattatattgttgaactattcaagactatccaattccagaacatttccatc

SEQ ID NO: 48221 - DNA, 120 bp, synthetic construct; identical to SEQ ID NO: 15221
  source 1..120: mol_type = other DNA

SEQ ID NO: 48222 - DNA, 120 bp, synthetic construct; identical to SEQ ID NO: 15222
  source 1..120: mol_type = other DNA

SEQ ID NO: 48223 - DNA, 120 bp, synthetic construct; identical to SEQ ID NO: 15223
  source 1..120: mol_type = other DNA

SEQ ID NO: 48224 - DNA, 120 bp, synthetic construct; identical to SEQ ID NO: 15224
  source 1..120: mol_type = other DNA

SEQ ID NO: 48225 - DNA, 120 bp, synthetic construct; identical to SEQ ID NO: 15225
  source 1..120: mol_type = other DNA

SEQ ID NO: 48226 - DNA, 120 bp, synthetic construct; identical to SEQ ID NO: 15226
  source 1..120: mol_type = other DNA

SEQ ID NO: 48227 - DNA, 120 bp, synthetic construct; identical to SEQ ID NO: 15227
  source 1..120: mol_type = other DNA

SEQ ID NO: 48228 - DNA, 120 bp, synthetic construct
  source 1..120: mol_type = other DNA
catgttggtcaggctggtctcgaactcctgacctcatgacccatccccctcggcttcccaaagtgctgggattacaggcgtgagccaccgcacccggccaatttgtttcatattctatgt

SEQ ID NO: 48229 - DNA, 120 bp, synthetic construct; identical to SEQ ID NO: 15228
  source 1..120: mol_type = other DNA

SEQ ID NO: 48230 - DNA, 120 bp, synthetic construct
  source 1..120: mol_type = other DNA
tcacattttaacatacatgaaattaggatgcttttttttttttctttgagacacagtctcgctctgttgccaagatggagtgcagtggtgcaatctcagctcactgcaacctccgcctcc

SEQ ID NO: 48231 - DNA, 120 bp, synthetic construct; identical to SEQ ID NO: 15229
  source 1..120: mol_type = other DNA

SEQ ID NO: 48232 - DNA, 120 bp, synthetic construct
  source 1..120: mol_type = other DNA
ttgttttcaaagaacatctttatttctgcattcatttcgttatgtagtcattcaggagcaggttatgtagtcattcaggagcaggttgttcagtttccatgtagttgagcggttttgagt

SEQ ID NO: 48233 - DNA, 120 bp, synthetic construct
  source 1..120: mol_type = other DNA
ttactggttgttcctttccatgtttagtgcttccttcaggagctcttttaggggaggcctggtggtgacaaaatctctcagcatttgcttgtctgtaaagtattttatttctccttcact

SEQ ID NO: 48234 - DNA, 120 bp, synthetic construct; identical to SEQ ID NO: 14599
  source 1..120: mol_type = other DNA

SEQ ID NO: 48235 - DNA, 120 bp, synthetic construct; identical to SEQ ID NO: 14600
  source 1..120: mol_type = other DNA

SEQ ID NO: 48236 - DNA, 120 bp, synthetic construct; identical to SEQ ID NO: 14601
  source 1..120: mol_type = other DNA

SEQ ID NO: 48237 - DNA, 120 bp, synthetic construct; identical to SEQ ID NO: 14602
  source 1..120: mol_type = other DNA

SEQ ID NO: 48238 - DNA, 120 bp, synthetic construct
  source 1..120: mol_type = other DNA
gtttacagtcccaccaacagtgtaaaagtgttcctatttctccacatcctctccagcacctgttgtttttaatgattgccattctaactggtgtgagatggtatctcatagtggttttga

SEQ ID NO: 48239 - DNA, 120 bp, synthetic construct
  source 1..120: mol_type = other DNA
atttggctctctgtttgtctgttgttggtgtataagaatgcttgtgatttttgtacattgattttgtatcctgagactttgctgaagttgcttatcatcttaaggagattttgggctgag

SEQ ID NO: 48240 - DNA, 120 bp, synthetic construct
  source 1..120: mol_type = other DNA
atagaggtgtttgtagtattctctgatggtagtttgtatttctgtgggatcggtggtgatatcccctttatcattttttattgtgtctatttgattcttctctctttttttctttattag

SEQ ID NO: 48241 - DNA, 120 bp, synthetic construct
  source 1..120: mol_type = other DNA
attgcaacccttgcctttttttgttttccatttgcttggtagatcttcctccatctttttattttgagcctatgtgtgtctctgcacgtgagatgggtttcctgaatacagcacactgat

SEQ ID NO: 48242 - DNA, 120 bp, synthetic construct
  source 1..120: mol_type = other DNA
tattcttttttctctaaacttcccttctcgcttcatttcattcatttcatcttccattgctgataccctttcttccagttgatcgcatcagctcctgaggcttctgcattcttcacgtag

SEQ ID NO: 48243 - DNA, 120 bp, synthetic construct
  source 1..120: mol_type = other DNA
aatgcctcgccctacttcggctcgcgcacggtgcgcgcaccaactggcctgcgcccactgtctggcactccctagtgagatgaacccggtacctcagatggaaatgcagaaatcacccgt

SEQ ID NO: 48244 - DNA, 120 bp, synthetic construct
  source 1..120: mol_type = other DNA
ggctgggaagggtagtggggcattatgtagggggagaatggcgatggttaatgggtacaaaaatatcattacatagaatgaataagatctagtatttgacagcacaacagagtgactaca

SEQ ID NO: 48245 - DNA, 120 bp, synthetic construct; identical to SEQ ID NO: 9678
  source 1..120: mol_type = other DNA

SEQ ID NO: 48246 - DNA, 120 bp, synthetic construct; identical to SEQ ID NO: 9679
  source 1..120: mol_type = other DNA

SEQ ID NO: 48247 - DNA, 120 bp, synthetic construct; identical to SEQ ID NO: 9680
  source 1..120: mol_type = other DNA

SEQ ID NO: 48248 - DNA, 120 bp, synthetic construct
  source 1..120: mol_type = other DNA
aaaacccttcaaaaaattaatgaatccaggagctggttttttgaaaagaccaacaaaatcgatagaccgctagcaagactaataaagaagaaaagagagaagaatcaaatagatgcaata

SEQ ID NO: 48249 - DNA, 120 bp, synthetic construct
  source 1..120: mol_type = other DNA
ggaagttctggccagggcaattaggcaggagaaggaaataaagggtattaaattgggaaaagaggaagtcaaattgtccctgtttgcagacgacatgattgtatatctagaaaaccccat

SEQ ID NO: 48250 - DNA, 120 bp, synthetic construct; identical to SEQ ID NO: 9681
  source 1..120: mol_type = other DNA

SEQ ID NO: 48251 - DNA, 120 bp, synthetic construct
  source 1..120: mol_type = other DNA
atgatttataatcctttgggttatatacccactaatgggattgctgggtcaaatggtatttctggttctagatccttgaggaattgccacactgtcttccacaatggttgaactaattta

SEQ ID NO: 48252 - DNA, 120 bp, synthetic construct
  source 1..120: mol_type = other DNA
aatagcctaatgagatccattttacacataccagattgataaatatattaaagttttagaaagtcattggtgagactgtcaacattagatcaacgagacagaaagtcaacaaggataccc

SEQ ID NO: 48253 - DNA, 120 bp, synthetic construct
  source 1..120: mol_type = other DNA
gcaataataagtagcttaccaaccaaaaagagtccaggaccagatggattcacagccgaattctacctgaggtacaaggaggaactggtaccattccttctgaaactattccaatcagta

SEQ ID NO: 48254 - DNA, 120 bp, synthetic construct
  source 1..120: mol_type = other DNA
tgaaggacctcttcaaggagaactacaaaccactgctcaatgaaataaaagaggatacaaagaaatggaagaacattccatgttcatgggtaggaagaatcaatatcgtgaaaatggcca

SEQ ID NO: 48255 - DNA, 120 bp, synthetic construct
  source 1..120: mol_type = other DNA
catctcacaccagttagaatgccaatcattaaaaagtcaggaaacaacaggtgctggagaggatgtggagaaataggaacacttttacactgttggtgggactgtaaactagttcaacca

SEQ ID NO: 48256 - DNA, 120 bp, synthetic construct; identical to SEQ ID NO: 9682
  source 1..120: mol_type = other DNA

SEQ ID NO: 48257 - DNA, 120 bp, synthetic construct; identical to SEQ ID NO: 9683
  source 1..120: mol_type = other DNA

SEQ ID NO: 48258 - DNA, 120 bp, synthetic construct
  source 1..120: mol_type = other DNA
atgttcatcaaggatattggtctaaaattctcttttttggttatgtctctgcccgcctttggtatcagaatgatgctggcctcataaagtgagttagggaggattctctctttttctatt

SEQ ID NO: 48259 - DNA, 120 bp, synthetic construct
  source 1..120: mol_type = other DNA
aacagacagagagccaaatcatgagtgaactcacattcacaattgcttcaaagagaataaaatacctaggaatccaacttacaagggacgtgaaggacctcttcaagtagaactacaaac

SEQ ID NO: 48260 - DNA, 120 bp, synthetic construct
  source 1..120: mol_type = other DNA
aaaaacaaacaaccccatcaaaaagtgggcgaaggacatgaacaggcacttctcaaaagaagacatttatgcagccaaaaaacacatgaaaaaatgctcaccatcactggccatcagaga

SEQ ID NO: 48261 - DNA, 120 bp, synthetic construct; identical to SEQ ID NO: 9684
  source 1..120: mol_type = other DNA

SEQ ID NO: 48262 - DNA, 120 bp, synthetic construct; identical to SEQ ID NO: 9685
  source 1..120: mol_type = other DNA

SEQ ID NO: 48263 - DNA, 120 bp, synthetic construct
  source 1..120: mol_type = other DNA
aatgcgtggccacattgataggaaactgaggggattatttataggccaggaattccgaaaaagtacagattcattagatcctattggagttctctaaagacactctatcccccctagggt

SEQ ID NO: 48264 - DNA, 120 bp, synthetic construct
  source 1..120: mol_type = other DNA
ggctggcatgaaagaatttctgagagtagtattaataaatgcaaataataaaatgaggtaatacgttagaaaggaggggggggcactgttttagtgggggtcgttggagaaggtcactct

SEQ ID NO: 48265 - DNA, 120 bp, synthetic construct
  source 1..120: mol_type = other DNA
gtgtgaggcatgaaccaccctgtgcttggccccgttagcctattccttttttttttttttttttttattgatcattcttgggtgtttctaggacaatagtggagggaaggtcagcagata

SEQ ID NO: 48266 - DNA, 120 bp, synthetic construct; identical to SEQ ID NO: 29960
  source 1..120: mol_type = other DNA

SEQ ID NO: 48267 - DNA, 120 bp, synthetic construct; identical to SEQ ID NO: 29961
  source 1..120: mol_type = other DNA

SEQ ID NO: 48268 - DNA, 120 bp, synthetic construct
  source 1..120: mol_type = other DNA
tcccaagagccacagtacataaacagatatacagtttatctattgttttaacatttcgtgagggagatgaacagcttggttaaaaatatctgaaaggggccgggtgctgtggctcaaggc

SEQ ID NO: 48269 - DNA, 120 bp, synthetic construct
  source 1..120: mol_type = other DNA
aagtggtgccgcttgggggaacctgcgcacgggatgtgccgtaagcgtcagccggcatgtgcctccacccgctccacacacacacagaatgcctatgcccccccgccacacacacacaat

SEQ ID NO: 48270 - DNA, 120 bp, synthetic construct
  source 1..120: mol_type = other DNA
atccgtccacctcggcctcccaaagtgctgagattataggcatgatccattgcccccagcctgttgaggtttttttttaaatcaggtatataatcaggtatatgctttgcaaatattttc

SEQ ID NO: 48271 - DNA, 120 bp, synthetic construct
  source 1..120: mol_type = other DNA
tttgaccttttaaatatttatttattttattttattttatttatttatttatttttaattgatcattcttgggtgtttctcgcagagggggagttggcagggtcataggacaatagtgga

SEQ ID NO: 48272 - DNA, 120 bp, synthetic construct
  source 1..120: mol_type = other DNA
ggtggagacactcctcacttcccagacggggtggctgccgggcgtaggggctcctcacttctcagacggggcggctgccgggcggaggggctcctcacttctcagacggggcggttgcca

SEQ ID NO: 48273 - DNA, 120 bp, synthetic construct
  source 1..120: mol_type = other DNA
cagcgcgcgcctgcaatcgcaggcactcggcaggctgaggcagtagaatcaggcagggaggttgcagtgagccgagatggcagcagtacagtccagcttcggctgggcatcagagggaga

SEQ ID NO: 48274 - DNA, 120 bp, synthetic construct; identical to SEQ ID NO: 17105
  source 1..120: mol_type = other DNA

SEQ ID NO: 48275 - DNA, 120 bp, synthetic construct; identical to SEQ ID NO: 17106
  source 1..120: mol_type = other DNA

SEQ ID NO: 48276 - DNA, 120 bp, synthetic construct; identical to SEQ ID NO: 17107
  source 1..120: mol_type = other DNA

SEQ ID NO: 48277 - DNA, 120 bp, synthetic construct; identical to SEQ ID NO: 17108
  source 1..120: mol_type = other DNA

SEQ ID NO: 48278 - DNA, 120 bp, synthetic construct; identical to SEQ ID NO: 17109
  source 1..120: mol_type = other DNA

SEQ ID NO: 48279 - DNA, 120 bp, synthetic construct
  source 1..120: mol_type = other DNA
agaatcacttgaacccgggaggcagagttgcaatgagccaaaatggtgccactgcactccagcgtgggtgacagagattctgtctgaaaaaaaagaaaagaaaacgaaggaacgaaaacc

SEQ ID NO: 48280 - DNA, 120 bp, synthetic construct
  source 1..120: mol_type = other DNA
tggcacctgtcttccggatctgttcacccctcgcctggaccggcaccggcacagagggtcagagtgttggcacctgtcttccggatctgttcacccctcccctggaccggcaccgccaca

SEQ ID NO: 48281 - DNA, 120 bp, synthetic construct
  source 1..120: mol_type = other DNA
ctgtggccttgggctggtcatttaacctctctgacccttgctgtatctgcaaactagcgctgtggagcctctggccgagacagactccggggagctccgggtgaatcagctcagtccttt

SEQ ID NO: 48282 - DNA, 120 bp, synthetic construct
  source 1..120: mol_type = other DNA
tggccgggggacaccagggcctgaccagacgtcatggacaggggccgtaggcctggtgggggcaagggtggggatgctgcggcgtttctctgcctgaccctgatcctcagttaagcaagg

SEQ ID NO: 48283 - DNA, 120 bp, synthetic construct; identical to SEQ ID NO: 17093
  source 1..120: mol_type = other DNA

SEQ ID NO: 48284 - DNA, 120 bp, synthetic construct; identical to SEQ ID NO: 17094
  source 1..120: mol_type = other DNA

SEQ ID NO: 48285 - DNA, 120 bp, synthetic construct; identical to SEQ ID NO: 17095
  source 1..120: mol_type = other DNA

SEQ ID NO: 48286 - DNA, 120 bp, synthetic construct; identical to SEQ ID NO: 17096
  source 1..120: mol_type = other DNA

SEQ ID NO: 48287 - DNA, 120 bp, synthetic construct; identical to SEQ ID NO: 17097
  source 1..120: mol_type = other DNA

SEQ ID NO: 48288 - DNA, 120 bp, synthetic construct; identical to SEQ ID NO: 17098
  source 1..120: mol_type = other DNA

SEQ ID NO: 48289 - DNA, 120 bp, synthetic construct; identical to SEQ ID NO: 17099
  source 1..120: mol_type = other DNA

SEQ ID NO: 48290 - DNA, 120 bp, synthetic construct; identical to SEQ ID NO: 17100
  source 1..120: mol_type = other DNA

SEQ ID NO: 48291 - DNA, 120 bp, synthetic construct; identical to SEQ ID NO: 17101
  source 1..120: mol_type = other DNA

SEQ ID NO: 48292 - DNA, 120 bp, synthetic construct
  source 1..120: mol_type = other DNA
aatcacttgaacccgggaagcagaggttgctgtgagctgagattgcgccactgcactccagcctgggcgacagagtgagattgtgtctgggggaaaaaaagaaagaaagaaaagaaaaat

SEQ ID NO: 48293 - DNA, 120 bp, synthetic construct; identical to SEQ ID NO: 17102
  source 1..120: mol_type = other DNA

SEQ ID NO: 48294 - DNA, 120 bp, synthetic construct; identical to SEQ ID NO: 16532
  source 1..120: mol_type = other DNA

SEQ ID NO: 48295 - DNA, 120 bp, synthetic construct
  source 1..120: mol_type = other DNA
gactttttttttaatggtgttgatgtttcagaaatactctgctgtttgtttctgtcggaataaaaaaggctggacaaggtggcttgcacctgtaatcccagcactttgggaggccaagac

SEQ ID NO: 48296 - DNA, 120 bp, synthetic construct
  source 1..120: mol_type = other DNA
agaatacatttaaaaatcaagcctatttggtggttagtgtatgaaataaattgtgtgtgtgtgtgtgtgtctctgtgtgtgtctctgtgtgtgtgtgtgatggagtctcattctgtcgcc

SEQ ID NO: 48297 - DNA, 120 bp, synthetic construct; identical to SEQ ID NO: 12394
  source 1..120: mol_type = other DNA

SEQ ID NO: 48298 - DNA, 120 bp, synthetic construct; identical to SEQ ID NO: 24513
  source 1..120: mol_type = other DNA

SEQ ID NO: 48299 - DNA, 120 bp, synthetic construct; identical to SEQ ID NO: 24514
  source 1..120: mol_type = other DNA

SEQ ID NO: 48300 - DNA, 120 bp, synthetic construct
  source 1..120: mol_type = other DNA
aacgacgagctcttccgggcgggctccagactcaggtgagccttcgccccagaacaaagtcctctggggtgaggcccaggtcttgctcccagcccctcctcccccagacccaggaactta

SEQ ID NO: 48301 - DNA, 120 bp, synthetic construct
  source 1..120: mol_type = other DNA
gttagctattactattattctctgattcaaagttttctagatgtgtgcacatttgtgatcagaacttggcctggtctggctgggtacggtggctcacacctgtaatcccagctctttggg

SEQ ID NO: 48302 - DNA, 120 bp, synthetic construct
  source 1..120: mol_type = other DNA
gggcacgtgtccatcttcgagttcgacgtcttcaccaggctctttcaggtcagggaaggccaaggctgggagctagacttgggtccaggaggaagtagagggctgaatcctggattcctg

SEQ ID NO: 48303 - DNA, 120 bp, synthetic construct
  source 1..120: mol_type = other DNA
gtcccaaactcctgagttctggagaaagaagagcttggggtcttgtaaaagggatatgcctgaggcccaccatgggtgtgaaggaggtggttggatcctcgagccctagggactacttag

SEQ ID NO: 48304 - DNA, 120 bp, synthetic construct
  source 1..120: mol_type = other DNA
tatggccaacatggtgaaacctcatctctactaaaaaaatacaaaaattagctgggcatggtggcacacaccttcatcccagctacttgggaggctgaagcagtagaatcacttgatcct

SEQ ID NO: 48305 - DNA, 120 bp, synthetic construct; identical to SEQ ID NO: 23067
  source 1..120: mol_type = other DNA

SEQ ID NO: 48306 - DNA, 120 bp, synthetic construct; identical to SEQ ID NO: 25962
  source 1..120: mol_type = other DNA

SEQ ID NO: 48307 - DNA, 120 bp, synthetic construct; identical to SEQ ID NO: 25963
  source 1..120: mol_type = other DNA

SEQ ID NO: 48308 - DNA, 120 bp, synthetic construct; identical to SEQ ID NO: 22830
  source 1..120: mol_type = other DNA

SEQ ID NO: 48309 - DNA, 120 bp, synthetic construct
  source 1..120: mol_type = other DNA
tagcctagtcatgttatgtaattacatttcttacagagctccaatattttctcccctttttttgagacaaggtcttgctctgtcacccaggctggagtgcagtggtataatcacagctca

SEQ ID NO: 48310 - DNA, 120 bp, synthetic construct; identical to SEQ ID NO: 22831
  source 1..120: mol_type = other DNA

SEQ ID NO: 48311 - DNA, 120 bp, synthetic construct
  source 1..120: mol_type = other DNA
tggtgaaaccctgtctccactaaaaatattaaaaattagacgaggcgcagtggctcacacctgtcatcccagcactttgggaggccgaggtgggcagatcacttgaggtcaggaattcga

SEQ ID NO: 48312 - DNA, 120 bp, synthetic construct; identical to SEQ ID NO: 22832
  source 1..120: mol_type = other DNA

SEQ ID NO: 48313 - DNA, 120 bp, synthetic construct; identical to SEQ ID NO: 22833
  source 1..120: mol_type = other DNA

SEQ ID NO: 48314 - DNA, 120 bp, synthetic construct
  source 1..120: mol_type = other DNA
ctgcaacctccacctcctgggttcaagtgattctcgtgcctcagactcccgagtatctgggacttcaggtgcacatcaccacacccagctaatttttgtatttttagtagagatggggtt

SEQ ID NO: 48315 - DNA, 120 bp, synthetic construct; identical to SEQ ID NO: 22834
  source 1..120: mol_type = other DNA

SEQ ID NO: 48316 - DNA, 120 bp, synthetic construct; identical to SEQ ID NO: 22835
  source 1..120: mol_type = other DNA

SEQ ID NO: 48317 - DNA, 120 bp, synthetic construct; identical to SEQ ID NO: 22836
  source 1..120: mol_type = other DNA

SEQ ID NO: 48318 - DNA, 120 bp, synthetic construct; identical to SEQ ID NO: 22837
  source 1..120: mol_type = other DNA

SEQ ID NO: 48319 - DNA, 120 bp, synthetic construct; identical to SEQ ID NO: 22838
  source 1..120: mol_type = other DNA

SEQ ID NO: 48320 - DNA, 120 bp, synthetic construct; identical to SEQ ID NO: 22839
  source 1..120: mol_type = other DNA

SEQ ID NO: 48321 - DNA, 120 bp, synthetic construct; identical to SEQ ID NO: 22840
  source 1..120: mol_type = other DNA

SEQ ID NO: 48322 - DNA, 120 bp, synthetic construct; identical to SEQ ID NO: 22841
  source 1..120: mol_type = other DNA

SEQ ID NO: 48323 - DNA, 120 bp, synthetic construct; identical to SEQ ID NO: 22842
  source 1..120: mol_type = other DNA

SEQ ID NO: 48324 - DNA, 120 bp, synthetic construct; identical to SEQ ID NO: 22843
  source 1..120: mol_type = other DNA

SEQ ID NO: 48325 - DNA, 120 bp, synthetic construct; identical to SEQ ID NO: 22844
  source 1..120: mol_type = other DNA

SEQ ID NO: 48326 - DNA, 120 bp, synthetic construct; identical to SEQ ID NO: 22845
  source 1..120: mol_type = other DNA

SEQ ID NO: 48327 - DNA, 120 bp, synthetic construct; identical to SEQ ID NO: 22846
  source 1..120: mol_type = other DNA

SEQ ID NO: 48328 - DNA, 120 bp, synthetic construct; identical to SEQ ID NO: 22847
  source 1..120: mol_type = other DNA

SEQ ID NO: 48329 - DNA, 120 bp, synthetic construct; identical to SEQ ID NO: 23136
  source 1..120: mol_type = other DNA

SEQ ID NO: 48330 - DNA, 120 bp, synthetic construct; identical to SEQ ID NO: 23137
  source 1..120: mol_type = other DNA

SEQ ID NO: 48331 - DNA, 120 bp, synthetic construct; identical to SEQ ID NO: 22850
  source 1..120: mol_type = other DNA

SEQ ID NO: 48332 - DNA, 120 bp, synthetic construct; identical to SEQ ID NO: 22851
  source 1..120: mol_type = other DNA

SEQ ID NO: 48333 - DNA, 120 bp, synthetic construct; identical to SEQ ID NO: 22852
  source 1..120: mol_type = other DNA

SEQ ID NO: 48334 - DNA, 120 bp, synthetic construct
  source 1..120: mol_type = other DNA
ggaactctatctattttttcaatttttctaaatctaaaactgctcttttttaaattttcgagacggagtctccctcttgttgcccaggctggagcagtggtgcgatctcggctcactgca

SEQ ID NO: 48335 - DNA, 120 bp, synthetic construct; identical to SEQ ID NO: 22853
  source 1..120: mol_type = other DNA

SEQ ID NO: 48336 - DNA, 120 bp, synthetic construct; identical to SEQ ID NO: 22854
  source 1..120: mol_type = other DNA

SEQ ID NO: 48337 - DNA, 120 bp, synthetic construct; identical to SEQ ID NO: 22855
  source 1..120: mol_type = other DNA

SEQ ID NO: 48338 - DNA, 120 bp, synthetic construct
  source 1..120: mol_type = other DNA
ctcccaaaagtgctaggctcacaggagtgagccaccgcgcccagcccaatgtgtgttgttttaaaccactcaagtttgcagtaatttgttacacagcccaaatactttttaattttttag

SEQ ID NO: 48339 - DNA, 120 bp, synthetic construct
  source 1..120: mol_type = other DNA
aggagaatcacttgaaccaaggactcggaggttgcagtgagctgagattgtgtcattgcactccagcctggcgacagagcaagactccgtctcaaaaaaaaaaaaaagtaaataaataag

SEQ ID NO: 48340 - DNA, 120 bp, synthetic construct; identical to SEQ ID NO: 23138
  source 1..120: mol_type = other DNA

SEQ ID NO: 48341 - DNA, 120 bp, synthetic construct; identical to SEQ ID NO: 23139
  source 1..120: mol_type = other DNA

SEQ ID NO: 48342 - DNA, 120 bp, synthetic construct
  source 1..120: mol_type = other DNA
tccttaggaaaggaagcttacttagtgtaatcattaagttttctaaacactgtaaaactggcatgtatagacagaatgcacttagagtccatctacaaggctgggtgcggtggttcacgc

SEQ ID NO: 48343 - DNA, 120 bp, synthetic construct
  source 1..120: mol_type = other DNA
taaagatctccatccctaacagctgccatagtattccattgtatggtttcctttattataatgaagaatgctgttttgacattggcagcgagccaaaatcacaccactgcactccagcct

SEQ ID NO: 48344 - DNA, 120 bp, synthetic construct
  source 1..120: mol_type = other DNA
caaggagtaaagaaaggaagtaaattctggatacaaacagaaaattttaacgaaatttatttgtgactttttttttttgagatggagtctggctctgtcacccaggctggagtgcagtgg

SEQ ID NO: 48345 - DNA, 120 bp, synthetic construct
  source 1..120: mol_type = other DNA
tcaaattattgttcacgccgcaatgacccacccctggcccgcgtctgtggaactgacccctggtgtacaggagagttcgctgctgaaagtggtcccaaaggggtactagtttttaagctc

SEQ ID NO: 48346 - DNA, 120 bp, synthetic construct
  source 1..120: mol_type = other DNA
aggctgcggcgaccgcccagttaacgtggccgccgcgggggtaggcgcgtgcggtgtggcgcagtgcccttgagcccccgtgccgcggcctttgtttctccccgcggatgcgctgaccac

SEQ ID NO: 48347 - DNA, 120 bp, synthetic construct
  source 1..120: mol_type = other DNA
ggggagataaaacaggcaaggcatgtagtggtttagcctaggcctggcacaaagtgtccactttttttttttttttttttttttttttttttgtgggggacggcgtctcactgtgttgcc

SEQ ID NO: 48348 - DNA, 120 bp, synthetic construct; identical to SEQ ID NO: 18565
  source 1..120: mol_type = other DNA

SEQ ID NO: 48349 - DNA, 120 bp, synthetic construct; identical to SEQ ID NO: 19577
  source 1..120: mol_type = other DNA

SEQ ID NO: 48350 - DNA, 120 bp, synthetic construct; identical to SEQ ID NO: 11049
  source 1..120: mol_type = other DNA

SEQ ID NO: 48351 - DNA, 120 bp, synthetic construct; identical to SEQ ID NO: 11050
  source 1..120: mol_type = other DNA

SEQ ID NO: 48352 - DNA, 120 bp, synthetic construct; identical to SEQ ID NO: 11051
  source 1..120: mol_type = other DNA

SEQ ID NO: 48353 - DNA, 120 bp, synthetic construct
  source 1..120: mol_type = other DNA
gaaggacatgaacagacacttctcaaaagaagacatttatgcagccaaaaaacacatgaagaaatgctcatcatcactggccatcagggaaatgcaaatcaaaaccacaatgagatatca

SEQ ID NO: 48354 - DNA, 120 bp, synthetic construct; identical to SEQ ID NO: 11052
  source 1..120: mol_type = other DNA

SEQ ID NO: 48355 - DNA, 120 bp, synthetic construct
  source 1..120: mol_type = other DNA
aaatatcactgaattctttttctcagcaaggaacagccctgagaaagagaatgtgtgcctaggggtaggcttctaaaatggccgctctagggatgtctgtcttttacagttgtggataca

SEQ ID NO: 48356 - DNA, 120 bp, synthetic construct
  source 1..120: mol_type = other DNA
tgcctggctaatttttgtatttttggtagagacagggttttgtcatgttgcccagactggtcttgaactcctaactttaagtgatccgcccgcctcggcctcccacagtgttaggattac

SEQ ID NO: 48357 - DNA, 120 bp, synthetic construct; identical to SEQ ID NO: 11054
  source 1..120: mol_type = other DNA

SEQ ID NO: 48358 - DNA, 120 bp, synthetic construct; identical to SEQ ID NO: 19087
  source 1..120: mol_type = other DNA

SEQ ID NO: 48359 - DNA, 120 bp, synthetic construct; identical to SEQ ID NO: 19088
  source 1..120: mol_type = other DNA

SEQ ID NO: 48360 - DNA, 120 bp, synthetic construct; identical to SEQ ID NO: 19089
  source 1..120: mol_type = other DNA

SEQ ID NO: 48361 - DNA, 120 bp, synthetic construct
  source 1..120: mol_type = other DNA
cacatggacacaggaaagggaacatcacactctggggactgttgtggggtcgggggaggggggagggatagcattaggagatacacctaatgctaaatgacgagttaatgggtgcagcac

SEQ ID NO: 48362 - DNA, 120 bp, synthetic construct; identical to SEQ ID NO: 19090
  source 1..120: mol_type = other DNA

SEQ ID NO: 48363 - DNA, 120 bp, synthetic construct
  source 1..120: mol_type = other DNA
atggggcaggaagagagagggagcttatagaataatctacgaagtttaaaaagtttgtaagtgataaattaaaatggtatcactttcaaatatatatcttgaagatgtttctacatggca

SEQ ID NO: 48364 - DNA, 120 bp, synthetic construct
  source 1..120: mol_type = other DNA
ttgcttcggcagcacatatactaaaattggaacgatacagagaagattagcatggcccttgcgcaaggatgacacgcaaattcgtgaagcgttccatatttttcttcaaactatactaca

SEQ ID NO: 48365 - DNA, 120 bp, synthetic construct
  source 1..120: mol_type = other DNA
gtggcacatgtacaccatggaatactatgcagccataaaaaatgatgagctcatgtcctttgtagggacatggatgaaattggaaaccatcattctcagtaaactatcgcaagaacaaaa

SEQ ID NO: 48366 - DNA, 120 bp, synthetic construct; identical to SEQ ID NO: 19126
  source 1..120: mol_type = other DNA

SEQ ID NO: 48367 - DNA, 120 bp, synthetic construct; identical to SEQ ID NO: 19127
  source 1..120: mol_type = other DNA

SEQ ID NO: 48368 - DNA, 120 bp, synthetic construct; identical to SEQ ID NO: 19128
  source 1..120: mol_type = other DNA

SEQ ID NO: 48369 - DNA, 120 bp, synthetic construct
  source 1..120: mol_type = other DNA
aacctgcaaagtttgtctttctgtgcctggcttgtttcgcttaacaaaatgacctccagttccacccatgttgttgcaaatgaagggatatcatccttcatgactgaatagtagtccatt

SEQ ID NO: 48370 - DNA, 120 bp, synthetic construct; identical to SEQ ID NO: 19597
  source 1..120: mol_type = other DNA

SEQ ID NO: 48371 - DNA, 120 bp, synthetic construct; identical to SEQ ID NO: 26011
  source 1..120: mol_type = other DNA

SEQ ID NO: 48372 - DNA, 120 bp, synthetic construct
  source 1..120: mol_type = other DNA
agggagttaacctctctgtgcccgtttccttatctgcaaaatggggatcgtggtagcacccacctcgtaaaagtgttgtgagaattaaacagttgatccattacgtgcttagaacagcac

SEQ ID NO: 48373 - DNA, 120 bp, synthetic construct
  source 1..120: mol_type = other DNA
cctaggagccccgccccgtccaactcttacccgggctcatcgccgcggctcatctctctcgcaaccgccgccgcacgcacccgctccgccgccccgcgcagggcatcctgtcgccaggta

SEQ ID NO: 48374 - DNA, 120 bp, synthetic construct; identical to SEQ ID NO: 23710
  source 1..120: mol_type = other DNA

SEQ ID NO: 48375 - DNA, 120 bp, synthetic construct
  source 1..120: mol_type = other DNA
gttgtacaccataaatatacagctattatttatcaattaacaatttttaaaaaatcattttagggctgggcacggtggctcaggcctgtaatcccagcactttgggaagccgaggcgggt

SEQ ID NO: 48376 - DNA, 120 bp, synthetic construct; identical to SEQ ID NO: 24276
  source 1..120: mol_type = other DNA

SEQ ID NO: 48377 - DNA, 120 bp, synthetic construct
  source 1..120: mol_type = other DNA
gaagtgaggagcgtctctgcccggccacccatcgtctgagatgtggggagcgcctttgccccgccgccccgtctgggatgtgaggagcgcctctgcctagctgcgaccccgtctgggagg

SEQ ID NO: 48378 - DNA, 120 bp, synthetic construct
  source 1..120: mol_type = other DNA
cttgggtgtttctcacagagggggatttggcagggtcatgggaccatagtggagggaaggtcagcagataaacaagtgaacaaaggtctctggttttcctaggcagaggaccctgcggcc

SEQ ID NO: 48379 - DNA, 120 bp, synthetic construct
  source 1..120: mol_type = other DNA
cgccctcttcagcctcccaaggtgctgggatcacaggcatgagccaccacgccaggccatattttaaattaaacttttactgtagcataatggttagttttctttttgccttaacatttt

SEQ ID NO: 48380 - DNA, 120 bp, synthetic construct; identical to SEQ ID NO: 28962
  source 1..120: mol_type = other DNA

SEQ ID NO: 48381 - DNA, 120 bp, synthetic construct
  source 1..120: mol_type = other DNA
tggttccaagtctttgctattgtgaatagtgctgcaataaacatacgtgtgcgtgtgtctttatagcagcatgatttataatcctttgggtacatacccagtaatgggatggttgggtca

SEQ ID NO: 48382 - DNA, 120 bp, synthetic construct
  source 1..120: mol_type = other DNA
gttctgttctattggtatgtatctctgttttggtaccagtcccatgctgttttggttactgtagccttgtagtatagtttgaagtcaggtagtgtgatgcctccagctttgttcttttgg

SEQ ID NO: 48383 - DNA, 120 bp, synthetic construct; identical to SEQ ID NO: 5923
  source 1..120: mol_type = other DNA

SEQ ID NO: 48384 - DNA, 120 bp, synthetic construct
  source 1..120: mol_type = other DNA
tgattagactgcacctttataattctcacacctcagtttaatgtcaaaccttctaggcttttagcttcattttgttaatgagttaagactgtcccctgctctccctctccctctccctct

SEQ ID NO: 48385 - DNA, 120 bp, synthetic construct
  source 1..120: mol_type = other DNA
catcccgtctgggaagtgaggagcccctccgcctggcagccaccccgtctggaaagtgaggagcgtctccgcccggcagccaccccgtccgggagggaggtggggggggggtcagccccc

SEQ ID NO: 48386 - DNA, 120 bp, synthetic construct
  source 1..120: mol_type = other DNA
ggtgatatgttgtttgattatgatgtaatacaataataaattaacaaaaaaaaaaaaaaaaaaaaaagactgtcccctgcccattttaggttgctacttcttttaatattataaaggagg

SEQ ID NO: 48387 - DNA, 120 bp, synthetic construct; identical to SEQ ID NO: 26052
  source 1..120: mol_type = other DNA

SEQ ID NO: 48388 - DNA, 120 bp, synthetic construct; identical to SEQ ID NO: 26053
  source 1..120: mol_type = other DNA

SEQ ID NO: 48389 - DNA, 120 bp, synthetic construct
  source 1..120: mol_type = other DNA
ctgcagccacgatgagacagcaccacacacccatcacgatggggcagacgggacagcagtgtgagcacgctgatgctcgacatcgaatactgcagccacgatgagacagcaccacacacc

SEQ ID NO: 48390 - DNA, 120 bp, synthetic construct
  source 1..120: mol_type = other DNA
ccacacacccatcacgatggggcagacgggacagcagtgtgagcacactgatgctcgacatcgaatactgcagccacgacgagacagcaccacacacccatcaggatggggcagacggga

SEQ ID NO: 48391 - DNA, 120 bp, synthetic construct
  source 1..120: mol_type = other DNA
agatgctcgacattgcacactgcagccacgatgagacagcaccacacacccatcaggatggggcagacgggacagcaatgtgagcacgctgagatgctcgacattgcacactgcagccac

SEQ ID NO: 48392 - DNA, 120 bp, synthetic construct; identical to SEQ ID NO: 26054
  source 1..120: mol_type = other DNA

SEQ ID NO: 48393 - DNA, 120 bp, synthetic construct; identical to SEQ ID NO: 26055
  source 1..120: mol_type = other DNA

SEQ ID NO: 48394 - DNA, 120 bp, synthetic construct; identical to SEQ ID NO: 26056
  source 1..120: mol_type = other DNA

SEQ ID NO: 48395 - DNA, 120 bp, synthetic construct; identical to SEQ ID NO: 26057
  source 1..120: mol_type = other DNA

SEQ ID NO: 48396 - DNA, 120 bp, synthetic construct
  source 1..120: mol_type = other DNA
aactttaaagtagttttttccaattctgtgaagaaagtcattggtagcttgatggggatggcactgaatctataaattactttgggcagtatggccattttcatgatattgactcttcct

SEQ ID NO: 48397 - DNA, 120 bp, synthetic construct
  source 1..120: mol_type = other DNA
aacgggcgaaaagtcagaattgaagcagagatgcaggcaggaactacctgggaaaatagggttctattttttttttttttgagacggagtctcgctgtgtcgcccaggctggagtgcagt

SEQ ID NO: 48398 - DNA, 120 bp, synthetic construct; identical to SEQ ID NO: 30021
  source 1..120: mol_type = other DNA

SEQ ID NO: 48399 - DNA, 120 bp, synthetic construct
  source 1..120: mol_type = other DNA
ttaaagcattcagcaattagatttaggcctcactttttttgttgttgttgttttgttttgagatagtctcgctctgtcatccaggctggagtacagtggcacgatctcggctcactacaa

SEQ ID NO: 48400 - DNA, 120 bp, synthetic construct
  source 1..120: mol_type = other DNA
atagcagcatgatttatagtcctttgggtatatacccagtaatgggatggctgggtcaaatggtatttctagttctagatccctgaggaatcgccacactgacttccaccatggttgaac

SEQ ID NO: 48401 - DNA, 120 bp, synthetic construct
  source 1..120: mol_type = other DNA
ggctccagctttgttcttttggcttaggattgacttggcgatgcgggctcttttttggttccatatgaactttaaagtaggtttttccaattctgtgaagaaagtcattggtagcttgat

SEQ ID NO: 48402 - DNA, 120 bp, synthetic construct; identical to SEQ ID NO: 21163
  source 1..120: mol_type = other DNA

SEQ ID NO: 48403 - DNA, 120 bp, synthetic construct
  source 1..120: mol_type = other DNA
aatggtgctgggaaaactggctagccatatgtagaaagctgaaactggatcccctccttacaccttatgcaaaaattaattcaagatggactaaagacttaaacgttacacctaaaacca

SEQ ID NO: 48404 - DNA, 120 bp, synthetic construct
  source 1..120: mol_type = other DNA
cctgcacattgtgcacatgtaccctaaaacttaaagtatagtaataatttaaaaaaaaattaaaaaaaaaaagaaaggaacctttccacagccagggaacatgccgcaagcaaagagtag

SEQ ID NO: 48405 - DNA, 120 bp, synthetic construct
  source 1..120: mol_type = other DNA
gatcagagcagaactgaaggagatagaaacactaaaaagccttcaataaatcaatgaatccaggagctgggtgtttgaaaagatcaacaaaacagaccgctagccagactaattaagaag

SEQ ID NO: 48406 - DNA, 120 bp, synthetic construct
  source 1..120: mol_type = other DNA
aatgggaaaaaattggaagcatttcctttgaaaaccagcacaagacaaagatgtcctctctcaacactcctattcaacatagtattggaagttctggccagggcagtcaggcaagagaaa

SEQ ID NO: 48407 - DNA, 120 bp, synthetic construct
  source 1..120: mol_type = other DNA
gaaaggggtgacagacggcacctggagaatcgggtcactcccacccgaatactgagcttttctgacgggcttaaaaaaaggcgcaccacgagattatatcccgcacctggctcggagggt

SEQ ID NO: 48408 - DNA, 120 bp, synthetic construct
  source 1..120: mol_type = other DNA
ccaagttggaaaacactctgcaggatattatccaggagaatttccccaatctagcaaggcaggccaacgttcagattcaggaaatacagagaatgccacaaagatactcctcgagaagag

SEQ ID NO: 48409 - DNA, 120 bp, synthetic construct
  source 1..120: mol_type = other DNA
catttttttcagcaccacaccacacctattccaaaattgaccacatacttggaagtaaagctctcctcggcaaatgtaaaagaacagaaattataacaaactatctctcagaccacagtg

SEQ ID NO: 48410 - DNA, 120 bp, synthetic construct
  source 1..120: mol_type = other DNA
tcggataccaaagccgggcagagacacaaccaaaaaagagaattttagaccaatatccttgatgaacattgatgcaaaaatcctcaataaaatactggcaaaccgaatccagcagcacat

SEQ ID NO: 48411 - DNA, 120 bp, synthetic construct
  source 1..120: mol_type = other DNA
ggaaccaaaaaagagcccgcatcgccaagtcaatccaaagccaaaagaacaaagctggaggcatcacactacctgacttcaaactatactacaaggctacagtaaccaaaacagcatggt

SEQ ID NO: 48412 - DNA, 120 bp, synthetic construct
  source 1..120: mol_type = other DNA
tagttcaaccattgtggaagtcagtgtggagattcctcagggatctagaactagaaataccatttgacccagccatcccattactgggtatatacccaaaggactataaatcatgctgct

SEQ ID NO: 48413 - DNA, 120 bp, synthetic construct; identical to SEQ ID NO: 21844
  source 1..120: mol_type = other DNA

SEQ ID NO: 48414 - DNA, 120 bp, synthetic construct; identical to SEQ ID NO: 21845
  source 1..120: mol_type = other DNA

SEQ ID NO: 48415 - DNA, 120 bp, synthetic construct
  source 1..120: mol_type = other DNA
gatgtctgaaacttccttttaaatagttctcccccctgggggttgaaaagccttgttttgtcatattaccatggttggttttctggatacttctcatttgggtatgctctctcagaggga

SEQ ID NO: 48416 - DNA, 120 bp, synthetic construct
  source 1..120: mol_type = other DNA
gggattatgttaaatgacaaaacctaagaataattggtgttcctgaggaagaagaaaattctaaaaccttggaagacatatttgggggaataatcgaggaaaacttccccagccttgcta

SEQ ID NO: 48417 - DNA, 120 bp, synthetic construct
  source 1..120: mol_type = other DNA
tctcatatatgtatcatatatctcatatatgtaccatatatctcatatatgtaccatatatatctcatatatgtaccatatatatctcatatatgtgccatatatatcatatatgtgcca

SEQ ID NO: 48418 - DNA, 120 bp, synthetic construct; identical to SEQ ID NO: 2175
  source 1..120: mol_type = other DNA

SEQ ID NO: 48419 - DNA, 120 bp, synthetic construct
  source 1..120: mol_type = other DNA
aacacggtgaaaccccgtcactactaaaaaatacaaaaaaaaaatagccgggcgtggtggtgggcgcctgtagtcccagctactcaggaggctaaggctggagaatggcatgaacccagg

SEQ ID NO: 48420 - DNA, 120 bp, synthetic construct
  source 1..120: mol_type = other DNA
aaactatgaactagctgtgatgccccaaattataagccacaaagaatagaactaataaaactagaacttaataacagttttggaaaactgcaacatttgaatattagaacctctggaaaa

SEQ ID NO: 48421 - DNA, 120 bp, synthetic construct
  source 1..120: mol_type = other DNA
gtcgcccaggctggagtgcagtggtgcgatctcggctcactgcaggctccaccccctggttcacgccattctcttgcctcagcctgcggagtagctgggactacaggcgcccgccacccc

SEQ ID NO: 48422 - DNA, 120 bp, synthetic construct
  source 1..120: mol_type = other DNA
ctgtgtccagaagttccagaccagcctgggtgacatagtgagaccacatctctacaaaaacaaataaaaaattagctgggtgttttggtgcacacctgtaatcccagctacttgggagac

SEQ ID NO: 48423 - DNA, 120 bp, synthetic construct
  source 1..120: mol_type = other DNA
ctggggccagcacagtggtgcatgcctgtaatctcaccactttgggaggctgagatgggaggatcacttgagcccagaagttcgagaccagcccgggcaacatgacaagacctcatctct

SEQ ID NO: 48424 - DNA, 120 bp, synthetic construct
  source 1..120: mol_type = other DNA
aacatggtgaaacctgtctctactaaaaatacacatgaaaaattagctggacgtggtggagcatgcctatggttccagctactcaggaggctgaggcaggagaatcacttgaaccttgga

SEQ ID NO: 48425 - DNA, 120 bp, synthetic construct
  source 1..120: mol_type = other DNA
tgtagtttgctgacccctcatatggagagcagctggaagataaccacataaagagacagggaaacaaaagaaacatttgcatttatcagagctatagtttccttgtgctgtcctcagact

SEQ ID NO: 48426 - DNA, 120 bp, synthetic construct
  source 1..120: mol_type = other DNA
gagtctacctaacttttgtaactgcagcagctccctgtacaggatcagggaaaatggtcaagactggtgagttaatgtaccaccattttcctagaattgtctaaacctaaggtcatatgt

SEQ ID NO: 48427 - DNA, 120 bp, synthetic construct
  source 1..120: mol_type = other DNA
ggttttttggactttttttgttgttgttgttgagacggagtctcgctcttccacccaggcgggactgcagtggcgctatctcggctcactgcaagctccgcctcccgggttcacaccatt

SEQ ID NO: 48428 - DNA, 120 bp, synthetic construct
  source 1..120: mol_type = other DNA
tttgatgacacatgtgcaatgttgtctaccttaccagagtttcattagaggctcagcacccatgttttcgatggaggctagtcacataggccacctctcctctccctcacatgtaacaaa

SEQ ID NO: 48429 - DNA, 120 bp, synthetic construct
  source 1..120: mol_type = other DNA
tattttctgagcagttttagattcacagcaaaattgagaaggtacagagattttccatattccccatgacccctgacatatgaatagcctccctcattatcagtaccccccatcggagtt

SEQ ID NO: 48430 - DNA, 120 bp, synthetic construct
  source 1..120: mol_type = other DNA
tcataggaaatgccagtgtttttctttacaataaatgaaaaataattttgttttcaccagagagagtaacaactgttggcacattctggcagcttgagtgagctgatagttctgttcata

SEQ ID NO: 48431 - DNA, 120 bp, synthetic construct; identical to SEQ ID NO: 860
  source 1..120: mol_type = other DNA

SEQ ID NO: 48432 - DNA, 120 bp, synthetic construct
  source 1..120: mol_type = other DNA
tgtgtttttggcttttttctttcacttgtcttaaaaaatttaaatctcaggccgggcgcggtggctcacgcctgtaaatcccagcactttgggaggccaaggcaggcggatcatgaggtc

SEQ ID NO: 48433 - DNA, 120 bp, synthetic construct
  source 1..120: mol_type = other DNA
atgaaaacttcattttcggatttttcagattggcatcctactaatttgacccttagtgatgagacttgtcagagatccaagaatctgaaagttgatgataaatgtccatctgtatcacca

SEQ ID NO: 48434 - DNA, 120 bp, synthetic construct
  source 1..120: mol_type = other DNA
tctatgactttatgtattatagaattgactttccaagtcagtaattaatgagacttattgagaatttgctgcatagtatctccttggctgtgtccacatgagctaccaccttgcgttaat

SEQ ID NO: 48435 - DNA, 120 bp, synthetic construct
  source 1..120: mol_type = other DNA
gtacaccaataaaggtgtccacagtcattttggaaatcattaataaggtactattatgaagtggagaacagtatgcagcattgcctgataatattactactgcattccaaaattttgttt

SEQ ID NO: 48436 - DNA, 120 bp, synthetic construct
  source 1..120: mol_type = other DNA
tagggtacaaacaataactttctaactttttagatgcagaaacttagtaagaattatctttaaagttttagtaagtgttattaggggaccatagtatatattagaacagaactgaagaag

SEQ ID NO: 48437 - DNA, 120 bp, synthetic construct
  source 1..120: mol_type = other DNA
accaattaaaactcgtcataaatgagttaaagcagaggtttggtgaaatttatgaaaaatacaaaattccggcttgtcctgaggaagagccactacttgataactctacaagaggaacag

SEQ ID NO: 48438 - DNA, 120 bp, synthetic construct
  source 1..120: mol_type = other DNA
gaaaatcgctaaaggaaatgtgatgagcttgagggctttttccttttaccgacttaaagatgagttgtgtctaacaataagatgggaatacagtagaaaggaagcaatgactaagaagag

SEQ ID NO: 48439 - DNA, 120 bp, synthetic construct
  source 1..120: mol_type = other DNA
atctatagagagtgagctaaagtagattcttatactgtatatcctccagctataaacttttatggctattgaatgtgaaatttgggaagcatctcatttccagaattccaccctagctca

SEQ ID NO: 48440 - DNA, 120 bp, synthetic construct
  source 1..120: mol_type = other DNA
ggccaaggcgggtgaatcacctgaggtcaggagttcaagaccagcctgaccaacatggataaaccccatctctactaaaaatacaaaattagccagatgtagtggtgcatgcctgtaatc

SEQ ID NO: 48441 - DNA, 120 bp, synthetic construct
  source 1..120: mol_type = other DNA
aattctcgtaatatctgctgagttacaaaaggaagctagctacatgctacattgacactgtaccttgttagcaacagaattctagttattaaatttttgttttttgctgtcaatgtgtga

SEQ ID NO: 48442 - DNA, 120 bp, synthetic construct
  source 1..120: mol_type = other DNA
aagggtaaaaatatagtatatagttatataagaattgaaaaatacagctaaacaagaagaaaattagatcatctacagtcatgcccctaggtatgctggccttgaaagagtggtatatac

SEQ ID NO: 48443 - DNA, 120 bp, synthetic construct
  source 1..120: mol_type = other DNA
ttaatccttaactcagtggcacttaaaacataagtcagatgatgtcattcttctgctcagatccatctgattgcctcccatttcactctgagtatgtgtcagggttcctcctcataccta

SEQ ID NO: 48444 - DNA, 120 bp, synthetic construct
  source 1..120: mol_type = other DNA
agggtggtaaatttaatggacttaaaattgtttccaattgattatgaaccttcagtatttgaagttaaaagaccaagttggaatgtgttgctttctataagagagctatgctcatcaggc

SEQ ID NO: 48445 - DNA, 120 bp, synthetic construct; identical to SEQ ID NO: 861
  source 1..120: mol_type = other DNA

SEQ ID NO: 48446 - DNA, 120 bp, synthetic construct; identical to SEQ ID NO: 862
  source 1..120: mol_type = other DNA

SEQ ID NO: 48447 - DNA, 120 bp, synthetic construct; identical to SEQ ID NO: 863
  source 1..120: mol_type = other DNA

SEQ ID NO: 48448 - DNA, 120 bp, synthetic construct; identical to SEQ ID NO: 864
  source 1..120: mol_type = other DNA

SEQ ID NO: 48449 - DNA, 120 bp, synthetic construct
  source 1..120: mol_type = other DNA
gaggattgtgaattgtctcactctgtttatgagaattttatgttgctgattgaacaacttagaatggagtataaaggtaggaccactgcataaatgcaaggccttttgatgtatcctgca

SEQ ID NO: 48450 - DNA, 120 bp, synthetic construct
  source 1..120: mol_type = other DNA
gcattaccctaaggactaataatgttgagcatcttgtatatgcttatttgccacctgtgaactgtcttttccaatctgggtagcttatgaacatttaaaattgagattcgattcaatcag

SEQ ID NO: 48451 - DNA, 120 bp, synthetic construct
  source 1..120: mol_type = other DNA
acacttgacctcattgatgttcctgaattgataatcataatcatccaaagtccatagtttatattagggttcagtctcggtgtcttatattctgtgaatttggacaaaagtataaggaca

SEQ ID NO: 48452 - DNA, 120 bp, synthetic construct
  source 1..120: mol_type = other DNA
ttattgacctcctcatagtgtgtggttttattgatttttttcctattgtttttccattttattggtttcatctttgatgttttggtctgttccgcctgctataacaaaataccatagact

SEQ ID NO: 48453 - DNA, 120 bp, synthetic construct
  source 1..120: mol_type = other DNA
ctgtctctactaaaaatacaaaaaattagcagggcgtggtggcaggctgaggcaggagaatggcgtgaacccgggaggcggagcttgcagtgagccgagatcccgccactgcactccagc

SEQ ID NO: 48454 - DNA, 120 bp, synthetic construct
  source 1..120: mol_type = other DNA
ccatcttcaaaaaatattatggcatatcatatatggcataagaaaattatgaatgaaaacccaaacattgtatgttctcacttgtaagtgggagctatgctatgaggatgcaggggcata

SEQ ID NO: 48455 - DNA, 120 bp, synthetic construct
  source 1..120: mol_type = other DNA
cctgggcgacacagcgagactccgtctcaaaaaaaaaaaaaaagagagataaaaaaaaaagaaaaatcttccatgcctctgcctgtctgcttgagcttaattttaatatacagttgagtt

SEQ ID NO: 48456 - DNA, 120 bp, synthetic construct
  source 1..120: mol_type = other DNA
ttctaccttttctccctgacacagattctgctagcctaccaagaatccaagacacattttgtttgtgtgaacacttactgaaacttaagaataatcactgtgaccaacttacagtaaaac

SEQ ID NO: 48457 - DNA, 120 bp, synthetic construct
  source 1..120: mol_type = other DNA
tctttttgaaaaattttttttaaatttcatagctttaggtatacaagtggttttcggttaaatggatgaattgtatggtggtgaagtctgggattttagtgtgcctatcacccgagtagt

SEQ ID NO: 48458 - DNA, 120 bp, synthetic construct
  source 1..120: mol_type = other DNA
actctgatgattatttcttttgctgtgcagaagccttttcttttcttttcttttgaggcagagtttcactcttgttgcccaggctggagtataatggcgtgatctcggctcatggctacc

SEQ ID NO: 48459 - DNA, 120 bp, synthetic construct; identical to SEQ ID NO: 17599
  source 1..120: mol_type = other DNA

SEQ ID NO: 48460 - DNA, 120 bp, synthetic construct; identical to SEQ ID NO: 17600
  source 1..120: mol_type = other DNA

SEQ ID NO: 48461 - DNA, 120 bp, synthetic construct; identical to SEQ ID NO: 17601
  source 1..120: mol_type = other DNA

SEQ ID NO: 48462 - DNA, 120 bp, synthetic construct; identical to SEQ ID NO: 17602
  source 1..120: mol_type = other DNA

SEQ ID NO: 48463 - DNA, 120 bp, synthetic construct
  source 1..120: mol_type = other DNA
acactttgggaggccgaggtgggtggatcacttgagcccaggagttccagaccagcctgggcagcatggcgaaaccccatctctacaaaaagtacaaatacatttagctgcgtgtggggg

SEQ ID NO: 48464 - DNA, 120 bp, synthetic construct; identical to SEQ ID NO: 17603
  source 1..120: mol_type = other DNA

SEQ ID NO: 48465 - DNA, 120 bp, synthetic construct; identical to SEQ ID NO: 17604
  source 1..120: mol_type = other DNA

SEQ ID NO: 48466 - DNA, 120 bp, synthetic construct; identical to SEQ ID NO: 17605
  source 1..120: mol_type = other DNA

SEQ ID NO: 48467 - DNA, 120 bp, synthetic construct; identical to SEQ ID NO: 17606
  source 1..120: mol_type = other DNA

SEQ ID NO: 48468 - DNA, 120 bp, synthetic construct; identical to SEQ ID NO: 17607
  source 1..120: mol_type = other DNA

SEQ ID NO: 48469 - DNA, 120 bp, synthetic construct; identical to SEQ ID NO: 17608
  source 1..120: mol_type = other DNA

SEQ ID NO: 48470 - DNA, 120 bp, synthetic construct; identical to SEQ ID NO: 17609
  source 1..120: mol_type = other DNA

SEQ ID NO: 48471 - DNA, 120 bp, synthetic construct; identical to SEQ ID NO: 17610
  source 1..120: mol_type = other DNA

SEQ ID NO: 48472 - DNA, 120 bp, synthetic construct; identical to SEQ ID NO: 17611
  source 1..120: mol_type = other DNA

SEQ ID NO: 48473 - DNA, 120 bp, synthetic construct
  source 1..120: mol_type = other DNA
tggttactgtaaccttgtaatatattttgaagtcaggtggagtgatgcctccagctctgttcttttccctcaggcttggcttgtatagtctagcttttttgcagttccatatgaatttta

SEQ ID NO: 48474 - DNA, 120 bp, synthetic construct
  source 1..120: mol_type = other DNA
gtaatagccattatgtctggtgtgagatggtatgtcattgtggctttgatttgcttttctctgatgatcagtgatgatgagcattttttcatatgtttgctctccacttttatgtctttt

SEQ ID NO: 48475 - DNA, 120 bp, synthetic construct; identical to SEQ ID NO: 17612
  source 1..120: mol_type = other DNA

SEQ ID NO: 48476 - DNA, 120 bp, synthetic construct; identical to SEQ ID NO: 17613
  source 1..120: mol_type = other DNA

SEQ ID NO: 48477 - DNA, 120 bp, synthetic construct; identical to SEQ ID NO: 17614
  source 1..120: mol_type = other DNA

SEQ ID NO: 48478 - DNA, 120 bp, synthetic construct
  source 1..120: mol_type = other DNA
attttatagagacaaggtctcactgtgttgcccagcctggtctcagactcctggcctcaagtgattctcctgtcttcgcctcccaacatgctggggttacaagcatgagccagtgcactt

SEQ ID NO: 48479 - DNA, 120 bp, synthetic construct; identical to SEQ ID NO: 17615
  source 1..120: mol_type = other DNA

SEQ ID NO: 48480 - DNA, 120 bp, synthetic construct; identical to SEQ ID NO: 17616
  source 1..120: mol_type = other DNA

SEQ ID NO: 48481 - DNA, 120 bp, synthetic construct; identical to SEQ ID NO: 17617
  source 1..120: mol_type = other DNA

SEQ ID NO: 48482 - DNA, 120 bp, synthetic construct; identical to SEQ ID NO: 17618
  source 1..120: mol_type = other DNA

SEQ ID NO: 48483 - DNA, 120 bp, synthetic construct; identical to SEQ ID NO: 17619
  source 1..120: mol_type = other DNA

SEQ ID NO: 48484 - DNA, 120 bp, synthetic construct; identical to SEQ ID NO: 17620
  source 1..120: mol_type = other DNA

SEQ ID NO: 48485 - DNA, 120 bp, synthetic construct; identical to SEQ ID NO: 17621
  source 1..120: mol_type = other DNA

SEQ ID NO: 48486 - DNA, 120 bp, synthetic construct; identical to SEQ ID NO: 17622
  source 1..120: mol_type = other DNA

SEQ ID NO: 48487 - DNA, 120 bp, synthetic construct; identical to SEQ ID NO: 17623
  source 1..120: mol_type = other DNA

SEQ ID NO: 48488 - DNA, 120 bp, synthetic construct; identical to SEQ ID NO: 17624
  source 1..120: mol_type = other DNA

SEQ ID NO: 48489 - DNA, 120 bp, synthetic construct; identical to SEQ ID NO: 17625
  source 1..120: mol_type = other DNA

SEQ ID NO: 48490 - DNA, 120 bp, synthetic construct; identical to SEQ ID NO: 17626
  source 1..120: mol_type = other DNA

SEQ ID NO: 48491 - DNA, 120 bp, synthetic construct
  source 1..120: mol_type = other DNA
tatgaatctacaacagtataggtaacattttattgcaactgaatttatttcaaaaattattagttttggctgggcgcggtggctcacgtctgtaatctcagcactttgggaggccgaggc

SEQ ID NO: 48492 - DNA, 120 bp, synthetic construct; identical to SEQ ID NO: 17627
  source 1..120: mol_type = other DNA

SEQ ID NO: 48493 - DNA, 120 bp, synthetic construct; identical to SEQ ID NO: 17628
  source 1..120: mol_type = other DNA

SEQ ID NO: 48494 - DNA, 120 bp, synthetic construct; identical to SEQ ID NO: 17629
  source 1..120: mol_type = other DNA

SEQ ID NO: 48495 - DNA, 120 bp, synthetic construct; identical to SEQ ID NO: 17630
  source 1..120: mol_type = other DNA

SEQ ID NO: 48496 - DNA, 120 bp, synthetic construct
  source 1..120: mol_type = other DNA
tccatgacacagcctcaggaagtcctgatgacatgtgtccaaggtggttggggcacagcttggttttatacattttagggggagacatgagacatcaatcaatatatttaagaagtacat

SEQ ID NO: 48497 - DNA, 120 bp, synthetic construct
  source 1..120: mol_type = other DNA
agttacagaaagaaggtgccttctagagttgctaggaacttaagtatttcctataggaaaacatcagctaatacaaggaggaggaggtaacataccatctaaactgagatttacaaaaaa

SEQ ID NO: 48498 - DNA, 120 bp, synthetic construct
  source 1..120: mol_type = other DNA
attaagaattccttcattattttgtcatactttaaggcccagggaaggcctaggcaagattcttggtgggcttttgttacattccagcctgtataagggcactggctctttcagctttta

SEQ ID NO: 48499 - DNA, 120 bp, synthetic construct
  source 1..120: mol_type = other DNA
gaactcatgtcactgtgggcagacacatcttttgaaagagaccctgagccaagcaagcacactgtgtgctttgcccaaattcacccattaggtagatctgatatcctctcaagaggaagc

SEQ ID NO: 48500 - DNA, 120 bp, synthetic construct
  source 1..120: mol_type = other DNA
ccacccaattcagcctcccaaagtgctgagattacaggcgtgagccaccacacctggactgtctgagttatttttttatttttattattattattatttttgatgcggagtctgactctg

SEQ ID NO: 48501 - DNA, 120 bp, synthetic construct
  source 1..120: mol_type = other DNA
cctactctataaagcctatctataatgtttttgtcacagaaatgttatggaaaggagtctcaaaatattggtaaacctgttagtaaaaaaaaaaattgacttgacacctaaaatttctaa

SEQ ID NO: 48502 - DNA, 120 bp, synthetic construct
  source 1..120: mol_type = other DNA
accaaaatttatgaattaaatttagattaagtaatatatatctgaaataaactgcaaacgacatccctttccgttcttgggctagtagatactacattaaatattctttcatatacatct

SEQ ID NO: 48503 - DNA, 120 bp, synthetic construct
  source 1..120: mol_type = other DNA
tttcattcttgttaacactgaaaaagctctcaactcttttttactgatttgcacttagttaactatgaaatatatagaatataattctttggccaggcatgttggctcacgtttgtagtc

SEQ ID NO: 48504 - DNA, 120 bp, synthetic construct
  source 1..120: mol_type = other DNA
tggagccaattgatggcttgtttgtattttataattttatctttatacatagtgatagatttaagtttagatagacatcattttggtatactggtactgtggtcattgtcaatgtttgga

SEQ ID NO: 48505 - DNA, 120 bp, synthetic construct
  source 1..120: mol_type = other DNA
ttctgcgttggtttgctgaggataatgttctgcagctccacccatgtccctgcaaaggacatgtctcattccttttcatggctgcatagtattccatggtgtatatgtaccacattttct

SEQ ID NO: 48506 - DNA, 120 bp, synthetic construct
  source 1..120: mol_type = other DNA
agggaatcttttccccattgcttccttttgtcaggtttgtcaaagatcacatggttgtaggtgtgtggtcttatttctgggttctctattctgttccattggtctatgtgtcggttcttg

SEQ ID NO: 48507 - DNA, 120 bp, synthetic construct
  source 1..120: mol_type = other DNA
atgctccacttaaaagatatagaatggcagaatgggtaagaattcaccaaccaagttgctgctgtcttcaggagactcacctaacacatacggactcacataaacttaaggcaaagggtt

SEQ ID NO: 48508 - DNA, 120 bp, synthetic construct
  source 1..120: mol_type = other DNA
gaactgaacgataatagtgacacaacctatcaaaaactctgggatacagcaaaagtggagctaagaagaaaattcatagcattaaatgcctatatcaaaaagtctgaaagagcacaaata

SEQ ID NO: 48509 - DNA, 120 bp, synthetic construct; identical to SEQ ID NO: 871
  source 1..120: mol_type = other DNA

SEQ ID NO: 48510 - DNA, 120 bp, synthetic construct
  source 1..120: mol_type = other DNA
acctaactccaaactattctgtaacaccatagtcactaaaacagcatgatactggtataaaaataggcacatagaccaatggaacagaatagagaacccagaattaaagccaaatactta

SEQ ID NO: 48511 - DNA, 120 bp, synthetic construct
  source 1..120: mol_type = other DNA
cttgtacacacgtttataagcagcaaaattcataattgtgaaaatatggaaccagcccaaatgcccatcaatcaatgagtggataaagaaaatgtgatatgtgcacacacaccccatgga

SEQ ID NO: 48512 - DNA, 120 bp, synthetic construct
  source 1..120: mol_type = other DNA
catgtctacttgatccacagctgagttcaggtcctgaatatctttgttaattttctgtctccatgatgtgtctaatattgtcattgtggtgttaaagtctcccactattattgtgtggga

SEQ ID NO: 48513 - DNA, 120 bp, synthetic construct
  source 1..120: mol_type = other DNA
atctgatggggttccctttgtaggtgacctggcctttctgtctgactgcccttaacattttttctttcatttagagtttggagaatctgatgattatgtgtctcagggatgatctcctcg

SEQ ID NO: 48514 - DNA, 120 bp, synthetic construct; identical to SEQ ID NO: 29630
  source 1..120: mol_type = other DNA

SEQ ID NO: 48515 - DNA, 120 bp, synthetic construct; identical to SEQ ID NO: 29631
  source 1..120: mol_type = other DNA

SEQ ID NO: 48516 - DNA, 120 bp, synthetic construct; identical to SEQ ID NO: 29632
  source 1..120: mol_type = other DNA

SEQ ID NO: 48517 - DNA, 120 bp, synthetic construct; identical to SEQ ID NO: 29633
  source 1..120: mol_type = other DNA

SEQ ID NO: 48518 - DNA, 120 bp, synthetic construct; identical to SEQ ID NO: 29607
  source 1..120: mol_type = other DNA

SEQ ID NO: 48519 - DNA, 120 bp, synthetic construct
  source 1..120: mol_type = other DNA
tagaggttgcagtgagccgagatcacaccactgcactccagcctgggcggcaagagtgaaactctgtctcaataaaaaaatgttaaatgctcccaaataagacagtattacataaattag

SEQ ID NO: 48520 - DNA, 120 bp, synthetic construct; identical to SEQ ID NO: 29609
  source 1..120: mol_type = other DNA

SEQ ID NO: 48521 - DNA, 120 bp, synthetic construct; identical to SEQ ID NO: 29610
  source 1..120: mol_type = other DNA

SEQ ID NO: 48522 - DNA, 120 bp, synthetic construct
  source 1..120: mol_type = other DNA
aggttcccaagtagctgggaatactggcgcatgccaccacacctggccaatttttataaagacggggtttcaccatgtcggccaggctggtctcaaactcctgacctcaagtgattctcc

SEQ ID NO: 48523 - DNA, 120 bp, synthetic construct; identical to SEQ ID NO: 29611
  source 1..120: mol_type = other DNA

SEQ ID NO: 48524 - DNA, 120 bp, synthetic construct; identical to SEQ ID NO: 29612
  source 1..120: mol_type = other DNA

SEQ ID NO: 48525 - DNA, 120 bp, synthetic construct; identical to SEQ ID NO: 29613
  source 1..120: mol_type = other DNA

SEQ ID NO: 48526 - DNA, 120 bp, synthetic construct
  source 1..120: mol_type = other DNA
aatgaataaataaactttgacacatccagatgatggaatattattcagcaataaaaagaaatgagctgtcaagccataaaaagacatggaggaaacttaagtgcatattactaagtgaaa

SEQ ID NO: 48527 - DNA, 120 bp, synthetic construct
  source 1..120: mol_type = other DNA
ggcctcccaaagtgctgggattaaaggcatgagccaccgttcccggccaatcagttgtatttctaagaactaataatagcatttggaaactgaaatcttaaagtcacttacaataatgta

SEQ ID NO: 48528 - DNA, 120 bp, synthetic construct
  source 1..120: mol_type = other DNA
cccctccctgtgtccctgtgttctcattgttcaactcccacttatgagtgaggacatgtgatgtttagttttctgttactgtgttagtttcctgagaatgatggtttccagcttcatcca

SEQ ID NO: 48529 - DNA, 120 bp, synthetic construct
  source 1..120: mol_type = other DNA
cactgtggttttaatttgcatttctctgatggccagtgatgaagagcattttttcatgtgtctgttggctgcataaatgtcttcttttgagaagtgtctgttcatatccttcgcccactt

SEQ ID NO: 48530 - DNA, 120 bp, synthetic construct
  source 1..120: mol_type = other DNA
catgagtgaactcccattcacaattgcttcaaagagaataaaatacctaggaatccaacttacaagggatgtgaaggacctcttcaaggagaactacaaaccactgctcaatgaaataaa

SEQ ID NO: 48531 - DNA, 120 bp, synthetic construct
  source 1..120: mol_type = other DNA
tattgaggattttttcatcgatgttcatcagggatattggtctaaaattctctttttttttctgtgtctctgccagcctttggtatcaggatgatgctggcctcataaagtgaattaggg

SEQ ID NO: 48532 - DNA, 120 bp, synthetic construct
  source 1..120: mol_type = other DNA
tgctcttgtattgggtgcatacatatttaagttagctcttcttgttgaattgatccctttaccattatgtaatggccttctttgtctcttttgatctttgttggtttaaagtctgtttta

SEQ ID NO: 48533 - DNA, 120 bp, synthetic construct; identical to SEQ ID NO: 29616
  source 1..120: mol_type = other DNA

SEQ ID NO: 48534 - DNA, 120 bp, synthetic construct; identical to SEQ ID NO: 29617
  source 1..120: mol_type = other DNA

SEQ ID NO: 48535 - DNA, 120 bp, synthetic construct; identical to SEQ ID NO: 29618
  source 1..120: mol_type = other DNA

SEQ ID NO: 48536 - DNA, 120 bp, synthetic construct; identical to SEQ ID NO: 29619
  source 1..120: mol_type = other DNA

SEQ ID NO: 48537 - DNA, 120 bp, synthetic construct; identical to SEQ ID NO: 29620
  source 1..120: mol_type = other DNA

SEQ ID NO: 48538 - DNA, 120 bp, synthetic construct; identical to SEQ ID NO: 29621
  source 1..120: mol_type = other DNA

SEQ ID NO: 48539 - DNA, 120 bp, synthetic construct; identical to SEQ ID NO: 29622
  source 1..120: mol_type = other DNA

SEQ ID NO: 48540 - DNA, 120 bp, synthetic construct
  source 1..120: mol_type = other DNA
ttcttatcaacaattactatcttttgttgccattgcttttggtgttttagacatgaagtccttgcccatgcctatgtcctgaatggtaatgcctaggttttcttctagggtttttatggt

SEQ ID NO: 48541 - DNA, 120 bp, synthetic construct
  source 1..120: mol_type = other DNA
tctagatatacaatcatgtcatctgcaaacagggacaatttgacttcctcttttcctaattgaataccctttatttccttctcctgcctaattgccaatgggatctaattaaactaaaga

SEQ ID NO: 48542 - DNA, 120 bp, synthetic construct
  source 1..120: mol_type = other DNA
tgagaacacatggacccaggaaggggaacgtcacactctggggactgttgtggggtggggggaggggggagggatagctttaggagatatacctaatgctaaatgacgagttaatgggtg

SEQ ID NO: 48543 - DNA, 120 bp, synthetic construct; identical to SEQ ID NO: 29623
  source 1..120: mol_type = other DNA

SEQ ID NO: 48544 - DNA, 120 bp, synthetic construct
  source 1..120: mol_type = other DNA
aggatcacttgaacctgggaggcagaggttatagtgagcagagaatgcaccactgcactccagcctgggagacagagcaagactctgtctcaaaaaaaaaaatacacatatatacgtatt

SEQ ID NO: 48545 - DNA, 120 bp, synthetic construct; identical to SEQ ID NO: 29624
  source 1..120: mol_type = other DNA

SEQ ID NO: 48546 - DNA, 120 bp, synthetic construct; identical to SEQ ID NO: 29625
  source 1..120: mol_type = other DNA

SEQ ID NO: 48547 - DNA, 120 bp, synthetic construct; identical to SEQ ID NO: 29626
  source 1..120: mol_type = other DNA

SEQ ID NO: 48548 - DNA, 120 bp, synthetic construct; identical to SEQ ID NO: 29627
  source 1..120: mol_type = other DNA

SEQ ID NO: 48549 - DNA, 120 bp, synthetic construct; identical to SEQ ID NO: 29628
  source 1..120: mol_type = other DNA

SEQ ID NO: 48550 - DNA, 120 bp, synthetic construct; identical to SEQ ID NO: 29629
  source 1..120: mol_type = other DNA

SEQ ID NO: 48551 - DNA, 120 bp, synthetic construct
  source 1..120: mol_type = other DNA
aatgggattgctgggctgaatggtagctctgttttaagttatttgagaaatctccaaactgctttccacagtggctgaactaaactaaagagcctcttcacagcaaaagaaactatcaac

SEQ ID NO: 48552 - DNA, 120 bp, synthetic construct; identical to SEQ ID NO: 21713
  source 1..120: mol_type = other DNA

SEQ ID NO: 48553 - DNA, 120 bp, synthetic construct
  source 1..120: mol_type = other DNA
tgtgaagagacacacataggctcaaaataaagggatggaggaagatctaccaagcaaaaggaaaacaaaaaacaggcaggggttgcaatcctagtctctgataaaacagactttaaacca

SEQ ID NO: 48554 - DNA, 120 bp, synthetic construct
  source 1..120: mol_type = other DNA
aaggggatatcaccacctatcccacagaaatacaaactaccatcagagaatactatgaacacctctatgcaaataaactagaaaatctagaagaaatggataaattcctcaacacataca

SEQ ID NO: 48555 - DNA, 120 bp, synthetic construct
  source 1..120: mol_type = other DNA
agtgttggaagttctgacaagggcaatcaggcaggagaaggaaataaagggtattcaattaggaaaagaggaagtcaaattgtccctgtttgcagatgacatgattgtatatctagaaaa

SEQ ID NO: 48556 - DNA, 120 bp, synthetic construct
  source 1..120: mol_type = other DNA
acaaaagacaaaattgacaaatgggatctaattaaaataaagagcttctgcatagcaaaagaaactatcatcagagggaacagacaacctacagaatgggagaaaaattttgcaatctac

SEQ ID NO: 48557 - DNA, 120 bp, synthetic construct
  source 1..120: mol_type = other DNA
cgggttaccgacaaagggaaacccatcagactaacagcggatctctcggcagaaactctacaagccagaagagagtgggggccaatattcaacattcttaaagaaaagaattttcaaccc

SEQ ID NO: 48558 - DNA, 120 bp, synthetic construct
  source 1..120: mol_type = other DNA
attaaggaactcactcaaaactgctcaactacatggaaactgaacaacctgctcctgattgattactgggtacataacgaaatggagtcagaaataaagatgttctttgaaaccgacgag

SEQ ID NO: 48559 - DNA, 120 bp, synthetic construct
  source 1..120: mol_type = other DNA
gcagcacatgaaaaagcttatccaccatgatcaagtgggcttcatccctgggatgcaaggctggttcaatatacacaaatcaataaatgtaatccagcatataaacagaacaaaagacaa

SEQ ID NO: 48560 - DNA, 120 bp, synthetic construct
  source 1..120: mol_type = other DNA
agagccctcggaaataacgctgcatatctacaactatgtgatctttgacaaacctgagaaaaacaagcaatggggaaaggattccctatttaataaatggtgctgggaaaactggctagc

SEQ ID NO: 48561 - DNA, 120 bp, synthetic construct
  source 1..120: mol_type = other DNA
accaaaatgtccaacaatgatagactggattaagaaaatgtggcacatatacaccatggaatactatgcagccataaaaaatgatgagttcatgtcctttgtagggacatggatgaaatt

SEQ ID NO: 48562 - DNA, 120 bp, synthetic construct
  source 1..120: mol_type = other DNA
tttatttgccatatatcttccttggtgaagtgattgaatttctgctcttttaaaaaattgagttgtttcttaaactagaaaatctagaagaaatggataaattcctcgacacatacaccc

SEQ ID NO: 48563 - DNA, 120 bp, synthetic construct; identical to SEQ ID NO: 21715
  source 1..120: mol_type = other DNA

SEQ ID NO: 48564 - DNA, 120 bp, synthetic construct
  source 1..120: mol_type = other DNA
ttgaggccaggtgatgcctccagctttgttcttttggcttaggattgacttggcgatgtgggctcttttttggttccatatgaactttaaagtagttttttccaattctgtgaagaaagt

SEQ ID NO: 48565 - DNA, 120 bp, synthetic construct
  source 1..120: mol_type = other DNA
tctctctggctgcccttaacattttttccctcatttcaactttggtgaatctgacagttattggtctgaaattttctttttttgtcgtgtctctgccaggttttggtatcaggatgatgc

SEQ ID NO: 48566 - DNA, 120 bp, synthetic construct; identical to SEQ ID NO: 21716
  source 1..120: mol_type = other DNA

SEQ ID NO: 48567 - DNA, 120 bp, synthetic construct
  source 1..120: mol_type = other DNA
acttaaatgtccctgtctgacagctttgaagagagcagtggttctcccagcacacagctggagatctgagaacgggcagactgcctcctcaagtgggtccctgacccctgacccctgagc

SEQ ID NO: 48568 - DNA, 120 bp, synthetic construct
  source 1..120: mol_type = other DNA
accaaagttgaaatgaaggaaaaaatgttaagggcagccagagagaaaggtcgggttactctcaaagggaagcccatcagactagcagcggatctcttggcagaaaccctacaagccaga

SEQ ID NO: 48569 - DNA, 120 bp, synthetic construct
  source 1..120: mol_type = other DNA
aacaaggacacccaggaattgaactcagctctgcaccaagcagacctaatagatatctacagaactctccaccccaaatcaacagaatatacatttttttcagcaccacaccacacctat

SEQ ID NO: 48570 - DNA, 120 bp, synthetic construct
  source 1..120: mol_type = other DNA
gattcacagctgaattctaccagaggtacaaggaggaactggtaccattccttctgaaactattccaatcaatagagaaagagggaatcctccctaactcattttatgaggccagcatca

SEQ ID NO: 48571 - DNA, 120 bp, synthetic construct
  source 1..120: mol_type = other DNA
ctaccaatgcctttcttcacagaattggaaaaaactactttaaagttcatatggaaccaaaaaagagcccgcatcgccaagtcaatcctaagccaaaagaacaaagctggaggcatcaca

SEQ ID NO: 48572 - DNA, 120 bp, synthetic construct
  source 1..120: mol_type = other DNA
gcgattcctcagggatctagaactggaaataccatttgacccagcaatcccattactgggtatatacccaaaggactataaatcatgctgctataaagacacatgcacacgtatgtttat

SEQ ID NO: 48573 - DNA, 120 bp, synthetic construct; identical to SEQ ID NO: 25354
  source 1..120: mol_type = other DNA

SEQ ID NO: 48574 - DNA, 120 bp, synthetic construct; identical to SEQ ID NO: 25355
  source 1..120: mol_type = other DNA

SEQ ID NO: 48575 - DNA, 120 bp, synthetic construct; identical to SEQ ID NO: 12430
  source 1..120: mol_type = other DNA

SEQ ID NO: 48576 - DNA, 120 bp, synthetic construct; identical to SEQ ID NO: 12431
  source 1..120: mol_type = other DNA

SEQ ID NO: 48577 - DNA, 120 bp, synthetic construct
  source 1..120: mol_type = other DNA
gggtgggtctgccttttccagtccactggctcaaatgttaatctcttttggccacaccctcacagaaacagtcaggaataatactttacatccttcaattcaatcaagttgacagtatta

SEQ ID NO: 48578 - DNA, 120 bp, synthetic construct
  source 1..120: mol_type = other DNA
ggtgcttttctttcagattaaagaactccctttagctttctcataggataggtctggtgttgatgaaatctctcagcttttgtttgtctgggaaagtcttgaattctccttcatgtttga

SEQ ID NO: 48579 - DNA, 120 bp, synthetic construct
  source 1..120: mol_type = other DNA
tgtatcctgagactgctgaagttgcttatcagcttaagaagctttggggctgaggcaatagggtttttgagatataggatcgcataaatgtcttcctttgagaagtgtctgttcatgtcc

SEQ ID NO: 48580 - DNA, 120 bp, synthetic construct
  source 1..120: mol_type = other DNA
tctctgtttgtctgttattggtgtataagaatgcttgtgatttttgtacattgattttgtatcctgagacttttctgaagttgcttatcagcttaaggagattttgggctgagacaacgg

SEQ ID NO: 48581 - DNA, 120 bp, synthetic construct
  source 1..120: mol_type = other DNA
agagcgagactctgtctaaaaaaaaaaaaatgaggaggggatgagaggctcaggggagacaggtggctggtgggggcgggggagtgggaaactgagaggccagaaggcagggaagacaga

SEQ ID NO: 48582 - DNA, 120 bp, synthetic construct
  source 1..120: mol_type = other DNA
gcagtgagccaagattgcgccattgcaacacagccttggcaacaggcaacagagcgaggctgggcaacagagcaagactccatctcaaaaagaataaaaataaataaaaataaataaaag

SEQ ID NO: 48583 - DNA, 120 bp, synthetic construct
  source 1..120: mol_type = other DNA
accctgccaaatccccctctgtgagaaacacccaagaatgatcaataaaagaaaaacaaacccaaaaaaaaaaaaaaaaaaaaagaaggcaaggtcttgactatcccttactcagtctgc

SEQ ID NO: 48584 - DNA, 120 bp, synthetic construct; identical to SEQ ID NO: 28424
  source 1..120: mol_type = other DNA

SEQ ID NO: 48585 - DNA, 120 bp, synthetic construct; identical to SEQ ID NO: 28425
  source 1..120: mol_type = other DNA

SEQ ID NO: 48586 - DNA, 120 bp, synthetic construct
  source 1..120: mol_type = other DNA
agcaaacttcattccatctacacccttaattctctctcgttgtgtaacataacacagtcacaggttccagggattagaatgtggacatctttagcgaggtcattattcttcctaccacag

SEQ ID NO: 48587 - DNA, 120 bp, synthetic construct; identical to SEQ ID NO: 32101
  source 1..120: mol_type = other DNA

SEQ ID NO: 48588 - DNA, 120 bp, synthetic construct
  source 1..120: mol_type = other DNA
tgggacggctgggtcaaatgatatttcttgttctagatacttgaggaattgccgcattgtcttccacaatggttgaactagtttacactcccaccaatggtgtaaaagtgttcctgtttc

SEQ ID NO: 48589 - DNA, 120 bp, synthetic construct
  source 1..120: mol_type = other DNA
cgtgatgaatgcacaagcttcagtagctgatttgatcaactggaagaaagggtatcagtgattgaagatcaaatgaatgaaatgaagtgagaagagaagtttagagaaaacagaggaaaa

SEQ ID NO: 48590 - DNA, 120 bp, synthetic construct
  source 1..120: mol_type = other DNA
caatacaggagcacccagattcataaagcaagtccttagagacctacaaagagacttagactcccacacaataataatgggagactttaacaccccactgtcagcattagatcaatgaga

SEQ ID NO: 48591 - DNA, 120 bp, synthetic construct
  source 1..120: mol_type = other DNA
agtccttaaaggacctgatgaagctgaaaaccacggcacgagaactacgtgataaatgcacaagcctcagtagctgattcgatcaactagaagaaagtatcagcgatggaagatgaaatg

SEQ ID NO: 48592 - DNA, 120 bp, synthetic construct
  source 1..120: mol_type = other DNA
ggagaactacaaaccactgctcaaggaaataaaagaggattcaaacaaatggaagaacattccatgctcctgggtgggaagaatcaatatcgtgaaaatggccatactgcccaaggtaat

SEQ ID NO: 48593 - DNA, 120 bp, synthetic construct
  source 1..120: mol_type = other DNA
atggtatttccagttctagatccctggggaatcaccacactgacttccacaatggttgaactagtttacagtcccaccaacagtgtaaaagtgttcctatttctccacatcctctccagc

SEQ ID NO: 48594 - DNA, 120 bp, synthetic construct; identical to SEQ ID NO: 32102
  source 1..120: mol_type = other DNA

SEQ ID NO: 48595 - DNA, 120 bp, synthetic construct
  source 1..120: mol_type = other DNA
ttcttatccagccaaactaagcttcataagtgaaggagaaataaaatcctttacacacaagcaaatgctgagagattttgtcaccaccaggcctgccctaaaagagctcctgaaggaagc

SEQ ID NO: 48596 - DNA, 120 bp, synthetic construct
  source 1..120: mol_type = other DNA
caccccactgtcaacattagacagatcaacgagacagaaagttaacaaagatatccaggaattgaactcagctctgcaccaagcagacctaatagacatctacagaactctccaccccaa

SEQ ID NO: 48597 - DNA, 120 bp, synthetic construct; identical to SEQ ID NO: 32103
  source 1..120: mol_type = other DNA

SEQ ID NO: 48598 - DNA, 120 bp, synthetic construct
  source 1..120: mol_type = other DNA
accacactgacttccacaatggtagaactagtttacagtcccaccaacagtgtaaaagtgttcctatttctccacatcctctccagcacctgttgtttcctgactttttaatgattgcca

SEQ ID NO: 48599 - DNA, 120 bp, synthetic construct; identical to SEQ ID NO: 32104
  source 1..120: mol_type = other DNA

SEQ ID NO: 48600 - DNA, 120 bp, synthetic construct
  source 1..120: mol_type = other DNA
gtgatggtgagcattttttcatgtgttttttggctgcataaatgtcttcttttgagtagtgtctgttcatgtccttcgccccctttttgatggggttgtttttttcttttaaatttgttt

SEQ ID NO: 48601 - DNA, 120 bp, synthetic construct
  source 1..120: mol_type = other DNA
tctttgaagcaattgtgaatgggagttcactcatgatttggatgtctgtctgtctgttattggtgtataagaatgcttgtgatttttgcacattgattttgtatccagagactttgctga

SEQ ID NO: 48602 - DNA, 120 bp, synthetic construct
  source 1..120: mol_type = other DNA
tgggcttccctttgtgggtaacctgacctttctctctggctgccagtgatgggatggctgggtcaaatggtatttctagttctagatccttgaggagtcgccatactgtcttccacaatg

SEQ ID NO: 48603 - DNA, 120 bp, synthetic construct; identical to SEQ ID NO: 32098
  source 1..120: mol_type = other DNA

SEQ ID NO: 48604 - DNA, 120 bp, synthetic construct
  source 1..120: mol_type = other DNA
gttcatatccttcgcccacttgttgatggggttgtttttttcctgtaaatttgtttgagttctttgtagattctggatattagccctttgtcagatgagtagattgcaaaaattttctcc

SEQ ID NO: 48605 - DNA, 120 bp, synthetic construct
  source 1..120: mol_type = other DNA
tcactgatgatttggctccctgtttgtctgttattggtgtataagaatgcttgtgatttttgcacattgattttgtatcctgagactttgctgaagttgcttatcagcttaaggagattt

SEQ ID NO: 48606 - DNA, 120 bp, synthetic construct
  source 1..120: mol_type = other DNA
cccctgaaccctgagcagcctaactgggaggcaccccccagtagaggcagactgacacctcacacggccgggtactcctctgagacaaaacttccagaggaacgatcagacagcagcatt

SEQ ID NO: 48607 - DNA, 120 bp, synthetic construct
  source 1..120: mol_type = other DNA
caaagttgaaatgaaggaaaaaatgttaagggcagccagagagaaaggtcgggttgcccacaaagggaagcccatcagactaacagtggatctctcggcagaaactctacaagccagaag

SEQ ID NO: 48608 - DNA, 120 bp, synthetic construct
  source 1..120: mol_type = other DNA
tgagaaattataacaaactgtctctcagaccacagtgcaatcaaactagaactcaggattaagaaactcactcaaaactgctcaactacatggaaactgaacaacctgctcctgaatgac

SEQ ID NO: 48609 - DNA, 120 bp, synthetic construct
  source 1..120: mol_type = other DNA
agacaaaaaccacatgattatctcaatagatgcagaaaaggcctttgacaaaattcaacaacccttcatgctaaaaactctcaataaattaggtattgatgggacgtgtctcaaaataat

SEQ ID NO: 48610 - DNA, 120 bp, synthetic construct
  source 1..120: mol_type = other DNA
ctggagacatcatgctacctgacttcaaactatactacaaggctacagtaaccaaaacagtatggtactggtaccaaaacagagatatagatcaatagaacagaacagagcactctgaaa

SEQ ID NO: 48611 - DNA, 120 bp, synthetic construct
  source 1..120: mol_type = other DNA
cagcctgggcaacagagcaagactctatctcaaaaacaaaacaaaagaaaaagtaataaaatgcacacaaaaaagaaaatatctaaacctaaactttaaggtgtggttgtgcacaacccg

SEQ ID NO: 48612 - DNA, 120 bp, synthetic construct
  source 1..120: mol_type = other DNA
tctagttctagatccctgaggaatcaccacactgacttccacaatatttttactttatgtttttttctttactgctgtgtaaatacttttgataataccaggtctctgcttttggagaac

SEQ ID NO: 48613 - DNA, 120 bp, synthetic construct
  source 1..120: mol_type = other DNA
tgggatctaattaaactaaagagctcctgcacagcaaaagaagctaccatcagagcgaacaggtaacctacagaatgggagaaaatttttggaatctactcatctgacaaagggctaata

SEQ ID NO: 48614 - DNA, 120 bp, synthetic construct
  source 1..120: mol_type = other DNA
atatatatatatatatatatataagagatgtggtctcattctgttacctagactggagtgcagtggcacaatcatagctcactgcaaccttgaactcctgggctcaagcaatcctcctgc

SEQ ID NO: 48615 - DNA, 120 bp, synthetic construct; identical to SEQ ID NO: 32099
  source 1..120: mol_type = other DNA

SEQ ID NO: 48616 - DNA, 120 bp, synthetic construct; identical to SEQ ID NO: 32100
  source 1..120: mol_type = other DNA

SEQ ID NO: 48617 - DNA, 120 bp, synthetic construct; identical to SEQ ID NO: 24112
  source 1..120: mol_type = other DNA

SEQ ID NO: 48618 - DNA, 120 bp, synthetic construct; identical to SEQ ID NO: 24113
  source 1..120: mol_type = other DNA

SEQ ID NO: 48619 - DNA, 120 bp, synthetic construct
  source 1..120: mol_type = other DNA
cttatacaccaataacagacaaacagagagccaaatcgtgagtgaactcccattcacaattgcttcaaagagaataaaatgcctaggaatccaacttacaagagatgtgaaggacctctt

SEQ ID NO: 48620 - DNA, 120 bp, synthetic construct
  source 1..120: mol_type = other DNA
ggctaatatccagaatctacaatgaactcagacaaatttacaagaaaaaaacaagcccatcaacaagtgggcgaaggatatgaacagacatttctcaaaagaagacatttatacagccaa

SEQ ID NO: 48621 - DNA, 120 bp, synthetic construct; identical to SEQ ID NO: 18946
  source 1..120: mol_type = other DNA

SEQ ID NO: 48622 - DNA, 120 bp, synthetic construct
  source 1..120: mol_type = other DNA
tccctctacatagacacagcaacaatctgatttctctatcttttccccacatttcccttttctattcgacaaaactgccattgtcatcatggcccgttctcaatgagctgttgggtacac

SEQ ID NO: 48623 - DNA, 120 bp, synthetic construct
  source 1..120: mol_type = other DNA
gttccttttataatggtattaatcccacccatgaaggcagagcactcatggcctgaacaccctccgaggtcccacctcttaatactgttacaatggcaattaaatttcaacatgagtttt

SEQ ID NO: 48624 - DNA, 120 bp, synthetic construct; identical to SEQ ID NO: 18948
  source 1..120: mol_type = other DNA

SEQ ID NO: 48625 - DNA, 120 bp, synthetic construct; identical to SEQ ID NO: 18949
  source 1..120: mol_type = other DNA

SEQ ID NO: 48626 - DNA, 120 bp, synthetic construct
  source 1..120: mol_type = other DNA
gaaaaaactactttcaagttcatatggaaccaaaaaagagcccacattgccaagtcaatcctaagccaaaagaacaaagctggaggcatcatgctacctgacttcaaactatactacaag

SEQ ID NO: 48627 - DNA, 120 bp, synthetic construct
  source 1..120: mol_type = other DNA
agaatggcaatcattaaaaagtcaggaaacaacaggtgctggagaggatggggagaaataggaacacttttacactgttggtgggactgtaaactagttcaaccattgtggaagtcagtg

SEQ ID NO: 48628 - DNA, 120 bp, synthetic construct
  source 1..120: mol_type = other DNA
aagtcaaattgtccctgtttgcagacgacatgattgtatatttagaaaaccccatcgtttcagcccaaaatctccttaagctgataagcaacttcagcaaagtctcaggatacaaaatca

SEQ ID NO: 48629 - DNA, 120 bp, synthetic construct; identical to SEQ ID NO: 11775
  source 1..120: mol_type = other DNA

SEQ ID NO: 48630 - DNA, 120 bp, synthetic construct; identical to SEQ ID NO: 11776
  source 1..120: mol_type = other DNA

SEQ ID NO: 48631 - DNA, 120 bp, synthetic construct
  source 1..120: mol_type = other DNA
aaccaaaatagacaaatgggatctaattaaagagcttctgcacagcaaaagaaactaccatcagagtgaacaggcaacctacagaatgggagaaaatttttgcaatctactcatctgaca

SEQ ID NO: 48632 - DNA, 120 bp, synthetic construct
  source 1..120: mol_type = other DNA
aatgggtgcagcacaccaacatggcacatgtatacatatgtaacaaacctgcacgttgagtacatgtaccctagaacttaaagtatttttaaaaaatcatataaatcaattttagatgaa

SEQ ID NO: 48633 - DNA, 120 bp, synthetic construct
  source 1..120: mol_type = other DNA
atcccctgggcctttttcctctatttttctactttatgttaaactgcttttatatgcaaataattgtgtaggggtgggttgcccctacacacctgtgggtgtttctcgtaaggtgggaca

SEQ ID NO: 48634 - DNA, 120 bp, synthetic construct
  source 1..120: mol_type = other DNA
acttctttctacacagacacagtaacaatctgatctctcttgcttttccccacataattgtcttttgtctctgtctgctctttttttcttcttttaatcttcctttttcattgatttttt

SEQ ID NO: 48635 - DNA, 120 bp, synthetic construct; identical to SEQ ID NO: 33168
  source 1..120: mol_type = other DNA

SEQ ID NO: 48636 - DNA, 120 bp, synthetic construct; identical to SEQ ID NO: 33169
  source 1..120: mol_type = other DNA

SEQ ID NO: 48637 - DNA, 120 bp, synthetic construct
  source 1..120: mol_type = other DNA
taccatgtacaccaactactattttattttaaatattaagcttcgaagagttttaggaaggaaggaaggaaagggaagggaagggaagggaaggaaaggaaagggaagggaagggaaggg

SEQ ID NO: 48638 - DNA, 120 bp, synthetic construct; identical to SEQ ID NO: 33149
  source 1..120: mol_type = other DNA

SEQ ID NO: 48639 - DNA, 120 bp, synthetic construct; identical to SEQ ID NO: 33150
  source 1..120: mol_type = other DNA

SEQ ID NO: 48640 - DNA, 120 bp, synthetic construct; identical to SEQ ID NO: 33151
  source 1..120: mol_type = other DNA

SEQ ID NO: 48641 - DNA, 120 bp, synthetic construct; identical to SEQ ID NO: 24542
  source 1..120: mol_type = other DNA

SEQ ID NO: 48642 - DNA, 120 bp, synthetic construct; identical to SEQ ID NO: 26996
  source 1..120: mol_type = other DNA

SEQ ID NO: 48643 - DNA, 120 bp, synthetic construct
  source 1..120: mol_type = other DNA
tttcttgtaaatttgtttgagtttgttgtagattctggatattagccctttgtcagatgagtaggttgcaaaaattttctcccattctgtaggttgcctgttcactctgatggtagtttc

SEQ ID NO: 48644 - DNA, 120 bp, synthetic construct
  source 1..120: mol_type = other DNA
gacaatggggttttctagatatacaatcatgtcttctgcaaagagggacaatttgacttcctcttttcctaattgaataccgtttatttctttctcctgcctaattgccctggccagaac

SEQ ID NO: 48645 - DNA, 120 bp, synthetic construct
  source 1..120: mol_type = other DNA
gaagggttttttgtgtctctatttccttcagttctgctcagattttagttatttcttgccttctgctagcttttgaatgtgtttgctcttgcttttctagttcttttaattgtgatgtta

SEQ ID NO: 48646 - DNA, 120 bp, synthetic construct
  source 1..120: mol_type = other DNA
ttttgttttccatttgcttggtagatcttcctccatccttttattttgagcctatgtgtgactctgcacgtgagatgggtttcctgaatacagcacactgatgagtcttgactctttatc

SEQ ID NO: 48647 - DNA, 120 bp, synthetic construct
  source 1..120: mol_type = other DNA
cttcccttctcgcttcatttcattcatttcttcttccattgctgataccctttctttcagttgatcacatcagctcctgaggcttctgcattcgtcacgtagttctcgagccttggtttt

SEQ ID NO: 48648 - DNA, 120 bp, synthetic construct
  source 1..120: mol_type = other DNA
tgctccgttttttaagcctgtcggaaaagtgcagtattcgggtgggagtgacccgattttccaggtgccatctgtcacccctttctttgactcagaaagggaactccctgaccccttgca

SEQ ID NO: 48649 - DNA, 120 bp, synthetic construct; identical to SEQ ID NO: 26997
  source 1..120: mol_type = other DNA

SEQ ID NO: 48650 - DNA, 120 bp, synthetic construct
  source 1..120: mol_type = other DNA
taatgggatggctgggtcaaatggtatttccagttctagatccctggggaatcaccacactgacttccacaatggttgaactagtttacagtcccaccaacagtgtaaaagtgttcctat

SEQ ID NO: 48651 - DNA, 120 bp, synthetic construct
  source 1..120: mol_type = other DNA
agtaccatgctgttttggttactgtagccttgtagtatagtttgaagtcaggtagtgtgatgcctccagctttgttcttttggcttaggattgacttggcgatttgggctcttttttggt

SEQ ID NO: 48652 - DNA, 120 bp, synthetic construct
  source 1..120: mol_type = other DNA
cccggctttggtatcagaatgatgctggcctcataaaatgagttagggaggattccctctttttctattgattggaatagtttcagaaggaatggtaccagttcctccttttacctatgg

SEQ ID NO: 48653 - DNA, 120 bp, synthetic construct
  source 1..120: mol_type = other DNA
gaggagtgctttacttccaagtatgtggtcaattttggaataggtgtggtgtggtgctgaaaaaaatgtatattctgttgatttggggtggagagttctgtagatgtctattaggtccgc

SEQ ID NO: 48654 - DNA, 120 bp, synthetic construct
  source 1..120: mol_type = other DNA
gctattagtctgatgggcttccctttgagggtaacgtgacctttctctctggctgcccttaacattttttccttcatttcaactttggtgaatctgacaattatgtgtcttggagttgct

SEQ ID NO: 48655 - DNA, 120 bp, synthetic construct
  source 1..120: mol_type = other DNA
gcctacagaggcaggcaggcctccttgagctgtggtgggctccacccagttagagcttccgggctgctttgtttacctaatcaagccggggcaatggtgggcgcccctcccccagcctcg

SEQ ID NO: 48656 - DNA, 120 bp, synthetic construct
  source 1..120: mol_type = other DNA
tgtataagaatgcttgtgatttttgtacattgattttgtatcctgagactttgctgaagttgcttatcagcttaaggagattttgggctgagacaatggggttttctagagcaatcctaa

SEQ ID NO: 48657 - DNA, 120 bp, synthetic construct
  source 1..120: mol_type = other DNA
cattgtggaagtcagtgtggcgattcctcagggatctagaactggaaataccatcccattactgggtatatacccagccatcccattactgggtatatacccaaaggactataaatcatg

SEQ ID NO: 48658 - DNA, 120 bp, synthetic construct; identical to SEQ ID NO: 14625
  source 1..120: mol_type = other DNA

SEQ ID NO: 48659 - DNA, 120 bp, synthetic construct
  source 1..120: mol_type = other DNA
atcttggctcactgcaacctccacctcccaggttcaggcgattcccctacctcagcctcccgagtagctgggattacaggtgcgcgccaccacgcccggctgatttttgtatttttagta

SEQ ID NO: 48660 - DNA, 120 bp, synthetic construct
  source 1..120: mol_type = other DNA
catctcaaaaaaaaaaaaaaaaatttggttcctcagtcacactccaaggctcaatatagcatacaggctgggggttaccctattggacagaacatctttaaacctcccaggcctagtacc

SEQ ID NO: 48661 - DNA, 120 bp, synthetic construct
  source 1..120: mol_type = other DNA
cactgaggtctgagcccccagaacgcaaaggggcttcttagaaaacaccctagctctggagatttctaattctggactcaagcctagcgtctacctcttaattttattttcattttattt

SEQ ID NO: 48662 - DNA, 120 bp, synthetic construct
  source 1..120: mol_type = other DNA
tgatcttatgcagggagggcaggtggactatgtgtggactctggtgatctgtttgggtgccaggtgttactcccagggccacccataactgtgaatgtgcaggaaccctgacttaggttc

SEQ ID NO: 48663 - DNA, 120 bp, synthetic construct
  source 1..120: mol_type = other DNA
aggcagaagaatggcgcgaacccaggaggtggagcttgcagtgagccgagatgcgccactgcactccagcctcagcgacagagtgagactccgtctcaaaaaaaaaaaaaaaaaagcttg

SEQ ID NO: 48664 - DNA, 120 bp, synthetic construct
  source 1..120: mol_type = other DNA
gtgtatttcatcgcgtccccgttgtttatatcagctattccactcaccacccttctgggcaaccctttatctcccgctctgaaatcccatcgctgagggctgggacccctcctcagtgct

SEQ ID NO: 48665 - DNA, 120 bp, synthetic construct
  source 1..120: mol_type = other DNA
aggccttggtctagcggtggccccagtgcctgggaaggcacccgttacttagcagaattactacgcagccataaaaaaggatgagttcatgacctctgcgggaacgtggagggaggaaaa

SEQ ID NO: 48666 - DNA, 120 bp, synthetic construct
  source 1..120: mol_type = other DNA
cctcggcctcccaaagtgttgtgattacaggcgtgagccaccacgcctggctgtctgtctttgtttttatatctgtagtaattttcaaacataaatgtagagagaatattctagtgaatc

SEQ ID NO: 48667 - DNA, 120 bp, synthetic construct; identical to SEQ ID NO: 7517
  source 1..120: mol_type = other DNA

SEQ ID NO: 48668 - DNA, 120 bp, synthetic construct
  source 1..120: mol_type = other DNA
ctagaactagaaataccatttgacccagccatcccattactgggtatatacccaaaggactataaatcatgctgctataaagacacatgcacacatatgtttattgcggcactattcaca

SEQ ID NO: 48669 - DNA, 120 bp, synthetic construct; identical to SEQ ID NO: 3856
  source 1..120: mol_type = other DNA

SEQ ID NO: 48670 - DNA, 120 bp, synthetic construct; identical to SEQ ID NO: 15480
  source 1..120: mol_type = other DNA

SEQ ID NO: 48671 - DNA, 120 bp, synthetic construct
  source 1..120: mol_type = other DNA
agtgtccctcatcattcaaatctatctggcttcagtgtttggataggaagaattcagatagtctagatagtgggtttaggggatgccaaattatccaaatctatttggttgccatgttct

SEQ ID NO: 48672 - DNA, 120 bp, synthetic construct
  source 1..120: mol_type = other DNA
ttaatttacaactgcagctctactttgtgagctcacagattaaataaaaagaacactgtctagttttacctctagagctttcagttgcagccggtcacgttcttctttttctttgccaat

SEQ ID NO: 48673 - DNA, 120 bp, synthetic construct
  source 1..120: mol_type = other DNA
cttatgaaatttgcattctagtgggaaagagacactgttgatgtgttatttcttatatgcgtctttccttcccagtcttgcagaaggaacccatctgcccccactgtagtgcagtttcaa

SEQ ID NO: 48674 - DNA, 120 bp, synthetic construct; identical to SEQ ID NO: 13135
  source 1..120: mol_type = other DNA

SEQ ID NO: 48675 - DNA, 120 bp, synthetic construct
  source 1..120: mol_type = other DNA
tcccatgtctacctctttctacacagacacggcaaccatccgatttctcaatcttttccccacctttcccccctttctattccacaaaactgccattgtcatcatggcccgttctcaatg

SEQ ID NO: 48676 - DNA, 120 bp, synthetic construct
  source 1..120: mol_type = other DNA
gcgaaaccccgtctccacccaaaaaataggaaaaccagtcaggcgtggcggcgcgcgcctgcaatcgcaggcactcggcaggctgaggcaggagaatcaggcagggaggttgcagtgagc

SEQ ID NO: 48677 - DNA, 120 bp, synthetic construct; identical to SEQ ID NO: 13136
  source 1..120: mol_type = other DNA

SEQ ID NO: 48678 - DNA, 120 bp, synthetic construct; identical to SEQ ID NO: 13137
  source 1..120: mol_type = other DNA

SEQ ID NO: 48679 - DNA, 120 bp, synthetic construct
  source 1..120: mol_type = other DNA
gtgagatggtatctcattgtggttttgatttgcatttccctgatggccagtgatggtgagcattttttcatgtgttttttggctgcataaatgtcttcttttgagaagtgtctgttcatg

SEQ ID NO: 48680 - DNA, 120 bp, synthetic construct
  source 1..120: mol_type = other DNA
taagttggattcctaggtattttattctctttgaagcaattgtgaatgagagttcactcctgatttggtcctctgtttgtctcttattggtgtataagaatgcttgtgatttttgcacat

SEQ ID NO: 48681 - DNA, 120 bp, synthetic construct
  source 1..120: mol_type = other DNA
actctttttggttggtaagctattgattattgccacaatttcagctcctgttattggtctattcagagattcaacttcttcctggtttagtcttgggagagtgtatgtgtcaaggaattt

SEQ ID NO: 48682 - DNA, 120 bp, synthetic construct
  source 1..120: mol_type = other DNA
tttctgtctcattgatctgtctaatgttgacagtggggtgttaaagtctcccattattaatgtgtgggagtctaagtctctttctaggtcgctcaggacttgctttatgaatctgggtgc

SEQ ID NO: 48683 - DNA, 120 bp, synthetic construct
  source 1..120: mol_type = other DNA
tttgtggcgttctctgtatttcctgaatctgaatgttggcctgccttgctagattggggaagttctcctggataatatcctgcagagtgttttccaacttggttccattctccgcatcac

SEQ ID NO: 48684 - DNA, 120 bp, synthetic construct
  source 1..120: mol_type = other DNA
cagggacccactcgaggaggcagtctgcccgttctcagatctccagctgcctgctgggagaaccactgctctcttcaaagctgtcagacagggacatttaagtctgcagaggttactgct

SEQ ID NO: 48685 - DNA, 120 bp, synthetic construct
  source 1..120: mol_type = other DNA
ctcattgaagccaaaaaaacaaagctggaggcatcacgctacctgacttcaaactatactacaaggctacagtaaccaaaacagcatggtactggtaccaaaacagagatatagaccaat

SEQ ID NO: 48686 - DNA, 120 bp, synthetic construct
  source 1..120: mol_type = other DNA
ttggtgggactgtaaactagttcaaccattgtggaagacagtgtggcgattcctgaaggatctagaactagaaataccatttgacccagccatcccattactgggtatatacccaaagga

SEQ ID NO: 48687 - DNA, 120 bp, synthetic construct
  source 1..120: mol_type = other DNA
tgaggcacagcgggtgagattcagcccaggcagccgtaccagccttaacctctgtgccccaagcataaaggaactcccctttcccttggagtaaattcctgaaccacccccctagttttc

SEQ ID NO: 48688 - DNA, 120 bp, synthetic construct; identical to SEQ ID NO: 18570
  source 1..120: mol_type = other DNA

SEQ ID NO: 48689 - DNA, 120 bp, synthetic construct; identical to SEQ ID NO: 18571
  source 1..120: mol_type = other DNA

SEQ ID NO: 48690 - DNA, 120 bp, synthetic construct
  source 1..120: mol_type = other DNA
agaaaaactgaaataaaaatacaggtttacaagtaaaaatgagatctttaaaatataacagtggggctgggtgcagtgactcttgcctgtaatcccagcactttgggaggctgaggcggg

SEQ ID NO: 48691 - DNA, 120 bp, synthetic construct; identical to SEQ ID NO: 24968
  source 1..120: mol_type = other DNA

SEQ ID NO: 48692 - DNA, 120 bp, synthetic construct; identical to SEQ ID NO: 18643
  source 1..120: mol_type = other DNA

SEQ ID NO: 48693 - DNA, 120 bp, synthetic construct
  source 1..120: mol_type = other DNA
gtagatgggtagatggatggatggatggatggtagatggatggatgggtggatggatacatggatgggtgggtgaatggataaatgggtgggtggatggatggatggatggataggtggg

SEQ ID NO: 48694 - DNA, 120 bp, synthetic construct; identical to SEQ ID NO: 18644
  source 1..120: mol_type = other DNA

SEQ ID NO: 48695 - DNA, 120 bp, synthetic construct; identical to SEQ ID NO: 18645
  source 1..120: mol_type = other DNA

SEQ ID NO: 48696 - DNA, 120 bp, synthetic construct; identical to SEQ ID NO: 18646
  source 1..120: mol_type = other DNA

SEQ ID NO: 48697 - DNA, 120 bp, synthetic construct; identical to SEQ ID NO: 18647
  source 1..120: mol_type = other DNA

SEQ ID NO: 48698 - DNA, 120 bp, synthetic construct; identical to SEQ ID NO: 18648
  source 1..120: mol_type = other DNA

SEQ ID NO: 48699 - DNA, 120 bp, synthetic construct; identical to SEQ ID NO: 18649
  source 1..120: mol_type = other DNA

SEQ ID NO: 48700 - DNA, 120 bp, synthetic construct; identical to SEQ ID NO: 18650
  source 1..120: mol_type = other DNA

SEQ ID NO: 48701 - DNA, 120 bp, synthetic construct
  source 1..120: mol_type = other DNA
acctgtgcatgtgtctttatagcagcatgatttgtagtcctttgggtatatacccagtaatgggatggctgggtcaaatggtatttctagttctagatccctgaggaatcaccacactga

SEQ ID NO: 48702 - DNA, 120 bp, synthetic construct; identical to SEQ ID NO: 10776
  source 1..120: mol_type = other DNA

SEQ ID NO: 48703 - DNA, 120 bp, synthetic construct; identical to SEQ ID NO: 10777
  source 1..120: mol_type = other DNA

SEQ ID NO: 48704 - DNA, 120 bp, synthetic construct
  source 1..120: mol_type = other DNA
gctcacgcctgtaatcccaacagtttgggaggccgaggcaggcggattatgaggttaggagatcgagaccattctgggtaacacagtgaaaccccgcctctagtaaaaacacaaaaaatt

SEQ ID NO: 48705 - DNA, 120 bp, synthetic construct; identical to SEQ ID NO: 10778
  source 1..120: mol_type = other DNA

SEQ ID NO: 48706 - DNA, 120 bp, synthetic construct; identical to SEQ ID NO: 10779
  source 1..120: mol_type = other DNA

SEQ ID NO: 48707 - DNA, 120 bp, synthetic construct
  source 1..120: mol_type = other DNA
taggttgcctgttcactctgatggtactttcttttgctgtacagaagctctttagtttaattagatcccttttgtcaattttgtcttttgttgccattgcttttggtgttttagacgtga

SEQ ID NO: 48708 - DNA, 120 bp, synthetic construct; identical to SEQ ID NO: 13269
  source 1..120: mol_type = other DNA

SEQ ID NO: 48709 - DNA, 120 bp, synthetic construct; identical to SEQ ID NO: 13270
  source 1..120: mol_type = other DNA

SEQ ID NO: 48710 - DNA, 120 bp, synthetic construct
  source 1..120: mol_type = other DNA
ccccacctccctcccggacagggtggctgccgggcggagacgctcctcacttcccagacggggtggctgccgggcggagaggctcctcacttctcagatggggcggctgccgggcggagg

SEQ ID NO: 48711 - DNA, 120 bp, synthetic construct; identical to SEQ ID NO: 13271
  source 1..120: mol_type = other DNA

SEQ ID NO: 48712 - DNA, 120 bp, synthetic construct; identical to SEQ ID NO: 13272
  source 1..120: mol_type = other DNA

SEQ ID NO: 48713 - DNA, 120 bp, synthetic construct; identical to SEQ ID NO: 13273
  source 1..120: mol_type = other DNA

SEQ ID NO: 48714 - DNA, 120 bp, synthetic construct
  source 1..120: mol_type = other DNA
acagagagctgattggtccattttgatagagtgctgattggtgcgtttacaatccctgagttagacacagagtgctgattggtgcatttgcaatcctctagctagacataaaagttctcc

SEQ ID NO: 48715 - DNA, 120 bp, synthetic construct
  source 1..120: mol_type = other DNA
taagcgcatcactgccaggcaccggcaccggccagccgctcctagtgcgtggccctccgagcttacgcccacccggaactcgtgctggcctgggagcatggcacgcagactcggttccca

SEQ ID NO: 48716 - DNA, 120 bp, synthetic construct; identical to SEQ ID NO: 13274
  source 1..120: mol_type = other DNA

SEQ ID NO: 48717 - DNA, 120 bp, synthetic construct
  source 1..120: mol_type = other DNA
agagtacttagttcatgaatggaagatgcaaaaaccatcaccaacaccatcatcatcatcaccatcatcctcatcaccatcatcaccatcaccatcatcatcatcatcaccatcaccatc

SEQ ID NO: 48718 - DNA, 120 bp, synthetic construct; identical to SEQ ID NO: 13275
  source 1..120: mol_type = other DNA

SEQ ID NO: 48719 - DNA, 120 bp, synthetic construct
  source 1..120: mol_type = other DNA
ctgaggtcagaagttcaagaccagcctggtcaacatggtgaaacaccatctggctatggcgaggtgccaatgactttcttcacagaattggaaaaaaatactttaaagttcatatagaac

SEQ ID NO: 48720 - DNA, 120 bp, synthetic construct
  source 1..120: mol_type = other DNA
taaaccagttcaaccattgtggaagacagtgtggcgattactcagggatctagaactagaaataccatttgacccagccatcccattactgggtatatacccaaaggattataaatcatg

SEQ ID NO: 48721 - DNA, 120 bp, synthetic construct
  source 1..120: mol_type = other DNA
tgaattacagagatcttgtccttacttctttgagctatggaacttagctcagcaacttttttctttttttgtatatgtgagacagagtctccctctgtcacccaggctggagtgtagtgg

SEQ ID NO: 48722 - DNA, 120 bp, synthetic construct
  source 1..120: mol_type = other DNA
caaagccgccattgtcatcctggcccgttctcaatgagctgttgggcacacctcccagacggggtggtggccgggcagaggggctcctcacttcccagtaggggcggccgggcagaggcg

SEQ ID NO: 48723 - DNA, 120 bp, synthetic construct
  source 1..120: mol_type = other DNA
ggccaaggcaggcggctgggaggtgtaggttgtagcgagccgagatcacgccactgcactccagtctgggcaccattgagcactgagtgaacgagactccgtctgcaatcccggcacctc

SEQ ID NO: 48724 - DNA, 120 bp, synthetic construct; identical to SEQ ID NO: 13225
  source 1..120: mol_type = other DNA

SEQ ID NO: 48725 - DNA, 120 bp, synthetic construct; identical to SEQ ID NO: 13226
  source 1..120: mol_type = other DNA

SEQ ID NO: 48726 - DNA, 120 bp, synthetic construct; identical to SEQ ID NO: 12912
  source 1..120: mol_type = other DNA

SEQ ID NO: 48727 - DNA, 120 bp, synthetic construct
  source 1..120: mol_type = other DNA
ggcacacctcccagacggggtggtggccgggcagaggggctcctcacttcccagtaggggcggccgggcagaggggctcctcacttcccagtaggggcggccgggcagaggcacccctca

SEQ ID NO: 48728 - DNA, 120 bp, synthetic construct
  source 1..120: mol_type = other DNA
ccggccaacacagcgaaaccccgtctccaccaaaaaaatacgaaaaccagtcaggcgtggaggcgcgcgcctgcaatcgcaggcactcggcaggctgaggcaggagaatcaggcagggag

SEQ ID NO: 48729 - DNA, 120 bp, synthetic construct
  source 1..120: mol_type = other DNA
tggaggctgtagtgaactgtgatagcaacactgccctccagcctgggtgacagagcgagaccctgtctcaaaaaaattaaaaaaagaaaaaaagaaaaatgctcaaggctactagaagta

SEQ ID NO: 48730 - DNA, 120 bp, synthetic construct
  source 1..120: mol_type = other DNA
gggttcaagcagtgcaactgcctttgcctcccaaagggctgggattataggcttgagctgctgtgcctggccaactttctgacttttaaaaatattatatgtatttgtgaaatgcaaaaa

SEQ ID NO: 48731 - DNA, 120 bp, synthetic construct
  source 1..120: mol_type = other DNA
acttctcagacggggtggctgccgggcggaggggttcttcacttctcagacggggcggctgccgggtagaggggctcctcacttctcagacggggcggctgccgggtggaggggctcctc

SEQ ID NO: 48732 - DNA, 120 bp, synthetic construct
  source 1..120: mol_type = other DNA
ctttccagaaagcatcagctgtagtagtgtgtggagagggaccagccatggtgagggccctagaactctcaagattatatgtcttttgtcttccgataccagggtggatagagaaggacc

SEQ ID NO: 48733 - DNA, 120 bp, synthetic construct
  source 1..120: mol_type = other DNA
ttatagtattcttgccagatagaaattgtcctggagtttccctagctgtgttcaaattatttctgaaggatcacagatactcactcccttccttccttccttccttccttcccttccctt

SEQ ID NO: 48734 - DNA, 120 bp, synthetic construct
  source 1..120: mol_type = other DNA
ctttcatatactttggtgttactgttgagcatcctttcatttcaactttaagaattccctttatcggacgtgaaggacctcttcaaggagaactacaaaccactgctcaatgaaataaaa

SEQ ID NO: 48735 - DNA, 120 bp, synthetic construct
  source 1..120: mol_type = other DNA
ggcgaaggacatgagcaaacacttctcaaaagaagacatttatgcagccaaaaaacacatgaaaaaatgctcaccatcactggccatcagagaaatgcaaatcaaaaccacaatgagata

SEQ ID NO: 48736 - DNA, 120 bp, synthetic construct
  source 1..120: mol_type = other DNA
acacataattgtcagattcaccaaggttgaaatgaagggaaaaatgttaagggcagctggagagaaagttcgggttaaccacaaagggaagcccatcagactaacagctgatctctcagc

SEQ ID NO: 48737 - DNA, 120 bp, synthetic construct
  source 1..120: mol_type = other DNA
tgaacaatgagaacacttggacacaggaaggggaacatcacacaccgaggcctatcgtgggtggggggaggggggagggatagcattaagagatatacctaatgtaaatgacaagtcaat

SEQ ID NO: 48738 - DNA, 120 bp, synthetic construct
  source 1..120: mol_type = other DNA
gcaagccatcgcaaggacaaaaaaccaaacaccgcatattctcactcatagctgggaattcaataatgagaacacttggacacaggaaggggaacatcacacaccggggcctgttgtggg

SEQ ID NO: 48739 - DNA, 120 bp, synthetic construct; identical to SEQ ID NO: 10201
  source 1..120: mol_type = other DNA

SEQ ID NO: 48740 - DNA, 120 bp, synthetic construct
  source 1..120: mol_type = other DNA
ctatactacaaggctacagtaaccaaaagagcatggtactggtaccaaaacagagatatggaccaatggaatagaatagagccctcagaaataatgccacatatctacaactatctgatc

SEQ ID NO: 48741 - DNA, 120 bp, synthetic construct
  source 1..120: mol_type = other DNA
gtggaagtcagtgtggcgattcctcagggatctagaactagaaataccatttgacccagccatcccattactgggtatatacccaaaggattataaatgatactgctataaagacacatg

SEQ ID NO: 48742 - DNA, 120 bp, synthetic construct
  source 1..120: mol_type = other DNA
ccatggcacgagaagtacgcgacgtatgcacaagcctgagtagccgatttgatcaactggaagagggggtatcagtgatggaagatcaaatgaatgaaatgaagcaagaagagaagttta

SEQ ID NO: 48743 - DNA, 120 bp, synthetic construct
  source 1..120: mol_type = other DNA
atggaggaagatctaccaagcaaatggaaaacaaaaaaaggcaagggttgcaatcctagtttctgataaaacagactttaaaccaatgaagatcaaaagagataaagaaggccattacat

SEQ ID NO: 48744 - DNA, 120 bp, synthetic construct
  source 1..120: mol_type = other DNA
tgctggtgggaccgtaaactagttcaaccattgtggaagacagtgtggtgattcctcagggatctagaactagaaataccatttgacccagccatcccattactgggtatatacccaaag

SEQ ID NO: 48745 - DNA, 120 bp, synthetic construct; identical to SEQ ID NO: 10202
  source 1..120: mol_type = other DNA

SEQ ID NO: 48746 - DNA, 120 bp, synthetic construct; identical to SEQ ID NO: 10203
  source 1..120: mol_type = other DNA

SEQ ID NO: 48747 - DNA, 120 bp, synthetic construct
  source 1..120: mol_type = other DNA
cgagttgttgaattttgtcaaaggctttttccgcatctattgagattatcatatggtttttgtcttttgttctgtttatatgctggattacatttactgatttgcgtatgttgaaccagc

SEQ ID NO: 48748 - DNA, 120 bp, synthetic construct
  source 1..120: mol_type = other DNA
ctctacacactgctttgaatatgtcccagagattctggtatgttgtgtctttgttctcattggtttcaaagaacatctttatttctgccttcatttcattatgtacccagtagtcattca

SEQ ID NO: 48749 - DNA, 120 bp, synthetic construct
  source 1..120: mol_type = other DNA
attttatttctccttcacttatgaagcttagtttggctggatatgaaattctgagttgaaaattcttctctttaagaatgttgaatattggcccccactctcttctggcttatagagttt

SEQ ID NO: 48750 - DNA, 120 bp, synthetic construct
  source 1..120: mol_type = other DNA
actagtttacagtcccaccaacagtgtaaaagtgttcctatttctccacatcctctccagcacctgttgtttcctgactttttaatgatcaccattctaactgatgtgagatggtatgtc

SEQ ID NO: 48751 - DNA, 120 bp, synthetic construct
  source 1..120: mol_type = other DNA
tacacactgctttgaatgtgtcccagagattctaggatgttatgtctttgttcttgttggtttcaaagaacatctttattcctgccttcatttcattatttacccagtagtcattcagga

SEQ ID NO: 48752 - DNA, 120 bp, synthetic construct
  source 1..120: mol_type = other DNA
atgttagctggttattttgctcattagttgatgcagcttcttcctagcctcgacgatctttacaatttggcatgtttttgcagtggctggttgttcctttccatgtttagtgcttccttc

SEQ ID NO: 48753 - DNA, 120 bp, synthetic construct; identical to SEQ ID NO: 10197
  source 1..120: mol_type = other DNA

SEQ ID NO: 48754 - DNA, 120 bp, synthetic construct; identical to SEQ ID NO: 10198
  source 1..120: mol_type = other DNA

SEQ ID NO: 48755 - DNA, 120 bp, synthetic construct; identical to SEQ ID NO: 10199
  source 1..120: mol_type = other DNA

SEQ ID NO: 48756 - DNA, 120 bp, synthetic construct
  source 1..120: mol_type = other DNA
gaagtgctaatcaaagtgtccgttaaacttcatctgtattaaaatctttacaaagaaaatgtgtgtgttaggtgggaattgaacaatgagaacacatggacacaggaaggggaacatcac

SEQ ID NO: 48757 - DNA, 120 bp, synthetic construct
  source 1..120: mol_type = other DNA
acaaaacttgcagaggaacgatcagacagcagcatttgcggttcatgaaaatccgctgttgtgcagccactgctgctgttatccaggtagacggtctggagtggacctctagcaaactcc

SEQ ID NO: 48758 - DNA, 120 bp, synthetic construct
  source 1..120: mol_type = other DNA
ccaatattcaacattcttaaagaaaagaattttcacccagaatttcatatccagccaaactaagcttcataagtgaaggagaaataaaatcctttacagacaagcaaatgctgagagatt

SEQ ID NO: 48759 - DNA, 120 bp, synthetic construct
  source 1..120: mol_type = other DNA
tctccaccccaaatcaacaggatatacatttttttcagcaccgcaccacacctatttgaaaattgaccacatagttggaagtaaagctctcctcagcaaatgtaaaagaacagaaattat

SEQ ID NO: 48760 - DNA, 120 bp, synthetic construct
  source 1..120: mol_type = other DNA
taaaaatcctcaataaaatactggcaaaccgaatccagcagcacatcaaaaagcttatccaccatgatcaagttggcttcatccctgggatgcaaggctggttcaatatatgcaaatcaa

SEQ ID NO: 48761 - DNA, 120 bp, synthetic construct
  source 1..120: mol_type = other DNA
ctcagaaataatgccacatatctacaactatctgatctttgacaaacctgagaaaaataagcaatggggaaaggattccctatttaataaatggtgctgggaatactggccagccatatg

SEQ ID NO: 48762 - DNA, 120 bp, synthetic construct
  source 1..120: mol_type = other DNA
acgtatgtttattgtggcactattcacaatagcagagacttggaaccaacccacatgtccaacaacgatagactggattaagaaaatgttgcacatatacaccatggaatactatgcagt

SEQ ID NO: 48763 - DNA, 120 bp, synthetic construct; identical to SEQ ID NO: 10200
  source 1..120: mol_type = other DNA

SEQ ID NO: 48764 - DNA, 120 bp, synthetic construct
  source 1..120: mol_type = other DNA
gtgcacatgtacgtgcctgtttggtgctcactgctttttgcctgagtgggtacctaaggtacaagacaaagtcctctttactttttcctctgtttttcttttttttttctttttttttaa

SEQ ID NO: 48765 - DNA, 120 bp, synthetic construct
  source 1..120: mol_type = other DNA
aattttcacaacctactcatctgacaaagggctaatatccagaatctacaatgaactccaacaaatttacaagaaaaaaacaaccccatcaaaaagtgggcgaaggacatgaacagacac

SEQ ID NO: 48766 - DNA, 120 bp, synthetic construct
  source 1..120: mol_type = other DNA
tgcaaaaattatctcccattctgtaggctgcctgttcactctgatggtagtttcttttgctgtgcagaaactcttcagtttaattagatcccatttgtcaattttggcttttgttgccat

SEQ ID NO: 48767 - DNA, 120 bp, synthetic construct
  source 1..120: mol_type = other DNA
atttttgcacattgattttgtatcctgagactttgctgaagttgcctatcagcttaaggagattttgggcagagatgatggggttttctagatatacaatcatgtcatctgcaaacagga

SEQ ID NO: 48768 - DNA, 120 bp, synthetic construct
  source 1..120: mol_type = other DNA
cgtatctcaaactaataagagctatctatgacaaacccacagccaatatcatactgaatgggcaaaaactggaagcattccctttgaaaactggcacaagacagggatgccctctctcac

SEQ ID NO: 48769 - DNA, 120 bp, synthetic construct
  source 1..120: mol_type = other DNA
acagagatatagaccaatggaacagaacagagccttcagaaataatgccacatatctacaactatctgatctttgacaaacctgacaaaaagaaatggggaaaggattccctatttaata

SEQ ID NO: 48770 - DNA, 120 bp, synthetic construct
  source 1..120: mol_type = other DNA
ttcttcttgtaaatttgtttgagtcctttgtagattctggatattagccctttgtcagatgagtagattgcaaaatttttttcccattctgtaggttgcctgttcactctgatggtagtt

SEQ ID NO: 48771 - DNA, 120 bp, synthetic construct
  source 1..120: mol_type = other DNA
tttgttattggtgtataaggatgcttgtgattttttgcacattgattttgtatcctgagactttgctgaagttgcttatcagcttaaggagattttgggctgagacaatggggttttcta

SEQ ID NO: 48772 - DNA, 120 bp, synthetic construct
  source 1..120: mol_type = other DNA
aagggatgtgaaggaactcttcaagaagaactacaaaccactgctcaacaaaatacaacaggaaacaaacagaacattccatgctcatggataggaagaatcaatatcgtgaaaatggcc

SEQ ID NO: 48773 - DNA, 120 bp, synthetic construct
  source 1..120: mol_type = other DNA
tgagataccatctcacatcagttagaacggcgatcatcaaaatgtcaggaaacaacaggtgctggagaggacgtggagaaataggaacacttttacactgttggtgggacggtaaactag

SEQ ID NO: 48774 - DNA, 120 bp, synthetic construct
  source 1..120: mol_type = other DNA
acccagtcagcttcgacattttttatcaggataaaagcttaggaaaataattaagaccttaaattatcctttcagaggccaggcatggtggctcacccgtgtaatcccagcactttggga

SEQ ID NO: 48775 - DNA, 120 bp, synthetic construct
  source 1..120: mol_type = other DNA
tggaaaaaactactttaaagttcatatggaaccaaagaagagctcgcattgccaaggcaatcctaagccaaaagaacaaagctggaggcatcacgctacctgacttcaaactatactaca

SEQ ID NO: 48776 - DNA, 120 bp, synthetic construct
  source 1..120: mol_type = other DNA
cggtaaactagttcaaccattgtggaagtcagtgtggcgattcctcaaggatctagaactagaaataccatttgacccagccatcccactactgggtatatacccaaaggattataaagc

SEQ ID NO: 48777 - DNA, 120 bp, synthetic construct; identical to SEQ ID NO: 21553
  source 1..120: mol_type = other DNA

SEQ ID NO: 48778 - DNA, 120 bp, synthetic construct
  source 1..120: mol_type = other DNA
cgcgggtctccctctgggaggaggggacagctcagcgtggcagggcgggcttaccgtcctgtgttccccctgagcccaggcgtgtgctggagttgatggctgtgtttctgtgctgcggga

SEQ ID NO: 48779 - DNA, 120 bp, synthetic construct; identical to SEQ ID NO: 21554
  source 1..120: mol_type = other DNA

SEQ ID NO: 48780 - DNA, 120 bp, synthetic construct
  source 1..120: mol_type = other DNA
tcaggatggggaagtgccttggacaagtggcaaggaaacaggactctgcttcctccctttgtccccatggttgctgcccagatggcaggaagggatccctggatggagtgtgtccagagc

SEQ ID NO: 48781 - DNA, 120 bp, synthetic construct; identical to SEQ ID NO: 21555
  source 1..120: mol_type = other DNA

SEQ ID NO: 48782 - DNA, 120 bp, synthetic construct
  source 1..120: mol_type = other DNA
gcagagcagttggctgactgcagggcgtgagcctagtaaatgtagtcatggggcccttagggtgcaggcaagacttacctggcctgcccttgcaccccaggaacacccaagccttacctg

SEQ ID NO: 48783 - DNA, 120 bp, synthetic construct
  source 1..120: mol_type = other DNA
agactgcccagggccacccccaccacccagggcctcacctcttgggtctgcaggaggttggtattccacagctcgcggatgagcacttcgcactgcctaagtgtggtgggctttcgcagg

SEQ ID NO: 48784 - DNA, 120 bp, synthetic construct
  source 1..120: mol_type = other DNA
caggagtgtgcagtgtgggcaagagacagagtgatcatgtgtttggaacgcagctccagcccagccaggggaccagaaaagccctcccgcttccagggaggatgtgcatggctctgccaa

SEQ ID NO: 48785 - DNA, 120 bp, synthetic construct
  source 1..120: mol_type = other DNA
ctctgctcacagttttgggttcaggctgtgctgctttgggcaggtggggcaccccccagagaagcccctaagtccagggcacaggctgcctatcggagggagggctggcccatggctgct

SEQ ID NO: 48786 - DNA, 120 bp, synthetic construct
  source 1..120: mol_type = other DNA
cctacggctcaaggacagaccctgcttttcccagaggccaccagggagctcagcggggctgacaggtcctaccagtagcttgggcacacaaggccccatctgggcgatgtggctccagag

SEQ ID NO: 48787 - DNA, 120 bp, synthetic construct; identical to SEQ ID NO: 21474
  source 1..120: mol_type = other DNA

SEQ ID NO: 48788 - DNA, 120 bp, synthetic construct; identical to SEQ ID NO: 21475
  source 1..120: mol_type = other DNA

SEQ ID NO: 48789 - DNA, 120 bp, synthetic construct; identical to SEQ ID NO: 21476
  source 1..120: mol_type = other DNA

SEQ ID NO: 48790 - DNA, 120 bp, synthetic construct
  source 1..120: mol_type = other DNA
ccctcttccccacattggcctgggcgctgcctggggaggtatgctgggtgggtggttagacgcacctgggcaggtcacctctggctgctgcaatgactgtttcagaaaggagaaagcaga

SEQ ID NO: 48791 - DNA, 120 bp, synthetic construct; identical to SEQ ID NO: 21477
  source 1..120: mol_type = other DNA

SEQ ID NO: 48792 - DNA, 120 bp, synthetic construct; identical to SEQ ID NO: 21478
  source 1..120: mol_type = other DNA

SEQ ID NO: 48793 - DNA, 120 bp, synthetic construct; identical to SEQ ID NO: 21479
  source 1..120: mol_type = other DNA

SEQ ID NO: 48794 - DNA, 120 bp, synthetic construct; identical to SEQ ID NO: 21480
  source 1..120: mol_type = other DNA

SEQ ID NO: 48795 - DNA, 120 bp, synthetic construct
  source 1..120: mol_type = other DNA
ccacctcagcctcccgaagtgttgggattacaagcgtgaaccaccatgcccagccctttaaattacttttaaaaagatacatttctccacattaattctcttaggttgtattctctagga

SEQ ID NO: 48796 - DNA, 120 bp, synthetic construct
  source 1..120: mol_type = other DNA
ttacagtgcacttctgtgtgtgtgtgctgggagtgagagggtaaatacacacatagcagcaccctccatgttccattacagtgcacttctgtgtgtgtgtgctgggagtgagagggtaaa

SEQ ID NO: 48797 - DNA, 120 bp, synthetic construct
  source 1..120: mol_type = other DNA
tgctgggagtgagagggtaaatacacacatagcagcacactccatgttccattacagtgcgcttctgtgtgtgtgtgctgggagtgagagggtaaatacacacatagcagcacactccat

SEQ ID NO: 48798 - DNA, 120 bp, synthetic construct; identical to SEQ ID NO: 12542
  source 1..120: mol_type = other DNA

SEQ ID NO: 48799 - DNA, 120 bp, synthetic construct; identical to SEQ ID NO: 12169
  source 1..120: mol_type = other DNA

SEQ ID NO: 48800 - DNA, 120 bp, synthetic construct
  source 1..120: mol_type = other DNA
gattgctttagcccaggggtttgaatccagcctgggcaacatagcaagaccctgtttctaataaaagcaaaccaaatagctaaaacagtggattctcaggacaaagaaacgataagtatc

SEQ ID NO: 48801 - DNA, 120 bp, synthetic construct; identical to SEQ ID NO: 20550
  source 1..120: mol_type = other DNA

SEQ ID NO: 48802 - DNA, 120 bp, synthetic construct
  source 1..120: mol_type = other DNA
gccaccccttcatagtccttttgggctgatacaacagaataccttaggttgggtaatttataaacaacagaaatttattgctcacagttttgaaggttggaaagtccaagacgcaggcac

SEQ ID NO: 48803 - DNA, 120 bp, synthetic construct
  source 1..120: mol_type = other DNA
atgccacattttcttaatccagtctattattgttggacatttgggttagttcaagtctttgctattgtgaatagtgccgcaataaacatacgtgtgcatgtgtctttatagcagcatgat

SEQ ID NO: 48804 - DNA, 120 bp, synthetic construct; identical to SEQ ID NO: 14640
  source 1..120: mol_type = other DNA

SEQ ID NO: 48805 - DNA, 120 bp, synthetic construct; identical to SEQ ID NO: 14641
  source 1..120: mol_type = other DNA

SEQ ID NO: 48806 - DNA, 120 bp, synthetic construct; identical to SEQ ID NO: 14642
  source 1..120: mol_type = other DNA

SEQ ID NO: 48807 - DNA, 120 bp, synthetic construct
  source 1..120: mol_type = other DNA
ttaggaggctgaggcggaaggattgcttgagcccagaaggtcttagctacagtgagctgtgacttaggcaacaaagacagaccttgtttcaatcaatcaataaaaaatgtaaacacataa

SEQ ID NO: 48808 - DNA, 120 bp, synthetic construct; identical to SEQ ID NO: 12001
  source 1..120: mol_type = other DNA

SEQ ID NO: 48809 - DNA, 120 bp, synthetic construct; identical to SEQ ID NO: 12002
  source 1..120: mol_type = other DNA

SEQ ID NO: 48810 - DNA, 120 bp, synthetic construct; identical to SEQ ID NO: 14592
  source 1..120: mol_type = other DNA

SEQ ID NO: 48811 - DNA, 120 bp, synthetic construct; identical to SEQ ID NO: 14593
  source 1..120: mol_type = other DNA

SEQ ID NO: 48812 - DNA, 120 bp, synthetic construct; identical to SEQ ID NO: 14594
  source 1..120: mol_type = other DNA

SEQ ID NO: 48813 - DNA, 120 bp, synthetic construct; identical to SEQ ID NO: 14595
  source 1..120: mol_type = other DNA

SEQ ID NO: 48814 - DNA, 120 bp, synthetic construct; identical to SEQ ID NO: 14596
  source 1..120: mol_type = other DNA

SEQ ID NO: 48815 - DNA, 120 bp, synthetic construct
  source 1..120: mol_type = other DNA
ttcatttcaactttggtgaatctgacaattatggagttgctcttctcgaggagtatctttgttggaaccaacccaaatggccaacaatgatagactggattaagaaaatgtggcacatat

SEQ ID NO: 48816 - DNA, 120 bp, synthetic construct; identical to SEQ ID NO: 12782
  source 1..120: mol_type = other DNA

SEQ ID NO: 48817 - DNA, 120 bp, synthetic construct
  source 1..120: mol_type = other DNA
ggctggccgggcggggggctgacccccacctccctcccggacgaggtggctgctgggcggagacgctcctcacttcccagacggggtgactgctgggcggaggggctcctcacttctcag

SEQ ID NO: 48818 - DNA, 120 bp, synthetic construct
  source 1..120: mol_type = other DNA
aactagttattttcacttcagttcttgccgttacaaacagacctgtagtgaatattcttgtattttcagcaaagctattttaattaggatgataatgtatattgtttctgtgacttgaaa

SEQ ID NO: 48819 - DNA, 120 bp, synthetic construct
  source 1..120: mol_type = other DNA
tttggtttcttgtccttctgatagtttgctgagaatgatggtttccagcttcatccatgtccctacaaaggacatgaactcatccttttttatggctgcatagtattccatggtgtatat

SEQ ID NO: 48820 - DNA, 120 bp, synthetic construct
  source 1..120: mol_type = other DNA
ttctcaggtttgtcaaagatcggatagttgtagatatgcagcattatttctgagggctctgttctgttccattggtctgtgtctctgttttggtaccagtaccatggtgttttggttact

SEQ ID NO: 48821 - DNA, 120 bp, synthetic construct; identical to SEQ ID NO: 12783
  source 1..120: mol_type = other DNA

SEQ ID NO: 48822 - DNA, 120 bp, synthetic construct; identical to SEQ ID NO: 12784
  source 1..120: mol_type = other DNA

SEQ ID NO: 48823 - DNA, 120 bp, synthetic construct; identical to SEQ ID NO: 12785
  source 1..120: mol_type = other DNA

SEQ ID NO: 48824 - DNA, 120 bp, synthetic construct; identical to SEQ ID NO: 12786
  source 1..120: mol_type = other DNA

SEQ ID NO: 48825 - DNA, 120 bp, synthetic construct
  source 1..120: mol_type = other DNA
tttgtttgctttacaaattatctatgtttaattttaagatctaaattttggctgggcacggcggctcatcctgtaatcccagcactttgggaagctaaggtgggaggatcacatgaagcc

SEQ ID NO: 48826 - DNA, 120 bp, synthetic construct
  source 1..120: mol_type = other DNA
acaagtgattataaattgttttatacaaatggtgatgtagcaccaattctataagaagcactctagtcatcagcaaacagggacaatttgatttcctcttttcctaattgaatacccttt

SEQ ID NO: 48827 - DNA, 120 bp, synthetic construct
  source 1..120: mol_type = other DNA
ggtgatatcccctttatcattttttattgcgtctatttgattcttctctcttttcttctttattagtcttgctagcggtctatcaattctgttgatcctttcaaaaaaccagctcatgat

SEQ ID NO: 48828 - DNA, 120 bp, synthetic construct
  source 1..120: mol_type = other DNA
cctactaatctgacaaagggctaatatccagaatctacaatgaactccaacaaatttacaagaaaaaaaacaaacaaccccatcaaaaagtgggcgaaggacatgaacagtcacttctca

SEQ ID NO: 48829 - DNA, 120 bp, synthetic construct; identical to SEQ ID NO: 12787
  source 1..120: mol_type = other DNA

SEQ ID NO: 48830 - DNA, 120 bp, synthetic construct; identical to SEQ ID NO: 13327
  source 1..120: mol_type = other DNA

SEQ ID NO: 48831 - DNA, 120 bp, synthetic construct
  source 1..120: mol_type = other DNA
gactacagggtacataacgacatgaaggtagagataaagatgttctttgaaaccaacgagaacaaagacacaacataccagaatctctgggacacattcaaagcagtgtgtagagggaaa

SEQ ID NO: 48832 - DNA, 120 bp, synthetic construct
  source 1..120: mol_type = other DNA
accaaagacaaaaaccacatgattatctcaatagatgcagaaaaggcctttgacaaaactcaacaacacttcatgctaaaaactctcaataaactaggtattgatgggatatatctcaaa

SEQ ID NO: 48833 - DNA, 120 bp, synthetic construct; identical to SEQ ID NO: 25358
  source 1..120: mol_type = other DNA

SEQ ID NO: 48834 - DNA, 120 bp, synthetic construct
  source 1..120: mol_type = other DNA
taccagaatctctgggacacattttaagcagtgtgtagggggaaatttatagcactacatgtgaacaagagaaagcaggaaagatctaaaattgacaccctaacatcacaattaaaagaa

SEQ ID NO: 48835 - DNA, 120 bp, synthetic construct
  source 1..120: mol_type = other DNA
tcaataaattaggtattgatgggacgtatctccaaataatcagagctatttatgacaaacccacagccaatatcatacggaatgggcaaaaactggaagcattccctttgaaaactggca

SEQ ID NO: 48836 - DNA, 120 bp, synthetic construct
  source 1..120: mol_type = other DNA
ggaaaggattccctatttaataaatggtgctgggaaaactggctagccatatgtagaaagctgaaactggatcccttccttacaccttatacaaaaattaattcaagatggattaaagac

SEQ ID NO: 48837 - DNA, 120 bp, synthetic construct; identical to SEQ ID NO: 17909
  source 1..120: mol_type = other DNA

SEQ ID NO: 48838 - DNA, 120 bp, synthetic construct; identical to SEQ ID NO: 17910
  source 1..120: mol_type = other DNA

SEQ ID NO: 48839 - DNA, 120 bp, synthetic construct; identical to SEQ ID NO: 17924
  source 1..120: mol_type = other DNA

SEQ ID NO: 48840 - DNA, 120 bp, synthetic construct
  source 1..120: mol_type = other DNA
ttccccggacctcatctggaaaatgtggaaattataccggatgactggtaaggttctacgattttattctgatagggtctgcacatccttgtggttgcacttctattttccaaatgtgtt

SEQ ID NO: 48841 - DNA, 120 bp, synthetic construct
  source 1..120: mol_type = other DNA
agcggctcgccccgacctcggccccagacggccttccctgcgcgtcgggacctggggctgcagaggaagtgggcccggcgaggggccagaaagctgtccagggctggaactggagctagt

SEQ ID NO: 48842 - DNA, 120 bp, synthetic construct
  source 1..120: mol_type = other DNA
gttattatcaggtatattaattcatgtatttctatctcaatctatccgcactgcatcaatgagaaggccagggttcttcaaggtttcagggtgacatctctgtgtccttctctcaccccg

SEQ ID NO: 48843 - DNA, 120 bp, synthetic construct; identical to SEQ ID NO: 31792
  source 1..120: mol_type = other DNA

SEQ ID NO: 48844 - DNA, 120 bp, synthetic construct
  source 1..120: mol_type = other DNA
tgtgtgttgagtgtgtatgtggtgtgtttgtgtatgtggtgtgtgtgtggtgtgtgtatggtgtgtgtatgtgtgtggtgtgtgtctgttgagtgtatatgtggtgtgtttttgtagtgt

SEQ ID NO: 48845 - DNA, 120 bp, synthetic construct; identical to SEQ ID NO: 31793
  source 1..120: mol_type = other DNA

SEQ ID NO: 48846 - DNA, 120 bp, synthetic construct
  source 1..120: mol_type = other DNA
gggaggggcttgacaattcaaagttctattgtgaacatgctgaatttgaggtgtctattagacatccaagtggagatgtggagtagtaatttggattcatgaaactggagtttagggcca

SEQ ID NO: 48847 - DNA, 120 bp, synthetic construct; identical to SEQ ID NO: 33875
  source 1..120: mol_type = other DNA

SEQ ID NO: 48848 - DNA, 120 bp, synthetic construct
  source 1..120: mol_type = other DNA
actggtgtgagatggtatctcattgtggttttgatttgcatttctctgatggccagtgatgatgagcattttttcatgtgttttttggctgcataaatgtcttcttttcagaaatgtctg

SEQ ID NO: 48849 - DNA, 120 bp, synthetic construct
  source 1..120: mol_type = other DNA
attcttatacaccaataacagacaaacagagagccaaatcatgagtgaactcccattcacaattgcttcaaagagaataaaatacctaggaatccaacttacaagggatgtgaaggacct

SEQ ID NO: 48850 - DNA, 120 bp, synthetic construct; identical to SEQ ID NO: 33876
  source 1..120: mol_type = other DNA

SEQ ID NO: 48851 - DNA, 120 bp, synthetic construct
  source 1..120: mol_type = other DNA
tacaagaagaaaacaaccccatcaaaaagcgggcaaaggatatgaacagacacttctcaaaagaagacatttatgcagccaaaaaacacatgaaaaaatgctcatcatcactggccatca

SEQ ID NO: 48852 - DNA, 120 bp, synthetic construct; identical to SEQ ID NO: 12611
  source 1..120: mol_type = other DNA

SEQ ID NO: 48853 - DNA, 120 bp, synthetic construct
  source 1..120: mol_type = other DNA
ctgcactccagcctgggcaacagagcaagaccctgtctcagagagagagagatatatatatatatatgcacacacacacacacatatatatgcacacacatatatatatgcacacacaca

SEQ ID NO: 48854 - DNA, 120 bp, synthetic construct
  source 1..120: mol_type = other DNA
tatatatatatgtttttgtttttgttttgttttgttttgttttgttttgtttttgatggagtcttgctctgttgcccaggctggagcgcagtggcacaatctcggctcaccacaagctcc

SEQ ID NO: 48855 - DNA, 120 bp, synthetic construct; identical to SEQ ID NO: 25534
  source 1..120: mol_type = other DNA

SEQ ID NO: 48856 - DNA, 120 bp, synthetic construct
  source 1..120: mol_type = other DNA
ctaaacatccatcaacagatgactggataaacacactgtgggatatacaatggaatattattcagtcataaaaagaaatgaaggctgggcactgtggctcacgcctgtaaccccagcact

SEQ ID NO: 48857 - DNA, 120 bp, synthetic construct
  source 1..120: mol_type = other DNA
gagagacggaggttgcagtgagccgggattgtgccactgcactccaggctggtgacagaatgagactccatctcaaaaaaaaaaaaaaattaatacttacattaatctttggtcataaac

SEQ ID NO: 48858 - DNA, 120 bp, synthetic construct
  source 1..120: mol_type = other DNA
cagcgaggcttgggggaggggtgcccaccattgcccacgcttgcttaggtaaacacagcagcctggaagctcgaactgggtggagcccaccacagctcaaggaggcctgcgtgcctctgt

SEQ ID NO: 48859 - DNA, 120 bp, synthetic construct
  source 1..120: mol_type = other DNA
tttcaaattcaccgaagttgaaatgaaggaaaaaatgttaagggcagccagagagaaaggtcgggttaccctcaaagggaagcccatcagactaacagcggatctctcggcagaaaccct

SEQ ID NO: 48860 - DNA, 120 bp, synthetic construct
  source 1..120: mol_type = other DNA
cacagtgcaatcaaactagaactcaggattaagaatctcactcagaactgttcaactacatggaaactgaacaacctgctcctgaatgactactgggtacataacgaaatgaaggcagaa

SEQ ID NO: 48861 - DNA, 120 bp, synthetic construct
  source 1..120: mol_type = other DNA
aaaagcttatccaccatgatcaagtgggcttcatccctgggatgcaaggctggttcaatatacgcaaatcaataaatgtaatccagcatataaacagagccaaagacaaaaaccacgtga

SEQ ID NO: 48862 - DNA, 120 bp, synthetic construct
  source 1..120: mol_type = other DNA
cagcatggtactggtaccaaaacagagatatagatcaatggaacagaacagagccctcagaaataacgccgcatatctacaactatctgatctttgacaaacctgagaaaaaccagctat

SEQ ID NO: 48863 - DNA, 120 bp, synthetic construct
  source 1..120: mol_type = other DNA
tagggacatggatgaaattggaaatcatcattctcagtaaactatcgcaagaacaaaaaaccaaacaccgcatattctcactcataggtgggaattgaacaatgagaacacatggacaca

SEQ ID NO: 48864 - DNA, 120 bp, synthetic construct; identical to SEQ ID NO: 10211
  source 1..120: mol_type = other DNA

SEQ ID NO: 48865 - DNA, 120 bp, synthetic construct; identical to SEQ ID NO: 10212
  source 1..120: mol_type = other DNA

SEQ ID NO: 48866 - DNA, 120 bp, synthetic construct; identical to SEQ ID NO: 10213
  source 1..120: mol_type = other DNA

SEQ ID NO: 48867 - DNA, 120 bp, synthetic construct; identical to SEQ ID NO: 10214
  source 1..120: mol_type = other DNA

SEQ ID NO: 48868 - DNA, 120 bp, synthetic construct
  source 1..120: mol_type = other DNA
ggaagctttttagtgccttctgtatccctgagatcctgaaattgcttaatatggcttgctatggaccttttcttttttccttttttttgagacggagtcttgctctgttgccaggcttga

SEQ ID NO: 48869 - DNA, 120 bp, synthetic construct
  source 1..120: mol_type = other DNA
aaggacattggaggccaagctagcctttaatttagaagacctcagtctgttatctggtgggtcttgtcttgtcttttctctcttcttttttatctcctttcctttcctttcctccttcct

SEQ ID NO: 48870 - DNA, 120 bp, synthetic construct
  source 1..120: mol_type = other DNA
accttggcctcccaaagtgctgggattacaggtatgagccatcgtgcccagccacaagatttattaagaactcaaagctaccttgactaagtaaataaaacctctaccttacattaccaa

SEQ ID NO: 48871 - DNA, 120 bp, synthetic construct
  source 1..120: mol_type = other DNA
agggcaaattccaagcagatgcgctgcagagtcagagatgttgtgctttgtaaattttgacagatatggcttaaccctccaaaaagatcacataaatttatactcctcacagcagtgtgg

SEQ ID NO: 48872 - DNA, 120 bp, synthetic construct; identical to SEQ ID NO: 25614
  source 1..120: mol_type = other DNA

SEQ ID NO: 48873 - DNA, 120 bp, synthetic construct; identical to SEQ ID NO: 25615
  source 1..120: mol_type = other DNA

SEQ ID NO: 48874 - DNA, 120 bp, synthetic construct
  source 1..120: mol_type = other DNA
ctgcaaaaacatgctaaattttaaagaccatcaaggctaggaagaaactgcatcaactaaagagcaaaataagcagctaacatcataatgacaggatcaaattcacacataacaatacta

SEQ ID NO: 48875 - DNA, 120 bp, synthetic construct
  source 1..120: mol_type = other DNA
gtccaacaatgatagactggattaagaaaatgtggcacatatataccatggaatactatgcagccttaagaaaggatgagttcatatcctttgtagggacatggatgaagctggaaacca

SEQ ID NO: 48876 - DNA, 120 bp, synthetic construct
  source 1..120: mol_type = other DNA
tgtgagctttcaattttattgtagaaaaaaatttcacaacgaaatatttgtgaaaagaactattcaaaaactaaggcggccgggcgcggtggctcacgcctgtaatcccagcactttggg

SEQ ID NO: 48877 - DNA, 120 bp, synthetic construct; identical to SEQ ID NO: 25617
  source 1..120: mol_type = other DNA

SEQ ID NO: 48878 - DNA, 120 bp, synthetic construct
  source 1..120: mol_type = other DNA
gatcggtggtgatatcccctttttcattttttattgcatctatttgattcttctctcatttcttctttattagtcttgctagtggtctatcaattttgttgatcttttcaaaaaaccagc

SEQ ID NO: 48879 - DNA, 120 bp, synthetic construct
  source 1..120: mol_type = other DNA
actgtgacgaggataaaaggagttttcagagagacagaaaaagtgaaagagaagatctgtcaaaatagtcaataaatatcaactattatttataaacaattacttacagttgcaaggctt

SEQ ID NO: 48880 - DNA, 120 bp, synthetic construct
  source 1..120: mol_type = other DNA
cctgaggaatcgccacactgacttccacaatggttgaactagtttacagtcccaccaacagtgtaaaagtgttcctatttctccgcatcctctccagcacctgttgtttcctgacttctt

SEQ ID NO: 48881 - DNA, 120 bp, synthetic construct
  source 1..120: mol_type = other DNA
gatattgattcttcctacccatgagcatggaatgttcttccatttatttgtctcctcttttatttccttgagcagtggtttgtagttctccttgaagaggtccttcacatcccttgtaag

SEQ ID NO: 48882 - DNA, 120 bp, synthetic construct
  source 1..120: mol_type = other DNA
agcctgttattggtcgattcagagattcaacttcttcctggtttagtcttgggagagtgtatgtgtcgaggaatgtatccatttcttctagattttctagtttatttgcgtagaggtgtt

SEQ ID NO: 48883 - DNA, 120 bp, synthetic construct
  source 1..120: mol_type = other DNA
ttcaattcctgggtatccttgttgactttctgtctcgttgatctgtctaatgttgacagtggggtgttaaagtctcccattattaatgtgtgggagtctaagtctctttgtaggtgactg

SEQ ID NO: 48884 - DNA, 120 bp, synthetic construct
  source 1..120: mol_type = other DNA
ctgaaagtgatgtggagaatggaaccaagttggaaaacactctgcaggatattatccaggagaacttccccaatctagcaaggcaggccaacgttcagattcaggaaatacagagaacgc

SEQ ID NO: 48885 - DNA, 120 bp, synthetic construct
  source 1..120: mol_type = other DNA
tggctcggagggtcctacgcccacggaatctcgctgattgctagcacagcagtctgagatcaaactgcaaggcggcaacgaggctgggggaggggcgcccgccattgcccaggcttgctt

SEQ ID NO: 48886 - DNA, 120 bp, synthetic construct
  source 1..120: mol_type = other DNA
ctttactctgatttggcaaacatggtgtaggtaaatcatcttggagagttcttcctagaatgagtttacaaacaaatccactttatacttataaattataataattccgcttatattgat

SEQ ID NO: 48887 - DNA, 120 bp, synthetic construct; identical to SEQ ID NO: 25618
  source 1..120: mol_type = other DNA

SEQ ID NO: 48888 - DNA, 120 bp, synthetic construct
  source 1..120: mol_type = other DNA
gctatccctcccccctccccccaccccacaatagtccccagagtgtgatattccccttcctgtgtccatgtgatctcattgttcaattcccacctatgagtgagaatatgcggtgttggg

SEQ ID NO: 48889 - DNA, 120 bp, synthetic construct
  source 1..120: mol_type = other DNA
atgtggctagccagttttcccagcaccatttattaaataggaaatcctttccccattgcttgtttttctcaggtttgtcaaagatcagatagttgtagatatgcggcgttatttctgagg

SEQ ID NO: 48890 - DNA, 120 bp, synthetic construct
  source 1..120: mol_type = other DNA
agtttcttttgctgtgcagaagctctttagtttaattagatcccatttgtctttctgtagagaataaactcctagtctgctagggacggaaggagaagttgcttgggtgcatggagtact

SEQ ID NO: 48891 - DNA, 120 bp, synthetic construct
  source 1..120: mol_type = other DNA
ggaggaagtcatcttgccctgtttgcagatgacatgattgtatatctagaaaaccccattgtctcagcccaaaatctccttaagctgataagcaacttcagcaaagtctcaggatacaaa

SEQ ID NO: 48892 - DNA, 120 bp, synthetic construct
  source 1..120: mol_type = other DNA
gtactccaggctgggtgacagagcaagactccgtctccaaaaaaaaaaaaaaaaagaaacaatgttgttccgtctcaagaaaggaaggaaggaaagaaagaaggaaggagaaagaaggag

SEQ ID NO: 48893 - DNA, 120 bp, synthetic construct; identical to SEQ ID NO: 25619
  source 1..120: mol_type = other DNA

SEQ ID NO: 48894 - DNA, 120 bp, synthetic construct; identical to SEQ ID NO: 25620
  source 1..120: mol_type = other DNA

SEQ ID NO: 48895 - DNA, 120 bp, synthetic construct
  source 1..120: mol_type = other DNA
tgcatttactcagtattactaagtgttagatactattttaagcatttttttttttttgagacggagtctcgcatggtcacccaggctagagtgcagtggcaggacctcagctcaccgcaa

SEQ ID NO: 48896 - DNA, 120 bp, synthetic construct; identical to SEQ ID NO: 25625
  source 1..120: mol_type = other DNA

SEQ ID NO: 48897 - DNA, 120 bp, synthetic construct; identical to SEQ ID NO: 25626
  source 1..120: mol_type = other DNA

SEQ ID NO: 48898 - DNA, 120 bp, synthetic construct; identical to SEQ ID NO: 25627
  source 1..120: mol_type = other DNA

SEQ ID NO: 48899 - DNA, 120 bp, synthetic construct; identical to SEQ ID NO: 25621
  source 1..120: mol_type = other DNA

SEQ ID NO: 48900 - DNA, 120 bp, synthetic construct
  source 1..120: mol_type = other DNA
ttgttttcattatatagttagacaagataaaaataatgcaaaatcttggggtataattttcacatgcatccgtgtgaagagaccaccaaacaggctttgtgtgagcaataaagcttttta

SEQ ID NO: 48901 - DNA, 120 bp, synthetic construct
  source 1..120: mol_type = other DNA
atatgttttttgttgttgttgttgttgttgttgttttgttttgggagctttttttttagatggagtcttgctctgtctccaggctggagtgcagtggcacgatctcggctcactacaacc

SEQ ID NO: 48902 - DNA, 120 bp, synthetic construct; identical to SEQ ID NO: 25622
  source 1..120: mol_type = other DNA

SEQ ID NO: 48903 - DNA, 120 bp, synthetic construct
  source 1..120: mol_type = other DNA
ccattctaactggtgtgagatgatatctcatagtggttttgatttgcacaaaatcaatgtacaaaaatcacaagcattcttatacaccaacaacagacaaacagagagccaaatcatgag

SEQ ID NO: 48904 - DNA, 120 bp, synthetic construct; identical to SEQ ID NO: 25623
  source 1..120: mol_type = other DNA

SEQ ID NO: 48905 - DNA, 120 bp, synthetic construct; identical to SEQ ID NO: 25624
  source 1..120: mol_type = other DNA

SEQ ID NO: 48906 - DNA, 120 bp, synthetic construct
  source 1..120: mol_type = other DNA
atgatgacgatggtggttttgttgaaaagaaaagggggaaatgtggggaaaagaaagagagatcagattgttactgtgtctgtgtagaaagaagtagacataggagactccattttgttc

SEQ ID NO: 48907 - DNA, 120 bp, synthetic construct
  source 1..120: mol_type = other DNA
accaggcctgccctaaaagagctcctgaaggaagcactaaacatggaaaggaacaaccagtaccagccactgcaaaatcacgccaaattgtaaagaccatcgagactaggaagaaactgc

SEQ ID NO: 48908 - DNA, 120 bp, synthetic construct
  source 1..120: mol_type = other DNA
aaaccgctcaactacatggaaactgaacaatctgctcctgaatgactactgggtacgtaacgaaatgaaggcagaaataaagatgttctttgaaaccaatgagaacaaagaaagatacaa

SEQ ID NO: 48909 - DNA, 120 bp, synthetic construct
  source 1..120: mol_type = other DNA
agcacatcaaaaagcttatccaccatgatcaagtgggcttcatccctgggatgcaaggctggttcaatatacacaaaacaataaatgtaacccagcatataaacagaaccaaagacaaaa

SEQ ID NO: 48910 - DNA, 120 bp, synthetic construct
  source 1..120: mol_type = other DNA
gttcatatggaaccaaaaaagagcccacatcgccaagtcaatcctaagccaaaagaacaaagctggaggcatcacgctacctgacttcaaactattctacaaggctacggtaaccaaaac

SEQ ID NO: 48911 - DNA, 120 bp, synthetic construct
  source 1..120: mol_type = other DNA
aaatgatgagttcatgtgctttgtagagacatggatgaaactggaaatcatcattctcagtaaactttgaaactggaaatcatcattctcagtaaactatcgcaaggacaaaaaaccaaa

SEQ ID NO: 48912 - DNA, 120 bp, synthetic construct; identical to SEQ ID NO: 25629
  source 1..120: mol_type = other DNA

SEQ ID NO: 48913 - DNA, 120 bp, synthetic construct; identical to SEQ ID NO: 25610
  source 1..120: mol_type = other DNA

SEQ ID NO: 48914 - DNA, 120 bp, synthetic construct
  source 1..120: mol_type = other DNA
gcggtttttggctgcataaatgtcttcttttgagaagtgtctgttcatatccttcacccactttttgatgggtttatttttttcttgtaaatttgtttgagttcattgtagattctggat

SEQ ID NO: 48915 - DNA, 120 bp, synthetic construct
  source 1..120: mol_type = other DNA
attggtgtataagaatgcttgtgatttttgtacattgattttgtatcctgagactttgctgaagttgcttatcagcttaaggagattttgggctgagacaatggggttttctagatatac

SEQ ID NO: 48916 - DNA, 120 bp, synthetic construct
  source 1..120: mol_type = other DNA
ttgcgtttatttgattcttctcttttttcttctttattagtcttgctagcggtctatcaattttgttgatcctttcaaaaaaccagctcctggattcattaattttttgaagggtttttt

SEQ ID NO: 48917 - DNA, 120 bp, synthetic construct
  source 1..120: mol_type = other DNA
ctgccttgctagattggggaagttctcctggataatatcctgaagagtgttttctaacttggttccattctccccgtcactttcagatacaccaatcagacgtagatttggtgttttcac

SEQ ID NO: 48918 - DNA, 120 bp, synthetic construct
  source 1..120: mol_type = other DNA
ctttccagcacctgttgtttcctgactttttaatgatcgccattctaactggtgtgagatgatatctcattgtggttttgatttgcatttctctgatggccagtgatgatgagcattatt

SEQ ID NO: 48919 - DNA, 120 bp, synthetic construct
  source 1..120: mol_type = other DNA
gaaagggatcaattcaacaagaagagctaactatcctaaatatatatgcacccaaaataggagcacccagattcataaggcaagtcctgagcgacctacaaagagacttagactcccaca

SEQ ID NO: 48920 - DNA, 120 bp, synthetic construct
  source 1..120: mol_type = other DNA
atagaccaataacaggatctgaaattgtggcaataaacaataccttaccaaccaaaaagagtccaggaacagatggattcacagctgaattctaccagaggtacaaggaggaactgatac

SEQ ID NO: 48921 - DNA, 120 bp, synthetic construct
  source 1..120: mol_type = other DNA
gctgctaagcaacttcagcaaagtctcaggatacaaaatcaatgtacaaaaatcacaagcattcttatacaccaacaacagacaaacagagagccaaatcatgagtgaactcccattcac

SEQ ID NO: 48922 - DNA, 120 bp, synthetic construct
  source 1..120: mol_type = other DNA
tacaatgaactcaaacaaatttacaagaaaaaaacaaacaaccccatcaaaaagtgggtgaaggacatgaacagacacttctcaaaagaagacatttatgcagccaaaaaccacatgaaa

SEQ ID NO: 48923 - DNA, 120 bp, synthetic construct; identical to SEQ ID NO: 25611
  source 1..120: mol_type = other DNA

SEQ ID NO: 48924 - DNA, 120 bp, synthetic construct
  source 1..120: mol_type = other DNA
tatggccattttcacaatattgattcttcctacccatgagcatggaatgttcttccatttgtttgtatcctcttttatttcattgagaagtagtttgtagttctccttgaagaggtcctt

SEQ ID NO: 48925 - DNA, 120 bp, synthetic construct
  source 1..120: mol_type = other DNA
gaattccactgtgaatccatctggtcctggactctttttggttggtaagctattgattattgccacaatttcagctcctgttattggtctattcagagattcaacttcttcctggtttag

SEQ ID NO: 48926 - DNA, 120 bp, synthetic construct; identical to SEQ ID NO: 25612
  source 1..120: mol_type = other DNA

SEQ ID NO: 48927 - DNA, 120 bp, synthetic construct
  source 1..120: mol_type = other DNA
aaagacttaaatgttagacctaataccataaaaaccctagaagaaaacctaggcattaccattcaggacataggcatgcgcaaggacttcatgtctaaaacaccaaaaacaatggcaaca

SEQ ID NO: 48928 - DNA, 120 bp, synthetic construct; identical to SEQ ID NO: 25613
  source 1..120: mol_type = other DNA

SEQ ID NO: 48929 - DNA, 120 bp, synthetic construct
  source 1..120: mol_type = other DNA
catagtattccatggtgtataggtgccacattttcttgatccagtctatcatggttggacatttgggttggttccaagtctttgctattgtgaatagtgccgcaataaacatacgtgtgc

SEQ ID NO: 48930 - DNA, 120 bp, synthetic construct
  source 1..120: mol_type = other DNA
tctgagggctctgttctattccattgatctatatctctgttttggtacctatcctctttaatgcctctccttcacatgttattaaaaccaggtactatgattgctcacctgacttttggt

SEQ ID NO: 48931 - DNA, 120 bp, synthetic construct; identical to SEQ ID NO: 3130
  source 1..120: mol_type = other DNA

SEQ ID NO: 48932 - DNA, 120 bp, synthetic construct
  source 1..120: mol_type = other DNA
agctcctttattaggtatgtaagtgatgaaacaaatggatatttttaaaaatgggactagctttttgggcaactatgtacaattgtgaggtaataaccctgcaccttcacattctcatta

SEQ ID NO: 48933 - DNA, 120 bp, synthetic construct
  source 1..120: mol_type = other DNA
cagaggttgcagtgagtggagactgtgcccaggcaccccagcctgggtgatagagtgagactctgtctcaaaataaataaacaaataaaatttgtctttactttctaatagacacacaca

SEQ ID NO: 48934 - DNA, 120 bp, synthetic construct
  source 1..120: mol_type = other DNA
cgtctgggatgtggggagcacctctgccccaccgccccgtctgggatgtgaggagcgcctctgcccagccgcgaccccgtctgggaggtgaggagaccctctgcctggcaaccgccctgt

SEQ ID NO: 48935 - DNA, 120 bp, synthetic construct; identical to SEQ ID NO: 8875
  source 1..120: mol_type = other DNA

SEQ ID NO: 48936 - DNA, 120 bp, synthetic construct
  source 1..120: mol_type = other DNA
tgtgtttcttttctttcttttcttctttctttctttcttttttttttttttttgttgagacagggtctggatctgttgcccaggctggagtgtagtggtgcaatcttggctcactgcaac

SEQ ID NO: 48937 - DNA, 120 bp, synthetic construct; identical to SEQ ID NO: 28830
  source 1..120: mol_type = other DNA

SEQ ID NO: 48938 - DNA, 120 bp, synthetic construct; identical to SEQ ID NO: 28831
  source 1..120: mol_type = other DNA

SEQ ID NO: 48939 - DNA, 120 bp, synthetic construct; identical to SEQ ID NO: 28832
  source 1..120: mol_type = other DNA

SEQ ID NO: 48940 - DNA, 120 bp, synthetic construct
  source 1..120: mol_type = other DNA
accagaaacacaacttcttaaaacagccccaagaatgaataaagcaaataggaagaacttgattttaaaattgcaaccaattttattttaattttacttggatgcaacagccagagaact

SEQ ID NO: 48941 - DNA, 120 bp, synthetic construct
  source 1..120: mol_type = other DNA
gcttaccttgtacatgctgtagcactgccgcagcaccgagctataaaccttgtcctgcagacgcgaaaacacagcacacagctcagttcaagggaaaaacaatgtctactggatagatgg

SEQ ID NO: 48942 - DNA, 120 bp, synthetic construct; identical to SEQ ID NO: 28890
  source 1..120: mol_type = other DNA

SEQ ID NO: 48943 - DNA, 120 bp, synthetic construct; identical to SEQ ID NO: 28833
  source 1..120: mol_type = other DNA

SEQ ID NO: 48944 - DNA, 120 bp, synthetic construct
  source 1..120: mol_type = other DNA
accccatctctactaaaaatggaaaaaaatagctgggcatggtggcaggcgcctgtagtcccagctgctcaggaggctgaggcaggagaatggtgtgaacctggaaggcggagcttgcag

SEQ ID NO: 48945 - DNA, 120 bp, synthetic construct
  source 1..120: mol_type = other DNA
tgtaccccagcctggcaacagagagagactctgtctccaaaaaaaaaaaaaaaaaaaaaaaaaagagaaaatgttcctatcaagtaaggtttaggaatcctgtttttattttggagtttt

SEQ ID NO: 48946 - DNA, 120 bp, synthetic construct; identical to SEQ ID NO: 28834
  source 1..120: mol_type = other DNA

SEQ ID NO: 48947 - DNA, 120 bp, synthetic construct; identical to SEQ ID NO: 28835
  source 1..120: mol_type = other DNA

SEQ ID NO: 48948 - DNA, 120 bp, synthetic construct; identical to SEQ ID NO: 28836
  source 1..120: mol_type = other DNA

SEQ ID NO: 48949 - DNA, 120 bp, synthetic construct
  source 1..120: mol_type = other DNA
gatcgcaccactgcttccagcctgggtgacagagcaagaccttgtctcaaaaaaaaaaagaaaaaaaaattttttttaataaaaaatgagttttatccagggcttcaaattctttggaaa

SEQ ID NO: 48950 - DNA, 120 bp, synthetic construct
  source 1..120: mol_type = other DNA
ctactaaaaatacaaaaaaattagctgggcgtggtggcgggcgcctgtaatcccaggtactagggaggccgaggcaaggagaattgcttgaacctctccatcccaggtgaaagttcgaga

SEQ ID NO: 48951 - DNA, 120 bp, synthetic construct
  source 1..120: mol_type = other DNA
acagtggtgtgaccacagcttgctgcagccaccgattcccaggctcaagcaaacctcccacctcagcctcctgagtagctgggacaactggtgcttttttctttaacattatatcaagag

SEQ ID NO: 48952 - DNA, 120 bp, synthetic construct
  source 1..120: mol_type = other DNA
taactcctggctcaagcgatccttctgcctcctcctccccagtagctgggactataggtatgtgcaccacgcctggcttaaaagtctttttggtatttaatataacagctttggaataag

SEQ ID NO: 48953 - DNA, 120 bp, synthetic construct
  source 1..120: mol_type = other DNA
actgactcagctatagttgctttctgtgatatgtacacaatgttactaaagtgaaattctgctgtgaaatgtaggagatgggaggctagttgtgcttctgtagcatcaggtctgcagagg

SEQ ID NO: 48954 - DNA, 120 bp, synthetic construct
  source 1..120: mol_type = other DNA
cgcttgaggccaggagtttgagaccagcctgggcaacacagtaaaccccatctctataagaaaaaaaaaaaaaaaaaaaaaaaggtataaaaattctgcttttaacatttatcatttcag

SEQ ID NO: 48955 - DNA, 120 bp, synthetic construct
  source 1..120: mol_type = other DNA
aagatacaaagttcaaactatctacttaatgtttattcagtattgtgttttactgctttaaatttatttttttgtgacagagtcttgctctgtcatccaggctggagtgcagtggtgcga

SEQ ID NO: 48956 - DNA, 120 bp, synthetic construct
  source 1..120: mol_type = other DNA
gttggccaggctggtctcgaactcatgacctcaagatctgcccgcctcggcctcccaaagtgctgggattacaggcgtaagccaccacacccagccaagagtgccatcttatactaaaat

SEQ ID NO: 48957 - DNA, 120 bp, synthetic construct; identical to SEQ ID NO: 28890
  source 1..120: mol_type = other DNA

SEQ ID NO: 48958 - DNA, 120 bp, synthetic construct; identical to SEQ ID NO: 28891
  source 1..120: mol_type = other DNA

SEQ ID NO: 48959 - DNA, 120 bp, synthetic construct; identical to SEQ ID NO: 28892
  source 1..120: mol_type = other DNA

SEQ ID NO: 48960 - DNA, 120 bp, synthetic construct
  source 1..120: mol_type = other DNA
atagcaagacccccaactctacaaaaaaaaaaaaaattgaaaagtgagccgggcgtggtggcacgcacctgtatttccagttactcaggaggctgaggccagaggatcgcttgagcccaa

SEQ ID NO: 48961 - DNA, 120 bp, synthetic construct
  source 1..120: mol_type = other DNA
aggagaaaactccgcgagccaggaaaacacaaactcggccaggaaacagccacccgggggtgcctgaagaggacgctgcgaggcggattctttttccgggcctgcggcgagcgcttccgg

SEQ ID NO: 48962 - DNA, 120 bp, synthetic construct; identical to SEQ ID NO: 28893
  source 1..120: mol_type = other DNA

SEQ ID NO: 48963 - DNA, 120 bp, synthetic construct; identical to SEQ ID NO: 28086
  source 1..120: mol_type = other DNA

SEQ ID NO: 48964 - DNA, 120 bp, synthetic construct; identical to SEQ ID NO: 28087
  source 1..120: mol_type = other DNA

SEQ ID NO: 48965 - DNA, 120 bp, synthetic construct; identical to SEQ ID NO: 28088
  source 1..120: mol_type = other DNA

SEQ ID NO: 48966 - DNA, 120 bp, synthetic construct
  source 1..120: mol_type = other DNA
gaggaacagacaactatttctggaaggccctttcccagggggtccagagggaccaggcattcctgggaagaggggccactcctcagcgggtcgcctgtgtcctcgcggtggaggacgcat

SEQ ID NO: 48967 - DNA, 120 bp, synthetic construct
  source 1..120: mol_type = other DNA
acgtatatatgtatatatgtgtgtgtgtatatatatatatatatatatatattttttcttctaagtgaagtaactcaggaatggaaaaccaaacaccatatgttctcactcataagtggg

SEQ ID NO: 48968 - DNA, 120 bp, synthetic construct; identical to SEQ ID NO: 19809
  source 1..120: mol_type = other DNA

SEQ ID NO: 48969 - DNA, 120 bp, synthetic construct; identical to SEQ ID NO: 19810
  source 1..120: mol_type = other DNA

SEQ ID NO: 48970 - DNA, 120 bp, synthetic construct; identical to SEQ ID NO: 19811
  source 1..120: mol_type = other DNA

SEQ ID NO: 48971 - DNA, 120 bp, synthetic construct; identical to SEQ ID NO: 19812
  source 1..120: mol_type = other DNA

SEQ ID NO: 48972 - DNA, 120 bp, synthetic construct; identical to SEQ ID NO: 19813
  source 1..120: mol_type = other DNA

SEQ ID NO: 48973 - DNA, 120 bp, synthetic construct; identical to SEQ ID NO: 19814
  source 1..120: mol_type = other DNA

SEQ ID NO: 48974 - DNA, 120 bp, synthetic construct; identical to SEQ ID NO: 19815
  source 1..120: mol_type = other DNA

SEQ ID NO: 48975 - DNA, 120 bp, synthetic construct; identical to SEQ ID NO: 19816
  source 1..120: mol_type = other DNA

SEQ ID NO: 48976 - DNA, 120 bp, synthetic construct; identical to SEQ ID NO: 16401
  source 1..120: mol_type = other DNA

SEQ ID NO: 48977 - DNA, 120 bp, synthetic construct
  source 1..120: mol_type = other DNA
aaagtggatctaggttttgtgggggctggaatcttacacaatttaaggattcattgtgacaaaagagacaaatgcctaatacacaaatagtgcagtgctttggaaggggcctgctcaagt

SEQ ID NO: 48978 - DNA, 120 bp, synthetic construct
  source 1..120: mol_type = other DNA
caaagattatactcagtaatggtcaccaaagatctaagtcagtggttcttatagtatgtttgggggtccctgaggatccctgtgtcccttttggggatctgcaaggtcaaacctattttc

SEQ ID NO: 48979 - DNA, 120 bp, synthetic construct; identical to SEQ ID NO: 28170
  source 1..120: mol_type = other DNA

SEQ ID NO: 48980 - DNA, 120 bp, synthetic construct; identical to SEQ ID NO: 28171
  source 1..120: mol_type = other DNA

SEQ ID NO: 48981 - DNA, 120 bp, synthetic construct; identical to SEQ ID NO: 8981
  source 1..120: mol_type = other DNA

SEQ ID NO: 48982 - DNA, 120 bp, synthetic construct; identical to SEQ ID NO: 15467
  source 1..120: mol_type = other DNA

SEQ ID NO: 48983 - DNA, 120 bp, synthetic construct; identical to SEQ ID NO: 15468
  source 1..120: mol_type = other DNA

SEQ ID NO: 48984 - DNA, 120 bp, synthetic construct; identical to SEQ ID NO: 15469
  source 1..120: mol_type = other DNA

SEQ ID NO: 48985 - DNA, 120 bp, synthetic construct; identical to SEQ ID NO: 15470
  source 1..120: mol_type = other DNA

SEQ ID NO: 48986 - DNA, 120 bp, synthetic construct; identical to SEQ ID NO: 27801
  source 1..120: mol_type = other DNA

SEQ ID NO: 48987 - DNA, 120 bp, synthetic construct
  source 1..120: mol_type = other DNA
gctgaccccccccacctccctcccggacggggtggctgccgggcggagacgctcctcacttcccagatggggtggctgccgggcggagaggctcctcacttctcagacggggcagctgcc

SEQ ID NO: 48988 - DNA, 120 bp, synthetic construct; identical to SEQ ID NO: 27802
  source 1..120: mol_type = other DNA

SEQ ID NO: 48989 - DNA, 120 bp, synthetic construct
  source 1..120: mol_type = other DNA
gacagtcttaggcatcttttgcaaatattttctcccattatgtggcttatcttctcactctcttgatacgtttgctttcttagtgcatggcaacatctgagcagttgcccaagtcaggaa

SEQ ID NO: 48990 - DNA, 120 bp, synthetic construct; identical to SEQ ID NO: 18022
  source 1..120: mol_type = other DNA

SEQ ID NO: 48991 - DNA, 120 bp, synthetic construct; identical to SEQ ID NO: 21726
  source 1..120: mol_type = other DNA

SEQ ID NO: 48992 - DNA, 120 bp, synthetic construct; identical to SEQ ID NO: 25322
  source 1..120: mol_type = other DNA

SEQ ID NO: 48993 - DNA, 120 bp, synthetic construct
  source 1..120: mol_type = other DNA
gacttaagtgtccctgtctgacagctttgaagagagcagtggttctcccagcacgcagctggagatctgagaacgggcagactgcctcttcaagtgggtccctgacccctgacccccgag

SEQ ID NO: 48994 - DNA, 120 bp, synthetic construct
  source 1..120: mol_type = other DNA
ggatctctcggcagaaaccctacaagccagaagagagtgggggccaatattcaacattcttaaagaaaagaattttcaacccaaaatttcatatccagccaaactaagcttcataagtga

SEQ ID NO: 48995 - DNA, 120 bp, synthetic construct
  source 1..120: mol_type = other DNA
agctttacttccaactatgtggtcaattttggaataggtgtggtgtggtgctgaaaaaaatgtatattctgttgatttggggtggagagttctgtagatgtctattaggtctgcttggtg

SEQ ID NO: 48996 - DNA, 120 bp, synthetic construct
  source 1..120: mol_type = other DNA
attctgataccaaagccgggcagagacacaaccaaaaaagagaattttagaccaatatccttgatgaacattgatgcaaaaatcctcaataaaatactggcaaaccgaatccagcagcac

SEQ ID NO: 48997 - DNA, 120 bp, synthetic construct
  source 1..120: mol_type = other DNA
tgctcaaggaaataaaagaggacacaaacaaatggaagaactgctcatgggtaggaagaatcaatatcgtgaaaatggccatactgcccaaggtaatttacagattcaatgccatcccca

SEQ ID NO: 48998 - DNA, 120 bp, synthetic construct
  source 1..120: mol_type = other DNA
gtggaagtcagtgtggcgattcctcagggatctagaactagaaataccatttgacccagccatcccattactgggtatataaccaaatgagtataaatcatgctgctataaagacacatg

SEQ ID NO: 48999 - DNA, 120 bp, synthetic construct; identical to SEQ ID NO: 25323
  source 1..120: mol_type = other DNA

SEQ ID NO: 49000 - DNA, 120 bp, synthetic construct; identical to SEQ ID NO: 25320
  source 1..120: mol_type = other DNA

SEQ ID NO: 49001 - DNA, 120 bp, synthetic construct
  source 1..120: mol_type = other DNA
cctctgcccggccgccaccccgtctgggaagtgaggagcgtctctgcctggccccccatcgtctgggatatgaggagcctctctgcctggctgcccagtctggagggtgaggagcgtctc

SEQ ID NO: 49002 - DNA, 120 bp, synthetic construct; identical to SEQ ID NO: 25321
  source 1..120: mol_type = other DNA

SEQ ID NO: 49003 - DNA, 120 bp, synthetic construct
  source 1..120: mol_type = other DNA
caactagtcgtgggcagttgaggggagaagactggaagaggggaaaagaggagaaaaagagtgaagaaggggagggaaaaaattagaaagaataaataaatataaggtgggaggaaacct

SEQ ID NO: 49004 - DNA, 120 bp, synthetic construct
  source 1..120: mol_type = other DNA
tcttgtggtggacatttttatcggggcaaggctaagagcagggcctgatgggggaagtcactgctacttcacattttgaccaataattccttgtgctgtatcagatgctgtaggctgata

SEQ ID NO: 49005 - DNA, 120 bp, synthetic construct
  source 1..120: mol_type = other DNA
gaggccctgtctcaaaataactttgatgaaggtggggaatcagaagtaggtgggcaggggtctgggtttgcaaggctctgagtttgagctctgttctgtacctttgaggggatgagggaa

SEQ ID NO: 49006 - DNA, 120 bp, synthetic construct
  source 1..120: mol_type = other DNA
ataagctgggggctgggaagcatagatacagaaatgcacagatgtgagctgagaagcaaggagggagagagagagacagaaagagagagagagacgtgccagggcttgagggaccagaga

SEQ ID NO: 49007 - DNA, 120 bp, synthetic construct
  source 1..120: mol_type = other DNA
tatctatctatctatctatctatctatcttttttttttttgagacaaaatctcactctgtcgcccaggctgtagtgcagtggcactacaagtaatcccaagtagctgagattacaggcgc

SEQ ID NO: 49008 - DNA, 120 bp, synthetic construct
  source 1..120: mol_type = other DNA
tttatctaatctatctgtctgtatgtctgttttttttttgttttttttttttttttgagatagagtcttgctctgtcgccgaggctggagtgcggtggcgcgatctcagctcactgctga

SEQ ID NO: 49009 - DNA, 120 bp, synthetic construct
  source 1..120: mol_type = other DNA
gttattcacataggttaagggaatcaatcaatttgaagcacagacactattaacagcaggaagagtcctgaagaagtgaaaatggtgtttctggaacccagagagtgcttgcactctgga

SEQ ID NO: 49010 - DNA, 120 bp, synthetic construct
  source 1..120: mol_type = other DNA
tatcttggtgcctttcctataatcactgctccagtcccatgtcatctggtccccagttaccacatcaagcttcccgaagctccacacagaccatgccacatctttaccaaaaaatcagca

SEQ ID NO: 49011 - DNA, 120 bp, synthetic construct
  source 1..120: mol_type = other DNA
ctctgctctttctcccctgacctctctgaagggggcctgcccctccacacctgtgggtatttctcgcaaggtggagacaagagactgagaaaagaaataagacacagagaaagtatagag

SEQ ID NO: 49012 - DNA, 120 bp, synthetic construct
  source 1..120: mol_type = other DNA
ctcctgacctcatgatccgcccgccttggcctcccaaaatgctgggattacacgtgtgaggcaagaactttttaaaagtgcatcttgcgcagccctagatccattaaaccttgattcaat

SEQ ID NO: 49013 - DNA, 120 bp, synthetic construct
  source 1..120: mol_type = other DNA
gggttgcttagtttcttggcctctgtgtgtttacgtgtcatttccttcccatagttttaagtacatgcatgatatgcactctgtaggcatgaaccttaagtagctaattactatacgggg

SEQ ID NO: 49014 - DNA, 120 bp, synthetic construct
  source 1..120: mol_type = other DNA
ggggatacagtggaactgacctgtacagcttcccagaagaagagcatacaattccactggaaaaactccaaccagataaagattctgggaaatcagggctccttcttaactaaaggtagg

SEQ ID NO: 49015 - DNA, 120 bp, synthetic construct
  source 1..120: mol_type = other DNA
gccaacatggtgaaacccggtctctactaaaaatacaaaaattagccaggtgtgggggtgcagtcctgtacttccagctactcaggaggctgaggcaggagactcgcttgaacctgggag

SEQ ID NO: 49016 - DNA, 120 bp, synthetic construct
  source 1..120: mol_type = other DNA
ttttgattgattttcttccaatctttttttttttttttctttttgagacagggtctcactctgctgcccaggctggagtacagtggcatgaccacaacacatcacagcctcaagtgatct

SEQ ID NO: 49017 - DNA, 120 bp, synthetic construct
  source 1..120: mol_type = other DNA
aagtctacttgacagaaataaaattgtgaatattcttttttgttgtttttttgagacagagtctcatttggacgcctaggctggagtgcagtggcatgatctcggctaactgcaacctcc

SEQ ID NO: 49018 - DNA, 120 bp, synthetic construct
  source 1..120: mol_type = other DNA
cacacacacacacacacacacacacaatgcaaaagacccaccctactacaactaacattatatttaatggtgaaaaactgaattctttctccctaagtgcaggaataagacaaagatgtc

SEQ ID NO: 49019 - DNA, 120 bp, synthetic construct
  source 1..120: mol_type = other DNA
gaaaagaaaagaaaaagaaagagagaaagaaatacttaggtgtaaatctaaaaaacatgcgtagggccaggtgcagtggctcatgcctgtaatcccagcactttgggaagttgaggctgg

SEQ ID NO: 49020 - DNA, 120 bp, synthetic construct
  source 1..120: mol_type = other DNA
attccagctggcactccagcctaagtgacaaagggagaccctgtctcaaaaacaaaaacaaaaccaaaataattttgctctgcaaaatccctattaagaagaagaaaagaggctgggcac

SEQ ID NO: 49021 - DNA, 120 bp, synthetic construct
  source 1..120: mol_type = other DNA
ttccaatattggtgggaggctaaaatggcaaagccactctggaaaacagtttgatagtttcttataaaacaaaacatgcggccgggcgcggtagctcacgcctgtaatcccagcactttg

SEQ ID NO: 49022 - DNA, 120 bp, synthetic construct
  source 1..120: mol_type = other DNA
ttacaactgcaagtgaatctacaattatctcaaaataataagtttagtttaatgctaggcgtggtggctcacatctgtaatctcagctctttgggaggctgagacgggtggatggcttga

SEQ ID NO: 49023 - DNA, 120 bp, synthetic construct
  source 1..120: mol_type = other DNA
ttctatttcattgtaagttatttgtaaatattggttttggtgctaacctagaattccatcaaattaattgtcccctaatatatggccattatcattttgtctaacattgtatcctattaa

SEQ ID NO: 49024 - DNA, 120 bp, synthetic construct
  source 1..120: mol_type = other DNA
aaaaaaaaaaaatgttctagtttcttcctcttctttgttcccatgggaatgccaccatcaccagccaaggctcacatacctcccacctggattacagtgagcttccaggtaatttggtct

SEQ ID NO: 49025 - DNA, 120 bp, synthetic construct
  source 1..120: mol_type = other DNA
atttcattttgaaccaattgcgtttggggtgatggcaggatattaacataaacttatttcttggaccattggaaatgtgtgcctagaactgaggagagaggtcagggctggcagtaacaa

SEQ ID NO: 49026 - DNA, 120 bp, synthetic construct
  source 1..120: mol_type = other DNA
ctacagagattttggagcttccactgcacccagaaaatgcacagctaaagagaaaacttcccttggtgatggttattagattttacaagaagaggccaaaggagacacatacttatgcca

SEQ ID NO: 49027 - DNA, 120 bp, synthetic construct
  source 1..120: mol_type = other DNA
taatcccagctactccgaaggctgaggcaagagaatcccttgaactcaggaggcagaggttacaatgagcagagatcgaacactcgactccataaaaacaaacaaacaaaaaaagaaagc

SEQ ID NO: 49028 - DNA, 120 bp, synthetic construct
  source 1..120: mol_type = other DNA
ctggagtgcagtggtgccatctcatttgtttcactgcaacctttgacttctgggctcaagtgattctcccacctcagcctcccaaggcggctaattaaaaaaaatttttttttttttttt

SEQ ID NO: 49029 - DNA, 120 bp, synthetic construct
  source 1..120: mol_type = other DNA
tccaaataaggatatgattttatttgtatttgtgagctactgtcccagccaggtaaatggatatgatgagacctccttgccagaccgggtttctctgattagaacgaggagcagatgttg

SEQ ID NO: 49030 - DNA, 120 bp, synthetic construct
  source 1..120: mol_type = other DNA
aaaacatacagggggggaagaccctctccgtgtctcagctggagctccaggatagtggcacctggacatgcactgtcttgcagaaccagaagaaggtggagttcaaaatagacatcgtgg

SEQ ID NO: 49031 - DNA, 120 bp, synthetic construct
  source 1..120: mol_type = other DNA
cacagagtaagccctagttaagtgttcgctgttattttgtgaagggtgatgaatacgcctctaaggagtggaggccaaatggcttctgtggtccaggaatcctaaggacagcaaggatcc

SEQ ID NO: 49032 - DNA, 120 bp, synthetic construct
  source 1..120: mol_type = other DNA
ccactgcaggcctgcttcctgacctgtctaataaggataatgaaatctgctctctgtgtgatagtaatgatgataatgtcaagctccaaattgagtttctggcttccttatctccttatc

SEQ ID NO: 49033 - DNA, 120 bp, synthetic construct
  source 1..120: mol_type = other DNA
tccaaatccagacgcacttacacacacactcacacacatacactctcacacacatgcacacactcccatacactctcacacacgcacacacatcactcacacactcgcacacactcatac

SEQ ID NO: 49034 - DNA, 120 bp, synthetic construct
  source 1..120: mol_type = other DNA
ctgtatatgggaactgattttggcccagctccctctgcccactcgtaagttcccttgctgccctgtcccagatcccactcaagggagagacaggaaggagcagagagttaattccaggat

SEQ ID NO: 49035 - DNA, 120 bp, synthetic construct
  source 1..120: mol_type = other DNA
gaagcatggagcatgggactgttcttttacaagacaggaccctgggaccacagagggcaggaacttgcacaaaatcacacagccaagccagtcaaggatggatgcagatccagaggtttc

SEQ ID NO: 49036 - DNA, 120 bp, synthetic construct
  source 1..120: mol_type = other DNA
aaatcagggttacaaatcttcttgatccacttctctcaggatcccctctcttcctacccttcctcaccacttccctcagtcccaactccttttccctatttccttctcctcctgtcttta

SEQ ID NO: 49037 - DNA, 120 bp, synthetic construct; identical to SEQ ID NO: 35372
  source 1..120: mol_type = other DNA

SEQ ID NO: 49038 - DNA, 120 bp, synthetic construct
  source 1..120: mol_type = other DNA
tgtatgcatatctaaaagcacagcatttaatcctttaccttgtctatgatgcaaagacctttgttcacgtgtttgtctgctcaccctctccccactattgtcttgtgaccctgacacatc

SEQ ID NO: 49039 - DNA, 120 bp, synthetic construct
  source 1..120: mol_type = other DNA
tccagaattagtggggccattagagtctaaaccacgagggccaagtcctctttcagcaggtcaggtgaccgtaacattacaacctcaagcgcaggttagagaaaataagacccaactgcc

SEQ ID NO: 49040 - DNA, 120 bp, synthetic construct
  source 1..120: mol_type = other DNA
gtcaatcagccattaagccattaaaaggaaaggttcccgcaggatcagatgtaatctcagagtatgtaaaagcccgtgatggaattggaggagctacgcataaagctatgcttatggccc

SEQ ID NO: 49041 - DNA, 120 bp, synthetic construct
  source 1..120: mol_type = other DNA
aggttggaaatagtgaaataaaaagaacaggagggtttggaagcactgatccgacaggaaaggctgcatattgggcaagtcaggtctcagagaacagacctgtgtgtaaggccgttattc

SEQ ID NO: 49042 - DNA, 120 bp, synthetic construct
  source 1..120: mol_type = other DNA
agagcaggattgtgaaaaatttgcctttactataccagccataaataataaagaaccagccaccaggtttcagtggaaagtgttacctcagggaatgcttaatagtccaactatttgtca

SEQ ID NO: 49043 - DNA, 120 bp, synthetic construct
  source 1..120: mol_type = other DNA
tggaaaagtggcttacacagggccaaaagaacgagtaatcaaaactccatatcaatcggctcaaagagcagagttggttgcagtcattacagtgttacaagattttgatcaacctatcaa

SEQ ID NO: 49044 - DNA, 120 bp, synthetic construct
  source 1..120: mol_type = other DNA
cttctgcagaacatcttactggtaaaaagaacagcccacatgaaggaaaactaatttagtggaaagataattaaaataagacatgggaaatagggaagctgataacgtgggggagaggtt

SEQ ID NO: 49045 - DNA, 120 bp, synthetic construct
  source 1..120: mol_type = other DNA
ctttgggaatgggaagaaaaaggaatctctaccccaagaccaaaaataataagtcctgtttctggtcctgaacatccagaattgtggaggcttactgtggcctcacaccacattagaatt

SEQ ID NO: 49046 - DNA, 120 bp, synthetic construct
  source 1..120: mol_type = other DNA
ttgtgtgcctgttttgtctgttgttagtctgcaggtgtacccaacagctccgaagagacagtgacatcgagaacgggccatgatgacgatggcggttttgtcgaaaagaaaagggggaaa

SEQ ID NO: 49047 - DNA, 120 bp, synthetic construct
  source 1..120: mol_type = other DNA
aataaatactaaggggactcagaggctggtgggatcctccatatgctgaacgttggttccccgggcccccttatttctttctctatactttgtctctgtgtctttttcttttccaagtct

SEQ ID NO: 49048 - DNA, 120 bp, synthetic construct; identical to SEQ ID NO: 8900
  source 1..120: mol_type = other DNA

SEQ ID NO: 49049 - DNA, 120 bp, synthetic construct; identical to SEQ ID NO: 11936
  source 1..120: mol_type = other DNA

SEQ ID NO: 49050 - DNA, 120 bp, synthetic construct; identical to SEQ ID NO: 11937
  source 1..120: mol_type = other DNA

SEQ ID NO: 49051 - DNA, 120 bp, synthetic construct; identical to SEQ ID NO: 11938
  source 1..120: mol_type = other DNA

SEQ ID NO: 49052 - DNA, 120 bp, synthetic construct; identical to SEQ ID NO: 11939
  source 1..120: mol_type = other DNA

SEQ ID NO: 49053 - DNA, 120 bp, synthetic construct; identical to SEQ ID NO: 11940
  source 1..120: mol_type = other DNA

SEQ ID NO: 49054 - DNA, 120 bp, synthetic construct; identical to SEQ ID NO: 7964
  source 1..120: mol_type = other DNA

SEQ ID NO: 49055 - DNA, 120 bp, synthetic construct; identical to SEQ ID NO: 7965
  source 1..120: mol_type = other DNA

SEQ ID NO: 49056 - DNA, 120 bp, synthetic construct
  source 1..120: mol_type = other DNA
actaataaatatatatatagagagaaacagaagagaaaattgctgggtggctcatgcctataatcccgacactttgggaaactgacttgggaggattgcttgagcccaggagttcaagac

SEQ ID NO: 49057 - DNA, 120 bp, synthetic construct; identical to SEQ ID NO: 3288
  source 1..120: mol_type = other DNA

SEQ ID NO: 49058 - DNA, 120 bp, synthetic construct; identical to SEQ ID NO: 3289
  source 1..120: mol_type = other DNA

SEQ ID NO: 49059 - DNA, 120 bp, synthetic construct
  source 1..120: mol_type = other DNA
actaagccaagatcgcgccactgcactccagcctgggcgacagagccagactgtctcaaataaataaatatgagataatgcagtcgggagaagggagggagagaattttattaaatgtga

SEQ ID NO: 49060 - DNA, 120 bp, synthetic construct; identical to SEQ ID NO: 18655
  source 1..120: mol_type = other DNA

SEQ ID NO: 49061 - DNA, 120 bp, synthetic construct; identical to SEQ ID NO: 27124
  source 1..120: mol_type = other DNA

SEQ ID NO: 49062 - DNA, 120 bp, synthetic construct; identical to SEQ ID NO: 27125
  source 1..120: mol_type = other DNA

SEQ ID NO: 49063 - DNA, 120 bp, synthetic construct; identical to SEQ ID NO: 24574
  source 1..120: mol_type = other DNA

SEQ ID NO: 49064 - DNA, 120 bp, synthetic construct; identical to SEQ ID NO: 24575
  source 1..120: mol_type = other DNA

SEQ ID NO: 49065 - DNA, 120 bp, synthetic construct
  source 1..120: mol_type = other DNA
ccacccctccccaacccctggaaaccactgatctttttactgtctccacagttttgccttttccagaatgttctatctttggaatcatacagtatgtacccttttcagattgacttcttt

SEQ ID NO: 49066 - DNA, 120 bp, synthetic construct
  source 1..120: mol_type = other DNA
tgggtcaaatggtatttctagttctagatccctgaggaatcgccacactgacttccacaatggttgaactagtttacagtcccaccaacagtgtaaaagtgttcctatttctccacattc

SEQ ID NO: 49067 - DNA, 120 bp, synthetic construct; identical to SEQ ID NO: 24603
  source 1..120: mol_type = other DNA

SEQ ID NO: 49068 - DNA, 120 bp, synthetic construct; identical to SEQ ID NO: 20685
  source 1..120: mol_type = other DNA

SEQ ID NO: 49069 - DNA, 120 bp, synthetic construct
  source 1..120: mol_type = other DNA
tgggtttgaaaaagtgcctgagacccatcttagccgcccctacctgagctttagcagcctaggagctattgcaccataaaacactgcaacctgaggctgcattaacagaagcaccacgtc

SEQ ID NO: 49070 - DNA, 120 bp, synthetic construct; identical to SEQ ID NO: 20686
  source 1..120: mol_type = other DNA

SEQ ID NO: 49071 - DNA, 120 bp, synthetic construct
  source 1..120: mol_type = other DNA
gagaatcgcttgaaccccggaggcagaggttgcaatgagcagagatcacaccattccgctgcagcctgggcaacaagagtgaaactctgtctcaaaaaaaaaaaaagaaagttccgttca

SEQ ID NO: 49072 - DNA, 120 bp, synthetic construct
  source 1..120: mol_type = other DNA
ttttaattgtgtacaattttcaccttgtgtgttggatttagaagctgccccctacccaagagataataacttgagtgtagctgtctcaggccagacctctagaaagttccattcaaggcc

SEQ ID NO: 49073 - DNA, 120 bp, synthetic construct; identical to SEQ ID NO: 20687
  source 1..120: mol_type = other DNA

SEQ ID NO: 49074 - DNA, 120 bp, synthetic construct
  source 1..120: mol_type = other DNA
ggctgaggagggaggatcacttgagcccaggagttcaagtctagcctagacaacataataagaccccattcctaaaaaaataaatgaaaatcaaaagtaataaaggctgaaatacaaatg

SEQ ID NO: 49075 - DNA, 120 bp, synthetic construct
  source 1..120: mol_type = other DNA
aacctgggtttgagtgcaacgtggctgtttcctgatccagtgccccggtctctctgagcctcggctgcctcagatgggggtaggacattagctacctcccagagttgctgtttgtaaatt

SEQ ID NO: 49076 - DNA, 120 bp, synthetic construct
  source 1..120: mol_type = other DNA
aaagactcattaccaggcatgaaaattgtctacttcttaaaaatttgaatgtgggacatgaaattttataataaaatgatttcaataatgtttaaagtgcttacaaagactagacgatgg

SEQ ID NO: 49077 - DNA, 120 bp, synthetic construct
  source 1..120: mol_type = other DNA
tgctttgcccctcagctactcaagggaccagccacaggggcctgaagggtgtcagaggaggatttgggacattgatagtgtaaagtctgctgtttaaatagcacacaaaatggacaaagg

SEQ ID NO: 49078 - DNA, 120 bp, synthetic construct; identical to SEQ ID NO: 20688
  source 1..120: mol_type = other DNA

SEQ ID NO: 49079 - DNA, 120 bp, synthetic construct; identical to SEQ ID NO: 21073
  source 1..120: mol_type = other DNA

SEQ ID NO: 49080 - DNA, 120 bp, synthetic construct
  source 1..120: mol_type = other DNA
acccagcaacatcagtttaaacaaagggaagaccccaagttgtatggcaccccaaccccagtgatagaaagaaacaacctgccaccaaaagaagaaaccttcatcctagcactaaattct

SEQ ID NO: 49081 - DNA, 120 bp, synthetic construct
  source 1..120: mol_type = other DNA
cctcctgagtagctgggactacaggcatgtgccaccacgcccagctaatttttttacattttcgtagagacagagtttcaccgtgttgcccaggctggtctctaactcctgagctcaagg

SEQ ID NO: 49082 - DNA, 120 bp, synthetic construct
  source 1..120: mol_type = other DNA
gtggacttcttggtgggctgggcagtggtgggaaggaaatcaactacagaaagaaagcaagacacatatcttagccaagtgaacaccacgtggactcaaagacaaaactttgtcttatgg

SEQ ID NO: 49083 - DNA, 120 bp, synthetic construct
  source 1..120: mol_type = other DNA
tttcaccatgttggccaggctggtcttgaactcctgatctcaggtaatccactcacctcggcctccaaaagtgctagtattacaggtacgagccaccgcacccggccgacctacacccct

SEQ ID NO: 49084 - DNA, 120 bp, synthetic construct
  source 1..120: mol_type = other DNA
cactgattttcgtattgaaaaatggactttgggagtttggggtttggggtttggctttagcttattgtttttgtctctgtaagccccacacctttccactcatgagatttcagagtctga

SEQ ID NO: 49085 - DNA, 120 bp, synthetic construct; identical to SEQ ID NO: 20691
  source 1..120: mol_type = other DNA

SEQ ID NO: 49086 - DNA, 120 bp, synthetic construct; identical to SEQ ID NO: 21069
  source 1..120: mol_type = other DNA

SEQ ID NO: 49087 - DNA, 120 bp, synthetic construct; identical to SEQ ID NO: 20692
  source 1..120: mol_type = other DNA

SEQ ID NO: 49088 - DNA, 120 bp, synthetic construct
  source 1..120: mol_type = other DNA
caggttctggggtcccacaagctgggttttaatctggatcactgtgtgaccttgagcacatctttaaccttcctgagtctctctttcctcatggataaagtagttgcaaaacagtatctc

SEQ ID NO: 49089 - DNA, 120 bp, synthetic construct; identical to SEQ ID NO: 21068
  source 1..120: mol_type = other DNA

SEQ ID NO: 49090 - DNA, 120 bp, synthetic construct; identical to SEQ ID NO: 20693
  source 1..120: mol_type = other DNA

SEQ ID NO: 49091 - DNA, 120 bp, synthetic construct
  source 1..120: mol_type = other DNA
gttccttttgcaatgctgtggcgcccatgagagagtggatagaaagaggtagcttgtgttttctaaacaacaaatactttgaatacacatacaaagaagaaatacaaatggccaacaagc

SEQ ID NO: 49092 - DNA, 120 bp, synthetic construct
  source 1..120: mol_type = other DNA
aaagaggagattgctttataataaatggaccagtcaacactcaggcacagctgcagaagacaatatagtgaggtccccaaatacttataccaacctgtactgaacaaacgtcaaccgaag

SEQ ID NO: 49093 - DNA, 120 bp, synthetic construct
  source 1..120: mol_type = other DNA
atatttttgtttgatttgggctccctttgatggtggttagtttgatatttgagactttttcctaaggagactataaaaagcaatctagacttcttctctttgatttgggttagaactaag

SEQ ID NO: 49094 - DNA, 120 bp, synthetic construct
  source 1..120: mol_type = other DNA
aggtgggaggattgattgagctcaggagttggagaccagctcaggcaatatggtgaaaccctgtctttaccaaaaaaaaaataaaaataaaaaattacccagaggtggtggcgtgtgcct

SEQ ID NO: 49095 - DNA, 120 bp, synthetic construct
  source 1..120: mol_type = other DNA
gagaattgtttgaacctgggaggcagaggttgcagtgagccgagacagcgccactgcactccagactgggcaacagagcaagactctgtctctacaaaaaaaaaaaaaaaggtggaatgt

SEQ ID NO: 49096 - DNA, 120 bp, synthetic construct
  source 1..120: mol_type = other DNA
tggtatagcagaaagagtgcctgttagcatcgcttctctgctatttacccactctcaggcctcagttcctatattcataaatgaggggtgctctttaaatagctgtggaaggagtgaaca

SEQ ID NO: 49097 - DNA, 120 bp, synthetic construct
  source 1..120: mol_type = other DNA
tggtatagcagaaagagcactggttagcatcacttctctgctacttacgcactctcaggcctctgtttctacgtggataaatgaggaaaataataccaaccatgccatctcactgggtta

SEQ ID NO: 49098 - DNA, 120 bp, synthetic construct; identical to SEQ ID NO: 21067
  source 1..120: mol_type = other DNA

SEQ ID NO: 49099 - DNA, 120 bp, synthetic construct; identical to SEQ ID NO: 20693
  source 1..120: mol_type = other DNA

SEQ ID NO: 49100 - DNA, 120 bp, synthetic construct; identical to SEQ ID NO: 21068
  source 1..120: mol_type = other DNA

SEQ ID NO: 49101 - DNA, 120 bp, synthetic construct
  source 1..120: mol_type = other DNA
acctgactttgaaccactgaattgaagaaacctgcaatcctctccctgatggtggttatgtgctcacgagcacacagtggggctgcaagtacacaggtgcccgaagcccttccgggaaaa

SEQ ID NO: 49102 - DNA, 120 bp, synthetic construct; identical to SEQ ID NO: 20692
  source 1..120: mol_type = other DNA

SEQ ID NO: 49103 - DNA, 120 bp, synthetic construct; identical to SEQ ID NO: 21069
  source 1..120: mol_type = other DNA

SEQ ID NO: 49104 - DNA, 120 bp, synthetic construct
  source 1..120: mol_type = other DNA
gttcaagtgattctcctgcctcagcttcctgagtagctgggattacaggcatgagccaccacacctggctaattttttgtatttttagtggagacgagatttcaccatgttggccaggtg

SEQ ID NO: 49105 - DNA, 120 bp, synthetic construct
  source 1..120: mol_type = other DNA
tgcacttcctcacgctgagtggtctaatttctgggtccccttgtggcttttagtgccctcaagtgagcaggaagcagggcagtgggagccctggagggggttggctccagccttgggcca

SEQ ID NO: 49106 - DNA, 120 bp, synthetic construct; identical to SEQ ID NO: 20689
  source 1..120: mol_type = other DNA

SEQ ID NO: 49107 - DNA, 120 bp, synthetic construct; identical to SEQ ID NO: 21072
  source 1..120: mol_type = other DNA

SEQ ID NO: 49108 - DNA, 120 bp, synthetic construct
  source 1..120: mol_type = other DNA
gtggctcacgcctgtaatcccagcactttgggaggccaaggcaggtggatcacctgaagtcaggagctcaagaccagcttggccaacatggtgaaaccctgcctctactaaaaatataaa

SEQ ID NO: 49109 - DNA, 120 bp, synthetic construct
  source 1..120: mol_type = other DNA
tgaggtcaggagttcgagaccagcctgatcaacatggcgaaacccgtctccactaaaaatacaaaaattagctgggcattgtggtgggcacctgtaatcccaacgacttaggaggctgag

SEQ ID NO: 49110 - DNA, 120 bp, synthetic construct
  source 1..120: mol_type = other DNA
ataatttaacctctttgaatcttgttgtttttgttttttgaactgtgaaatgagaggtaaaaataatggcaagccaggcacggtggctcacacctgtaatcccagcactttgggaggcca

SEQ ID NO: 49111 - DNA, 120 bp, synthetic construct; identical to SEQ ID NO: 1088
  source 1..120: mol_type = other DNA

SEQ ID NO: 49112 - DNA, 120 bp, synthetic construct
  source 1..120: mol_type = other DNA
attagccaggcatggtggcacatgcctgtaatcccagctactcgggaggctaagaatgagaatcccttgaacccaggaggcggaagttgcagtgagctgagaatgcaccactgcactccg

SEQ ID NO: 49113 - DNA, 120 bp, synthetic construct; identical to SEQ ID NO: 1089
  source 1..120: mol_type = other DNA

SEQ ID NO: 49114 - DNA, 120 bp, synthetic construct; identical to SEQ ID NO: 1090
  source 1..120: mol_type = other DNA

SEQ ID NO: 49115 - DNA, 120 bp, synthetic construct
  source 1..120: mol_type = other DNA
ttcaatttagagttgtgtacttttgctcccccaaacatttctgtatagagggggttgttctaaggatcaaatgtaattaactggataggcagatgtgaaacagtctctgttgtgaggaac

SEQ ID NO: 49116 - DNA, 120 bp, synthetic construct
  source 1..120: mol_type = other DNA
ccattccgctgcagcctgggcaacaagagtgaaactctgtctcaaaaaaaaaaaaagaaagttccgttcaaaatctctcccatgatgacctttcatggaaagtaagtccctctctggtac

SEQ ID NO: 49117 - DNA, 120 bp, synthetic construct
  source 1..120: mol_type = other DNA
tgctgttgttttcagattttacaaatgagcagagaatacggttttggtgtcctgctacaaaaagacatcggtcagtaacgagcacgatgtggaaaaatgagagaagggacacattcaacc

SEQ ID NO: 49118 - DNA, 120 bp, synthetic construct
  source 1..120: mol_type = other DNA
aagaatcaataagaaaatgaagagacatgtgacagaacccctcatgcctcctaccttctgtttggtgcctgacttgaagccagggatccctgcggttcaacccgcggtagaaatgaacac

SEQ ID NO: 49119 - DNA, 120 bp, synthetic construct
  source 1..120: mol_type = other DNA
gacccaggtgttttccgtttgctccagctttgagaagtcagcacaaattggcctcagattccctgcccccagacgtaggtgtttctccttcattcagcacgaattggccttagatgccct

SEQ ID NO: 49120 - DNA, 120 bp, synthetic construct; identical to SEQ ID NO: 24523
  source 1..120: mol_type = other DNA

SEQ ID NO: 49121 - DNA, 120 bp, synthetic construct
  source 1..120: mol_type = other DNA
tttacagtcccaccaacagtgtaaaagtgttcctgtttctccacatcctctccagcacctgttgtttcctgactttgtaatgattgtcattctaactggtgtgagatggtatctcatagt

SEQ ID NO: 49122 - DNA, 120 bp, synthetic construct
  source 1..120: mol_type = other DNA
gtgtgatgcctccagctttgttcttttggcttaggattgacttggcgatgcgggctctattttggttccatatgaactttaaagtagttttttccaattctgtgaagaaagtcattggta

SEQ ID NO: 49123 - DNA, 120 bp, synthetic construct
  source 1..120: mol_type = other DNA
aagctttttgatgtgctgctggattcggtttgccagtattttattggggatttttgcatcaatgttcatcaaggatattggtctaaaattctcttttttggttgtgtctctgcccggctt

SEQ ID NO: 49124 - DNA, 120 bp, synthetic construct
  source 1..120: mol_type = other DNA
tggtatgtcgtgtctttgttctcgttggtttcaaagaacatctttatttctgccttcatttcgttatgtacccagtagtcattcaggagcaggttgttcagtttccatgtagttgagcgg

SEQ ID NO: 49125 - DNA, 120 bp, synthetic construct
  source 1..120: mol_type = other DNA
gttagttgacacagtttcttcctagtctcgatggtctttacattttggcatgattttgcagcagctggtaccagttgttcctttccatgtttagcgcttccttcaggagctcttttaggg

SEQ ID NO: 49126 - DNA, 120 bp, synthetic construct
  source 1..120: mol_type = other DNA
ttccttctaacagacaggaccctcagctgcaggtctgttggaataccctgccttgtgaggtgtcagtgtgcccctgctgcggggtgcctcccagttaggctgctcgggggtcaggggtca

SEQ ID NO: 49127 - DNA, 120 bp, synthetic construct; identical to SEQ ID NO: 24524
  source 1..120: mol_type = other DNA

SEQ ID NO: 49128 - DNA, 120 bp, synthetic construct
  source 1..120: mol_type = other DNA
atttttaatgaaatgatttaaaatattttaattttttttctttttgagatggagtgtctctctgtcacccaggctggagtgcagtggtgcgacctctgctcactgcaacccctgcctccc

SEQ ID NO: 49129 - DNA, 120 bp, synthetic construct; identical to SEQ ID NO: 33369
  source 1..120: mol_type = other DNA

SEQ ID NO: 49130 - DNA, 120 bp, synthetic construct; identical to SEQ ID NO: 35497
  source 1..120: mol_type = other DNA

SEQ ID NO: 49131 - DNA, 120 bp, synthetic construct
  source 1..120: mol_type = other DNA
tatataaagaacttatacaagtcaacaacaacaaaaaccctgattttaaggctaggcacagtggctcatgcttgtaatcccagaactttgggaggctgaggcaggtggattacttgagtc

SEQ ID NO: 49132 - DNA, 120 bp, synthetic construct
  source 1..120: mol_type = other DNA
attggaaaccatcatcctcagtaaactatcgcaagaacaaaaaaccaaacaccgcatattctcactcataggtgggaattgaacaatgagaacacatggacacaggaaggggaacatcac

SEQ ID NO: 49133 - DNA, 120 bp, synthetic construct; identical to SEQ ID NO: 35499
  source 1..120: mol_type = other DNA

SEQ ID NO: 49134 - DNA, 120 bp, synthetic construct
  source 1..120: mol_type = other DNA
gccttccaaagtgttgggactacaggcatgagccaccatgcccagcggaaaacatgaactttaacataggaatacgtataatcatatcagtaaaaaaaaaaaaaaaaaaatggggggggg

SEQ ID NO: 49135 - DNA, 120 bp, synthetic construct; identical to SEQ ID NO: 35501
  source 1..120: mol_type = other DNA

SEQ ID NO: 49136 - DNA, 120 bp, synthetic construct; identical to SEQ ID NO: 7251
  source 1..120: mol_type = other DNA

SEQ ID NO: 49137 - DNA, 120 bp, synthetic construct
  source 1..120: mol_type = other DNA
cccgggaggtggagctcgcagtgagctgagatcacgcctctgcattccagcctgagtgacagagcgagattccgtctccaaaacaaaaaagcgggagggacctaaaaatcacctgctata

SEQ ID NO: 49138 - DNA, 120 bp, synthetic construct
  source 1..120: mol_type = other DNA
tgggagtacaggcgtgcgccacaacacccggcctaaacctcttttctttataaattacccggtctcaagtatgtctttattagcagcttgagaacagactaatacactgagtatatgtag

SEQ ID NO: 49139 - DNA, 120 bp, synthetic construct; identical to SEQ ID NO: 13717
  source 1..120: mol_type = other DNA

SEQ ID NO: 49140 - DNA, 120 bp, synthetic construct; identical to SEQ ID NO: 10066
  source 1..120: mol_type = other DNA

SEQ ID NO: 49141 - DNA, 120 bp, synthetic construct; identical to SEQ ID NO: 10067
  source 1..120: mol_type = other DNA

SEQ ID NO: 49142 - DNA, 120 bp, synthetic construct; identical to SEQ ID NO: 7845
  source 1..120: mol_type = other DNA

SEQ ID NO: 49143 - DNA, 120 bp, synthetic construct
  source 1..120: mol_type = other DNA
gcagaccaaagagtgcatcaaatgtacattatttcagcatagataatgaactcgaatatgagaacttctccgaagactttggaccactcaatctggcaatggtttacagatattgttgca

SEQ ID NO: 49144 - DNA, 120 bp, synthetic construct
  source 1..120: mol_type = other DNA
gcgaagacaatcaaaaacaaacgatattcttctcccatctcccctggctgtgctgacctttacactgtgtagtgttgtcatctggtggattgtttgtgactacattcttcccatcctgct

SEQ ID NO: 49145 - DNA, 120 bp, synthetic construct
  source 1..120: mol_type = other DNA
gaatgcctttaagcagttttccactctgggctgggtgggccaggtgttccttgccctcattccggtaaacccacacccttccagcgtgggcattagggccattatgaacatgttacagtg

SEQ ID NO: 49146 - DNA, 120 bp, synthetic construct; identical to SEQ ID NO: 6411
  source 1..120: mol_type = other DNA

SEQ ID NO: 49147 - DNA, 120 bp, synthetic construct
  source 1..120: mol_type = other DNA
tggcaaacatggtgaaaccctatctctactaaaaatacaaaaatttggcggggcacggtggctcacatctgtaatcccagccctttgggaggctgaggcgagcggatcacgaggtcagga

SEQ ID NO: 49148 - DNA, 120 bp, synthetic construct
  source 1..120: mol_type = other DNA
ttctactctccccaagatagtgacatttcaaactaacaatttcctcacattgtatgaccattcccacaaaagctaaacttgctagggggaaaaaaagagagaagctgaggggagggagaa

SEQ ID NO: 49149 - DNA, 120 bp, synthetic construct; identical to SEQ ID NO: 19315
  source 1..120: mol_type = other DNA

SEQ ID NO: 49150 - DNA, 120 bp, synthetic construct; identical to SEQ ID NO: 19316
  source 1..120: mol_type = other DNA

SEQ ID NO: 49151 - DNA, 120 bp, synthetic construct; identical to SEQ ID NO: 19317
  source 1..120: mol_type = other DNA

SEQ ID NO: 49152 - DNA, 120 bp, synthetic construct; identical to SEQ ID NO: 19318
  source 1..120: mol_type = other DNA

SEQ ID NO: 49153 - DNA, 120 bp, synthetic construct; identical to SEQ ID NO: 28209
  source 1..120: mol_type = other DNA

SEQ ID NO: 49154 - DNA, 120 bp, synthetic construct; identical to SEQ ID NO: 28210
  source 1..120: mol_type = other DNA

SEQ ID NO: 49155 - DNA, 120 bp, synthetic construct; identical to SEQ ID NO: 28211
  source 1..120: mol_type = other DNA

SEQ ID NO: 49156 - DNA, 120 bp, synthetic construct; identical to SEQ ID NO: 7283
  source 1..120: mol_type = other DNA

SEQ ID NO: 49157 - DNA, 120 bp, synthetic construct; identical to SEQ ID NO: 9423
  source 1..120: mol_type = other DNA

SEQ ID NO: 49158 - DNA, 120 bp, synthetic construct; identical to SEQ ID NO: 9424
  source 1..120: mol_type = other DNA

SEQ ID NO: 49159 - DNA, 120 bp, synthetic construct; identical to SEQ ID NO: 9425
  source 1..120: mol_type = other DNA

SEQ ID NO: 49160 - DNA, 120 bp, synthetic construct
  source 1..120: mol_type = other DNA
cgccccgtctgagaagtgaggagaccctctgcctggcaaccgccccgactgagaggtgaggagcccctccgcccggcagccgccctgtctgagaagtgaggagccccgccgtccggcagc

SEQ ID NO: 49161 - DNA, 120 bp, synthetic construct
  source 1..120: mol_type = other DNA
cctatgaccctgcccaatccccctctgcgagaaacacccaagaatgatcaataaaaaaataaatgaataaataaataaataaataaataaaaaagaaattcaactatacactttgtcatt

SEQ ID NO: 49162 - DNA, 120 bp, synthetic construct; identical to SEQ ID NO: 2964
  source 1..120: mol_type = other DNA

SEQ ID NO: 49163 - DNA, 120 bp, synthetic construct
  source 1..120: mol_type = other DNA
tcatccatgtccctacaaaggacatgaactcttcactttttatggctgcatagtaattccatggtgtatatgtcacacattttttttttctttttttactggcatatctttttttcatct

SEQ ID NO: 49164 - DNA, 120 bp, synthetic construct
  source 1..120: mol_type = other DNA
actcatcattttttatggctgcatagtattccatggtgtatatgtgccacattttcttaatccagtctatcattgttggacatctgggttggttccaagtctttgctattgtgaataatg

SEQ ID NO: 49165 - DNA, 120 bp, synthetic construct
  source 1..120: mol_type = other DNA
atcctttccccattgcttgtttttctcaggtttgtcaaagatcagatagttgtagatatgtggcattatttctgagggctctgttctgttccactgatctatatctctgttttggtacca

SEQ ID NO: 49166 - DNA, 120 bp, synthetic construct
  source 1..120: mol_type = other DNA
tttattgagagtttttagcatgaagggttgttgaattttgtcaaaggctttttctgcatctattgagataatcatgtggtttttgtctttggctctgtttacatgctggattacatttat

SEQ ID NO: 49167 - DNA, 120 bp, synthetic construct
  source 1..120: mol_type = other DNA
acctgaggaattgccacactgtcttccacaatgattgaactagtttacagtcccaccaacagtgtaaaagcgttcctatttctccacatcctctccagcacctgttgtttcctgattttt

SEQ ID NO: 49168 - DNA, 120 bp, synthetic construct; identical to SEQ ID NO: 9427
  source 1..120: mol_type = other DNA

SEQ ID NO: 49169 - DNA, 120 bp, synthetic construct
  source 1..120: mol_type = other DNA
gagatggcagcctctgcccagccgccaccccctctgggaagtgaggagcgtctctgcctggctgcccatcgtctgggatgtgaggagcccctctgcccggccgcccagtctgggaagtga

SEQ ID NO: 49170 - DNA, 120 bp, synthetic construct
  source 1..120: mol_type = other DNA
gattaatgaaaaattcataccctgaatatacatggaatatctcggcgtgtagcatgaatgacatctgaggccaggactgagctcacggaaaactcgtcatctctggtaaggaagaaacat

SEQ ID NO: 49171 - DNA, 120 bp, synthetic construct
  source 1..120: mol_type = other DNA
gggtgtggaggtgaggggggagcagggggtgggtgtggaggtgagagggggagcggggtgtgggatcagtgtggaaatgctgttctgaagaggttccctaaagagtgctgagccctccga

SEQ ID NO: 49172 - DNA, 120 bp, synthetic construct; identical to SEQ ID NO: 14664
  source 1..120: mol_type = other DNA

SEQ ID NO: 49173 - DNA, 120 bp, synthetic construct; identical to SEQ ID NO: 14665
  source 1..120: mol_type = other DNA

SEQ ID NO: 49174 - DNA, 120 bp, synthetic construct
  source 1..120: mol_type = other DNA
caaggaactaagctgcagctatacccaatcatgtggatggatctcagttactcttacttacaattactttttattttttgagacacagtatcactctgttcccaggctggagtgcagcag

SEQ ID NO: 49175 - DNA, 120 bp, synthetic construct; identical to SEQ ID NO: 20469
  source 1..120: mol_type = other DNA

SEQ ID NO: 49176 - DNA, 120 bp, synthetic construct; identical to SEQ ID NO: 19987
  source 1..120: mol_type = other DNA

SEQ ID NO: 49177 - DNA, 120 bp, synthetic construct
  source 1..120: mol_type = other DNA
acccaggagtccaggcccccagcccctcctccctcagacccaggaatccaggccccatcccctcctccctcagacccaggagtccagacccccagcccctcttccctcagactcaggggt

SEQ ID NO: 49178 - DNA, 120 bp, synthetic construct
  source 1..120: mol_type = other DNA
ggcctcccaaagtgctgggattacagatgtgtgccactgcgcctggcctattcttccttgtgagtgattttagtgtattaataatttaaaatgtcaaaagcctatttctcctaacctaga

SEQ ID NO: 49179 - DNA, 120 bp, synthetic construct; identical to SEQ ID NO: 27008
  source 1..120: mol_type = other DNA

SEQ ID NO: 49180 - DNA, 120 bp, synthetic construct
  source 1..120: mol_type = other DNA
gaaaagtgtctgctcatatccttcgcccactttttgatggggttgtttgttttttgcttgtaaatttgtttgagttccctgtagattctggatattagccctttgtcagatgagtaggtt

SEQ ID NO: 49181 - DNA, 120 bp, synthetic construct
  source 1..120: mol_type = other DNA
ggagtggtgagagagggcatccctgtcttgtgccagttttcaaagggaatgcttccagtttttgcccattcagtatgatattggctgtgggtttgtcatagatagctcttattcttttga

SEQ ID NO: 49182 - DNA, 120 bp, synthetic construct
  source 1..120: mol_type = other DNA
tccatttcttctagattttctagtttatttgcgtagaggtgtttgtagtattctctgatggtagtttgtatttctgtgggatcggtggtgatatccccattatcattttttattgggtct

SEQ ID NO: 49183 - DNA, 120 bp, synthetic construct
  source 1..120: mol_type = other DNA
gttagctcttcttgttgaattgatccctttaccattatgtaatggccttgtctcttttgatttttgatggtttaaagtctgttttatcagagactaggattgcaacccctgccttttttt

SEQ ID NO: 49184 - DNA, 120 bp, synthetic construct
  source 1..120: mol_type = other DNA
ctttgctcgtttctttttattcttttttctctgaacttcccttctcacttcatttcattcatctcatcttccatcgctgataccctttcttccagttgatcacatcggctcctgaggctt

SEQ ID NO: 49185 - DNA, 120 bp, synthetic construct
  source 1..120: mol_type = other DNA
ccaatattgttcacgattctgactgtacagggttatacaaaaaccttgaacatttatttatttattttttattgttatactttaagttttagggtacatgtgcacaacgtgcaagtttgt

SEQ ID NO: 49186 - DNA, 120 bp, synthetic construct
  source 1..120: mol_type = other DNA
tcaattttggcttttgttgccattgcttttggtgttttagacatgaagtccttgcccgtgcctatacctgaatggtattgcctaggttttcttctagggtttttatggttttaggtctaa

SEQ ID NO: 49187 - DNA, 120 bp, synthetic construct
  source 1..120: mol_type = other DNA
gtgttgagagagggcatccctgtcttgtgccagttttcaaagggaatgcttccagtttttatccattcagtatgatattggctgtgggtttgtcatagatagctcttattattttgagat

SEQ ID NO: 49188 - DNA, 120 bp, synthetic construct
  source 1..120: mol_type = other DNA
taatgttgacagtaggatgttaaagtctcccgttattatcgtgtgggaatctaagtctctttgtaggtcacttaaggacttgctttatgaatctgggtgctcctgtattggatgcacatg

SEQ ID NO: 49189 - DNA, 120 bp, synthetic construct; identical to SEQ ID NO: 23523
  source 1..120: mol_type = other DNA

SEQ ID NO: 49190 - DNA, 120 bp, synthetic construct
  source 1..120: mol_type = other DNA
tttgatggttttgtgttagtcttcctgcagctgagcttccacaagacactttttccctttcagccacccaatatctcgcgagacttgctattctgcgccccctcccaccttgcgcttgcg

SEQ ID NO: 49191 - DNA, 120 bp, synthetic construct; identical to SEQ ID NO: 27777
  source 1..120: mol_type = other DNA

SEQ ID NO: 49192 - DNA, 120 bp, synthetic construct
  source 1..120: mol_type = other DNA
gtatttctagttctagatccctgaggaatcgccacactgacttccacaatggttgaactagtttacagtcccaccaacagtgtaaaagtgttcctatttctccacatcctctccagcacc

SEQ ID NO: 49193 - DNA, 120 bp, synthetic construct
  source 1..120: mol_type = other DNA
agaatggtgctttgcactgaatccattgaagacatattcacttgaaatgcttagaaatgaaaaattttaagatcttacttttgttttaattagagacaaaagtcataccatagaactcag

SEQ ID NO: 49194 - DNA, 120 bp, synthetic construct; identical to SEQ ID NO: 2921
  source 1..120: mol_type = other DNA

SEQ ID NO: 49195 - DNA, 120 bp, synthetic construct; identical to SEQ ID NO: 24265
  source 1..120: mol_type = other DNA

SEQ ID NO: 49196 - DNA, 120 bp, synthetic construct
  source 1..120: mol_type = other DNA
catgtttttgaggccttagatctacttctttctttttttttttttgagatggagtctcagtgcagtggtgcgatctatgctcactgcaagctccgcctccggggttcacatcattctcct

SEQ ID NO: 49197 - DNA, 120 bp, synthetic construct
  source 1..120: mol_type = other DNA
caaagattaaaaaaaaaatttagccaggtatggtggcgtgcacctgtggtactagcatcaaaaaaatgcaaaaatttgctgggcgtggtggcatgtgcatgtagtcccaactactcagga

SEQ ID NO: 49198 - DNA, 120 bp, synthetic construct; identical to SEQ ID NO: 16545
  source 1..120: mol_type = other DNA

SEQ ID NO: 49199 - DNA, 120 bp, synthetic construct; identical to SEQ ID NO: 5506
  source 1..120: mol_type = other DNA

SEQ ID NO: 49200 - DNA, 120 bp, synthetic construct; identical to SEQ ID NO: 26469
  source 1..120: mol_type = other DNA

SEQ ID NO: 49201 - DNA, 120 bp, synthetic construct; identical to SEQ ID NO: 26470
  source 1..120: mol_type = other DNA

SEQ ID NO: 49202 - DNA, 120 bp, synthetic construct; identical to SEQ ID NO: 26363
  source 1..120: mol_type = other DNA

SEQ ID NO: 49203 - DNA, 120 bp, synthetic construct; identical to SEQ ID NO: 26364
  source 1..120: mol_type = other DNA

SEQ ID NO: 49204 - DNA, 120 bp, synthetic construct
  source 1..120: mol_type = other DNA
ttataatctccataatcaccacatggagagaccaggtggaggtaattgaatctgggggtggtttcacccatgctgttcttgtgatagtgaatgagttctcacgagatctaatggttttat

SEQ ID NO: 49205 - DNA, 120 bp, synthetic construct
  source 1..120: mol_type = other DNA
tgttttgtaattctcattgtagagatttttcacctccctggttagttgtattttaccctagatattttattctttttgtgaaaattgtgaatgggattgccttcctgatttgactgccag

SEQ ID NO: 49206 - DNA, 120 bp, synthetic construct
  source 1..120: mol_type = other DNA
aggcggagattgcagtgagctgagattgtgccactgcactatagcctggcgacagagtgaggctccatctcaaaaaaaaaaaaaaaaaaaaagacgaagtgcattacataatgatgaagg

SEQ ID NO: 49207 - DNA, 120 bp, synthetic construct; identical to SEQ ID NO: 26365
  source 1..120: mol_type = other DNA

SEQ ID NO: 49208 - DNA, 120 bp, synthetic construct; identical to SEQ ID NO: 26366
  source 1..120: mol_type = other DNA

SEQ ID NO: 49209 - DNA, 120 bp, synthetic construct; identical to SEQ ID NO: 26367
  source 1..120: mol_type = other DNA

SEQ ID NO: 49210 - DNA, 120 bp, synthetic construct; identical to SEQ ID NO: 26368
  source 1..120: mol_type = other DNA

SEQ ID NO: 49211 - DNA, 120 bp, synthetic construct; identical to SEQ ID NO: 26369
  source 1..120: mol_type = other DNA

SEQ ID NO: 49212 - DNA, 120 bp, synthetic construct; identical to SEQ ID NO: 26370
  source 1..120: mol_type = other DNA

SEQ ID NO: 49213 - DNA, 120 bp, synthetic construct; identical to SEQ ID NO: 26371
  source 1..120: mol_type = other DNA

SEQ ID NO: 49214 - DNA, 120 bp, synthetic construct; identical to SEQ ID NO: 26372
  source 1..120: mol_type = other DNA

SEQ ID NO: 49215 - DNA, 120 bp, synthetic construct
  source 1..120: mol_type = other DNA
tttcacattcaaaagaaatacccttctgttattaaaaataaaaaaaaaggagccaggagggtggctcatgactgtaatcccagtgctctgggaagccaaggtggagggatcatttgaggc

SEQ ID NO: 49216 - DNA, 120 bp, synthetic construct
  source 1..120: mol_type = other DNA
tcaagctgatttcttaggtcaaggagagattatggtccttaaatgcctgataaggtcacatacacaatttcaagtgcattatagtaaatccatgtgacagctcctacagctactaacctg

SEQ ID NO: 49217 - DNA, 120 bp, synthetic construct; identical to SEQ ID NO: 26376
  source 1..120: mol_type = other DNA

SEQ ID NO: 49218 - DNA, 120 bp, synthetic construct
  source 1..120: mol_type = other DNA
gataaaaagaactcatagtcttttccatatttttgggtcatgttcactgtaaaaaaaatcacatgatgccatttttacacagcctttttaatctacacatacggcaagctaataattcca

SEQ ID NO: 49219 - DNA, 120 bp, synthetic construct
  source 1..120: mol_type = other DNA
ttttggctgcataaatgtcttcttttgagaagtgtctgttcatgtccttcgcccacttcatgtaccctaaaacttaaagtataataaaaaaaaaaaacatacatacatatatgtatggca

SEQ ID NO: 49220 - DNA, 120 bp, synthetic construct
  source 1..120: mol_type = other DNA
ccatactctttcttttcctagccagctggggacatttttaattgtttctattttcattctttctgtttcagttcttataaaaatacatatataaaattggctaaatgattaaatgttata

SEQ ID NO: 49221 - DNA, 120 bp, synthetic construct; identical to SEQ ID NO: 26380
  source 1..120: mol_type = other DNA

SEQ ID NO: 49222 - DNA, 120 bp, synthetic construct; identical to SEQ ID NO: 26381
  source 1..120: mol_type = other DNA

SEQ ID NO: 49223 - DNA, 120 bp, synthetic construct; identical to SEQ ID NO: 26382
  source 1..120: mol_type = other DNA

SEQ ID NO: 49224 - DNA, 120 bp, synthetic construct; identical to SEQ ID NO: 26383
  source 1..120: mol_type = other DNA

SEQ ID NO: 49225 - DNA, 120 bp, synthetic construct; identical to SEQ ID NO: 26384
  source 1..120: mol_type = other DNA

SEQ ID NO: 49226 - DNA, 120 bp, synthetic construct; identical to SEQ ID NO: 26385
  source 1..120: mol_type = other DNA

SEQ ID NO: 49227 - DNA, 120 bp, synthetic construct; identical to SEQ ID NO: 26386
  source 1..120: mol_type = other DNA

SEQ ID NO: 49228 - DNA, 120 bp, synthetic construct; identical to SEQ ID NO: 26387
  source 1..120: mol_type = other DNA

SEQ ID NO: 49229 - DNA, 120 bp, synthetic construct; identical to SEQ ID NO: 26388
  source 1..120: mol_type = other DNA

SEQ ID NO: 49230 - DNA, 120 bp, synthetic construct; identical to SEQ ID NO: 26389
  source 1..120: mol_type = other DNA

SEQ ID NO: 49231 - DNA, 120 bp, synthetic construct; identical to SEQ ID NO: 26390
  source 1..120: mol_type = other DNA

SEQ ID NO: 49232 - DNA, 120 bp, synthetic construct
  source 1..120: mol_type = other DNA
aaagacaagaacatttaaagggaaatgatctgtattgagaatacagagctacccttttgttacaaatcaggtaactgttctatatactattttgcataaaactgctataaagtttgtatt

SEQ ID NO: 49233 - DNA, 120 bp, synthetic construct
  source 1..120: mol_type = other DNA
tcatatgaagaaagccaaagagacaatttcagagtaaacattgttaatggaaattacgttttgaaagggcctcaattacattggcagtgggccgtcctctgagcaccataagaaaatgta

SEQ ID NO: 49234 - DNA, 120 bp, synthetic construct
  source 1..120: mol_type = other DNA
gccccaatgcctattattttcctctttatgtccatgtgtactcattgtttagcttccacttataagtgagaatatgcagtatttgatttttccagttatttcacccaagataatggcctc

SEQ ID NO: 49235 - DNA, 120 bp, synthetic construct; identical to SEQ ID NO: 26394
  source 1..120: mol_type = other DNA

SEQ ID NO: 49236 - DNA, 120 bp, synthetic construct; identical to SEQ ID NO: 26395
  source 1..120: mol_type = other DNA

SEQ ID NO: 49237 - DNA, 120 bp, synthetic construct; identical to SEQ ID NO: 26396
  source 1..120: mol_type = other DNA

SEQ ID NO: 49238 - DNA, 120 bp, synthetic construct
  source 1..120: mol_type = other DNA
tacctgtaggaatacaattttgcatgaatacaaaatattctcatgagatacacaattaacttattaacttattcattctatttaatgagtaatggaaatgcttattatatatgagacaca

SEQ ID NO: 49239 - DNA, 120 bp, synthetic construct; identical to SEQ ID NO: 26397
  source 1..120: mol_type = other DNA

SEQ ID NO: 49240 - DNA, 120 bp, synthetic construct; identical to SEQ ID NO: 26398
  source 1..120: mol_type = other DNA

SEQ ID NO: 49241 - DNA, 120 bp, synthetic construct
  source 1..120: mol_type = other DNA
ttcaattacctccaccaggtccctcccttgctaggtggggattacggagattataattcaagatgagatttgggtggggacacaaaacctaactatatcacattgagtgaatgcatgcat

SEQ ID NO: 49242 - DNA, 120 bp, synthetic construct; identical to SEQ ID NO: 26399
  source 1..120: mol_type = other DNA

SEQ ID NO: 49243 - DNA, 120 bp, synthetic construct; identical to SEQ ID NO: 26400
  source 1..120: mol_type = other DNA

SEQ ID NO: 49244 - DNA, 120 bp, synthetic construct
  source 1..120: mol_type = other DNA
ctgctggattcggtttgccagtattttattgaggatttttgcatcaatgttcatcaaggatattggtctaaaattctcttttttggttgtgtctctgcccagctttggtattaggatgat

SEQ ID NO: 49245 - DNA, 120 bp, synthetic construct
  source 1..120: mol_type = other DNA
agaggttttgagtgagtttcttaatcctgagctctagtttgattgcagcaaaaactggaagcattccctttgagaaatgacacaagacagggatgccctctctcaccactcctattcaac

SEQ ID NO: 49246 - DNA, 120 bp, synthetic construct
  source 1..120: mol_type = other DNA
atttcaagatggattaaagacttaaatgttatacctaaaaccataaaaaccctagaagaaaacctaggcattaccattcaggacataggcatgggcaaggacttcatgtctaaaacacca

SEQ ID NO: 49247 - DNA, 120 bp, synthetic construct
  source 1..120: mol_type = other DNA
acaccagcatggcacatgtatacatatgtaactaacctgcacattgtacacatgtaccccaaaacttaaagtttaataataataaaataaaataaaaaaaagaaaggtatttcttgaatg

SEQ ID NO: 49248 - DNA, 120 bp, synthetic construct
  source 1..120: mol_type = other DNA
aaccatcattctcagcaaactatcgcaaggacaaaaaaccaaacaccacatgttctcactcataggtgggaattgaacaatgagaacactcggacacttgaagggggaacatcacacact

SEQ ID NO: 49249 - DNA, 120 bp, synthetic construct
  source 1..120: mol_type = other DNA
cataaaaactaatgtgctctgctatgcggctcactttctgctattagatattatgaggcactaagaaaaaactactgcctgcatcatacctttcttcggtttgagataaagagattggcc

SEQ ID NO: 49250 - DNA, 120 bp, synthetic construct
  source 1..120: mol_type = other DNA
catcattgcactccagcctggacaacaagagtggaactccatctcgaaaaaaaaaaaaaaaagagaaaagtaggtgaaaagaagtaattaaatggtaaggaaagaataggtcaggacagg

SEQ ID NO: 49251 - DNA, 120 bp, synthetic construct
  source 1..120: mol_type = other DNA
gagaacttttatcattgtcatccaaagaaaatataatcctaagagaaaaagtccagctagttttttttttcttttttgttacctgctcataggatataaacttatttctatcacacatag

SEQ ID NO: 49252 - DNA, 120 bp, synthetic construct; identical to SEQ ID NO: 26405
  source 1..120: mol_type = other DNA

SEQ ID NO: 49253 - DNA, 120 bp, synthetic construct; identical to SEQ ID NO: 26406
  source 1..120: mol_type = other DNA

SEQ ID NO: 49254 - DNA, 120 bp, synthetic construct; identical to SEQ ID NO: 26407
  source 1..120: mol_type = other DNA

SEQ ID NO: 49255 - DNA, 120 bp, synthetic construct; identical to SEQ ID NO: 26408
  source 1..120: mol_type = other DNA

SEQ ID NO: 49256 - DNA, 120 bp, synthetic construct; identical to SEQ ID NO: 26409
  source 1..120: mol_type = other DNA

SEQ ID NO: 49257 - DNA, 120 bp, synthetic construct; identical to SEQ ID NO: 26410
  source 1..120: mol_type = other DNA

SEQ ID NO: 49258 - DNA, 120 bp, synthetic construct; identical to SEQ ID NO: 26411
  source 1..120: mol_type = other DNA

SEQ ID NO: 49259 - DNA, 120 bp, synthetic construct; identical to SEQ ID NO: 26412
  source 1..120: mol_type = other DNA

SEQ ID NO: 49260 - DNA, 120 bp, synthetic construct; identical to SEQ ID NO: 26413
  source 1..120: mol_type = other DNA

SEQ ID NO: 49261 - DNA, 120 bp, synthetic construct; identical to SEQ ID NO: 26414
  source 1..120: mol_type = other DNA

SEQ ID NO: 49262 - DNA, 120 bp, synthetic construct; identical to SEQ ID NO: 26415
  source 1..120: mol_type = other DNA

SEQ ID NO: 49263 - DNA, 120 bp, synthetic construct; identical to SEQ ID NO: 26416
  source 1..120: mol_type = other DNA

SEQ ID NO: 49264 - DNA, 120 bp, synthetic construct; identical to SEQ ID NO: 26417
  source 1..120: mol_type = other DNA

SEQ ID NO: 49265 - DNA, 120 bp, synthetic construct; identical to SEQ ID NO: 26418
  source 1..120: mol_type = other DNA

SEQ ID NO: 49266 - DNA, 120 bp, synthetic construct; identical to SEQ ID NO: 26419
  source 1..120: mol_type = other DNA

SEQ ID NO: 49267 - DNA, 120 bp, synthetic construct; identical to SEQ ID NO: 26420
  source 1..120: mol_type = other DNA

SEQ ID NO: 49268 - DNA, 120 bp, synthetic construct; identical to SEQ ID NO: 26421
  source 1..120: mol_type = other DNA

SEQ ID NO: 49269 - DNA, 120 bp, synthetic construct; identical to SEQ ID NO: 26422
  source 1..120: mol_type = other DNA

SEQ ID NO: 49270 - DNA, 120 bp, synthetic construct; identical to SEQ ID NO: 26423
  source 1..120: mol_type = other DNA

SEQ ID NO: 49271 - DNA, 120 bp, synthetic construct
  source 1..120: mol_type = other DNA
ttggggaaaggattccctatttaataaatggtgctgggaaaactggctagccatatataaaaagctgaaactggatcccttccttacaccttacacaaaaaccaattcaagatggattaa

SEQ ID NO: 49272 - DNA, 120 bp, synthetic construct
  source 1..120: mol_type = other DNA
acaccacatattctcactcataggtgggaattgaacaatgagaacatatggacacaggaaggggaacatcacactctggggactgttgtggggtggggggaggggggagggatagcattg

SEQ ID NO: 49273 - DNA, 120 bp, synthetic construct; identical to SEQ ID NO: 26424
  source 1..120: mol_type = other DNA

SEQ ID NO: 49274 - DNA, 120 bp, synthetic construct; identical to SEQ ID NO: 26425
  source 1..120: mol_type = other DNA

SEQ ID NO: 49275 - DNA, 120 bp, synthetic construct; identical to SEQ ID NO: 26426
  source 1..120: mol_type = other DNA

SEQ ID NO: 49276 - DNA, 120 bp, synthetic construct
  source 1..120: mol_type = other DNA
caatggatgaatgtttgatgaccctatttaaaattgcaaatatccagcctcccaacacacatacacatacacatacacatacacacacacatacacacacacacacacacagacattcca

SEQ ID NO: 49277 - DNA, 120 bp, synthetic construct; identical to SEQ ID NO: 26427
  source 1..120: mol_type = other DNA

SEQ ID NO: 49278 - DNA, 120 bp, synthetic construct; identical to SEQ ID NO: 26428
  source 1..120: mol_type = other DNA

SEQ ID NO: 49279 - DNA, 120 bp, synthetic construct; identical to SEQ ID NO: 26429
  source 1..120: mol_type = other DNA

SEQ ID NO: 49280 - DNA, 120 bp, synthetic construct; identical to SEQ ID NO: 26430
  source 1..120: mol_type = other DNA

SEQ ID NO: 49281 - DNA, 120 bp, synthetic construct; identical to SEQ ID NO: 26431
  source 1..120: mol_type = other DNA

SEQ ID NO: 49282 - DNA, 120 bp, synthetic construct; identical to SEQ ID NO: 26432
  source 1..120: mol_type = other DNA

SEQ ID NO: 49283 - DNA, 120 bp, synthetic construct; identical to SEQ ID NO: 26433
  source 1..120: mol_type = other DNA

SEQ ID NO: 49284 - DNA, 120 bp, synthetic construct; identical to SEQ ID NO: 26434
  source 1..120: mol_type = other DNA

SEQ ID NO: 49285 - DNA, 120 bp, synthetic construct; identical to SEQ ID NO: 26435
  source 1..120: mol_type = other DNA

SEQ ID NO: 49286 - DNA, 120 bp, synthetic construct; identical to SEQ ID NO: 26436
  source 1..120: mol_type = other DNA

SEQ ID NO: 49287 - DNA, 120 bp, synthetic construct; identical to SEQ ID NO: 26437
  source 1..120: mol_type = other DNA

SEQ ID NO: 49288 - DNA, 120 bp, synthetic construct; identical to SEQ ID NO: 26438
  source 1..120: mol_type = other DNA

SEQ ID NO: 49289 - DNA, 120 bp, synthetic construct; identical to SEQ ID NO: 26439
  source 1..120: mol_type = other DNA

SEQ ID NO: 49290 - DNA, 120 bp, synthetic construct; identical to SEQ ID NO: 26440
  source 1..120: mol_type = other DNA

SEQ ID NO: 49291 - DNA, 120 bp, synthetic construct; identical to SEQ ID NO: 26441
  source 1..120: mol_type = other DNA

SEQ ID NO: 49292 - DNA, 120 bp, synthetic construct; identical to SEQ ID NO: 26442
  source 1..120: mol_type = other DNA

SEQ ID NO: 49293 - DNA, 120 bp, synthetic construct
  source 1..120: mol_type = other DNA
tttttgacagagtcttgctctgtcgccaggcttgagtgcagtggcatgatctcggctcactgcaacttccgaatcccgggtttaggcgattctcttgcctcagtctcctgcgtggctggg

SEQ ID NO: 49294 - DNA, 120 bp, synthetic construct
  source 1..120: mol_type = other DNA
atacctcaacttaaagaatggaaagaatagccgggtgcagcggctcatgcctgtaatcccagcactttgggaggccaaagggggaggatcatgaggtcaggagatcgagtccatcctggc

SEQ ID NO: 49295 - DNA, 120 bp, synthetic construct
  source 1..120: mol_type = other DNA
atcaatttgaaagttataaaaggctttacatggtgctcttcacttgcaaattggtgggacaacattcattatgataaaaataacagtaaaataagtatgattttattcacaacaatatta

SEQ ID NO: 49296 - DNA, 120 bp, synthetic construct; identical to SEQ ID NO: 26446
  source 1..120: mol_type = other DNA

SEQ ID NO: 49297 - DNA, 120 bp, synthetic construct; identical to SEQ ID NO: 26447
  source 1..120: mol_type = other DNA

SEQ ID NO: 49298 - DNA, 120 bp, synthetic construct; identical to SEQ ID NO: 26346
  source 1..120: mol_type = other DNA

SEQ ID NO: 49299 - DNA, 120 bp, synthetic construct
  source 1..120: mol_type = other DNA
agctaatttttgtatttttagtagagacaggatttcaccatgttggccaggatggtctccatctcttgacctcatgttccaccttcctcagcctcccaaagtgctgggattacaggcttg

SEQ ID NO: 49300 - DNA, 120 bp, synthetic construct; identical to SEQ ID NO: 26448
  source 1..120: mol_type = other DNA

SEQ ID NO: 49301 - DNA, 120 bp, synthetic construct; identical to SEQ ID NO: 26449
  source 1..120: mol_type = other DNA

SEQ ID NO: 49302 - DNA, 120 bp, synthetic construct; identical to SEQ ID NO: 26450
  source 1..120: mol_type = other DNA

SEQ ID NO: 49303 - DNA, 120 bp, synthetic construct; identical to SEQ ID NO: 26451
  source 1..120: mol_type = other DNA

SEQ ID NO: 49304 - DNA, 120 bp, synthetic construct; identical to SEQ ID NO: 26452
  source 1..120: mol_type = other DNA

SEQ ID NO: 49305 - DNA, 120 bp, synthetic construct
  source 1..120: mol_type = other DNA
ctggtagttgataactttgtcaaaatttataattagaggttttaaataccatagaaaaatatggatgaattagtgagtgtgaggaaataaaaatactgagtctctccagagacagacatt

SEQ ID NO: 49306 - DNA, 120 bp, synthetic construct; identical to SEQ ID NO: 26455
  source 1..120: mol_type = other DNA

SEQ ID NO: 49307 - DNA, 120 bp, synthetic construct; identical to SEQ ID NO: 26456
  source 1..120: mol_type = other DNA

SEQ ID NO: 49308 - DNA, 120 bp, synthetic construct; identical to SEQ ID NO: 26457
  source 1..120: mol_type = other DNA

SEQ ID NO: 49309 - DNA, 120 bp, synthetic construct; identical to SEQ ID NO: 26458
  source 1..120: mol_type = other DNA

SEQ ID NO: 49310 - DNA, 120 bp, synthetic construct; identical to SEQ ID NO: 26459
  source 1..120: mol_type = other DNA

SEQ ID NO: 49311 - DNA, 120 bp, synthetic construct; identical to SEQ ID NO: 26460
  source 1..120: mol_type = other DNA

SEQ ID NO: 49312 - DNA, 120 bp, synthetic construct; identical to SEQ ID NO: 26461
  source 1..120: mol_type = other DNA

SEQ ID NO: 49313 - DNA, 120 bp, synthetic construct; identical to SEQ ID NO: 26462
  source 1..120: mol_type = other DNA

SEQ ID NO: 49314 - DNA, 120 bp, synthetic construct
  source 1..120: mol_type = other DNA
ctcatagtgggatctaattaaaataaagagcttctgcacagcaaaagaaactaccatcagagtgaacaggcaacctacaaaatgggagaaaattttcgcaacctactcatctgacaaagg

SEQ ID NO: 49315 - DNA, 120 bp, synthetic construct
  source 1..120: mol_type = other DNA
acctaaaaccataaaaaccctagaagaaaacctaagcaataccattcaggacacaggcatgggcaaggacttaatgtctaaaacaccaaaagcaaaggcaacaaaagccaaaagtgacaa

SEQ ID NO: 49316 - DNA, 120 bp, synthetic construct
  source 1..120: mol_type = other DNA
ccaacatggcacatgtatatgtatgtaacaaacctgcgcattgtgcacatgtaccctagaacttataataataaaaaaacaaatttattatactacagaaataaatggagctctgtgtat

SEQ ID NO: 49317 - DNA, 120 bp, synthetic construct
  source 1..120: mol_type = other DNA
cctatgatttcatctttgaccaatcagtactcctggctcactggtttccccccacccatcatggtgtctttaaaaactctgctccacgtatgtttattgcagcactactcacaatagcaa

SEQ ID NO: 49318 - DNA, 120 bp, synthetic construct; identical to SEQ ID NO: 26464
  source 1..120: mol_type = other DNA

SEQ ID NO: 49319 - DNA, 120 bp, synthetic construct
  source 1..120: mol_type = other DNA
ttaaaaccagcctgggtaacatagggagaacccatctccacaaaaaatttaaaaattagctaggcattctggtgcatacctgtagtcctagctacttgggaggctaaggtaggaggattg

SEQ ID NO: 49320 - DNA, 120 bp, synthetic construct
  source 1..120: mol_type = other DNA
ggttttctatgctgttcttgtgatagtgagggggttctcaggagatctgatggttttataagtggcagtttcccctgcatgctctctctcttacctgccacagtgtaagacttgccttgc

SEQ ID NO: 49321 - DNA, 120 bp, synthetic construct; identical to SEQ ID NO: 26348
  source 1..120: mol_type = other DNA

SEQ ID NO: 49322 - DNA, 120 bp, synthetic construct; identical to SEQ ID NO: 26349
  source 1..120: mol_type = other DNA

SEQ ID NO: 49323 - DNA, 120 bp, synthetic construct; identical to SEQ ID NO: 26350
  source 1..120: mol_type = other DNA

SEQ ID NO: 49324 - DNA, 120 bp, synthetic construct; identical to SEQ ID NO: 26351
  source 1..120: mol_type = other DNA

SEQ ID NO: 49325 - DNA, 120 bp, synthetic construct; identical to SEQ ID NO: 26352
  source 1..120: mol_type = other DNA

SEQ ID NO: 49326 - DNA, 120 bp, synthetic construct; identical to SEQ ID NO: 5505
  source 1..120: mol_type = other DNA

SEQ ID NO: 49327 - DNA, 120 bp, synthetic construct
  source 1..120: mol_type = other DNA
atataccccattatgagattgctggaccatatggtagttctatttttaattttttgaggaacttccatactcttgtccataatggctttactaatttacattcccaccaacagtgcatga

SEQ ID NO: 49328 - DNA, 120 bp, synthetic construct
  source 1..120: mol_type = other DNA
gatgaattcacagccgaattctaccagaggtacaaggaggaaccggtaccattccttctgaaactattccaatcaatagaaaaagagggaatcctccctaactcattttatgaggccagc

SEQ ID NO: 49329 - DNA, 120 bp, synthetic construct
  source 1..120: mol_type = other DNA
gacagagagccaaatcatgactgaactcccattcacaattgcttcaaagagaataaaatacctaggaatccaacttacaagggatgtgaaggacctcttcaaggagaactacaaaccact

SEQ ID NO: 49330 - DNA, 120 bp, synthetic construct
  source 1..120: mol_type = other DNA
aattttcgcaacctactcatctgacaaagggctaatatccagaatctacaatgaattcaaagaaatttacaagaaaaaaacaaacaaccccatcaaaaagtgggcaaaggatatgaacag

SEQ ID NO: 49331 - DNA, 120 bp, synthetic construct; identical to SEQ ID NO: 26353
  source 1..120: mol_type = other DNA

SEQ ID NO: 49332 - DNA, 120 bp, synthetic construct; identical to SEQ ID NO: 26354
  source 1..120: mol_type = other DNA

SEQ ID NO: 49333 - DNA, 120 bp, synthetic construct; identical to SEQ ID NO: 26355
  source 1..120: mol_type = other DNA

SEQ ID NO: 49334 - DNA, 120 bp, synthetic construct; identical to SEQ ID NO: 26356
  source 1..120: mol_type = other DNA

SEQ ID NO: 49335 - DNA, 120 bp, synthetic construct; identical to SEQ ID NO: 26357
  source 1..120: mol_type = other DNA

SEQ ID NO: 49336 - DNA, 120 bp, synthetic construct; identical to SEQ ID NO: 26358
  source 1..120: mol_type = other DNA

SEQ ID NO: 49337 - DNA, 120 bp, synthetic construct
  source 1..120: mol_type = other DNA
gaggctgaggcaggagaatggcgtgaacccaggaggcggagcttgcagtgagccgagatcacgccactgcactccagcctgtgcgacagaacgagactctgtctcaaaaaaaaaaaaaaa

SEQ ID NO: 49338 - DNA, 120 bp, synthetic construct
  source 1..120: mol_type = other DNA
ataccatttttgatttttgactggattttttactgtaccttttttttatgtttagatacacaaatatttaccattgtgttgcaaatgcctacagtattcagcacagtaacatgctgtata

SEQ ID NO: 49339 - DNA, 120 bp, synthetic construct
  source 1..120: mol_type = other DNA
ttagctaggatggtctcgatctcctgaccttgtgatctgccagtctcagcctcccaaagtgctgggattacaggcatgagccagggtgcctggcccagctacataaattttaaaaagtaa

SEQ ID NO: 49340 - DNA, 120 bp, synthetic construct; identical to SEQ ID NO: 26360
  source 1..120: mol_type = other DNA

SEQ ID NO: 49341 - DNA, 120 bp, synthetic construct; identical to SEQ ID NO: 26361
  source 1..120: mol_type = other DNA

SEQ ID NO: 49342 - DNA, 120 bp, synthetic construct; identical to SEQ ID NO: 26362
  source 1..120: mol_type = other DNA

SEQ ID NO: 49343 - DNA, 120 bp, synthetic construct; identical to SEQ ID NO: 17013
  source 1..120: mol_type = other DNA

SEQ ID NO: 49344 - DNA, 120 bp, synthetic construct; identical to SEQ ID NO: 17014
  source 1..120: mol_type = other DNA

SEQ ID NO: 49345 - DNA, 120 bp, synthetic construct
  source 1..120: mol_type = other DNA
gcctaggaatccaactgacaagggatgtgaaggacctcttcaaggagaactacaaaccactgctcaaggaaataaaagaggatacaaacaaatggaagaacattccatgctcatgggtag

SEQ ID NO: 49346 - DNA, 120 bp, synthetic construct
  source 1..120: mol_type = other DNA
ccacaatgagataccatctcacaccagttagaatggcgatcattcaaatgtcaggaaacaacaggtgctggagaggatgtggagaaataggaacgcttttacactgttggtgggactgta

SEQ ID NO: 49347 - DNA, 120 bp, synthetic construct; identical to SEQ ID NO: 17015
  source 1..120: mol_type = other DNA

SEQ ID NO: 49348 - DNA, 120 bp, synthetic construct; identical to SEQ ID NO: 17016
  source 1..120: mol_type = other DNA

SEQ ID NO: 49349 - DNA, 120 bp, synthetic construct
  source 1..120: mol_type = other DNA
aaattgtcttatcacttagtttaaaaatgttttgcttagtaaaaaatttatgagggcaggtgcggtggctcatgcttgtaatcccagcactctggaaggccgaggcaggcagatcatggg

SEQ ID NO: 49350 - DNA, 120 bp, synthetic construct; identical to SEQ ID NO: 17018
  source 1..120: mol_type = other DNA

SEQ ID NO: 49351 - DNA, 120 bp, synthetic construct; identical to SEQ ID NO: 17019
  source 1..120: mol_type = other DNA

SEQ ID NO: 49352 - DNA, 120 bp, synthetic construct; identical to SEQ ID NO: 17020
  source 1..120: mol_type = other DNA

SEQ ID NO: 49353 - DNA, 120 bp, synthetic construct; identical to SEQ ID NO: 17023
  source 1..120: mol_type = other DNA

SEQ ID NO: 49354 - DNA, 120 bp, synthetic construct; identical to SEQ ID NO: 17024
  source 1..120: mol_type = other DNA

SEQ ID NO: 49355 - DNA, 120 bp, synthetic construct; identical to SEQ ID NO: 17025
  source 1..120: mol_type = other DNA

SEQ ID NO: 49356 - DNA, 120 bp, synthetic construct; identical to SEQ ID NO: 17021
  source 1..120: mol_type = other DNA

SEQ ID NO: 49357 - DNA, 120 bp, synthetic construct
  source 1..120: mol_type = other DNA
gtaacctctgcagacttaagtgtccctgtctgacagctttgaagagagcagtggttctcccagcacgcagctggagatctgagaacgggcagactgcctcctcaagtgggtccctgactc

SEQ ID NO: 49358 - DNA, 120 bp, synthetic construct
  source 1..120: mol_type = other DNA
ttgaatattggcccccactctcttctggcttgtagggtttctgccgagagatccgctgttagtctgatgggctttcctttgagggtaacccgacctttctctctggctgcccttaacatt

SEQ ID NO: 49359 - DNA, 120 bp, synthetic construct; identical to SEQ ID NO: 48995
  source 1..120: mol_type = other DNA

SEQ ID NO: 49360 - DNA, 120 bp, synthetic construct
  source 1..120: mol_type = other DNA
ggctctgaaattgtggcaataatcaatagtttaccaaccaaaaagagtccaggaccagatggattcacagccgaattctaccagaggtacaaggaggaactggtaccattccttctgaaa

SEQ ID NO: 49361 - DNA, 120 bp, synthetic construct
  source 1..120: mol_type = other DNA
actgctcaaggaaataaaagaggagacaaacaaatggaagaacattccatgctcatgggtaggaagaatcaatatcgtgaaaatggccatactgcccaaggtaatttacagattcaatgc

SEQ ID NO: 49362 - DNA, 120 bp, synthetic construct
  source 1..120: mol_type = other DNA
agtcaggaaacaacaggtgccggagaggatgcggagaaataggaacacttttacactgttggtgggactgtaaactacttcaaccattgtggaagtcagtgtggcgattcctcagggatc

SEQ ID NO: 49363 - DNA, 120 bp, synthetic construct; identical to SEQ ID NO: 17022
  source 1..120: mol_type = other DNA

SEQ ID NO: 49364 - DNA, 120 bp, synthetic construct; identical to SEQ ID NO: 17002
  source 1..120: mol_type = other DNA

SEQ ID NO: 49365 - DNA, 120 bp, synthetic construct; identical to SEQ ID NO: 17003
  source 1..120: mol_type = other DNA

SEQ ID NO: 49366 - DNA, 120 bp, synthetic construct; identical to SEQ ID NO: 17004
  source 1..120: mol_type = other DNA

SEQ ID NO: 49367 - DNA, 120 bp, synthetic construct
  source 1..120: mol_type = other DNA
cagagcaggtagcaagtaatctgaatgagttagggtgagcaagtgatcagaatgagttagggtggagcaggtgatcagaatgagtcagggtggagtaggtaatggaaaacggttgcttta

SEQ ID NO: 49368 - DNA, 120 bp, synthetic construct; identical to SEQ ID NO: 17005
  source 1..120: mol_type = other DNA

SEQ ID NO: 49369 - DNA, 120 bp, synthetic construct; identical to SEQ ID NO: 17006
  source 1..120: mol_type = other DNA

SEQ ID NO: 49370 - DNA, 120 bp, synthetic construct; identical to SEQ ID NO: 17007
  source 1..120: mol_type = other DNA

SEQ ID NO: 49371 - DNA, 120 bp, synthetic construct; identical to SEQ ID NO: 17008
  source 1..120: mol_type = other DNA

SEQ ID NO: 49372 - DNA, 120 bp, synthetic construct; identical to SEQ ID NO: 17009
  source 1..120: mol_type = other DNA

SEQ ID NO: 49373 - DNA, 120 bp, synthetic construct; identical to SEQ ID NO: 17010
  source 1..120: mol_type = other DNA

SEQ ID NO: 49374 - DNA, 120 bp, synthetic construct; identical to SEQ ID NO: 17011
  source 1..120: mol_type = other DNA

SEQ ID NO: 49375 - DNA, 120 bp, synthetic construct; identical to SEQ ID NO: 17012
  source 1..120: mol_type = other DNA

SEQ ID NO: 49376 - DNA, 120 bp, synthetic construct
  source 1..120: mol_type = other DNA
tgacagagtgagactctgtctcaaaaaaaaaaacagaagaagaaagaagaagaggaggaggaagaggaggagaagaagaaagaagaagaagaaaaaaaagggcagtgggagcaagcccta

SEQ ID NO: 49377 - DNA, 120 bp, synthetic construct; identical to SEQ ID NO: 17113
  source 1..120: mol_type = other DNA

SEQ ID NO: 49378 - DNA, 120 bp, synthetic construct; identical to SEQ ID NO: 17114
  source 1..120: mol_type = other DNA

SEQ ID NO: 49379 - DNA, 120 bp, synthetic construct; identical to SEQ ID NO: 17115
  source 1..120: mol_type = other DNA

SEQ ID NO: 49380 - DNA, 120 bp, synthetic construct; identical to SEQ ID NO: 17116
  source 1..120: mol_type = other DNA

SEQ ID NO: 49381 - DNA, 120 bp, synthetic construct; identical to SEQ ID NO: 17117
  source 1..120: mol_type = other DNA

SEQ ID NO: 49382 - DNA, 120 bp, synthetic construct; identical to SEQ ID NO: 17118
  source 1..120: mol_type = other DNA

SEQ ID NO: 49383 - DNA, 120 bp, synthetic construct; identical to SEQ ID NO: 17119
  source 1..120: mol_type = other DNA

SEQ ID NO: 49384 - DNA, 120 bp, synthetic construct
  source 1..120: mol_type = other DNA
aagatatcacagcagcaactttgtcccttgctaattatttaagcatcacccattgtccctgcagactaccttcttggttctaaagtgggctcctcttgtgttctaaaaattcagtctgag

SEQ ID NO: 49385 - DNA, 120 bp, synthetic construct; identical to SEQ ID NO: 26342
  source 1..120: mol_type = other DNA

SEQ ID NO: 49386 - DNA, 120 bp, synthetic construct
  source 1..120: mol_type = other DNA
aggagatgatccaaatcccagtgcgggctccattaccccatctgacttcacttataaaacacaaactcgatgtggagaaataggaacacttttacactgttggtgggactgtaaactagt

SEQ ID NO: 49387 - DNA, 120 bp, synthetic construct; identical to SEQ ID NO: 26343
  source 1..120: mol_type = other DNA

SEQ ID NO: 49388 - DNA, 120 bp, synthetic construct
  source 1..120: mol_type = other DNA
agcatggtactggtaccaaaacagagatatagatcaatggaacagaacagagccctcagaaataacgccacatatctacaactatcagatctttgacaaacctgagaaaaacaagcaaca

SEQ ID NO: 49389 - DNA, 120 bp, synthetic construct
  source 1..120: mol_type = other DNA
actataaatcatgctgctataaagacacatgcacatgtatgtttattgcggcactattcccaatagcaaagacttggaaccaacccaaatgtccaacaatgatagactggattaagaaaa

SEQ ID NO: 49390 - DNA, 120 bp, synthetic construct; identical to SEQ ID NO: 18931
  source 1..120: mol_type = other DNA

SEQ ID NO: 49391 - DNA, 120 bp, synthetic construct; identical to SEQ ID NO: 18932
  source 1..120: mol_type = other DNA

SEQ ID NO: 49392 - DNA, 120 bp, synthetic construct; identical to SEQ ID NO: 18933
  source 1..120: mol_type = other DNA

SEQ ID NO: 49393 - DNA, 120 bp, synthetic construct; identical to SEQ ID NO: 19091
  source 1..120: mol_type = other DNA

SEQ ID NO: 49394 - DNA, 120 bp, synthetic construct; identical to SEQ ID NO: 19092
  source 1..120: mol_type = other DNA

SEQ ID NO: 49395 - DNA, 120 bp, synthetic construct; identical to SEQ ID NO: 19093
  source 1..120: mol_type = other DNA

SEQ ID NO: 49396 - DNA, 120 bp, synthetic construct
  source 1..120: mol_type = other DNA
actctttatccaatttgccagtctgtgtcttttaattggagcatttagtccatttacatttaaagttaatattgttatgtgtgaatttgatcctgccattacgatgttagctggttattt

SEQ ID NO: 49397 - DNA, 120 bp, synthetic construct
  source 1..120: mol_type = other DNA
ggcttctgcattcttcacgtagttcacgagccttggttttcagcttcatcagctcctttaagcacttctctgtattggttattctagttatacattcttctaaatttttttcaaagtttt

SEQ ID NO: 49398 - DNA, 120 bp, synthetic construct
  source 1..120: mol_type = other DNA
tgcagtttgatctcagactgttgtgctagcaatcagcgagactccgtgggcctaggaccctcggagccaggtgcgggatataatctcgtggtgcgccattttttaagcccgtcggaaaag

SEQ ID NO: 49399 - DNA, 120 bp, synthetic construct; identical to SEQ ID NO: 19094
  source 1..120: mol_type = other DNA

SEQ ID NO: 49400 - DNA, 120 bp, synthetic construct
  source 1..120: mol_type = other DNA
tgcactccagcctgggcgacagagccagactccatctcaaaagaaccaaaaaacaaaaaacaacaaccaaaaaaaaacaaatccagcagtctgtataaacatctagacttctggcattgc

SEQ ID NO: 49401 - DNA, 120 bp, synthetic construct; identical to SEQ ID NO: 10830
  source 1..120: mol_type = other DNA

SEQ ID NO: 49402 - DNA, 120 bp, synthetic construct; identical to SEQ ID NO: 3117
  source 1..120: mol_type = other DNA

SEQ ID NO: 49403 - DNA, 120 bp, synthetic construct; identical to SEQ ID NO: 10832
  source 1..120: mol_type = other DNA

SEQ ID NO: 49404 - DNA, 120 bp, synthetic construct; identical to SEQ ID NO: 10833
  source 1..120: mol_type = other DNA

SEQ ID NO: 49405 - DNA, 120 bp, synthetic construct; identical to SEQ ID NO: 22600
  source 1..120: mol_type = other DNA

SEQ ID NO: 49406 - DNA, 120 bp, synthetic construct; identical to SEQ ID NO: 22601
  source 1..120: mol_type = other DNA

SEQ ID NO: 49407 - DNA, 120 bp, synthetic construct; identical to SEQ ID NO: 16543
  source 1..120: mol_type = other DNA

SEQ ID NO: 49408 - DNA, 120 bp, synthetic construct; identical to SEQ ID NO: 22619
  source 1..120: mol_type = other DNA

SEQ ID NO: 49409 - DNA, 120 bp, synthetic construct
  source 1..120: mol_type = other DNA
gtactttgtatccttcaatccaactaggttgacacccagtattaaccatcacaggtggggatattgggaatcacaccaggaggaaccatgagtgtagagacagggtctccccacagagca

SEQ ID NO: 49410 - DNA, 120 bp, synthetic construct; identical to SEQ ID NO: 22620
  source 1..120: mol_type = other DNA

SEQ ID NO: 49411 - DNA, 120 bp, synthetic construct; identical to SEQ ID NO: 22621
  source 1..120: mol_type = other DNA

SEQ ID NO: 49412 - DNA, 120 bp, synthetic construct; identical to SEQ ID NO: 22622
  source 1..120: mol_type = other DNA

SEQ ID NO: 49413 - DNA, 120 bp, synthetic construct; identical to SEQ ID NO: 22623
  source 1..120: mol_type = other DNA

SEQ ID NO: 49414 - DNA, 120 bp, synthetic construct; identical to SEQ ID NO: 22624
  source 1..120: mol_type = other DNA

SEQ ID NO: 49415 - DNA, 120 bp, synthetic construct; identical to SEQ ID NO: 22625
  source 1..120: mol_type = other DNA

SEQ ID NO: 49416 - DNA, 120 bp, synthetic construct; identical to SEQ ID NO: 22626
  source 1..120: mol_type = other DNA

SEQ ID NO: 49417 - DNA, 120 bp, synthetic construct; identical to SEQ ID NO: 22627
  source 1..120: mol_type = other DNA

SEQ ID NO: 49418 - DNA, 120 bp, synthetic construct
  source 1..120: mol_type = other DNA
agatagttaaagcaggcccagctccttttcttaaaggatttactgattagctggaaaacaggtaactttaaaaaagaagaaaaaacaggctgggtgtggtggctcacgcctgtaatccca

SEQ ID NO: 49419 - DNA, 120 bp, synthetic construct; identical to SEQ ID NO: 22628
  source 1..120: mol_type = other DNA

SEQ ID NO: 49420 - DNA, 120 bp, synthetic construct; identical to SEQ ID NO: 22629
  source 1..120: mol_type = other DNA

SEQ ID NO: 49421 - DNA, 120 bp, synthetic construct; identical to SEQ ID NO: 22630
  source 1..120: mol_type = other DNA

SEQ ID NO: 49422 - DNA, 120 bp, synthetic construct; identical to SEQ ID NO: 22631
  source 1..120: mol_type = other DNA

SEQ ID NO: 49423 - DNA, 120 bp, synthetic construct; identical to SEQ ID NO: 22632
  source 1..120: mol_type = other DNA

SEQ ID NO: 49424 - DNA, 120 bp, synthetic construct
  source 1..120: mol_type = other DNA
aaagggtaacttcatttccctcctctgaacaaaccacttttaatctttggcatggtgtgtgtgcatgtgtgtgtgtgtgtgtgtgtgtgtatgtctatctgtacttgtacctgcacacac

SEQ ID NO: 49425 - DNA, 120 bp, synthetic construct
  source 1..120: mol_type = other DNA
gtgatgtaggtgcatttgcacgcgtgtgctgtggtgtgtgatgtaggtgcatttacacgcgtgtgctgtggtgtgtgatgtaggtgcatttgcacgtgtgtgctgtggtgtgtgtgatgt

SEQ ID NO: 49426 - DNA, 120 bp, synthetic construct; identical to SEQ ID NO: 22633
  source 1..120: mol_type = other DNA

SEQ ID NO: 49427 - DNA, 120 bp, synthetic construct; identical to SEQ ID NO: 22634
  source 1..120: mol_type = other DNA

SEQ ID NO: 49428 - DNA, 120 bp, synthetic construct; identical to SEQ ID NO: 22635
  source 1..120: mol_type = other DNA

SEQ ID NO: 49429 - DNA, 120 bp, synthetic construct; identical to SEQ ID NO: 22636
  source 1..120: mol_type = other DNA

SEQ ID NO: 49430 - DNA, 120 bp, synthetic construct; identical to SEQ ID NO: 22637
  source 1..120: mol_type = other DNA

SEQ ID NO: 49431 - DNA, 120 bp, synthetic construct
  source 1..120: mol_type = other DNA
tcccagacggggtggctgccgggctgaggggctcctcacttctcagacagggcggccgggcagagacgctcctcacctcccagacggggtcgcagccgggcagaggcgctcctcacatcc

SEQ ID NO: 49432 - DNA, 120 bp, synthetic construct
  source 1..120: mol_type = other DNA
agagggagaccgtggaaagagggagagggagaccgtggggagagggagagggagaaaaatcaagactttttaagaaactttaattgttgattagttgtgtatttacattgtatgagaagc

SEQ ID NO: 49433 - DNA, 120 bp, synthetic construct; identical to SEQ ID NO: 22638
  source 1..120: mol_type = other DNA

SEQ ID NO: 49434 - DNA, 120 bp, synthetic construct; identical to SEQ ID NO: 22639
  source 1..120: mol_type = other DNA

SEQ ID NO: 49435 - DNA, 120 bp, synthetic construct; identical to SEQ ID NO: 22640
  source 1..120: mol_type = other DNA

SEQ ID NO: 49436 - DNA, 120 bp, synthetic construct; identical to SEQ ID NO: 22641
  source 1..120: mol_type = other DNA

SEQ ID NO: 49437 - DNA, 120 bp, synthetic construct; identical to SEQ ID NO: 22642
  source 1..120: mol_type = other DNA

SEQ ID NO: 49438 - DNA, 120 bp, synthetic construct; identical to SEQ ID NO: 22643
  source 1..120: mol_type = other DNA

SEQ ID NO: 49439 - DNA, 120 bp, synthetic construct; identical to SEQ ID NO: 22644
  source 1..120: mol_type = other DNA

SEQ ID NO: 49440 - DNA, 120 bp, synthetic construct; identical to SEQ ID NO: 22645
  source 1..120: mol_type = other DNA

SEQ ID NO: 49441 - DNA, 120 bp, synthetic construct; identical to SEQ ID NO: 22646
  source 1..120: mol_type = other DNA

SEQ ID NO: 49442 - DNA, 120 bp, synthetic construct; identical to SEQ ID NO: 22647
  source 1..120: mol_type = other DNA

SEQ ID NO: 49443 - DNA, 120 bp, synthetic construct; identical to SEQ ID NO: 22610
  source 1..120: mol_type = other DNA

SEQ ID NO: 49444 - DNA, 120 bp, synthetic construct; identical to SEQ ID NO: 22611
  source 1..120: mol_type = other DNA

SEQ ID NO: 49445 - DNA, 120 bp, synthetic construct; identical to SEQ ID NO: 22648
  source 1..120: mol_type = other DNA

SEQ ID NO: 49446 - DNA, 120 bp, synthetic construct; identical to SEQ ID NO: 22649
  source 1..120: mol_type = other DNA

SEQ ID NO: 49447 - DNA, 120 bp, synthetic construct; identical to SEQ ID NO: 22650
  source 1..120: mol_type = other DNA

SEQ ID NO: 49448 - DNA, 120 bp, synthetic construct; identical to SEQ ID NO: 22651
  source 1..120: mol_type = other DNA

SEQ ID NO: 49449 - DNA, 120 bp, synthetic construct; identical to SEQ ID NO: 22652
  source 1..120: mol_type = other DNA

SEQ ID NO: 49450 - DNA, 120 bp, synthetic construct; identical to SEQ ID NO: 22653
  source 1..120: mol_type = other DNA

SEQ ID NO: 49451 - DNA, 120 bp, synthetic construct; identical to SEQ ID NO: 22602
  source 1..120: mol_type = other DNA

SEQ ID NO: 49452 - DNA, 120 bp, synthetic construct; identical to SEQ ID NO: 22603
  source 1..120: mol_type = other DNA

SEQ ID NO: 49453 - DNA, 120 bp, synthetic construct; identical to SEQ ID NO: 22654
  source 1..120: mol_type = other DNA

SEQ ID NO: 49454 - DNA, 120 bp, synthetic construct
  source 1..120: mol_type = other DNA
gatggatggatacatgatggatgcatagatggataatggatgggtaagtagatggtggatgatagaagggtggatggatggatggatagatggatgatggatgggtgagtgaatggatgt

SEQ ID NO: 49455 - DNA, 120 bp, synthetic construct; identical to SEQ ID NO: 22655
  source 1..120: mol_type = other DNA

SEQ ID NO: 49456 - DNA, 120 bp, synthetic construct; identical to SEQ ID NO: 22656
  source 1..120: mol_type = other DNA

SEQ ID NO: 49457 - DNA, 120 bp, synthetic construct; identical to SEQ ID NO: 22657
  source 1..120: mol_type = other DNA

SEQ ID NO: 49458 - DNA, 120 bp, synthetic construct; identical to SEQ ID NO: 22658
  source 1..120: mol_type = other DNA

SEQ ID NO: 49459 - DNA, 120 bp, synthetic construct
  source 1..120: mol_type = other DNA
aataaataaagcccactgttagataggtcttaggagaaattaaaaatgaaaacaacaaaccagtccatactgaatgacactgagtaccctctcccagggtcacaggaggagcaggtgctg

SEQ ID NO: 49460 - DNA, 120 bp, synthetic construct; identical to SEQ ID NO: 22604
  source 1..120: mol_type = other DNA

SEQ ID NO: 49461 - DNA, 120 bp, synthetic construct; identical to SEQ ID NO: 22605
  source 1..120: mol_type = other DNA

SEQ ID NO: 49462 - DNA, 120 bp, synthetic construct; identical to SEQ ID NO: 22606
  source 1..120: mol_type = other DNA

SEQ ID NO: 49463 - DNA, 120 bp, synthetic construct; identical to SEQ ID NO: 22607
  source 1..120: mol_type = other DNA

SEQ ID NO: 49464 - DNA, 120 bp, synthetic construct; identical to SEQ ID NO: 22612
  source 1..120: mol_type = other DNA

SEQ ID NO: 49465 - DNA, 120 bp, synthetic construct; identical to SEQ ID NO: 22613
  source 1..120: mol_type = other DNA

SEQ ID NO: 49466 - DNA, 120 bp, synthetic construct; identical to SEQ ID NO: 22614
  source 1..120: mol_type = other DNA

SEQ ID NO: 49467 - DNA, 120 bp, synthetic construct; identical to SEQ ID NO: 22615
  source 1..120: mol_type = other DNA

SEQ ID NO: 49468 - DNA, 120 bp, synthetic construct; identical to SEQ ID NO: 22616
  source 1..120: mol_type = other DNA

SEQ ID NO: 49469 - DNA, 120 bp, synthetic construct; identical to SEQ ID NO: 22617
  source 1..120: mol_type = other DNA

SEQ ID NO: 49470 - DNA, 120 bp, synthetic construct
  source 1..120: mol_type = other DNA
gagggctgtgtcacaggccagggtcactcatatttggctcagaaatctcttcagatattttacagagtttgactctttttgtcaacataggagtgatgcttagaaaagttcatggtacct

SEQ ID NO: 49471 - DNA, 120 bp, synthetic construct; identical to SEQ ID NO: 22618
  source 1..120: mol_type = other DNA

SEQ ID NO: 49472 - DNA, 120 bp, synthetic construct; identical to SEQ ID NO: 16527
  source 1..120: mol_type = other DNA

SEQ ID NO: 49473 - DNA, 120 bp, synthetic construct; identical to SEQ ID NO: 16528
  source 1..120: mol_type = other DNA

SEQ ID NO: 49474 - DNA, 120 bp, synthetic construct
  source 1..120: mol_type = other DNA
tctctgatttacctgcttttttataaagcgagagagagagagagatgtttcaggcaggtccttttttttttttatttattttttattattatactttaagttttagggtacatgtgcaca

SEQ ID NO: 49475 - DNA, 120 bp, synthetic construct; identical to SEQ ID NO: 26471
  source 1..120: mol_type = other DNA

SEQ ID NO: 49476 - DNA, 120 bp, synthetic construct; identical to SEQ ID NO: 26472
  source 1..120: mol_type = other DNA

SEQ ID NO: 49477 - DNA, 120 bp, synthetic construct; identical to SEQ ID NO: 19121
  source 1..120: mol_type = other DNA

SEQ ID NO: 49478 - DNA, 120 bp, synthetic construct; identical to SEQ ID NO: 19122
  source 1..120: mol_type = other DNA

SEQ ID NO: 49479 - DNA, 120 bp, synthetic construct
  source 1..120: mol_type = other DNA
ctggatattagccctttgtcagatgagtaggttgctaaaattttctcccattctgtaggttgcctgttcactctgatggtagtttcttttgctgtgcagaagctctttagtttaattaga

SEQ ID NO: 49480 - DNA, 120 bp, synthetic construct; identical to SEQ ID NO: 19123
  source 1..120: mol_type = other DNA

SEQ ID NO: 49481 - DNA, 120 bp, synthetic construct
  source 1..120: mol_type = other DNA
ggcctcccaaagtgctgggattacaggcatgaggcacctcactcagccggatttctatttgtagatagaagtggaatgtggggtttacaagtatattaaaatagagcaaaattttctttt

SEQ ID NO: 49482 - DNA, 120 bp, synthetic construct; identical to SEQ ID NO: 19124
  source 1..120: mol_type = other DNA

SEQ ID NO: 49483 - DNA, 120 bp, synthetic construct; identical to SEQ ID NO: 19125
  source 1..120: mol_type = other DNA

SEQ ID NO: 49484 - DNA, 120 bp, synthetic construct; identical to SEQ ID NO: 16520
  source 1..120: mol_type = other DNA

SEQ ID NO: 49485 - DNA, 120 bp, synthetic construct; identical to SEQ ID NO: 16521
  source 1..120: mol_type = other DNA

SEQ ID NO: 49486 - DNA, 120 bp, synthetic construct; identical to SEQ ID NO: 16522
  source 1..120: mol_type = other DNA

SEQ ID NO: 49487 - DNA, 120 bp, synthetic construct
  source 1..120: mol_type = other DNA
actgacacctcacatggcagggtattccaacagacctgcagctgagggtcctgtgttagaaggaaaactaacaaacagaaaggacatccacaccgaaaacctatctgtacatcaccatca

SEQ ID NO: 49488 - DNA, 120 bp, synthetic construct
  source 1..120: mol_type = other DNA
gaaggagaaataaaatactttacagacaagcaaatgctgacagattttgtcaccaccaggactgccctataagagctcctgaaggaagcgctaaacatggaaaggaacaaccggtaccag

SEQ ID NO: 49489 - DNA, 120 bp, synthetic construct
  source 1..120: mol_type = other DNA
aactacatggaaactgaacaacctgctcctgaatgactactgggtacataatgaaataaaggcagaaataaagatgttctttaaaaccaactagaacaaagacacaacataccagaatct

SEQ ID NO: 49490 - DNA, 120 bp, synthetic construct
  source 1..120: mol_type = other DNA
tgggcttcatccctgggatgcaaggctggttcaatatacgcaaatcaataaatgtaatccagcatataaacagagccaaagacaaaaaccacatgattatctcaatagacgcagaaaaag

SEQ ID NO: 49491 - DNA, 120 bp, synthetic construct
  source 1..120: mol_type = other DNA
tcaatgcaacagaacagagccctcagaaataacgccgcctacctacaactatctgatctttgacaaacctgagaaaaacaagcaatggggaaaggattccctatttaataaatggtgctg

SEQ ID NO: 49492 - DNA, 120 bp, synthetic construct
  source 1..120: mol_type = other DNA
ggcacatatacatcatggaatactatgcagccataaaaaatgatgacttcatgtcctttgtagggacatggatgaaattggaaatcatcattctcagtaaactatcgcaagaacaaaaaa

SEQ ID NO: 49493 - DNA, 120 bp, synthetic construct; identical to SEQ ID NO: 16523
  source 1..120: mol_type = other DNA

SEQ ID NO: 49494 - DNA, 120 bp, synthetic construct
  source 1..120: mol_type = other DNA
aaaacagaacagaaaaactggaaactctaaaacgcagagcgcctctcctcctccaaaggaacgcagttcctcaccagcaacggaacaaagctggatggagaatgactttgatgagctgag

SEQ ID NO: 49495 - DNA, 120 bp, synthetic construct
  source 1..120: mol_type = other DNA
aaaatgtaaagaccatcgagactaggaagaaactgcatcaactaaccagcaaaatcaccagctaacatcataatgacaggatcaaattcacacataacaatattaactttaaatgtaaat

SEQ ID NO: 49496 - DNA, 120 bp, synthetic construct
  source 1..120: mol_type = other DNA
actcaggattaagaatctcactcaaagctgctcaactacatggaaactgaacaacctgctcctgaatgactactgggtacgtaacgaaatgaaggcagaaataaagatgttctttaaaac

SEQ ID NO: 49497 - DNA, 120 bp, synthetic construct; identical to SEQ ID NO: 49490
  source 1..120: mol_type = other DNA

SEQ ID NO: 49498 - DNA, 120 bp, synthetic construct; identical to SEQ ID NO: 49491
  source 1..120: mol_type = other DNA

SEQ ID NO: 49499 - DNA, 120 bp, synthetic construct
  source 1..120: mol_type = other DNA
atacaccatggaatactatgcagccataaaaaatgatgagttcgtgttctttgtagggacatggatgaaattggaaatcatcattctcagtaaactatcacaagaacaaaaaaccaaaca

SEQ ID NO: 49500 - DNA, 120 bp, synthetic construct; identical to SEQ ID NO: 16524
  source 1..120: mol_type = other DNA

SEQ ID NO: 49501 - DNA, 120 bp, synthetic construct
  source 1..120: mol_type = other DNA
agcctaactgggaggcaccccccagcaggggcatactgacacctcacacggcagggtattccaacagacctgcagctgagggtcctgtctgttagaaggaaaactaacaaacagaaagga

SEQ ID NO: 49502 - DNA, 120 bp, synthetic construct
  source 1..120: mol_type = other DNA
gtaccaaaacagagatatagatcaatgaaacagaacagagccctcagaaataatgccgcatatctacaactatctgatctttgacaaacctgagacaaacaagcaatggggaaaggattc

SEQ ID NO: 49503 - DNA, 120 bp, synthetic construct
  source 1..120: mol_type = other DNA
attctcagtaaactatcacaagaacaaaaaaccaaacaccgcatattctcactcgtaggtgggaattgaacaatgagaacacatggacacaggaaggggaacatcacactctggggactg

SEQ ID NO: 49504 - DNA, 120 bp, synthetic construct
  source 1..120: mol_type = other DNA
tgtgtgtgtgtgtatatatatatatacgcatacatatatacacacacatacacagaaagagacagagggaggaaatgtttattacacctcaacaaatctttctctctgtatgtgtgtctg

SEQ ID NO: 49505 - DNA, 120 bp, synthetic construct; identical to SEQ ID NO: 16525
  source 1..120: mol_type = other DNA

SEQ ID NO: 49506 - DNA, 120 bp, synthetic construct; identical to SEQ ID NO: 4041
  source 1..120: mol_type = other DNA

SEQ ID NO: 49507 - DNA, 120 bp, synthetic construct; identical to SEQ ID NO: 27285
  source 1..120: mol_type = other DNA

SEQ ID NO: 49508 - DNA, 120 bp, synthetic construct; identical to SEQ ID NO: 27286
  source 1..120: mol_type = other DNA

SEQ ID NO: 49509 - DNA, 120 bp, synthetic construct
  source 1..120: mol_type = other DNA
ctgagattgcgccattgcactccagcctgggcgacagagtgagactccatctcaaaataagtaaataaataaagtaacatagagtatcctctttcctttcatgtgttctaactcctatgc

SEQ ID NO: 49510 - DNA, 120 bp, synthetic construct; identical to SEQ ID NO: 29915
  source 1..120: mol_type = other DNA

SEQ ID NO: 49511 - DNA, 120 bp, synthetic construct; identical to SEQ ID NO: 29916
  source 1..120: mol_type = other DNA

SEQ ID NO: 49512 - DNA, 120 bp, synthetic construct; identical to SEQ ID NO: 15141
  source 1..120: mol_type = other DNA

SEQ ID NO: 49513 - DNA, 120 bp, synthetic construct
  source 1..120: mol_type = other DNA
cctaattgccctggccagaacttccaacactatgttgaatagcagtggtgagagagggcatccctgtcttgtgccagttttcaaagggaatgcttccagtttttgcccattcagtatgat

SEQ ID NO: 49514 - DNA, 120 bp, synthetic construct
  source 1..120: mol_type = other DNA
ctttctcttgtgggcatttagtgctgtaaatttccctctacacactgctttgaatgcgtcccagagattctggtatgttgtgtctttgttctcgttggtttcaaagaacgtctttatttc

SEQ ID NO: 49515 - DNA, 120 bp, synthetic construct
  source 1..120: mol_type = other DNA
gacacatgcacacgtatgtttattgtggcactattcacgatagcaaagacttggaaccaagccaaatgtccaacaatgatagactggattaagaaaatgtggcacatatacaccatggaa

SEQ ID NO: 49516 - DNA, 120 bp, synthetic construct; identical to SEQ ID NO: 15142
  source 1..120: mol_type = other DNA

SEQ ID NO: 49517 - DNA, 120 bp, synthetic construct; identical to SEQ ID NO: 6867
  source 1..120: mol_type = other DNA

SEQ ID NO: 49518 - DNA, 120 bp, synthetic construct; identical to SEQ ID NO: 6868
  source 1..120: mol_type = other DNA

SEQ ID NO: 49519 - DNA, 120 bp, synthetic construct; identical to SEQ ID NO: 6869
  source 1..120: mol_type = other DNA

SEQ ID NO: 49520 - DNA, 120 bp, synthetic construct; identical to SEQ ID NO: 6870
  source 1..120: mol_type = other DNA

SEQ ID NO: 49521 - DNA, 120 bp, synthetic construct; identical to SEQ ID NO: 6871
  source 1..120: mol_type = other DNA

SEQ ID NO: 49522 - DNA, 120 bp, synthetic construct; identical to SEQ ID NO: 6842
  source 1..120: mol_type = other DNA

SEQ ID NO: 49523 - DNA, 120 bp, synthetic construct; identical to SEQ ID NO: 6843
  source 1..120: mol_type = other DNA

SEQ ID NO: 49524 - DNA, 120 bp, synthetic construct; identical to SEQ ID NO: 6872
  source 1..120: mol_type = other DNA

SEQ ID NO: 49525 - DNA, 120 bp, synthetic construct
  source 1..120: mol_type = other DNA
gattgcttgagcccaggagttcaagaccagcctggccaacatagcaacactctgttttctttttttctttttgagatggagtctcgctctgtcacccaggctggagtgcaatggtgagat

SEQ ID NO: 49526 - DNA, 120 bp, synthetic construct; identical to SEQ ID NO: 6873
  source 1..120: mol_type = other DNA

SEQ ID NO: 49527 - DNA, 120 bp, synthetic construct; identical to SEQ ID NO: 5
  source 1..120: mol_type = other DNA

SEQ ID NO: 49528 - DNA, 120 bp, synthetic construct; identical to SEQ ID NO: 6
  source 1..120: mol_type = other DNA

SEQ ID NO: 49529 - DNA, 120 bp, synthetic construct; identical to SEQ ID NO: 6874
  source 1..120: mol_type = other DNA

SEQ ID NO: 49530 - DNA, 120 bp, synthetic construct; identical to SEQ ID NO: 6875
  source 1..120: mol_type = other DNA

SEQ ID NO: 49531 - DNA, 120 bp, synthetic construct
  source 1..120: mol_type = other DNA
gagatcgcgccaccgcactccagcctgggggacaagagcaaaactctgcctccaaaaaaaaaaaaaaggcaggggcgaaaagcaagcaccggaaccaagcgcccgcctgtgacagcaagt

SEQ ID NO: 49532 - DNA, 120 bp, synthetic construct
  source 1..120: mol_type = other DNA
tccttcttgtttctagcttttttttgagacagggtcttggtttgtcacccaggctggagtgcagtggcgcaatctcggctcactgcaacctccatctcacgagttcaagtgattctcata

SEQ ID NO: 49533 - DNA, 120 bp, synthetic construct; identical to SEQ ID NO: 6876
  source 1..120: mol_type = other DNA

SEQ ID NO: 49534 - DNA, 120 bp, synthetic construct
  source 1..120: mol_type = other DNA
cttagcaattagccagcactggaaaaaggctgggctcaaatacctcgagcacagtaaggcttccttggcccacggctgtgtgtggacagggagcacactgaacgttcacgcgtcattcgc

SEQ ID NO: 49535 - DNA, 120 bp, synthetic construct
  source 1..120: mol_type = other DNA
ccctctcatcatctttacatgctgtgtacccagccctggctgctggcaaacatcgctgcccttccgcttcagactcctctcttcctggagcagcttgcaagctttctgtggactcactct

SEQ ID NO: 49536 - DNA, 120 bp, synthetic construct
  source 1..120: mol_type = other DNA
taaacaaactgctcccaaacaatataatgggggagagaaaaccccagaggaaaaatggactagccattctgaatggtctgtgacacacgcacgctttcagctagagtttgctctctctgg

SEQ ID NO: 49537 - DNA, 120 bp, synthetic construct
  source 1..120: mol_type = other DNA
agagtattctctctatagccattctgaacggtctgtgacgcacgtatgctttcagctagagtattcttttttttttttttgagacggagtcttgctctgtcgcccaggctagagtgtgca

SEQ ID NO: 49538 - DNA, 120 bp, synthetic construct
  source 1..120: mol_type = other DNA
tcaggacattaagaccatcctggctaacacggagagaccccatctctactaaaaatacaaaaaattagcttggcatgttggtgagcccctgtagtcccagctactcaggaagctgaggta

SEQ ID NO: 49539 - DNA, 120 bp, synthetic construct; identical to SEQ ID NO: 10
  source 1..120: mol_type = other DNA

SEQ ID NO: 49540 - DNA, 120 bp, synthetic construct; identical to SEQ ID NO: 11
  source 1..120: mol_type = other DNA

SEQ ID NO: 49541 - DNA, 120 bp, synthetic construct
  source 1..120: mol_type = other DNA
attttattttatttattcatgtatttacttttgagtcggagccttgctctgccgcccaggttggagtgcagtggcgtggtcttggctcactgcagcctcctcccgggttcaaggaatttt

SEQ ID NO: 49542 - DNA, 120 bp, synthetic construct
  source 1..120: mol_type = other DNA
ccaagctcttaatgttgcttcctgagttcttggtaactggggaaatctccctatttttttatttttatttttttttgagacggagtcttgctctgtcgcccaggctggagtgcagtggcg

SEQ ID NO: 49543 - DNA, 120 bp, synthetic construct
  source 1..120: mol_type = other DNA
tttttaaagtcttcttttcttctttctcttttttttttttttttgtggcagaatctcactgtcacccaggctggggtacactggcgtgatcttgcctcactgcaatctccacctcctggc

SEQ ID NO: 49544 - DNA, 120 bp, synthetic construct
  source 1..120: mol_type = other DNA
ctcaggcaatcctctcacctcagcccctcacaatgtggggattacaggcatgagccactgaacacagccctaaatttgttgattcatttttctctcaatttttaatactatgattttctc

SEQ ID NO: 49545 - DNA, 120 bp, synthetic construct
  source 1..120: mol_type = other DNA
aagatcagatggttgtagatatgcggcattacttctgaggtctctgttctgttccattggtctatatctctgttttagtaccagtaccatgctgttttcgttactgtagccttgtagtat

SEQ ID NO: 49546 - DNA, 120 bp, synthetic construct
  source 1..120: mol_type = other DNA
atgctggattacgtttattgatttgcatatgttgaaccagccttgcatcccagggatgaagcccacttgatcatggtggataagctttttgatgtactgctggatttggtttgccagtat

SEQ ID NO: 49547 - DNA, 120 bp, synthetic construct
  source 1..120: mol_type = other DNA
tgtggtcaattttggaataggtgtggtgtggtgctgaaaagaatgtatattctgttgatttggggtggagagttctgtagatgtctattaggttagcttggtgcagagctgagttcaatt

SEQ ID NO: 49548 - DNA, 120 bp, synthetic construct
  source 1..120: mol_type = other DNA
tgcctcagcctcccaaatagctgggaccacaggcgcccgccactacgcccggctaatttttttttttttcactattgtgtattttttcttttttcttctttttttctttttttttaatta

SEQ ID NO: 49549 - DNA, 120 bp, synthetic construct
  source 1..120: mol_type = other DNA
attctgggtattagccctttgtcagatgagtaggttgtgaaaattttctcccatgttgtaggttgcctgttcactctgatggttgtttcttttgctgtgcagaagctctttagtttaatt

SEQ ID NO: 49550 - DNA, 120 bp, synthetic construct; identical to SEQ ID NO: 29717
  source 1..120: mol_type = other DNA

SEQ ID NO: 49551 - DNA, 120 bp, synthetic construct
  source 1..120: mol_type = other DNA
ttctagatccctgaggaatcgccacactgacttccacaatggttgaacaagtttacagtcccaccaacagtgtaaaagtgttcctatttctccacatcctctccagcacctgttgtttcc

SEQ ID NO: 49552 - DNA, 120 bp, synthetic construct; identical to SEQ ID NO: 29718
  source 1..120: mol_type = other DNA

SEQ ID NO: 49553 - DNA, 120 bp, synthetic construct
  source 1..120: mol_type = other DNA
cgtcgtgtgccagtgttgttaggagtgccccaaagtttcaggacttgcttggcagccatacttcctcggaagatgcctcattttcaactctatgtaatttactaattttagattatgcat

SEQ ID NO: 49554 - DNA, 120 bp, synthetic construct
  source 1..120: mol_type = other DNA
ttgtgctggttccctgcaaaataattagcattgacactgtagaaagtggggaaggaaagctttcatgactaacttctctgccctccttcatctaattatacccttccttatcaacccact

SEQ ID NO: 49555 - DNA, 120 bp, synthetic construct
  source 1..120: mol_type = other DNA
cccgagtagctgggactacaggcgcctgccaccgcacccggctaattttttgtatttttagtagagacggggtttcaccttgttagccaggatggtctcgatctcctgacctcgtgatcc

SEQ ID NO: 49556 - DNA, 120 bp, synthetic construct
  source 1..120: mol_type = other DNA
aatttttcagcatgtgaaaattctttttttttaattatactttaacttttagggtacatgtgcacaatgtgcaggttggttacatatgtatacatgtgccatgttggtgtgctgcaccca

SEQ ID NO: 49557 - DNA, 120 bp, synthetic construct
  source 1..120: mol_type = other DNA
tctccgatgctgtaggttgcctgttcactctgatgggagtttcttttgctgtgcagaagctctttagtttaattagatcccatttgtcaattttggcttttgttgccattgcttttggtg

SEQ ID NO: 49558 - DNA, 120 bp, synthetic construct
  source 1..120: mol_type = other DNA
acaatttggcttcctcttttcctaattgaataccctttatttccttcccctgcctgattgccctggccagaacttccaacactatgttgaataggagtggtgagagagggcatccctgtc

SEQ ID NO: 49559 - DNA, 120 bp, synthetic construct
  source 1..120: mol_type = other DNA
ttgattttttgaagggttttttgtgtctctatttccttcagttctgctctgatcttagttatttcttgccttctgctagcttttgaatgtgcttgctcttgcttctctagttcttttaat

SEQ ID NO: 49560 - DNA, 120 bp, synthetic construct
  source 1..120: mol_type = other DNA
gtgtgtctctgcccgtgagatgggtttcctgaatacagcacactaatgggtcttgactctttatctaatttggcagtctgtgtcttttaattggagcatctagcccatttacatttaagg

SEQ ID NO: 49561 - DNA, 120 bp, synthetic construct
  source 1..120: mol_type = other DNA
aaagagtaagactgcatctcttaaaaaaaaaaaggtggggaggagccaagatggccgaataggaacagctccggtctatagctcccagcctaagcaacgcagaagactggtgatttctgc

SEQ ID NO: 49562 - DNA, 120 bp, synthetic construct
  source 1..120: mol_type = other DNA
atcaaagatcaaaagtagataaaaccacaaagatggggaaaaaacagaacagaaaaactgaaaactctaaaacgcagagcgcctctcctcctccaaaggaacacagttcctcaccagcaa

SEQ ID NO: 49563 - DNA, 120 bp, synthetic construct
  source 1..120: mol_type = other DNA
caaccggtatcagctgctgcaaaatcatgccaaaatgtaaagaccatcgagactaggaagaaactgcatcaactaacgagcaaaataaccagctaacatcatcatgacaggatcaaattc

SEQ ID NO: 49564 - DNA, 120 bp, synthetic construct
  source 1..120: mol_type = other DNA
aagcaagaaataactaaaatcagagcagaactgaaggaaatagagaccaaaaaaacccttcaaaaaattaatgaatccaggagctggttttttgaaaggatcaacaaaattgatagactg

SEQ ID NO: 49565 - DNA, 120 bp, synthetic construct
  source 1..120: mol_type = other DNA
ttcaaaataataagagctatctatgacaaacccacagccaatatcatactgaatgggcaaaaactggaagcattccctttgaaaactggcacaagacagggataccctctctcaccactc

SEQ ID NO: 49566 - DNA, 120 bp, synthetic construct
  source 1..120: mol_type = other DNA
atcccttccttacaccttatacaaaaatgaattcaagatggattaaagacttaaacgttagacctaaaaccataaaaaccctagaagaaaacctaggcattaccattcaggacataggca

SEQ ID NO: 49567 - DNA, 120 bp, synthetic construct
  source 1..120: mol_type = other DNA
tttgtagggacatggatgaaactggaaattatcattctcagtaaactatcacaagaacaaaaaaccaaaccccgcatattctcactcataggtgggaattgaacaatgagatcacatgga

SEQ ID NO: 49568 - DNA, 120 bp, synthetic construct; identical to SEQ ID NO: 29721
  source 1..120: mol_type = other DNA

SEQ ID NO: 49569 - DNA, 120 bp, synthetic construct; identical to SEQ ID NO: 29710
  source 1..120: mol_type = other DNA

SEQ ID NO: 49570 - DNA, 120 bp, synthetic construct
  source 1..120: mol_type = other DNA
gcattttttcatgtgtcttttggctgcataaatgtcttcttttgagaagtgtctgttcatgtcctttgcccactttttgatggggttgtttgtttttttcttgtaaatgtgttggagttc

SEQ ID NO: 49571 - DNA, 120 bp, synthetic construct
  source 1..120: mol_type = other DNA
taaaatatctaggaatccaacttacaagggacgtgaaggacctcttcaaggagaactacaaaccactgctcaatgaaataaaagaggatacaaacaaatggaagaatattccctgctcat

SEQ ID NO: 49572 - DNA, 120 bp, synthetic construct
  source 1..120: mol_type = other DNA
ttattgccgcaattttggatcctgttattagtctattcagagattcaacttcttcctggtttagtcttgggagagtgtatgtgtcgaggaatttatccatttcttctagattttctagtt

SEQ ID NO: 49573 - DNA, 120 bp, synthetic construct
  source 1..120: mol_type = other DNA
atatatttaggatagttagctgctcttgttgaattgatccgtttaccattatgtaatggccttctttgtctcttttgatctttgttggtttaaagtctgttttatcagagactaggattg

SEQ ID NO: 49574 - DNA, 120 bp, synthetic construct
  source 1..120: mol_type = other DNA
ttgatcgcatcggctcctgaggcttctgcattcttcacgtagttctcgagccttggctttcaggtccatcagctcctttaagcacttctctgtattggttattctagttatacattcatc

SEQ ID NO: 49575 - DNA, 120 bp, synthetic construct; identical to SEQ ID NO: 29711
  source 1..120: mol_type = other DNA

SEQ ID NO: 49576 - DNA, 120 bp, synthetic construct
  source 1..120: mol_type = other DNA
tcgtgtatgtttattgtaatcattgatatgtttggatttaactttattctttttttttaaattatttatttttattgatcattcttgggtgtttctcgcagagggggatttggcagggtc

SEQ ID NO: 49577 - DNA, 120 bp, synthetic construct; identical to SEQ ID NO: 29712
  source 1..120: mol_type = other DNA

SEQ ID NO: 49578 - DNA, 120 bp, synthetic construct; identical to SEQ ID NO: 29713
  source 1..120: mol_type = other DNA

SEQ ID NO: 49579 - DNA, 120 bp, synthetic construct; identical to SEQ ID NO: 29714
  source 1..120: mol_type = other DNA

SEQ ID NO: 49580 - DNA, 120 bp, synthetic construct
  source 1..120: mol_type = other DNA
cagagtgtgatgttccccttcctgtgtccatgtgttctcattgttcaatacggtgtttggttttttgttcttgcgatagttaatgagaatgatgatttccaatttcatccatgtccctac

SEQ ID NO: 49581 - DNA, 120 bp, synthetic construct
  source 1..120: mol_type = other DNA
acatgtggctagccagttttcccagcaccatgtattaaatagggaatcctttccccattgcttgtttttctcaggtttgtcaaagatcagatagttgtagatatgcggcattatttctga

SEQ ID NO: 49582 - DNA, 120 bp, synthetic construct; identical to SEQ ID NO: 29715
  source 1..120: mol_type = other DNA

SEQ ID NO: 49583 - DNA, 120 bp, synthetic construct
  source 1..120: mol_type = other DNA
tttatccaccatgatcaagtgggcatcatcccagggatgcaaggctggttcaacatatgcaaatcaaaaaaacgtaatccagcgtagaaacagaaccaaagagaaaaaccacatgattat

SEQ ID NO: 49584 - DNA, 120 bp, synthetic construct
  source 1..120: mol_type = other DNA
agagcccccattgccaagtcaatcctaagacaaaagaacaaagctggaggcatcatgctacctgacttcaaactatactacaaggctacagtaaccaaaacagcatggtactggtaccaa

SEQ ID NO: 49585 - DNA, 120 bp, synthetic construct
  source 1..120: mol_type = other DNA
tttgacccagccatcccattactgggtatatacccaaaggattataaaacatgctgttataaagacacatgcccatgtatgtttattgtggcactattagcaatagcaaagacttggaac

SEQ ID NO: 49586 - DNA, 120 bp, synthetic construct
  source 1..120: mol_type = other DNA
ttaaagatgtacagtgctgtattttaaaatcttcacaattttagttgtcacttttcccattctttcctcttctttcctctcctttcctctcctctcctctcctctcctctcctcacctct

SEQ ID NO: 49587 - DNA, 120 bp, synthetic construct; identical to SEQ ID NO: 29716
  source 1..120: mol_type = other DNA

SEQ ID NO: 49588 - DNA, 120 bp, synthetic construct
  source 1..120: mol_type = other DNA
aagataatcccatattccagaggtaaccactgaagacatttaaatgtattttctgccaaacttttttcttttttttttttttttttttttttgagacggagtctcgctctatcacccagg

SEQ ID NO: 49589 - DNA, 120 bp, synthetic construct; identical to SEQ ID NO: 21914
  source 1..120: mol_type = other DNA

SEQ ID NO: 49590 - DNA, 120 bp, synthetic construct; identical to SEQ ID NO: 33803
  source 1..120: mol_type = other DNA

SEQ ID NO: 49591 - DNA, 120 bp, synthetic construct
  source 1..120: mol_type = other DNA
agtgagaccttcccacagaaaggctcaactcccaaagtgctacacttttgagacttacagggtacatttaaaaaaaaaatcagagggaggagccaagatggccgaataggaacagctccg

SEQ ID NO: 49592 - DNA, 120 bp, synthetic construct
  source 1..120: mol_type = other DNA
actctaaaacgcagagtgcctctcctcctccaaaggaacacagttcctcaccagcaacggaacaaagctggatggagaatgactttgacgagctgagagaagaaggcttcagacgatcaa

SEQ ID NO: 49593 - DNA, 120 bp, synthetic construct
  source 1..120: mol_type = other DNA
gaaggaagtgctaaacatggaaaggaacaactggtaccagccgctgcaaaatcatgccaaaatgtaaagaccatcgagactaggaagaaactgcatcaactaatgagcaaaatcaccacc

SEQ ID NO: 49594 - DNA, 120 bp, synthetic construct
  source 1..120: mol_type = other DNA
aatctcactcaaaaccgctcaactacatggaaactgaacaacctgctcctgaatgactactgggtacataacgaaatgaaggcagaaataaagatgttctttgagaccaacgagaacaaa

SEQ ID NO: 49595 - DNA, 120 bp, synthetic construct
  source 1..120: mol_type = other DNA
caatatacgcaaatcaacaaatgtaatccagcatataaacagagccaaagacaaaaaccacatgattatctcaatagatgcagaaaaagcctttgacaaaattcaacaacccttcatgct

SEQ ID NO: 49596 - DNA, 120 bp, synthetic construct
  source 1..120: mol_type = other DNA
ggcatcacgctacctgacttcaaactatactacaaggctacagtaaccaaaacagcatggtactggtaccaaaacagagatatagatcaatggaacagaacagagccttcagaaataaca

SEQ ID NO: 49597 - DNA, 120 bp, synthetic construct
  source 1..120: mol_type = other DNA
tcacaatagcaaagacttggaaccaacccaaatgtccaacaatgatagactggattaagaaaatgtggcacatatacaccatggaatactatgcagccataaaaattgatgagttcatgt

SEQ ID NO: 49598 - DNA, 120 bp, synthetic construct; identical to SEQ ID NO: 13138
  source 1..120: mol_type = other DNA

SEQ ID NO: 49599 - DNA, 120 bp, synthetic construct
  source 1..120: mol_type = other DNA
agggatacagaaagaagtctttccagatattaaaatatactacaggtcaggcgcagtggctcaagcctgtaatcctagcactttgggaagccaatatggtgaaaccctgtctctacaaaa

SEQ ID NO: 49600 - DNA, 120 bp, synthetic construct
  source 1..120: mol_type = other DNA
caataatagatggagacttcaatatcctattttaagtactggacagaagaaccagacagatttataaagaaatacaggacgtggctgggtgtggtggctcatgcctgtaatcccaacact

SEQ ID NO: 49601 - DNA, 120 bp, synthetic construct; identical to SEQ ID NO: 13141
  source 1..120: mol_type = other DNA

SEQ ID NO: 49602 - DNA, 120 bp, synthetic construct; identical to SEQ ID NO: 13142
  source 1..120: mol_type = other DNA

SEQ ID NO: 49603 - DNA, 120 bp, synthetic construct; identical to SEQ ID NO: 5816
  source 1..120: mol_type = other DNA

SEQ ID NO: 49604 - DNA, 120 bp, synthetic construct
  source 1..120: mol_type = other DNA
tttagcatgggagatggaagctgcagtaagccatgatcttaccactgcactccagcctgggtgacagggtgagaccccaactcaaaaaataaataaataaatctaaacatatgaataaat

SEQ ID NO: 49605 - DNA, 120 bp, synthetic construct
  source 1..120: mol_type = other DNA
ccaagatcgcaccattgtactccagcctgggcaacaagggtgaaactccgtctcaaaaaaaaaaaaaaaattaaaccaccacccacaaacctttcaagacatgaaccatgtcttctttca

SEQ ID NO: 49606 - DNA, 120 bp, synthetic construct
  source 1..120: mol_type = other DNA
gggaggtgaggagcgtctctgcccggccgccccgtctgagaagtgaggagcccctccgcgcggcagccgccccgtctgagaagtgaggagcccctccgcgcggcagccgccccgtctgag

SEQ ID NO: 49607 - DNA, 120 bp, synthetic construct; identical to SEQ ID NO: 32971
  source 1..120: mol_type = other DNA

SEQ ID NO: 49608 - DNA, 120 bp, synthetic construct
  source 1..120: mol_type = other DNA
gagagaagaatcaaatagatgcaataaagaatgataaaggggatatcaccaccgatcccaaagaaatacaaactaccatcagagaatactacaaacacctctacgcaaataaactagaaa

SEQ ID NO: 49609 - DNA, 120 bp, synthetic construct
  source 1..120: mol_type = other DNA
gcccaaaatttccttaagctgataagcaacttcagcaaagtctcaggatacaaaatcgatgtacaaaaatcacaagcattcttatacaccaataacagacaaacagagagccaaatcatg

SEQ ID NO: 49610 - DNA, 120 bp, synthetic construct
  source 1..120: mol_type = other DNA
ccagaatctacaatgaactcaaacaaatttacaagaaaaaaacaaacaaccccatcaaaaagtgggcgaaggatatgaacagacacttctcaaaagaagacatttatgcagccaaaagac

SEQ ID NO: 49611 - DNA, 120 bp, synthetic construct
  source 1..120: mol_type = other DNA
gcgcacatgtaccctaaaacttaaagtataataataagaagaagaagaaatgtttgaccagttaatccaatttgataggagtgtgaaaagcacgatatcatggtggttaggagggtagac

SEQ ID NO: 49612 - DNA, 120 bp, synthetic construct
  source 1..120: mol_type = other DNA
ataatacgaaatgagcctaggagatcttgtgctcctagaaagcaaggaattgctcaaaaaatgaggagtcatgttgaaaaggcacaggaatcaatttgaaggagctcccaatggccaagt

SEQ ID NO: 49613 - DNA, 120 bp, synthetic construct
  source 1..120: mol_type = other DNA
caccccgtctgagaagtgaggagcccctccgcccggcagctgccccatctgagaagtgaggagcctctccgcccggcagccaccccatctgggaagtgaggagcgtctccgcccggcagc

SEQ ID NO: 49614 - DNA, 120 bp, synthetic construct
  source 1..120: mol_type = other DNA
cgagaagcaggatattcatatagtctcaaaagatctccccacaaaattaattataaagggaataaaatagtgactttatagtgaagaaacccagaagattccactttaaccaagtgacta

SEQ ID NO: 49615 - DNA, 120 bp, synthetic construct
  source 1..120: mol_type = other DNA
aagacttggaaccaacccaaatgtccaacaatgatagactggattaagaaaatgtggcacatatacaccatggaatactatgcagccataaaaaaggatgagttcatgtgctttgtagat

SEQ ID NO: 49616 - DNA, 120 bp, synthetic construct; identical to SEQ ID NO: 32972
  source 1..120: mol_type = other DNA

SEQ ID NO: 49617 - DNA, 120 bp, synthetic construct; identical to SEQ ID NO: 32973
  source 1..120: mol_type = other DNA

SEQ ID NO: 49618 - DNA, 120 bp, synthetic construct
  source 1..120: mol_type = other DNA
tgttcactgcagcactattcacaatagcaaaggcttggaaccaagccaaatgtccaacaacgatagactggattaagaaaatgtggcacatatacaccatggaatactatgcagccataa

SEQ ID NO: 49619 - DNA, 120 bp, synthetic construct; identical to SEQ ID NO: 29727
  source 1..120: mol_type = other DNA

SEQ ID NO: 49620 - DNA, 120 bp, synthetic construct; identical to SEQ ID NO: 29728
  source 1..120: mol_type = other DNA

SEQ ID NO: 49621 - DNA, 120 bp, synthetic construct
  source 1..120: mol_type = other DNA
tctgattttggtatcagggtaatactggccccatagaatgagtttggaagtatttacttctctgtttttttggaatagtttgagtagtattggtattagccccctcccctcccccgtcct

SEQ ID NO: 49622 - DNA, 120 bp, synthetic construct; identical to SEQ ID NO: 27518
  source 1..120: mol_type = other DNA

SEQ ID NO: 49623 - DNA, 120 bp, synthetic construct
  source 1..120: mol_type = other DNA
cgatcattaaaaagtcaggaaacaacaggtgctggagaggatgtggagaaataggaacacttttacactgttggtgggactgtaaactagttcaaccattgtggaagtcagtgtggcgat

SEQ ID NO: 49624 - DNA, 120 bp, synthetic construct
  source 1..120: mol_type = other DNA
ttggcgatgcgggctcttttttggttccatatgaactttaaagtagttttttccaattctgtgaagaaagtcactggtagcttgatggggatggcattgaatctgtaaattaccttgggc

SEQ ID NO: 49625 - DNA, 120 bp, synthetic construct; identical to SEQ ID NO: 27519
  source 1..120: mol_type = other DNA

SEQ ID NO: 49626 - DNA, 120 bp, synthetic construct; identical to SEQ ID NO: 27520
  source 1..120: mol_type = other DNA

SEQ ID NO: 49627 - DNA, 120 bp, synthetic construct; identical to SEQ ID NO: 27521
  source 1..120: mol_type = other DNA

SEQ ID NO: 49628 - DNA, 120 bp, synthetic construct; identical to SEQ ID NO: 27522
  source 1..120: mol_type = other DNA

SEQ ID NO: 49629 - DNA, 120 bp, synthetic construct
  source 1..120: mol_type = other DNA
ttactcatgtatacgtgtgccatgttggtttgctgcacccgttaacttgtcatttacgttaggtatttctcctaatgctgtccctcccgcattcccgcaccccatgacaggccctggtgt

SEQ ID NO: 49630 - DNA, 120 bp, synthetic construct; identical to SEQ ID NO: 27523
  source 1..120: mol_type = other DNA

SEQ ID NO: 49631 - DNA, 120 bp, synthetic construct
  source 1..120: mol_type = other DNA
gatgaatgtggtatattagtctgttctcatgctgctaataaagacatacccaggaccgggtaatttataaaggaaagaggcttaatcgacttacaattccacatggctggggaggcctca

SEQ ID NO: 49632 - DNA, 120 bp, synthetic construct; identical to SEQ ID NO: 25525
  source 1..120: mol_type = other DNA

SEQ ID NO: 49633 - DNA, 120 bp, synthetic construct
  source 1..120: mol_type = other DNA
agtagagacggggtctcaccgttttagccgggatggtctcgatctcctgacctcgtgatccgcccgcctcggcctcccaaagtgctgggattacaggcgtgagccaccgcgcccggccga

SEQ ID NO: 49634 - DNA, 120 bp, synthetic construct
  source 1..120: mol_type = other DNA
catgatcatagcttactttaaccttgaactcctgggctcaagagatttttccacctcagcctcctaagtatctaggactacaggtgggtgccaccacacacagctaattttttatttttc

SEQ ID NO: 49635 - DNA, 120 bp, synthetic construct
  source 1..120: mol_type = other DNA
ggcaggagagggaggcacactcagtgtaatttatattgaaaaaaaatctgggtataagtagatccatgcagttcaaacctgtgttgttcaagggtcaactgtatgtaacagggtagggtt

SEQ ID NO: 49636 - DNA, 120 bp, synthetic construct; identical to SEQ ID NO: 33527
  source 1..120: mol_type = other DNA

SEQ ID NO: 49637 - DNA, 120 bp, synthetic construct; identical to SEQ ID NO: 33528
  source 1..120: mol_type = other DNA

SEQ ID NO: 49638 - DNA, 120 bp, synthetic construct
  source 1..120: mol_type = other DNA
agggacataccaccatgcccggctgactttgtaatttttagtagagccagggtctcgccatgttgcccataataaataacaactaagacctcatagttgtcagtcatgtaatattatttt

SEQ ID NO: 49639 - DNA, 120 bp, synthetic construct; identical to SEQ ID NO: 33530
  source 1..120: mol_type = other DNA

SEQ ID NO: 49640 - DNA, 120 bp, synthetic construct; identical to SEQ ID NO: 33531
  source 1..120: mol_type = other DNA

SEQ ID NO: 49641 - DNA, 120 bp, synthetic construct; identical to SEQ ID NO: 33532
  source 1..120: mol_type = other DNA

SEQ ID NO: 49642 - DNA, 120 bp, synthetic construct
  source 1..120: mol_type = other DNA
ctccagcctgcgcgacagagcaagactccgtctcagaaaacaacagagtagtacgtcgtgatctatttctacataaaaagtaatccaacactgatttactgtgtaattagaagctgtagt

SEQ ID NO: 49643 - DNA, 120 bp, synthetic construct; identical to SEQ ID NO: 33533
  source 1..120: mol_type = other DNA

SEQ ID NO: 49644 - DNA, 120 bp, synthetic construct
  source 1..120: mol_type = other DNA
tctttatagcagcatgatttatagtcctttgggtatatgcccagtaatggatggctgggtcaaatggtatttctagttctagatccctaaggaatcgccacactaacttccacaatggtt

SEQ ID NO: 49645 - DNA, 120 bp, synthetic construct; identical to SEQ ID NO: 33534
  source 1..120: mol_type = other DNA

SEQ ID NO: 49646 - DNA, 120 bp, synthetic construct
  source 1..120: mol_type = other DNA
taaatcatgctgctataaagacacatgcacacatatgtttactgcggcactattcacaatagcaaagacttggaaccaacccaaatgtccaacaatgatagactggagtaagaaaatgtg

SEQ ID NO: 49647 - DNA, 120 bp, synthetic construct; identical to SEQ ID NO: 33535
  source 1..120: mol_type = other DNA

SEQ ID NO: 49648 - DNA, 120 bp, synthetic construct; identical to SEQ ID NO: 27719
  source 1..120: mol_type = other DNA

SEQ ID NO: 49649 - DNA, 120 bp, synthetic construct; identical to SEQ ID NO: 19543
  source 1..120: mol_type = other DNA

SEQ ID NO: 49650 - DNA, 120 bp, synthetic construct
  source 1..120: mol_type = other DNA
tcttctacagtttttagagttttaggtcttaggtttaagtctttaatccatcctaagttaatttgtgtgtaaggtgtaaggaaggggtccactttcagttttctacatatggctagccag

SEQ ID NO: 49651 - DNA, 120 bp, synthetic construct; identical to SEQ ID NO: 17476
  source 1..120: mol_type = other DNA

SEQ ID NO: 49652 - DNA, 120 bp, synthetic construct; identical to SEQ ID NO: 17477
  source 1..120: mol_type = other DNA

SEQ ID NO: 49653 - DNA, 120 bp, synthetic construct; identical to SEQ ID NO: 17478
  source 1..120: mol_type = other DNA

SEQ ID NO: 49654 - DNA, 120 bp, synthetic construct; identical to SEQ ID NO: 17479
  source 1..120: mol_type = other DNA

SEQ ID NO: 49655 - DNA, 120 bp, synthetic construct; identical to SEQ ID NO: 17480
  source 1..120: mol_type = other DNA

SEQ ID NO: 49656 - DNA, 120 bp, synthetic construct; identical to SEQ ID NO: 17481
  source 1..120: mol_type = other DNA

SEQ ID NO: 49657 - DNA, 120 bp, synthetic construct; identical to SEQ ID NO: 17482
  source 1..120: mol_type = other DNA

SEQ ID NO: 49658 - DNA, 120 bp, synthetic construct; identical to SEQ ID NO: 17483
  source 1..120: mol_type = other DNA

SEQ ID NO: 49659 - DNA, 120 bp, synthetic construct
  source 1..120: mol_type = other DNA
ccccgcagcactgcctccctaacccaccagttttacaagcaagcggctttcccctttctgtgctcttcccttaactataaacaagaaatgaaaatactctatacaggtttccttctgctt

SEQ ID NO: 49660 - DNA, 120 bp, synthetic construct
  source 1..120: mol_type = other DNA
gggcgcggtggctcacacctgtaatcccagcgctttgggaggccgtgacgggtggatcacgaggttgggagttcaaggtgagcctggccaagatggtgaaaccccgtctctactaaaaat

SEQ ID NO: 49661 - DNA, 120 bp, synthetic construct
  source 1..120: mol_type = other DNA
cttgaaccagggagatggaggttgcagtgagccaagatctcaccactgtgctccagcctggtgacagagcgagactctgtctcaaaaaataaataaagaaaaaaagaaaagaaaaaataa

SEQ ID NO: 49662 - DNA, 120 bp, synthetic construct
  source 1..120: mol_type = other DNA
ctacagagtgcaatactctggaggagaaaaaggtacttcacctccactgctgttagaaggccctgagcccatatctcatgctgagtcagaatgcagccttcctctaccaaccccatgata

SEQ ID NO: 49663 - DNA, 120 bp, synthetic construct
  source 1..120: mol_type = other DNA
agagtcgttggtcaggcacagtggctcacccctgtaatcccaacactttgggaggctgaggcaggcggatcatgagatcaagagattgagaccatactggccaacatggtgaaatcctgt

SEQ ID NO: 49664 - DNA, 120 bp, synthetic construct
  source 1..120: mol_type = other DNA
tgtgattctgggcaaattactgaactaccacttacctcagtttcttcatctgtaaactgagaataataattgtacttacagccgggcacggtggctcacacctgtaatcccagcactttg

SEQ ID NO: 49665 - DNA, 120 bp, synthetic construct
  source 1..120: mol_type = other DNA
ccaggcgtggtggcacatgcttgtagtcccagctactcgggaggctgaggcaggggaatcctttgaatcagggagtcggaggttacagtgagccgagatcgcgtcacagcactccagcct

SEQ ID NO: 49666 - DNA, 120 bp, synthetic construct
  source 1..120: mol_type = other DNA
tattgaaagttggtaaacttactccaaaaactcaaaacttatatactatagctgttacataaaaaagaaaagtgaggccgggcgcggtggctcatgcctgtaatcccagcactttgggag

SEQ ID NO: 49667 - DNA, 120 bp, synthetic construct
  source 1..120: mol_type = other DNA
aatgaggaaaaaaaaaaccctgataaactgatattttattacattcatattgagatttttttttttttttgagaccgagttttttttttttttttttttttgagacggagtctcgctgtc

SEQ ID NO: 49668 - DNA, 120 bp, synthetic construct
  source 1..120: mol_type = other DNA
tttctctggagaccctgactaatacacatatgaaaaggtgttcaacttcattagtaatcaggaaagttaaaatttaaaccccaataaaacacagtgggttttatttaatacccatcagat

SEQ ID NO: 49669 - DNA, 120 bp, synthetic construct
  source 1..120: mol_type = other DNA
taatggacgcatgagtgtttgttatattgtttaaaaatatacatatgtggttgtttttgggtttttttgagatggagtcttgctgtgtcgcccagtctggagtgcagtggcgcgatctcg

SEQ ID NO: 49670 - DNA, 120 bp, synthetic construct
  source 1..120: mol_type = other DNA
cagaagatggatctttcgattagatgacacagctatcagatctcccccggaatagtggatgactcggttttgatcccacctgagtgccaggggaaaaggattatccatgaaagaagagtc

SEQ ID NO: 49671 - DNA, 120 bp, synthetic construct; identical to SEQ ID NO: 17493
  source 1..120: mol_type = other DNA

SEQ ID NO: 49672 - DNA, 120 bp, synthetic construct; identical to SEQ ID NO: 17494
  source 1..120: mol_type = other DNA

SEQ ID NO: 49673 - DNA, 120 bp, synthetic construct; identical to SEQ ID NO: 17495
  source 1..120: mol_type = other DNA

SEQ ID NO: 49674 - DNA, 120 bp, synthetic construct
  source 1..120: mol_type = other DNA
gggattataggcatgcaccaccatgcctggctaattttctatatttttagtagagacagggttttgtcatgttggccaggctggccttgaactcctgacctcaggtgatccacctgcctc

SEQ ID NO: 49675 - DNA, 120 bp, synthetic construct; identical to SEQ ID NO: 17496
  source 1..120: mol_type = other DNA

SEQ ID NO: 49676 - DNA, 120 bp, synthetic construct; identical to SEQ ID NO: 17497
  source 1..120: mol_type = other DNA

SEQ ID NO: 49677 - DNA, 120 bp, synthetic construct; identical to SEQ ID NO: 17498
  source 1..120: mol_type = other DNA

SEQ ID NO: 49678 - DNA, 120 bp, synthetic construct; identical to SEQ ID NO: 17499
  source 1..120: mol_type = other DNA

SEQ ID NO: 49679 - DNA, 120 bp, synthetic construct; identical to SEQ ID NO: 17500
  source 1..120: mol_type = other DNA

SEQ ID NO: 49680 - DNA, 120 bp, synthetic construct; identical to SEQ ID NO: 17501
  source 1..120: mol_type = other DNA

SEQ ID NO: 49681 - DNA, 120 bp, synthetic construct; identical to SEQ ID NO: 17502
  source 1..120: mol_type = other DNA

SEQ ID NO: 49682 - DNA, 120 bp, synthetic construct; identical to SEQ ID NO: 17503
  source 1..120: mol_type = other DNA

SEQ ID NO: 49683 - DNA, 120 bp, synthetic construct; identical to SEQ ID NO: 17504
  source 1..120: mol_type = other DNA

SEQ ID NO: 49684 - DNA, 120 bp, synthetic construct
  source 1..120: mol_type = other DNA
tgtaacatttgcttgcatgtgaggatgcatatctatgtgtaaatgctctcatgtcttgcatgtttagtgtgtgtgtatctgggcacacatgagtgcatgtgtagagatacgtgtctgtgt

SEQ ID NO: 49685 - DNA, 120 bp, synthetic construct
  source 1..120: mol_type = other DNA
ggggaccagcaaatacttaacaggagattagagatttcctgtgagtgcatatggtgcggggtgacctgattctgtgaagcaaatgttattgtcctccttaaattcatgtgttgaattcta

SEQ ID NO: 49686 - DNA, 120 bp, synthetic construct
  source 1..120: mol_type = other DNA
gtacaggaggccaggccaaatgccctgctctctgcctgcatgtttgccaccgtgcccaggactaggggcagcatgggagctgctggctggggctgtgctggtcaccccctccctcccact

SEQ ID NO: 49687 - DNA, 120 bp, synthetic construct
  source 1..120: mol_type = other DNA
cctagtccccttccttccataagacctactcaggactccactgggctgctgactactcaccctcccctcaggtcatctcctgacccgtacacagttatgtccacccagggtctgcttgga

SEQ ID NO: 49688 - DNA, 120 bp, synthetic construct
  source 1..120: mol_type = other DNA
gcagtaacaggcatggagctgtcatctccttgataagaatgccttcttctggaaacctcctgaagaaactgcctgaggctgcttcacagttaccttaaaaaaaagtagtaagcatatact

SEQ ID NO: 49689 - DNA, 120 bp, synthetic construct; identical to SEQ ID NO: 851
  source 1..120: mol_type = other DNA

SEQ ID NO: 49690 - DNA, 120 bp, synthetic construct
  source 1..120: mol_type = other DNA
gcagtttacttcttaatcagtctccataatcaactgcattttttttttttttgagatggagtcttgctcttgttgcccaggcatgagtgcaatggcatgatctcggctcacctctgcctc

SEQ ID NO: 49691 - DNA, 120 bp, synthetic construct
  source 1..120: mol_type = other DNA
tttttttgagacggagtctcgctctgtcacccaggctggagtgcagtggcacgatctcggctcactgcaagatccgcctcccgggtttacgccattctgctgcctcagcgtcccaagtag

SEQ ID NO: 49692 - DNA, 120 bp, synthetic construct
  source 1..120: mol_type = other DNA
gagactgaggcaggagaattgctggaacctgggaggtggaggctgcagtgagccgagatcactccattgcactccagcccaggtgacaacagtgagactgcatctcaaaaaaaaaaaaaa

SEQ ID NO: 49693 - DNA, 120 bp, synthetic construct
  source 1..120: mol_type = other DNA
tctgccatctgatgggcttcgtggtgggtcatgtgaggagtttctatttttgtctgtgttctaaatttgcaggtattttattgaaagtataaaagtaattttaatagaagttactagcca

SEQ ID NO: 49694 - DNA, 120 bp, synthetic construct
  source 1..120: mol_type = other DNA
ctacttcttggacatttctttgatttctcactagtttcttgagtaaaattgtttgttcgtttcactttcttctttcttgattgataatgaaagcatttaaagatatgaatttgacttttc

SEQ ID NO: 49695 - DNA, 120 bp, synthetic construct
  source 1..120: mol_type = other DNA
ataatgttggagctttaagatttaatgactcccctaccagattctggacttgcatgaggcccattggcccctttgttttggccaatttctcccgtttggaatgggaacatttacccaatg

SEQ ID NO: 49696 - DNA, 120 bp, synthetic construct
  source 1..120: mol_type = other DNA
tttttggtttgtttgcttgcttgttttttagagagacagggtctcattctgtcacctcagctggaattcagtgttgtgatcctcacccactgcagccttcaactcctgagttcaagcgat

SEQ ID NO: 49697 - DNA, 120 bp, synthetic construct
  source 1..120: mol_type = other DNA
acaaggccccaagagggacataggccaaggcagacatcaggccccaggtggacatcaggcctgaggacgacatctggcccctggtgaacatcaggcacaggtgtccaagcagagcctggg

SEQ ID NO: 49698 - DNA, 120 bp, synthetic construct
  source 1..120: mol_type = other DNA
aaatcatggcacctactgtagccactggccttaatgctggagctgaaaacgtggctggagagagaagtgggagggagggggtgacaagcacagccccagccagcagatcccatgctgccc

SEQ ID NO: 49699 - DNA, 120 bp, synthetic construct
  source 1..120: mol_type = other DNA
tcctggttcatagacagccatctttttactgtgtctttacatgacagaaggggtgagggagctctctgcagtccctttgatagggacaccaattccattcatgaggtccctgccttcatg

SEQ ID NO: 49700 - DNA, 120 bp, synthetic construct
  source 1..120: mol_type = other DNA
gaggcacagaaatggggaacaaacatttaactagtgagagagatttaagacgaatgggaagagaaatctcgcaaaaaggacacattcatgcagatcctcaaagatggacacgcagtcatc

SEQ ID NO: 49701 - DNA, 120 bp, synthetic construct
  source 1..120: mol_type = other DNA
cacatatactatagtacttacagtaccttaaatgcatctgtttctctggtgaagcaatctctgagatggaacagtgttctgtgtttgccaagggagacagggccaatgcccaggacactc

SEQ ID NO: 49702 - DNA, 120 bp, synthetic construct
  source 1..120: mol_type = other DNA
caggcaatggtgaacagctgtgaatgggtcatgccaccggcagcagcctcggtggcaatctggcaggctgcctcaaaggcaatgtggtctttctcacagagtgtaagggctgacagggca

SEQ ID NO: 49703 - DNA, 120 bp, synthetic construct
  source 1..120: mol_type = other DNA
gaacagaggctatcttctcccaccagcagccgcatcctttcttaggccatcaggaataggaatatgagagctccaaggattcgttgtcctgtcccaagagtagggtatagaaactccttt

SEQ ID NO: 49704 - DNA, 120 bp, synthetic construct; identical to SEQ ID NO: 22319
  source 1..120: mol_type = other DNA

SEQ ID NO: 49705 - DNA, 120 bp, synthetic construct
  source 1..120: mol_type = other DNA
caatcccgtgtctttcctcatggcttcccaggagtttgaggttgaagctattgttgacaaaagacaggataaaaatgggaatacacagtatttggttcggtggaaaggttatgacaaaca

SEQ ID NO: 49706 - DNA, 120 bp, synthetic construct
  source 1..120: mol_type = other DNA
gaaagtgccagcacatacagagacattgtagtgaagaaagaggatggattcacccagatagtgctatcaactagatcgacagaaaaaaatgcactgaatacagaagtaattaaagaaata

SEQ ID NO: 49707 - DNA, 120 bp, synthetic construct
  source 1..120: mol_type = other DNA
aggacacaagaactaaggggcaacaaatgcatcatgagttgcaagatgccctaatccatcttcatagcccaaaacaatttcacccatagctaaggcttggaaacagaactggaaatgtcc

SEQ ID NO: 49708 - DNA, 120 bp, synthetic construct
  source 1..120: mol_type = other DNA
tgtgcaaggttcccttgagcctgcttttctaattttacaaacccatcttacaggctgcactcagctcaaactatgggcttaggtttcattttgctatggatgcaccaggcacagactgga

SEQ ID NO: 49709 - DNA, 120 bp, synthetic construct; identical to SEQ ID NO: 49705
  source 1..120: mol_type = other DNA

SEQ ID NO: 49710 - DNA, 120 bp, synthetic construct; identical to SEQ ID NO: 49706
  source 1..120: mol_type = other DNA

SEQ ID NO: 49711 - DNA, 120 bp, synthetic construct; identical to SEQ ID NO: 49707
  source 1..120: mol_type = other DNA

SEQ ID NO: 49712 - DNA, 120 bp, synthetic construct
  source 1..120: mol_type = other DNA
acaaatgtaaaaatgattcctaacttgtaggttccacaaaaataggcagtgggctggctttgccctgtaggttgttgtttgttaagccctgctgtaggtgatcaactgtcatagtctgtt

SEQ ID NO: 49713 - DNA, 120 bp, synthetic construct; identical to SEQ ID NO: 27455
  source 1..120: mol_type = other DNA

SEQ ID NO: 49714 - DNA, 120 bp, synthetic construct; identical to SEQ ID NO: 27456
  source 1..120: mol_type = other DNA

SEQ ID NO: 49715 - DNA, 120 bp, synthetic construct
  source 1..120: mol_type = other DNA
gaggaattaatgcctaggttttcttctagggtttttatggttttaggtctaacatttaagtctttaatccatcttgaattgatttttgtataaggtgtaaggaagggatccagtttcagc

SEQ ID NO: 49716 - DNA, 120 bp, synthetic construct
  source 1..120: mol_type = other DNA
ttagcatgaagcattgttgagttttgtcaaaggccttttctgcatctattgagataatcatgtggtttttgtctttggctctgtttatatgctggattacatttattgatttgcgtatat

SEQ ID NO: 49717 - DNA, 120 bp, synthetic construct
  source 1..120: mol_type = other DNA
gaacatctttatttctgccttcatttcgttatgtccccagtagtcattcaggagcaggttgttcagtttccatgtagttgagtggttttgagtgagtttcttaatcctgagttctagttt

SEQ ID NO: 49718 - DNA, 120 bp, synthetic construct
  source 1..120: mol_type = other DNA
tgctcattagttgatgcagtttcttcctagtcttgatggtctttacattttggcatgattttgcagcggctggtaccagttgttcctttccatgtttagtgcttctttcaggagctcttt

SEQ ID NO: 49719 - DNA, 120 bp, synthetic construct
  source 1..120: mol_type = other DNA
caactcgtcaaagtcattctccgtccagctttgttccattgctggtgaggaactgcgatcctttggaggaggagaggtgctctgctttttagagtttccagtttttgtgctctgtttttt

SEQ ID NO: 49720 - DNA, 120 bp, synthetic construct
  source 1..120: mol_type = other DNA
ctgctcttaggaggccatagatctgtgagcccccttttttgtccacaaaagtcgtgtgtgtgtgtgtgtgtgtgtatatgtgtatatacacacatgtgtatgtgtgtgtatatatacaca

SEQ ID NO: 49721 - DNA, 120 bp, synthetic construct; identical to SEQ ID NO: 27457
  source 1..120: mol_type = other DNA

SEQ ID NO: 49722 - DNA, 120 bp, synthetic construct; identical to SEQ ID NO: 16982
  source 1..120: mol_type = other DNA

SEQ ID NO: 49723 - DNA, 120 bp, synthetic construct
  source 1..120: mol_type = other DNA
taaaaaaggatgagttcatgtcctttgtagggacatggatgaagctggaaaccatcattctcagcaaactatctcaaggacagaaaaccaaacaccgcatgttctcactcataggtggga

SEQ ID NO: 49724 - DNA, 120 bp, synthetic construct; identical to SEQ ID NO: 4067
  source 1..120: mol_type = other DNA

SEQ ID NO: 49725 - DNA, 120 bp, synthetic construct
  source 1..120: mol_type = other DNA
accacgaggtcaggagatgagaccatgctgcccaacacggtgaaaccccgtctctaataaaaatacaaaaaaaatcagctgggcatggtggcaggcgcctgtagtcccagctactcggga

SEQ ID NO: 49726 - DNA, 120 bp, synthetic construct
  source 1..120: mol_type = other DNA
atgcagccaaaagacacatgaaaaaatgctcaccaccactggccatcagagaaatgcaaatcaaaaccacaatgagataccatctcacaccagttagaatggcaatcattaaaaagtcag

SEQ ID NO: 49727 - DNA, 120 bp, synthetic construct; identical to SEQ ID NO: 16984
  source 1..120: mol_type = other DNA

SEQ ID NO: 49728 - DNA, 120 bp, synthetic construct
  source 1..120: mol_type = other DNA
aaaaacagagcagaaaaactggaaactctaaaaagcagagcacctctcctcctccaaaggatggcagttcctcaccagcaatggaacaaagctggatggggaatgactttgacgagctga

SEQ ID NO: 49729 - DNA, 120 bp, synthetic construct
  source 1..120: mol_type = other DNA
ccagccactgcaaaatcatgccaaaatgtaaagaccatcgagactaggaagaaactgcatcaactaacgagaaaataaccagctaacatcataatgacaggttcaaattcacacataaca

SEQ ID NO: 49730 - DNA, 120 bp, synthetic construct
  source 1..120: mol_type = other DNA
tctttgaaaccaacgagaacaaagacacaacataccagaatctctgggacgcattcaaagcagtgggtagagggaaatttatagcactaaatgcccacaagagaaagcaggaaagatcca

SEQ ID NO: 49731 - DNA, 120 bp, synthetic construct; identical to SEQ ID NO: 16985
  source 1..120: mol_type = other DNA

SEQ ID NO: 49732 - DNA, 120 bp, synthetic construct; identical to SEQ ID NO: 16986
  source 1..120: mol_type = other DNA

SEQ ID NO: 49733 - DNA, 120 bp, synthetic construct; identical to SEQ ID NO: 19829
  source 1..120: mol_type = other DNA

SEQ ID NO: 49734 - DNA, 120 bp, synthetic construct; identical to SEQ ID NO: 19830
  source 1..120: mol_type = other DNA

SEQ ID NO: 49735 - DNA, 120 bp, synthetic construct; identical to SEQ ID NO: 19785
  source 1..120: mol_type = other DNA

SEQ ID NO: 49736 - DNA, 120 bp, synthetic construct
  source 1..120: mol_type = other DNA
accatccgatttctcaatcttttccccacctttcccccttttctattccacaaaactgccattgtcatcatggcccgttctcaatgagctgttgggtacacctcccagacggggtggtgg

SEQ ID NO: 49737 - DNA, 120 bp, synthetic construct; identical to SEQ ID NO: 20466
  source 1..120: mol_type = other DNA

SEQ ID NO: 49738 - DNA, 120 bp, synthetic construct; identical to SEQ ID NO: 20467
  source 1..120: mol_type = other DNA

SEQ ID NO: 49739 - DNA, 120 bp, synthetic construct; identical to SEQ ID NO: 4960
  source 1..120: mol_type = other DNA

SEQ ID NO: 49740 - DNA, 120 bp, synthetic construct
  source 1..120: mol_type = other DNA
gcctgggtgacagagcgagactccatctcaaaaaaaaaaaaaagagagagagagagaagtgtctgttcatatcctttgcccactttttcatggggttgtttgattttttttgttgttgtt

SEQ ID NO: 49741 - DNA, 120 bp, synthetic construct; identical to SEQ ID NO: 33064
  source 1..120: mol_type = other DNA

SEQ ID NO: 49742 - DNA, 120 bp, synthetic construct
  source 1..120: mol_type = other DNA
gattgcggtgagctgagatcacgctactgcactccagcctgggtgacagggcgagactctgtctcaaaaaatagaaaaagaaaaaaatgaaacatactaaaaaacaattcactgtttacc

SEQ ID NO: 49743 - DNA, 120 bp, synthetic construct; identical to SEQ ID NO: 33065
  source 1..120: mol_type = other DNA

SEQ ID NO: 49744 - DNA, 120 bp, synthetic construct; identical to SEQ ID NO: 33066
  source 1..120: mol_type = other DNA

SEQ ID NO: 49745 - DNA, 120 bp, synthetic construct; identical to SEQ ID NO: 33067
  source 1..120: mol_type = other DNA

SEQ ID NO: 49746 - DNA, 120 bp, synthetic construct
  source 1..120: mol_type = other DNA
agcccaccaccacattaaaaatcttcatgtaataatagccaattataataaaaaataaggccagacacagtagctcatgcctgtaatcccagcacattgggaggtcaaggtgggaggatc

SEQ ID NO: 49747 - DNA, 120 bp, synthetic construct; identical to SEQ ID NO: 33068
  source 1..120: mol_type = other DNA

SEQ ID NO: 49748 - DNA, 120 bp, synthetic construct; identical to SEQ ID NO: 33069
  source 1..120: mol_type = other DNA

SEQ ID NO: 49749 - DNA, 120 bp, synthetic construct
  source 1..120: mol_type = other DNA
caggagaatcacttgaacctgggagccgggagacggaggttgcaatgagccaagcttgcgccactgcactccagcctggacagcagagcgagactccatctaaaaaaataaaaataataa

SEQ ID NO: 49750 - DNA, 120 bp, synthetic construct
  source 1..120: mol_type = other DNA
gggaggctcaggcagagaattgcttgaacctgggaggtggaggttgcagttagtcgagatcataccactgcactgcagcctgggtgacagagcgagactccgtctcaaaaaaaaaaaaaa

SEQ ID NO: 49751 - DNA, 120 bp, synthetic construct
  source 1..120: mol_type = other DNA
ccaatatggtgaaaccctgtctctacaaaaatataaaaaaattggccaggcgtggtagtgcgtcgctgtaatctcagctacttgggaggttgaggcagaagaattgctcgaactcaggag

SEQ ID NO: 49752 - DNA, 120 bp, synthetic construct; identical to SEQ ID NO: 59
  source 1..120: mol_type = other DNA

SEQ ID NO: 49753 - DNA, 120 bp, synthetic construct
  source 1..120: mol_type = other DNA
aaggaagaacgctggccaggtgcagtagctcatgcttgtaatcctagcactttgggaggctgaggcaggtagatcaactgaggtcacgagttcgaaactccttcttaaaaaaaaaaaaga

SEQ ID NO: 49754 - DNA, 120 bp, synthetic construct
  source 1..120: mol_type = other DNA
cgctcagctaatttttgtatttttagtagagatgaggtttctccatgttgcccacgctggtctcgaactcctggcctcaagtgatcacccgccttggtctcccaaagtgctgggattaca

SEQ ID NO: 49755 - DNA, 120 bp, synthetic construct
  source 1..120: mol_type = other DNA
ctcctaggtccaagcaataatcccacctcagcctcctgtgtagctaggactacaggcatgcgccaccatgcccagctaatttttatacattgttgtagagatggggtctcactatgttgc

SEQ ID NO: 49756 - DNA, 120 bp, synthetic construct
  source 1..120: mol_type = other DNA
tctcaagaaacagaaggtagagaatgttggggtccccagggaggtcatagtgctggtgtggggaggctttggagaatcagaatgtgacccccatggaaaagtgatagggccaccacgggc

SEQ ID NO: 49757 - DNA, 120 bp, synthetic construct; identical to SEQ ID NO: 7279
  source 1..120: mol_type = other DNA

SEQ ID NO: 49758 - DNA, 120 bp, synthetic construct
  source 1..120: mol_type = other DNA
agagcaggtcaaaactcacatgctgaaaagtagtaggatcacacctgtgaatagccactgtactccagcctgggcaacacagcaagagcctctctcttaaaaaaatgaaaataaactaaa

SEQ ID NO: 49759 - DNA, 120 bp, synthetic construct
  source 1..120: mol_type = other DNA
cactccagcctgggcaacagagtgagactctgtctcaaaaagaaaaaaaactccaaaaatatatattttgtttatatacatacatacatacatacatatatatacacacacagacgtata

SEQ ID NO: 49760 - DNA, 120 bp, synthetic construct; identical to SEQ ID NO: 7280
  source 1..120: mol_type = other DNA

SEQ ID NO: 49761 - DNA, 120 bp, synthetic construct
  source 1..120: mol_type = other DNA
atggtaaaaccccatctctacaaaaaacataaaaattagccaggtgtggtggtgggtacttgtagtcccagctactcggaagactgaggtggaagaatcacttgagtccaggaggcagaa

SEQ ID NO: 49762 - DNA, 120 bp, synthetic construct
  source 1..120: mol_type = other DNA
ccaaagtgctgggattacaggtgtgagccactgtgccgggccaggatctataaatttggaaaggagattttatatcttataaagggttatagcctgcatggtggccatgctgacaggctg

SEQ ID NO: 49763 - DNA, 120 bp, synthetic construct
  source 1..120: mol_type = other DNA
ccttagcctcctgagtagctgagattataggcacatgccaccatacctggctactttattttattgtactttatttttctagagatgaggtcttgctatgttgcccaggctggtctcaaa

SEQ ID NO: 49764 - DNA, 120 bp, synthetic construct
  source 1..120: mol_type = other DNA
aacaattcaattcctcagtgcttgccatatttctttttttcttttcttttcttttctttttttttttttttttgagacagggtcttgctgtgttgcccaggctggagtgcagtggtgtaa

SEQ ID NO: 49765 - DNA, 120 bp, synthetic construct; identical to SEQ ID NO: 7277
  source 1..120: mol_type = other DNA

SEQ ID NO: 49766 - DNA, 120 bp, synthetic construct; identical to SEQ ID NO: 7278
  source 1..120: mol_type = other DNA

SEQ ID NO: 49767 - DNA, 120 bp, synthetic construct
  source 1..120: mol_type = other DNA
gacagtttctaacttaatgattattttgctaaagagtagcaatgttactatgaaaatggaaactacttggccaggtgtggaggctcacacttgtaatcccagcactttgggaggccaagg

SEQ ID NO: 49768 - DNA, 120 bp, synthetic construct; identical to SEQ ID NO: 10060
  source 1..120: mol_type = other DNA

SEQ ID NO: 49769 - DNA, 120 bp, synthetic construct; identical to SEQ ID NO: 10061
  source 1..120: mol_type = other DNA

SEQ ID NO: 49770 - DNA, 120 bp, synthetic construct; identical to SEQ ID NO: 10062
  source 1..120: mol_type = other DNA

SEQ ID NO: 49771 - DNA, 120 bp, synthetic construct; identical to SEQ ID NO: 10063
  source 1..120: mol_type = other DNA

SEQ ID NO: 49772 - DNA, 120 bp, synthetic construct; identical to SEQ ID NO: 10064
  source 1..120: mol_type = other DNA

SEQ ID NO: 49773 - DNA, 120 bp, synthetic construct
  source 1..120: mol_type = other DNA
gttcctagaaagcaagccagtttctgggacagacttaacgctagacatgccctgcagatacactgagaccaagacaagggcgaaggggaaaattcatatgggaattatattttaaataaa

SEQ ID NO: 49774 - DNA, 120 bp, synthetic construct; identical to SEQ ID NO: 18966
  source 1..120: mol_type = other DNA

SEQ ID NO: 49775 - DNA, 120 bp, synthetic construct; identical to SEQ ID NO: 18967
  source 1..120: mol_type = other DNA

SEQ ID NO: 49776 - DNA, 120 bp, synthetic construct; identical to SEQ ID NO: 18968
  source 1..120: mol_type = other DNA

SEQ ID NO: 49777 - DNA, 120 bp, synthetic construct; identical to SEQ ID NO: 18969
  source 1..120: mol_type = other DNA

SEQ ID NO: 49778 - DNA, 120 bp, synthetic construct; identical to SEQ ID NO: 18970
  source 1..120: mol_type = other DNA

SEQ ID NO: 49779 - DNA, 120 bp, synthetic construct
  source 1..120: mol_type = other DNA
atcaaactcttcgtgggccagatcccgcggcacctggacgagaaggacctcaagccgctcttcgagcagttcggccgcatctacgagctcacggtgctcaaagacccctacacggggatg

SEQ ID NO: 49780 - DNA, 120 bp, synthetic construct
  source 1..120: mol_type = other DNA
tcaagctgagcgcgcccctctctgtgcctcgttttcccctgctgcatattctctcctttatttaacagactttcataaggccccggagcctcacacctgtgactgtgacatcgtttctgc

SEQ ID NO: 49781 - DNA, 120 bp, synthetic construct; identical to SEQ ID NO: 19409
  source 1..120: mol_type = other DNA

SEQ ID NO: 49782 - DNA, 120 bp, synthetic construct; identical to SEQ ID NO: 23923
  source 1..120: mol_type = other DNA

SEQ ID NO: 49783 - DNA, 120 bp, synthetic construct; identical to SEQ ID NO: 23924
  source 1..120: mol_type = other DNA

SEQ ID NO: 49784 - DNA, 120 bp, synthetic construct; identical to SEQ ID NO: 5015
  source 1..120: mol_type = other DNA

SEQ ID NO: 49785 - DNA, 120 bp, synthetic construct; identical to SEQ ID NO: 23926
  source 1..120: mol_type = other DNA

SEQ ID NO: 49786 - DNA, 120 bp, synthetic construct; identical to SEQ ID NO: 23927
  source 1..120: mol_type = other DNA

SEQ ID NO: 49787 - DNA, 120 bp, synthetic construct
  source 1..120: mol_type = other DNA
ttccatgctgagcccctcactcccatctgccacatcccaacttcagttcttgtacaagagtggcagggctctctgtgtttgttttgttgttgtttgtttgtttgtttgttttgagatgga

SEQ ID NO: 49788 - DNA, 120 bp, synthetic construct
  source 1..120: mol_type = other DNA
taatcctaacatcaatctccttcgagaccacgggccacggtgaaattactttttacttaagtagtctgggttggattttgaaccaacctgcagcttaagccttcagatacacacatctaa

SEQ ID NO: 49789 - DNA, 120 bp, synthetic construct
  source 1..120: mol_type = other DNA
agctccaaattcttcccatggcacctttggctcagatctggagagatggaagagctgacgctaatatcacatatcctgctattgcatgattaagagatgacttacaagtaacaaattgga

SEQ ID NO: 49790 - DNA, 120 bp, synthetic construct
  source 1..120: mol_type = other DNA
cagctgtggtcagcagccactcagggctggcatccatcctattgtctcactgaaactcatgacagtgggaggtgaaggtgacccccagatagtccccagagccagtgctacatgggaagc

SEQ ID NO: 49791 - DNA, 120 bp, synthetic construct; identical to SEQ ID NO: 24288
  source 1..120: mol_type = other DNA

SEQ ID NO: 49792 - DNA, 120 bp, synthetic construct; identical to SEQ ID NO: 24289
  source 1..120: mol_type = other DNA

SEQ ID NO: 49793 - DNA, 120 bp, synthetic construct
  source 1..120: mol_type = other DNA
tataagtttttgaattaaagaataagttttgaatgaaaccttactttgttaatttgccaagaggaaggaaggaaggaaggaagggggagggaaggagggaggaaggggaaagggaagggg

SEQ ID NO: 49794 - DNA, 120 bp, synthetic construct
  source 1..120: mol_type = other DNA
tctcctgcctcagcctcctgagtagctggtattacaggcatgcgccaccatgccttgataattttttttttaatggtgaaaagatatacatatatttagaattagccaactggactcagt

SEQ ID NO: 49795 - DNA, 120 bp, synthetic construct
  source 1..120: mol_type = other DNA
aaatgatctacccaccttggcttcccaaagtgctgggattacaggcgtgagccactgcacccggccaataattagaaatatttctctctcttttttttttttttttttgggagacagagt

SEQ ID NO: 49796 - DNA, 120 bp, synthetic construct
  source 1..120: mol_type = other DNA
aagcagtccttccactttggcatcccaaagtgttgagattacaggcatgagccactgtgcccagcctaatttttacttttgaaccttgtaaattgtcaaacatacacacacaaggcaatt

SEQ ID NO: 49797 - DNA, 120 bp, synthetic construct
  source 1..120: mol_type = other DNA
tacaggtgtcgggctgggagacagtcaggtctttctcatcccacgaggccatatttcagactatcacatggagagaaaccttggacaataccccgctttcaagggcagaggtccctgcgg

SEQ ID NO: 49798 - DNA, 120 bp, synthetic construct
  source 1..120: mol_type = other DNA
acctcatcaccatcctcctcatcatcatcgtcgtcttcatcttcatcatcctcttcctcatcgtcctcttcctcactgtctgaatcagagtcctccccaccttccaggaaatgcagagta

SEQ ID NO: 49799 - DNA, 120 bp, synthetic construct
  source 1..120: mol_type = other DNA
agaaaatccttcacagcagttctgtttattctcctgtaaaaaagtatgtatgagtatataagtacatatactcgtatatatacttctatagacttataagtataatacttctaattatat

SEQ ID NO: 49800 - DNA, 120 bp, synthetic construct
  source 1..120: mol_type = other DNA
ctgaaatgtttatattcaatgagaagccattgcagggctttatgcaagggagtaatagaaccctgccttgctagattggggaagttctcctggataatatcctgcagagtgttttcctac

SEQ ID NO: 49801 - DNA, 120 bp, synthetic construct
  source 1..120: mol_type = other DNA
aaagaaggccattacataatggtaaagggatcaattcaacaagaagagctaactatcctaaatatatatgcacccaatacaggagcacccagattcataaagcaagtcctcagagaccta

SEQ ID NO: 49802 - DNA, 120 bp, synthetic construct
  source 1..120: mol_type = other DNA
aaaagagagaagaatcaaatagacccaataaaaaatgataaaggggatatcatcaccgatcccacagaaatacaaactaccatcagagaatactataaacacctctatgcaaataaacta

SEQ ID NO: 49803 - DNA, 120 bp, synthetic construct; identical to SEQ ID NO: 9347
  source 1..120: mol_type = other DNA

SEQ ID NO: 49804 - DNA, 120 bp, synthetic construct
  source 1..120: mol_type = other DNA
aacaaatacattattacaaatattttacatagcatatacatagtattaggtattataagtaatctagagatgatttaaagtgtgtgggaggatgtgcataggttatgtgcaaacactata

SEQ ID NO: 49805 - DNA, 120 bp, synthetic construct; identical to SEQ ID NO: 2953
  source 1..120: mol_type = other DNA

SEQ ID NO: 49806 - DNA, 120 bp, synthetic construct
  source 1..120: mol_type = other DNA
ggctcaagtgatccgcttgcctcggcctcccaaagtgttaggattataggcatgagccactgtgcctaactattgccttattgtatattagtagttaaaggtacatttttgttttgaaca

SEQ ID NO: 49807 - DNA, 120 bp, synthetic construct; identical to SEQ ID NO: 6687
  source 1..120: mol_type = other DNA

SEQ ID NO: 49808 - DNA, 120 bp, synthetic construct; identical to SEQ ID NO: 34945
  source 1..120: mol_type = other DNA

SEQ ID NO: 49809 - DNA, 120 bp, synthetic construct
  source 1..120: mol_type = other DNA
tgcccttctcggcctcccaaagtgctgggattacaggcatgaaccaccacgcctggccaagatttttgttttctaaatgtaacattgtatatacctaccgtgtacccacaaaaattaaaa

SEQ ID NO: 49810 - DNA, 120 bp, synthetic construct; identical to SEQ ID NO: 34946
  source 1..120: mol_type = other DNA

SEQ ID NO: 49811 - DNA, 120 bp, synthetic construct
  source 1..120: mol_type = other DNA
aatccagcagcacatcaaaaagcttatccaccatgaccaagtcagcttcgttcctaggatgcgaggctggttcaacatacgcaaatcaataaatgtaattcatcacataaacagaaacaa

SEQ ID NO: 49812 - DNA, 120 bp, synthetic construct
  source 1..120: mol_type = other DNA
ggtttttgtcaggtttgtcaaagatcatatggttgtagatgtgtggtgttatttctgaggcctctgttctgttccattggtctatatctctgttttggtaccagtaccatgctgttttgg

SEQ ID NO: 49813 - DNA, 120 bp, synthetic construct
  source 1..120: mol_type = other DNA
tgctctaggcccgggcacagatgttctagacacgtccgctggaagaacacgatgctgcccagtgtctgtctcaaaaaagaaagaaaaagaaagaaaaagaaagaaaaagaaagaaaaaga

SEQ ID NO: 49814 - DNA, 120 bp, synthetic construct; identical to SEQ ID NO: 20388
  source 1..120: mol_type = other DNA

SEQ ID NO: 49815 - DNA, 120 bp, synthetic construct
  source 1..120: mol_type = other DNA
caatggtggaactagtttacagtcccaccaacagtgtaaaagtgttcctatttctccacagcctctccagcacctgttgtttcctgactttttaatgatcgccattctaactggtatgag

SEQ ID NO: 49816 - DNA, 120 bp, synthetic construct
  source 1..120: mol_type = other DNA
acaatattgattcttcctatccatgagcatggaatgttctcccatttgtttgtgtcctcttttatttcgttgattagtggtttgtagttctccttgaagaggtccttcacatcccttgta

SEQ ID NO: 49817 - DNA, 120 bp, synthetic construct
  source 1..120: mol_type = other DNA
agagcctgttattggtctattcagaggttcaacttcttcctggtttagtcttgggagaatgtatgtgtccaggaatttatccatttcttctagattttctagtttatttgcgtagaggtg

SEQ ID NO: 49818 - DNA, 120 bp, synthetic construct
  source 1..120: mol_type = other DNA
gctctgcaccaagcggacctaatagacatctacagaactctccaccccaaatcaacagaatatacatttttttcagcaccacaccacacctattccaaaattgaccacatagttggaagt

SEQ ID NO: 49819 - DNA, 120 bp, synthetic construct
  source 1..120: mol_type = other DNA
attggatgcttcctgaggcctccccagaagcagactctgccatgcttcctatacagcctgcagaactatgagccaattaaacattgtttataaattacccagtgtcaggtatttctttat

SEQ ID NO: 49820 - DNA, 120 bp, synthetic construct
  source 1..120: mol_type = other DNA
tcatgtgttttttggctgcatacatgtcttcttttgagaagtgtctgttcatgtcgttcgcccactttttgatggggttgtttgtttttttcttgtaaatttgtttgagttcattgtaga

SEQ ID NO: 49821 - DNA, 120 bp, synthetic construct; identical to SEQ ID NO: 49609
  source 1..120: mol_type = other DNA

SEQ ID NO: 49822 - DNA, 120 bp, synthetic construct
  source 1..120: mol_type = other DNA
ttctgtgggatcggtggtgatatcccctttatcattttttattgcgtctatttgaatcttctctcttttcttctttattagtcttgctaggggtctatcaattttgttgatcctttcaaa

SEQ ID NO: 49823 - DNA, 120 bp, synthetic construct; identical to SEQ ID NO: 32757
  source 1..120: mol_type = other DNA

SEQ ID NO: 49824 - DNA, 120 bp, synthetic construct
  source 1..120: mol_type = other DNA
caaatactatttattcctcctgtctaactaaaacattgtaccctttgactaatatctccccatttccccatcactagcctctggtaaccactattctactgcaacctccactgccacccc

SEQ ID NO: 49825 - DNA, 120 bp, synthetic construct
  source 1..120: mol_type = other DNA
gatgaagcccacttgatcatggtggataagctttttgatgtgctgctggatacggtttgccagtattttattgaggatttttgcatcaatgttcatcagggatattggtctaaaatgctc

SEQ ID NO: 49826 - DNA, 120 bp, synthetic construct
  source 1..120: mol_type = other DNA
ttcttaatcctgagttctagtttgattgcactgtggtctgagagacagtttgttataatttctgttcttttacatttgcttaggagtgctttacttccaactatgtggtcaattttggag

SEQ ID NO: 49827 - DNA, 120 bp, synthetic construct; identical to SEQ ID NO: 32758
  source 1..120: mol_type = other DNA

SEQ ID NO: 49828 - DNA, 120 bp, synthetic construct
  source 1..120: mol_type = other DNA
atagtcctttgggtatatacccagtaatgcgatggctgggtctaatggtatttctagttctagatccctgaggaattgccacactgacttccacaatggttgaactagtttacagtccca

SEQ ID NO: 49829 - DNA, 120 bp, synthetic construct
  source 1..120: mol_type = other DNA
tggcattgaatctataaattaccttgggcagtatggccattttcacgatattgattcttcctacccatgagcatggaatgttcttccatttgtttgtatcctcttttatttcgttgagca

SEQ ID NO: 49830 - DNA, 120 bp, synthetic construct
  source 1..120: mol_type = other DNA
cccggctttggtatcaggatgatgctagcctcataaaaagagttagggaggattccctctttttctgttgattggaatagtttcagaaggaatggtaccagttcctccttgtagctctgg

SEQ ID NO: 49831 - DNA, 120 bp, synthetic construct; identical to SEQ ID NO: 32759
  source 1..120: mol_type = other DNA

SEQ ID NO: 49832 - DNA, 120 bp, synthetic construct
  source 1..120: mol_type = other DNA
catgctaaaaactctaaataaattaggtattgaggggatgtatctgaaaataataagagctttttatgacaaatccacagccaatgtcatactgaatgggcaaaaactggaagcattccc

SEQ ID NO: 49833 - DNA, 120 bp, synthetic construct
  source 1..120: mol_type = other DNA
gagccctcagaaataataccacacatctacaaccatctgatctttgacaaacctgacaaaaacaagcaatggggaaaggattcctatttaataaatggtgctgggaaaactggctagcca

SEQ ID NO: 49834 - DNA, 120 bp, synthetic construct
  source 1..120: mol_type = other DNA
accatttgatctagccatcccattactgggtatatactcaaaggattataagtcatgctactataaagacacatgaacatgtgtgtttactgcggcactattcacaatagcaaagacttg

SEQ ID NO: 49835 - DNA, 120 bp, synthetic construct; identical to SEQ ID NO: 27807
  source 1..120: mol_type = other DNA

SEQ ID NO: 49836 - DNA, 120 bp, synthetic construct; identical to SEQ ID NO: 27808
  source 1..120: mol_type = other DNA

SEQ ID NO: 49837 - DNA, 120 bp, synthetic construct; identical to SEQ ID NO: 26006
  source 1..120: mol_type = other DNA

SEQ ID NO: 49838 - DNA, 120 bp, synthetic construct; identical to SEQ ID NO: 33895
  source 1..120: mol_type = other DNA

SEQ ID NO: 49839 - DNA, 120 bp, synthetic construct
  source 1..120: mol_type = other DNA
caactaggtgtgctcgtagctgccagagtctagtggttcctaggccctctctgctgaagcagaaaggaaatacgtatgtatgtatactaacccacgtatgtacacatttctataaatatt

SEQ ID NO: 49840 - DNA, 120 bp, synthetic construct; identical to SEQ ID NO: 33896
  source 1..120: mol_type = other DNA

SEQ ID NO: 49841 - DNA, 120 bp, synthetic construct
  source 1..120: mol_type = other DNA
gagaatcgtttgaacccgggaggcagaggttgcagtgaacggagattgcgccattgcactccaacctaggtgacagagcgagactcttcctcaagaaacaaaacaaacaaacagaaaata

SEQ ID NO: 49842 - DNA, 120 bp, synthetic construct; identical to SEQ ID NO: 33891
  source 1..120: mol_type = other DNA

SEQ ID NO: 49843 - DNA, 120 bp, synthetic construct
  source 1..120: mol_type = other DNA
ttggcgcggagggcagcaggtctctggggcccgccttccggacccgccgccagcggcgcttccgtcgccacctacccagccacctcttggccgccgcgtggctcccgaccccgacttgga

SEQ ID NO: 49844 - DNA, 120 bp, synthetic construct; identical to SEQ ID NO: 33897
  source 1..120: mol_type = other DNA

SEQ ID NO: 49845 - DNA, 120 bp, synthetic construct; identical to SEQ ID NO: 33898
  source 1..120: mol_type = other DNA

SEQ ID NO: 49846 - DNA, 120 bp, synthetic construct; identical to SEQ ID NO: 33899
  source 1..120: mol_type = other DNA

SEQ ID NO: 49847 - DNA, 120 bp, synthetic construct; identical to SEQ ID NO: 33888
  source 1..120: mol_type = other DNA

SEQ ID NO: 49848 - DNA, 120 bp, synthetic construct; identical to SEQ ID NO: 33887
  source 1..120: mol_type = other DNA

SEQ ID NO: 49849 - DNA, 120 bp, synthetic construct; identical to SEQ ID NO: 33886
  source 1..120: mol_type = other DNA

SEQ ID NO: 49850 - DNA, 120 bp, synthetic construct; identical to SEQ ID NO: 33886
  source 1..120: mol_type = other DNA

SEQ ID NO: 49851 - DNA, 120 bp, synthetic construct; identical to SEQ ID NO: 33887
  source 1..120: mol_type = other DNA

SEQ ID NO: 49852 - DNA, 120 bp, synthetic construct; identical to SEQ ID NO: 33888
  source 1..120: mol_type = other DNA

SEQ ID NO: 49853 - DNA, 120 bp, synthetic construct; identical to SEQ ID NO: 33889
  source 1..120: mol_type = other DNA

SEQ ID NO: 49854 - DNA, 120 bp, synthetic construct; identical to SEQ ID NO: 33890
  source 1..120: mol_type = other DNA

SEQ ID NO: 49855 - DNA, 120 bp, synthetic construct
  source 1..120: mol_type = other DNA
tacatacctcattactctttatttcctgtaacagcgaaagctgttactatttcgcttgttgtttgggaagtgtctctgggtaaggagatggggatacaggaatgagaaagacatctgtgc

SEQ ID NO: 49856 - DNA, 120 bp, synthetic construct
  source 1..120: mol_type = other DNA
gtcgtggattgcagctgcaggctgtgcaggaagaagcagcaccgccacttcctcgtcccggcctcgcgcttcacgctgctccagggcgcagaaagcatcgtcacctatcggtccaacacg

SEQ ID NO: 49857 - DNA, 120 bp, synthetic construct; identical to SEQ ID NO: 33891
  source 1..120: mol_type = other DNA

SEQ ID NO: 49858 - DNA, 120 bp, synthetic construct; identical to SEQ ID NO: 33892
  source 1..120: mol_type = other DNA

SEQ ID NO: 49859 - DNA, 120 bp, synthetic construct; identical to SEQ ID NO: 33896
  source 1..120: mol_type = other DNA

SEQ ID NO: 49860 - DNA, 120 bp, synthetic construct; identical to SEQ ID NO: 33893
  source 1..120: mol_type = other DNA

SEQ ID NO: 49861 - DNA, 120 bp, synthetic construct; identical to SEQ ID NO: 33894
  source 1..120: mol_type = other DNA

SEQ ID NO: 49862 - DNA, 120 bp, synthetic construct; identical to SEQ ID NO: 33885
  source 1..120: mol_type = other DNA

SEQ ID NO: 49863 - DNA, 120 bp, synthetic construct; identical to SEQ ID NO: 49856
  source 1..120: mol_type = other DNA

SEQ ID NO: 49864 - DNA, 120 bp, synthetic construct; identical to SEQ ID NO: 6988
  source 1..120: mol_type = other DNA

SEQ ID NO: 49865 - DNA, 120 bp, synthetic construct; identical to SEQ ID NO: 6989
  source 1..120: mol_type = other DNA

SEQ ID NO: 49866 - DNA, 120 bp, synthetic construct; identical to SEQ ID NO: 18456
  source 1..120: mol_type = other DNA

SEQ ID NO: 49867 - DNA, 120 bp, synthetic construct
  source 1..120: mol_type = other DNA
cttgatgtctattttaaatctaaatatggccacttctgttctctttttttttttaccatttgtgtgcaatagcttcttccatcccttcactttcagcctatgtatatccttaaggctaat

SEQ ID NO: 49868 - DNA, 120 bp, synthetic construct
  source 1..120: mol_type = other DNA
aaatgatttttttctacaatattcatgacgagaacctggtcaagctcctgggggcaaaactcacaaaagcccaacactgctatggctgcttgcaagccatgttagacccaataccaagag

SEQ ID NO: 49869 - DNA, 120 bp, synthetic construct
  source 1..120: mol_type = other DNA
cattttacgtaagccttgtggtaaccacaaagcaaaacactatagcagatacacaaaaaaataaagaaaaaagaataaacacctaacactatagaagatcaccaaatcatgaaggcaaat

SEQ ID NO: 49870 - DNA, 120 bp, synthetic construct; identical to SEQ ID NO: 18457
  source 1..120: mol_type = other DNA

SEQ ID NO: 49871 - DNA, 120 bp, synthetic construct
  source 1..120: mol_type = other DNA
taatctataaccttacccccaaccccgtgctctctgaaacatgtgctgtgtccactaagggttaaatggattaagggtggtgcaagatgtgctttgttaaatagatgcttgaaggcagca

SEQ ID NO: 49872 - DNA, 120 bp, synthetic construct; identical to SEQ ID NO: 18458
  source 1..120: mol_type = other DNA

SEQ ID NO: 49873 - DNA, 120 bp, synthetic construct; identical to SEQ ID NO: 18459
  source 1..120: mol_type = other DNA

SEQ ID NO: 49874 - DNA, 120 bp, synthetic construct
  source 1..120: mol_type = other DNA
aagatgtgctttgttaaacagatgcttgaaggcagcatgctccctaagagtcatcaccactccctaatctcaagtacccagggacacaaacactgcgaaagcccgcagggtcctctgcct

SEQ ID NO: 49875 - DNA, 120 bp, synthetic construct; identical to SEQ ID NO: 18460
  source 1..120: mol_type = other DNA

SEQ ID NO: 49876 - DNA, 120 bp, synthetic construct; identical to SEQ ID NO: 18461
  source 1..120: mol_type = other DNA

SEQ ID NO: 49877 - DNA, 120 bp, synthetic construct; identical to SEQ ID NO: 18462
  source 1..120: mol_type = other DNA

SEQ ID NO: 49878 - DNA, 120 bp, synthetic construct; identical to SEQ ID NO: 18463
  source 1..120: mol_type = other DNA

SEQ ID NO: 49879 - DNA, 120 bp, synthetic construct; identical to SEQ ID NO: 18464
  source 1..120: mol_type = other DNA

SEQ ID NO: 49880 - DNA, 120 bp, synthetic construct
  source 1..120: mol_type = other DNA
actttttaatgatcgccattctaactggtgtgagatagtatctcattgtggctttgatttgcgtttctctgatggccagtgatgatgagcattttttcatgtgttttttgactgcataaa

SEQ ID NO: 49881 - DNA, 120 bp, synthetic construct
  source 1..120: mol_type = other DNA
caggaaaagaatttattttgttaatctgttctaccagtaaactttagaaaagtttaccggcaattatctggccgggcgtggtgactcacacctgtaatcctagcactttgggaggctgag

SEQ ID NO: 49882 - DNA, 120 bp, synthetic construct; identical to SEQ ID NO: 14543
  source 1..120: mol_type = other DNA

SEQ ID NO: 49883 - DNA, 120 bp, synthetic construct
  source 1..120: mol_type = other DNA
atgaaattggaaatcatcattctcagtaaactgtcgcaaggacaaaaaaccaaacactgcatgttctcactcataggtgggaattgaacaatgagaacacatggacacaggaaggggaac

SEQ ID NO: 49884 - DNA, 120 bp, synthetic construct
  source 1..120: mol_type = other DNA
atatattatcatttcttgcctcagtaaaactattgtttcattagagttgatgagcatttttaaaatgcactaaagcaggccgggcgcggtggctcacgcctgtaatcccagcactttggg

SEQ ID NO: 49885 - DNA, 120 bp, synthetic construct; identical to SEQ ID NO: 14545
  source 1..120: mol_type = other DNA

SEQ ID NO: 49886 - DNA, 120 bp, synthetic construct; identical to SEQ ID NO: 14546
  source 1..120: mol_type = other DNA

SEQ ID NO: 49887 - DNA, 120 bp, synthetic construct
  source 1..120: mol_type = other DNA
aggaattcgaggctgtagtgagccgagatcatgctgctgcactcctgggcaacagagtgaccccatctcaaaaaaaaacaacaacaacaacaacaacaacaacaaaaaacatgaattgaa

SEQ ID NO: 49888 - DNA, 120 bp, synthetic construct
  source 1..120: mol_type = other DNA
aaaatgggagaaaattttcgcaacctactcatctgacaaagggctaatatccagaatctacaatgcactcaaacaaatttacaagaaaaaaacaaacaaccccatcaaaaagtgggcgaa

SEQ ID NO: 49889 - DNA, 120 bp, synthetic construct; identical to SEQ ID NO: 14547
  source 1..120: mol_type = other DNA

SEQ ID NO: 49890 - DNA, 120 bp, synthetic construct
  source 1..120: mol_type = other DNA
agatcacaccactgcactctggcttgggcgacagagcgagacttcgtctcaaaaacaaaaacaaacaaacaaaaaaacaccagaagaaatagcttgaaaagatgctgctcctcaggggca

SEQ ID NO: 49891 - DNA, 120 bp, synthetic construct
  source 1..120: mol_type = other DNA
agtcacaccgatcacagtttctggggacaagggccttatttgttttttcttttcttttttttttttttatgttagtagagatagggtttcggctatgttgcccaggctggtctcgagctc

SEQ ID NO: 49892 - DNA, 120 bp, synthetic construct; identical to SEQ ID NO: 18625
  source 1..120: mol_type = other DNA

SEQ ID NO: 49893 - DNA, 120 bp, synthetic construct; identical to SEQ ID NO: 18626
  source 1..120: mol_type = other DNA

SEQ ID NO: 49894 - DNA, 120 bp, synthetic construct
  source 1..120: mol_type = other DNA
tgaaaccccgtctctactaaaaatacaaaaattagctgggcatagtggcgggtgcctgtagtcccagctactcagcaggctgaggtaggggaattgcttaaacctgagaggcggaggttg

SEQ ID NO: 49895 - DNA, 120 bp, synthetic construct; identical to SEQ ID NO: 9635
  source 1..120: mol_type = other DNA

SEQ ID NO: 49896 - DNA, 120 bp, synthetic construct; identical to SEQ ID NO: 9636
  source 1..120: mol_type = other DNA

SEQ ID NO: 49897 - DNA, 120 bp, synthetic construct; identical to SEQ ID NO: 9637
  source 1..120: mol_type = other DNA

SEQ ID NO: 49898 - DNA, 120 bp, synthetic construct; identical to SEQ ID NO: 9638
  source 1..120: mol_type = other DNA

SEQ ID NO: 49899 - DNA, 120 bp, synthetic construct; identical to SEQ ID NO: 9639
  source 1..120: mol_type = other DNA

SEQ ID NO: 49900 - DNA, 120 bp, synthetic construct; identical to SEQ ID NO: 9640
  source 1..120: mol_type = other DNA

SEQ ID NO: 49901 - DNA, 120 bp, synthetic construct; identical to SEQ ID NO: 9641
  source 1..120: mol_type = other DNA

SEQ ID NO: 49902 - DNA, 120 bp, synthetic construct; identical to SEQ ID NO: 9642
  source 1..120: mol_type = other DNA

SEQ ID NO: 49903 - DNA, 120 bp, synthetic construct
  source 1..120: mol_type = other DNA
gctgagatcacgccactgcattccagcctgggcgaaaaagtgagaccctgtttcaaaaaaaaaaaaaaaaagatttaataatgttgttaaacagtacaacaatgcaaagagttagaaaaa

SEQ ID NO: 49904 - DNA, 120 bp, synthetic construct; identical to SEQ ID NO: 9643
  source 1..120: mol_type = other DNA

SEQ ID NO: 49905 - DNA, 120 bp, synthetic construct
  source 1..120: mol_type = other DNA
aattaccaactatctagactgttgcttactgtcatcccacctgctggaaggctcaacagtatttcttttttgtttttttttgagacagagtctcgctttgtcgcccaggccggagtgcag

SEQ ID NO: 49906 - DNA, 120 bp, synthetic construct
  source 1..120: mol_type = other DNA
ccactgcaggggattacaaaatctgtatgacagtctttgcttttgaggaggttacgtctgataaaggagcttataaaaagaagaggctgtcacctgaaagaaccatgcaggaatattctg

SEQ ID NO: 49907 - DNA, 120 bp, synthetic construct; identical to SEQ ID NO: 9646
  source 1..120: mol_type = other DNA

SEQ ID NO: 49908 - DNA, 120 bp, synthetic construct; identical to SEQ ID NO: 9647
  source 1..120: mol_type = other DNA

SEQ ID NO: 49909 - DNA, 120 bp, synthetic construct; identical to SEQ ID NO: 9648
  source 1..120: mol_type = other DNA

SEQ ID NO: 49910 - DNA, 120 bp, synthetic construct; identical to SEQ ID NO: 9649
  source 1..120: mol_type = other DNA

SEQ ID NO: 49911 - DNA, 120 bp, synthetic construct; identical to SEQ ID NO: 9650
  source 1..120: mol_type = other DNA

SEQ ID NO: 49912 - DNA, 120 bp, synthetic construct; identical to SEQ ID NO: 9651
  source 1..120: mol_type = other DNA

SEQ ID NO: 49913 - DNA, 120 bp, synthetic construct
  source 1..120: mol_type = other DNA
tgagccgagatcgcgccactgcactccagcctgagtgacaaagcgagactctgtctccaaaaaaaaaaaaaaaaaatagtagtaataataatagtcaatatagaaaatagttataatgac

SEQ ID NO: 49914 - DNA, 120 bp, synthetic construct; identical to SEQ ID NO: 9652
  source 1..120: mol_type = other DNA

SEQ ID NO: 49915 - DNA, 120 bp, synthetic construct; identical to SEQ ID NO: 9653
  source 1..120: mol_type = other DNA

SEQ ID NO: 49916 - DNA, 120 bp, synthetic construct; identical to SEQ ID NO: 9654
  source 1..120: mol_type = other DNA

SEQ ID NO: 49917 - DNA, 120 bp, synthetic construct; identical to SEQ ID NO: 9655
  source 1..120: mol_type = other DNA

SEQ ID NO: 49918 - DNA, 120 bp, synthetic construct; identical to SEQ ID NO: 9656
  source 1..120: mol_type = other DNA

SEQ ID NO: 49919 - DNA, 120 bp, synthetic construct; identical to SEQ ID NO: 9657
  source 1..120: mol_type = other DNA

SEQ ID NO: 49920 - DNA, 120 bp, synthetic construct; identical to SEQ ID NO: 9658
  source 1..120: mol_type = other DNA

SEQ ID NO: 49921 - DNA, 120 bp, synthetic construct; identical to SEQ ID NO: 9659
  source 1..120: mol_type = other DNA

SEQ ID NO: 49922 - DNA, 120 bp, synthetic construct
  source 1..120: mol_type = other DNA
gaagctagctagctgatgacgacattgttgagatgctgaagtaaacaaccctcatggggttcagttatgtgagccagtaaatttcttccctgtttagtctcaggcagcatttgttattta

SEQ ID NO: 49923 - DNA, 120 bp, synthetic construct
  source 1..120: mol_type = other DNA
atggcttgagtccaggagttcaagactagcctgggcaacacagtgtgatcccatctcaaagaataaattaatttattttaaaaatatgattatattctggggatctaataaaaacgcaaa

SEQ ID NO: 49924 - DNA, 120 bp, synthetic construct; identical to SEQ ID NO: 9662
  source 1..120: mol_type = other DNA

SEQ ID NO: 49925 - DNA, 120 bp, synthetic construct; identical to SEQ ID NO: 9663
  source 1..120: mol_type = other DNA

SEQ ID NO: 49926 - DNA, 120 bp, synthetic construct; identical to SEQ ID NO: 9664
  source 1..120: mol_type = other DNA

SEQ ID NO: 49927 - DNA, 120 bp, synthetic construct; identical to SEQ ID NO: 9607
  source 1..120: mol_type = other DNA

SEQ ID NO: 49928 - DNA, 120 bp, synthetic construct; identical to SEQ ID NO: 9608
  source 1..120: mol_type = other DNA

SEQ ID NO: 49929 - DNA, 120 bp, synthetic construct; identical to SEQ ID NO: 9609
  source 1..120: mol_type = other DNA

SEQ ID NO: 49930 - DNA, 120 bp, synthetic construct; identical to SEQ ID NO: 9610
  source 1..120: mol_type = other DNA

SEQ ID NO: 49931 - DNA, 120 bp, synthetic construct
  source 1..120: mol_type = other DNA
caatatgtactcatttcttgtcaaccaaacaactattatttctattagaatgtaagtttgtttcaggttacaccaccaacataatttaagaactgtcaaatcacacaaataatgctaatt

SEQ ID NO: 49932 - DNA, 120 bp, synthetic construct
  source 1..120: mol_type = other DNA
caaaggagttgggatgataggcgcccgccacaatgcctggctaatttttgtatttttagtaaagacagagtttcgccatattggccaggctggtcttcaactcctgacctcaagtgatcc

SEQ ID NO: 49933 - DNA, 120 bp, synthetic construct
  source 1..120: mol_type = other DNA
tattgaaaacaaaatataaaacaaatgtaaatgatgttatgacctcaaaactttaatatttataatttacaatacagtaatgccctcttatccacagtttctctttccatggttttagtt

SEQ ID NO: 49934 - DNA, 120 bp, synthetic construct
  source 1..120: mol_type = other DNA
aaactaagttaatatttgtgctggtatttcttcaaagatcaacatgccagacttaccttatttaaaaacatgaaactcattaacatcacatcaagtctggaacatttgcttaaggtggca

SEQ ID NO: 49935 - DNA, 120 bp, synthetic construct; identical to SEQ ID NO: 9665
  source 1..120: mol_type = other DNA

SEQ ID NO: 49936 - DNA, 120 bp, synthetic construct; identical to SEQ ID NO: 9666
  source 1..120: mol_type = other DNA

SEQ ID NO: 49937 - DNA, 120 bp, synthetic construct; identical to SEQ ID NO: 9667
  source 1..120: mol_type = other DNA

SEQ ID NO: 49938 - DNA, 120 bp, synthetic construct; identical to SEQ ID NO: 9668
  source 1..120: mol_type = other DNA

SEQ ID NO: 49939 - DNA, 120 bp, synthetic construct
  source 1..120: mol_type = other DNA
agcgattctcctgcctcagcctctggagtagctgggattacagatgcgtgccaccatgactggttatttaaaacatttttttgtatttttagtagagacggggtttcaccacattggtca

SEQ ID NO: 49940 - DNA, 120 bp, synthetic construct
  source 1..120: mol_type = other DNA
tcctctccccagttacattctttgatgctcaaattatatatgcaatagcacttcagtgagactgatgctgaaactacataaatagagagagagagggaaaaaaaaagctgagtccaccaa

SEQ ID NO: 49941 - DNA, 120 bp, synthetic construct; identical to SEQ ID NO: 9616
  source 1..120: mol_type = other DNA

SEQ ID NO: 49942 - DNA, 120 bp, synthetic construct; identical to SEQ ID NO: 9617
  source 1..120: mol_type = other DNA

SEQ ID NO: 49943 - DNA, 120 bp, synthetic construct; identical to SEQ ID NO: 9618
  source 1..120: mol_type = other DNA

SEQ ID NO: 49944 - DNA, 120 bp, synthetic construct; identical to SEQ ID NO: 9619
  source 1..120: mol_type = other DNA

SEQ ID NO: 49945 - DNA, 120 bp, synthetic construct
  source 1..120: mol_type = other DNA
caagaattctaatgaggccgggcgcagtggctcacgcctgtaatcccagcactttgggaggctggggtgggtggatcacgaggtcaggagatcgagaccatcctggccaacatggtgaaa

SEQ ID NO: 49946 - DNA, 120 bp, synthetic construct; identical to SEQ ID NO: 9620
  source 1..120: mol_type = other DNA

SEQ ID NO: 49947 - DNA, 120 bp, synthetic construct
  source 1..120: mol_type = other DNA
gaagaattgtgtatgtcttgccaccaggacgatccttaaggttttcatcaataaggatgatttcatttacagttacatttgatcaatgtggtaacaaaactctacacagattgatgaagt

SEQ ID NO: 49948 - DNA, 120 bp, synthetic construct
  source 1..120: mol_type = other DNA
tttaattggagcattttcatagtcaaactttatagaaactttataccatcatttatcaaattttgggttgcttttcaaaataccatttatattcatgtttcaagtgaagctatggaccaa

SEQ ID NO: 49949 - DNA, 120 bp, synthetic construct
  source 1..120: mol_type = other DNA
ctttaaaagcccttgagtagagctatgcccttaacacacactgtgttaatgactagcattaatacatcacaggggtcttaaacttggggaataatggatagaattcaagcagttcatgaa

SEQ ID NO: 49950 - DNA, 120 bp, synthetic construct
  source 1..120: mol_type = other DNA
ctatttccacagggaaggttttggaatgacagaatattattaaaagtatatatgaaagtttctgcaacttcaaaatccaaaggaaatacaaagtaacttaaaaagaaaaaaaaaaaaaag

SEQ ID NO: 49951 - DNA, 120 bp, synthetic construct
  source 1..120: mol_type = other DNA
agaaacagaataaccaagcttaatgagataaaatacagataagcatcattgtatccaaaactctatttttcattaaggattttttatgcagacgatctgtacaatgaagtttctaatatt

SEQ ID NO: 49952 - DNA, 120 bp, synthetic construct
  source 1..120: mol_type = other DNA
gattcaagtgattctcctgcctcagactaccgagtagccaggattacaggcgtgcaccaccacgcccggctaattttggtatttttagtagcaatgaggtttcaccatgttggccaggat

SEQ ID NO: 49953 - DNA, 120 bp, synthetic construct; identical to SEQ ID NO: 9627
  source 1..120: mol_type = other DNA

SEQ ID NO: 49954 - DNA, 120 bp, synthetic construct
  source 1..120: mol_type = other DNA
ggcgtgatctcggctcactgcaacctccgcttcccaagtttcaacgattctcctgcctcagccacccgagtagctgggattacaggtgcatgccatcacacccggctaatttttgtattt

SEQ ID NO: 49955 - DNA, 120 bp, synthetic construct; identical to SEQ ID NO: 9628
  source 1..120: mol_type = other DNA

SEQ ID NO: 49956 - DNA, 120 bp, synthetic construct
  source 1..120: mol_type = other DNA
caggctgactctcttgttaggggttaatgtagctggtgactttatgttggaagccaatgctcattttccattccaaaagtcatagggcccttaagaattatgctaaatctactctgcttg

SEQ ID NO: 49957 - DNA, 120 bp, synthetic construct
  source 1..120: mol_type = other DNA
cctcggcctcccaaagtgctgggattacaggcgtgaaccaccgtgcctggcccgttttgtcttctaagcagaaaatgtattcctttatttaagaaataacattttgcaagacatagctgt

SEQ ID NO: 49958 - DNA, 120 bp, synthetic construct
  source 1..120: mol_type = other DNA
ctcagcacaggagtcttttaggtgacagtagttcatttaaataaataaaattatttctcatattctacttagtttgtgattcatagccatttgaaaatacattttctcaccctaagcaaa

SEQ ID NO: 49959 - DNA, 120 bp, synthetic construct
  source 1..120: mol_type = other DNA
tggccaacatggtgaaaccccatctctactaaaaatacaaaaattagccaggcgtggtagggcgcgcctgtaatcccagctactcgggaggctaagagaggagaattacgtgaaccctgg

SEQ ID NO: 49960 - DNA, 120 bp, synthetic construct
  source 1..120: mol_type = other DNA
aattctcctgcctcagcctccagagtagctggaattacaggcacctgccaccatgtctggctaatttttgtagttttagtagagacggagtttcaccatgttggccaggctgatctcgaa

SEQ ID NO: 49961 - DNA, 120 bp, synthetic construct; identical to SEQ ID NO: 9632
  source 1..120: mol_type = other DNA

SEQ ID NO: 49962 - DNA, 120 bp, synthetic construct; identical to SEQ ID NO: 9633
  source 1..120: mol_type = other DNA

SEQ ID NO: 49963 - DNA, 120 bp, synthetic construct; identical to SEQ ID NO: 9634
  source 1..120: mol_type = other DNA

SEQ ID NO: 49964 - DNA, 120 bp, synthetic construct; identical to SEQ ID NO: 14680
  source 1..120: mol_type = other DNA

SEQ ID NO: 49965 - DNA, 120 bp, synthetic construct; identical to SEQ ID NO: 14681
  source 1..120: mol_type = other DNA

SEQ ID NO: 49966 - DNA, 120 bp, synthetic construct
  source 1..120: mol_type = other DNA
acgatgaggaggagcctgacccttatggtttcatcgtgcagacggcagagattgcggagattgccaggtgagtagcccattcagagtaaatccactgggtgccagtgcgttttcttgagt

SEQ ID NO: 49967 - DNA, 120 bp, synthetic construct
  source 1..120: mol_type = other DNA
gatgagtgggtagatggatggatggatggatggatgagtgggtgggtggatggatggatggatggatgaatggatgaatgagtgggtgggtgggtggatggatgaatggatgagtgggtg

SEQ ID NO: 49968 - DNA, 120 bp, synthetic construct; identical to SEQ ID NO: 18818
  source 1..120: mol_type = other DNA

SEQ ID NO: 49969 - DNA, 120 bp, synthetic construct
  source 1..120: mol_type = other DNA
ggctgaccccccacctccctcctggatggggcggctggcctggcgggggctgacccccacctccctcccggacagggtggctgccaggcggagacactcctcacttcccagacggggcgg

SEQ ID NO: 49970 - DNA, 120 bp, synthetic construct; identical to SEQ ID NO: 2910
  source 1..120: mol_type = other DNA

SEQ ID NO: 49971 - DNA, 120 bp, synthetic construct
  source 1..120: mol_type = other DNA
cgcctgcctcagcccccaaaagtgctaggattataggcgtgagccactgtgtcctgcctctttcttcttcttaatgaatttattgctataaacacttctcttattctgcttttactgcat

SEQ ID NO: 49972 - DNA, 120 bp, synthetic construct; identical to SEQ ID NO: 25980
  source 1..120: mol_type = other DNA

SEQ ID NO: 49973 - DNA, 120 bp, synthetic construct
  source 1..120: mol_type = other DNA
ggttgccaggcggagggtctcctcacttctcagacggagcggctgggcagagacgctcctcacctcccagacggggtcgcggccgggtagaggtgctcctcacatcccagacggggcggc

SEQ ID NO: 49974 - DNA, 120 bp, synthetic construct; identical to SEQ ID NO: 25981
  source 1..120: mol_type = other DNA

SEQ ID NO: 49975 - DNA, 120 bp, synthetic construct; identical to SEQ ID NO: 25982
  source 1..120: mol_type = other DNA

SEQ ID NO: 49976 - DNA, 120 bp, synthetic construct
  source 1..120: mol_type = other DNA
cccacacgataataatgggagactttaacaccccactgtcaacatgagacagatccacgagacagaaagttaacaaggatatccaggaattgaactcagctctgcaccaagcggacctaa

SEQ ID NO: 49977 - DNA, 120 bp, synthetic construct
  source 1..120: mol_type = other DNA
aagggagtcctccctaactcattttatgaggccagcatcatcctgataccaaagactggcagagacacaacaaaaaaagagaattttagaccaatatccctgatgaacatcgatgcaaaa

SEQ ID NO: 49978 - DNA, 120 bp, synthetic construct
  source 1..120: mol_type = other DNA
aaaatacctagaaatccaacttacaagggatgtgaaggacctcttcaaggacaactacaaaccactgctcaacaaaataaaagaggatacaaacaaatggaagaacattccatgctcatg

SEQ ID NO: 49979 - DNA, 120 bp, synthetic construct
  source 1..120: mol_type = other DNA
caaagggctaatatccagaatctacaaagaacttaaacaaatttaaaagaaaaaaacaaccccatcaaaaagtgggtgaaggatatgaatagacacttctcaaaagaagacatttatgca

SEQ ID NO: 49980 - DNA, 120 bp, synthetic construct; identical to SEQ ID NO: 12282
  source 1..120: mol_type = other DNA

SEQ ID NO: 49981 - DNA, 120 bp, synthetic construct; identical to SEQ ID NO: 12283
  source 1..120: mol_type = other DNA

SEQ ID NO: 49982 - DNA, 120 bp, synthetic construct; identical to SEQ ID NO: 12284
  source 1..120: mol_type = other DNA

SEQ ID NO: 49983 - DNA, 120 bp, synthetic construct
  source 1..120: mol_type = other DNA
aaatacctaggaatccaacttacaagggatgtgaaggacctcttcaaggaggactacaaaccactgcttaacggaattaaagaggatacaaacaaatggaagaacattccatgctcatga

SEQ ID NO: 49984 - DNA, 120 bp, synthetic construct
  source 1..120: mol_type = other DNA
acaatgtaaaagtgttcctatttctccacatcctctccagcacctgttgtttcctgactttttaatgattgccattctaactggtgtgagatgctatctcactgtggttttgatttgcat

SEQ ID NO: 49985 - DNA, 120 bp, synthetic construct
  source 1..120: mol_type = other DNA
tctttgctgttgtgaatagtgccgcaataaacatacgtgtgcatgtgtctttgtagcagcatgatttataatcctttgggtatatacccagtaatgggatggctgggtcaaatggtattt

SEQ ID NO: 49986 - DNA, 120 bp, synthetic construct
  source 1..120: mol_type = other DNA
tccagtttcagctttctacatatggctagccagttttcccagcaccatttattaaatagggaatcctttccccgttgcttgttttttcaggtttgtcaaagatcagatggttgtagatat

SEQ ID NO: 49987 - DNA, 120 bp, synthetic construct; identical to SEQ ID NO: 28203
  source 1..120: mol_type = other DNA

SEQ ID NO: 49988 - DNA, 120 bp, synthetic construct; identical to SEQ ID NO: 24734
  source 1..120: mol_type = other DNA

SEQ ID NO: 49989 - DNA, 120 bp, synthetic construct
  source 1..120: mol_type = other DNA
gatccctgaggaatcgccacactgacttccacaatggttgaactactttatagtcccaccaacagtgtaaaagtgttcctatttctccacatcctctccagcacctgttgtttcctgact

SEQ ID NO: 49990 - DNA, 120 bp, synthetic construct
  source 1..120: mol_type = other DNA
tcaaagagaataaaatacctaggaatccaacttacaagggatgtgaaggacctcttcaaggagaactacaaaccactgctcaaggaaataaaacaggatacaaacaaatggaagaacatc

SEQ ID NO: 49991 - DNA, 120 bp, synthetic construct; identical to SEQ ID NO: 24735
  source 1..120: mol_type = other DNA

SEQ ID NO: 49992 - DNA, 120 bp, synthetic construct
  source 1..120: mol_type = other DNA
aaatccccctctccgagaaaaacccaagaatgatcaataaatactaaaaaaattaaaaaaaaaaaaaaagaactagagaagcaagagcaaacacattcaaaagctagcaaaaggcaagaa

SEQ ID NO: 49993 - DNA, 120 bp, synthetic construct
  source 1..120: mol_type = other DNA
ttatccctgggatgcaaggctggttcaacatacacaaatcaataaatgtaatccggcatataaacagaaccaaagacaaaaaccatataattatctcaatagatgcagaaaaggcctttg

SEQ ID NO: 49994 - DNA, 120 bp, synthetic construct
  source 1..120: mol_type = other DNA
gaaataatgccacatatcaacaaccatctgatctttgacaaacctgacaaaaacaagaaatggggaaaggattccctatttaataaatggtgctgggaaaactggctagccatatgtaga

SEQ ID NO: 49995 - DNA, 120 bp, synthetic construct
  source 1..120: mol_type = other DNA
aaaggcacatgcacacgtatgtttattgtggcactattcacaatagcaaagacttagaaccaacccaaatgtccaacaatgatagactggattaagaaaatgtggcacatatacaccatg

SEQ ID NO: 49996 - DNA, 120 bp, synthetic construct; identical to SEQ ID NO: 26115
  source 1..120: mol_type = other DNA

SEQ ID NO: 49997 - DNA, 120 bp, synthetic construct; identical to SEQ ID NO: 26116
  source 1..120: mol_type = other DNA

SEQ ID NO: 49998 - DNA, 120 bp, synthetic construct
  source 1..120: mol_type = other DNA
ttctgtccagtgctgggatttgacccagtcctggtggggttctgtccagtgccgggatttggcccagtcctggtggggttctgtccagcgccgggatttggcccagtcctggtggggttc

SEQ ID NO: 49999 - DNA, 120 bp, synthetic construct
  source 1..120: mol_type = other DNA
gatttagaccagtcctggtggggttctgtccagtgccgggatttgacccagtcctggtggggttctatccagtgccgggatttggcccagtcctggtggggttctatccagtgccgggat

SEQ ID NO: 50000 - DNA, 120 bp, synthetic construct
  source 1..120: mol_type = other DNA
ctgtccagtgccgggatttagaccagtcctggtggggttctgtccagcgccgggatttggcccagtcctggtggggttctgtccagcgccgggatttggaccagtcctggtggggttctg

SEQ ID NO: 50001 - DNA, 120 bp, synthetic construct
  source 1..120: mol_type = other DNA
ttctgtccagtgccgggatttagaccagtcctggtggggttctgtccagtgctggatttgacccagtcctggtggggtgctgtccagttccgggatttagaccagtcctggtggggttct

SEQ ID NO: 50002 - DNA, 120 bp, synthetic construct; identical to SEQ ID NO: 26117
  source 1..120: mol_type = other DNA

SEQ ID NO: 50003 - DNA, 120 bp, synthetic construct; identical to SEQ ID NO: 26118
  source 1..120: mol_type = other DNA

SEQ ID NO: 50004 - DNA, 120 bp, synthetic construct; identical to SEQ ID NO: 26119
  source 1..120: mol_type = other DNA

SEQ ID NO: 50005 - DNA, 120 bp, synthetic construct; identical to SEQ ID NO: 26120
  source 1..120: mol_type = other DNA

SEQ ID NO: 50006 - DNA, 120 bp, synthetic construct
  source 1..120: mol_type = other DNA
gggactgtgaggtgtgactgaggtgtgactgtgaggtgtggactgtgaggcgtgactgtgaggcgtgactgtgaggcgtggactgtgaggtgtgactgtgaggcgtggactgtgaggcgt

SEQ ID NO: 50007 - DNA, 120 bp, synthetic construct
  source 1..120: mol_type = other DNA
gtgactgtgaggcgtggactgtgaggcgtggactgtgaggcgtggactgtgaggcgtggactgtgaggcgtggactgtgaggtgtggactgtgaggtgtgactgtgaggtgtgactgtga

SEQ ID NO: 50008 - DNA, 120 bp, synthetic construct; identical to SEQ ID NO: 26121
  source 1..120: mol_type = other DNA

SEQ ID NO: 50009 - DNA, 120 bp, synthetic construct; identical to SEQ ID NO: 28248
  source 1..120: mol_type = other DNA

SEQ ID NO: 50010 - DNA, 120 bp, synthetic construct; identical to SEQ ID NO: 28249
  source 1..120: mol_type = other DNA

SEQ ID NO: 50011 - DNA, 120 bp, synthetic construct
  source 1..120: mol_type = other DNA
aaaaaaaagcgggggggggggggggggactctcaaatcagtaatctaatctgctaacaagaacctagaaaaaaagaagagttcaacagacccaaagcagaaaaaaaggaagcaacaaaga

SEQ ID NO: 50012 - DNA, 120 bp, synthetic construct
  source 1..120: mol_type = other DNA
ggtaaccattttttttttaattaaagaaaaacagaaatcaaaatattggtatgaaaagtaatttggggccaggcgtggtggctcacgccttaatcccagcactttgggaggccgaggctg

SEQ ID NO: 50013 - DNA, 120 bp, synthetic construct
  source 1..120: mol_type = other DNA
catttgggttggttccaagtctttgctattgtgaataatgccacaataaacatatgtgtgcatgtgtctttatagcagcatgatttatagcatcacactacctgactttaaactatacta

SEQ ID NO: 50014 - DNA, 120 bp, synthetic construct
  source 1..120: mol_type = other DNA
gggagaaaatttttgcaacctactcacctgacaaagggctaatatccagaatctacaatgaactcaaacaaatttacaagaaaaaaacaaacaaccccatcaaaaagtgggcaaaggaca

SEQ ID NO: 50015 - DNA, 120 bp, synthetic construct
  source 1..120: mol_type = other DNA
tgaagattctaaatgattttgatttagtccacagggatgtttccatggaagaatacttctttttcttttgagatggagtctcactctgttgcccaggctggagtgcagtggcgcaatctc

SEQ ID NO: 50016 - DNA, 120 bp, synthetic construct
  source 1..120: mol_type = other DNA
tgctgcaataaacatacgtgtgcatgtgtctttatagcagcatgatttatagtcctttgggtatatacccagtaatgggttggctgggtcaaatggtatttctagttctagattcctgag

SEQ ID NO: 50017 - DNA, 120 bp, synthetic construct
  source 1..120: mol_type = other DNA
gttttggtaccagtaccatgctgttttggttactgtagccttgtagtatagtttgaagtcaggtagtgtgatgcctccagctttgttccctctttttctattgattggaatagtttcaga

SEQ ID NO: 50018 - DNA, 120 bp, synthetic construct
  source 1..120: mol_type = other DNA
gttaaagtctgttttatcggagactaggattgcaacccctgcctttttttgttttccatttgcttggtagatcttcctccatccttttattttgagcctatgtgtgtctctgcacgtgag

SEQ ID NO: 50019 - DNA, 120 bp, synthetic construct
  source 1..120: mol_type = other DNA
cactaatcagacctagatttggtcttttcacatagtccctatttcttggaggctttgttcgtttctttttattcttttttctgtaaacttcccttctcgcttcatttcattcatttcatc

SEQ ID NO: 50020 - DNA, 120 bp, synthetic construct
  source 1..120: mol_type = other DNA
tgaggatgttcatatgctcactaagaagttccttgcttgcattctcaggggcatttttggcctctcccaactattctgcaagctatagtctgattgctcacaaagtatacataccactaa

SEQ ID NO: 50021 - DNA, 120 bp, synthetic construct
  source 1..120: mol_type = other DNA
cagtaaatactaattgattaaccctcatcagtaagactgacttttctctagaacatcaattcccaaactctttagtctcaggccccactgtgcacccttaaagactgagggccgcaaata

SEQ ID NO: 50022 - DNA, 120 bp, synthetic construct; identical to SEQ ID NO: 21855
  source 1..120: mol_type = other DNA

SEQ ID NO: 50023 - DNA, 120 bp, synthetic construct
  source 1..120: mol_type = other DNA
acctgagatcagaagttcgagaccagcctggccaccatggtgaaaccctgtctctactaaaaaaaaaaaaaaaaaaaaaaatttgccaggtgtagtggcacacacctgtaatcccagcta

SEQ ID NO: 50024 - DNA, 120 bp, synthetic construct; identical to SEQ ID NO: 15683
  source 1..120: mol_type = other DNA

SEQ ID NO: 50025 - DNA, 120 bp, synthetic construct
  source 1..120: mol_type = other DNA
ctcctcaagtaggtccctgacccctgacccctgggcagcctaactgagaggcaccccccagcaagggcacactgacacctcacacagcagggtattccaacagacctgcagctgagggtc

SEQ ID NO: 50026 - DNA, 120 bp, synthetic construct
  source 1..120: mol_type = other DNA
aaaagaattttcaacccagaatttcatatccagccaaactaagcttcataagtgaaggagaaataaaatactatacagacaagcaaatgctgagagattttgtcaccaccaggcctgcct

SEQ ID NO: 50027 - DNA, 120 bp, synthetic construct
  source 1..120: mol_type = other DNA
tctttgaaaccaacgagaacaaagacacaacataccagaatctctgggacgcattcaaagcatgtgtagagggaaatttatagcactaaatgcccacaagagaaagcaggaaagatccaa

SEQ ID NO: 50028 - DNA, 120 bp, synthetic construct
  source 1..120: mol_type = other DNA
gatgccctctctcaccactcctattcaacatagtgttggaagttctggccagggcaattaggcaggagaaggaaataaagggtattcaattaggaaaagaggaagtcaaattgaccatgt

SEQ ID NO: 50029 - DNA, 120 bp, synthetic construct
  source 1..120: mol_type = other DNA
gacctaaaaccataaaaaccctagaagaaaacctaggcattaccattcaggacataggcatgggcaaggacttcatgtctaaaacaccaaaagcaatggcagcaaaagccaaaattgaca

SEQ ID NO: 50030 - DNA, 120 bp, synthetic construct
  source 1..120: mol_type = other DNA
cattgtgcacatgtaccctaaaacttaaagtataataaaaaaaaaatgttaaaaaaaaaagaaaataacagattttggcaatgtgatggagaaaaaggaatgcttataaactactggtgg

SEQ ID NO: 50031 - DNA, 120 bp, synthetic construct
  source 1..120: mol_type = other DNA
aggagcttgctacaagtgccagaaatctggccaccaggccaaggaatgctcgcagcctgggattcctcctaagccgtgtcctgtctatgcgggaccccactgaaaatcagactgttcaac

SEQ ID NO: 50032 - DNA, 120 bp, synthetic construct
  source 1..120: mol_type = other DNA
cagcctcttttcactttcacttggactgaccctgacacccatcaggctcagcaaattacctgggctgtactgccccaaagcttcacagacagcccccattactttagtcaagcccaaatt

SEQ ID NO: 50033 - DNA, 120 bp, synthetic construct; identical to SEQ ID NO: 15684
  source 1..120: mol_type = other DNA

SEQ ID NO: 50034 - DNA, 120 bp, synthetic construct
  source 1..120: mol_type = other DNA
aggttgtagtgagccaagattacaccaatgcactccaggctgcgtgacagagcaagactccatctcaaagaacaaaaaaagaaacattaagagaataaaaaagccacactacagactggg

SEQ ID NO: 50035 - DNA, 120 bp, synthetic construct; identical to SEQ ID NO: 15685
  source 1..120: mol_type = other DNA

SEQ ID NO: 50036 - DNA, 120 bp, synthetic construct; identical to SEQ ID NO: 21772
  source 1..120: mol_type = other DNA

SEQ ID NO: 50037 - DNA, 120 bp, synthetic construct; identical to SEQ ID NO: 26818
  source 1..120: mol_type = other DNA

SEQ ID NO: 50038 - DNA, 120 bp, synthetic construct
  source 1..120: mol_type = other DNA
gctactgcactccagcctgggcaacaagagtgaaacaccgtcataaaagaaagaagaaagaaagaaggaaagaaggaaagaaagaaagaaagagaaagaaagaaagaaggaaagaaggag

SEQ ID NO: 50039 - DNA, 120 bp, synthetic construct; identical to SEQ ID NO: 16477
  source 1..120: mol_type = other DNA

SEQ ID NO: 50040 - DNA, 120 bp, synthetic construct; identical to SEQ ID NO: 16478
  source 1..120: mol_type = other DNA

SEQ ID NO: 50041 - DNA, 120 bp, synthetic construct; identical to SEQ ID NO: 16479
  source 1..120: mol_type = other DNA

SEQ ID NO: 50042 - DNA, 120 bp, synthetic construct; identical to SEQ ID NO: 16480
  source 1..120: mol_type = other DNA

SEQ ID NO: 50043 - DNA, 120 bp, synthetic construct; identical to SEQ ID NO: 16481
  source 1..120: mol_type = other DNA

SEQ ID NO: 50044 - DNA, 120 bp, synthetic construct; identical to SEQ ID NO: 16482
  source 1..120: mol_type = other DNA

SEQ ID NO: 50045 - DNA, 120 bp, synthetic construct; identical to SEQ ID NO: 16483
  source 1..120: mol_type = other DNA

SEQ ID NO: 50046 - DNA, 120 bp, synthetic construct; identical to SEQ ID NO: 16484
  source 1..120: mol_type = other DNA

SEQ ID NO: 50047 - DNA, 120 bp, synthetic construct; identical to SEQ ID NO: 16485
  source 1..120: mol_type = other DNA

SEQ ID NO: 50048 - DNA, 120 bp, synthetic construct; identical to SEQ ID NO: 16486
  source 1..120: mol_type = other DNA

SEQ ID NO: 50049 - DNA, 120 bp, synthetic construct; identical to SEQ ID NO: 16487
  source 1..120: mol_type = other DNA

SEQ ID NO: 50050 - DNA, 120 bp, synthetic construct; identical to SEQ ID NO: 16488
  source 1..120: mol_type = other DNA

SEQ ID NO: 50051 - DNA, 120 bp, synthetic construct; identical to SEQ ID NO: 16489
  source 1..120: mol_type = other DNA

SEQ ID NO: 50052 - DNA, 120 bp, synthetic construct; identical to SEQ ID NO: 16490
  source 1..120: mol_type = other DNA

SEQ ID NO: 50053 - DNA, 120 bp, synthetic construct
  source 1..120: mol_type = other DNA
gacctacctcagccaagggcttgacatcacctttcttcaccagaacagaagtgagggccacgccactctcagaaatggcccggtggaagaggttcttggccaatggagacaaaacctgac

SEQ ID NO: 50054 - DNA, 120 bp, synthetic construct; identical to SEQ ID NO: 16493
  source 1..120: mol_type = other DNA

SEQ ID NO: 50055 - DNA, 120 bp, synthetic construct; identical to SEQ ID NO: 16494
  source 1..120: mol_type = other DNA

SEQ ID NO: 50056 - DNA, 120 bp, synthetic construct; identical to SEQ ID NO: 16495
  source 1..120: mol_type = other DNA

SEQ ID NO: 50057 - DNA, 120 bp, synthetic construct; identical to SEQ ID NO: 16496
  source 1..120: mol_type = other DNA

SEQ ID NO: 50058 - DNA, 120 bp, synthetic construct; identical to SEQ ID NO: 16497
  source 1..120: mol_type = other DNA

SEQ ID NO: 50059 - DNA, 120 bp, synthetic construct; identical to SEQ ID NO: 16517
  source 1..120: mol_type = other DNA

SEQ ID NO: 50060 - DNA, 120 bp, synthetic construct; identical to SEQ ID NO: 16518
  source 1..120: mol_type = other DNA

SEQ ID NO: 50061 - DNA, 120 bp, synthetic construct; identical to SEQ ID NO: 6839
  source 1..120: mol_type = other DNA

SEQ ID NO: 50062 - DNA, 120 bp, synthetic construct; identical to SEQ ID NO: 6840
  source 1..120: mol_type = other DNA

SEQ ID NO: 50063 - DNA, 120 bp, synthetic construct; identical to SEQ ID NO: 6841
  source 1..120: mol_type = other DNA

SEQ ID NO: 50064 - DNA, 120 bp, synthetic construct; identical to SEQ ID NO: 6842
  source 1..120: mol_type = other DNA

SEQ ID NO: 50065 - DNA, 120 bp, synthetic construct; identical to SEQ ID NO: 6843
  source 1..120: mol_type = other DNA

SEQ ID NO: 50066 - DNA, 120 bp, synthetic construct; identical to SEQ ID NO: 6872
  source 1..120: mol_type = other DNA

SEQ ID NO: 50067 - DNA, 120 bp, synthetic construct
  source 1..120: mol_type = other DNA
agggcaaggcaggaggactgcttgagcccaggagttcaagaccagcccggccaacatagcaacactctgttttctatttttttttttttttttttttgagacggagtctcgctctgtcac

SEQ ID NO: 50068 - DNA, 120 bp, synthetic construct; identical to SEQ ID NO: 6873
  source 1..120: mol_type = other DNA

SEQ ID NO: 50069 - DNA, 120 bp, synthetic construct; identical to SEQ ID NO: 5
  source 1..120: mol_type = other DNA

SEQ ID NO: 50070 - DNA, 120 bp, synthetic construct; identical to SEQ ID NO: 6
  source 1..120: mol_type = other DNA

SEQ ID NO: 50071 - DNA, 120 bp, synthetic construct; identical to SEQ ID NO: 6874
  source 1..120: mol_type = other DNA

SEQ ID NO: 50072 - DNA, 120 bp, synthetic construct; identical to SEQ ID NO: 6875
  source 1..120: mol_type = other DNA

SEQ ID NO: 50073 - DNA, 120 bp, synthetic construct; identical to SEQ ID NO: 49531
  source 1..120: mol_type = other DNA

SEQ ID NO: 50074 - DNA, 120 bp, synthetic construct; identical to SEQ ID NO: 49532
  source 1..120: mol_type = other DNA

SEQ ID NO: 50075 - DNA, 120 bp, synthetic construct; identical to SEQ ID NO: 6876
  source 1..120: mol_type = other DNA

SEQ ID NO: 50076 - DNA, 120 bp, synthetic construct; identical to SEQ ID NO: 49534
  source 1..120: mol_type = other DNA

SEQ ID NO: 50077 - DNA, 120 bp, synthetic construct; identical to SEQ ID NO: 49535
  source 1..120: mol_type = other DNA

SEQ ID NO: 50078 - DNA, 120 bp, synthetic construct
  source 1..120: mol_type = other DNA
catgtagtcccatatattccagttttgtcacttggtagtaatgttctaattgagtttaaaagggttactagcgtttgttgaaccagccttgcatcccagggatgaagcccacttgatcat

SEQ ID NO: 50079 - DNA, 120 bp, synthetic construct
  source 1..120: mol_type = other DNA
ctctagttcttttaattgtgatgttacggtgtcaattttagatctttcctgctttcacttgtgggcatttagagctataaatttccctctacacactgctttgaatgcgtcccagagatt

SEQ ID NO: 50080 - DNA, 120 bp, synthetic construct
  source 1..120: mol_type = other DNA
tcatacaaaaattaattcaagatggattaaggacttaaatgttagacctaaaaccataaaaaccctagaagaaaacctaggcattaccattcaggacataggcatgggcaaggacttcat

SEQ ID NO: 50081 - DNA, 120 bp, synthetic construct
  source 1..120: mol_type = other DNA
gtagggacatggatgaagctggaaaccatcattctcagcaaactattgcagggacaaaaaaccaaacacctcatgttctcactcataggtgggaattgaacaatgagatcacatggacac

SEQ ID NO: 50082 - DNA, 120 bp, synthetic construct
  source 1..120: mol_type = other DNA
ttaggaaaacaggaagacaaattgtccctgtttgcagatgacatgattgtatatctagaaaaccccattgtctcagcccaaaatctccttaagctgataagcaacttcagcaaagtctca

SEQ ID NO: 50083 - DNA, 120 bp, synthetic construct
  source 1..120: mol_type = other DNA
aacaggcaacctacaaaatgggagaaaattttcgcaacctgctcatctgacaaagggctaatatccagaatctacaatgaactcaaacaaatttacaagaaaaaaacaaacaaccccatc

SEQ ID NO: 50084 - DNA, 120 bp, synthetic construct; identical to SEQ ID NO: 24365
  source 1..120: mol_type = other DNA

SEQ ID NO: 50085 - DNA, 120 bp, synthetic construct
  source 1..120: mol_type = other DNA
aggtatatctcctaatgctatccctcccccttcccctcacccacaacaggccccagtgtgtgatttttcccttcctgtgtccgtgtgttctcattgttcaattcccacctatgagggaga

SEQ ID NO: 50086 - DNA, 120 bp, synthetic construct
  source 1..120: mol_type = other DNA
ttcttaaataggtaatcctttccccattgcttgtttttcccaggtttatcaaagatcagatggttgtagatatgcggcattatttctgagggctctgttctgttccattgatctatatct

SEQ ID NO: 50087 - DNA, 120 bp, synthetic construct
  source 1..120: mol_type = other DNA
attcttctctgttttcttctttattagtcttgctagtggtctatcaattttgttgatcttctcaaaaaaccagctcctggattcattgatttttttgaagggttttttgtgtctctattt

SEQ ID NO: 50088 - DNA, 120 bp, synthetic construct
  source 1..120: mol_type = other DNA
atctccctccatccttttattttgagcctgtgtgtgtctctgcacatgagatgggtttcctgaatacagcacactgatgggtcttgactctttatccaatttgccagtctgtgtctttta

SEQ ID NO: 50089 - DNA, 120 bp, synthetic construct
  source 1..120: mol_type = other DNA
gctttcttcatttctttttattcttttttctctaaacttttcttgtcgcttcatttcattcatttgatcttccatcactgacaccctttcttccagttgatcgaatcggctactgaggct

SEQ ID NO: 50090 - DNA, 120 bp, synthetic construct
  source 1..120: mol_type = other DNA
tcagcagaaattctacaagccagaaaagagtggggaccaatattcaacattcttaaagaaaagaattttcaacccagaatttcatatccagccaaactaagcttcataagtgaaggagaa

SEQ ID NO: 50091 - DNA, 120 bp, synthetic construct
  source 1..120: mol_type = other DNA
gaccccatactgggaagtaaagctctcctcagcaaatgtaaaagaacagaaattataataaattgtctctcagaccacagtgcaatcaaactagaactcaggattaagaaactcacttaa

SEQ ID NO: 50092 - DNA, 120 bp, synthetic construct
  source 1..120: mol_type = other DNA
aaaatactggcaaaccaaatccagcagcatatcaaaaagcttatccaccatgatcaagtgggcttcatccctgggatgcaaggctggttcaatatacgcaaatcaataaatgtaatccag

SEQ ID NO: 50093 - DNA, 120 bp, synthetic construct
  source 1..120: mol_type = other DNA
atggccatactgcccaaggtaatttatagatgcaatgccatccccatcaagctaccaatgactttcttcacagaattggaaaaaactactttaaagttcatacggaaccaaaaaagagcc

SEQ ID NO: 50094 - DNA, 120 bp, synthetic construct; identical to SEQ ID NO: 24359
  source 1..120: mol_type = other DNA

SEQ ID NO: 50095 - DNA, 120 bp, synthetic construct
  source 1..120: mol_type = other DNA
agaacacagccctcagaaataacgctgcatatctacaactatctaatctttgacaaacctgagaaaaacaagcaatggggaaaggattccctatttaataaatggtgctgggaaaactgg

SEQ ID NO: 50096 - DNA, 120 bp, synthetic construct
  source 1..120: mol_type = other DNA
tgtggcgactcctcagggatctagaactggaaatatcatttgacccagccatcccattactgggtatatacccaaaggactataaatcatgctgctataaagacacatgcacacgtatat

SEQ ID NO: 50097 - DNA, 120 bp, synthetic construct
  source 1..120: mol_type = other DNA
gcctaactgggaggcaccccccagcagcagcacactgacacctcacacggcagggtattccaacagacctgcagctgagggtcttgtctgttagaaggaaaactaacaaacagaaaggac

SEQ ID NO: 50098 - DNA, 120 bp, synthetic construct
  source 1..120: mol_type = other DNA
ccctaaaagagctcctgaaggaagcgctaaacatggaaaggaacaaccggtaccagccgctgcaaaatcatgccaaaatgtaaagaccatcgagactagaaagaaactgcatcgactaat

SEQ ID NO: 50099 - DNA, 120 bp, synthetic construct
  source 1..120: mol_type = other DNA
tgttctttgaaaccaacgagaacaaagacacaacataccagaatctctgggacgcattcaaagcaatgtgtagagggaaatttatagcactaaatgcccacaagagaaagcaggaaagat

SEQ ID NO: 50100 - DNA, 120 bp, synthetic construct
  source 1..120: mol_type = other DNA
taatccagcatataaacagagccaaagacaaaaaccacatgattatctcaatagatgcagaaaaagcctttgacaaaattcaacaacccttcatgctaagaactctgaataaattaggta

SEQ ID NO: 50101 - DNA, 120 bp, synthetic construct
  source 1..120: mol_type = other DNA
tagagccctcagaaataacgccacatatctacaattatctgatctttgacaaacctgagaaaaacaagcaatggggaaaggattccctatttaataaatggtgctgggaaaactggctag

SEQ ID NO: 50102 - DNA, 120 bp, synthetic construct
  source 1..120: mol_type = other DNA
aaaaaatgaagagttcatgtcctttgtagggacatggatgaaattggaaatcatcattctcagtaaactatcgcaagaacaaaaaaccaaacaccgcatattctcactcataggtgggaa

SEQ ID NO: 50103 - DNA, 120 bp, synthetic construct; identical to SEQ ID NO: 24360
  source 1..120: mol_type = other DNA

SEQ ID NO: 50104 - DNA, 120 bp, synthetic construct; identical to SEQ ID NO: 24361
  source 1..120: mol_type = other DNA

SEQ ID NO: 50105 - DNA, 120 bp, synthetic construct
  source 1..120: mol_type = other DNA
acagttcctcaccagcaacggaataaagctggatggagaatgactttgatgagctgagagaagaaggcttcagatgatcaaatgactctgagctacgggaggacattcaaaccaaaggca

SEQ ID NO: 50106 - DNA, 120 bp, synthetic construct
  source 1..120: mol_type = other DNA
gaaggaagcgctaaacatggaaaggaacaaccggtaccagccgctgcaaaatcatgccaaaatgtaaagaccatcgagactaggaagaaactgcatcaactaacgagcaaaatcaccagc

SEQ ID NO: 50107 - DNA, 120 bp, synthetic construct
  source 1..120: mol_type = other DNA
agcaggaaagatccaaaattgacaccctaacatcacaattaaaagaactagaaaagcaagagcaaacacattcaaaagctagcagaaggcgagaaataactaaaatcagagcagaactga

SEQ ID NO: 50108 - DNA, 120 bp, synthetic construct
  source 1..120: mol_type = other DNA
tttgacaaaattcaacaacccttcatgctaaaaactctcaataaattaagtattgatgggacgtatttcaaaataataagagctatctatgacaaacccacagccaatatcatactgaat

SEQ ID NO: 50109 - DNA, 120 bp, synthetic construct
  source 1..120: mol_type = other DNA
ggtactggtaccaaaacagagatatagatcaatggaacagaacagagccctcagaaataacgccgcatatctacaattatctgatctttgacaaacctgagaaaaacaaacaatggggaa

SEQ ID NO: 50110 - DNA, 120 bp, synthetic construct
  source 1..120: mol_type = other DNA
tctcagtaaactatcgcaagaacaaaaaaccaaacaccgcatattctcactcataggtgggaattgaacaatgagatcacatggacacaggaaggggaatatcacactctggggactgtt

SEQ ID NO: 50111 - DNA, 120 bp, synthetic construct; identical to SEQ ID NO: 24362
  source 1..120: mol_type = other DNA

SEQ ID NO: 50112 - DNA, 120 bp, synthetic construct
  source 1..120: mol_type = other DNA
agaatcaaatagacacaataagaaatgatgaaggggatatcaccactgatcccacagaaatacaaactaccatcagagaatactacaaacacctctacgcaaataaactagaaaatctag

SEQ ID NO: 50113 - DNA, 120 bp, synthetic construct
  source 1..120: mol_type = other DNA
aggaaaagaggaagtcaaattgtccctgtttgcagacgacatgattgtatatctagaaaaccccattgtctcagcccaaaatctccttaagctgatgaacaacttcagcaaagtctcagg

SEQ ID NO: 50114 - DNA, 120 bp, synthetic construct
  source 1..120: mol_type = other DNA
tcaaacaaatttaccagaaaaaaacaaacaaccccatcaaaaagtgggtgaaggacatgaacagacacttctcaaaagaagacattaatgcagccaaaaaacacatgaaaaaatgctcac

SEQ ID NO: 50115 - DNA, 120 bp, synthetic construct; identical to SEQ ID NO: 24363
  source 1..120: mol_type = other DNA

SEQ ID NO: 50116 - DNA, 120 bp, synthetic construct
  source 1..120: mol_type = other DNA
ctagttccttgaggaatcaccacgctgtcttccatgatggatgaactatgaactaatttgcactcccatcaacagtgtaaaatcattccgtttttctccacaacctcaccagcatctatt

SEQ ID NO: 50117 - DNA, 120 bp, synthetic construct
  source 1..120: mol_type = other DNA
gcagaagaatttttcttagtgcagaacaaaatgaaaagtctcccatgtctacttctttctacacagacacggcaaccatccgatttctcaatcttttccccacctttcccgcctttctat

SEQ ID NO: 50118 - DNA, 120 bp, synthetic construct
  source 1..120: mol_type = other DNA
ccgtggggagagggagagggagagggagagggagagggagagggagagggagagagcttttttactttttaatagtggccgttctgactggtgtgagatggtatctcattgtgcttttga

SEQ ID NO: 50119 - DNA, 120 bp, synthetic construct
  source 1..120: mol_type = other DNA
gtttgattggtgtacctgaaagtgatggggagaatggaacaaagttggaaaacactctgcaggatattatccaggagaacttccccaatctagcaaggcaggccaacattcagattcagg

SEQ ID NO: 50120 - DNA, 120 bp, synthetic construct
  source 1..120: mol_type = other DNA
caatatcaactttaaatgtaaatggactaaatgctccaattaaaaaacacagactggcaaattggatagagacaagacccatcagtgtgctatattcaggaaacccatctcacgtgcaga

SEQ ID NO: 50121 - DNA, 120 bp, synthetic construct
  source 1..120: mol_type = other DNA
aattaaaacaactagaaaagcaagagcaaacacattcaaaagctagcagaaggcgagaaataactaaaatcagagcagaactgaaggaaatagagacacaaaaaacccttcaaaaaatta

SEQ ID NO: 50122 - DNA, 120 bp, synthetic construct
  source 1..120: mol_type = other DNA
atttcaatagatgcagaaaaggcctttgacaaaattcaacagcccttcatgctaaaaactctcaataaattaggtattgatgggacatatctgaaaataataagagctatctatgacaaa

SEQ ID NO: 50123 - DNA, 120 bp, synthetic construct
  source 1..120: mol_type = other DNA
aaatggtgctgggaaaactggctagccatatgtagaaagctgaaactggatcccttccttacatcttatacaaaaattaattcaaggtggattaaagacttaaacgttagatctaaaacc

SEQ ID NO: 50124 - DNA, 120 bp, synthetic construct
  source 1..120: mol_type = other DNA
atgaagagttcatgtcgtttgtagggacatggatgaagctggaaaccatcattctcagtaaactatcgcaaggacggaaaaccaaacaccgcatgttctcccgcacaggtgggaattgaa

SEQ ID NO: 50125 - DNA, 120 bp, synthetic construct; identical to SEQ ID NO: 21394
  source 1..120: mol_type = other DNA

SEQ ID NO: 50126 - DNA, 120 bp, synthetic construct
  source 1..120: mol_type = other DNA
attatcttgggatagggtgcagcaatgtggagatatagattttctccttcttcttcttctttttttttttttttttgaggcagggtctcactctgttgcccaggctggagtgcagtggca

SEQ ID NO: 50127 - DNA, 120 bp, synthetic construct
  source 1..120: mol_type = other DNA
tctcaagctcctaaaacgatctacccactccagcctcctaaagtgctgggattacaggcgtaagccaccccacccagccaaattataatttatcttatgttatgattacatgtattgtaa

SEQ ID NO: 50128 - DNA, 120 bp, synthetic construct
  source 1..120: mol_type = other DNA
gtctgagaagtgaggagaccctctgcctggcaaccaccccgtctgagaagtgaggagcccctctgcccggccagcaccccgtccgggagggaggtgggggggtcagccccccgcccggcc

SEQ ID NO: 50129 - DNA, 120 bp, synthetic construct; identical to SEQ ID NO: 13296
  source 1..120: mol_type = other DNA

SEQ ID NO: 50130 - DNA, 120 bp, synthetic construct
  source 1..120: mol_type = other DNA
caaactttttaaaaatttcactaaaaagtcttcttaaaaatcttcccaagtctttgtagattctgtggcacatatacaccatggaatactatgcagccataaaaaatgatgagttcgtgt

SEQ ID NO: 50131 - DNA, 120 bp, synthetic construct; identical to SEQ ID NO: 25560
  source 1..120: mol_type = other DNA

SEQ ID NO: 50132 - DNA, 120 bp, synthetic construct
  source 1..120: mol_type = other DNA
ttacccaaataaatgaaacatctatacaatgaaaacctataaaagactgatgaaagaaattgcagagatccaagtctttgctattgtgaatagtgccgcaataaacatacgtgtgcatgt

SEQ ID NO: 50133 - DNA, 120 bp, synthetic construct
  source 1..120: mol_type = other DNA
tcaggtttgtcaaagatcaacccaaatgtccaacaatgatagactggattaagaaaatgtggcacatatacaccatggaatactatgcagccataaaaaatgatgagttcatgtcctttg

SEQ ID NO: 50134 - DNA, 120 bp, synthetic construct; identical to SEQ ID NO: 25555
  source 1..120: mol_type = other DNA

SEQ ID NO: 50135 - DNA, 120 bp, synthetic construct; identical to SEQ ID NO: 25556
  source 1..120: mol_type = other DNA

SEQ ID NO: 50136 - DNA, 120 bp, synthetic construct
  source 1..120: mol_type = other DNA
tgcaaggacaaaaaaccaaacacctcatgttctcactcataggtgggaattgaacaacgagaacactcggacacagtaaggggaacatcacacaccagggcctgttttgaggtgggggag

SEQ ID NO: 50137 - DNA, 120 bp, synthetic construct; identical to SEQ ID NO: 25558
  source 1..120: mol_type = other DNA

SEQ ID NO: 50138 - DNA, 120 bp, synthetic construct; identical to SEQ ID NO: 25559
  source 1..120: mol_type = other DNA

SEQ ID NO: 50139 - DNA, 120 bp, synthetic construct
  source 1..120: mol_type = other DNA
agctggacggagaatgactttgagaagctgagagaagaaggcttcagatgatcaaattactccgagctacgggaggacattcaaaccaaaggcaaagaagttgaaaactttgaaaaaaat

SEQ ID NO: 50140 - DNA, 120 bp, synthetic construct
  source 1..120: mol_type = other DNA
caactggtaccagccgatgcaaaatcatgccaaattgtaaagatcattgagactaggcagaaactgcatcaactaacgagcaaaataaccagctaacatcataatgacaggatcaaattc

SEQ ID NO: 50141 - DNA, 120 bp, synthetic construct
  source 1..120: mol_type = other DNA
aactagaaaagcaagaacaaacacattcaaaagctaacagaaggcaagaaataactaaaatcagagcagaactgaaagaaatagagacacaaaaaacccttcaaaaaattaatgaatcca

SEQ ID NO: 50142 - DNA, 120 bp, synthetic construct
  source 1..120: mol_type = other DNA
ctcaccactcctattcaacatagtgttggaagttctggccagggcaatcaggcaggagaaggaaataaagggtattcaattaggaaaagaggaagtcaaattgtccctgtttgcagttga

SEQ ID NO: 50143 - DNA, 120 bp, synthetic construct
  source 1..120: mol_type = other DNA
attcaagatggattaaagacttaaacgttagacctaaaaccataaaaaaccctagaagaaaacctaggcattaccattcaggacataggcatgggcaaggacttcatgtctaaaacacca

SEQ ID NO: 50144 - DNA, 120 bp, synthetic construct
  source 1..120: mol_type = other DNA
gcacatgtaccctaaaacttaaagtataataataatttaaaaaaaaaaaagaaagaactggcattctaaagcagtactgagtgatctaagcgtggcttggtcagagaaagagggaatacc

SEQ ID NO: 50145 - DNA, 120 bp, synthetic construct
  source 1..120: mol_type = other DNA
ttcagaagtttgagtaagaatggtattattcctcccattttgaaggttgcctgttcactctggtggtagtttcttttgctgagcagaagctctttagtttaattagatcccatttgtcaa

SEQ ID NO: 50146 - DNA, 120 bp, synthetic construct
  source 1..120: mol_type = other DNA
acatgcacaggtatgtttattgctgcattattcacaatagcaaagacttggaaccaacccaaatgtccaacaatgatagactggattaagaaaatgtggcacatatacaccatggaatac

SEQ ID NO: 50147 - DNA, 120 bp, synthetic construct
  source 1..120: mol_type = other DNA
taatgggatggctgggtcaaatggtatttctagttctagatccctgaggaatcatcacactgacttccacagtggttgaactagtttacagtcccaccaatagtgtaaaagtgttcctat

SEQ ID NO: 50148 - DNA, 120 bp, synthetic construct
  source 1..120: mol_type = other DNA
tgcacaatgtgcaggttagttacatatgtatacatgtgacatgctggtgcgctgcaccgactaactcgtcatctagcattaggtatatctcacaatgctatccctcccctctccccccaa

SEQ ID NO: 50149 - DNA, 120 bp, synthetic construct
  source 1..120: mol_type = other DNA
gcttttggtattttagacatgaagtccttgcccatgcccatgtcctgaatggtaatgcctaggttttcttctagggtttttatggttttaggtctaacgtttaagtctttaatccatctt

SEQ ID NO: 50150 - DNA, 120 bp, synthetic construct
  source 1..120: mol_type = other DNA
gatattggctgttggtttgtcatagatagctgttattattttgagatacatcccatcaatacctaattaattgagagtttttagcatgaagcgttgttgaattttgtcaaaggccttttc

SEQ ID NO: 50151 - DNA, 120 bp, synthetic construct
  source 1..120: mol_type = other DNA
ttctagttcttttaattgtgatgttggggtgtcaattttggatctttcctgctttctcctgtgggcatgtagtgctataaatttccctctacacactgctttgaatgcgtcccagggatt

SEQ ID NO: 50152 - DNA, 120 bp, synthetic construct
  source 1..120: mol_type = other DNA
tccttcaggaactcttttagggcaggcctggtggtgacaaatctctcagcatttgcttgtctataaaatattttatttctccttcacttatgaagcttagtttggctggatatgaaattc

SEQ ID NO: 50153 - DNA, 120 bp, synthetic construct; identical to SEQ ID NO: 23269
  source 1..120: mol_type = other DNA

SEQ ID NO: 50154 - DNA, 120 bp, synthetic construct; identical to SEQ ID NO: 23270
  source 1..120: mol_type = other DNA

SEQ ID NO: 50155 - DNA, 120 bp, synthetic construct
  source 1..120: mol_type = other DNA
cactgcactccagcctgggcgacaaagcgagactctgtctcaaaaaaaaaagaacatggagcaaaatgtagaaagttatatactacacagtaaccctggttgcatcaggagtggttgaag

SEQ ID NO: 50156 - DNA, 120 bp, synthetic construct; identical to SEQ ID NO: 24534
  source 1..120: mol_type = other DNA

SEQ ID NO: 50157 - DNA, 120 bp, synthetic construct; identical to SEQ ID NO: 8897
  source 1..120: mol_type = other DNA

SEQ ID NO: 50158 - DNA, 120 bp, synthetic construct; identical to SEQ ID NO: 8898
  source 1..120: mol_type = other DNA

SEQ ID NO: 50159 - DNA, 120 bp, synthetic construct; identical to SEQ ID NO: 11452
  source 1..120: mol_type = other DNA

SEQ ID NO: 50160 - DNA, 120 bp, synthetic construct; identical to SEQ ID NO: 11453
  source 1..120: mol_type = other DNA

SEQ ID NO: 50161 - DNA, 120 bp, synthetic construct; identical to SEQ ID NO: 11454
  source 1..120: mol_type = other DNA

SEQ ID NO: 50162 - DNA, 120 bp, synthetic construct; identical to SEQ ID NO: 11455
  source 1..120: mol_type = other DNA

SEQ ID NO: 50163 - DNA, 120 bp, synthetic construct; identical to SEQ ID NO: 11456
  source 1..120: mol_type = other DNA

SEQ ID NO: 50164 - DNA, 120 bp, synthetic construct; identical to SEQ ID NO: 11457
  source 1..120: mol_type = other DNA

SEQ ID NO: 50165 - DNA, 120 bp, synthetic construct; identical to SEQ ID NO: 11458
  source 1..120: mol_type = other DNA

SEQ ID NO: 50166 - DNA, 120 bp, synthetic construct; identical to SEQ ID NO: 11459
  source 1..120: mol_type = other DNA

SEQ ID NO: 50167 - DNA, 120 bp, synthetic construct; identical to SEQ ID NO: 11460
  source 1..120: mol_type = other DNA

SEQ ID NO: 50168 - DNA, 120 bp, synthetic construct; identical to SEQ ID NO: 11461
  source 1..120: mol_type = other DNA

SEQ ID NO: 50169 - DNA, 120 bp, synthetic construct; identical to SEQ ID NO: 11462
  source 1..120: mol_type = other DNA

SEQ ID NO: 50170 - DNA, 120 bp, synthetic construct; identical to SEQ ID NO: 11463
  source 1..120: mol_type = other DNA

SEQ ID NO: 50171 - DNA, 120 bp, synthetic construct; identical to SEQ ID NO: 11464
  source 1..120: mol_type = other DNA

SEQ ID NO: 50172 - DNA, 120 bp, synthetic construct; identical to SEQ ID NO: 11465
  source 1..120: mol_type = other DNA

SEQ ID NO: 50173 - DNA, 120 bp, synthetic construct; identical to SEQ ID NO: 11429
  source 1..120: mol_type = other DNA

SEQ ID NO: 50174 - DNA, 120 bp, synthetic construct; identical to SEQ ID NO: 11430
  source 1..120: mol_type = other DNA

SEQ ID NO: 50175 - DNA, 120 bp, synthetic construct; identical to SEQ ID NO: 11431
  source 1..120: mol_type = other DNA

SEQ ID NO: 50176 - DNA, 120 bp, synthetic construct; identical to SEQ ID NO: 11432
  source 1..120: mol_type = other DNA

SEQ ID NO: 50177 - DNA, 120 bp, synthetic construct; identical to SEQ ID NO: 11433
  source 1..120: mol_type = other DNA

SEQ ID NO: 50178 - DNA, 120 bp, synthetic construct; identical to SEQ ID NO: 11434
  source 1..120: mol_type = other DNA

SEQ ID NO: 50179 - DNA, 120 bp, synthetic construct; identical to SEQ ID NO: 11435
  source 1..120: mol_type = other DNA

SEQ ID NO: 50180 - DNA, 120 bp, synthetic construct; identical to SEQ ID NO: 11436
  source 1..120: mol_type = other DNA

SEQ ID NO: 50181 - DNA, 120 bp, synthetic construct; identical to SEQ ID NO: 11437
  source 1..120: mol_type = other DNA

SEQ ID NO: 50182 - DNA, 120 bp, synthetic construct; identical to SEQ ID NO: 11438
  source 1..120: mol_type = other DNA

SEQ ID NO: 50183 - DNA, 120 bp, synthetic construct; identical to SEQ ID NO: 11439
  source 1..120: mol_type = other DNA

SEQ ID NO: 50184 - DNA, 120 bp, synthetic construct; identical to SEQ ID NO: 11440
  source 1..120: mol_type = other DNA

SEQ ID NO: 50185 - DNA, 120 bp, synthetic construct; identical to SEQ ID NO: 11441
  source 1..120: mol_type = other DNA

SEQ ID NO: 50186 - DNA, 120 bp, synthetic construct; identical to SEQ ID NO: 11442
  source 1..120: mol_type = other DNA

SEQ ID NO: 50187 - DNA, 120 bp, synthetic construct; identical to SEQ ID NO: 11443
  source 1..120: mol_type = other DNA

SEQ ID NO: 50188 - DNA, 120 bp, synthetic construct; identical to SEQ ID NO: 11444
  source 1..120: mol_type = other DNA

SEQ ID NO: 50189 - DNA, 120 bp, synthetic construct; identical to SEQ ID NO: 11445
  source 1..120: mol_type = other DNA

SEQ ID NO: 50190 - DNA, 120 bp, synthetic construct; identical to SEQ ID NO: 11446
  source 1..120: mol_type = other DNA

SEQ ID NO: 50191 - DNA, 120 bp, synthetic construct; identical to SEQ ID NO: 11447
  source 1..120: mol_type = other DNA

SEQ ID NO: 50192 - DNA, 120 bp, synthetic construct; identical to SEQ ID NO: 11448
  source 1..120: mol_type = other DNA

SEQ ID NO: 50193 - DNA, 120 bp, synthetic construct; identical to SEQ ID NO: 11449
  source 1..120: mol_type = other DNA

SEQ ID NO: 50194 - DNA, 120 bp, synthetic construct; identical to SEQ ID NO: 11450
  source 1..120: mol_type = other DNA

SEQ ID NO: 50195 - DNA, 120 bp, synthetic construct; identical to SEQ ID NO: 11451
  source 1..120: mol_type = other DNA

SEQ ID NO: 50196 - DNA, 120 bp, synthetic construct; identical to SEQ ID NO: 33727
  source 1..120: mol_type = other DNA

SEQ ID NO: 50197 - DNA, 120 bp, synthetic construct
  source 1..120: mol_type = other DNA
actggtgtgagatggtatctcattgtggttttgatttgcatttctctgattgccagtgatggtgagcattttttcatgtgttttttggctgcataaatgtcttcttttgagaagtgtctg

SEQ ID NO: 50198 - DNA, 120 bp, synthetic construct; identical to SEQ ID NO: 6587
  source 1..120: mol_type = other DNA

SEQ ID NO: 50199 - DNA, 120 bp, synthetic construct; identical to SEQ ID NO: 33729
  source 1..120: mol_type = other DNA

SEQ ID NO: 50200 - DNA, 120 bp, synthetic construct
  source 1..120: mol_type = other DNA
atttctccacatcctctccggcacctgttgtttcctgactttttaatgattgccattctacctggtgtgaaatggtatctcattgtggttttgatttgcatttctctgatggccagtgat

SEQ ID NO: 50201 - DNA, 120 bp, synthetic construct
  source 1..120: mol_type = other DNA
ctattttttggttccttatgaactttaaagtagttttttccaattctgtgaagaaagtcattggtagcttgatggggatggcattgaatctataaattaccttgggcagtatggccattt

SEQ ID NO: 50202 - DNA, 120 bp, synthetic construct
  source 1..120: mol_type = other DNA
tgcagcaatattcatcaaggatattggtctaaaattctcttttttggttgtgtctctgcccggctttggtatcaggatgatgctggcctcataaaatgagttagggaggattccctcttt

SEQ ID NO: 50203 - DNA, 120 bp, synthetic construct
  source 1..120: mol_type = other DNA
tattcttttacatttgctgaggagagctttacttccaagtatgtcgtcaattttggaataggtgttgggtggtgctgaaaaaaatgtatattctgttgatttagggtggagagttctgta

SEQ ID NO: 50204 - DNA, 120 bp, synthetic construct
  source 1..120: mol_type = other DNA
ctgcccttaacattttttccttcatttcaactttggtgaatctgacaattatgtgtcttggagttgctcttctcgagcagtatctttgtggcattctctgtatttcctgaatctgaatgt

SEQ ID NO: 50205 - DNA, 120 bp, synthetic construct
  source 1..120: mol_type = other DNA
gaagtgtcagtctgcccctgctggggtggtgcctcccagttaggctgctcggatgtcagcagtcagggacccacttaaggaggcagtctgcccattctcagatctccagctgcttgctgg

SEQ ID NO: 50206 - DNA, 120 bp, synthetic construct; identical to SEQ ID NO: 33730
  source 1..120: mol_type = other DNA

SEQ ID NO: 50207 - DNA, 120 bp, synthetic construct
  source 1..120: mol_type = other DNA
ttttaatgatgccattctaactggtgtgagatggtatctcattgtggttttgatttgcatttctctgatggccagtgatgatgagcattttttcatgtgttttttggctgcataaatgtc

SEQ ID NO: 50208 - DNA, 120 bp, synthetic construct
  source 1..120: mol_type = other DNA
tataaattactttgggcagtatggccattttcatgatattgattcttcctacccatgagcatggaatgttcttccatttgtttgtatcctcttttatttccttgagcagtggtttgtagt

SEQ ID NO: 50209 - DNA, 120 bp, synthetic construct
  source 1..120: mol_type = other DNA
tgccggcatcataaaatgagttagggaggattccctctttttctattgattggaatagttttagaaggaatggtaccagttcctccttgtacctctggtagaattcggctgtgaatccat

SEQ ID NO: 50210 - DNA, 120 bp, synthetic construct
  source 1..120: mol_type = other DNA
aaaaccaaacaccgcatgttctcactcataggtgggaatggaacaatgagatcacatggacacaggaaggggaatatcacactctggggactgttgtggggtggggggaggggggaggga

SEQ ID NO: 50211 - DNA, 120 bp, synthetic construct; identical to SEQ ID NO: 33732
  source 1..120: mol_type = other DNA

SEQ ID NO: 50212 - DNA, 120 bp, synthetic construct
  source 1..120: mol_type = other DNA
tctcagattataggcatgagccactgcagtcaacctctaaatttttaatatacatatttaaatatagtttttcggggggaggagccaagatggccgaataggaacagctccggtctacag

SEQ ID NO: 50213 - DNA, 120 bp, synthetic construct
  source 1..120: mol_type = other DNA
tgattttgacgagctgagagaagaaggcttcagacgatcaagttactctgagctacgggaggacattcaaaccaaaggcaaagaagttgaaaactttgaaaaaaatttagaagaatgtat

SEQ ID NO: 50214 - DNA, 120 bp, synthetic construct
  source 1..120: mol_type = other DNA
aaaggaacaaccggtaccagctgctgcaaaatcatgccaaaatgtaaagaccatcgagactaggaagaaactgcatcaactaatgagcaaaatcaccagctaacatcataatgacaggat

SEQ ID NO: 50215 - DNA, 120 bp, synthetic construct
  source 1..120: mol_type = other DNA
caggattaagaatctcactcaaagccgctcaactacatggaaactgaacaacctgctcctgaacgactactgggtacataacgaaatgaaggcagaaataaagatgttctttgaaaccaa

SEQ ID NO: 50216 - DNA, 120 bp, synthetic construct
  source 1..120: mol_type = other DNA
ggtattgatgggatgtatttcagaataataagagctatctatgacaaacccacagccaatatcatactgaatgggcaaaaactggaagcattccctttgaaaactggcacaagacaggga

SEQ ID NO: 50217 - DNA, 120 bp, synthetic construct
  source 1..120: mol_type = other DNA
taaaaaccctagaagaaaacctaggcattaccgttcaggacataggcatgggcaaggacttcatgtccaaaacaccaaaagcaatggcaacaaaagccaaaattgacaaatgggatctaa

SEQ ID NO: 50218 - DNA, 120 bp, synthetic construct; identical to SEQ ID NO: 17418
  source 1..120: mol_type = other DNA

SEQ ID NO: 50219 - DNA, 120 bp, synthetic construct
  source 1..120: mol_type = other DNA
tgcagttatatgtgattatatataatgtgcagttatatgtgattatatataatgtgcagttatatgtgattatatatagtgtgcagttatatgtgattatatatagtgtgcagttatatg

SEQ ID NO: 50220 - DNA, 120 bp, synthetic construct
  source 1..120: mol_type = other DNA
cactggcaacattgtgaagtaggcatagttaatctctgacaattatgtagttatgacttcttcagttgtaagtgaggaaaaaactacttacagtaactcaagtcatttaggtttggtagg

SEQ ID NO: 50221 - DNA, 120 bp, synthetic construct; identical to SEQ ID NO: 13143
  source 1..120: mol_type = other DNA

SEQ ID NO: 50222 - DNA, 120 bp, synthetic construct; identical to SEQ ID NO: 13144
  source 1..120: mol_type = other DNA

SEQ ID NO: 50223 - DNA, 120 bp, synthetic construct
  source 1..120: mol_type = other DNA
ggcaatcaggcaggagaaagaaataaagggtattcaattaggaaaagaggaagtcaaattgtccctgtttgcagatgacatgattgtatatgtagaaaacctcatcatctcagcccaaaa

SEQ ID NO: 50224 - DNA, 120 bp, synthetic construct
  source 1..120: mol_type = other DNA
caacctacagaatgggagaaaatttttgcaatctatccatctgacaaagggctaatatccggaatctacaaagaactcaaacaaatttacaagaaaaaaataaacaaccccatcaacaag

SEQ ID NO: 50225 - DNA, 120 bp, synthetic construct; identical to SEQ ID NO: 13145
  source 1..120: mol_type = other DNA

SEQ ID NO: 50226 - DNA, 120 bp, synthetic construct
  source 1..120: mol_type = other DNA
actcaaacaaatttacaagaaaaaaacaaccccatcaacaagtgggtgaaggatatgaacagacatttcacaaaagaatacatttatgcagccaaaagacacatgaaaaaatgctcatca

SEQ ID NO: 50227 - DNA, 120 bp, synthetic construct
  source 1..120: mol_type = other DNA
ctgatcctctccatcctcttcaccctctgataggccagagtgtgtgttattctcttctatgtgtccatgtgttcttattatttagctcctacttataagtgaggacatgtggtatttggt

SEQ ID NO: 50228 - DNA, 120 bp, synthetic construct
  source 1..120: mol_type = other DNA
ttccaatttcatccatgtccctacaaaggacatgatctcatcatgtttatggctgcatagtattccatggtgtatatgtgccagtttcttaatccagtctatcattgatggacatttggg

SEQ ID NO: 50229 - DNA, 120 bp, synthetic construct
  source 1..120: mol_type = other DNA
tgtggcgttatttctgagggctctgttctgttccattgatctatatctctgttttggtaccactaccatgctgttttggttactgtagccttgtagtatagtttgaagtcaggtagcgtg

SEQ ID NO: 50230 - DNA, 120 bp, synthetic construct
  source 1..120: mol_type = other DNA
ggtttgccagtattttattgaggatttttgcatcaatgttcatcagggatattggtctaaaattctcttttttggttgtgtctctgcccggctttggtatcaggatgatgctggcctcat

SEQ ID NO: 50231 - DNA, 120 bp, synthetic construct
  source 1..120: mol_type = other DNA
taatttctgttcttttacatttgctggggagagctttacttccaactatgtggtcaattttggaataggtgtggtgtggtgctgaaaaaaatgtatattctgttgatttggggtggagag

SEQ ID NO: 50232 - DNA, 120 bp, synthetic construct
  source 1..120: mol_type = other DNA
gcagcggctggtaccggttgttcctttccatgtttagtgcttccttcaggagctcttttagggcaggcctggtggtgacaaaatctctcagcatttgcttgtctgtaaaggattttattt

SEQ ID NO: 50233 - DNA, 120 bp, synthetic construct
  source 1..120: mol_type = other DNA
ccttcttctctcaactcgtcaaagtcattctccgtccagctttgttccgttgctggtgagtaactgtgttcctttggaggaggagaggcgctctgctttttagagtttccagtttttctg

SEQ ID NO: 50234 - DNA, 120 bp, synthetic construct; identical to SEQ ID NO: 13146
  source 1..120: mol_type = other DNA

SEQ ID NO: 50235 - DNA, 120 bp, synthetic construct; identical to SEQ ID NO: 11134
  source 1..120: mol_type = other DNA

SEQ ID NO: 50236 - DNA, 120 bp, synthetic construct; identical to SEQ ID NO: 22404
  source 1..120: mol_type = other DNA

SEQ ID NO: 50237 - DNA, 120 bp, synthetic construct; identical to SEQ ID NO: 22405
  source 1..120: mol_type = other DNA

SEQ ID NO: 50238 - DNA, 120 bp, synthetic construct; identical to SEQ ID NO: 22406
  source 1..120: mol_type = other DNA

SEQ ID NO: 50239 - DNA, 120 bp, synthetic construct; identical to SEQ ID NO: 22407
  source 1..120: mol_type = other DNA

SEQ ID NO: 50240 - DNA, 120 bp, synthetic construct
  source 1..120: mol_type = other DNA
ctgcattgagccaagattgcaccactgcactccccagcctgggtgacagagtgagaccccatctcaaaaaaaaaaaaaaaaaatcaacatgagttttgttggggaaaaagaaaccataaa

SEQ ID NO: 50241 - DNA, 120 bp, synthetic construct
  source 1..120: mol_type = other DNA
tgttatttcctgactttttaatgactgccattctaactggtgtgagatggtatctcattgtggttttgatttgcatttctctgatggccagtgatggtgagcattttttcatgtgttttt

SEQ ID NO: 50242 - DNA, 120 bp, synthetic construct
  source 1..120: mol_type = other DNA
aattaccttgggcagtatggccattttcacgatattgattcttcctacccatgagcatggaatgttcttccatttgtttgtatcctcatttatttccttgagcagtggtttgtagttctc

SEQ ID NO: 50243 - DNA, 120 bp, synthetic construct
  source 1..120: mol_type = other DNA
ttcccgagtagctgggattacaggcttgagccagcatgcccggctaatttttgtatttttagtagagatggggtttcactatgttggtcggactagtcttgaactcctgacctcaagtga

SEQ ID NO: 50244 - DNA, 120 bp, synthetic construct
  source 1..120: mol_type = other DNA
aacacaccacctgcgaaaaacaagccaaattgaacctgagtctgactaggactgttgatctaccaccaatatgtaggaaaccgagaggatagaggaacatgtaaaacatgtaaaacacag

SEQ ID NO: 50245 - DNA, 120 bp, synthetic construct; identical to SEQ ID NO: 22409
  source 1..120: mol_type = other DNA

SEQ ID NO: 50246 - DNA, 120 bp, synthetic construct; identical to SEQ ID NO: 22410
  source 1..120: mol_type = other DNA

SEQ ID NO: 50247 - DNA, 120 bp, synthetic construct; identical to SEQ ID NO: 22411
  source 1..120: mol_type = other DNA

SEQ ID NO: 50248 - DNA, 120 bp, synthetic construct; identical to SEQ ID NO: 22412
  source 1..120: mol_type = other DNA

SEQ ID NO: 50249 - DNA, 120 bp, synthetic construct
  source 1..120: mol_type = other DNA
cggggaggtggtcatactgaggggaggtggtcacagtgtgaggggaggtggtcacagtgtgaggggaggtggtcacactgaggggaggtggtcatagtgtgaggggaggtggtcacactg

SEQ ID NO: 50250 - DNA, 120 bp, synthetic construct; identical to SEQ ID NO: 22413
  source 1..120: mol_type = other DNA

SEQ ID NO: 50251 - DNA, 120 bp, synthetic construct; identical to SEQ ID NO: 22414
  source 1..120: mol_type = other DNA

SEQ ID NO: 50252 - DNA, 120 bp, synthetic construct; identical to SEQ ID NO: 22006
  source 1..120: mol_type = other DNA

SEQ ID NO: 50253 - DNA, 120 bp, synthetic construct; identical to SEQ ID NO: 22007
  source 1..120: mol_type = other DNA

SEQ ID NO: 50254 - DNA, 120 bp, synthetic construct
  source 1..120: mol_type = other DNA
ctttgtaaaacattccaaaaggctctcccttccccagtaaagtagctctttttttcctttcttttttcttttcttttctcttttctttcctctcctctcctctctcctctcccctcccct

SEQ ID NO: 50255 - DNA, 120 bp, synthetic construct
  source 1..120: mol_type = other DNA
cagaagcctcaggagccgatgtgatcaactggaagaaggagtatcagtgatggaagatgaaatgaacaaaatgaagtgagaagggaagtttagagaaaaaagaataaaaagaaacaaaca

SEQ ID NO: 50256 - DNA, 120 bp, synthetic construct
  source 1..120: mol_type = other DNA
taaagagtcaagacccatcagtgtgctgtattcaggaaacccatctcacgtgcagggacacacataggctcaaaataaaaggatggaggaagatctaccaagcaaatggaaaacaaaaaa

SEQ ID NO: 50257 - DNA, 120 bp, synthetic construct
  source 1..120: mol_type = other DNA
caaaattgatagactgctagcaagactaataaagaagaaaagagagaagaatcaaatagatgcaataaaaaatgataaaggggatatcaccaccgatcccacagagatacaaactaccat

SEQ ID NO: 50258 - DNA, 120 bp, synthetic construct
  source 1..120: mol_type = other DNA
ccactcctcttcaacatagtgttggaatttctggccagggcaattaggcaggagaaggaaataaagggtattcaattaggaaaagaggaagtcaaattgtccctgtttgcagatgacatg

SEQ ID NO: 50259 - DNA, 120 bp, synthetic construct
  source 1..120: mol_type = other DNA
aaattaattcaagatggattaaagacttaaacgttagacctaaaaccataaaaactctagaagaaaacctaggcattaccattcaggacataggcatgggcaaggacttcatgtctaaaa

SEQ ID NO: 50260 - DNA, 120 bp, synthetic construct
  source 1..120: mol_type = other DNA
tgttctcactcataggtgggaactgaacaatgagaacacatggacacaggaaggggaacatcacactttggggacggttgtggggtcgggggagcggggagggatagcattaagagatat

SEQ ID NO: 50261 - DNA, 120 bp, synthetic construct; identical to SEQ ID NO: 6886
  source 1..120: mol_type = other DNA

SEQ ID NO: 50262 - DNA, 120 bp, synthetic construct; identical to SEQ ID NO: 6887
  source 1..120: mol_type = other DNA

SEQ ID NO: 50263 - DNA, 120 bp, synthetic construct; identical to SEQ ID NO: 6888
  source 1..120: mol_type = other DNA

SEQ ID NO: 50264 - DNA, 120 bp, synthetic construct; identical to SEQ ID NO: 6889
  source 1..120: mol_type = other DNA

SEQ ID NO: 50265 - DNA, 120 bp, synthetic construct; identical to SEQ ID NO: 6890
  source 1..120: mol_type = other DNA

SEQ ID NO: 50266 - DNA, 120 bp, synthetic construct
  source 1..120: mol_type = other DNA
gtgtgtgttaggttgtaggtacacacgtgtgtacatgtgtgttgtaggtacacatgtgtgtattaggttgtaggtacacaggtgtgtatgtgtgttaggttgtaggtacacaggtgtata

SEQ ID NO: 50267 - DNA, 120 bp, synthetic construct
  source 1..120: mol_type = other DNA
gggtgttaggttgtaggtacacaggtgtgtgcgcgctaggttgtaggtacacatgtgtgcacgtgggttaggttgtaggtacacacgtgtgtacctgttaggttgtaggtatacacgtgt

SEQ ID NO: 50268 - DNA, 120 bp, synthetic construct; identical to SEQ ID NO: 6893
  source 1..120: mol_type = other DNA

SEQ ID NO: 50269 - DNA, 120 bp, synthetic construct; identical to SEQ ID NO: 6894
  source 1..120: mol_type = other DNA

SEQ ID NO: 50270 - DNA, 120 bp, synthetic construct; identical to SEQ ID NO: 6895
  source 1..120: mol_type = other DNA

SEQ ID NO: 50271 - DNA, 120 bp, synthetic construct; identical to SEQ ID NO: 6896
  source 1..120: mol_type = other DNA

SEQ ID NO: 50272 - DNA, 120 bp, synthetic construct; identical to SEQ ID NO: 6897
  source 1..120: mol_type = other DNA

SEQ ID NO: 50273 - DNA, 120 bp, synthetic construct
  source 1..120: mol_type = other DNA
cttatccagggcgctcaggttctgccgcaggtgaaatgcctgcgttctgtcctcagctgttttcttcttcaatttatcagcatcagtatctagttctttcactgagcttaggatgaaaag

SEQ ID NO: 50274 - DNA, 120 bp, synthetic construct
  source 1..120: mol_type = other DNA
ttagaactagaggcgtgagccaccgtgcccggccggtggctgttttctattagaccttaaatatgtgattggttttaacgcctattaatcacattgtgcttgtaccatgattaatataca

SEQ ID NO: 50275 - DNA, 120 bp, synthetic construct
  source 1..120: mol_type = other DNA
aaatgctgggattacaggcatgagccacagcgcccgaccggcagtttcttaaaaaaaaactaaacaccaggagctggttttttgaaaggatcaacaaaattgatagacagctagcaagac

SEQ ID NO: 50276 - DNA, 120 bp, synthetic construct
  source 1..120: mol_type = other DNA
actggaagcattccctttgaaaactggcacaagacagggatgccctctctcaccgctcctattcaacatagtgttggaagttctggccagggcaatcaggcaggagaaggaaataaaggg

SEQ ID NO: 50277 - DNA, 120 bp, synthetic construct
  source 1..120: mol_type = other DNA
acctaggcattaccattcaggacataggcgtgggcaaggtcttcatgtccaaaacaccaaaagcattggcaacaaaagccaaaattgacaaatgggatctaattaaactaaacagcttct

SEQ ID NO: 50278 - DNA, 120 bp, synthetic construct
  source 1..120: mol_type = other DNA
tgtaccctaaaacttagagtataataaaaaaaaaaaacaaaaaaaaaactaaacacatacttggccgggcacggtggctcacgcctgtaatcccagcattttgggaggccgaggcggacg

SEQ ID NO: 50279 - DNA, 120 bp, synthetic construct
  source 1..120: mol_type = other DNA
tagacttgagaatcctgggttctcatgctctggtttctcttcaaatcgtataaatctttcgccttttactaaagatttctgtggagaatcctgggttcttctccaggcttcgtgacattc

SEQ ID NO: 50280 - DNA, 120 bp, synthetic construct; identical to SEQ ID NO: 33054
  source 1..120: mol_type = other DNA

SEQ ID NO: 50281 - DNA, 120 bp, synthetic construct; identical to SEQ ID NO: 33055
  source 1..120: mol_type = other DNA

SEQ ID NO: 50282 - DNA, 120 bp, synthetic construct; identical to SEQ ID NO: 33056
  source 1..120: mol_type = other DNA

SEQ ID NO: 50283 - DNA, 120 bp, synthetic construct; identical to SEQ ID NO: 33057
  source 1..120: mol_type = other DNA

SEQ ID NO: 50284 - DNA, 120 bp, synthetic construct
  source 1..120: mol_type = other DNA
gatttctcatctgtaaagtgaggatattgatatcagtctctcgagttgttgtcccaaggattgaggaggcaggcagggagtgtgagctgtgaggatggttatttctgctgtatgctctgt

SEQ ID NO: 50285 - DNA, 120 bp, synthetic construct
  source 1..120: mol_type = other DNA
tggatggactaacgaacgagtgaacgtagagttgagatctcattcatgaggtgcactgcccttctgctgtccccttcctccccctgaaatgtccttgggccctcaaatcctgtaccattc

SEQ ID NO: 50286 - DNA, 120 bp, synthetic construct; identical to SEQ ID NO: 24577
  source 1..120: mol_type = other DNA

SEQ ID NO: 50287 - DNA, 120 bp, synthetic construct; identical to SEQ ID NO: 24670
  source 1..120: mol_type = other DNA

SEQ ID NO: 50288 - DNA, 120 bp, synthetic construct
  source 1..120: mol_type = other DNA
tgtgaggagcccctctgcccggccgcccagtctgggaagtgaggagcgtctccgcccggccgccatcccatctaggaagtgaggagcgcctcttcccagccgccatcacatctaggaagt

SEQ ID NO: 50289 - DNA, 120 bp, synthetic construct
  source 1..120: mol_type = other DNA
ttgtttatctgctgaccttccctccactattgtcccatgaccctgccaaatccccctctgtgagaaacacccaagaattatcaataaaaaaataaattaaaaaaaaaaataaaaaaaaaa

SEQ ID NO: 50290 - DNA, 120 bp, synthetic construct
  source 1..120: mol_type = other DNA
ccgtccccttcttaagcaatacggaggctacccactccacattaccttcttttcaagggcctgtttcccttgcctccataactgttgtgggtattgacagacaggcttctaaacctctta

SEQ ID NO: 50291 - DNA, 120 bp, synthetic construct
  source 1..120: mol_type = other DNA
aaggcttcacagacagcccccattacttcagtcaagcccaaatttcgtcctcatctgttacctatcttggcataattctcataaaaacacatgtgctctccctgctgatcgtgtctgatt

SEQ ID NO: 50292 - DNA, 120 bp, synthetic construct
  source 1..120: mol_type = other DNA
gcaaattagctttactcaacatgcccgagtcaggaaactaaaatacctcttagttcaaatagacactttcactgaataagtaaaggcctttcctacagggtctgagaaggccaccgcagt

SEQ ID NO: 50293 - DNA, 120 bp, synthetic construct
  source 1..120: mol_type = other DNA
gccatcacatcccctgtgacttgcacgtatacatccagatggcctgaagtaactgaagatccacaaaagaaataaaaactgccttaactgatgacattccaccattgtgatttgttcctg

SEQ ID NO: 50294 - DNA, 120 bp, synthetic construct
  source 1..120: mol_type = other DNA
caggagtttgaagctgcagggagctgtgactgcaccactgcagtccagcctggctaagagatagagactcgtactggtaccaaaacagagaaatagaccaatggaacagaacagagccct

SEQ ID NO: 50295 - DNA, 120 bp, synthetic construct
  source 1..120: mol_type = other DNA
ctgtaaagacacatgcacacgtatgtttattgcagcactattcacaatagcaaagacttgaaaccaacccaaatgtccaacaatgataggctggattaagaaaatgtggcacatatacac

SEQ ID NO: 50296 - DNA, 120 bp, synthetic construct; identical to SEQ ID NO: 32610
  source 1..120: mol_type = other DNA

SEQ ID NO: 50297 - DNA, 120 bp, synthetic construct; identical to SEQ ID NO: 45566
  source 1..120: mol_type = other DNA

SEQ ID NO: 50298 - DNA, 120 bp, synthetic construct
  source 1..120: mol_type = other DNA
ttaaattagttttttccaattctgtgaagaaagacattggtagcttgatggggatggcattgaatctataaattaccttgggcagtatggccattttcacgatattgattcttcctaccc

SEQ ID NO: 50299 - DNA, 120 bp, synthetic construct
  source 1..120: mol_type = other DNA
agaatgatgctggcctcataaaatgagttagggaggattccctctttttctcttgattggaatagtttcagaaggaatggtaccagttcctccttgtacctctggtagaattcggctgtg

SEQ ID NO: 50300 - DNA, 120 bp, synthetic construct; identical to SEQ ID NO: 32611
  source 1..120: mol_type = other DNA

SEQ ID NO: 50301 - DNA, 120 bp, synthetic construct
  source 1..120: mol_type = other DNA
tttttgtattttagtagacacagggtttcaccatgttggccaggatggtctgatctcctgacctcgtgaagtttacctcatttggtgattgagaattgcatggttatctcgaagtaatgc

SEQ ID NO: 50302 - DNA, 120 bp, synthetic construct; identical to SEQ ID NO: 14166
  source 1..120: mol_type = other DNA

SEQ ID NO: 50303 - DNA, 120 bp, synthetic construct; identical to SEQ ID NO: 14167
  source 1..120: mol_type = other DNA

SEQ ID NO: 50304 - DNA, 120 bp, synthetic construct; identical to SEQ ID NO: 14168
  source 1..120: mol_type = other DNA

SEQ ID NO: 50305 - DNA, 120 bp, synthetic construct; identical to SEQ ID NO: 14169
  source 1..120: mol_type = other DNA

SEQ ID NO: 50306 - DNA, 120 bp, synthetic construct; identical to SEQ ID NO: 25180
  source 1..120: mol_type = other DNA

SEQ ID NO: 50307 - DNA, 120 bp, synthetic construct; identical to SEQ ID NO: 21503
  source 1..120: mol_type = other DNA

SEQ ID NO: 50308 - DNA, 120 bp, synthetic construct
  source 1..120: mol_type = other DNA
attattattattttttttttttttttgagagggagtctggctgtgtcgcccaggctggatggagtgcagtggccgagcttggctcactgcaagctctgcttcctgggttcacgccattct

SEQ ID NO: 50309 - DNA, 120 bp, synthetic construct; identical to SEQ ID NO: 21504
  source 1..120: mol_type = other DNA

SEQ ID NO: 50310 - DNA, 120 bp, synthetic construct; identical to SEQ ID NO: 21505
  source 1..120: mol_type = other DNA

SEQ ID NO: 50311 - DNA, 120 bp, synthetic construct; identical to SEQ ID NO: 21506
  source 1..120: mol_type = other DNA

SEQ ID NO: 50312 - DNA, 120 bp, synthetic construct
  source 1..120: mol_type = other DNA
cacctcggcctcccaaagtgctgagattacaggcgtgagcccccgcgccgggtctcaaaaaatattaatgcctagaaatatttatgtctcaatacttgaataattatttttctcatgaac

SEQ ID NO: 50313 - DNA, 120 bp, synthetic construct; identical to SEQ ID NO: 21507
  source 1..120: mol_type = other DNA

SEQ ID NO: 50314 - DNA, 120 bp, synthetic construct; identical to SEQ ID NO: 21508
  source 1..120: mol_type = other DNA

SEQ ID NO: 50315 - DNA, 120 bp, synthetic construct
  source 1..120: mol_type = other DNA
ctaggagtgtgaggttacagtgagctatgattgcaccactgcactccaacctgggtgacagagcgagaccctgtctcttaaaaagaaaagaaagaataaatatgaaacaaatgaagattt

SEQ ID NO: 50316 - DNA, 120 bp, synthetic construct; identical to SEQ ID NO: 21509
  source 1..120: mol_type = other DNA

SEQ ID NO: 50317 - DNA, 120 bp, synthetic construct; identical to SEQ ID NO: 21510
  source 1..120: mol_type = other DNA

SEQ ID NO: 50318 - DNA, 120 bp, synthetic construct
  source 1..120: mol_type = other DNA
aatcactgtcaggtgaagccacagccagaggttaacatgtgaaaggaagggagagagcaagcccggcttgcaggccgcacccctgatagtttgtttcacatccctaacaagcagggttta

SEQ ID NO: 50319 - DNA, 120 bp, synthetic construct
  source 1..120: mol_type = other DNA
gaaggggtcttaagagcctcagaataaatcgtagtgcatgagccactgttcattaaaggaggtgtacactttctgtctcaaaatctttctaagccatagcaaaattaacaaaaacctaca

SEQ ID NO: 50320 - DNA, 120 bp, synthetic construct
  source 1..120: mol_type = other DNA
aaagtgtcttctttagtgctgataaaaggggctcagtccctattctggtagttagaaaagcagatttagaaggtgctagaaaataccccaaatcactccttccttgggttccgtttggat

SEQ ID NO: 50321 - DNA, 120 bp, synthetic construct
  source 1..120: mol_type = other DNA
agtgctgggattactggcatgagccactgcgcccggccgaaaaatacacttttaaactcagtggttactactggttaattgcatcatttaattatatgtaaaagtaagtacattttatga

SEQ ID NO: 50322 - DNA, 120 bp, synthetic construct; identical to SEQ ID NO: 21511
  source 1..120: mol_type = other DNA

SEQ ID NO: 50323 - DNA, 120 bp, synthetic construct; identical to SEQ ID NO: 21512
  source 1..120: mol_type = other DNA

SEQ ID NO: 50324 - DNA, 120 bp, synthetic construct; identical to SEQ ID NO: 21513
  source 1..120: mol_type = other DNA

SEQ ID NO: 50325 - DNA, 120 bp, synthetic construct
  source 1..120: mol_type = other DNA
tctcatccccaaatggaatttaggctggatggtccagggttctggagcactgttgttaattcagttccatctaatacagatttgtgggaacacagcctcatttttcagacatcctaaata

SEQ ID NO: 50326 - DNA, 120 bp, synthetic construct
  source 1..120: mol_type = other DNA
gaggctgaggcgggtggatcacgaagtcaggagatggagaccattttggctaacatggtgaaaccctgtctctactaaaaaaaaagtacaaaaattagccaggcatggtggtgggtgcct

SEQ ID NO: 50327 - DNA, 120 bp, synthetic construct
  source 1..120: mol_type = other DNA
cgtgaaatattattcagtcacaaaaggagtgaagctctgatgtgcgctacagcacagatggacctaagacattatgctacgtggcataggccggacgcaaaaggaaaatactgcatgatt

SEQ ID NO: 50328 - DNA, 120 bp, synthetic construct
  source 1..120: mol_type = other DNA
cattctaccagcctttgtgtatgtttggaaatgtccactaaggtaaaatttaataaataaactgtgggggaaagttagattttagaggctgcttttaaagctttactattgtcagagagg

SEQ ID NO: 50329 - DNA, 120 bp, synthetic construct
  source 1..120: mol_type = other DNA
tagtctttaatggtgatttaatttcttacatctttacgtgtgaggtttattaaagaggctgttaaataaagcaataggaaattggaggaccgggctaccctggggggcctcccagcaatg

SEQ ID NO: 50330 - DNA, 120 bp, synthetic construct
  source 1..120: mol_type = other DNA
caagataccatcccgtttctcctggctgaggaagggaagggaacatccacatcttctgtactcgtccattctgtgtccccggggcctggagtaaagacaccttcaaatgcagagactctt

SEQ ID NO: 50331 - DNA, 120 bp, synthetic construct
  source 1..120: mol_type = other DNA
tcttcaatggttattttgctgcagatctagagaactgtgatttaaatgtgttgaaaataaatatcccaagccaagataacagcggactcttgcttggcttctcccagacaccgcgtcccc

SEQ ID NO: 50332 - DNA, 120 bp, synthetic construct
  source 1..120: mol_type = other DNA
ctcaccctccataccgatccacagtgcatcttccagtgccaggccacatagcatttagcaaagtagatcgattcatcattgaagaaagtcgcattcattgggaatcatatagtgaattaa

SEQ ID NO: 50333 - DNA, 120 bp, synthetic construct
  source 1..120: mol_type = other DNA
tcacagatgaagtcagttcccacctgccattaggccgccccagcaggaatgtggggaagggactagctgtcatgacttccaggatatctggtcatgattttacattcttggaaacatcca

SEQ ID NO: 50334 - DNA, 120 bp, synthetic construct
  source 1..120: mol_type = other DNA
ggcccattcttgtactctttctataagagtaattatcaatatgactgggtacagtggctcatgcctataatcccagcactctaggaggcttaggtgggaagattgcttgaggccaggagt

SEQ ID NO: 50335 - DNA, 120 bp, synthetic construct
  source 1..120: mol_type = other DNA
aaactcatttttaaacatgccattctggcaaaaacccaccaaccaaccaacaagcaaacaaacatccgtgggccagacccagtctacagacctctgggatgccattggaatggctctcac

SEQ ID NO: 50336 - DNA, 120 bp, synthetic construct
  source 1..120: mol_type = other DNA
ctaggcctcctcagaacagcagccagactttggatggctgcaccctcctgctctatcagctgtccctcgtcaaagaaatatttcgagcactcatttggggaaaagtggaacctttgttgc

SEQ ID NO: 50337 - DNA, 120 bp, synthetic construct
  source 1..120: mol_type = other DNA
taggtagagacagcagaacaacagcgagaaggagccaaagctggagccagaaagcctggcaccgccaccttcccctgacagttagcaccttcctttcacaacatctcccttaagggggaa

SEQ ID NO: 50338 - DNA, 120 bp, synthetic construct; identical to SEQ ID NO: 1160
  source 1..120: mol_type = other DNA

SEQ ID NO: 50339 - DNA, 120 bp, synthetic construct
  source 1..120: mol_type = other DNA
gagtatttaaaattaagtttgataagctttctatgcgcaggcacttatctcacttggactgtctgttatagggaaaggaaaacaaggggctgtgtctcccatggttacagctgctcgact

SEQ ID NO: 50340 - DNA, 120 bp, synthetic construct
  source 1..120: mol_type = other DNA
tgtggccctgcatgacacgcctcctgtttctaagtgagtatacacactttttcctccttgacatcatttccaggtctgcattcttaccatatctggttaaaacgaatctcatttgaaaac

SEQ ID NO: 50341 - DNA, 120 bp, synthetic construct
  source 1..120: mol_type = other DNA
aacatggtgaaaccccgactctactaaaaatacaaaaaaaaaaaaaaaaatcagccgggtgtggtggcaaatgcctgtaatgtcagctactccagaggctgaggcaggagaattgcttga

SEQ ID NO: 50342 - DNA, 120 bp, synthetic construct
  source 1..120: mol_type = other DNA
tttaattttaatttaaaaatttttgagacagggtcttgctctgtagcttaggctggagtgcagcggtggcatcatattatatagttcactgcagcctctacctccagggctcagtgatcc

SEQ ID NO: 50343 - DNA, 120 bp, synthetic construct
  source 1..120: mol_type = other DNA
aaggtgcaggttctcctgggcgcgcactccctgtcgcagccggagccctccaagcgcctgtacgacgtgctccgcgcagtgccccacccggacagccagcccgacaccatcgaccacgac

SEQ ID NO: 50344 - DNA, 120 bp, synthetic construct; identical to SEQ ID NO: 4057
  source 1..120: mol_type = other DNA

SEQ ID NO: 50345 - DNA, 120 bp, synthetic construct
  source 1..120: mol_type = other DNA
gtgacagagcgagactctgtctcaaaaaaagaaaaaaaagaaatatagttcctagcactttgggaggctaaggcagaaagactgcttgaccccaggttgagaatgcagtgagctgtgttt

SEQ ID NO: 50346 - DNA, 120 bp, synthetic construct
  source 1..120: mol_type = other DNA
tatagaattgggaaataatgcctaggttggcactatttcaaggagaaaaacaagagttaaaaaaaaaaatttgaggagaccaggcacagtggcccatgcctgtaatcccagcactttggg

SEQ ID NO: 50347 - DNA, 120 bp, synthetic construct
  source 1..120: mol_type = other DNA
gtgcaaaaccactgctccaatgtgagtcttctcattaattctagattagtccccacactttcctattcttcacagtctcagtggtactcttcccttaaactacagtgtaatatccaagtg

SEQ ID NO: 50348 - DNA, 120 bp, synthetic construct
  source 1..120: mol_type = other DNA
aacacagaccactggatttgatacctggctccagcaatgtcttgtgaccttaagggagttgctaaaatgttctgtggttcagttcagtcatctatacctttgaaagagtaatagtctccc

SEQ ID NO: 50349 - DNA, 120 bp, synthetic construct
  source 1..120: mol_type = other DNA
gcttggtgatatagacccacacatatccagcacctgacttatgacaaaggtgaaagcatgtcagtacagaggaaagaatgatactttcgttgaataatgctataacaattggatatctct

SEQ ID NO: 50350 - DNA, 120 bp, synthetic construct
  source 1..120: mol_type = other DNA
tagagggctatttcactgtcccactacccatgagataaggaagagggtttgttgagctgattaacacataaaccatttgcagatggcaaagctaaaggagcacactgtaacatacgccca

SEQ ID NO: 50351 - DNA, 120 bp, synthetic construct
  source 1..120: mol_type = other DNA
ttgactgaaaaggagtactggggttttctgggatgtaataatgttcagtgttttgaccttggtggtggtttcacaggtatctttaccttctcaatatccagcatatgatttatgttttcc

SEQ ID NO: 50352 - DNA, 120 bp, synthetic construct
  source 1..120: mol_type = other DNA
ctcttttctgaaaactgtattatgaaacatttgctaatgatgcttttcacaggagtaataaaaatttgatttagaaaatgtgcttaagtattctgtaacttgacaattgagtggcttttg

SEQ ID NO: 50353 - DNA, 120 bp, synthetic construct
  source 1..120: mol_type = other DNA
taataccttttgaaaggttgaattattttcagttatattttctaatgttattgcttgttctttggcttgtaaactttatatgtagccactttttaaatgaagaaaacaattatttccttg

SEQ ID NO: 50354 - DNA, 120 bp, synthetic construct
  source 1..120: mol_type = other DNA
cctttctaatgcaatatattgtctacaataacatttccaattgtgtaggaacgttaattgcctccttgttttaacagtctggctcagggggtcactgcaggctactaagaattgggtcag

SEQ ID NO: 50355 - DNA, 120 bp, synthetic construct
  source 1..120: mol_type = other DNA
ctataagagaaggggtagagaaaatgcccacagaaatggcacgagcctgagacgtctgccaaggcaagctttgcttattttaaatttaggcatatcctgggaatgcatatgctactcttt

SEQ ID NO: 50356 - DNA, 120 bp, synthetic construct
  source 1..120: mol_type = other DNA
aggcggaggttgcagtgagctgagatcatgccattgcccttcagcttgggcgacagagggagattccatctcaaaaagaaaaaaaaaaaaaagaaagaaagaaagaaagaaaaggaaaaa

SEQ ID NO: 50357 - DNA, 120 bp, synthetic construct
  source 1..120: mol_type = other DNA
ctgcctcagcctcccacacctagctaaatttttttcttttcttttttctttttctttctcaaatgcctattaagtgtgacataatctctattctgctttgtctctagagtttgtttcttt

SEQ ID NO: 50358 - DNA, 120 bp, synthetic construct
  source 1..120: mol_type = other DNA
attaagtaatattgatttttagctttgaccaaaattatataactattttcctcaaattatagtaaaaacattcctactctttaccagtagttaaacgtattcacactcttaattcatggg

SEQ ID NO: 50359 - DNA, 120 bp, synthetic construct
  source 1..120: mol_type = other DNA
gttgcccaggctggtcttgaactcctggggtctattgatcctcttgacttggcatgtcaaagtgctgggattataagcatgacccactgcatccagactaaaactaattttaaattgtaa

SEQ ID NO: 50360 - DNA, 120 bp, synthetic construct
  source 1..120: mol_type = other DNA
agggaggggcttccactcagacctgttttggataatcctcaatttggtccagtgtccaagtcccatctcctatctcaataatactcaatacaataatggttagaacaaaagcagacagga

SEQ ID NO: 50361 - DNA, 120 bp, synthetic construct
  source 1..120: mol_type = other DNA
tgagaagttggtaggaagattttgtggaagagatgtatccttgttttctacatctggttgttaaaagcaatgaactatatttggaaatcaagaattaggggcacaaacgtatcacctgga

SEQ ID NO: 50362 - DNA, 120 bp, synthetic construct
  source 1..120: mol_type = other DNA
aaataaattgcctcaaggaattgtgagcatgagataagcaagtctgaaatccacagggcaggtagtcagaaaaggaagattacagacaggatggaactcacaggaaaggaagctgctttc

SEQ ID NO: 50363 - DNA, 120 bp, synthetic construct
  source 1..120: mol_type = other DNA
ctgtatatagaattctatatagatagttatttcttcctgaaaatggaagtgattaatacctggtggcgtctgctattgctattgagaagtctttgtaaatctaaccattactgcttttaa

SEQ ID NO: 50364 - DNA, 120 bp, synthetic construct
  source 1..120: mol_type = other DNA
tctatgaaagtatttatttcaaaacatatgttttcctgtttttttccccttttgtgacagggtctcaccctgtctctcggctggagtgcggtgacatgatcatagctcactgcatcctta

SEQ ID NO: 50365 - DNA, 120 bp, synthetic construct
  source 1..120: mol_type = other DNA
attattggtaatggtcacgttaatgcctgttcttaagtaaatgatctatcctactctaacatttttctttagatagtgtttagtgcttttgttactgcaagaagtgtttgtgttaagaat

SEQ ID NO: 50366 - DNA, 120 bp, synthetic construct
  source 1..120: mol_type = other DNA
cccccaccaggataattttgctgatgaaggatgaaagttgatgccagtataggtcacatccatgcccggtaacaacagaattgggtatccttagtttaaatactttagttgtcaccttga

SEQ ID NO: 50367 - DNA, 120 bp, synthetic construct
  source 1..120: mol_type = other DNA
cttattttctgttagcaatgtctagtggtcagggagtatacttagagtggctttaattttttgagattggtagagatttgcttggaatgaatatgcatcttgcaattgttgaagacagtg

SEQ ID NO: 50368 - DNA, 120 bp, synthetic construct
  source 1..120: mol_type = other DNA
tgatacagttcagtttaagtctagcatattgctacttacttttgcctcaatttttctctcttcttttcctgccttctcttattttaatcaaatagtcttgactatctcattacatcatgt

SEQ ID NO: 50369 - DNA, 120 bp, synthetic construct
  source 1..120: mol_type = other DNA
gtttgtcccatgctgttctcatgatagtgagtgagttcttatgagatttaatggtttaagcatctggcatttccccaacttgcacttctctctcctgctaccatatgaagaagatcctct

SEQ ID NO: 50370 - DNA, 120 bp, synthetic construct
  source 1..120: mol_type = other DNA
ggccattgcttcagataatgaaagccctaagccttggcagcttccacatggtgttggtcctgtgggtacacagaatacaaaacctccacctagattcagaaaatgtatataagtgcttag

SEQ ID NO: 50371 - DNA, 120 bp, synthetic construct
  source 1..120: mol_type = other DNA
cagtttctcctatgctattctcgtgatagtgaatgagttctcatgaggtttgatggttttataagcatctggcatttcccctgtttgcacttctctcttgccatcatgtgaagaggtctt

SEQ ID NO: 50372 - DNA, 120 bp, synthetic construct
  source 1..120: mol_type = other DNA
gagggacctgggtaacacttttagtttgagtcagtcccatttctggtttctagtctcaaagattaaaccctcttgggtttttaaagtcaagaatctggttggtttcttctatctcaaaag

SEQ ID NO: 50373 - DNA, 120 bp, synthetic construct
  source 1..120: mol_type = other DNA
tctctttgattacttaataactggcttccctaatagaatggaaatgctttgagaacagatagtttgtttcttcattgttttttctttataacttagaatagtgctcaataaatatttccc

SEQ ID NO: 50374 - DNA, 120 bp, synthetic construct
  source 1..120: mol_type = other DNA
ctgcaacctctgcctccctggttcaagcaattctcctgcctcaacttcccgagtagctgggactataggcacgtgccaccacgcccggctaatttttgtatttttagtagagatggggtt

SEQ ID NO: 50375 - DNA, 120 bp, synthetic construct
  source 1..120: mol_type = other DNA
aatgtcccaggtctgcaaattattcttaccacatggattaaaaatactactctttcagaatcattgactctgttccttctaaccaactactgggttttcattgccaaaatcatcactgta

SEQ ID NO: 50376 - DNA, 120 bp, synthetic construct
  source 1..120: mol_type = other DNA
tgagcagatttgactcactgggtattctcaggaaaaaatctctacgatagagatggagagatggaggcaagtgctgaaagtaaatcacacactaacaacttttggctggcactatcttta

SEQ ID NO: 50377 - DNA, 120 bp, synthetic construct
  source 1..120: mol_type = other DNA
agctaaataaagaccagaattttgcctttattaatgaagaagaactcacccagtaaccacccaaatgcagggatctatggtaacagctgaagtggagaacgtgattgagacctcccacta

SEQ ID NO: 50378 - DNA, 120 bp, synthetic construct
  source 1..120: mol_type = other DNA
caagctagcattgaaagtagtaattttcattgtccactcccatagaaaagaatcaggaataaacattccatttgcttgtttcttagaggaaagtatctctagcaaacaggtatatcaaat

SEQ ID NO: 50379 - DNA, 120 bp, synthetic construct
  source 1..120: mol_type = other DNA
agtaaactgtaagccaggatttttttagtcataatactgccaacctgtgcatcatgaccaatcaaagattttggcttctgtgataaacatcgtggttgatttgtttagtagtaccatagt

SEQ ID NO: 50380 - DNA, 120 bp, synthetic construct
  source 1..120: mol_type = other DNA
tcagataaatcatttattaagcggtcaagtcaaaacagaacttttgtttggttgactgatttacctgatggaaacaacatttctgttttcatataattatgtcctggtcacagtccttta

SEQ ID NO: 50381 - DNA, 120 bp, synthetic construct
  source 1..120: mol_type = other DNA
cgggaaagtttcaaactatcatggccaagaagagagaatatggacagttgtggacttttaagaaattatgccataagacgtacagtaagaagctacagctatagtgtggtgataacagtt

SEQ ID NO: 50382 - DNA, 120 bp, synthetic construct
  source 1..120: mol_type = other DNA
tttttccatttctcagtcacaagtacaagtaaaacctgaatattcaatactatgcttgcaggtcctgctttctttaggaaaagagataccaagagaaggcactgggattgggtactcctt

SEQ ID NO: 50383 - DNA, 120 bp, synthetic construct
  source 1..120: mol_type = other DNA
atagagtgctaaccttgaattagtattctaacttcaaatgaccaatggttgtttccaatagtaggaaaatatggatagtctcaagtattgttttggataaaggtacaggttcgggcaatg

SEQ ID NO: 50384 - DNA, 120 bp, synthetic construct
  source 1..120: mol_type = other DNA
gtaccagtgactggaatatgtgaaatgcaaagcatttctgaatttggacattgggctcattggtagcttttatcagagcaatggcaacaaaatagaggtcagaaactaggtagtagtgag

SEQ ID NO: 50385 - DNA, 120 bp, synthetic construct
  source 1..120: mol_type = other DNA
ggcagagttgagttgttgcagcagagacattttatctggccctttacggaaaaggttttccaaaccctctgctattttatcctattatagtaagaaaaatgtaatgcagtatctcaatgt

SEQ ID NO: 50386 - DNA, 120 bp, synthetic construct
  source 1..120: mol_type = other DNA
ctgcaacccggggaaatacagcaaaatgcacaagtactggctggatacctgctccgagatgtacctgtaagttccattcatatcttgacccatttcttaattctgaaatttcttttaaac

SEQ ID NO: 50387 - DNA, 120 bp, synthetic construct
  source 1..120: mol_type = other DNA
atccacctctatgatccaatcacctccctcaacattgggaattacaattcaacatgagatgtgtgtggggacacagagccaaaccatatcaattatctactcacacactgttaacttcag

SEQ ID NO: 50388 - DNA, 120 bp, synthetic construct
  source 1..120: mol_type = other DNA
ggaaacaccataaatgctgtgaaaccaaaaactacatttgtagaagtgtaacaagtagaatgaagctatttgaagtccttctattctcagcgctgatgagactctctgtgggtactaata

SEQ ID NO: 50389 - DNA, 120 bp, synthetic construct
  source 1..120: mol_type = other DNA
cagaatttaagaaagatggagatgtaaaagaatatttatatgtgtgtgtgtgtatgtgtgtattgaaattctttttaacctattgcataaggtttattgaaatagaaacatatttcatgg

SEQ ID NO: 50390 - DNA, 120 bp, synthetic construct
  source 1..120: mol_type = other DNA
gtctgtgcatttttctttctggagagccttcatacaaatttacgcatcatgtgatccacaagacataatttcatcttcattaacaaagaccttcttgttacatatctcagtcatctgagt

SEQ ID NO: 50391 - DNA, 120 bp, synthetic construct
  source 1..120: mol_type = other DNA
tttggaaaatggatataatcaaaatcatggaagaaagtttgtacagggtaaatctatagacgttgcctgccatcctggctacgctcttccaaaagcgcagaccacagttacatgtatgga

SEQ ID NO: 50392 - DNA, 120 bp, synthetic construct
  source 1..120: mol_type = other DNA
tgctggcattcaccttgcaagcttccagcttgcttgtctatgtttgcagttcgattttacaggctcctcttgttagaaaagaaaatgatttgggggctgcctttcattaaaaggaaaaac

SEQ ID NO: 50393 - DNA, 120 bp, synthetic construct
  source 1..120: mol_type = other DNA
tttttaaccagcattgcagtaaccctctattgaattttatttatttattttattttgagatagaatctcactctgtcacccaggctggagtgcaatgtcgcgatctcgcctcgctgcaac

SEQ ID NO: 50394 - DNA, 120 bp, synthetic construct; identical to SEQ ID NO: 9121
  source 1..120: mol_type = other DNA

SEQ ID NO: 50395 - DNA, 120 bp, synthetic construct
  source 1..120: mol_type = other DNA
taagtatacgtgtgccatggtggtttgctgcacccatcaacccgtcatctaggttgtaagccttgcatgaattagctctttgtcctgatgctctctctcccctttccccgcacaccccaa

SEQ ID NO: 50396 - DNA, 120 bp, synthetic construct
  source 1..120: mol_type = other DNA
aagggaagggtccagtttcagttttctgcatatggctagccaattttccctgcaccatttattcaatagggaatcttttccctattgcttgtttttgtcaggtttgttgaagatcaaatg

SEQ ID NO: 50397 - DNA, 120 bp, synthetic construct
  source 1..120: mol_type = other DNA
ctggacctaatagacatctacagaactctccaccagaagtcaagtgttcttcttggcactacatagcacttattctaagatcgaccatataattggaagtaaaacactccccagcaaacg

SEQ ID NO: 50398 - DNA, 120 bp, synthetic construct
  source 1..120: mol_type = other DNA
cttcatgtctaaaataccaaaagcaatggcaacacaagccaaaactgacaaatgggatctaattaaactaaagagcttctgcacagcaaaagaaactaccatcagagtgaacaggcaacc

SEQ ID NO: 50399 - DNA, 120 bp, synthetic construct
  source 1..120: mol_type = other DNA
agttaatgggtgcagcacaccaccatggcacatgtatacatatgtaactaacctgcacgtagtgcacatgtaccctaaaacttaaagtataataataataaaaaaagaattagagaagca

SEQ ID NO: 50400 - DNA, 120 bp, synthetic construct; identical to SEQ ID NO: 9122
  source 1..120: mol_type = other DNA

SEQ ID NO: 50401 - DNA, 120 bp, synthetic construct
  source 1..120: mol_type = other DNA
aaacagttaaggaggaaaaagtaaaattcaactaggcttgtaggacaatcaatggtaatcattaggctagctttccattgacccacttccttatagctggtcactgattactagtccagg

SEQ ID NO: 50402 - DNA, 120 bp, synthetic construct
  source 1..120: mol_type = other DNA
agacagattgagattccgtctcaaaaaaaaaaaaaaagaaaagaaaaaaaaattcatggcaagccactctccttgcagtcatttacctacagtccagtgcccccatgccactggggctga

SEQ ID NO: 50403 - DNA, 120 bp, synthetic construct
  source 1..120: mol_type = other DNA
agctctcatgaactaagggctgtcccttagttctcccaaagtaacccacaatgcaaccctgatgggctgcatcttccaaaattgaaaggcctttgtctatcattccatgaaacaaaaaaa

SEQ ID NO: 50404 - DNA, 120 bp, synthetic construct
  source 1..120: mol_type = other DNA
aaaactgcattttgatcagcctctgcaagggagtgcccaagcaaaggagtctcagtaaggtccaggatggtcaagcagaagcctaatgagggttgctttggaattcttagaacaagtctt

SEQ ID NO: 50405 - DNA, 120 bp, synthetic construct
  source 1..120: mol_type = other DNA
aggcagagcttgcaagtgagccaagatcatgccactgcactccagcctgggggacagagcaagactctgtcaaaaaaaaaaaaaaaaaaaaaaagacagagtttttctatacatccttga

SEQ ID NO: 50406 - DNA, 120 bp, synthetic construct
  source 1..120: mol_type = other DNA
tctgtattcccctgagtccagagtcccatgaagtgtttgcctttgaataggaagactctgacactaaagctaaatgatagtattgctggatgatgctccatcaaggcttcaaaaactcac

SEQ ID NO: 50407 - DNA, 120 bp, synthetic construct
  source 1..120: mol_type = other DNA
ccctttaaaaacctggacttaaaaatattcactgaggaaagcagctttatgcaccacggacaacagaaggctgagtatgctattgtaaccctgtgacagatcctagatgcagagacactc

SEQ ID NO: 50408 - DNA, 120 bp, synthetic construct
  source 1..120: mol_type = other DNA
tttagatacattttcaagataaacaaaatcattccgctgcaagaccaagagaatgtctgagctaatgagagccttggtagagaagattaccctcaggtttaggtggcctgtctccatcca

SEQ ID NO: 50409 - DNA, 120 bp, synthetic construct
  source 1..120: mol_type = other DNA
acccttatagacattacttcataattgccttggtcaatacaattgttagacttatagattttctagacattctatgccatgctaacatagtctcatgccactcattatgtggacattcta

SEQ ID NO: 50410 - DNA, 120 bp, synthetic construct
  source 1..120: mol_type = other DNA
tatcaatatatctggtggcagagccttctaggcatcacgagtcctagctatggagtatacactcactgggacatgatcagaaacttattggcaaccacagaaataattgcaaaagaggct

SEQ ID NO: 50411 - DNA, 120 bp, synthetic construct
  source 1..120: mol_type = other DNA
gagcaagatcatcttgctcaaaaacaaaacacacacacacacacaaacatacacacacagacacacagacacacacatcagctggtctaaagagcccagcaaaaagctgactcaggaaat

SEQ ID NO: 50412 - DNA, 120 bp, synthetic construct
  source 1..120: mol_type = other DNA
ttaatagacagaatttattaatgctacctaatccttcttgagagagccatgatagtttgtggcttcagtaattttttaattcattcaagttcttgaatttattgacatggcattattcag

SEQ ID NO: 50413 - DNA, 120 bp, synthetic construct
  source 1..120: mol_type = other DNA
tctagggagttgctgtggaaatttgtagagccctttcactccatagtttcttcttttctcactctgtttcctgcagattctagtgaactcatcttctttgggaacactgagttttgtttc

SEQ ID NO: 50414 - DNA, 120 bp, synthetic construct
  source 1..120: mol_type = other DNA
agttctgggaagcaacctagtaaacgacagtaatttctttttttgggttattattattattattattattatactttaagttttagggtacatgtgcacaatgtgcaggttagttacata

SEQ ID NO: 50415 - DNA, 120 bp, synthetic construct
  source 1..120: mol_type = other DNA
agagccttgttttaaaaagtgatgaagagtcttgatgtaatgtctttggcaactctgagcttattttccttgacttaagtatttgaatgcttatggttatccaggttttcagttacaaat

SEQ ID NO: 50416 - DNA, 120 bp, synthetic construct
  source 1..120: mol_type = other DNA
agatggtaccaatttctgctctgttgtatgatttccctaccacactatctagatatttatgaagatttccctaccacactatctagatatttatgaaaattttctgggaacaattggttc

SEQ ID NO: 50417 - DNA, 120 bp, synthetic construct
  source 1..120: mol_type = other DNA
ggggcttaagcaatgaaaaaaaatgttgtgtagaaagatatactttcacttttgacaactattttacgacaacaaattctcaccagtcatagattatttttgtacggtacctatttatta

SEQ ID NO: 50418 - DNA, 120 bp, synthetic construct
  source 1..120: mol_type = other DNA
aggtggtaaagcagagtctatcctgctgaggctagatgggaggcaaggaaacaattatccagatcagctcaaggcatcatatcatttggattcattttatgactaatgaaaacccataaa

SEQ ID NO: 50419 - DNA, 120 bp, synthetic construct
  source 1..120: mol_type = other DNA
tccactgcttgctgggcatgtatctttggccaacacagcaagtctatttgaagctttgttgactctttcttgttggtaaaatgtcacatatttacaaacagttctaatatttcaaaggat

SEQ ID NO: 50420 - DNA, 120 bp, synthetic construct
  source 1..120: mol_type = other DNA
attgtagatgaaaggcagtgtcaaaggtccagttaaatttgactcattcctgctgttgtaaacacctatcataggacaggagaaaatggtgaaaacacaagcacaggtctacttatccag

SEQ ID NO: 50421 - DNA, 120 bp, synthetic construct
  source 1..120: mol_type = other DNA
ttctctcagccatgtaacagaaaactgcatgtggattgacagacatctgagtatatttcaagtgtcctaggaggtctcttctttgtggaaaggtttccacagaattgttattatggagca

SEQ ID NO: 50422 - DNA, 120 bp, synthetic construct
  source 1..120: mol_type = other DNA
gcatagtggtgaagtctgtacttttagtgtattcatcacccaaatactgaacattgcacccattaggtaatttcttattcctcaccctcctgctatcctgccacatttctgagtctccaa

SEQ ID NO: 50423 - DNA, 120 bp, synthetic construct
  source 1..120: mol_type = other DNA
atttcaccaagttctgataagatacttgatattatttctaacctttaaaattttgggaacttgctttgtagctgtagcctagcatatggtctattttggagaatgttccatgcacaggtg

SEQ ID NO: 50424 - DNA, 120 bp, synthetic construct
  source 1..120: mol_type = other DNA
taagaaccctgaaaataggacaccaatatcttctggcttgtacagtttctgctgagaagtccactgttagtcttacgagatttccgttatagttgattagatgcttttctcttgctgatt

SEQ ID NO: 50425 - DNA, 120 bp, synthetic construct
  source 1..120: mol_type = other DNA
aagactctgtttgagtaccttggttagagataacttttgtatgatggctttcttaattgctggttgtagtagttatgtactgggtgtatgacgaggcttactgcctcctgaagggctggt

SEQ ID NO: 50426 - DNA, 120 bp, synthetic construct
  source 1..120: mol_type = other DNA
aaggcagatgaccctattcaactagtagtttggtgtaatgccctcaagaagttcccaaatctccactcacaccagtgtgtgtgttcacgaagacagaagagctctctgatggcttggatc

SEQ ID NO: 50427 - DNA, 120 bp, synthetic construct
  source 1..120: mol_type = other DNA
tgaaggacatgtattgagtactgaatacctgagattcagtcacttaagttaatctccactgtttcttgaacgatgtgctggaagtattcccagacacacaggtgttgtcggtcttagtct

SEQ ID NO: 50428 - DNA, 120 bp, synthetic construct
  source 1..120: mol_type = other DNA
cattatttacatagtatttctactatagagcaagtacaatcatgtggtccacctcctgaactcctcaatgggaatgttaaggaaaaaacgaaagaagaatatggacacagtgaagtggtg

SEQ ID NO: 50429 - DNA, 120 bp, synthetic construct
  source 1..120: mol_type = other DNA
cactagtgtgggcaatatagcaaaagcccatctctataaaaaaaattttgtaattagttaaggtgtggtggtgcatgcctgtaatccagctacttgggaggctgaggaggaatgattgct

SEQ ID NO: 50430 - DNA, 120 bp, synthetic construct
  source 1..120: mol_type = other DNA
tcccaaagaataaaatgtcttctgataggtatctctaacatttcagcgacagaatacagggcttatattttgacataatagcattttgatgcaatgtgatcaggaataacttggttggtg

SEQ ID NO: 50431 - DNA, 120 bp, synthetic construct
  source 1..120: mol_type = other DNA
tatccaattgtgggtttccttgcctcactaacttcaatatttttaccaatgtctgccagtctaggatatacagaaagcattgacaaccaatacaaaaactaatctgctatcaacatttca

SEQ ID NO: 50432 - DNA, 120 bp, synthetic construct
  source 1..120: mol_type = other DNA
gggggctctattttacttacttttactctgatctttatgatttccatccttctactaattttggaattgactagtttgttcatgtttttctgcttctttgaggtgtactactagactgtt

SEQ ID NO: 50433 - DNA, 120 bp, synthetic construct
  source 1..120: mol_type = other DNA
ttttgtgtatctattagatgttttgcttttggctatccttaggcttgcatagcataccttataaaaggctatttgaagttgtagttatccttaggcttgcataacatatcttataacagg

SEQ ID NO: 50434 - DNA, 120 bp, synthetic construct
  source 1..120: mol_type = other DNA
tttggttctcagatttggtgattttcagtaatttgacttcaagttcactaattccttcttctccttcatctagtctgctgatgaatacctctttaaaacttttccgttcagttatagtat

SEQ ID NO: 50435 - DNA, 120 bp, synthetic construct
  source 1..120: mol_type = other DNA
tgcagatctctatcatctcccagtgtgagtttgttaaggagacgatctcttgagttggagctatagaagtgatgacctttgaatgcatggctaaacttggtccaggaagaatggataaat

SEQ ID NO: 50436 - DNA, 120 bp, synthetic construct
  source 1..120: mol_type = other DNA
cttttctaattgtgtggtgcagtgaacaaggctggggtccatgctccattgtgttgcaacttttcttacttgttcaatgtgaatgttgtctttgttgcctgttaagtaggagtcccttta

SEQ ID NO: 50437 - DNA, 120 bp, synthetic construct
  source 1..120: mol_type = other DNA
ctttgaaaatataaaactttaaagctctattcttttaagcactgctttagctgtgtcccagaatgttacacacgtgtgtgtgtgtatgttctatgtgtcgggagacagagagagagagtt

SEQ ID NO: 50438 - DNA, 120 bp, synthetic construct
  source 1..120: mol_type = other DNA
aagctttaggtgaagtagagcatacactatgataggagaaaggaaaatcaagggattatagaatgctcccagatgcttctaaactcccccgtcagtcaaacaggacatgcttcattttca

SEQ ID NO: 50439 - DNA, 120 bp, synthetic construct
  source 1..120: mol_type = other DNA
gcccacctccacctcagattcccaattctcacaatatgacaaccacactgaattatcgggatggagaaaaagtatctgttctttgccaagaaaattatctaattcaggaaggagaagaaa

SEQ ID NO: 50440 - DNA, 120 bp, synthetic construct
  source 1..120: mol_type = other DNA
gctacatgggaaaatggagttctccacctcagtgtgaaggttaggccaatatgaatactcaatttctgtttatagtagaattcataaaaataatctcttgttatcaaagtgaggggaata

SEQ ID NO: 50441 - DNA, 120 bp, synthetic construct
  source 1..120: mol_type = other DNA
cttgatggaagtctgaaatttaatagggcagtcattaaaccttaaatttccaagattatctcctttgactccatgtctcacattcaggtcatgctgatgcaagagatgggctcccacagc

SEQ ID NO: 50442 - DNA, 120 bp, synthetic construct
  source 1..120: mol_type = other DNA
agataccctaaatcatctctctcaagttcaaagttccacagatctctaaggcagggcaatatgccaccagtctctttgcatagcaggagtgacctttactccagtttcaaacaagttcct

SEQ ID NO: 50443 - DNA, 120 bp, synthetic construct
  source 1..120: mol_type = other DNA
tacagaggcattgtttaccaggcatagatgatctctttctgaaatgtattgctatttttagtttcaagtccttcttcagttggtgacagtccgatagacagacagacaccagaaggctag

SEQ ID NO: 50444 - DNA, 120 bp, synthetic construct
  source 1..120: mol_type = other DNA
caatcacttcccaccaggtctctctctcaacacctggagattattattcaagatgagatttgggtgaggacacaaagcctaaccatatcaggtggcaagtatggacaaaaataatgtgaa

SEQ ID NO: 50445 - DNA, 120 bp, synthetic construct
  source 1..120: mol_type = other DNA
cttgaaccagggagatgaagattgaagtgggccaagatcgtgccactgcactccacccagggtgacagagtgagattccgtctcaaaaaaataaataaacctgaaataaataaatatata

SEQ ID NO: 50446 - DNA, 120 bp, synthetic construct
  source 1..120: mol_type = other DNA
gaactggtaatatttgtttactcaaactcaaagagagatatccaggaaaactttcgtttacactggcttccagaagggaaaaataaaggtctatcagtgttctagcgaaggatgaagaag

SEQ ID NO: 50447 - DNA, 120 bp, synthetic construct
  source 1..120: mol_type = other DNA
tttacttagactctacctatgtttattattgaagtgagtttttgtagacagcatatagttgggtcatgtttacatatccattcatcctttcatggcctgttaactggtgcacttggacca

SEQ ID NO: 50448 - DNA, 120 bp, synthetic construct
  source 1..120: mol_type = other DNA
gaaaagcatagtttttgtctagttgctttcaaggtatttttttctttttttaaagtagttttattttaatgtatattggtataaattccaatgtttttatcctctttggagttcactcag

SEQ ID NO: 50449 - DNA, 120 bp, synthetic construct
  source 1..120: mol_type = other DNA
attattgaacaaccattctgctgaatgcttgcctaccaaatatttctgtcagaaagtaaagtttagaaatttttctctttagggctgggtgcggtggctcacacctgtaatcccagcact

SEQ ID NO: 50450 - DNA, 120 bp, synthetic construct
  source 1..120: mol_type = other DNA
attcctgaaccatcatataacattctacttgaaaacctgaaagtctatgaagatttgcatactacttaatgttttatgtttactgttttttattttcagatccgtgtgtaatatcccgag

SEQ ID NO: 50451 - DNA, 120 bp, synthetic construct
  source 1..120: mol_type = other DNA
tatagaaaaaacattgccaggaaattcaaaactatagataaatgtgtgtgtgtgtgtgtgtgtgtgtgtatacatgtatatgtatgtgagtgtgtgcgtgtgtgtgtgtgtgtatttaga

SEQ ID NO: 50452 - DNA, 120 bp, synthetic construct
  source 1..120: mol_type = other DNA
accatagtgatgaggacgtaacacacatattttgaaagggtactactatgcacaccatagcacagcatagggataaacaaatatgttccatgtaaatggaaaccaaaagaaagcaggggg

SEQ ID NO: 50453 - DNA, 120 bp, synthetic construct
  source 1..120: mol_type = other DNA
actagaagttggcttttgaaaatataaacaagattgacaaacctttagctgaactaaaaaagagagaaggaacaaataaaattagaaatgaaacaggaaacattgtaactgatagcacag

SEQ ID NO: 50454 - DNA, 120 bp, synthetic construct
  source 1..120: mol_type = other DNA
atggaaaacccaaggacttcaccaaactttgctaaaagtaataaccaattcagtaaagttgcagggtacaagatctacagacagagccagttacatttctatacactaacagcaagctat

SEQ ID NO: 50455 - DNA, 120 bp, synthetic construct
  source 1..120: mol_type = other DNA
gtaggaatgctcaaagatttcccataaaaattctcacaaaattgtttttgtctgttgagaggaatgagcaggagcattgttctggtggaggaggactctctgatgaagttttcctgggca

SEQ ID NO: 50456 - DNA, 120 bp, synthetic construct
  source 1..120: mol_type = other DNA
ttgttaagttctttgtagattctggctatcagccgtttatcagatgggtagattgcaaaaattttctcccattctgtaggttgcccgttcaccctgatggtagtttcttttgctgtgcac

SEQ ID NO: 50457 - DNA, 120 bp, synthetic construct
  source 1..120: mol_type = other DNA
gtctgttattggtgtgtaggaaagcttgtgatttttgcacattgactttgtatcctgagactttgctgaagttgcttaccagcctaaggagattttgggctgagacgatggggttttcta

SEQ ID NO: 50458 - DNA, 120 bp, synthetic construct
  source 1..120: mol_type = other DNA
tcctttctcttttcttctttattagtattgctaggggtatattaattttgttgattctttcaaattttcagcttttctgctctggtttctccccatctttgtggtttttacctacctttg

SEQ ID NO: 50459 - DNA, 120 bp, synthetic construct
  source 1..120: mol_type = other DNA
atgagatgaaccaggtacctcaattggaaatacagaaatctcccatcctctgcgctggtcacgctgggagctgcagaccagagctgttcctattcagccatcttggagcggtgaccgcat

SEQ ID NO: 50460 - DNA, 120 bp, synthetic construct
  source 1..120: mol_type = other DNA
gtatgctctttggccaatttctagagattatttttataattttatccagttttattgctgccttttggtggtgagtgaatataccaagacccagaaatacccattctcaaagtcccatcg

SEQ ID NO: 50461 - DNA, 120 bp, synthetic construct; identical to SEQ ID NO: 9134
  source 1..120: mol_type = other DNA

SEQ ID NO: 50462 - DNA, 120 bp, synthetic construct
  source 1..120: mol_type = other DNA
tctattgcttgaaattcatttttttttgagatggactttcactcttgtttcccaggctggagtgcaatggtgtgatttcggctcaccacaacttccatctcctgggttcaagcaattctc

SEQ ID NO: 50463 - DNA, 120 bp, synthetic construct; identical to SEQ ID NO: 9135
  source 1..120: mol_type = other DNA

SEQ ID NO: 50464 - DNA, 120 bp, synthetic construct
  source 1..120: mol_type = other DNA
cacggcagtaacaggcatggagctgtcctctcctatgataacaaaggtttcttctagaatagttcctgaaggacctgcctcaggaaacattaactgttttacagttaatttttttaatca

SEQ ID NO: 50465 - DNA, 120 bp, synthetic construct
  source 1..120: mol_type = other DNA
ttatggtaggttaatactatcaagacgggagtctttccctcaacacctttaccaaaactatctaatgtcaaattttaaacagttagataatcaatttcaggtttcacaaggtgaaaatat

SEQ ID NO: 50466 - DNA, 120 bp, synthetic construct
  source 1..120: mol_type = other DNA
ttttaattttttttgaggtggagtcttgctctgtcgcccccaggctcgagtttagtggcatgatctccgctcactgcaacctccccctcctgggttcaagtgattcttctgcctcagcct

SEQ ID NO: 50467 - DNA, 120 bp, synthetic construct
  source 1..120: mol_type = other DNA
gaacaaccctatcacttttctactgtatactatgtagatcaggaagatttgctactcttacactctgtcttcattcttaaattgttgtgtgtgggttttattcttgaagacaatgcagga

SEQ ID NO: 50468 - DNA, 120 bp, synthetic construct
  source 1..120: mol_type = other DNA
ttgggagacagatacatgaggcaacaaaggagatagcaatgatctttctcctaagaaacatttatgagagttaagagagaaatagatatatgaagaggttcttttgtccctaaaaggttg

SEQ ID NO: 50469 - DNA, 120 bp, synthetic construct; identical to SEQ ID NO: 9128
  source 1..120: mol_type = other DNA

SEQ ID NO: 50470 - DNA, 120 bp, synthetic construct; identical to SEQ ID NO: 9129
  source 1..120: mol_type = other DNA

SEQ ID NO: 50471 - DNA, 120 bp, synthetic construct; identical to SEQ ID NO: 9130
  source 1..120: mol_type = other DNA

SEQ ID NO: 50472 - DNA, 120 bp, synthetic construct
  source 1..120: mol_type = other DNA
ctacgggatttttaagaaccatcatcaatttcaaaacccgtgtcctcttagtgttactccaaagaatgttgaatatgaaataagaaactttctttgtcatagttttctatgtttagcatg

SEQ ID NO: 50473 - DNA, 120 bp, synthetic construct
  source 1..120: mol_type = other DNA
ccactgcactccagcctgggcgacagagcgagactccgtctcaataaaaacaacacaaaaaagtaatttttctctttatatttatattttattttaaagaatttagttgataaataaaaa

SEQ ID NO: 50474 - DNA, 120 bp, synthetic construct
  source 1..120: mol_type = other DNA
cagctgaatttgtgtgtaaacggggatatcgtctttcatcacgttctcacacattgcgaacaacatgttgggatgggaaactggagtatccaacttgtgcaaaaagatagaatcaatcat

SEQ ID NO: 50475 - DNA, 120 bp, synthetic construct
  source 1..120: mol_type = other DNA
caagcaaggcggtgcatgttgagaatgataaagatttcatcagtaatgatcttaacatcaaatagcctcttaagtatttttggagtagaagagttttggaaatttcaatagtaaggttct

SEQ ID NO: 50476 - DNA, 120 bp, synthetic construct
  source 1..120: mol_type = other DNA
gacaaaaatgcagtaatagtaggggacttcaataacccacattcaacaatggatagacagtctatacagaaatcaataaaaacattggacttgaactctatattagaccaaatggaccta

SEQ ID NO: 50477 - DNA, 120 bp, synthetic construct
  source 1..120: mol_type = other DNA
ataatgaaatacaaaattaatacagaacagtaatgagtaagaaaaatgaacaagtaataaaaagtctctcatcaaaaacaaaacaaaacaaaaaaaaaactcgtggcttcatgacagatg

SEQ ID NO: 50478 - DNA, 120 bp, synthetic construct
  source 1..120: mol_type = other DNA
cacaaataaatgaaaagatgtcctgtcttcaaggatcaaaagaatcaatattataaaattgtcttcaatacctaaaactccagattccatgcaatattgtcaatattctaaacacatctt

SEQ ID NO: 50479 - DNA, 120 bp, synthetic construct
  source 1..120: mol_type = other DNA
gaagaaatgtttcaggttcttattcccacttgtttaatacactttccgttaaaaactattcccttgctggccgggcgccgtggctcacgcctgtaatcccagcactttgggaggccgaag

SEQ ID NO: 50480 - DNA, 120 bp, synthetic construct; identical to SEQ ID NO: 9133
  source 1..120: mol_type = other DNA

SEQ ID NO: 50481 - DNA, 120 bp, synthetic construct; identical to SEQ ID NO: 9134
  source 1..120: mol_type = other DNA

SEQ ID NO: 50482 - DNA, 120 bp, synthetic construct; identical to SEQ ID NO: 50462
  source 1..120: mol_type = other DNA

SEQ ID NO: 50483 - DNA, 120 bp, synthetic construct; identical to SEQ ID NO: 9135
  source 1..120: mol_type = other DNA

SEQ ID NO: 50484 - DNA, 120 bp, synthetic construct
  source 1..120: mol_type = other DNA
tcatcaagtattacgtactgtacaaaattgtgtgtggcatatttttatgtgactggcaatgctgtaggtttgtttacccccggcattgccacaaatatgtgagtaatatattgcactgca

SEQ ID NO: 50485 - DNA, 120 bp, synthetic construct
  source 1..120: mol_type = other DNA
tgatgttccccttcctgtgtccatgtgttctcgttgttcagttcccacctatgagtgagaacacgtggtgtttggtgttttgtccttgtgatagtttactgagaatggtgatttccagtt

SEQ ID NO: 50486 - DNA, 120 bp, synthetic construct
  source 1..120: mol_type = other DNA
cttgaattaatttttgtataaggtgtaaggaagggatccagtttcagctttctacatatggctagcctgttttcccagcaacatttattaaatagggaatcctttccccattacttgttt

SEQ ID NO: 50487 - DNA, 120 bp, synthetic construct
  source 1..120: mol_type = other DNA
attgagataatcatgtggtttttgtctttggttctgtctatatgctggattacatttattgatttgcgtatattgaactagccttgcatccccgggatgaagaccacttgatcatggtgg

SEQ ID NO: 50488 - DNA, 120 bp, synthetic construct
  source 1..120: mol_type = other DNA
gtttgttataatttctgttcttttacatttgctgaggagagctttacttccaactatgtggtcaattttggaattggtgtggtgtggtgctgaaaaaaatgtatattctgtcgatttggg

SEQ ID NO: 50489 - DNA, 120 bp, synthetic construct
  source 1..120: mol_type = other DNA
tgctgagagatctgctattagtctgatgggcttccctttgtgggtaacccgacctttctctctggctgcccttaacattttttccttcatttcaactttggtgaatctgacaattatgtg

SEQ ID NO: 50490 - DNA, 120 bp, synthetic construct
  source 1..120: mol_type = other DNA
acaaacaaaaagacagcagtaacctctgcagacttaaatgtccctgtctgacagctttgaagagagcagtggttctcccagcacgcagctggagatctgagaacgggcagactgcctcct

SEQ ID NO: 50491 - DNA, 120 bp, synthetic construct; identical to SEQ ID NO: 9123
  source 1..120: mol_type = other DNA

SEQ ID NO: 50492 - DNA, 120 bp, synthetic construct
  source 1..120: mol_type = other DNA
aaccccgtatctacaaaaaatacaaaaattagccaggcatgctggcatatgcctgtaatcccagctactcaggagggtgaggcaggagaatcatttgaacccgggaggcagaggttgcag

SEQ ID NO: 50493 - DNA, 120 bp, synthetic construct; identical to SEQ ID NO: 9124
  source 1..120: mol_type = other DNA

SEQ ID NO: 50494 - DNA, 120 bp, synthetic construct
  source 1..120: mol_type = other DNA
gaatgataagaaagaatatacagagagaaatatatttaactattgtaattaactattatagcacaaaaagcactgattgtcagactatttttaatagtactcaatttattagcacacact

SEQ ID NO: 50495 - DNA, 120 bp, synthetic construct
  source 1..120: mol_type = other DNA
gccgaggcaggcagatcacgaggtcaggagttcgagatcagcctgaccaacatggtgaaccctgtctctacaaaaaatacaaaaattagccaggcatgctggcatatgcctgtaatccta

SEQ ID NO: 50496 - DNA, 120 bp, synthetic construct; identical to SEQ ID NO: 9124
  source 1..120: mol_type = other DNA

SEQ ID NO: 50497 - DNA, 120 bp, synthetic construct; identical to SEQ ID NO: 9136
  source 1..120: mol_type = other DNA

SEQ ID NO: 50498 - DNA, 120 bp, synthetic construct
  source 1..120: mol_type = other DNA
tgtatagaaattcttgctggcacaaactagagatatctgttggtactagtgaatgttgagactcatggtgtcacagtttccagtagttagagcacgcaaaatgcacagcccagaagagga

SEQ ID NO: 50499 - DNA, 120 bp, synthetic construct
  source 1..120: mol_type = other DNA
agtgaaggaaaagagcaaaacagatacagcccacagtacagatgaggatggtgttgtctggtggcttcaagaatcagaaataatgccgcatatctacaaccatctgatctttgacaaact

SEQ ID NO: 50500 - DNA, 120 bp, synthetic construct
  source 1..120: mol_type = other DNA
gctgctataaagacacatgcacacgtatgtttattgcggcactattcacaatagcaaagacttggaaccaacccaaatgtccatcaatgatagaccagattaagaaaatgtggcatatat

SEQ ID NO: 50501 - DNA, 120 bp, synthetic construct
  source 1..120: mol_type = other DNA
taatgacaggatcagattcacacataacaatactaaccttaaaggtaaatgggctaaatgctcgaattaaaagacacagactggcaaattggataaagagtcaagacccatcagtgtgct

SEQ ID NO: 50502 - DNA, 120 bp, synthetic construct
  source 1..120: mol_type = other DNA
tgaatccaggagatggttttttgaaaagatcaacaaaattgctagactgctagcaagactaataaagaagaaaagagaagaatcaaatagatgcaataaaaaatgataaaggggatatca

SEQ ID NO: 50503 - DNA, 120 bp, synthetic construct
  source 1..120: mol_type = other DNA
tgattcaccagcctcggcctcccaaagtgctgggattacaggtgtgagccactgcacctggcctattattatttttaaattttttttttttaattgatcattcttgggtgtttctcacag

SEQ ID NO: 50504 - DNA, 120 bp, synthetic construct
  source 1..120: mol_type = other DNA
agaagctcctcacatcccagacgggggggcggggcagaggcgctccccacatctcagacgatgggcggccgggcagagacgctcctcacttcatcccagacggggtggcggccgggcaga

SEQ ID NO: 50505 - DNA, 120 bp, synthetic construct
  source 1..120: mol_type = other DNA
agccaagaaagtttattaagctttagaacagtaaggaaaggaaagaaaagaaggaaagtataacttggaagagggccaagcaggtgacctgagaaaccaggtgcagggcttgccctcttg

SEQ ID NO: 50506 - DNA, 120 bp, synthetic construct
  source 1..120: mol_type = other DNA
ggcattaggggtggggaggaacggaagggagaatctcagggaaggcaagaatgcattcaattcttattgagtgcctgctatatgccgagggctactttttttttttttttttttcctttt

SEQ ID NO: 50507 - DNA, 120 bp, synthetic construct
  source 1..120: mol_type = other DNA
gtgtatgatatgtggtagggaatcaaggttcatgtttttcctacatagatatccaattgacccagcattatttattgaaaaaaaaaaatcgggccgggcgcggtggctcacgcctgtaat

SEQ ID NO: 50508 - DNA, 120 bp, synthetic construct
  source 1..120: mol_type = other DNA
gaatcacaaggtcaagagatcaaggccatcctggccaacatggtggaacttcgtctctattaaaaatatgaaaattagctaggtgtggtggcatgcacctgtagttccagctactcagga

SEQ ID NO: 50509 - DNA, 120 bp, synthetic construct
  source 1..120: mol_type = other DNA
agagattctcctgcctaagcctcccaagtacctgggagtataggcatgcaccaccacgcccgacgatattttgtaattttagtagagatggggtttctccatgttggtcatgttggtctg

SEQ ID NO: 50510 - DNA, 120 bp, synthetic construct
  source 1..120: mol_type = other DNA
cccatgctcagcagcagcaacagcagcagcctctggggcaaggacactgcttcacccgggtctgagactgcagcccccagtcctggccttcccatcccgcatggtacaccacccacaaag

SEQ ID NO: 50511 - DNA, 120 bp, synthetic construct; identical to SEQ ID NO: 19881
  source 1..120: mol_type = other DNA

SEQ ID NO: 50512 - DNA, 120 bp, synthetic construct; identical to SEQ ID NO: 19882
  source 1..120: mol_type = other DNA

SEQ ID NO: 50513 - DNA, 120 bp, synthetic construct
  source 1..120: mol_type = other DNA
ttttgttgtttttggaaagggtggcatggagaagactgggaaacaaccagtggtcaccagagctgtagcacctccttcacctctgagctctgctgggaaccccaggcttcgggggccact

SEQ ID NO: 50514 - DNA, 120 bp, synthetic construct; identical to SEQ ID NO: 19879
  source 1..120: mol_type = other DNA

SEQ ID NO: 50515 - DNA, 120 bp, synthetic construct
  source 1..120: mol_type = other DNA
aggacactgcttcacccgggtctgagactgcagcccccagtcctggccttcccatcccgcatggtacaccacccacaaagacccagagacccttcccggcatcttctattcaggacccac

SEQ ID NO: 50516 - DNA, 120 bp, synthetic construct
  source 1..120: mol_type = other DNA
ccggagctgtccccggaaatgcgtgtgcttcaggtgatttaactgattattgaataggcccgcaggaggtatgtcctgcccacggggccgaagcctcggaggacattatctggacttagt

SEQ ID NO: 50517 - DNA, 120 bp, synthetic construct; identical to SEQ ID NO: 19880
  source 1..120: mol_type = other DNA

SEQ ID NO: 50518 - DNA, 120 bp, synthetic construct; identical to SEQ ID NO: 19883
  source 1..120: mol_type = other DNA

SEQ ID NO: 50519 - DNA, 120 bp, synthetic construct
  source 1..120: mol_type = other DNA
gccagtgatggcctggaaggaggtggaaggtgcccaggggccctgcagtcttacctggaacatctccatccttggtgcgtcccctgcctggtgtacctggctttatacctcgggtttgtg

SEQ ID NO: 50520 - DNA, 120 bp, synthetic construct
  source 1..120: mol_type = other DNA
ctgtataaaatagtttggaagctggacccaccctgtgtgtgtgattgccctgagcccacagaaagacacctccagagtgcggattgagaagcctttattgtgggaggatcggggtgtcct

SEQ ID NO: 50521 - DNA, 120 bp, synthetic construct
  source 1..120: mol_type = other DNA
tcactctcttttctttttctttctttccttctttctttctttctttttttttttttttgagatggagtctcgctccgtcatgcaggctggagtgcagtggtgtgatctcggctcactgca

SEQ ID NO: 50522 - DNA, 120 bp, synthetic construct
  source 1..120: mol_type = other DNA
aagccctctgttcctgccctcccacaccccattccgcagcccctgaccagagaggcagaccacccttcctcccccgctgcctctgtgggtctggccctgaggtggcagcacctgccccgg

SEQ ID NO: 50523 - DNA, 120 bp, synthetic construct
  source 1..120: mol_type = other DNA
agggagtagggtgtaggaaggcctgcctctgcctatggtggggtcctgggagccaggaggaggccgtgacccgagaaaggtgctggactgaagcctcaaccctcctctacttgaggcttt

SEQ ID NO: 50524 - DNA, 120 bp, synthetic construct; identical to SEQ ID NO: 19884
  source 1..120: mol_type = other DNA

SEQ ID NO: 50525 - DNA, 120 bp, synthetic construct
  source 1..120: mol_type = other DNA
cagggcaatcacacacacacaggatgggtccagcttccaaaccattttatacagagtcacagtacagaactctggtagaaaacagggtggacggctaggcgcggtggctcacgcctgtaa

SEQ ID NO: 50526 - DNA, 120 bp, synthetic construct
  source 1..120: mol_type = other DNA
atcttctattcaggacccaccacccggacacctgcctttcagagcccaccccacagcccagaggacctgagataccccaacatttcagatccgcaccctcaggaactgacccacctgaag

SEQ ID NO: 50527 - DNA, 120 bp, synthetic construct
  source 1..120: mol_type = other DNA
gcttagaatattttgttttgagataatgagctaccgatcacagggggagtttaagcaaggttcaatgagaagcgatcaagatgctgcacagttcagccctgggtggggagctcaagtcag

SEQ ID NO: 50528 - DNA, 120 bp, synthetic construct; identical to SEQ ID NO: 15341
  source 1..120: mol_type = other DNA

SEQ ID NO: 50529 - DNA, 120 bp, synthetic construct
  source 1..120: mol_type = other DNA
ctgccgggcagagatgctcctctcttcccagacggggcggctgctgggcggaggggctcctctcttcccagacggggcggctgccgggcggaggggctcctcacttctcagacggggcgg

SEQ ID NO: 50530 - DNA, 120 bp, synthetic construct
  source 1..120: mol_type = other DNA
aggagttcgagactagcctggctaacatggtgaaaccctgtctctactagaaatacagaaatttgctgggcatagtggcgcatgcctgtagtcccagctactccggtggctgaggcacga

SEQ ID NO: 50531 - DNA, 120 bp, synthetic construct; identical to SEQ ID NO: 3706
  source 1..120: mol_type = other DNA

SEQ ID NO: 50532 - DNA, 120 bp, synthetic construct; identical to SEQ ID NO: 30059
  source 1..120: mol_type = other DNA

SEQ ID NO: 50533 - DNA, 120 bp, synthetic construct
  source 1..120: mol_type = other DNA
cccatctaggaagtgaggagcgtctctgccaggccgcccatcgtctgagatgtggggagtgcctctgccctgccgccccgtctgggatgtgaggagcgtctctgcccggccgctccgtct

SEQ ID NO: 50534 - DNA, 120 bp, synthetic construct; identical to SEQ ID NO: 30060
  source 1..120: mol_type = other DNA

SEQ ID NO: 50535 - DNA, 120 bp, synthetic construct
  source 1..120: mol_type = other DNA
ttatttattgagctccataattaaggcatagtttactggtaaaacctataaaacataaatcttcaggccaggcacagtggctcacgcctgtaatcctaacactttgggaagccaaggcag

SEQ ID NO: 50536 - DNA, 120 bp, synthetic construct; identical to SEQ ID NO: 30061
  source 1..120: mol_type = other DNA

SEQ ID NO: 50537 - DNA, 120 bp, synthetic construct; identical to SEQ ID NO: 24658
  source 1..120: mol_type = other DNA

SEQ ID NO: 50538 - DNA, 120 bp, synthetic construct
  source 1..120: mol_type = other DNA
tgttggacatttgagttggttccaagtctttgctattgtgaatggtgccgcaataaacatacatgtgtgtgtgtctttatagcagcatgatttatagtcctttgggtatatacccagtaa

SEQ ID NO: 50539 - DNA, 120 bp, synthetic construct
  source 1..120: mol_type = other DNA
ccaattctgtgaaaaaagtcattggtagcttgatggggatggcattgaatctataagttaccttgggcagtatggccattttcacgatattgattcttcctatccatgagcatggaatgt

SEQ ID NO: 50540 - DNA, 120 bp, synthetic construct
  source 1..120: mol_type = other DNA
ataatcatgttgtttttgtctttggttctgtttatatgatggattatgtttattgatttgcgtatgttgaaccagccttgcatcccagggatgaagcccacttgatcatggtggataagc

SEQ ID NO: 50541 - DNA, 120 bp, synthetic construct
  source 1..120: mol_type = other DNA
cattaatcattcaggagcaggttgttcagtttccatatagttgagcagttttgagtgagtttcttaatcctgagttctagtttgattgcactgtggtctgagagacagtttgttataatt

SEQ ID NO: 50542 - DNA, 120 bp, synthetic construct
  source 1..120: mol_type = other DNA
actgcctcctcaagtgggtccctgacccctgacccccgagcagcctaactgtgaggcaacccccagtaggggcagactgacacctcacacagccgggtactcctctgagacaaaacttcc

SEQ ID NO: 50543 - DNA, 120 bp, synthetic construct
  source 1..120: mol_type = other DNA
aaagagagaagaatcaaatagacgcaataaaaaatgataaaggggatatcaccaccgatcccacagaaatacaaactaccatcagagaatactacaaacacctctacgcaagtaaaccag

SEQ ID NO: 50544 - DNA, 120 bp, synthetic construct
  source 1..120: mol_type = other DNA
aattaggcaagagaaggaaataaagggtattcagttaggaaaagaggaagtcaaactgtccctgtttgcagacgacatgattgtgtatctagaaaaccccatcatctcagcccaaaatct

SEQ ID NO: 50545 - DNA, 120 bp, synthetic construct
  source 1..120: mol_type = other DNA
caaaaattttctcccattttttaggttgtctgttcactctgatggtagtttcttttgctgtgcagaagctctttagtttaattagatcccatttgtcaattttggcttttgttgccattg

SEQ ID NO: 50546 - DNA, 120 bp, synthetic construct; identical to SEQ ID NO: 24659
  source 1..120: mol_type = other DNA

SEQ ID NO: 50547 - DNA, 120 bp, synthetic construct; identical to SEQ ID NO: 24660
  source 1..120: mol_type = other DNA

SEQ ID NO: 50548 - DNA, 120 bp, synthetic construct; identical to SEQ ID NO: 24661
  source 1..120: mol_type = other DNA

SEQ ID NO: 50549 - DNA, 120 bp, synthetic construct; identical to SEQ ID NO: 24662
  source 1..120: mol_type = other DNA

SEQ ID NO: 50550 - DNA, 120 bp, synthetic construct
  source 1..120: mol_type = other DNA
ccatcaccacctcctcctccaccatcacaaccgcctcctccaccatcatcaccacctcctcctcctcctccatcaccacctcctcctcctcctccatcacctcctcctcctctaccatca

SEQ ID NO: 50551 - DNA, 120 bp, synthetic construct; identical to SEQ ID NO: 24663
  source 1..120: mol_type = other DNA

SEQ ID NO: 50552 - DNA, 120 bp, synthetic construct; identical to SEQ ID NO: 24664
  source 1..120: mol_type = other DNA

SEQ ID NO: 50553 - DNA, 120 bp, synthetic construct
  source 1..120: mol_type = other DNA
aaagcaaggtgatacgatgtaacatatgcatacatcccaagagtagataacggagtcttattagataacttggtcgaataaatgaagtgggggggggggtgggaggaggttacctttaat

SEQ ID NO: 50554 - DNA, 120 bp, synthetic construct
  source 1..120: mol_type = other DNA
ctcccagagtgctgggattgcaggcttgagccaccgcacctggctgctgatgtacttttgtctgattcatatttcagttttgtcaattaacccaataaagtctttcataatatttttcca

SEQ ID NO: 50555 - DNA, 120 bp, synthetic construct; identical to SEQ ID NO: 15661
  source 1..120: mol_type = other DNA

SEQ ID NO: 50556 - DNA, 120 bp, synthetic construct; identical to SEQ ID NO: 7003
  source 1..120: mol_type = other DNA

SEQ ID NO: 50557 - DNA, 120 bp, synthetic construct; identical to SEQ ID NO: 7004
  source 1..120: mol_type = other DNA

SEQ ID NO: 50558 - DNA, 120 bp, synthetic construct; identical to SEQ ID NO: 7005
  source 1..120: mol_type = other DNA

SEQ ID NO: 50559 - DNA, 120 bp, synthetic construct; identical to SEQ ID NO: 7006
  source 1..120: mol_type = other DNA

SEQ ID NO: 50560 - DNA, 120 bp, synthetic construct; identical to SEQ ID NO: 7007
  source 1..120: mol_type = other DNA

SEQ ID NO: 50561 - DNA, 120 bp, synthetic construct
  source 1..120: mol_type = other DNA
ccccgctcacctgacatctcgtcctcattctccatctcctcggcgaacagccgcggcagctcctcctcggtgcccactgggccccgcatgcccggcgcggggaggaggggaggtgggcgc

SEQ ID NO: 50562 - DNA, 120 bp, synthetic construct
  source 1..120: mol_type = other DNA
aatctactcatctgacaaagggctaatatccagaatcagcaacgagctcaaaacaaatttgtaagaaaaaaacaaccccatcaaaaaatgggtgaaggatatgaacagacatttctcgaa

SEQ ID NO: 50563 - DNA, 120 bp, synthetic construct; identical to SEQ ID NO: 22505
  source 1..120: mol_type = other DNA

SEQ ID NO: 50564 - DNA, 120 bp, synthetic construct; identical to SEQ ID NO: 22506
  source 1..120: mol_type = other DNA

SEQ ID NO: 50565 - DNA, 120 bp, synthetic construct
  source 1..120: mol_type = other DNA
caggtgggaactgaacaatgagaacacatggacacaggaaggggaacatcacactccggagactgttgtggggtggggggaggggggagggatagcattaggagatatacctaatgctaa

SEQ ID NO: 50566 - DNA, 120 bp, synthetic construct; identical to SEQ ID NO: 22507
  source 1..120: mol_type = other DNA

SEQ ID NO: 50567 - DNA, 120 bp, synthetic construct
  source 1..120: mol_type = other DNA
cagactgggcagccaggcagaggggctcctcacgtcccagacgatgggcggccaggcagagacgctcctcacttcccagacggggtggcggctgggcagaggctgcaatctcggtacttt

SEQ ID NO: 50568 - DNA, 120 bp, synthetic construct
  source 1..120: mol_type = other DNA
ctctgccctcgcagagagccgcggcttggagcgtgaacggccgaggtggctggaggccaagcggtcagcggggagaggaaaggagggcggtgggggacgcgttgtttgtttggttcgcac

SEQ ID NO: 50569 - DNA, 120 bp, synthetic construct; identical to SEQ ID NO: 31551
  source 1..120: mol_type = other DNA

SEQ ID NO: 50570 - DNA, 120 bp, synthetic construct
  source 1..120: mol_type = other DNA
ccagttagtactttatagaccttaaaaatattccctatttaataaatggtgctgggaaaactggctagccatatgtagaaagctgaaactggatcccttccttacaccttatacaaaaat

SEQ ID NO: 50571 - DNA, 120 bp, synthetic construct
  source 1..120: mol_type = other DNA
tggaaatcatcattctcagtaaactatcgcaagaacaaaaaaccaaacaccgcatattctcactcataggtgggaattgaacaatgagaacgcatggacacaggaaggggaacatcacac

SEQ ID NO: 50572 - DNA, 120 bp, synthetic construct
  source 1..120: mol_type = other DNA
gccactgtactttagcctgggcaatagagtctgaccctgtctcaaaataaaataaaataaaataaaaaattagccaggcatggtggcatatgctgtggtctcagctacttgggaggctaa

SEQ ID NO: 50573 - DNA, 120 bp, synthetic construct
  source 1..120: mol_type = other DNA
tctactaaaaatacaaaaaattagccgggtgtggtggcgggcacctatagtcccagctacttgggaggctgaggcaggagaatggcgtgaacccgggaggtggagcttgcagtgagccga

SEQ ID NO: 50574 - DNA, 120 bp, synthetic construct
  source 1..120: mol_type = other DNA
ccgggccaatcagcggcgcgggcacaaatatgcaaatagcgcgccggtgctgccggagtgccgctcgcaggggctggtggggtcgcgctgggggagtgaactgggccaatcaggcgggtg

SEQ ID NO: 50575 - DNA, 120 bp, synthetic construct
  source 1..120: mol_type = other DNA
attttgtctcataggtttttttaggcttgattcacttttcttcttcatttttctttctttttctttttctttttcttttccctcccctcccctcccctccccccctcccctccctttcct

SEQ ID NO: 50576 - DNA, 120 bp, synthetic construct
  source 1..120: mol_type = other DNA
gatgaaaggcacacaactttaaatataaaaaagccattcaggctaggctcagtggctcatgcgtgtaatcccagcactttaagagactgaggcagacagatcacctgaggtcagaagttc

SEQ ID NO: 50577 - DNA, 120 bp, synthetic construct
  source 1..120: mol_type = other DNA
atatataaaattgggaggaaggctgggtgcggtgactcacagctgtaatcccagcactttggaaagccgaggtgggcaggtcgcttcaggtcaaaagttcgagacaagcctgaccaacat

SEQ ID NO: 50578 - DNA, 120 bp, synthetic construct
  source 1..120: mol_type = other DNA
cgaatcgcctgaggtcggaagtttgagatcagcctggctaacatggtgaaaccccttctctactaaaaatacaaaataagcagggcatggtagtgcacgcctgtaatcccagctactcag

SEQ ID NO: 50579 - DNA, 120 bp, synthetic construct
  source 1..120: mol_type = other DNA
aacatggtgaaaccccatctctactaaaaatacaaaaatgagctgggatggtggcaggcacctgtaatcccagccacttgggaggctgatgcaggagaatcacttgaacccagaggtaga

SEQ ID NO: 50580 - DNA, 120 bp, synthetic construct
  source 1..120: mol_type = other DNA
ttgacacaaaaaagtacaagaaagataggctatgcttgctcataaatttcaggcagatgcaaaccctgttcccaggctcaactggccagctctattttttgttagagatgaacacagctc

SEQ ID NO: 50581 - DNA, 120 bp, synthetic construct
  source 1..120: mol_type = other DNA
taagtttcctgaggcctccccagccatgtgcagctgtgagtcagttaaacctcttttctttgtaaattacccagtcttgggcagttctttatagcagtgtgagaacagactaatacacaa

SEQ ID NO: 50582 - DNA, 120 bp, synthetic construct; identical to SEQ ID NO: 13514
  source 1..120: mol_type = other DNA

SEQ ID NO: 50583 - DNA, 120 bp, synthetic construct; identical to SEQ ID NO: 13515
  source 1..120: mol_type = other DNA

SEQ ID NO: 50584 - DNA, 120 bp, synthetic construct; identical to SEQ ID NO: 13516
  source 1..120: mol_type = other DNA

SEQ ID NO: 50585 - DNA, 120 bp, synthetic construct; identical to SEQ ID NO: 13517
  source 1..120: mol_type = other DNA

SEQ ID NO: 50586 - DNA, 120 bp, synthetic construct; identical to SEQ ID NO: 13518
  source 1..120: mol_type = other DNA

SEQ ID NO: 50587 - DNA, 120 bp, synthetic construct; identical to SEQ ID NO: 13519
  source 1..120: mol_type = other DNA

SEQ ID NO: 50588 - DNA, 120 bp, synthetic construct
  source 1..120: mol_type = other DNA
cactgcactccagcctgagcgacagagcgagactccgtctcaacaacaacaaaaaagagcacgcatgattccatgtctgtgaagtgtctagaacagaaaaatccagaggccgaaagcaca

SEQ ID NO: 50589 - DNA, 120 bp, synthetic construct; identical to SEQ ID NO: 13520
  source 1..120: mol_type = other DNA

SEQ ID NO: 50590 - DNA, 120 bp, synthetic construct; identical to SEQ ID NO: 7943
  source 1..120: mol_type = other DNA

SEQ ID NO: 50591 - DNA, 120 bp, synthetic construct
  source 1..120: mol_type = other DNA
gacctttgttcacttgtttatctgctgaccttccctccactattgtcctatgaccctgccaaatccccctctgcgagaaacacccaagaatgatcaataaaaaaaaaaaaaaaagaaaga

SEQ ID NO: 50592 - DNA, 120 bp, synthetic construct
  source 1..120: mol_type = other DNA
ggttggttccaagtctttgctattgtgaatagtgctgcagaaaacattcatatgcatgtgtctttataggagaatgatttgcaaaccattgggtatatgcccagtaatgggatcgctggg

SEQ ID NO: 50593 - DNA, 120 bp, synthetic construct
  source 1..120: mol_type = other DNA
gcatttctctgatggccagtgatgatgagcattttttcatgtgttttttggctgcataaatgtcttcttttgagaagtgtctgttcatgtccttcgcccaccttttgatggcgttgtttg

SEQ ID NO: 50594 - DNA, 120 bp, synthetic construct
  source 1..120: mol_type = other DNA
cctacccatgagcatggaatgttcttccatttgtttttatcctcttttatttcgttgagcagtggtttgtagttctccttgaagaggtccttcacatcccttgtaagttggattcctagg

SEQ ID NO: 50595 - DNA, 120 bp, synthetic construct
  source 1..120: mol_type = other DNA
caacaacaagagctaactatcctaaatatatatgcacccagtacaggagcacccagattcataaagcaagtcctgagtgacctacaaagagacttagactcccacacattaataatggga

SEQ ID NO: 50596 - DNA, 120 bp, synthetic construct
  source 1..120: mol_type = other DNA
gaaatggataaattcctggacacatacaccccctgcccccaagactaaaccaggaagaagtcaaattcctgaatagaccagtaacaggttcagaaattcaggcaataattaacagcttac

SEQ ID NO: 50597 - DNA, 120 bp, synthetic construct
  source 1..120: mol_type = other DNA
agttcccacccatgagtgagaacatgcggtgtttggttttttgtccttgtgatagtttgctgagaatgatggtttccagcttcatccatgtccctacaaaggacatgaactcatcatttt

SEQ ID NO: 50598 - DNA, 120 bp, synthetic construct; identical to SEQ ID NO: 34227
  source 1..120: mol_type = other DNA

SEQ ID NO: 50599 - DNA, 120 bp, synthetic construct
  source 1..120: mol_type = other DNA
aggaatcgccacactgacttccacaaggatcgaactagtttacaatcccaccaacagtgtaaaagtgttcctatttttccacatcctctccagcacctgttgtttcctgactttttaatg

SEQ ID NO: 50600 - DNA, 120 bp, synthetic construct
  source 1..120: mol_type = other DNA
gcttgtttttctcaggtttgtcaaagatcagacagttgtagatatgcggtgttatttctgagggctctgttctgttccattgatctatatctctgttttggtaccagtaccatgctgttt

SEQ ID NO: 50601 - DNA, 120 bp, synthetic construct
  source 1..120: mol_type = other DNA
cagaaagttaacaaggatatccaggaattgaactcagctctgcaccaagcagacctaatagacatctacagaactctccaccccaaatcaacagaatatacattcctttcggcaccacac

SEQ ID NO: 50602 - DNA, 120 bp, synthetic construct
  source 1..120: mol_type = other DNA
taacaggctctgaaattgaggcaataattagtagcttaccaatcaaaaaaagtccaggaccagatggattcacagccgaattctaccagaggtacaaggaggaactggtaccattccttc

SEQ ID NO: 50603 - DNA, 120 bp, synthetic construct
  source 1..120: mol_type = other DNA
aaacaaatggaagaacattccatgctcatggatagcaagaatcaatattgtgaaaatggacacactgcccacggtaatttatagattcaatgccatccccatcaagctaccaatgacttt

SEQ ID NO: 50604 - DNA, 120 bp, synthetic construct
  source 1..120: mol_type = other DNA
atcattaaaaagtcaggaaacaacaggtgctggagaggatgtggagaaataggaacacttttacactgttggtgggactataaaccagttcaaccattgtggaagtcagtgtggcgattc

SEQ ID NO: 50605 - DNA, 120 bp, synthetic construct
  source 1..120: mol_type = other DNA
cttgagcccaggagttcaagaccagcctggaccacatagtgagacccccatctcataaaaaataaaaaaaattgaattacaacacgaggtgacaaaagcactggatgagattaacggtag

SEQ ID NO: 50606 - DNA, 120 bp, synthetic construct
  source 1..120: mol_type = other DNA
aacatcccttctaagggcactgccaacaaactctgcaggaaaagctgcccctgagcctctgtccagggcccagtgcatgggaccgaacctgctgagcccagtctcgggcctggcacaatg

SEQ ID NO: 50607 - DNA, 120 bp, synthetic construct
  source 1..120: mol_type = other DNA
gtctcagcacccctagcctccaccccagacgtgtggctgtctcagtgcccccagcctccaccccagacacaatgagcctgtctcagggcccccagcctccaccacagaaactaagctgtc

SEQ ID NO: 50608 - DNA, 120 bp, synthetic construct; identical to SEQ ID NO: 24038
  source 1..120: mol_type = other DNA

SEQ ID NO: 50609 - DNA, 120 bp, synthetic construct; identical to SEQ ID NO: 24039
  source 1..120: mol_type = other DNA

SEQ ID NO: 50610 - DNA, 120 bp, synthetic construct; identical to SEQ ID NO: 24040
  source 1..120: mol_type = other DNA

SEQ ID NO: 50611 - DNA, 120 bp, synthetic construct
  source 1..120: mol_type = other DNA
agacctaaaaccataaaaaccctagaagaaaacctaggcattaccattcaggacataggcatgggcaaggacttcatgtctaaaacaccagaagcaatggcaacaaaagacaaaattgac

SEQ ID NO: 50612 - DNA, 120 bp, synthetic construct; identical to SEQ ID NO: 24041
  source 1..120: mol_type = other DNA

SEQ ID NO: 50613 - DNA, 120 bp, synthetic construct
  source 1..120: mol_type = other DNA
gtatttatccaatacctggacccccattgtatctaggaagttaactaacttgcttttgattttacaggctcatagacagatgggacttgccttgtgtcagatgagactttggactgtgga

SEQ ID NO: 50614 - DNA, 120 bp, synthetic construct; identical to SEQ ID NO: 6668
  source 1..120: mol_type = other DNA

SEQ ID NO: 50615 - DNA, 120 bp, synthetic construct
  source 1..120: mol_type = other DNA
gactccatctcagaaaaaaaaaaaaaaaaaaaaaaaaaggaaagaaagaggcagggcccacgcctgtaatcctagcactttgggaggccaaggcaggcagatcaccagatgtcaggagtt

SEQ ID NO: 50616 - DNA, 120 bp, synthetic construct; identical to SEQ ID NO: 34280
  source 1..120: mol_type = other DNA

SEQ ID NO: 50617 - DNA, 120 bp, synthetic construct; identical to SEQ ID NO: 34281
  source 1..120: mol_type = other DNA

SEQ ID NO: 50618 - DNA, 120 bp, synthetic construct
  source 1..120: mol_type = other DNA
ctccgatatccgaaacacttctggtcccaagcatttcagataagggctattcattcacctgtagcggcagaagcagcatttaaatatataagagcagtagatgctcttatatatatctct

SEQ ID NO: 50619 - DNA, 120 bp, synthetic construct
  source 1..120: mol_type = other DNA
ttttttttttttttttttttgagactgtctttctctgtcacccaggttgtagtgcagtagtgcaatctcggcttactgcaacctccaccaccggaccaagttcaagcaattctcctgcct

SEQ ID NO: 50620 - DNA, 120 bp, synthetic construct; identical to SEQ ID NO: 17163
  source 1..120: mol_type = other DNA

SEQ ID NO: 50621 - DNA, 120 bp, synthetic construct; identical to SEQ ID NO: 17164
  source 1..120: mol_type = other DNA

SEQ ID NO: 50622 - DNA, 120 bp, synthetic construct; identical to SEQ ID NO: 17165
  source 1..120: mol_type = other DNA

SEQ ID NO: 50623 - DNA, 120 bp, synthetic construct
  source 1..120: mol_type = other DNA
caaagaatgagtccacacagcggaacaccaaggcctaatgcccaagttgtcttttttttttttcttttctttttttttttttttttttgagacggagtctctgtcacccaggctggagtg

SEQ ID NO: 50624 - DNA, 120 bp, synthetic construct
  source 1..120: mol_type = other DNA
cgttcttgatggttgctgtctcttcggagctgttgggtacacttcccagacggggcgaccgggcagaggcgctcctcacttcccagacggggcagccgggcagagacgctcacttcctag

SEQ ID NO: 50625 - DNA, 120 bp, synthetic construct
  source 1..120: mol_type = other DNA
gcggccaggcagagacactcctcacttcctagacggggtggtggctgggcagaggctgtaatcttagtactttgggaggccaaggcaggcggctgggaggtggaggttgtagcgagctga

SEQ ID NO: 50626 - DNA, 120 bp, synthetic construct; identical to SEQ ID NO: 20656
  source 1..120: mol_type = other DNA

SEQ ID NO: 50627 - DNA, 120 bp, synthetic construct
  source 1..120: mol_type = other DNA
accgccatcgtcatcatggcctgttctcgatggtcactgtctcttcggagctattgggtacacttcccagatggggtggccgggcagaggcactcctcacttcccagacggggcagccgg

SEQ ID NO: 50628 - DNA, 120 bp, synthetic construct
  source 1..120: mol_type = other DNA
cagacggggcggccgggcagaggcgcttctcacttcccagacaatgggcggctgggctgatacgctcctcacttcccagacggggtggcggccgggcagaggctgtaatcttagcacttt

SEQ ID NO: 50629 - DNA, 120 bp, synthetic construct
  source 1..120: mol_type = other DNA
ggcggggtgggaagtgcctgctgtttataatgttgaatttctgtaaaataaactgtatttgcaaatccaacattgagcttctggactacgctgactccactgctgaatcctcaatggaaa

SEQ ID NO: 50630 - DNA, 120 bp, synthetic construct; identical to SEQ ID NO: 18618
  source 1..120: mol_type = other DNA

SEQ ID NO: 50631 - DNA, 120 bp, synthetic construct; identical to SEQ ID NO: 21809
  source 1..120: mol_type = other DNA

SEQ ID NO: 50632 - DNA, 120 bp, synthetic construct
  source 1..120: mol_type = other DNA
gtcaaatggtatttctagttctagatccctaaggaatcaccacactgacttctacaatggttgaactagtttacagtcccaccaacagtgtaaaagtgttcctatttctccacatcctct

SEQ ID NO: 50633 - DNA, 120 bp, synthetic construct; identical to SEQ ID NO: 21810
  source 1..120: mol_type = other DNA

SEQ ID NO: 50634 - DNA, 120 bp, synthetic construct; identical to SEQ ID NO: 21811
  source 1..120: mol_type = other DNA

SEQ ID NO: 50635 - DNA, 120 bp, synthetic construct; identical to SEQ ID NO: 28984
  source 1..120: mol_type = other DNA

SEQ ID NO: 50636 - DNA, 120 bp, synthetic construct; identical to SEQ ID NO: 28985
  source 1..120: mol_type = other DNA

SEQ ID NO: 50637 - DNA, 120 bp, synthetic construct; identical to SEQ ID NO: 28986
  source 1..120: mol_type = other DNA

SEQ ID NO: 50638 - DNA, 120 bp, synthetic construct
  source 1..120: mol_type = other DNA
tgctcagaaagaaaaagcaaactaccctgacttcatgagtttggccccactttatatcattgccaagagcatttaaacctctgccaatagttagctctatagaaattttaatggctaagg

SEQ ID NO: 50639 - DNA, 120 bp, synthetic construct; identical to SEQ ID NO: 22009
  source 1..120: mol_type = other DNA

SEQ ID NO: 50640 - DNA, 120 bp, synthetic construct; identical to SEQ ID NO: 13163
  source 1..120: mol_type = other DNA

SEQ ID NO: 50641 - DNA, 120 bp, synthetic construct
  source 1..120: mol_type = other DNA
aaaaacctggggcatgtattcttcccattgcttttttgttttgtttgtttgtttgtttgtttttgagatagggtctcacttggctcactgcaaccttggcctactgtcctcaagtgatcc

SEQ ID NO: 50642 - DNA, 120 bp, synthetic construct
  source 1..120: mol_type = other DNA
gagctaccacacccagcctgattttcatcatctacgtatttagctcctacagaagatttttaaaaatagaatacgtggctgggtgcggtgactcatgcctgtaatcccaggactttggga

SEQ ID NO: 50643 - DNA, 120 bp, synthetic construct; identical to SEQ ID NO: 35141
  source 1..120: mol_type = other DNA

SEQ ID NO: 50644 - DNA, 120 bp, synthetic construct
  source 1..120: mol_type = other DNA
atatatatatatatatatatatattttaagaccggatcttgctctgtcacccaggttgcagtggtgtgattgtggctcactgtagccttgacttcccgggctcaggcaatccttctacat

SEQ ID NO: 50645 - DNA, 120 bp, synthetic construct
  source 1..120: mol_type = other DNA
agagtagctgggactacaggtgcccgccaccacgcccggctaacttttttttggatttttagtagagacggggtttcactgtgttagccaggatggtctcgatctcctgacctcgtgatc

SEQ ID NO: 50646 - DNA, 120 bp, synthetic construct; identical to SEQ ID NO: 35142
  source 1..120: mol_type = other DNA

SEQ ID NO: 50647 - DNA, 120 bp, synthetic construct; identical to SEQ ID NO: 30083
  source 1..120: mol_type = other DNA

SEQ ID NO: 50648 - DNA, 120 bp, synthetic construct; identical to SEQ ID NO: 30084
  source 1..120: mol_type = other DNA

SEQ ID NO: 50649 - DNA, 120 bp, synthetic construct; identical to SEQ ID NO: 30085
  source 1..120: mol_type = other DNA

SEQ ID NO: 50650 - DNA, 120 bp, synthetic construct; identical to SEQ ID NO: 30086
  source 1..120: mol_type = other DNA

SEQ ID NO: 50651 - DNA, 120 bp, synthetic construct; identical to SEQ ID NO: 9530
  source 1..120: mol_type = other DNA

SEQ ID NO: 50652 - DNA, 120 bp, synthetic construct
  source 1..120: mol_type = other DNA
cgcaataaacatacgtgtgcatgtgtctttatagcagcatgatttatagtcctttgggtatatacccagtaatgggatggctgggtcaaatggtatttctagttctacatccctgaggaa

SEQ ID NO: 50653 - DNA, 120 bp, synthetic construct
  source 1..120: mol_type = other DNA
aaagtcattggtagcttgatggggatggcattgaatctgtaaattaccttgggcagtatggccattttcacgatattgattcttcccacccatgagcatggaatgttcttccatttgttt

SEQ ID NO: 50654 - DNA, 120 bp, synthetic construct
  source 1..120: mol_type = other DNA
tcattctgataccaaagccgggcagagacacaaccaaaaaagagaattttagaccaatatccttgatgaacattgatgcaaaaatcctcaataaaatactggcaaaccgaatccagcagc

SEQ ID NO: 50655 - DNA, 120 bp, synthetic construct
  source 1..120: mol_type = other DNA
gtggtgtggtgctgaaaaaaatgtatattctgttgatttggggtggagagttctgtagatgtctattaggtctgcttggtgcagagctgagttcaattcctgcgtatccttgttgacttt

SEQ ID NO: 50656 - DNA, 120 bp, synthetic construct
  source 1..120: mol_type = other DNA
ggctttcctttgagggtaacccgaccattctctctggctgcccttaacattttttccttcatttcaactttggtgaatctgacaattatgtgtcttggagttgctcttctcgaggagtat

SEQ ID NO: 50657 - DNA, 120 bp, synthetic construct
  source 1..120: mol_type = other DNA
ctccagctgtgtgctgggagaaccactgctctcttcaaagctgtcagacagggacacttaagtctgcagaggttactgctgtctttttgtttgtctgtgccctgcccccagaggtggagc

SEQ ID NO: 50658 - DNA, 120 bp, synthetic construct; identical to SEQ ID NO: 9531
  source 1..120: mol_type = other DNA

SEQ ID NO: 50659 - DNA, 120 bp, synthetic construct
  source 1..120: mol_type = other DNA
ctccctccttcccactctttttctcccctttctttttcttttttttttgtcgttctccttcattttctctcttccttcctctctcactttctcacccttctttcctcccttcctttcttc

SEQ ID NO: 50660 - DNA, 120 bp, synthetic construct
  source 1..120: mol_type = other DNA
ttccctgtgacatatgggtctcttataaaagccgttcagtgttctgctgaagccagctcataccagctcaggagagccagttgttcacatcttttttttccagtaaggctatttttttat

SEQ ID NO: 50661 - DNA, 120 bp, synthetic construct; identical to SEQ ID NO: 9528
  source 1..120: mol_type = other DNA

SEQ ID NO: 50662 - DNA, 120 bp, synthetic construct; identical to SEQ ID NO: 9529
  source 1..120: mol_type = other DNA

SEQ ID NO: 50663 - DNA, 120 bp, synthetic construct; identical to SEQ ID NO: 9532
  source 1..120: mol_type = other DNA

SEQ ID NO: 50664 - DNA, 120 bp, synthetic construct
  source 1..120: mol_type = other DNA
tgtggttttgatttgcatttctctgatggccagtgatgatgagcattttttcatgtgttttttggctgcatgaatgtcttcctttgagaagtgtctgttcatatccttcacccacttttt

SEQ ID NO: 50665 - DNA, 120 bp, synthetic construct
  source 1..120: mol_type = other DNA
tttatttcattgagcagtggtttgtagttcttcttgaagaggtccttcacatccctagtaagttggattcttggtattttattgtctttgaatcaattgtgaataggagttcactcatga

SEQ ID NO: 50666 - DNA, 120 bp, synthetic construct
  source 1..120: mol_type = other DNA
gaatccatctggtcctggactctttttggttggtaagctattgattattgccacaatttcagatcctgttattggtctattcagagattcaacttcttcgtggtttagtcttgggagggt

SEQ ID NO: 50667 - DNA, 120 bp, synthetic construct
  source 1..120: mol_type = other DNA
gcatatatatttaggatagttagctcttcttgttgaattgatccctttaccattatgtaatggccttctttgtctcttttgatctttgttggtttaaagtctgttttatcagaggctagg

SEQ ID NO: 50668 - DNA, 120 bp, synthetic construct
  source 1..120: mol_type = other DNA
tattcttttttatctaaacttcccttctcgcttcatttcattcatttcatcttccatcactgatacctcttcttccagttgatcgcatcggctcctgaggcttctgcattcttcacatag

SEQ ID NO: 50669 - DNA, 120 bp, synthetic construct; identical to SEQ ID NO: 9533
  source 1..120: mol_type = other DNA

SEQ ID NO: 50670 - DNA, 120 bp, synthetic construct; identical to SEQ ID NO: 9534
  source 1..120: mol_type = other DNA

SEQ ID NO: 50671 - DNA, 120 bp, synthetic construct; identical to SEQ ID NO: 31427
  source 1..120: mol_type = other DNA

SEQ ID NO: 50672 - DNA, 120 bp, synthetic construct; identical to SEQ ID NO: 15534
  source 1..120: mol_type = other DNA

SEQ ID NO: 50673 - DNA, 120 bp, synthetic construct
  source 1..120: mol_type = other DNA
tttttaaaaaattaattaattaattaaagaaaggacttcactctgttacccaggctggagtgcagtggcatgatcacagctcactagacttcctgagctccagtgatcctctcacctcag

SEQ ID NO: 50674 - DNA, 120 bp, synthetic construct
  source 1..120: mol_type = other DNA
ggaacaaagctggacggagaatgactttgacaagttgagagaagaaggctccagacgaccaaaatactccaagctacaggaggaaattcaaaccaatggcaaagaagttaaaaactgtga

SEQ ID NO: 50675 - DNA, 120 bp, synthetic construct
  source 1..120: mol_type = other DNA
aaagagtcaagacccatcagtgtgctgtattcaggaaacccatttcacacgcagagacacacataggctcaaaataaagggatggaggaagatctaccaagcaaatggaaaacaaaaaaa

SEQ ID NO: 50676 - DNA, 120 bp, synthetic construct
  source 1..120: mol_type = other DNA
tcaaaaaattaatgaatccaggagctggttttttgaaaagatcaacaaaattgatagactgctagcaagactaataaagcagaaagaagaatcaaatagatgcaataaaaattgataaag

SEQ ID NO: 50677 - DNA, 120 bp, synthetic construct
  source 1..120: mol_type = other DNA
ttggaagttctggccagggcaattaggcaggagaaggaaataaagggattcaattaggaaaagaggaagtcaaattgtccctgtttgcagatgacatgattgtatatctagaaaacccca

SEQ ID NO: 50678 - DNA, 120 bp, synthetic construct
  source 1..120: mol_type = other DNA
gggagaaaattttcacaacctactcatctgacaaagggctaatattcagaatctacaatgaactcaaacaaatttacaagaaaaaaacaaacaaccccatcaaaaagtgggtgaaggata

SEQ ID NO: 50679 - DNA, 120 bp, synthetic construct
  source 1..120: mol_type = other DNA
actggaaaccatcattctcagcaaactatcgcaaggacaaaaaaccaaacaccgcatgttatcactcataggtgggaattgaacaatgagaacacatggacacaggaaggggaacatcac

SEQ ID NO: 50680 - DNA, 120 bp, synthetic construct
  source 1..120: mol_type = other DNA
aacacctgtatttttaaaaagctcattggggctgggcatggtggctcatgctgtaatcccagcactttgggaggccaaggcagacagattgcttgaggtcaggagttcaaaaccagcctg

SEQ ID NO: 50681 - DNA, 120 bp, synthetic construct
  source 1..120: mol_type = other DNA
tcggtgacaatcccagccccaaagagaaaactggggtcaccccactacatcccacaggccatggtgaggaggagacacaggagaacatggggtggcagcaatccctgctctcctgagctg

SEQ ID NO: 50682 - DNA, 120 bp, synthetic construct
  source 1..120: mol_type = other DNA
taaatggggctgtggtcctggggggctgtagtcctggggggctgtggtcctagggggctgtggtcctgggggggagctgctgtcctaggggtgttgtagtcctagggggctgtggtcagg

SEQ ID NO: 50683 - DNA, 120 bp, synthetic construct
  source 1..120: mol_type = other DNA
aatacagagaatttactagagtcttctctctcttcaataagtttttttttttttgagacagagtctcactttgtcacccaggctggcatatggtggcacagtctcggctcactgcaacct

SEQ ID NO: 50684 - DNA, 120 bp, synthetic construct
  source 1..120: mol_type = other DNA
cttttttcatgtgtcttttggctgcataaatgtcttcttttgagaagtttctgttcatatcctttgcccactttttgatggggttgtttgtttttttcttgtaaatttgtttgagttcat

SEQ ID NO: 50685 - DNA, 120 bp, synthetic construct
  source 1..120: mol_type = other DNA
cagtggtttgtagttctccttgaagaggtccttcacatcccttgtaaggtggattcctaagtattttattctctttgaagcaattgcgaatgggagttcactcatgatttggctctctgt

SEQ ID NO: 50686 - DNA, 120 bp, synthetic construct
  source 1..120: mol_type = other DNA
atgttcatcagggatattggtctaaaattctcttttttggttgtgtctctgctcagctttggtatcagaatgatgctggcctcatgaaatgagttagggagattccctctttttctgttg

SEQ ID NO: 50687 - DNA, 120 bp, synthetic construct
  source 1..120: mol_type = other DNA
gagctttacttccaggtatgtggtcaattttgggataggtgtggtgtggtgctgaaaaaaatgtatattctgttgatttggggtggagagttctgtagatgtctattaggtctgcttggt

SEQ ID NO: 50688 - DNA, 120 bp, synthetic construct
  source 1..120: mol_type = other DNA
agtttggctggatatgaaattctaggtgaaaattcttttctttgagaatgttgaatattggcccccactctcttctggcttgtagagtttctgccgagagatccgctgttagtctgatgg

SEQ ID NO: 50689 - DNA, 120 bp, synthetic construct; identical to SEQ ID NO: 15037
  source 1..120: mol_type = other DNA

SEQ ID NO: 50690 - DNA, 120 bp, synthetic construct; identical to SEQ ID NO: 15038
  source 1..120: mol_type = other DNA

SEQ ID NO: 50691 - DNA, 120 bp, synthetic construct; identical to SEQ ID NO: 15039
  source 1..120: mol_type = other DNA

SEQ ID NO: 50692 - DNA, 120 bp, synthetic construct; identical to SEQ ID NO: 15040
  source 1..120: mol_type = other DNA

SEQ ID NO: 50693 - DNA, 120 bp, synthetic construct; identical to SEQ ID NO: 15041
  source 1..120: mol_type = other DNA

SEQ ID NO: 50694 - DNA, 120 bp, synthetic construct; identical to SEQ ID NO: 15042
  source 1..120: mol_type = other DNA

SEQ ID NO: 50695 - DNA, 120 bp, synthetic construct; identical to SEQ ID NO: 15043
  source 1..120: mol_type = other DNA

SEQ ID NO: 50696 - DNA, 120 bp, synthetic construct; identical to SEQ ID NO: 15044
  source 1..120: mol_type = other DNA

SEQ ID NO: 50697 - DNA, 120 bp, synthetic construct; identical to SEQ ID NO: 15045
  source 1..120: mol_type = other DNA

SEQ ID NO: 50698 - DNA, 120 bp, synthetic construct; identical to SEQ ID NO: 15046
  source 1..120: mol_type = other DNA

SEQ ID NO: 50699 - DNA, 120 bp, synthetic construct; identical to SEQ ID NO: 15047
  source 1..120: mol_type = other DNA

SEQ ID NO: 50700 - DNA, 120 bp, synthetic construct
  source 1..120: mol_type = other DNA
aaagaaatagctttgggttttttgtttgtttttttgagacggagtctcactatgtcacccaggctggagtgcagtggtgtaatcttggctcactgcaacctccacctcctggattcaagc

SEQ ID NO: 50701 - DNA, 120 bp, synthetic construct; identical to SEQ ID NO: 15048
  source 1..120: mol_type = other DNA

SEQ ID NO: 50702 - DNA, 120 bp, synthetic construct; identical to SEQ ID NO: 15049
  source 1..120: mol_type = other DNA

SEQ ID NO: 50703 - DNA, 120 bp, synthetic construct; identical to SEQ ID NO: 15050
  source 1..120: mol_type = other DNA

SEQ ID NO: 50704 - DNA, 120 bp, synthetic construct; identical to SEQ ID NO: 15051
  source 1..120: mol_type = other DNA

SEQ ID NO: 50705 - DNA, 120 bp, synthetic construct; identical to SEQ ID NO: 15052
  source 1..120: mol_type = other DNA

SEQ ID NO: 50706 - DNA, 120 bp, synthetic construct; identical to SEQ ID NO: 15053
  source 1..120: mol_type = other DNA

SEQ ID NO: 50707 - DNA, 120 bp, synthetic construct; identical to SEQ ID NO: 15054
  source 1..120: mol_type = other DNA

SEQ ID NO: 50708 - DNA, 120 bp, synthetic construct; identical to SEQ ID NO: 15055
  source 1..120: mol_type = other DNA

SEQ ID NO: 50709 - DNA, 120 bp, synthetic construct; identical to SEQ ID NO: 15056
  source 1..120: mol_type = other DNA

SEQ ID NO: 50710 - DNA, 120 bp, synthetic construct; identical to SEQ ID NO: 15057
  source 1..120: mol_type = other DNA

SEQ ID NO: 50711 - DNA, 120 bp, synthetic construct
  source 1..120: mol_type = other DNA
tcaaccactcttgttttggtcctttttttttttttttctttttttgagacagagtctcattttatcacccaggctagagtgcagtggtgcaatctctgctcactgcaacctctgcctcct

SEQ ID NO: 50712 - DNA, 120 bp, synthetic construct; identical to SEQ ID NO: 15058
  source 1..120: mol_type = other DNA

SEQ ID NO: 50713 - DNA, 120 bp, synthetic construct; identical to SEQ ID NO: 15059
  source 1..120: mol_type = other DNA

SEQ ID NO: 50714 - DNA, 120 bp, synthetic construct; identical to SEQ ID NO: 15060
  source 1..120: mol_type = other DNA

SEQ ID NO: 50715 - DNA, 120 bp, synthetic construct; identical to SEQ ID NO: 15537
  source 1..120: mol_type = other DNA

SEQ ID NO: 50716 - DNA, 120 bp, synthetic construct; identical to SEQ ID NO: 13186
  source 1..120: mol_type = other DNA

SEQ ID NO: 50717 - DNA, 120 bp, synthetic construct
  source 1..120: mol_type = other DNA
agatgtattatcaaatccagccactggttagactagaaaaaggagctattaggagtggtgacagagggcatccctgtcttgtgccggttttcaaagggactgcttccagtttttgatcat

SEQ ID NO: 50718 - DNA, 120 bp, synthetic construct
  source 1..120: mol_type = other DNA
gtgtttgctcttgcttctctactttttaattgtgatgttagggtgtcagttttagatctttattgctattcaacatagtgttggaagttctggccagggcaatcaggcaggagaaggaaa

SEQ ID NO: 50719 - DNA, 120 bp, synthetic construct
  source 1..120: mol_type = other DNA
ctagaagaaaacctaggcaataccatttaggacataggcacaggcaaagacttcatgtctaaaacaccaaaagcaatgggaacagaagccaaaattgacaaatggaatctaatgaaacta

SEQ ID NO: 50720 - DNA, 120 bp, synthetic construct; identical to SEQ ID NO: 13187
  source 1..120: mol_type = other DNA

SEQ ID NO: 50721 - DNA, 120 bp, synthetic construct; identical to SEQ ID NO: 13188
  source 1..120: mol_type = other DNA

SEQ ID NO: 50722 - DNA, 120 bp, synthetic construct; identical to SEQ ID NO: 24653
  source 1..120: mol_type = other DNA

SEQ ID NO: 50723 - DNA, 120 bp, synthetic construct; identical to SEQ ID NO: 24654
  source 1..120: mol_type = other DNA

SEQ ID NO: 50724 - DNA, 120 bp, synthetic construct; identical to SEQ ID NO: 24655
  source 1..120: mol_type = other DNA

SEQ ID NO: 50725 - DNA, 120 bp, synthetic construct; identical to SEQ ID NO: 24656
  source 1..120: mol_type = other DNA

SEQ ID NO: 50726 - DNA, 120 bp, synthetic construct; identical to SEQ ID NO: 11259
  source 1..120: mol_type = other DNA

SEQ ID NO: 50727 - DNA, 120 bp, synthetic construct; identical to SEQ ID NO: 11260
  source 1..120: mol_type = other DNA

SEQ ID NO: 50728 - DNA, 120 bp, synthetic construct; identical to SEQ ID NO: 19688
  source 1..120: mol_type = other DNA

SEQ ID NO: 50729 - DNA, 120 bp, synthetic construct; identical to SEQ ID NO: 19689
  source 1..120: mol_type = other DNA

SEQ ID NO: 50730 - DNA, 120 bp, synthetic construct; identical to SEQ ID NO: 19690
  source 1..120: mol_type = other DNA

SEQ ID NO: 50731 - DNA, 120 bp, synthetic construct; identical to SEQ ID NO: 19691
  source 1..120: mol_type = other DNA

SEQ ID NO: 50732 - DNA, 120 bp, synthetic construct; identical to SEQ ID NO: 19692
  source 1..120: mol_type = other DNA

SEQ ID NO: 50733 - DNA, 120 bp, synthetic construct
  source 1..120: mol_type = other DNA
gtggaggttgcagtgagccaaaaccatgccactgcactccagcctgggcaacagagtgagacgcggtctcaaaaaaagaagaaagaaagaaagaaagaaagaaagaaagaaagaaagaaa

SEQ ID NO: 50734 - DNA, 120 bp, synthetic construct; identical to SEQ ID NO: 19693
  source 1..120: mol_type = other DNA

SEQ ID NO: 50735 - DNA, 120 bp, synthetic construct
  source 1..120: mol_type = other DNA
gcttaaaacctagatgacaggttgataggtgcagcaaaccatcatggcacaggtattcctatgtaacaaacctgcatgttcagcacatgtatcccagaacttaaagtaaagaagaagaag

SEQ ID NO: 50736 - DNA, 120 bp, synthetic construct; identical to SEQ ID NO: 18928
  source 1..120: mol_type = other DNA

SEQ ID NO: 50737 - DNA, 120 bp, synthetic construct; identical to SEQ ID NO: 18929
  source 1..120: mol_type = other DNA

SEQ ID NO: 50738 - DNA, 120 bp, synthetic construct; identical to SEQ ID NO: 18930
  source 1..120: mol_type = other DNA

SEQ ID NO: 50739 - DNA, 120 bp, synthetic construct
  source 1..120: mol_type = other DNA
tctttatagtagcatgatttataatcctttgggtatatacccagtaatgggattgctgagtcaaatggtaattctagacctagatccttgaggaattgccacactgtcttccacaatagt

SEQ ID NO: 50740 - DNA, 120 bp, synthetic construct
  source 1..120: mol_type = other DNA
tgctgttctcctctatgtgtccacatgttctcatcattgagcacctacttataactgagaacatgcagtatttggttttctgttcctgggttagtttgctagggataatggcctctagct

SEQ ID NO: 50741 - DNA, 120 bp, synthetic construct
  source 1..120: mol_type = other DNA
gagcattttttcatgtgttttttggctgcatgaatgtcttcctttgagaagtgtctgttcatatccttcacccactttttgatggggttgtttgtttttttcttgtaaatttgtttgagt

SEQ ID NO: 50742 - DNA, 120 bp, synthetic construct; identical to SEQ ID NO: 15690
  source 1..120: mol_type = other DNA

SEQ ID NO: 50743 - DNA, 120 bp, synthetic construct; identical to SEQ ID NO: 15691
  source 1..120: mol_type = other DNA

SEQ ID NO: 50744 - DNA, 120 bp, synthetic construct; identical to SEQ ID NO: 15692
  source 1..120: mol_type = other DNA

SEQ ID NO: 50745 - DNA, 120 bp, synthetic construct; identical to SEQ ID NO: 15693
  source 1..120: mol_type = other DNA

SEQ ID NO: 50746 - DNA, 120 bp, synthetic construct
  source 1..120: mol_type = other DNA
cttggcctcccaaagtgctaggatgacatgagccaccatgcccggccaactactttgtttaaactataatttgtttgataaataaatccggagttacagttcatggcaactaacaaaagc

SEQ ID NO: 50747 - DNA, 120 bp, synthetic construct
  source 1..120: mol_type = other DNA
tgttgcataggtaaatgtgtgtcatgggggtttgttatacagattatttcatcacccaggtattaaacttggtattcatttgttatctttcctgatcctccctctccccaccccccaccc

SEQ ID NO: 50748 - DNA, 120 bp, synthetic construct
  source 1..120: mol_type = other DNA
ctcgtcattagttctgaatccaaaaactacactgttattcacagtactctgtcttttaagagtgatgtgattccatctcgttgatctgtttaatgttgacagtggggtgttaaagtctcc

SEQ ID NO: 50749 - DNA, 120 bp, synthetic construct
  source 1..120: mol_type = other DNA
actttggtgaatgtgacaattatgtgtcttggagttgctcttctcgaggagtgtctttgtggtgttctgtgtatttcctgaatttgaatgttgacctgccttgctagattggggaagttc

SEQ ID NO: 50750 - DNA, 120 bp, synthetic construct; identical to SEQ ID NO: 27006
  source 1..120: mol_type = other DNA

SEQ ID NO: 50751 - DNA, 120 bp, synthetic construct
  source 1..120: mol_type = other DNA
tttgattgaactgtggtctgagagacagtttgttataatttccgttcttttacatttgctgaggagtgctttacttccaactatgtggtcaattttggaataggtgtggtgtggtgctga

SEQ ID NO: 50752 - DNA, 120 bp, synthetic construct
  source 1..120: mol_type = other DNA
aatcctcaataaaatactggcaaaccgaatccagcagcacatcaaaaagcttatccaccatgatcaagtgggcttcatccctgggatgcaaggctgtttcaatatatgcaaatcaataaa

SEQ ID NO: 50753 - DNA, 120 bp, synthetic construct
  source 1..120: mol_type = other DNA
aggcatcacactacctgacttcaaactatactacaaggctatggtaaccaaaacaacatggtagtggtaccaaaacagagatatagatcaatggaatagaacagagctctcagaaataat

SEQ ID NO: 50754 - DNA, 120 bp, synthetic construct
  source 1..120: mol_type = other DNA
ctcagggatctagaactagaaataccatttgacccagccatcccattactgggtatatacccaaatgactataaatcatgctgctataaagacacacgcacacgtatgtttattgcggca

SEQ ID NO: 50755 - DNA, 120 bp, synthetic construct
  source 1..120: mol_type = other DNA
tgacctgctggcgggggctgctcatcacagccagagcttccagctgctgcgctacccacccttcctgcccgtggccttccatgtgctgtttgcttccagccacacacccaggatcacctt

SEQ ID NO: 50756 - DNA, 120 bp, synthetic construct; identical to SEQ ID NO: 14404
  source 1..120: mol_type = other DNA

SEQ ID NO: 50757 - DNA, 120 bp, synthetic construct; identical to SEQ ID NO: 20401
  source 1..120: mol_type = other DNA

SEQ ID NO: 50758 - DNA, 120 bp, synthetic construct
  source 1..120: mol_type = other DNA
caccatgttggccaggctggtctcaaactcctgacctcaggtgatccacccacctcagcctctcaaagtgctgggattacaggtgtgagccactgcacccagcccctgctggattcttga

SEQ ID NO: 50759 - DNA, 120 bp, synthetic construct
  source 1..120: mol_type = other DNA
gtgggagggtggggggcggggcaggcagggatggttaatgggtacacacaaaaaaaatagaaaaaatgaataagacctactattggatagcacaacaaggtattatggtgtatatatata

SEQ ID NO: 50760 - DNA, 120 bp, synthetic construct; identical to SEQ ID NO: 19793
  source 1..120: mol_type = other DNA

SEQ ID NO: 50761 - DNA, 120 bp, synthetic construct; identical to SEQ ID NO: 19794
  source 1..120: mol_type = other DNA

SEQ ID NO: 50762 - DNA, 120 bp, synthetic construct
  source 1..120: mol_type = other DNA
tggggcgtatctggggacagctgtgatgttaaagtgatgggatggcacaggtccgctgtaatagaaaggtgaggggtgcagagtaactggctctggagcatggggtagaataggaacagc

SEQ ID NO: 50763 - DNA, 120 bp, synthetic construct
  source 1..120: mol_type = other DNA
tcataattttaaccaagactggagacatttagggagagtaaaattaaaactttcaaaagtcagaaagggatgtgaggctcggaaaaagaggcgcgggacgggaggagaagccctctctga

SEQ ID NO: 50764 - DNA, 120 bp, synthetic construct; identical to SEQ ID NO: 24519
  source 1..120: mol_type = other DNA

SEQ ID NO: 50765 - DNA, 120 bp, synthetic construct; identical to SEQ ID NO: 24520
  source 1..120: mol_type = other DNA

SEQ ID NO: 50766 - DNA, 120 bp, synthetic construct
  source 1..120: mol_type = other DNA
ttgcctaaggaataggaaatcactgaagcaggttattggcttcaactggaagtattcaactttgttaggaggagtgattattttttgagacagagtctcactcagtggcccaagctggag

SEQ ID NO: 50767 - DNA, 120 bp, synthetic construct; identical to SEQ ID NO: 25689
  source 1..120: mol_type = other DNA

SEQ ID NO: 50768 - DNA, 120 bp, synthetic construct; identical to SEQ ID NO: 25690
  source 1..120: mol_type = other DNA

SEQ ID NO: 50769 - DNA, 120 bp, synthetic construct; identical to SEQ ID NO: 13276
  source 1..120: mol_type = other DNA

SEQ ID NO: 50770 - DNA, 120 bp, synthetic construct; identical to SEQ ID NO: 13277
  source 1..120: mol_type = other DNA

SEQ ID NO: 50771 - DNA, 120 bp, synthetic construct
  source 1..120: mol_type = other DNA
ggcaatcttctcaggaacatctatgttagatctggagaaggggtagaagggagggtaaacggtgtaacttctttaacccttagaatttagggctccttgcatagtcatctaatttcctaa

SEQ ID NO: 50772 - DNA, 120 bp, synthetic construct; identical to SEQ ID NO: 15194
  source 1..120: mol_type = other DNA

SEQ ID NO: 50773 - DNA, 120 bp, synthetic construct; identical to SEQ ID NO: 15195
  source 1..120: mol_type = other DNA

SEQ ID NO: 50774 - DNA, 120 bp, synthetic construct; identical to SEQ ID NO: 15196
  source 1..120: mol_type = other DNA

SEQ ID NO: 50775 - DNA, 120 bp, synthetic construct; identical to SEQ ID NO: 15197
  source 1..120: mol_type = other DNA

SEQ ID NO: 50776 - DNA, 120 bp, synthetic construct; identical to SEQ ID NO: 15198
  source 1..120: mol_type = other DNA

SEQ ID NO: 50777 - DNA, 120 bp, synthetic construct; identical to SEQ ID NO: 15199
  source 1..120: mol_type = other DNA

SEQ ID NO: 50778 - DNA, 120 bp, synthetic construct; identical to SEQ ID NO: 15200
  source 1..120: mol_type = other DNA

SEQ ID NO: 50779 - DNA, 120 bp, synthetic construct
  source 1..120: mol_type = other DNA
ttgttgtggggattaagtgaaatacaggtaaagtacttggtccacagtaagtgcttaataagtgttaaagtgttagctgcaatattattctggatggaagagtttccccccatgttcagc

SEQ ID NO: 50780 - DNA, 120 bp, synthetic construct
  source 1..120: mol_type = other DNA
gccaggcacagtggctcatgcctctaatcccaacacttgggaggccaaggcaggcagatcatttgagcccaggagttcaagaccagcctgggcaacctggtgaaaccccatctctactac

SEQ ID NO: 50781 - DNA, 120 bp, synthetic construct
  source 1..120: mol_type = other DNA
tcagcttctgaaaataatcaggatgcacttctgtttgcactttattcattatgacttaagatttctctccccacaatctccttctactgtagagacaggctcatagcaggtggccaagga

SEQ ID NO: 50782 - DNA, 120 bp, synthetic construct
  source 1..120: mol_type = other DNA
tccaaacattgtcttagactgaccttccctctcttcaaacctatagaccttctctaactactcccaaagtgccctatcatagaccttccccaatatgtctctagccccttatttaaacac

SEQ ID NO: 50783 - DNA, 120 bp, synthetic construct; identical to SEQ ID NO: 8838
  source 1..120: mol_type = other DNA

SEQ ID NO: 50784 - DNA, 120 bp, synthetic construct; identical to SEQ ID NO: 8839
  source 1..120: mol_type = other DNA

SEQ ID NO: 50785 - DNA, 120 bp, synthetic construct; identical to SEQ ID NO: 21402
  source 1..120: mol_type = other DNA

SEQ ID NO: 50786 - DNA, 120 bp, synthetic construct; identical to SEQ ID NO: 21403
  source 1..120: mol_type = other DNA

SEQ ID NO: 50787 - DNA, 120 bp, synthetic construct
  source 1..120: mol_type = other DNA
attttttattgcgtctatttgattcttctttttttctttattagtcttgttagcagtctatcaattttgttgatcctttcaaaaaaccagctcctggattcattaattttttgaagggtt

SEQ ID NO: 50788 - DNA, 120 bp, synthetic construct
  source 1..120: mol_type = other DNA
gggtgcagcgcaccagcatggcacacgtatacatatgtaactaacctgcacaatgtgcacatgtaccctaaaacttaaagtataattaaaaaaaaaactaaaaaaaaaaaaaaaaactaa

SEQ ID NO: 50789 - DNA, 120 bp, synthetic construct; identical to SEQ ID NO: 21404
  source 1..120: mol_type = other DNA

SEQ ID NO: 50790 - DNA, 120 bp, synthetic construct
  source 1..120: mol_type = other DNA
gtgagcattttttcatgtgtttttttagctgcataaatgtcttcttttgagaagtgtctgttcatgtccttcacccactttttgatggggttgtttgtttttttcttgtaaatttgtttg

SEQ ID NO: 50791 - DNA, 120 bp, synthetic construct
  source 1..120: mol_type = other DNA
aaaaactactttaaagttcatatggaaccacaaaagagcccgcatcgccaagtcaatcctaagccaaaagaacaaagctggaggcatcacgctacctgacttcagactatactacagggc

SEQ ID NO: 50792 - DNA, 120 bp, synthetic construct; identical to SEQ ID NO: 21405
  source 1..120: mol_type = other DNA

SEQ ID NO: 50793 - DNA, 120 bp, synthetic construct; identical to SEQ ID NO: 21406
  source 1..120: mol_type = other DNA

SEQ ID NO: 50794 - DNA, 120 bp, synthetic construct; identical to SEQ ID NO: 21407
  source 1..120: mol_type = other DNA

SEQ ID NO: 50795 - DNA, 120 bp, synthetic construct; identical to SEQ ID NO: 21408
  source 1..120: mol_type = other DNA

SEQ ID NO: 50796 - DNA, 120 bp, synthetic construct; identical to SEQ ID NO: 21409
  source 1..120: mol_type = other DNA

SEQ ID NO: 50797 - DNA, 120 bp, synthetic construct
  source 1..120: mol_type = other DNA
tctgtaatctctaaagatagtcttaagaacacgtaaaaataaaacaaacaaccccatcaaaaagtgggcgaaggacatgaacagacacttctcaaaagaagacatttatgcagccaaaaa

SEQ ID NO: 50798 - DNA, 120 bp, synthetic construct
  source 1..120: mol_type = other DNA
aataggtgaaaaatgcttagaaaggtacagtgggacatacactggaaaaaaaaaaaaaaaaaaaaggccaggagtggtggctcagcctataatcccagcactttgggaggctgaggcagg

SEQ ID NO: 50799 - DNA, 120 bp, synthetic construct
  source 1..120: mol_type = other DNA
caaactcctgacctgaggcgatctgcccacctcagcctcccaaagtgctgagattacagacatgagccatcacacctggctaataacattttattttctctagtttactttattataata

SEQ ID NO: 50800 - DNA, 120 bp, synthetic construct
  source 1..120: mol_type = other DNA
gtaaatgattataaaaattacatgtcatggggtgggggaggggggagggatagcattaggagatataactaatgtaaatgacaagtaatgggtgcagcacaccaacaggcacatgtatac

SEQ ID NO: 50801 - DNA, 120 bp, synthetic construct
  source 1..120: mol_type = other DNA
caaagatggggaaaaaacagagcagaagaactggaaactctaaaaagcagagcacctctcctcctccaaaggaacgcagttcctcaccagcaacggaacaaagctggatggagaatgact

SEQ ID NO: 50802 - DNA, 120 bp, synthetic construct
  source 1..120: mol_type = other DNA
ctccaattaaaagacacagactggcaaactggataaagactcaagacccatcagtgtgctgtattcaggaaacccatctcacgtgcacagacacacataggctcaaaataaaaggatgga

SEQ ID NO: 50803 - DNA, 120 bp, synthetic construct
  source 1..120: mol_type = other DNA
caaaaaacccttcaaaaaattaataaatccaggagctggttttttgaaaggattaacaaaattgataagactgctagcaagactaataaagaaaaaaagagagaagaatcaaatagaccc

SEQ ID NO: 50804 - DNA, 120 bp, synthetic construct
  source 1..120: mol_type = other DNA
gcacaagacagggatgccctctctcaccactcctattcaacatagtgttggaagttctggccagggcaattaggcaggagaaggaaataaagggtattcaattaggaaaaggggaagtca

SEQ ID NO: 50805 - DNA, 120 bp, synthetic construct
  source 1..120: mol_type = other DNA
cattcaggacataggcatgggcaaggacttcatgtctaaaacaccaaaaactatggcaacaaaagccgaaattgacaaatgggatctaattagactaaagagcttctgcacagcaaaaga

SEQ ID NO: 50806 - DNA, 120 bp, synthetic construct; identical to SEQ ID NO: 24183
  source 1..120: mol_type = other DNA

SEQ ID NO: 50807 - DNA, 120 bp, synthetic construct; identical to SEQ ID NO: 19831
  source 1..120: mol_type = other DNA

SEQ ID NO: 50808 - DNA, 120 bp, synthetic construct
  source 1..120: mol_type = other DNA
ttcttgtcactacttgtgttttgttttgttttgttttgttttttgtttttggagatggagtctcgctcttgtcccccaggctggagtgcactggtgggatctctgcttattgcaacctac

SEQ ID NO: 50809 - DNA, 120 bp, synthetic construct; identical to SEQ ID NO: 19754
  source 1..120: mol_type = other DNA

SEQ ID NO: 50810 - DNA, 120 bp, synthetic construct
  source 1..120: mol_type = other DNA
agcacctgttgtttcctgactttttaatgattgccattctaactggtgtgagacggtaaacgttagacctaaaaccataaaaaccctagaagaaaacctaggcattaccattcaggacat

SEQ ID NO: 50811 - DNA, 120 bp, synthetic construct
  source 1..120: mol_type = other DNA
actcaagtgatcggcccacctcagcctcctgagtagctgggactacaagcttacaccacacctggctaattttttaaaattaattaacttttttgtagagatagggtctcactatattgc

SEQ ID NO: 50812 - DNA, 120 bp, synthetic construct; identical to SEQ ID NO: 7931
  source 1..120: mol_type = other DNA

SEQ ID NO: 50813 - DNA, 120 bp, synthetic construct; identical to SEQ ID NO: 33449
  source 1..120: mol_type = other DNA

SEQ ID NO: 50814 - DNA, 120 bp, synthetic construct; identical to SEQ ID NO: 33450
  source 1..120: mol_type = other DNA

SEQ ID NO: 50815 - DNA, 120 bp, synthetic construct
  source 1..120: mol_type = other DNA
aaccatcccccttccagccctaggccactgttaacctgctttctgtctctatggatttgcctattctgggcatttcatataaatggaatcatacaatatgtggtctttgtgattaactta

SEQ ID NO: 50816 - DNA, 120 bp, synthetic construct; identical to SEQ ID NO: 33451
  source 1..120: mol_type = other DNA

SEQ ID NO: 50817 - DNA, 120 bp, synthetic construct; identical to SEQ ID NO: 33862
  source 1..120: mol_type = other DNA

SEQ ID NO: 50818 - DNA, 120 bp, synthetic construct
  source 1..120: mol_type = other DNA
tctctgatggccagtgatgatgagcattttttcatgtgtttcttggctgcataaatgttttcttttgagaagtgtctgttcatatccttcggtcactttttgatggggttgcttgttttc

SEQ ID NO: 50819 - DNA, 120 bp, synthetic construct; identical to SEQ ID NO: 33863
  source 1..120: mol_type = other DNA

SEQ ID NO: 50820 - DNA, 120 bp, synthetic construct; identical to SEQ ID NO: 33864
  source 1..120: mol_type = other DNA

SEQ ID NO: 50821 - DNA, 120 bp, synthetic construct
  source 1..120: mol_type = other DNA
ttttgtccttgcgatagtttgctgagaatgatggtttccagcttcatccatgtccctacaaaggacatgaactcatccttttttatggctgcatagtatcccatcgtgcatatgtgtcac

SEQ ID NO: 50822 - DNA, 120 bp, synthetic construct
  source 1..120: mol_type = other DNA
aaacctgacgaaaacaagcaatggggaaaggattccctagttaataaatggtgctgggaaaactggctagccatatgtagaaagctgaaactggatcccttccttacaccttatacaaaa

SEQ ID NO: 50823 - DNA, 120 bp, synthetic construct
  source 1..120: mol_type = other DNA
attaagagtttttagcatgaaggttgttgaattttgtcaaaggccttttctgcatctattgagataatcatgtggtttttgtctttggttctgtttatatgctggattacatttattgat

SEQ ID NO: 50824 - DNA, 120 bp, synthetic construct; identical to SEQ ID NO: 33865
  source 1..120: mol_type = other DNA

SEQ ID NO: 50825 - DNA, 120 bp, synthetic construct; identical to SEQ ID NO: 33866
  source 1..120: mol_type = other DNA

SEQ ID NO: 50826 - DNA, 120 bp, synthetic construct
  source 1..120: mol_type = other DNA
ttggctgcataaatgtcttcttttgagaagtgtctgttcatgtccttcgcccactttttgatggggttgtttgtttttttcttgtaaatttgtttgagttcaaggctggttcaatatacg

SEQ ID NO: 50827 - DNA, 120 bp, synthetic construct
  source 1..120: mol_type = other DNA
ttaggattgacttggcaatgcgggctcttttttggttccatatgaactttaaagtagttttttccaattctgtgaagaaagtcattggtagcttgatggggatggcattgaatctgtaaa

SEQ ID NO: 50828 - DNA, 120 bp, synthetic construct; identical to SEQ ID NO: 33867
  source 1..120: mol_type = other DNA

SEQ ID NO: 50829 - DNA, 120 bp, synthetic construct
  source 1..120: mol_type = other DNA
ggtttccaatttcatccatgtccctacaaaggatatgaactcatcattttttatggctgcatagtattccatggtgtatatgtgccacattttcttaatccagtctatcattgttggaca

SEQ ID NO: 50830 - DNA, 120 bp, synthetic construct
  source 1..120: mol_type = other DNA
ggcttaggattgacttggcaatgcaggctcttttttggttccatatgaactttaaagtagttttttccaattctgtgaagaaagtcattggtagcttgatggggatggcattgaatctgt

SEQ ID NO: 50831 - DNA, 120 bp, synthetic construct
  source 1..120: mol_type = other DNA
tgtgctgctggattcggtttgccagtattttattgaggatttttgcatcgatgttcatcaaggatattggtctaaaattctcttttttggttgtgtctctgcccggctttggtatcagaa

SEQ ID NO: 50832 - DNA, 120 bp, synthetic construct
  source 1..120: mol_type = other DNA
cagagattctggtatgtggtgtctttgttctctttggtttcaaagaacatctttatttctgccttcatttcgttatgtacccagtagtcattcaggagcaggttgttcagtttccatgta

SEQ ID NO: 50833 - DNA, 120 bp, synthetic construct
  source 1..120: mol_type = other DNA
gttagttggttattttgctcattagttgatgcagtttcttcctagtctcgatggtctttacattttggcatgattttgcagcggctggtaccggttgttcctttccatgtttagcgcttc

SEQ ID NO: 50834 - DNA, 120 bp, synthetic construct
  source 1..120: mol_type = other DNA
atccagctttgttccattgctggtgaggaactgcgttcctttggaggaggagaggcgctctgcgtttcagagtttccagtttttctgttctgttttttccccatctttgtggttttatct

SEQ ID NO: 50835 - DNA, 120 bp, synthetic construct; identical to SEQ ID NO: 33868
  source 1..120: mol_type = other DNA

SEQ ID NO: 50836 - DNA, 120 bp, synthetic construct; identical to SEQ ID NO: 33869
  source 1..120: mol_type = other DNA

SEQ ID NO: 50837 - DNA, 120 bp, synthetic construct
  source 1..120: mol_type = other DNA
ctagtttacagtcccaccaacagtgaaaaagtgttcctatttctccacatcctctccagcacctgttgtttcctgactttttaatgattgccattctaactggtgtgagatggtatctca

SEQ ID NO: 50838 - DNA, 120 bp, synthetic construct; identical to SEQ ID NO: 33870
  source 1..120: mol_type = other DNA

SEQ ID NO: 50839 - DNA, 120 bp, synthetic construct; identical to SEQ ID NO: 33871
  source 1..120: mol_type = other DNA

SEQ ID NO: 50840 - DNA, 120 bp, synthetic construct
  source 1..120: mol_type = other DNA
gttttcaacttctttgcctttggtttgaatgtcctcccgtagctcagagtaatttgatcgtctgaagccttcttctctcagctcgtcaaaatcattctccatccagctttgttccattgc

SEQ ID NO: 50841 - DNA, 120 bp, synthetic construct
  source 1..120: mol_type = other DNA
ggactaaattctccaattaaaagacacagactggcaagttggataaagagtcaagacccatcagtgtgctgtattcaggaaacccatctcacgtgcagagacacacataggctcaaaata

SEQ ID NO: 50842 - DNA, 120 bp, synthetic construct
  source 1..120: mol_type = other DNA
gagctggttttttgaaaggatcaacaaaattgatagaccgctagcaagactaataaagaaaaaaagagagaagaatcaaatagacacaataaaaaatgataaaggggatatcaccactga

SEQ ID NO: 50843 - DNA, 120 bp, synthetic construct
  source 1..120: mol_type = other DNA
ttgcagatgacatgattgtatatctataaaaccccgtcgtctcagcccaaaatctccttaagctgataagcaacttcagcaaagtctcaggatacaaaatcaatgtacaaaaatcacaag

SEQ ID NO: 50844 - DNA, 120 bp, synthetic construct
  source 1..120: mol_type = other DNA
ttctggctattagccctttgtcagatgagtaggttgcgaaaattttctcccatgttgtaggttgcctgttcactctgatggtagtttcttttgctgtgcagaagctctttagtttaatta

SEQ ID NO: 50845 - DNA, 120 bp, synthetic construct; identical to SEQ ID NO: 33872
  source 1..120: mol_type = other DNA

SEQ ID NO: 50846 - DNA, 120 bp, synthetic construct; identical to SEQ ID NO: 33873
  source 1..120: mol_type = other DNA

SEQ ID NO: 50847 - DNA, 120 bp, synthetic construct; identical to SEQ ID NO: 7068
  source 1..120: mol_type = other DNA

SEQ ID NO: 50848 - DNA, 120 bp, synthetic construct; identical to SEQ ID NO: 15812
  source 1..120: mol_type = other DNA

SEQ ID NO: 50849 - DNA, 120 bp, synthetic construct; identical to SEQ ID NO: 15813
  source 1..120: mol_type = other DNA

SEQ ID NO: 50850 - DNA, 120 bp, synthetic construct; identical to SEQ ID NO: 15814
  source 1..120: mol_type = other DNA

SEQ ID NO: 50851 - DNA, 120 bp, synthetic construct; identical to SEQ ID NO: 7186
  source 1..120: mol_type = other DNA

SEQ ID NO: 50852 - DNA, 120 bp, synthetic construct; identical to SEQ ID NO: 7187
  source 1..120: mol_type = other DNA

SEQ ID NO: 50853 - DNA, 120 bp, synthetic construct; identical to SEQ ID NO: 7188
  source 1..120: mol_type = other DNA

SEQ ID NO: 50854 - DNA, 120 bp, synthetic construct; identical to SEQ ID NO: 7189
  source 1..120: mol_type = other DNA

SEQ ID NO: 50855 - DNA, 120 bp, synthetic construct; identical to SEQ ID NO: 7190
  source 1..120: mol_type = other DNA

SEQ ID NO: 50856 - DNA, 120 bp, synthetic construct; identical to SEQ ID NO: 7191
  source 1..120: mol_type = other DNA

SEQ ID NO: 50857 - DNA, 120 bp, synthetic construct; identical to SEQ ID NO: 7192
  source 1..120: mol_type = other DNA

SEQ ID NO: 50858 - DNA, 120 bp, synthetic construct; identical to SEQ ID NO: 35108
  source 1..120: mol_type = other DNA

SEQ ID NO: 50859 - DNA, 120 bp, synthetic construct; identical to SEQ ID NO: 17400
  source 1..120: mol_type = other DNA

SEQ ID NO: 50860 - DNA, 120 bp, synthetic construct; identical to SEQ ID NO: 17401
  source 1..120: mol_type = other DNA

SEQ ID NO: 50861 - DNA, 120 bp, synthetic construct; identical to SEQ ID NO: 15998
  source 1..120: mol_type = other DNA

SEQ ID NO: 50862 - DNA, 120 bp, synthetic construct; identical to SEQ ID NO: 15999
  source 1..120: mol_type = other DNA

SEQ ID NO: 50863 - DNA, 120 bp, synthetic construct; identical to SEQ ID NO: 16000
  source 1..120: mol_type = other DNA

SEQ ID NO: 50864 - DNA, 120 bp, synthetic construct
  source 1..120: mol_type = other DNA
aaagtcgagatcatcttgggacgcttttcttcctgtcaagaaaagagcttgccccagatttcctcactgtccacaaattctaaggagacggaggggcaatgataggaaagaaacaaaatg

SEQ ID NO: 50865 - DNA, 120 bp, synthetic construct; identical to SEQ ID NO: 16002
  source 1..120: mol_type = other DNA

SEQ ID NO: 50866 - DNA, 120 bp, synthetic construct; identical to SEQ ID NO: 3999
  source 1..120: mol_type = other DNA

SEQ ID NO: 50867 - DNA, 120 bp, synthetic construct
  source 1..120: mol_type = other DNA
atcacttgagcccaggagttctgggcgattgtgaactaggcgatcgggcgtctgcactaagtttggcatcaatatggtgatgttttgggagcaggggaccaccaggttgcctaaggtgtc

SEQ ID NO: 50868 - DNA, 120 bp, synthetic construct
  source 1..120: mol_type = other DNA
tgtctgctcattagtttttatgagaggaaaccagagaatttaaaaaaaatatttttgagacagggtcttgcttgtcacccaggctgccctgaagtggtgcaatcatagctcactgcagcc

SEQ ID NO: 50869 - DNA, 120 bp, synthetic construct
  source 1..120: mol_type = other DNA
tttttttcttgagacggagtttcactcttgctgcccaggccggagtgcaatggtgcaatcttggctgacagcaacctctgcctcccgggttcaagtgattctcctgactcagcctccctg

SEQ ID NO: 50870 - DNA, 120 bp, synthetic construct; identical to SEQ ID NO: 19585
  source 1..120: mol_type = other DNA

SEQ ID NO: 50871 - DNA, 120 bp, synthetic construct; identical to SEQ ID NO: 19587
  source 1..120: mol_type = other DNA

SEQ ID NO: 50872 - DNA, 120 bp, synthetic construct; identical to SEQ ID NO: 19588
  source 1..120: mol_type = other DNA

SEQ ID NO: 50873 - DNA, 120 bp, synthetic construct
  source 1..120: mol_type = other DNA
atgccaggagttcaagaccatcctggacaacatggcgagacccccatctctgcaaaaaaataaaataaattagctgggcctagtggcacacatctatagacccagctacttgaaagggtg

SEQ ID NO: 50874 - DNA, 120 bp, synthetic construct
  source 1..120: mol_type = other DNA
cagtggctcaatctcggctcactgtaacctccgcctcccgggttcaagcaattctcctgcctcagcctcctgagtagagtagctgggattacagttgcccaccaccacgcctggctaatt

SEQ ID NO: 50875 - DNA, 120 bp, synthetic construct
  source 1..120: mol_type = other DNA
tcacagtgaaccaaaattgtgccactgcattccagctgggcaacagagccagacttcgtctcaagaaaaatttaaaaatcaaatagacatgatttttttttagacagagtctcattctgt

SEQ ID NO: 50876 - DNA, 120 bp, synthetic construct
  source 1..120: mol_type = other DNA
tcagtatccaatggcgtagagctgggatgacccctctgctgggcccctaaccagggcattgcaacttggtttccatggtactccctcctgggttcagactttttagtggagcctgctcgg

SEQ ID NO: 50877 - DNA, 120 bp, synthetic construct
  source 1..120: mol_type = other DNA
ttatggagctcacaaagcctgtttgcatgtgtgagttcaagttattgccacaagaacctggtgcagtagcagatgggatgcccgtcgtgtagatgaggaaacgggcttagtgtgtctaag

SEQ ID NO: 50878 - DNA, 120 bp, synthetic construct
  source 1..120: mol_type = other DNA
gtgactacaggccagggggggagtgaggcaggaggagtcaaagcaggcggggaccagagcacgtgatgccctgggctgactccagtcctgctgggatcacgtccgcctctagaaaaacag

SEQ ID NO: 50879 - DNA, 120 bp, synthetic construct; identical to SEQ ID NO: 16581
  source 1..120: mol_type = other DNA

SEQ ID NO: 50880 - DNA, 120 bp, synthetic construct; identical to SEQ ID NO: 16582
  source 1..120: mol_type = other DNA

SEQ ID NO: 50881 - DNA, 120 bp, synthetic construct
  source 1..120: mol_type = other DNA
acacaagcagatcacctaaggtcagcagtttgagaccagcaatggccaacagtgaaaccccgtctctactaaaaatacaaaaattagccaggcgtggtgtcacatggctgtaatcccagc

SEQ ID NO: 50882 - DNA, 120 bp, synthetic construct
  source 1..120: mol_type = other DNA
cctgcgcaacacagcaagactccgtatcaaaaaaaaaaaaagtaaaactaaaccaattggaggaaaaggaatcccaacatttaggacaaactgtagcctcttctgagatggcccagtgga

SEQ ID NO: 50883 - DNA, 120 bp, synthetic construct
  source 1..120: mol_type = other DNA
cccaagtagctgggactacaggcacgagccaccacaccccactaatttttgtatttttagtagagatagggtttcaccatgctggccaggctgggtctcaaactcctgacctcaagtgat

SEQ ID NO: 50884 - DNA, 120 bp, synthetic construct
  source 1..120: mol_type = other DNA
cagttcccacttcccgaagatcttctggctccttaatttttttttttttttgagacggagtcttgctctgtcgcgcaggctactgtgcagtggcgcgatctcggctcactgcaagctccg

SEQ ID NO: 50885 - DNA, 120 bp, synthetic construct
  source 1..120: mol_type = other DNA
tccggagtagctgggactacaggtgtgtgccaccatgcctggctaattttttgtatttgtaatagagatggggttttgccatgttggccaggctgatcttgaacttctgaactcacatga

SEQ ID NO: 50886 - DNA, 120 bp, synthetic construct
  source 1..120: mol_type = other DNA
cagcctaggaaggctttcttagttgagagggggatggagaggggaggtacctgaaatgaggggagattgttgatgggtggaggggagtagccaaaaaaagactggaacgtcaagggcctt

SEQ ID NO: 50887 - DNA, 120 bp, synthetic construct
  source 1..120: mol_type = other DNA
atcagggagtttgtccaggattggtttggaggccatctcttctctcccagggaatctccctatctcacccagctccctgactccctggcctggccgcaggagctgaaggggccagggggg

SEQ ID NO: 50888 - DNA, 120 bp, synthetic construct
  source 1..120: mol_type = other DNA
ccagtgagtcctgccccagggcccccaaagagccagctcctctcaagaccccccttcaatggggcatcagctcccaggagcccgctgtgtgcctctctttccaactcattcagtgacaac

SEQ ID NO: 50889 - DNA, 120 bp, synthetic construct; identical to SEQ ID NO: 16586
  source 1..120: mol_type = other DNA

SEQ ID NO: 50890 - DNA, 120 bp, synthetic construct; identical to SEQ ID NO: 16587
  source 1..120: mol_type = other DNA

SEQ ID NO: 50891 - DNA, 120 bp, synthetic construct; identical to SEQ ID NO: 16588
  source 1..120: mol_type = other DNA

SEQ ID NO: 50892 - DNA, 120 bp, synthetic construct; identical to SEQ ID NO: 766
  source 1..120: mol_type = other DNA

SEQ ID NO: 50893 - DNA, 120 bp, synthetic construct; identical to SEQ ID NO: 767
  source 1..120: mol_type = other DNA

SEQ ID NO: 50894 - DNA, 120 bp, synthetic construct
  source 1..120: mol_type = other DNA
cttgtgtttagcttctgttagaggcctttgaaccagagcaactccatcttgagtaggcgctgggtaaaatgaggctgagacctactgggctgtgttcccaggcggttgaggcattctaag

SEQ ID NO: 50895 - DNA, 120 bp, synthetic construct; identical to SEQ ID NO: 838
  source 1..120: mol_type = other DNA

SEQ ID NO: 50896 - DNA, 120 bp, synthetic construct
  source 1..120: mol_type = other DNA
aacaagagcaaatctccatctcaaaaaagcaaacaccgagactgggtaacttataaagaagtttaattgactcacagttccacacggctggggaggcttcaggaaacttacaaccatgga

SEQ ID NO: 50897 - DNA, 120 bp, synthetic construct; identical to SEQ ID NO: 16565
  source 1..120: mol_type = other DNA

SEQ ID NO: 50898 - DNA, 120 bp, synthetic construct; identical to SEQ ID NO: 16927
  source 1..120: mol_type = other DNA

SEQ ID NO: 50899 - DNA, 120 bp, synthetic construct
  source 1..120: mol_type = other DNA
acgcatataatcccagcactttgggaggccaaggcaggcagatcatctgaggacaggagttcgagaccaccctggccatcgtggtgaaaccccgtctctattaaaagtacaaaaaaaaaa

SEQ ID NO: 50900 - DNA, 120 bp, synthetic construct; identical to SEQ ID NO: 16928
  source 1..120: mol_type = other DNA

SEQ ID NO: 50901 - DNA, 120 bp, synthetic construct
  source 1..120: mol_type = other DNA
tggttagacaggcgaagccctgggaagcagtgggagagggaaagactgggccggcgcggggccgcatgcctgtaaccccagcactttgggaggcccaggatggcggatcgcttgagcacg

SEQ ID NO: 50902 - DNA, 120 bp, synthetic construct
  source 1..120: mol_type = other DNA
gtattaaattatgaatcagctgaacctgtgcatgctcatttcaaagggaaattcagatgatccaggatgaccctggagagaccagagggggcctgaggcttcactgcagcggcctccacc

SEQ ID NO: 50903 - DNA, 120 bp, synthetic construct; identical to SEQ ID NO: 16562
  source 1..120: mol_type = other DNA

SEQ ID NO: 50904 - DNA, 120 bp, synthetic construct; identical to SEQ ID NO: 16561
  source 1..120: mol_type = other DNA

SEQ ID NO: 50905 - DNA, 120 bp, synthetic construct
  source 1..120: mol_type = other DNA
gttccagccactggttgccttgcaggaatgcaaggtcagggtggccagagctcggggttgttcaagaaaaccagcaacccagacttccactggcaactctcgaaaccacaattaattact

SEQ ID NO: 50906 - DNA, 120 bp, synthetic construct
  source 1..120: mol_type = other DNA
ggtattcttgctgtggttggcattccctggatgttcgaggcctctggggggcagcgtggggtccagaaggctgggggctgagcctctgccccactgccctgccctggcagtgaggtgcag

SEQ ID NO: 50907 - DNA, 120 bp, synthetic construct; identical to SEQ ID NO: 50887
  source 1..120: mol_type = other DNA

SEQ ID NO: 50908 - DNA, 120 bp, synthetic construct
  source 1..120: mol_type = other DNA
agtatcacttctgtggcattctggtggccaaaccagttacagagccagccagattcaaggagcaaggaaagagacacctctctttgctgcaaaaagctgcagagtcacatttaaaggagt

SEQ ID NO: 50909 - DNA, 120 bp, synthetic construct
  source 1..120: mol_type = other DNA
tccaataagttttgatgttttttctatttccaatcatgatgttgtttttgtttgttttgagacatggtctggctctgtcgcccaggctggagtgcagtggtgcaatctcagctcactgca

SEQ ID NO: 50910 - DNA, 120 bp, synthetic construct
  source 1..120: mol_type = other DNA
ggctgaggtaggagaattgctggagcctgggaggtgaagattgcagtgagctgagactgcgccattgcactccagcctgggcagcaggagtaaaaccctggcttagtaaaaagaagaaca

SEQ ID NO: 50911 - DNA, 120 bp, synthetic construct
  source 1..120: mol_type = other DNA
ctggccaacatggtgaaaccctgtctctactaaaaatacaaaaaaatgagctgggtgtagaggcgcacacctgtaatcccagctacttgtgaggctgaggcacaagaatcgcttgaatct

SEQ ID NO: 50912 - DNA, 120 bp, synthetic construct
  source 1..120: mol_type = other DNA
ctgtagggctttttgcatcacaggagggcagcatggccgggtgggagcagtggagcctttctgacaatggccagggcccaaacacagaaccagtctgcaacgcgtgggcactgctcacat

SEQ ID NO: 50913 - DNA, 120 bp, synthetic construct; identical to SEQ ID NO: 16929
  source 1..120: mol_type = other DNA

SEQ ID NO: 50914 - DNA, 120 bp, synthetic construct; identical to SEQ ID NO: 16556
  source 1..120: mol_type = other DNA

SEQ ID NO: 50915 - DNA, 120 bp, synthetic construct
  source 1..120: mol_type = other DNA
agcccacagattgcacccctctggtgtgcggttacctcttgcctatgtttaattcatggctggggggttgggacgagcttcccaagaaaggaaagaactcccctggggtcttgcccagtt

SEQ ID NO: 50916 - DNA, 120 bp, synthetic construct
  source 1..120: mol_type = other DNA
tcagcctcccaagtagctgggaccaggtgtgtgccaccatgcctggctaattattattattttttttggtagagacaggatttcatcgtcttgcccaggctggtctccaactcctgggct

SEQ ID NO: 50917 - DNA, 120 bp, synthetic construct
  source 1..120: mol_type = other DNA
tcagggtcacacagcgtgtcggttccagcctaggtcttccagtgtctcattaatcttttatccactcagcttctcttctggcccatgaaccttgctctcctgggactctttttttttttt

SEQ ID NO: 50918 - DNA, 120 bp, synthetic construct
  source 1..120: mol_type = other DNA
tgcccaggctggagtgcagtggtgtgatctcagctcactgcaacctctgtctcctgggctcaagtgattctcatgcctcagcctcccaagtagctgggattacaggtgtgtgccaccata

SEQ ID NO: 50919 - DNA, 120 bp, synthetic construct
  source 1..120: mol_type = other DNA
agttgcagtgagcccagatcgcgccactgaactccagcctcagtgacagagtgagactctgtctcaaaaaaaaaaaaaaaaaaagaaaagaaaaaaaaagaaattagctggacatggtgg

SEQ ID NO: 50920 - DNA, 120 bp, synthetic construct; identical to SEQ ID NO: 2169
  source 1..120: mol_type = other DNA

SEQ ID NO: 50921 - DNA, 120 bp, synthetic construct
  source 1..120: mol_type = other DNA
cctccctggctcaggctatcctcccacctcagcctcccaggtaggtgggactatggacacgtgctaccacgcccagctaattttttgtattttttttagagacggggtttcaccatgctg

SEQ ID NO: 50922 - DNA, 120 bp, synthetic construct
  source 1..120: mol_type = other DNA
gataatttttgtatttttagtagagacaggatttcaccatgttggccaggctggtctcgagctcctgacctcaagtgatccgcctgccttggcctcccaaagttctgggattacaggcgt

SEQ ID NO: 50923 - DNA, 120 bp, synthetic construct
  source 1..120: mol_type = other DNA
aggggctcaggagtttcttctccctcaaacagaaacccagcaccctcagggtcactgcgtgtgggtcctagcaatgcttaatagctacctgttttttgatgtatttttatttttattttt

SEQ ID NO: 50924 - DNA, 120 bp, synthetic construct; identical to SEQ ID NO: 16555
  source 1..120: mol_type = other DNA

SEQ ID NO: 50925 - DNA, 120 bp, synthetic construct; identical to SEQ ID NO: 16556
  source 1..120: mol_type = other DNA

SEQ ID NO: 50926 - DNA, 120 bp, synthetic construct; identical to SEQ ID NO: 16929
  source 1..120: mol_type = other DNA

SEQ ID NO: 50927 - DNA, 120 bp, synthetic construct; identical to SEQ ID NO: 769
  source 1..120: mol_type = other DNA

SEQ ID NO: 50928 - DNA, 120 bp, synthetic construct; identical to SEQ ID NO: 50911
  source 1..120: mol_type = other DNA

SEQ ID NO: 50929 - DNA, 120 bp, synthetic construct; identical to SEQ ID NO: 50910
  source 1..120: mol_type = other DNA

SEQ ID NO: 50930 - DNA, 120 bp, synthetic construct
  source 1..120: mol_type = other DNA
ttcagctgcatccaataagttttgatgttttttctatttccaatcatgatgttgtttttgtttgttttgagacatggtctggctctgtcgcccaggctggagtgcagtggtgcaatctca

SEQ ID NO: 50931 - DNA, 120 bp, synthetic construct; identical to SEQ ID NO: 770
  source 1..120: mol_type = other DNA

SEQ ID NO: 50932 - DNA, 120 bp, synthetic construct
  source 1..120: mol_type = other DNA
cagaatctttagcaccctctgcctttcctctcctcccctctcccaccaagggtgcagagcaaggcatcagggactctactttcgggtggatgtgtgggaatctcaccctcggtgaaagca

SEQ ID NO: 50933 - DNA, 120 bp, synthetic construct
  source 1..120: mol_type = other DNA
tagggctgctacacttcctgagagtctcaagggtgtcagaggtgctgactgtgtactccctgagtctgcccactgcatacattctttcaacaagcattcactgagcactagctgtttgcc

SEQ ID NO: 50934 - DNA, 120 bp, synthetic construct; identical to SEQ ID NO: 16560
  source 1..120: mol_type = other DNA

SEQ ID NO: 50935 - DNA, 120 bp, synthetic construct; identical to SEQ ID NO: 16561
  source 1..120: mol_type = other DNA

SEQ ID NO: 50936 - DNA, 120 bp, synthetic construct; identical to SEQ ID NO: 16562
  source 1..120: mol_type = other DNA

SEQ ID NO: 50937 - DNA, 120 bp, synthetic construct; identical to SEQ ID NO: 16563
  source 1..120: mol_type = other DNA

SEQ ID NO: 50938 - DNA, 120 bp, synthetic construct
  source 1..120: mol_type = other DNA
gtgagccaccgctcccggccctatttttttcttttttgagacagagtctcgctttgtcgtacaggctggagtgcaggggtgcaattggggttcactgcagcctcgaactcccaggctcaa

SEQ ID NO: 50939 - DNA, 120 bp, synthetic construct; identical to SEQ ID NO: 839
  source 1..120: mol_type = other DNA

SEQ ID NO: 50940 - DNA, 120 bp, synthetic construct
  source 1..120: mol_type = other DNA
cacgccactgcactccagcctgagcaagagcaagactccctctcaaaaaaaaaaaaaaagtaaagaaataaaacaatggctactccatagagcagccccgagggctgctggttgctcatt

SEQ ID NO: 50941 - DNA, 120 bp, synthetic construct
  source 1..120: mol_type = other DNA
aggggatgctagatagggatgaatgtaccgatattgaggattccacagggacagcttgagaagctgggattataggcgtgagccacagcgataatgtagtactttcagtgctgaaatcag

SEQ ID NO: 50942 - DNA, 120 bp, synthetic construct
  source 1..120: mol_type = other DNA
tgatctcggctctttgcaacctctgcctctcgggttgaagctattctcctgcctcagcctcccaagtagctgggattacaggcgtgaaccaccacacccagctagttttgtatttttagt

SEQ ID NO: 50943 - DNA, 120 bp, synthetic construct; identical to SEQ ID NO: 3447
  source 1..120: mol_type = other DNA

SEQ ID NO: 50944 - DNA, 120 bp, synthetic construct; identical to SEQ ID NO: 12668
  source 1..120: mol_type = other DNA

SEQ ID NO: 50945 - DNA, 120 bp, synthetic construct; identical to SEQ ID NO: 19509
  source 1..120: mol_type = other DNA

SEQ ID NO: 50946 - DNA, 120 bp, synthetic construct; identical to SEQ ID NO: 12666
  source 1..120: mol_type = other DNA

SEQ ID NO: 50947 - DNA, 120 bp, synthetic construct
  source 1..120: mol_type = other DNA
gttccacctaacgagaaacacccacaggtgtggaggggcaacccaccccttcataatttgacatcagatttttatcatgctatagaagcaaaagctttaatttctggaacattgtaaata

SEQ ID NO: 50948 - DNA, 120 bp, synthetic construct; identical to SEQ ID NO: 12667
  source 1..120: mol_type = other DNA

SEQ ID NO: 50949 - DNA, 120 bp, synthetic construct
  source 1..120: mol_type = other DNA
ttggttttctgttcctgtgtgaattcacttaggataatggcctccagctgcatccatgttgctgcaaaggacatgatttaaatcattttaatgactatatagtattccatggtgtatatg

SEQ ID NO: 50950 - DNA, 120 bp, synthetic construct
  source 1..120: mol_type = other DNA
ccgaagcagggcgaggcattgcctcactcgggaagcacaaggggtcagggagttccctttccgagtcaaagaaaggggtgacggacggcacctggaaaatcgggtcactcccaccggaat

SEQ ID NO: 50951 - DNA, 120 bp, synthetic construct
  source 1..120: mol_type = other DNA
aaagaccaaatctacgtctgattggtgtacctaaaagtgatggggagaatggaaccaagttggaaaacactctgcaggatattacccaggagaacttccccaatctagcaaggcaggcca

SEQ ID NO: 50952 - DNA, 120 bp, synthetic construct
  source 1..120: mol_type = other DNA
cataatggtaaagggatcaattcaacaaggagagctaactatcctaaatatatatgcacccaatacaggagcaccaagattcataaagcaagtcctgagtgacctacaaagagacttaga

SEQ ID NO: 50953 - DNA, 120 bp, synthetic construct
  source 1..120: mol_type = other DNA
ataaagaaaaaaagagagaagaatctaatagacgcagcaaaaaatgataaaggggatatcaccactgatcccacaaatacaaactaccatcagagaatactacaaacacctctacacaaa

SEQ ID NO: 50954 - DNA, 120 bp, synthetic construct
  source 1..120: mol_type = other DNA
caattaggcaggagaaggaaataaatggtattcaattaggaaaagaggaagtcaaattgtccctgtttgcagacgacatgattgtatatctagaaaaccccattgtctcagcccaaaatc

SEQ ID NO: 50955 - DNA, 120 bp, synthetic construct
  source 1..120: mol_type = other DNA
aaaggcttaaacgttagacctaaaaccataaaaaccctagaagaaaacctaggcattaccattcaggacataggcatgggcaaggacttcatgtctaaaacaccaaaagcaatggcaaca

SEQ ID NO: 50956 - DNA, 120 bp, synthetic construct
  source 1..120: mol_type = other DNA
ctgcacaatgtgcacatgtaccctaaaacttaaagtataataaaaaaaaaatctaaagataaagatgatagtagttatcaaacacaaataatatgtagacctctttaaaagtatcatgat

SEQ ID NO: 50957 - DNA, 120 bp, synthetic construct; identical to SEQ ID NO: 35663
  source 1..120: mol_type = other DNA

SEQ ID NO: 50958 - DNA, 120 bp, synthetic construct
  source 1..120: mol_type = other DNA
gggcgacagagcgagactccggtctcaaaaaaaaaaaaaaaaaaaaaaaaaagaaggtgaaccatcagagagacattctcctgcaggttttagaggaagagaacaatcagccatgttgcg

SEQ ID NO: 50959 - DNA, 120 bp, synthetic construct; identical to SEQ ID NO: 35665
  source 1..120: mol_type = other DNA

SEQ ID NO: 50960 - DNA, 120 bp, synthetic construct
  source 1..120: mol_type = other DNA
catcctctccagcacctgttgtttcctgactttttaatgattgccattctaactggagtgagatggtatctcattgtggttttgatttgcatttctctgatggccagtgatgatgagcat

SEQ ID NO: 50961 - DNA, 120 bp, synthetic construct
  source 1..120: mol_type = other DNA
tacccatgagcatggaatgttcttccatttgtttgtaacctcttttatttccttgagcagtggtttgtagttctccttgaagaggtccttcacatcccttgtaagttggattcctaggta

SEQ ID NO: 50962 - DNA, 120 bp, synthetic construct
  source 1..120: mol_type = other DNA
ttcaacttcttcctggtttagtcttgggagagtgtatatgtccaggaatttatccatttcgtctagattttctagtttatttgcgtagaggtgtttgtagtattctctgatggtagtttg

SEQ ID NO: 50963 - DNA, 120 bp, synthetic construct
  source 1..120: mol_type = other DNA
tccattggcttggtagatcttcctccatccttttattttgagcctatgtgtgtctctgcacgtgagatgtgtttcctgaatacagcacactgatgggtcttgactctttatccaatttgc

SEQ ID NO: 50964 - DNA, 120 bp, synthetic construct
  source 1..120: mol_type = other DNA
agttcatcgctttggctcctgaggcttctgcattcttcacgtagttctcgagccttggttttcagctccatcagctcctttaagcacttctctgtattggttattctagttatacattct

SEQ ID NO: 50965 - DNA, 120 bp, synthetic construct
  source 1..120: mol_type = other DNA
gtgccatctgtcacccctttctttgactcagaaagggaactccctgaccccttgctcttcccaagtgaggcaatgcctcgccctgcttcggctcgcgcacggtgcacgcacccactgacc

SEQ ID NO: 50966 - DNA, 120 bp, synthetic construct; identical to SEQ ID NO: 7310
  source 1..120: mol_type = other DNA

SEQ ID NO: 50967 - DNA, 120 bp, synthetic construct
  source 1..120: mol_type = other DNA
ctgagatgtggggagcgcctctgccccgcctccccatctgggatgtgaggagcgcctctgcccggccgcaaccccgtctgggaggtgaggagcgtctctgtccggccgccccgtctgaga

SEQ ID NO: 50968 - DNA, 120 bp, synthetic construct
  source 1..120: mol_type = other DNA
aaagaactacctgagactgggtaattcataaagaaaagaggtttaattgactggcagttctgcaggttgtacaggaaacttgtctggggaggcctcaggagacttacaagtatgatagaa

SEQ ID NO: 50969 - DNA, 120 bp, synthetic construct
  source 1..120: mol_type = other DNA
aaagtactgagatgacaggtgtgaagcaccatgcccggccatgcattcactgcctttaataagaagcatattaactcttgttttacaaccttgagattctgctctctccttttctctttt

SEQ ID NO: 50970 - DNA, 120 bp, synthetic construct
  source 1..120: mol_type = other DNA
tctattccacaaaaccgccattgtcatcatggcccatccccaatgagccgctgggcacacctcccagacggggtcgtggccgggcagaggggctcctcacttcccagtaggggcggcccg

SEQ ID NO: 50971 - DNA, 120 bp, synthetic construct
  source 1..120: mol_type = other DNA
ggagagggagacgggagagggagagggagacgggagagggagacgggagagggagagggagacgggagagggagacgggagagggagagggagagggagacgggagagggagagggagac

SEQ ID NO: 50972 - DNA, 120 bp, synthetic construct; identical to SEQ ID NO: 27789
  source 1..120: mol_type = other DNA

SEQ ID NO: 50973 - DNA, 120 bp, synthetic construct; identical to SEQ ID NO: 27790
  source 1..120: mol_type = other DNA

SEQ ID NO: 50974 - DNA, 120 bp, synthetic construct; identical to SEQ ID NO: 27791
  source 1..120: mol_type = other DNA

SEQ ID NO: 50975 - DNA, 120 bp, synthetic construct
  source 1..120: mol_type = other DNA
atatgtttattgcagcattattcacaatagcaaagacttggaaccaagccaaatgtccaacaatgatagactggattaagaaaatgtggcacatatacaccatggaatactatgcagcca

SEQ ID NO: 50976 - DNA, 120 bp, synthetic construct; identical to SEQ ID NO: 27792
  source 1..120: mol_type = other DNA

SEQ ID NO: 50977 - DNA, 120 bp, synthetic construct; identical to SEQ ID NO: 27139
  source 1..120: mol_type = other DNA

SEQ ID NO: 50978 - DNA, 120 bp, synthetic construct; identical to SEQ ID NO: 13302
  source 1..120: mol_type = other DNA

SEQ ID NO: 50979 - DNA, 120 bp, synthetic construct
  source 1..120: mol_type = other DNA
ggccgcgaccctgtctgggaggtgaggagcgtctctgcccggccgccccgtctgagaagagaggagaccctccgcctggcaaccgccccgtctgagaagtgaggagcccctccgcccggc

SEQ ID NO: 50980 - DNA, 120 bp, synthetic construct
  source 1..120: mol_type = other DNA
ctgccaaatccccctctgcgagaaacacccaagaatgaacaattaaaaaaaaaaaaagaaaaaagaaaaaaaaaaccacttgttgaaatattgagttagatatggaagggggcagtatgg

SEQ ID NO: 50981 - DNA, 120 bp, synthetic construct; identical to SEQ ID NO: 13303
  source 1..120: mol_type = other DNA

SEQ ID NO: 50982 - DNA, 120 bp, synthetic construct
  source 1..120: mol_type = other DNA
ctccctcccagtgtcccctctctgtcccagatcaggcctcattttgtttgttgtttgtttgtttttgagacggagtctcactttgtcgcccaggctggagtgcaatggcaccatctcagc

SEQ ID NO: 50983 - DNA, 120 bp, synthetic construct
  source 1..120: mol_type = other DNA
cagcctgggcaacagagtgagactctgtctcaaaaataaagtagaaacaaagaaacaaaataaataaaataaaaaatccaccaggcatggtagcacgcctgtagtcccagctacttgggg

SEQ ID NO: 50984 - DNA, 120 bp, synthetic construct
  source 1..120: mol_type = other DNA
ggcacggtggctcatgcctgtaatcccagcactttgggaggccgaggtgggcggatcacgaggtcaggggatcgaaaccatcctggctaccatggtgaaaccctgtctctactaaaaata

SEQ ID NO: 50985 - DNA, 120 bp, synthetic construct; identical to SEQ ID NO: 29359
  source 1..120: mol_type = other DNA

SEQ ID NO: 50986 - DNA, 120 bp, synthetic construct
  source 1..120: mol_type = other DNA
ctttgacacaggtttgttaggggtcaatttttacgtgaagatgaacccgtgcatctatgcaggagatgagaacacactagtgcgctaaaagaaggacatatcatatcactaacagatccc

SEQ ID NO: 50987 - DNA, 120 bp, synthetic construct
  source 1..120: mol_type = other DNA
atgaatggataggtagatggatagatggatgggtgggtgggtgggtggatggatggatggatggatggatggataggtggatggataaatggatgggtggatggatggatgaatgaatga

SEQ ID NO: 50988 - DNA, 120 bp, synthetic construct
  source 1..120: mol_type = other DNA
atggagagaattcagcggctcactccacacaactacacgtccttaacaccctctacaccatttatgttaaaactcgacacattcacagggaaaaagcccaaaaagaaaatgcatcaaaag

SEQ ID NO: 50989 - DNA, 120 bp, synthetic construct
  source 1..120: mol_type = other DNA
ggagcaggagaaagaagtgggtaagtgacacagagcagaatgcaattttgcacatagccgtccatggccatgagaaccactaggaatgtatttgggagatggttagaaataaaaaaatta

SEQ ID NO: 50990 - DNA, 120 bp, synthetic construct; identical to SEQ ID NO: 12414
  source 1..120: mol_type = other DNA

SEQ ID NO: 50991 - DNA, 120 bp, synthetic construct; identical to SEQ ID NO: 12415
  source 1..120: mol_type = other DNA

SEQ ID NO: 50992 - DNA, 120 bp, synthetic construct; identical to SEQ ID NO: 12416
  source 1..120: mol_type = other DNA

SEQ ID NO: 50993 - DNA, 120 bp, synthetic construct; identical to SEQ ID NO: 15414
  source 1..120: mol_type = other DNA

SEQ ID NO: 50994 - DNA, 120 bp, synthetic construct
  source 1..120: mol_type = other DNA
tctgggatgtgaggagcccctctgcccggccaccccatctgggaggtgagaagcgcctctgcccagctgcccatcgtctgggatgtgaggagcgcctctgcccggccgccccgtctggga

SEQ ID NO: 50995 - DNA, 120 bp, synthetic construct
  source 1..120: mol_type = other DNA
gtgtagaaagaagtagacataggagactccattttgttctgtactaagaaaaattcttctgccttgggatgctgttagtctataaccttacccccaaccccgtgctctctgaaacatgtg

SEQ ID NO: 50996 - DNA, 120 bp, synthetic construct; identical to SEQ ID NO: 30979
  source 1..120: mol_type = other DNA

SEQ ID NO: 50997 - DNA, 120 bp, synthetic construct; identical to SEQ ID NO: 30980
  source 1..120: mol_type = other DNA

SEQ ID NO: 50998 - DNA, 120 bp, synthetic construct
  source 1..120: mol_type = other DNA
atacttgaatttctaggattacaataaaagagagctaatattcaccaacccaacacctttttttttttttgagacggagtctctctgtccccaggctggattggagtgcagtggcgcgat

SEQ ID NO: 50999 - DNA, 120 bp, synthetic construct; identical to SEQ ID NO: 25315
  source 1..120: mol_type = other DNA

SEQ ID NO: 51000 - DNA, 120 bp, synthetic construct
  source 1..120: mol_type = other DNA
aaagagcttctgcacagcaaaagaaactaccatcagagtgaacaggcaacctacaacatgggagaaaattttcgcaacctgctactcatctgacaaagggctaatatccagaatctacaa

SEQ ID NO: 51001 - DNA, 120 bp, synthetic construct; identical to SEQ ID NO: 25316
  source 1..120: mol_type = other DNA

SEQ ID NO: 51002 - DNA, 120 bp, synthetic construct
  source 1..120: mol_type = other DNA
taaagttcatatggaagcaaacaagagcgtgcattgccaactcaatcctaagcctaaagaacaaagctggaggcatcagactacctgacttcaaactatactacaaggctgcagcaacca

SEQ ID NO: 51003 - DNA, 120 bp, synthetic construct
  source 1..120: mol_type = other DNA
gtatgtttattgcggcactattcacaataacaaagactcggaaccaacctaaatgtccaacaatgatagactggatgaagaaaatgtggcagatatacatcatggaatactatgcagcca

SEQ ID NO: 51004 - DNA, 120 bp, synthetic construct; identical to SEQ ID NO: 25450
  source 1..120: mol_type = other DNA

SEQ ID NO: 51005 - DNA, 120 bp, synthetic construct
  source 1..120: mol_type = other DNA
gccctggaagtccaggctgcaatgagctgtgactgcaccactgcactccaggctgggtgacagaacaagaccttgtctcaaaataaaaaataaaaaataaaattaactggatgtaatttc

SEQ ID NO: 51006 - DNA, 120 bp, synthetic construct; identical to SEQ ID NO: 25452
  source 1..120: mol_type = other DNA

SEQ ID NO: 51007 - DNA, 120 bp, synthetic construct; identical to SEQ ID NO: 25453
  source 1..120: mol_type = other DNA

SEQ ID NO: 51008 - DNA, 120 bp, synthetic construct; identical to SEQ ID NO: 26248
  source 1..120: mol_type = other DNA

SEQ ID NO: 51009 - DNA, 120 bp, synthetic construct; identical to SEQ ID NO: 26249
  source 1..120: mol_type = other DNA

SEQ ID NO: 51010 - DNA, 120 bp, synthetic construct
  source 1..120: mol_type = other DNA
tacctatggagggaccctgcctgtggagctccagcgtcatttcatccagctcctcctctacagggacattccatccagctcctcctctacagacacattccatgcagctcctcctctaca

SEQ ID NO: 51011 - DNA, 120 bp, synthetic construct
  source 1..120: mol_type = other DNA
gctcctcctctacagacacatttcatccagctcctcctctacagggacactccatccagatcctcctctacagacacatttcatccagctcctgctctacagacacattgcatccagctc

SEQ ID NO: 51012 - DNA, 120 bp, synthetic construct; identical to SEQ ID NO: 26250
  source 1..120: mol_type = other DNA

SEQ ID NO: 51013 - DNA, 120 bp, synthetic construct; identical to SEQ ID NO: 26251
  source 1..120: mol_type = other DNA

SEQ ID NO: 51014 - DNA, 120 bp, synthetic construct; identical to SEQ ID NO: 26252
  source 1..120: mol_type = other DNA

SEQ ID NO: 51015 - DNA, 120 bp, synthetic construct; identical to SEQ ID NO: 26253
  source 1..120: mol_type = other DNA

SEQ ID NO: 51016 - DNA, 120 bp, synthetic construct; identical to SEQ ID NO: 26254
  source 1..120: mol_type = other DNA

SEQ ID NO: 51017 - DNA, 120 bp, synthetic construct
  source 1..120: mol_type = other DNA
ccagcctgggcgacaaagtgagactctgtctcaaaaaaaaaaaaaaaaaaaaaaaaaaatttgtggatacacagtgatgagttcatgtcctttgtagggacatggatgaagctagaaacc

SEQ ID NO: 51018 - DNA, 120 bp, synthetic construct; identical to SEQ ID NO: 24796
  source 1..120: mol_type = other DNA

SEQ ID NO: 51019 - DNA, 120 bp, synthetic construct
  source 1..120: mol_type = other DNA
ctgggtcaaatggtatttctagttctagatccctgaggaatcgccacaatgacttccccaatggttgaactagtttatagtcccaccaacagtgtaaaagtgttcctatttctccagatc

SEQ ID NO: 51020 - DNA, 120 bp, synthetic construct; identical to SEQ ID NO: 24797
  source 1..120: mol_type = other DNA

SEQ ID NO: 51021 - DNA, 120 bp, synthetic construct; identical to SEQ ID NO: 7051
  source 1..120: mol_type = other DNA

SEQ ID NO: 51022 - DNA, 120 bp, synthetic construct; identical to SEQ ID NO: 7052
  source 1..120: mol_type = other DNA

SEQ ID NO: 51023 - DNA, 120 bp, synthetic construct
  source 1..120: mol_type = other DNA
aaccgagatcacaccaccgcactctagcctgagggaaagagcaaaactctgtctcaaaaaaactataaaaatgataccagctacttgggaggctgaggcaggagaatagcttgaacctgg

SEQ ID NO: 51024 - DNA, 120 bp, synthetic construct
  source 1..120: mol_type = other DNA
acagaatgagactctgtctcaaaaataaataaataaagactggggacactagctcacgcctgtaatcccagcactttgggaggccacagcagatagatcacctgtagtcaggagttcgag

SEQ ID NO: 51025 - DNA, 120 bp, synthetic construct; identical to SEQ ID NO: 24757
  source 1..120: mol_type = other DNA

SEQ ID NO: 51026 - DNA, 120 bp, synthetic construct
  source 1..120: mol_type = other DNA
tttaattagatcccatttgccaattttggcttctgttgccattgcttttggtgttttagacattaagatcttgcccatgcctatgtcctgaatggtattgcctaggttttcttctagggt

SEQ ID NO: 51027 - DNA, 120 bp, synthetic construct
  source 1..120: mol_type = other DNA
tttctcctgcctgattgccctggccagaacttccaacactatgttgaataggagtggtgagagagggcatccctgtcttgtggcagttttcaaagggaattcttccagtttttgcccatt

SEQ ID NO: 51028 - DNA, 120 bp, synthetic construct
  source 1..120: mol_type = other DNA
taacttggaaattataggaatttatttctcacagttctggaggctgtgaagtccaagatgaaggtgctggcagatttggtgtctagtgagggctgactttcttgcttccaaaatgatacc

SEQ ID NO: 51029 - DNA, 120 bp, synthetic construct; identical to SEQ ID NO: 24759
  source 1..120: mol_type = other DNA

SEQ ID NO: 51030 - DNA, 120 bp, synthetic construct
  source 1..120: mol_type = other DNA
gctcatttaggcaatttttctttagttttgatgaaatataaaaatatacctgagtcaggctgggcatgttggctcacacctgtaatcccagcactttgggaggatgaggcaggtggatca

SEQ ID NO: 51031 - DNA, 120 bp, synthetic construct
  source 1..120: mol_type = other DNA
tgatggccagtgatgatgagcattttttcatctgtcttttgcctgcataaatgtcttcttttgagaagtgtctgttcatatccttcacccacttgttgatggggttgtttgtttttttct

SEQ ID NO: 51032 - DNA, 120 bp, synthetic construct
  source 1..120: mol_type = other DNA
tttgtctgttattggtgtataagaatgcttgtgatttttgcacattgattttgtatcctgagactttgctgaagttgcctatcggcttaaggagattttgggctgagacgatggggtttt

SEQ ID NO: 51033 - DNA, 120 bp, synthetic construct
  source 1..120: mol_type = other DNA
aggagcaggttgcttggtttccatgtagttgagcggttttgagtgcgtttcttaatcctgagttctagtttgattgcactgtggtctgagagacagtttgttataatttctgttctttta

SEQ ID NO: 51034 - DNA, 120 bp, synthetic construct; identical to SEQ ID NO: 24760
  source 1..120: mol_type = other DNA

SEQ ID NO: 51035 - DNA, 120 bp, synthetic construct; identical to SEQ ID NO: 24761
  source 1..120: mol_type = other DNA

SEQ ID NO: 51036 - DNA, 120 bp, synthetic construct; identical to SEQ ID NO: 24762
  source 1..120: mol_type = other DNA

SEQ ID NO: 51037 - DNA, 120 bp, synthetic construct; identical to SEQ ID NO: 24763
  source 1..120: mol_type = other DNA

SEQ ID NO: 51038 - DNA, 120 bp, synthetic construct; identical to SEQ ID NO: 24764
  source 1..120: mol_type = other DNA

SEQ ID NO: 51039 - DNA, 120 bp, synthetic construct; identical to SEQ ID NO: 23519
  source 1..120: mol_type = other DNA

SEQ ID NO: 51040 - DNA, 120 bp, synthetic construct; identical to SEQ ID NO: 23520
  source 1..120: mol_type = other DNA

SEQ ID NO: 51041 - DNA, 120 bp, synthetic construct
  source 1..120: mol_type = other DNA
atgcccaggccatctgccttcgggtctgtgatgagaaacggagtggcccattcctttctgcccgggtctaggccgctgagcagagcccctactcccgggcagcgttgtctcaatccttcc

SEQ ID NO: 51042 - DNA, 120 bp, synthetic construct
  source 1..120: mol_type = other DNA
ttttaaacgtttcaaattggcaacaatttaaaagttaaataataccaagggctggtaaagacgcatggaattggaatcccaggtgacgctgtggaagcaaggagtccagccactctggaa

SEQ ID NO: 51043 - DNA, 120 bp, synthetic construct; identical to SEQ ID NO: 31429
  source 1..120: mol_type = other DNA

SEQ ID NO: 51044 - DNA, 120 bp, synthetic construct
  source 1..120: mol_type = other DNA
atcttttttgaactttgtagattttttttccaaataattcagatccatggttggctgaacccatggatgtgaaatccatggatacagagggccagttttgtatgtgtgtgtgtgtgtgtg

SEQ ID NO: 51045 - DNA, 120 bp, synthetic construct
  source 1..120: mol_type = other DNA
tgcctcatactagcttgcccagaattattcttgatttgaaatgactactgtaagttgactttaaaatttgcaataagaaatggtccagggccgggtgcagtggctcacccctgttatcct

SEQ ID NO: 51046 - DNA, 120 bp, synthetic construct
  source 1..120: mol_type = other DNA
aatctaaatttgatgaaaagttctccctccaagatctagatttgcagcattatttaaaatattaaaatgttggccgggcgcagtggctcatgcctgtaatcccagcactttgggaggctg

SEQ ID NO: 51047 - DNA, 120 bp, synthetic construct
  source 1..120: mol_type = other DNA
acatgcaaaaatcacaagcattcctgtacaccaataacagacaaacagagagccaaatcatgagtgaactcccattcacaattgcttcaaagagaataaaatacctaggaatccaactta

SEQ ID NO: 51048 - DNA, 120 bp, synthetic construct
  source 1..120: mol_type = other DNA
aagtggacaaaggatatgaacagacacttctcaaaagaagacatttatgcagtcaacagacacatgaaaaaatgctcatcatcactggccatcagagaaatgcaaatcaaaaccacaatg

SEQ ID NO: 51049 - DNA, 120 bp, synthetic construct
  source 1..120: mol_type = other DNA
agcctcccaaagtgctgggattacaggtgtgagccatgactcccggcccctaattcttttattggccatatgtaatctaatttacttactatttcagtgactctgtttttttccttctaa

SEQ ID NO: 51050 - DNA, 120 bp, synthetic construct
  source 1..120: mol_type = other DNA
agataatgggccactgtactccagcctgggtgacagagcaagactctgtcaaaaaaacaaacaaaacatgcagttcatctttccctcagtagatatcgaaagagtgggataaaaggaaaa

SEQ ID NO: 51051 - DNA, 120 bp, synthetic construct
  source 1..120: mol_type = other DNA
aggatcctcctgcctcagcctcccgaatagctgggattacagatgccagctcacaagtttactattaaagaaacatcaccctaggtgtatttttcatgtaaactggctttttcatataaa

SEQ ID NO: 51052 - DNA, 120 bp, synthetic construct; identical to SEQ ID NO: 16991
  source 1..120: mol_type = other DNA

SEQ ID NO: 51053 - DNA, 120 bp, synthetic construct; identical to SEQ ID NO: 16992
  source 1..120: mol_type = other DNA

SEQ ID NO: 51054 - DNA, 120 bp, synthetic construct; identical to SEQ ID NO: 16993
  source 1..120: mol_type = other DNA

SEQ ID NO: 51055 - DNA, 120 bp, synthetic construct; identical to SEQ ID NO: 16994
  source 1..120: mol_type = other DNA

SEQ ID NO: 51056 - DNA, 120 bp, synthetic construct; identical to SEQ ID NO: 4069
  source 1..120: mol_type = other DNA

SEQ ID NO: 51057 - DNA, 120 bp, synthetic construct; identical to SEQ ID NO: 16996
  source 1..120: mol_type = other DNA

SEQ ID NO: 51058 - DNA, 120 bp, synthetic construct; identical to SEQ ID NO: 16997
  source 1..120: mol_type = other DNA

SEQ ID NO: 51059 - DNA, 120 bp, synthetic construct; identical to SEQ ID NO: 16998
  source 1..120: mol_type = other DNA

SEQ ID NO: 51060 - DNA, 120 bp, synthetic construct
  source 1..120: mol_type = other DNA
cggaaacctggagaacctcagtttggccttcaccaatgtaaccagtgcctgcgccgagcacctcatcaaactgccttcgctcaagcagctgaacctgtggtccactcaggtacgtcctcc

SEQ ID NO: 51061 - DNA, 120 bp, synthetic construct
  source 1..120: mol_type = other DNA
tgggtctttttgttatagtaacaccagtggctgctgagtcccagctcagtgtgaactgcactgctcagtactctgcacagggcagatgaaggggccttcactgcacacctgtgaagtgca

SEQ ID NO: 51062 - DNA, 120 bp, synthetic construct; identical to SEQ ID NO: 7594
  source 1..120: mol_type = other DNA

SEQ ID NO: 51063 - DNA, 120 bp, synthetic construct; identical to SEQ ID NO: 16530
  source 1..120: mol_type = other DNA

SEQ ID NO: 51064 - DNA, 120 bp, synthetic construct
  source 1..120: mol_type = other DNA
tgaggagcatctctgcccggccgccatcccatctaggaagtgaggagcgtctctgcccggccgcccatcgtctgagatgtggggagcgcctctgccccgccgccccgtctgggatgtgag

SEQ ID NO: 51065 - DNA, 120 bp, synthetic construct; identical to SEQ ID NO: 16531
  source 1..120: mol_type = other DNA

SEQ ID NO: 51066 - DNA, 120 bp, synthetic construct
  source 1..120: mol_type = other DNA
ctcctgaatgactactgggtacataacggaatgaaggcagaaataaagatattctttgaaaccaacaagaacaaagagacaacataccagaatctctgggacacatttaaagcagtgtgt

SEQ ID NO: 51067 - DNA, 120 bp, synthetic construct
  source 1..120: mol_type = other DNA
tagatgcagaaaaggcctttgacaaaattcaacagcccttcatgctaaaaactctcaataaattaggtattgatgggacgtatctcaaaataataagagctatatatgacaaaccccagc

SEQ ID NO: 51068 - DNA, 120 bp, synthetic construct
  source 1..120: mol_type = other DNA
gaaacgggaccccttccttacaccttatacaaaaattaattcaaaatggattaaagacttaaatgttaggcctaaaaccataaaaaccctagaagaaaacctaggcattaccattcagga

SEQ ID NO: 51069 - DNA, 120 bp, synthetic construct; identical to SEQ ID NO: 24178
  source 1..120: mol_type = other DNA

SEQ ID NO: 51070 - DNA, 120 bp, synthetic construct
  source 1..120: mol_type = other DNA
gtggttttgatttgcatttctctgatggccagtgatgatgagcattttttcatgtgttttttggctgcataaatgtcttcttttgagaagtgtctgttattaataatgggagactttaac

SEQ ID NO: 51071 - DNA, 120 bp, synthetic construct; identical to SEQ ID NO: 27726
  source 1..120: mol_type = other DNA

SEQ ID NO: 51072 - DNA, 120 bp, synthetic construct; identical to SEQ ID NO: 26856
  source 1..120: mol_type = other DNA

SEQ ID NO: 51073 - DNA, 120 bp, synthetic construct
  source 1..120: mol_type = other DNA
tgggtatatacccaaatgactataaatcatgctgctataaagacacatgcacacgtatgtttattgcggcactattcacaatagcaaagacttggaaccaacccaaatgtccaacaatga

SEQ ID NO: 51074 - DNA, 120 bp, synthetic construct
  source 1..120: mol_type = other DNA
gcttaggattgacttggcgatgcgggctcttttttggttccatatgaactttaaagtagttttttccaattctgtgaagaaagtcattggtagcttgatggggatggcattgaatctgta

SEQ ID NO: 51075 - DNA, 120 bp, synthetic construct
  source 1..120: mol_type = other DNA
accagttcctccttgtacctctggtagaattcggctgtgaatccatctggtcctggactctttttggttggtaaactattgattattgccacaatttcagagcctgttattggtctattc

SEQ ID NO: 51076 - DNA, 120 bp, synthetic construct
  source 1..120: mol_type = other DNA
gttgactttctgtctcgttgatctgtctaatgttgacagtggggtgttaaagtcttccattattaatgtgtgggagtctaagtctctttgtaggtcactcaggacttgctttatgaatct

SEQ ID NO: 51077 - DNA, 120 bp, synthetic construct
  source 1..120: mol_type = other DNA
tttgtggcgttctctgtatttcctgaatctgaatgttggcctgccttgctagattggggaagttctcctggataatatcctgcagagtgttttccaacttggttccattctccacatcac

SEQ ID NO: 51078 - DNA, 120 bp, synthetic construct
  source 1..120: mol_type = other DNA
cacccagttcgagcttcccggctgctttgtttacctaagcaagcctgggcaatggcgggagcccctcccccagcctcgctgccgccttgcagtttgatctcagactgctgtgctagcaat

SEQ ID NO: 51079 - DNA, 120 bp, synthetic construct; identical to SEQ ID NO: 26855
  source 1..120: mol_type = other DNA

SEQ ID NO: 51080 - DNA, 120 bp, synthetic construct
  source 1..120: mol_type = other DNA
tcctatttctccactactctccagcacctgttgtttcctgactttttaatgattgccattctaactggtgtgagatggtatctcattgtggttttgatttgcatttctctgatggccagt

SEQ ID NO: 51081 - DNA, 120 bp, synthetic construct
  source 1..120: mol_type = other DNA
tctttcggcttaggattgactgggcaatgggggctcttttttggttccatatgaactttaaagtagttttttccatttctgtgaggaaagtcattggtagcttgatggggatggcattga

SEQ ID NO: 51082 - DNA, 120 bp, synthetic construct
  source 1..120: mol_type = other DNA
ccactgtctcagcccaaaatcttcttaagctgataagcaacttcagccaagtctcaggatacaaaatcaatgtacaaaaatcacaagcattcttatacaccaataacagacaaacagaga

SEQ ID NO: 51083 - DNA, 120 bp, synthetic construct
  source 1..120: mol_type = other DNA
atttttttatgattattatttatattattattatactttaagttttacggtacatgtgcacattgtgcaggttagttacatatgtatacatgtgccatgctggtgcgctgcacccactaa

SEQ ID NO: 51084 - DNA, 120 bp, synthetic construct
  source 1..120: mol_type = other DNA
gcgaaaattttctcccattttgtaagttgcctgttcactctgatggtagtttcttttgctgtgcagaagctctttagtttaattagatcccatttgtcaattttgtcttttgttgccatt

SEQ ID NO: 51085 - DNA, 120 bp, synthetic construct
  source 1..120: mol_type = other DNA
aaaaggtccttcatatcccttgtaagttggattcctaggtattttattctctttgaagcaattgtgaatgggagttcactcatgatttggctctctgtttgtctgttgttggtgtatagg

SEQ ID NO: 51086 - DNA, 120 bp, synthetic construct
  source 1..120: mol_type = other DNA
agttctatgtagattctgcatgttaaccctttgtcagatgggtagtttgtaaaaattgtctcttgttctgtaggttgcctgttcgcactgatggtagtttcttttgctgtgcagaagctc

SEQ ID NO: 51087 - DNA, 120 bp, synthetic construct; identical to SEQ ID NO: 31642
  source 1..120: mol_type = other DNA

SEQ ID NO: 51088 - DNA, 120 bp, synthetic construct; identical to SEQ ID NO: 31643
  source 1..120: mol_type = other DNA

SEQ ID NO: 51089 - DNA, 120 bp, synthetic construct
  source 1..120: mol_type = other DNA
tcaaaagcaatggaagtattcataagggaatacttgattcttactgagctattggttctctgctttccatgtctgtctaggccagtacttattttcatggttaatttacatctcagtgac

SEQ ID NO: 51090 - DNA, 120 bp, synthetic construct; identical to SEQ ID NO: 31644
  source 1..120: mol_type = other DNA

SEQ ID NO: 51091 - DNA, 120 bp, synthetic construct
  source 1..120: mol_type = other DNA
cacattttcttaatccagtctatcattgttggacatttgggttggttccaagtctttgctattgtgaataatgccgcaataaacatacgtgtgcatgtgtctttatagcagcatgattca

SEQ ID NO: 51092 - DNA, 120 bp, synthetic construct
  source 1..120: mol_type = other DNA
tgtgcggtgttatttctgagggctctgttctgttccattgatctatatctctgtttaggtaccagtaccatgctgttttggttactgtagccttgtagtatagtttgaagtcaggtagtg

SEQ ID NO: 51093 - DNA, 120 bp, synthetic construct
  source 1..120: mol_type = other DNA
tttttgcccattcagtatgatattggctgtgggtttgtcatagctcttattattttgaaatatgtcccatcaatacctaatttattgagagtttttagcatgaagggttgttgaattttg

SEQ ID NO: 51094 - DNA, 120 bp, synthetic construct
  source 1..120: mol_type = other DNA
gtgtctctatttccttcagttctgctctgattttagttatttcttgccttctgctagcttttgaatgtgtttgctcgtgcttttctagttcttttaattgtgatgttagggtgtcaattt

SEQ ID NO: 51095 - DNA, 120 bp, synthetic construct
  source 1..120: mol_type = other DNA
gtttagcgcttccttcaggagctcttttagggcaggcctggtggtgacaaaatctttcagcatttgcttgtctgtaaagtattttatttctccttcacttatgaagcttagtttggctgg

SEQ ID NO: 51096 - DNA, 120 bp, synthetic construct
  source 1..120: mol_type = other DNA
aacacacaggaccctcagctgcaggtctgttggagtaccctgcggtgtgaggtgtcagtgtgcccctgctggggggtgcctcccagttaggctgctcgggggtcaggggtcagggaccca

SEQ ID NO: 51097 - DNA, 120 bp, synthetic construct; identical to SEQ ID NO: 31645
  source 1..120: mol_type = other DNA

SEQ ID NO: 51098 - DNA, 120 bp, synthetic construct
  source 1..120: mol_type = other DNA
aatcgcttgaatccaggagatggaggttgcagtcagctgagattgtgccattacactccaacctgggcaacaagagcaaaactctatcgcaaaaaaaaaaaaaaaaggaaatgacaattg

SEQ ID NO: 51099 - DNA, 120 bp, synthetic construct
  source 1..120: mol_type = other DNA
caatgctatccctcacccctccccccaccccacaacagtccccagagtgatgttccccttcctgtgtccatgtgttctcattgttcaattcccacctatgagtgagaatatgcggtgttt

SEQ ID NO: 51100 - DNA, 120 bp, synthetic construct
  source 1..120: mol_type = other DNA
tttagtttaattagatcccatttgtcaattttggcttttgttgccattgcttttgatattttagacatgaagtccttgcccatgcctatgtcctgaatggtaattttagcctaggttttc

SEQ ID NO: 51101 - DNA, 120 bp, synthetic construct
  source 1..120: mol_type = other DNA
cagagagccaaatcatgagtgaactcccattcacaattgcttcaaagagaataaaaaacctaggaatccaccttacaagggacctgaaggacaaataaattttaaaaatgatacacacat

SEQ ID NO: 51102 - DNA, 120 bp, synthetic construct
  source 1..120: mol_type = other DNA
ctaaaaactctcaataaattaggtattgatgggacgtatctcaaaataataagagctatttatgacaaacccacagccaatatcctgaatgggcaaaaactggaagcattccctttgaaa

SEQ ID NO: 51103 - DNA, 120 bp, synthetic construct
  source 1..120: mol_type = other DNA
ggtactggtaccaaaacagagatatagaccaatggaacagaacagagccctcagaaataatgccgcatatctacaaacatctgatctttgacaaatctgagaaaaacaagcaatggggaa

SEQ ID NO: 51104 - DNA, 120 bp, synthetic construct
  source 1..120: mol_type = other DNA
ctagaactagaaataccatttgacccagccatcccattactgggtatatacccaaaggactataaatcatgctgctataaagacacatgcacacgtatgtttattgcggcactattcaca

SEQ ID NO: 51105 - DNA, 120 bp, synthetic construct
  source 1..120: mol_type = other DNA
gcctgtgcttttggtgtcgtatccaagaaatcattgccaagaccaatgtcatcaggcttttttctttttctttttctttttttttttttttatactttaagttttagggtacatgtgcac

SEQ ID NO: 51106 - DNA, 120 bp, synthetic construct
  source 1..120: mol_type = other DNA
tcttttgctgtgcagaagctctttagtttaattagatcccatttgtcaattttgtcttttgttgccattgcttttggtgttttagacatgaagtccttgcccatgcctaggtcctgaatg

SEQ ID NO: 51107 - DNA, 120 bp, synthetic construct
  source 1..120: mol_type = other DNA
tcttttcctaattgaataccctttatttccttctcctgcctgattgccctggccagaacttccaacactgtgttgaataggagtggtgagagagggcatctctgtcttgtgccagttttc

SEQ ID NO: 51108 - DNA, 120 bp, synthetic construct
  source 1..120: mol_type = other DNA
ctctctttttttcttagtagtcttgctagcggtctatcaattttgttgatcctttcaaaaaaccagctcctggattcattgattttttgaagggttttttgtgtctctatttccttcagt

SEQ ID NO: 51109 - DNA, 120 bp, synthetic construct
  source 1..120: mol_type = other DNA
tctgcatgtgagatgggtttcctgaatacaacacactgatgggtcttgactctttatccaacttgccagtctgtgtcttttaattggagcatttagtccatttacatttaaagtttatat

SEQ ID NO: 51110 - DNA, 120 bp, synthetic construct
  source 1..120: mol_type = other DNA
cttcatttcattcatttcatcttccattgctgataccctttcttccagttgatcgcatcggctcctgaggcttctgcattcttcccgtagttctcgagccttggttttcagctccatcag

SEQ ID NO: 51111 - DNA, 120 bp, synthetic construct
  source 1..120: mol_type = other DNA
caatattcgggtgggagtgacccgattttccaggtgcgtcagtcaccccttttttgactcagaaagggaactccctgaccccttgcgcttcccaggtgaggcagtgcctcgccctgcttc

SEQ ID NO: 51112 - DNA, 120 bp, synthetic construct; identical to SEQ ID NO: 22471
  source 1..120: mol_type = other DNA

SEQ ID NO: 51113 - DNA, 120 bp, synthetic construct; identical to SEQ ID NO: 22472
  source 1..120: mol_type = other DNA

SEQ ID NO: 51114 - DNA, 120 bp, synthetic construct
  source 1..120: mol_type = other DNA
aacttccgcctcccagtttcaagtattcttgtgcctcagcctcacgagtagctgggattataggcgtccaccaccacgcctggctaatttttttttttttcatttgtgtatgaaattttt

SEQ ID NO: 51115 - DNA, 120 bp, synthetic construct
  source 1..120: mol_type = other DNA
acggggcggccgggcagagacgctcctcacctcccagacggggtcgcggccgggtagaggcgctcctcacatcccagacggggtggcggggcagaggcgctccccacatctcagacgatg

SEQ ID NO: 51116 - DNA, 120 bp, synthetic construct
  source 1..120: mol_type = other DNA
tcccatttgctatgttttaggttttcctacatgaggcccagaatttggggggaaataactccatgtgcacaccagcccccaaacctcatttaacagtgatgccttcaaaaataaatcttt

SEQ ID NO: 51117 - DNA, 120 bp, synthetic construct
  source 1..120: mol_type = other DNA
taacaccgtgaaaccccgtctttactaaaaatacaaaaaaaaaaaattagctgggcgcggtggcgggtacctgtagccccagctactcaggaggctgaggcaggagaatggcacgaaccc

SEQ ID NO: 51118 - DNA, 120 bp, synthetic construct
  source 1..120: mol_type = other DNA
gtgttctaaacctttgccatcaccatctatgtgtccaacatcaacactgtgatgaagttgttcctgtttaggcttttattccgatttctctcgaacagccattaacacgcatgtttatct

SEQ ID NO: 51119 - DNA, 120 bp, synthetic construct
  source 1..120: mol_type = other DNA
tattaaaaaagtccagttgtgaaaactgcccaggtaccataagccacaggatatcagggcagaatacagaattatatacagatagactgccagttacatatgctgaaaattggtcttatc

SEQ ID NO: 51120 - DNA, 120 bp, synthetic construct; identical to SEQ ID NO: 24677
  source 1..120: mol_type = other DNA

SEQ ID NO: 51121 - DNA, 120 bp, synthetic construct
  source 1..120: mol_type = other DNA
gacagacagacacacacacacacacacacacacacacacacacacactggcagtaatactcattcactcattccaagtccaacttaatggacacatttgcatggttataaggcctatata

SEQ ID NO: 51122 - DNA, 120 bp, synthetic construct
  source 1..120: mol_type = other DNA
tcctctcaaacctaagcacaggcaccatcatctagaaaaacatatttccaactgagtaaaacttgagtggataatcgaattagctaacctaaccacagtgccaaagacccaaaacgcagt

SEQ ID NO: 51123 - DNA, 120 bp, synthetic construct
  source 1..120: mol_type = other DNA
aatttaatatttaaacaagatacatctcttttagaaaatacaaaacaaggatgggcacagtggctcacacctgtaatcccagcactttgggacgccaaggcaggaggatcacctgaggtc

SEQ ID NO: 51124 - DNA, 120 bp, synthetic construct
  source 1..120: mol_type = other DNA
agggaagaaaaacattaatagcctccaaatgtcatcaacatgacacgtgattttaaaagaggtctttgagtggccttaggtactatgtatgcaatctgccctctcctccctttggctaac

SEQ ID NO: 51125 - DNA, 120 bp, synthetic construct
  source 1..120: mol_type = other DNA
ctcagctttctgaaatcataggtgagattctgcccagatgaatttaggatccacaactttcagcttctgacagggattagggccaaccactcaaaggacattcccaatgtaatttttttt

SEQ ID NO: 51126 - DNA, 120 bp, synthetic construct
  source 1..120: mol_type = other DNA
ctgcactccagcttgggcgacagagtgagactccgtctcagaaaaaaaaaaagaaaaacccctggtcttccactgatttggttcaaaatattttacagactgcaccatctgaaatacatt

SEQ ID NO: 51127 - DNA, 120 bp, synthetic construct; identical to SEQ ID NO: 19137
  source 1..120: mol_type = other DNA

SEQ ID NO: 51128 - DNA, 120 bp, synthetic construct; identical to SEQ ID NO: 19138
  source 1..120: mol_type = other DNA

SEQ ID NO: 51129 - DNA, 120 bp, synthetic construct; identical to SEQ ID NO: 25427
  source 1..120: mol_type = other DNA

SEQ ID NO: 51130 - DNA, 120 bp, synthetic construct
  source 1..120: mol_type = other DNA
tagcattacgtatatctcccaatgctatccctcccccctccccccaccacacaacagtccccagagtgtgatgttccccttcctgtgtccatgtgatctcattgttcaattcccacctat

SEQ ID NO: 51131 - DNA, 120 bp, synthetic construct
  source 1..120: mol_type = other DNA
gcccatgcctatgtcctgaatggtaatgcctaggttttcttctagggttttgatggttttaggtctaacgtttaagtctttaatccatattgaattgatttttatataaggtgtaaggaa

SEQ ID NO: 51132 - DNA, 120 bp, synthetic construct
  source 1..120: mol_type = other DNA
gaatgcttgtgatttttgcacattgattttgtatactgagactttgctgaagttgcttatcagcttaaggagattttgggctgagacaatggggttttctagatatacaatcatgtcatc

SEQ ID NO: 51133 - DNA, 120 bp, synthetic construct
  source 1..120: mol_type = other DNA
ctttatcattttttattgtgtctatttgattcttctctctttttttctttattagtcttgctagcggtctatcaattttgttgatcctttcaaaaaaccagatcctggattcattaattt

SEQ ID NO: 51134 - DNA, 120 bp, synthetic construct
  source 1..120: mol_type = other DNA
ttctttgtctcttttgatcttttttggtttcaagtctgttttatcagagactaggattgcaacccctgcctttttttgttttccatttgcttggtagatcttcctccatccctttatttt

SEQ ID NO: 51135 - DNA, 120 bp, synthetic construct
  source 1..120: mol_type = other DNA
tttcacatagtcccatatttcttcaaggctttgcttgtttctttttattcttttttctctaaactttccttcttgcttcatttcattcatttcatcttccattgctgataccctttcttc

SEQ ID NO: 51136 - DNA, 120 bp, synthetic construct
  source 1..120: mol_type = other DNA
aggcctccttgagctgtggtgggctccacccagttcgagcttctgggctgctttgtttacctaagcaagcctgggcaatggcgggcgcccctcccccagcctcgctgccaccttgcagtt

SEQ ID NO: 51137 - DNA, 120 bp, synthetic construct
  source 1..120: mol_type = other DNA
gtttcactggatgcaaaattcttggctgattattgttttgtttaaggaggttaaagacaggaccccaatcccttctggcttgcagggttcctactgagaaatctgctgttaatctgatag

SEQ ID NO: 51138 - DNA, 120 bp, synthetic construct
  source 1..120: mol_type = other DNA
ttctctctacacagacacggcaaccatccgacctctcaatcttttccccacccttccccccctctccattccacaaaaccgccattgtcatcatggcccgttctcaatgagccattgggt

SEQ ID NO: 51139 - DNA, 120 bp, synthetic construct
  source 1..120: mol_type = other DNA
ggggctcctcacgtcccagacgatgggcggccaggcagagactctcctcacttcccagacggggtggcgcccgggcagaggctgcaatctcagcactttgggaggctaaggcaggcggct

SEQ ID NO: 51140 - DNA, 120 bp, synthetic construct
  source 1..120: mol_type = other DNA
tgtctgtgtgtatgtcagtcggtctctgaccccctcctctgccctcgtcctctgctcccatgcagcccgtgaggtggggggtggaattctggcatttttgttgctttatcttctatgtcc

SEQ ID NO: 51141 - DNA, 120 bp, synthetic construct; identical to SEQ ID NO: 9400
  source 1..120: mol_type = other DNA

SEQ ID NO: 51142 - DNA, 120 bp, synthetic construct; identical to SEQ ID NO: 9401
  source 1..120: mol_type = other DNA

SEQ ID NO: 51143 - DNA, 120 bp, synthetic construct; identical to SEQ ID NO: 7400
  source 1..120: mol_type = other DNA

SEQ ID NO: 51144 - DNA, 120 bp, synthetic construct; identical to SEQ ID NO: 33575
  source 1..120: mol_type = other DNA

SEQ ID NO: 51145 - DNA, 120 bp, synthetic construct; identical to SEQ ID NO: 6546
  source 1..120: mol_type = other DNA

SEQ ID NO: 51146 - DNA, 120 bp, synthetic construct; identical to SEQ ID NO: 33577
  source 1..120: mol_type = other DNA

SEQ ID NO: 51147 - DNA, 120 bp, synthetic construct; identical to SEQ ID NO: 33578
  source 1..120: mol_type = other DNA

SEQ ID NO: 51148 - DNA, 120 bp, synthetic construct
  source 1..120: mol_type = other DNA
aacccgggaggcagaggttgcagtgagccgagattctgccactgcactccagcctgggggacgaaagtgaagctccgtctcaaaaaaaaaaaaaaaaaaaaaaaaaaaaaaaaaaaaaaa

SEQ ID NO: 51149 - DNA, 120 bp, synthetic construct; identical to SEQ ID NO: 33579
  source 1..120: mol_type = other DNA

SEQ ID NO: 51150 - DNA, 120 bp, synthetic construct
  source 1..120: mol_type = other DNA
tttagaatttttaacaccccctcaccaaagaaaattctgtacccattagaagtccctccccccgaaattatacaataacgttgtataagttccccccaccctgtcagtattctttccggt

SEQ ID NO: 51151 - DNA, 120 bp, synthetic construct; identical to SEQ ID NO: 19340
  source 1..120: mol_type = other DNA

SEQ ID NO: 51152 - DNA, 120 bp, synthetic construct
  source 1..120: mol_type = other DNA
gaactcctgacctcagatgatccgcccgccttggcctcccaaagtgctgggattgtaggtgtgagccaccgcacccagcccaaaccctactttattctccctccagcgtttatctcccgc

SEQ ID NO: 51153 - DNA, 120 bp, synthetic construct; identical to SEQ ID NO: 19341
  source 1..120: mol_type = other DNA

SEQ ID NO: 51154 - DNA, 120 bp, synthetic construct; identical to SEQ ID NO: 19342
  source 1..120: mol_type = other DNA

SEQ ID NO: 51155 - DNA, 120 bp, synthetic construct; identical to SEQ ID NO: 19343
  source 1..120: mol_type = other DNA

SEQ ID NO: 51156 - DNA, 120 bp, synthetic construct
  source 1..120: mol_type = other DNA
gacactgtacactcaactaatgatgctgcagaacaatcaaatgccttggcctatgcctgtttgcaaagtagcagaactaggtcttcagtttctctttccaaatccatgttagtgcatatg

SEQ ID NO: 51157 - DNA, 120 bp, synthetic construct; identical to SEQ ID NO: 20859
  source 1..120: mol_type = other DNA

SEQ ID NO: 51158 - DNA, 120 bp, synthetic construct; identical to SEQ ID NO: 20860
  source 1..120: mol_type = other DNA

SEQ ID NO: 51159 - DNA, 120 bp, synthetic construct
  source 1..120: mol_type = other DNA
tgaactcctgacctcgtgatccacccaccccccgcccccggccctccaaaatgctgggattacaggcgtgagccaacacacccgggctagaatttttttttttttttttttttttgagac

SEQ ID NO: 51160 - DNA, 120 bp, synthetic construct; identical to SEQ ID NO: 20861
  source 1..120: mol_type = other DNA

SEQ ID NO: 51161 - DNA, 120 bp, synthetic construct
  source 1..120: mol_type = other DNA
cccaccgccctcccggacggggcggctggccgggcggggggctgacaccttcttttcagttttatgaaaataattagatgttttaggaacatgaaattactagctttccagctaaaatgt

SEQ ID NO: 51162 - DNA, 120 bp, synthetic construct
  source 1..120: mol_type = other DNA
ttaactttacaatgccgatatccaaggaggtgaagtgagcacatcaaaagtgaccgattttttaagctaaaaatagcatgtaaggctaggtatggtgtcatgctcgcctgatcttcccaa

SEQ ID NO: 51163 - DNA, 120 bp, synthetic construct
  source 1..120: mol_type = other DNA
gtgaattctaatgtaaaccagagaatttggatgatgatgatctatcagcgtagattcatcaattgtaagaaatgtacaggctgggctcggtggctcacacctgtaatcccagcactttgg

SEQ ID NO: 51164 - DNA, 120 bp, synthetic construct
  source 1..120: mol_type = other DNA
aaagtgctgggattacaggtgtgagccaccgtgcccaggtgcttttaaattttgaattgtgtaaatcttttttcaaaatgtgaattataggccaggcacggtggctcatgcctgtaatcc

SEQ ID NO: 51165 - DNA, 120 bp, synthetic construct
  source 1..120: mol_type = other DNA
aaagacctgtttggaggctattggagtggcttgttctagtgtattattagtccgttctcatgctaacaaagacgtacccgagactgggtagtttataagggaaagaggtttaattgactc

SEQ ID NO: 51166 - DNA, 120 bp, synthetic construct
  source 1..120: mol_type = other DNA
cctttgggtatatacccagtaatgggatggctgggtcaaatggtatttctagttctagatccctgaggaatcgccacactgacttccacaatggttgaactagtttacagtcccaccagc

SEQ ID NO: 51167 - DNA, 120 bp, synthetic construct
  source 1..120: mol_type = other DNA
tttatagtattctctgatggtggtatgtatttctgtgggatcagtggtgatatcccctttggcattttttattgcatctatttgattcttctctcttctttattaatcttgctagcggtc

SEQ ID NO: 51168 - DNA, 120 bp, synthetic construct
  source 1..120: mol_type = other DNA
tcttgactctttatccaatttgccagtctgtgccttttaattggagcatatagcccgttcacatttaaggttagtattgttatgtgtgaatttgatcctgtcattatgatgttagctggt

SEQ ID NO: 51169 - DNA, 120 bp, synthetic construct; identical to SEQ ID NO: 30080
  source 1..120: mol_type = other DNA

SEQ ID NO: 51170 - DNA, 120 bp, synthetic construct; identical to SEQ ID NO: 27380
  source 1..120: mol_type = other DNA

SEQ ID NO: 51171 - DNA, 120 bp, synthetic construct
  source 1..120: mol_type = other DNA
aggctggagtgcagtggcgtgatctcggctcgctacaacctccacctcccagccgcctgccttggcctccaaaagtgctaagattacaggctctgcccggccgccaccccatctaggaag

SEQ ID NO: 51172 - DNA, 120 bp, synthetic construct; identical to SEQ ID NO: 27381
  source 1..120: mol_type = other DNA

SEQ ID NO: 51173 - DNA, 120 bp, synthetic construct
  source 1..120: mol_type = other DNA
gtctgtttttccattctgtatgtgcatgtgtacccattgtttagctcccacttgtaagtgagaacatcggtatttgactgtttctgagttgttttgcttaggataacggcctccagttct

SEQ ID NO: 51174 - DNA, 120 bp, synthetic construct; identical to SEQ ID NO: 25535
  source 1..120: mol_type = other DNA

SEQ ID NO: 51175 - DNA, 120 bp, synthetic construct; identical to SEQ ID NO: 25536
  source 1..120: mol_type = other DNA

SEQ ID NO: 51176 - DNA, 120 bp, synthetic construct; identical to SEQ ID NO: 5344
  source 1..120: mol_type = other DNA

SEQ ID NO: 51177 - DNA, 120 bp, synthetic construct; identical to SEQ ID NO: 22004
  source 1..120: mol_type = other DNA

SEQ ID NO: 51178 - DNA, 120 bp, synthetic construct
  source 1..120: mol_type = other DNA
ggagagtttagaggatttatgagtagataaaagtgaagagaacttgcaggcaggaatataacattttagagaatctggagggattttccccagactggagttgaaaaccgagccttgcct

SEQ ID NO: 51179 - DNA, 120 bp, synthetic construct
  source 1..120: mol_type = other DNA
ttcaccatgttggccaggctggtatcgaactcctgacctcaaatgatccacccgattcagcctcccaaagtgctgggattacaagtgtgagccaccatgcccagctgaccatctagttta

SEQ ID NO: 51180 - DNA, 120 bp, synthetic construct; identical to SEQ ID NO: 2759
  source 1..120: mol_type = other DNA

SEQ ID NO: 51181 - DNA, 120 bp, synthetic construct
  source 1..120: mol_type = other DNA
tccatcttgcttctaacctccaaggtgtccttgttcattcctgggctgaactaactttgggagaaacttagtttaaaactaagacaataacagccctttcccaaagtacacctccttctt

SEQ ID NO: 51182 - DNA, 120 bp, synthetic construct
  source 1..120: mol_type = other DNA
cttgaatgctggtggagactgatttgagtaataataaaattccggtctcccgcacagccagctctgcataaattactctttctctattgcaattctcctgtcttgatgaatcggctctgt

SEQ ID NO: 51183 - DNA, 120 bp, synthetic construct; identical to SEQ ID NO: 7297
  source 1..120: mol_type = other DNA

SEQ ID NO: 51184 - DNA, 120 bp, synthetic construct; identical to SEQ ID NO: 7298
  source 1..120: mol_type = other DNA

SEQ ID NO: 51185 - DNA, 120 bp, synthetic construct; identical to SEQ ID NO: 9748
  source 1..120: mol_type = other DNA

SEQ ID NO: 51186 - DNA, 120 bp, synthetic construct; identical to SEQ ID NO: 9749
  source 1..120: mol_type = other DNA

SEQ ID NO: 51187 - DNA, 120 bp, synthetic construct; identical to SEQ ID NO: 9750
  source 1..120: mol_type = other DNA

SEQ ID NO: 51188 - DNA, 120 bp, synthetic construct
  source 1..120: mol_type = other DNA
gccctttgtcagatgagtaggttgcaaaaattttctcccattctgtagttttaatgaactcctcattaaagaaggaagaggctttattcgggcgggagctttggcagacttgcatcttaa

SEQ ID NO: 51189 - DNA, 120 bp, synthetic construct
  source 1..120: mol_type = other DNA
tttgtggacctggataagtagttttaagaatttggctaggcacggtgactcacacttataatcccagcattttgggaggccaaagcaagggagtcgcttgagtccatgagttaaagaaca

SEQ ID NO: 51190 - DNA, 120 bp, synthetic construct
  source 1..120: mol_type = other DNA
ccccaatgatgaagattactgtccctaccagcgttttaaatccccctaaattagagaaccaccctcctagaaggtttgttgggtcccatcccttccaggtttggactggtacacgggcta

SEQ ID NO: 51191 - DNA, 120 bp, synthetic construct
  source 1..120: mol_type = other DNA
tatcagtccacttgcgggatatgcacgccgtccctcttactgggttggtaagtgtccaggtcgacgggcgttcctgagaattcaaagtgaggctggggttttgaaatgctagtaattaag

SEQ ID NO: 51192 - DNA, 120 bp, synthetic construct; identical to SEQ ID NO: 9754
  source 1..120: mol_type = other DNA

SEQ ID NO: 51193 - DNA, 120 bp, synthetic construct; identical to SEQ ID NO: 9755
  source 1..120: mol_type = other DNA

SEQ ID NO: 51194 - DNA, 120 bp, synthetic construct; identical to SEQ ID NO: 9756
  source 1..120: mol_type = other DNA

SEQ ID NO: 51195 - DNA, 120 bp, synthetic construct; identical to SEQ ID NO: 9757
  source 1..120: mol_type = other DNA

SEQ ID NO: 51196 - DNA, 120 bp, synthetic construct; identical to SEQ ID NO: 9758
  source 1..120: mol_type = other DNA

SEQ ID NO: 51197 - DNA, 120 bp, synthetic construct; identical to SEQ ID NO: 9759
  source 1..120: mol_type = other DNA

SEQ ID NO: 51198 - DNA, 120 bp, synthetic construct
  source 1..120: mol_type = other DNA
agccctaatattgaagaggaagtatcaggtgttttggatgagttgccctgaagtgatatgatgatggtgatgatggtggtgatggatggtgatgatgatgatggtgttgatgatgtcata

SEQ ID NO: 51199 - DNA, 120 bp, synthetic construct; identical to SEQ ID NO: 9760
  source 1..120: mol_type = other DNA

SEQ ID NO: 51200 - DNA, 120 bp, synthetic construct; identical to SEQ ID NO: 32110
  source 1..120: mol_type = other DNA

SEQ ID NO: 51201 - DNA, 120 bp, synthetic construct
  source 1..120: mol_type = other DNA
cctatgagtgagaatatgcggtgtttggtattttgttcttgcgatagtttactgagaatgatgatttccaatgtcatccatgtccctacaaaggacatgaactcatcattttttaaggct

SEQ ID NO: 51202 - DNA, 120 bp, synthetic construct
  source 1..120: mol_type = other DNA
gaatggtattgcctaggttttcttctagggtttttatggttttaggtctaacgtttaagtctttaatccatcttgaattgatttttgtataaggtgtaaggaagggatccagtttcagct

SEQ ID NO: 51203 - DNA, 120 bp, synthetic construct
  source 1..120: mol_type = other DNA
attttgtacaaaggccttttctgcatctattgagataatcatgtggtttttgtctttggttctgtttatatgctggattacatttattgatttgcgtatattgaaccagccttgcatccc

SEQ ID NO: 51204 - DNA, 120 bp, synthetic construct
  source 1..120: mol_type = other DNA
atctttcctgctttctcttgtgggcatttagtgctataaatttccctctacacactgctttgaatgcgtcccagagattctggtatgttatgtctttgttctctttggtttcaaagaaca

SEQ ID NO: 51205 - DNA, 120 bp, synthetic construct
  source 1..120: mol_type = other DNA
gttcctatttctgcacatcctctccagcccctgttgtttcctgactttttaatgatcaccattctaactggtgtgagatggtatctcattgtggttttgatttgcatttctctgatggcc

SEQ ID NO: 51206 - DNA, 120 bp, synthetic construct
  source 1..120: mol_type = other DNA
ccttcagctttgttcttttggcttaggattgactgggtgatgtgggctctcttttggttccatatgaactttaaagtagttttttccaattctgtgaagaaagtcattggtagcttgatg

SEQ ID NO: 51207 - DNA, 120 bp, synthetic construct
  source 1..120: mol_type = other DNA
tctttagttctgtttatatgctggattacacttattgatttgcgtatgttgtaacagccttgcattctagggatgaagcccacttgatcatggtggataagctttttgatgtgctgctgg

SEQ ID NO: 51208 - DNA, 120 bp, synthetic construct
  source 1..120: mol_type = other DNA
ttttgatgtgggcagttagtgctataaatttccctcttaacactgctttagctggatcccagagactctgtgtgttgtctctttgttatcattggtttcaaagaacttcttgatttctgc

SEQ ID NO: 51209 - DNA, 120 bp, synthetic construct
  source 1..120: mol_type = other DNA
tttcttttgctgtgcagaagctctttagtttaattagatcccatttgtcaattttgtcttttgttgccattgcttttggtgttttggacgtgaagtccttgcccatgcctatgtcctgaa

SEQ ID NO: 51210 - DNA, 120 bp, synthetic construct
  source 1..120: mol_type = other DNA
agtttttgcccattcagtatgatattggctgtgggtttgtcatagatagctcttattattttgaaatacgtcccatcaatacctaatttattgagagtttttagcatgaagcgttgctga

SEQ ID NO: 51211 - DNA, 120 bp, synthetic construct
  source 1..120: mol_type = other DNA
tgctataaatttccctctacacactgctttgaatgcatcccagagattctggtatgttgtgtctttgttctcgttggtttcaaagaacatctttattgctgccttcatttcattatgtac

SEQ ID NO: 51212 - DNA, 120 bp, synthetic construct
  source 1..120: mol_type = other DNA
ttagctggttattttgctcgttagttgatgcagtttcttcctagtctccatggtctttacattttggcatgattttgcagcggctggtaccagttgttcctttccatgtttagcgcttcc

SEQ ID NO: 51213 - DNA, 120 bp, synthetic construct
  source 1..120: mol_type = other DNA
ttccgttgctggtgaggaactgcgttcctttggaggaggagaggcgctctgcatttaagagtgtctagtttttctgttctgttttttccccatctttgtggttttatctacttttggtct

SEQ ID NO: 51214 - DNA, 120 bp, synthetic construct
  source 1..120: mol_type = other DNA
atatacccaggagtcattcaggagcaggttgttcagtttccatgtagttgtgtggtttgagtgggtttctttatcttgagttataatttgattgcgctgttttctgagagactgttatga

SEQ ID NO: 51215 - DNA, 120 bp, synthetic construct
  source 1..120: mol_type = other DNA
ttggtgcgtttacaatccctgagctagacacaaaagttctccaagtcccactagattctttagatacagagtgctgattggtgcatccacaaaccctgaggtagacacacggtgctgatt

SEQ ID NO: 51216 - DNA, 120 bp, synthetic construct
  source 1..120: mol_type = other DNA
cgcggagagcgagccacgactgcgagggctgccagcacactggcacctctcagtaggtcgatcactcaccatttcccttggctggtggtaggagctcgcattactctgtgtggctcccag

SEQ ID NO: 51217 - DNA, 120 bp, synthetic construct; identical to SEQ ID NO: 32111
  source 1..120: mol_type = other DNA

SEQ ID NO: 51218 - DNA, 120 bp, synthetic construct
  source 1..120: mol_type = other DNA
cgttccaccttacgagaaacacccacaggtgtggaggggcaacccacccctacagaccctatcatgaaaatatttccgtttttaagtattaagatgtaattcatatttaggatatattta

SEQ ID NO: 51219 - DNA, 120 bp, synthetic construct; identical to SEQ ID NO: 12867
  source 1..120: mol_type = other DNA

SEQ ID NO: 51220 - DNA, 120 bp, synthetic construct
  source 1..120: mol_type = other DNA
cagcaccatttattaaatagggaatcctttccccattgcttgtttttctcaggcttgccaaagatcagatagttgtagatatgtggcattaattctgagggctctgttctgttccattga

SEQ ID NO: 51221 - DNA, 120 bp, synthetic construct
  source 1..120: mol_type = other DNA
ctattcacaatagcaaagacttggaaccaacccaaatgtccaacaacgatagactggattaagaaaatgtggcgcgtatacaccatggaatactatgcagccataaaaaatgatgagttc

SEQ ID NO: 51222 - DNA, 120 bp, synthetic construct; identical to SEQ ID NO: 12868
  source 1..120: mol_type = other DNA

SEQ ID NO: 51223 - DNA, 120 bp, synthetic construct
  source 1..120: mol_type = other DNA
cgtcccatcaatacctaatttattgagagtttttagcatgaagggttgttgaattttgtcaaaggccttttttgcatctattgagataatcatgtggtttttgtctttggttctgtttat

SEQ ID NO: 51224 - DNA, 120 bp, synthetic construct
  source 1..120: mol_type = other DNA
agtattataaatttccccctacacactgctttgaatgtgtcccagagattctggtatgttgtgtctttgttctcgttggtttcaaagaacatctttatttctgccttcatttcgttatgt

SEQ ID NO: 51225 - DNA, 120 bp, synthetic construct
  source 1..120: mol_type = other DNA
tctttacaccttatacaaaaattaattcaagatggattaaagacttacatgttagacctaaaaccataaaaaccctagaagaaaacctaggcattaccattcaagacataggcatgggca

SEQ ID NO: 51226 - DNA, 120 bp, synthetic construct
  source 1..120: mol_type = other DNA
ctcactcataggtgggaattgaacaatgagaacacatggacacaggaaggggaacatcacactctggggactgttgtggggtggggggaggggggtgggatagcattaggagatatacct

SEQ ID NO: 51227 - DNA, 120 bp, synthetic construct
  source 1..120: mol_type = other DNA
gatatgaagtccacccaggtgcccattaatgggagactgggtaaagaaaatgtggtacatatataccatgaaatactctgcaaccatgaaaaagatgaaatcatggtgcactttgggagg

SEQ ID NO: 51228 - DNA, 120 bp, synthetic construct
  source 1..120: mol_type = other DNA
ttctttaagaatgttgaatattggcccccactatcttctggcttgtagagtttctgtggagagatcagctgttagtctgatgggcttccctttgtgggtaacccgacctttctctctggc

SEQ ID NO: 51229 - DNA, 120 bp, synthetic construct; identical to SEQ ID NO: 24426
  source 1..120: mol_type = other DNA

SEQ ID NO: 51230 - DNA, 120 bp, synthetic construct; identical to SEQ ID NO: 24427
  source 1..120: mol_type = other DNA

SEQ ID NO: 51231 - DNA, 120 bp, synthetic construct; identical to SEQ ID NO: 24428
  source 1..120: mol_type = other DNA

SEQ ID NO: 51232 - DNA, 120 bp, synthetic construct
  source 1..120: mol_type = other DNA
tttcatgtgttttttggctgcataaatgtcttctttggagaagtgtctgttcatgtccattgccccctttttgatggggttgtttgtttttttcttgtaaatttgtttcagttcattgta

SEQ ID NO: 51233 - DNA, 120 bp, synthetic construct
  source 1..120: mol_type = other DNA
gatttggctctctgtttgtctgttattggtgtataagaatgcttgtgattttcgcacattgattttgtatcctgagactttgctgaagttgcttatcagcttaaggagattttgggctga

SEQ ID NO: 51234 - DNA, 120 bp, synthetic construct
  source 1..120: mol_type = other DNA
ttctctgatggtagtttgtatttctgtgggatcggtggtgatatcccctttatcattttttattgcgtctatttgattcttctctctttttttctttattagtcttgctaccagtctatc

SEQ ID NO: 51235 - DNA, 120 bp, synthetic construct
  source 1..120: mol_type = other DNA
ctttttttgttttccatttgcttggtagatcttcctccatccttttattttgagcctatgtgtgtctctgcacgtgagatgggtttcctgaatacaacacactgatgggtcttgactctt

SEQ ID NO: 51236 - DNA, 120 bp, synthetic construct
  source 1..120: mol_type = other DNA
tctctcgactcgtcaaagtcattctccgtccagctttgttccattgctggtgaggaactgcgatcctttggaggaggagaggtgctctcctttttagagtttccagtttttctgctctgt

SEQ ID NO: 51237 - DNA, 120 bp, synthetic construct
  source 1..120: mol_type = other DNA
gaacaatgagaacacttggacacagggtggggaacatcatacaccgggacctgttgtgggatggggggaggggggagggatagcattaggagatataactaatgtaaatgacgagttaat

SEQ ID NO: 51238 - DNA, 120 bp, synthetic construct; identical to SEQ ID NO: 24430
  source 1..120: mol_type = other DNA

SEQ ID NO: 51239 - DNA, 120 bp, synthetic construct
  source 1..120: mol_type = other DNA
caaaatctccttaagctgataagcaacttcagcaaactctcaggataaaaatcaatgtacaaaaatcacaagcattcttatacaccaataacagacaaacagagagccaaatcatgagtg

SEQ ID NO: 51240 - DNA, 120 bp, synthetic construct
  source 1..120: mol_type = other DNA
agacacatgcacacgtatgtttattgcggcactattcacaatagcaaagacttggaaccaacccaaatgtccaacaatgatagaatggattaagaaaatgtggcacatatacaccatggg

SEQ ID NO: 51241 - DNA, 120 bp, synthetic construct; identical to SEQ ID NO: 24432
  source 1..120: mol_type = other DNA

SEQ ID NO: 51242 - DNA, 120 bp, synthetic construct
  source 1..120: mol_type = other DNA
atatactttgcccactttttgatgcggctgtttttttcttgtaaattggtttgagttcattgtagattctggatattagccctttgtcagatgagtaggttgcaaaaattttctcccatt

SEQ ID NO: 51243 - DNA, 120 bp, synthetic construct
  source 1..120: mol_type = other DNA
aatcaatgtacaaaaatcacaagcattcttatacaccaaaaacagacagagagccaaatcatgagtgaactcccattcacaattgcttcaaagagaataaaatacttaggaatccaactt

SEQ ID NO: 51244 - DNA, 120 bp, synthetic construct; identical to SEQ ID NO: 24049
  source 1..120: mol_type = other DNA

SEQ ID NO: 51245 - DNA, 120 bp, synthetic construct
  source 1..120: mol_type = other DNA
atattaaccttaaatgtaaatgggctaaatgctccaattaaaagacacagatggcaaattggatagagtcaagacccatcagtgtgctgtattcaggaaacctgtctcacgtgcagggac

SEQ ID NO: 51246 - DNA, 120 bp, synthetic construct; identical to SEQ ID NO: 24050
  source 1..120: mol_type = other DNA

SEQ ID NO: 51247 - DNA, 120 bp, synthetic construct
  source 1..120: mol_type = other DNA
tgctagtttttttcatagcacattttaaaactgaacatttgaaatgggctgtgtataaagataaatgaggctgggcacagtggtgcacgcctgttatcctaacactttgggaggccgagg

SEQ ID NO: 51248 - DNA, 120 bp, synthetic construct; identical to SEQ ID NO: 24043
  source 1..120: mol_type = other DNA

SEQ ID NO: 51249 - DNA, 120 bp, synthetic construct
  source 1..120: mol_type = other DNA
cacctgttgtttcctgactttttaatgattgccattctaactggtgtgagatggtatcccattgcggttttgatttgcatttctctgatggccagtgatggtgagcattttttcatgtgt

SEQ ID NO: 51250 - DNA, 120 bp, synthetic construct; identical to SEQ ID NO: 24044
  source 1..120: mol_type = other DNA

SEQ ID NO: 51251 - DNA, 120 bp, synthetic construct; identical to SEQ ID NO: 24045
  source 1..120: mol_type = other DNA

SEQ ID NO: 51252 - DNA, 120 bp, synthetic construct
  source 1..120: mol_type = other DNA
atccccttactgggcatatacccaagggattataaatcatgctgctataaagacacatgcacacgtatgtttattgcggcactattcacaatagcaaagacttggaaccaacccaaatgt

SEQ ID NO: 51253 - DNA, 120 bp, synthetic construct; identical to SEQ ID NO: 24047
  source 1..120: mol_type = other DNA

SEQ ID NO: 51254 - DNA, 120 bp, synthetic construct
  source 1..120: mol_type = other DNA
ggaatcgccacactaacttccacaatggttgaactagtttacagtcccactaacagtgtaaaagtgttcctatttctccacatcctctccagcacctgctgtttcctgactttttaatga

SEQ ID NO: 51255 - DNA, 120 bp, synthetic construct
  source 1..120: mol_type = other DNA
ggcatggaatctataaattaccttgggcagtatgaccattttcacaatattgattcttcctaccctggagcatggaatgttcttccatttgtttgtgtcctcttttatttccttgagcag

SEQ ID NO: 51256 - DNA, 120 bp, synthetic construct
  source 1..120: mol_type = other DNA
ttcaggagcaggttgttcagtttccatgtagttgagcagttttgagtgagtttctcaatcctgagttctagtttgattgcactgtggtctgacagacaatttgttataatttctgttctt

SEQ ID NO: 51257 - DNA, 120 bp, synthetic construct
  source 1..120: mol_type = other DNA
ttatttctccttcacttatgaagcttagtttggctggatatgaaattctggtttgaaaattcttttctttaagaatgttgaatattggccccccactctcttctggcttgtagtttctgc

SEQ ID NO: 51258 - DNA, 120 bp, synthetic construct
  source 1..120: mol_type = other DNA
tatatatttattaattattaatttgttatttattaattccaaaggcatggtacagagagctgcataagaattctcagctggctttgggaggccgaggcaggcggatcacgaggtcaggag

SEQ ID NO: 51259 - DNA, 120 bp, synthetic construct; identical to SEQ ID NO: 24048
  source 1..120: mol_type = other DNA

SEQ ID NO: 51260 - DNA, 120 bp, synthetic construct
  source 1..120: mol_type = other DNA
tattagaacaattagagcagtggcaaattgagtcaagcatgtattgataagaaataattgataaggccaggagcagtgactcatgcctgtaatgccagcaatttaggaggccaaggcagg

SEQ ID NO: 51261 - DNA, 120 bp, synthetic construct
  source 1..120: mol_type = other DNA
tacatgtaaacattgtcaagatggtaaattttatgttatgtactttttttttctttttctttttttcaatttttttagtatttattgatcattcttgggtgtttctccgagagggggatt

SEQ ID NO: 51262 - DNA, 120 bp, synthetic construct
  source 1..120: mol_type = other DNA
cactcgcggttaggagctggagaccagcccggccaacacggcgaaaccccgtctccaccaaaaaatataaaaaccagtcaggcgtggcggcgcgcgcctgcaatcgcaggcagtcggcag

SEQ ID NO: 51263 - DNA, 120 bp, synthetic construct
  source 1..120: mol_type = other DNA
ggtatatggatcaaagtaaatcttcaggtaaagtttctgtattagtttttttttaagtgtttttttcttttattattatactttaagttttagggtacgtgtgcacattgtgcaggtttg

SEQ ID NO: 51264 - DNA, 120 bp, synthetic construct
  source 1..120: mol_type = other DNA
gtctgttcatgtccttcacccactttttgatggggttgtttgtttttttcttgtaaatttgtttgagttcattgtagattctggatattagccctttgtcagatgagtaggttgcgaaaa

SEQ ID NO: 51265 - DNA, 120 bp, synthetic construct; identical to SEQ ID NO: 12303
  source 1..120: mol_type = other DNA

SEQ ID NO: 51266 - DNA, 120 bp, synthetic construct
  source 1..120: mol_type = other DNA
ccaaaacagcatggtactggtaccaaaacagagatatagatcaatggaacagaacagagccctcagaaataacgccgcatatccacaactatctgatctttgacaaacctgagaaaaaca

SEQ ID NO: 51267 - DNA, 120 bp, synthetic construct
  source 1..120: mol_type = other DNA
acaccatggaatactatgcagccataaaaaaggatgagttcatgtcctttgtagggacatggatgaaattggaaatcatcattctcagtaaactaccgcaagaacaaaaacccaaacacc

SEQ ID NO: 51268 - DNA, 120 bp, synthetic construct
  source 1..120: mol_type = other DNA
tttcctgacaaagtataaagcttgggcttttgactgtcttcccttctttcctacttacctctctctctctacttgctttcttccttcccttctgccatcatttttccttttccctctcct

SEQ ID NO: 51269 - DNA, 120 bp, synthetic construct
  source 1..120: mol_type = other DNA
agctcccaggccttgagacagacactactgggttataaaaatgacaagagcctgtgttggttgtaagttagtcttcttttctaaacatctttaaaggatttgtatgcattattatgtaat

SEQ ID NO: 51270 - DNA, 120 bp, synthetic construct
  source 1..120: mol_type = other DNA
taggtatatctcctaatgctatccctcccccctcccccaacccccgacaggccctggtgtgtgatgttccccaccctgtgtcgaagtgttctcattgttcaattcctacctatgagtgag

SEQ ID NO: 51271 - DNA, 120 bp, synthetic construct
  source 1..120: mol_type = other DNA
tctaaggaagacgtagattagaatggaattatttttattcaaaaactgtttttattataccttaagttttagagtacacgtgcacaacatgcaggttagttacatatgtatacatgtgcc

SEQ ID NO: 51272 - DNA, 120 bp, synthetic construct
  source 1..120: mol_type = other DNA
cctaggttttcttctagggtttttatggttttaggtctaacatgtaagtctttgctccatcttgaattattttttgtataaggtgtaaggaggggatccagtttcagctttctacatatg

SEQ ID NO: 51273 - DNA, 120 bp, synthetic construct
  source 1..120: mol_type = other DNA
catgatcaagtgggcttcatccctgggatgcaaggctgattcaatatacgcatatcaataaatgtaatccagcatataaacagaaccaaagacaaaaaccacatgattatctcaatagat

SEQ ID NO: 51274 - DNA, 120 bp, synthetic construct
  source 1..120: mol_type = other DNA
gtcaaagatcagatagctgtagatatgcggcattatttctgagggctctgttctgttccattggtctatatctctgttttggtaccagtaccaggctattttggttactgtagctttgta

SEQ ID NO: 51275 - DNA, 120 bp, synthetic construct
  source 1..120: mol_type = other DNA
caaaggactataaatcatgctgctgtaaagacacatgcacacgtatgtttattgcagcactattcacaatagcaaagacttggaaccaacccaaatgtccaacaatgatagactggatta

SEQ ID NO: 51276 - DNA, 120 bp, synthetic construct
  source 1..120: mol_type = other DNA
ccgcaataaacatacgtgtgcatgtgtctttatagcagcatgatttatagtcctttgggtatatacccagtaatgggatggctgggtcaaatggtatttctagttctggatccctgagga

SEQ ID NO: 51277 - DNA, 120 bp, synthetic construct
  source 1..120: mol_type = other DNA
ttaccttgggcagtatggccattttcatgatattgattcttcctacccatgagcaaggaatgttcttccatttgtttgtatcctcttttatttcattgagcagtggtttgtcattctcct

SEQ ID NO: 51278 - DNA, 120 bp, synthetic construct
  source 1..120: mol_type = other DNA
gtttcagaaggaatggtaccagctcctccttgtacctctggtagaattcggctgtgaatccatctggtcctggactctttttgcttggtaaactattgattattgccacaatttcagctc

SEQ ID NO: 51279 - DNA, 120 bp, synthetic construct
  source 1..120: mol_type = other DNA
gtggtgttgaaaagaatgtatattctgttgatttggggtggagagttctgtaaatgtctgttaggtctgcttggtgcagagctgagttcaattgctgggtatccttgttaactttctgtc

SEQ ID NO: 51280 - DNA, 120 bp, synthetic construct
  source 1..120: mol_type = other DNA
agaacttccccaatctagcaaggcaggccaacattcaaattcaggaaatacagagaatgccataaagatactcctcgagaagagcaactccaagacacataattgtcagattcaccaaag

SEQ ID NO: 51281 - DNA, 120 bp, synthetic construct; identical to SEQ ID NO: 12304
  source 1..120: mol_type = other DNA

SEQ ID NO: 51282 - DNA, 120 bp, synthetic construct; identical to SEQ ID NO: 12305
  source 1..120: mol_type = other DNA

SEQ ID NO: 51283 - DNA, 120 bp, synthetic construct
  source 1..120: mol_type = other DNA
acctctgggggcagggcacagacaaacaaaaagacagcaggaacctctgcagacttaaatgtccctgtctgacagctttgaagagagcagtggttctcccagcacgcagctggagatctg

SEQ ID NO: 51284 - DNA, 120 bp, synthetic construct
  source 1..120: mol_type = other DNA
caatctagcaaggcaggccaacattcaaattcaggaaatacagagaatgccataaagatactcctcgagaagagcaactccaagacacataattgtcagattcaccaaagttgaaatgaa

SEQ ID NO: 51285 - DNA, 120 bp, synthetic construct
  source 1..120: mol_type = other DNA
tcaacattagacagatcaacgagacagaaagtcaacaaggatacccaggaattgaactcagctctgtaccaagtggacctaatagacatctacagaactctccaccccaaatcaacagaa

SEQ ID NO: 51286 - DNA, 120 bp, synthetic construct
  source 1..120: mol_type = other DNA
aactattccaatcaatagaaaaagagggaatcctccctaactcattttatgagggcagcatcatcctgataccaaagccgggcagagacacaacgaacaaagagaattttagaccaatat

SEQ ID NO: 51287 - DNA, 120 bp, synthetic construct
  source 1..120: mol_type = other DNA
ctgggtaggaagaatctttatcgtgaaaatggccatactgcccaaggtaatttacagattcaatgccatccccatcaagctaccaatgcctttcttcacagaattggaaaaaactacttt

SEQ ID NO: 51288 - DNA, 120 bp, synthetic construct
  source 1..120: mol_type = other DNA
actagaaataccatttgacccagccatcccattactgggtatatacccaatggactataaatcatgctgctataaagacacatgcacacgtatgtttattgcagcactattcacaatagc

SEQ ID NO: 51289 - DNA, 120 bp, synthetic construct; identical to SEQ ID NO: 12301
  source 1..120: mol_type = other DNA

SEQ ID NO: 51290 - DNA, 120 bp, synthetic construct; identical to SEQ ID NO: 41682
  source 1..120: mol_type = other DNA

SEQ ID NO: 51291 - DNA, 120 bp, synthetic construct
  source 1..120: mol_type = other DNA
agaaggccattacataatggtaaagggatcaattcaacaagaggagctaactatcctaaatatttatgcacccaatacaggagcacccagattcataaagcaagtcctgagtgacctaca

SEQ ID NO: 51292 - DNA, 120 bp, synthetic construct
  source 1..120: mol_type = other DNA
attcctcgacacatacactctcccaagactaaaccaggaagaagttgaatctctgaatagaccaataacagtctctgaaattgtggcaataatcaatagtttaccaaccaaaaagagtcc

SEQ ID NO: 51293 - DNA, 120 bp, synthetic construct
  source 1..120: mol_type = other DNA
cattcacaattgcttcaaagagaataaaatacctaggaatccaacttacaagggatgtgaaggacctcttcaaggagaactacaaaccactgctcaaggaaattaaagaggacacaaaca

SEQ ID NO: 51294 - DNA, 120 bp, synthetic construct
  source 1..120: mol_type = other DNA
tgctcaccatcactggccatcagagaaatgcaaatcaaaaccactgtgagatatcatctcacaccagttagaatggcaatcattaaaaagtcaggaaacaacaggtgctggagaggatgt

SEQ ID NO: 51295 - DNA, 120 bp, synthetic construct; identical to SEQ ID NO: 12302
  source 1..120: mol_type = other DNA

SEQ ID NO: 51296 - DNA, 120 bp, synthetic construct
  source 1..120: mol_type = other DNA
tccatgtgttctcattgttcaattcccacctatgagtgagaatatgcggtgtttggttttttgttcttgcgatagtttactgagaatgatgacttccaatttcatccacgtccctaaaaa

SEQ ID NO: 51297 - DNA, 120 bp, synthetic construct
  source 1..120: mol_type = other DNA
tcttctagggtttttatggttttaggtctaacgtttaagtctttaatccatcttgaattgatttttgtataaggtgtaaggaagggatccagtttcagctttctgcatatggctagccag

SEQ ID NO: 51298 - DNA, 120 bp, synthetic construct
  source 1..120: mol_type = other DNA
cacctgcctaattgccctggccagaacttccaacactatggtgaataggagtggtgagagagggcatccctgtcttgtgccagttttcaaagggaatgcttccagtttttgcccattcag

SEQ ID NO: 51299 - DNA, 120 bp, synthetic construct
  source 1..120: mol_type = other DNA
ggattcattaattttttgaagggttttttgcatctctatttccttcagttctgctctgattttagttatttcttgccttctgctagcttttgaatgtgtttgctcttgcttttctagttc

SEQ ID NO: 51300 - DNA, 120 bp, synthetic construct
  source 1..120: mol_type = other DNA
tgttttatcagagactaggattgcaacccctgcctttttttgttttccatttgcttggtagatcttcctccatccttttattttgagcctatgtgtgtctctgcaagtgagatgggttta

SEQ ID NO: 51301 - DNA, 120 bp, synthetic construct; identical to SEQ ID NO: 12293
  source 1..120: mol_type = other DNA

SEQ ID NO: 51302 - DNA, 120 bp, synthetic construct; identical to SEQ ID NO: 12294
  source 1..120: mol_type = other DNA

SEQ ID NO: 51303 - DNA, 120 bp, synthetic construct; identical to SEQ ID NO: 12295
  source 1..120: mol_type = other DNA

SEQ ID NO: 51304 - DNA, 120 bp, synthetic construct
  source 1..120: mol_type = other DNA
ctacaggatttctgcttgatttttaaaaattatttcaatctctttgttaaatttacctgatagaattctgaattcctggccgggcgcggtggctcacgcctgtaatcccagcactttggg

SEQ ID NO: 51305 - DNA, 120 bp, synthetic construct; identical to SEQ ID NO: 12297
  source 1..120: mol_type = other DNA

SEQ ID NO: 51306 - DNA, 120 bp, synthetic construct
  source 1..120: mol_type = other DNA
ctaaggctaatttattgaagatacaaaaagattttaaataaatttagtgtagcctaaatgcacagtgtttataaagtctacagtagtgtacagtaatgtcctagggcttcacattcactc

SEQ ID NO: 51307 - DNA, 120 bp, synthetic construct; identical to SEQ ID NO: 12298
  source 1..120: mol_type = other DNA

SEQ ID NO: 51308 - DNA, 120 bp, synthetic construct; identical to SEQ ID NO: 12299
  source 1..120: mol_type = other DNA

SEQ ID NO: 51309 - DNA, 120 bp, synthetic construct
  source 1..120: mol_type = other DNA
catgtgttctcattgttcaattcccatctatgagtgagaacatgcggtgtttggttttttctccgtgcgatagtttgctgagaatgatggtttccagtttcatccatgtccctacaaagg

SEQ ID NO: 51310 - DNA, 120 bp, synthetic construct
  source 1..120: mol_type = other DNA
ttaattagatcccatttgtcaattttggcttttgtcgccattgcttttggtgttttagacatgaagtccttgcccatgcctatgtcctgaatggtattgcctaggttttcttctagggtt

SEQ ID NO: 51311 - DNA, 120 bp, synthetic construct
  source 1..120: mol_type = other DNA
aatgccctttattcccttctcctgcctgactgccctggccagaacttccaacactatgttgaataggagtggtgagagagggcatccctgtcttgtgccagttttcaaagagaatgcttc

SEQ ID NO: 51312 - DNA, 120 bp, synthetic construct
  source 1..120: mol_type = other DNA
tctttatttccttcagttctgctctgatcttagttatttcttgccttctgctagcttttgaatgtgtttgctcttgcttctctagttcttttaattgtgatgttagggtgtcaattttag

SEQ ID NO: 51313 - DNA, 120 bp, synthetic construct
  source 1..120: mol_type = other DNA
gcacatgagatgggtttcctgaatacagcacactgtattttctttatccaattttccagtctgtgccttttaattggagcatttagcccatttacatttaaggttattattgttatatgt

SEQ ID NO: 51314 - DNA, 120 bp, synthetic construct; identical to SEQ ID NO: 12300
  source 1..120: mol_type = other DNA

SEQ ID NO: 51315 - DNA, 120 bp, synthetic construct
  source 1..120: mol_type = other DNA
actagtacaatcactatggaaaacagtgttggagattccttaaaggactaaaagtagatctaccgtttgatccagcaatcccactacttggtgtctacccagaggaaaagaagttattat

SEQ ID NO: 51316 - DNA, 120 bp, synthetic construct
  source 1..120: mol_type = other DNA
ttgtgattttgaaggcctctaaaagtattaaagcagcagcagccgctgcacgcagacatgagggctaggctaaaacagtaaggtcaagttgtttggacagaaaggctacagggtgtggtc

SEQ ID NO: 51317 - DNA, 120 bp, synthetic construct
  source 1..120: mol_type = other DNA
aagggatgtcccccgatccgagtcacagcaccaaatttcatgcgtgtctgtgtgaagagaccgccaaacaggctttgtgtgagcaataaagctgtttatttcacctgggtgcaggtgggc

SEQ ID NO: 51318 - DNA, 120 bp, synthetic construct
  source 1..120: mol_type = other DNA
caaacatcatacgttcttattcatatgtgggagctaagctatgtgtacacaaagcataagaatgatacaatggattttggggattgggggaaagggtgggggttggtgagggataaaaga

SEQ ID NO: 51319 - DNA, 120 bp, synthetic construct; identical to SEQ ID NO: 24042
  source 1..120: mol_type = other DNA

SEQ ID NO: 51320 - DNA, 120 bp, synthetic construct
  source 1..120: mol_type = other DNA
atctcgctgattgctagcacagcagtctgagatcaaactgcaaggcggcagcgaggctgggggaggggcgcccgccattggccaggcttgattaggtaaacaaagcagccaggaagctcc

SEQ ID NO: 51321 - DNA, 120 bp, synthetic construct
  source 1..120: mol_type = other DNA
agcaatggaagatgaaatgaatgaaatgaagcaagaagggaagtttagagaaaaaagaataaaaagaaacgagcaaagcctccaagaaatatgggactatgtgaaaagaccaaatctacg

SEQ ID NO: 51322 - DNA, 120 bp, synthetic construct
  source 1..120: mol_type = other DNA
gagacacacataggctcaaaaggatggaggaagatctactgagccaatggaaaacaaaaaaaggcaggggttgcaatcctagtctctgataaaacagactttaaaccaacaaagatcaaa

SEQ ID NO: 51323 - DNA, 120 bp, synthetic construct
  source 1..120: mol_type = other DNA
ctggcagaaagaaagaaataactaaaatcagagcacaactgaaggaaatagagacacaaaaaacccttaaaaaattaatgaatccaggagctggttttttgaaaggatcaacaaaattga

SEQ ID NO: 51324 - DNA, 120 bp, synthetic construct
  source 1..120: mol_type = other DNA
aggaagtccaattgtccctgtttgcagatgagatgattgtatatctagaaaaccccattgtctcagcccaaaatctccttaagctgataagcaacttcagcaaagtctcaggatacaaaa

SEQ ID NO: 51325 - DNA, 120 bp, synthetic construct
  source 1..120: mol_type = other DNA
cctaaaagaaaacctaggcattaccattcaggacataggcatgggcaaggacttcatgtctaaaacaccaaaagcaatggcaacaaaagacaaaattgacaaatgggatctaattaaact

SEQ ID NO: 51326 - DNA, 120 bp, synthetic construct
  source 1..120: mol_type = other DNA
tggggggaggggggagggatagcattgggagatatacctaatgctagatgacgagttagtgggtgcagcgcaccagcatggcacatgtatacatatgtaactaacctgcacgttgtgcac

SEQ ID NO: 51327 - DNA, 120 bp, synthetic construct
  source 1..120: mol_type = other DNA
acaagtaaatctaatttactaaaatatatttagtacatgtaaatttaaaatattgcgatagctgggcgaggtggctcacgcctgtaatcccagcactttgggagaccaaggcgggcggat

SEQ ID NO: 51328 - DNA, 120 bp, synthetic construct
  source 1..120: mol_type = other DNA
gaaaattttcccaacctactcatctgacaaagggctaatatccagaatctacaatgaactcaaacaaatttacaagaaaaaaacaaacaaccccatcaaaaagtgggcgaaggacatgaa

SEQ ID NO: 51329 - DNA, 120 bp, synthetic construct; identical to SEQ ID NO: 30240
  source 1..120: mol_type = other DNA

SEQ ID NO: 51330 - DNA, 120 bp, synthetic construct
  source 1..120: mol_type = other DNA
tgaactcatcatttcttatggctgcatggtattccatggtgtatacgtgccacattttcttcatccagtctatcattgttggacatttgggttggttccaagtctttgctattgtgaata

SEQ ID NO: 51331 - DNA, 120 bp, synthetic construct
  source 1..120: mol_type = other DNA
tccccattgcttgtttttctcaggtttgtcaaagatcagatagttgtagatatgcagcgttatttctgagggctgtgttctgttccattgatctatatctctgttttggtaccagtacca

SEQ ID NO: 51332 - DNA, 120 bp, synthetic construct
  source 1..120: mol_type = other DNA
ggggagagtgggagggtggagattgggagaaaagagaggaatgggaaaaataactaaaagtaattgggtactaggcttaatacctggatgatgatataatctgtacaacaaacctccatg

SEQ ID NO: 51333 - DNA, 120 bp, synthetic construct
  source 1..120: mol_type = other DNA
gacgcacagaaacacatgtataagctacatcatcatatatcatcactttggtgttttaagtcatagaaccattgctcactgtagaacaagacagcaaaaatgatgctttatgaaaacaga

SEQ ID NO: 51334 - DNA, 120 bp, synthetic construct; identical to SEQ ID NO: 30241
  source 1..120: mol_type = other DNA

SEQ ID NO: 51335 - DNA, 120 bp, synthetic construct; identical to SEQ ID NO: 30242
  source 1..120: mol_type = other DNA

SEQ ID NO: 51336 - DNA, 120 bp, synthetic construct
  source 1..120: mol_type = other DNA
acgtgagatgggtttcctgaatacagcacactgatgggtcttgactctttatccaatttgccagtctgtgtcttttaattggagcatttaccccatttacatttaaagttaatattgtta

SEQ ID NO: 51337 - DNA, 120 bp, synthetic construct
  source 1..120: mol_type = other DNA
atagtgccgcaataaacatacgtgtgcatgtgtctttatagcagcatgatttataatcctttgggtatatacccagtaatgggatggctgggtcaaatggtatttctagttctagatccc

SEQ ID NO: 51338 - DNA, 120 bp, synthetic construct; identical to SEQ ID NO: 30243
  source 1..120: mol_type = other DNA

SEQ ID NO: 51339 - DNA, 120 bp, synthetic construct; identical to SEQ ID NO: 30244
  source 1..120: mol_type = other DNA

SEQ ID NO: 51340 - DNA, 120 bp, synthetic construct
  source 1..120: mol_type = other DNA
tattagcagaatgaaacctataacaatttttaacttaatacaataaaatttggtttacgaaggaggagccaagatggccgaataggaacagctccgggtctacagctcccagcgtgagcg

SEQ ID NO: 51341 - DNA, 120 bp, synthetic construct
  source 1..120: mol_type = other DNA
tctgtacatcaccatcatcaaagaccaaaagtagataaaaccacaaagatggggagaaaacagaacagaaaaactggaaactctaaaacgcagaacacctctcctcctccaaaggaacgc

SEQ ID NO: 51342 - DNA, 120 bp, synthetic construct
  source 1..120: mol_type = other DNA
atactttacagacaagcaaatgctgagagattttgtcaccaccaagcctgccctaaaagagctcctgaaggaagcgctaaacatggaaaggaacaaccggtaccagctgctgcaaaatca

SEQ ID NO: 51343 - DNA, 120 bp, synthetic construct
  source 1..120: mol_type = other DNA
taaatgcccacaagagaaagcaggaaagatccaaaattgacaccctaacatcacagttaaaagaactagaaaagcaagagcaaacacattcaaaagctagcagaaggcaagaaataacta

SEQ ID NO: 51344 - DNA, 120 bp, synthetic construct; identical to SEQ ID NO: 50276
  source 1..120: mol_type = other DNA

SEQ ID NO: 51345 - DNA, 120 bp, synthetic construct
  source 1..120: mol_type = other DNA
ttccttacaccttatacaaaaatcaattcaagatggatcaaagatttaaacgttagacctaaaaccataaaaaccctagaagaaaacctaggcattaccattcaggacataggcatgggc

SEQ ID NO: 51346 - DNA, 120 bp, synthetic construct
  source 1..120: mol_type = other DNA
attgaacaatgagatcacatggacacatgaaggggagtaccacactctggggactgtggtggggtggggggaggggggagggatagcatttggaggtatacctaaggctagatgacaagt

SEQ ID NO: 51347 - DNA, 120 bp, synthetic construct; identical to SEQ ID NO: 30245
  source 1..120: mol_type = other DNA

SEQ ID NO: 51348 - DNA, 120 bp, synthetic construct
  source 1..120: mol_type = other DNA
aaaagaccaaatctacgtctgactggtgtacctgacagtgatggggagaatggaaccaagttggaaaacactctgcaggatattatccaggagaacttccccaatctagcaaggcaggcc

SEQ ID NO: 51349 - DNA, 120 bp, synthetic construct
  source 1..120: mol_type = other DNA
acatagactcccacacaataataatgggagactttaacaccccactgtcaacatcagacagatcaacgagacagaaagttaacaaggatacccaggaattgaactcagctctgcaccaag

SEQ ID NO: 51350 - DNA, 120 bp, synthetic construct
  source 1..120: mol_type = other DNA
ttccttgacacatacaccctcccaagactaatccaggaagaagttgaatctccgaatagaccaataacaggctctgaaattgtggcaataatcaatagcttaccaaccaaaaagagtcca

SEQ ID NO: 51351 - DNA, 120 bp, synthetic construct
  source 1..120: mol_type = other DNA
aactcacaagggatgtgaaggacctcttcaaggagaactacaaaccacttctcaatgaaataaaacaggatacaaagaaatggaagaacattccatgctcatgggtaggaagaatcaata

SEQ ID NO: 51352 - DNA, 120 bp, synthetic construct
  source 1..120: mol_type = other DNA
gaacacttttacactgtgggtgggagtgtaaactagttcaacccttgtggaagtcagtgtggcgtttcctcagggatctagaactagaaataccatttgacccagccatcctattactgg

SEQ ID NO: 51353 - DNA, 120 bp, synthetic construct; identical to SEQ ID NO: 30246
  source 1..120: mol_type = other DNA

SEQ ID NO: 51354 - DNA, 120 bp, synthetic construct; identical to SEQ ID NO: 30247
  source 1..120: mol_type = other DNA

SEQ ID NO: 51355 - DNA, 120 bp, synthetic construct; identical to SEQ ID NO: 51351
  source 1..120: mol_type = other DNA

SEQ ID NO: 51356 - DNA, 120 bp, synthetic construct; identical to SEQ ID NO: 51350
  source 1..120: mol_type = other DNA

SEQ ID NO: 51357 - DNA, 120 bp, synthetic construct
  source 1..120: mol_type = other DNA
atccttgttaactttctgtcttgttgatctgtctaatgttgacagtggggtgttaaagtctcccattattattgtgtgggagtctaagtctctttgtagatcactcaggacttgctttat

SEQ ID NO: 51358 - DNA, 120 bp, synthetic construct
  source 1..120: mol_type = other DNA
tcttggctgcataaatgtcttcttttgagaagtgtctgttcatgtcctttgcccactttttgatggggttgtttgtttttttcttgtaaatttgtttgagttcattgtagattctggata

SEQ ID NO: 51359 - DNA, 120 bp, synthetic construct
  source 1..120: mol_type = other DNA
attctagcactttgggaggctgaggcaagtggatcacttgaggtcaggagttcagggccagcctgacttacatggtgaaaccccatctctactaaaaataccaaaaaattagccgggtgt

SEQ ID NO: 51360 - DNA, 120 bp, synthetic construct; identical to SEQ ID NO: 30248
  source 1..120: mol_type = other DNA

SEQ ID NO: 51361 - DNA, 120 bp, synthetic construct
  source 1..120: mol_type = other DNA
tttgggttggttccaagtctttgctattgtgaatagtgctgcaataaacatacgtgtatttgtgtctttataacagcatgatttatagtcctttgggtatctacccagtaataggatggc

SEQ ID NO: 51362 - DNA, 120 bp, synthetic construct
  source 1..120: mol_type = other DNA
gtagatatgcagcgttatttctgagggctctgttctgttccattgatctatatctctgttttggtaccattaccatgctgttttggttactgtagccttgtagtatagcttgaagtcagg

SEQ ID NO: 51363 - DNA, 120 bp, synthetic construct; identical to SEQ ID NO: 30249
  source 1..120: mol_type = other DNA

SEQ ID NO: 51364 - DNA, 120 bp, synthetic construct
  source 1..120: mol_type = other DNA
ccctctacacactgctttgaatgcgtcccagagattctggtatgttgtgtctttgttctcgttggtttcaaagaacatctgtatttctgccttcatttcgttatgtacccagtagtcatt

SEQ ID NO: 51365 - DNA, 120 bp, synthetic construct; identical to SEQ ID NO: 30250
  source 1..120: mol_type = other DNA

SEQ ID NO: 51366 - DNA, 120 bp, synthetic construct; identical to SEQ ID NO: 30251
  source 1..120: mol_type = other DNA

SEQ ID NO: 51367 - DNA, 120 bp, synthetic construct; identical to SEQ ID NO: 30252
  source 1..120: mol_type = other DNA

SEQ ID NO: 51368 - DNA, 120 bp, synthetic construct
  source 1..120: mol_type = other DNA
ttttgtctttgtgatagtttactgagaatgatgatttccaatttcatccatgcccctacaaaggacatgaactcatcattttttatggctgcatagtattccatggtgtatatgtgccac

SEQ ID NO: 51369 - DNA, 120 bp, synthetic construct
  source 1..120: mol_type = other DNA
aatcctaagccaaaagaacaaagctggaggcatcatgctacctgacttcaaactatactacaaggctacagtaaccaaaacagcatggtactggtactaaaacagagatatagatcaatg

SEQ ID NO: 51370 - DNA, 120 bp, synthetic construct
  source 1..120: mol_type = other DNA
cgtgttgaagtctcccattattattgtgtgggagtctaagtctctttgtaggtgtcgaaagacttgctttatcaatctgggtgctcctgtattgggtgcatatatatttaagatagttag

SEQ ID NO: 51371 - DNA, 120 bp, synthetic construct
  source 1..120: mol_type = other DNA
ctgtatttcctgaatttgaatgttgacctgctttgctagattggggaagttctcctgaataatattctgcagagtgttttccaacttggttccattcttcccgtcactttcaggtacacc

SEQ ID NO: 51372 - DNA, 120 bp, synthetic construct
  source 1..120: mol_type = other DNA
acacccccacctccctcccggacggggtggctgccgggcggagacgctcctcacttcccggacagggtggctgccgggcggaggggctcctcacttctcagacggggcagttgccgggcg

SEQ ID NO: 51373 - DNA, 120 bp, synthetic construct
  source 1..120: mol_type = other DNA
ggccgggcagaggctgcaatctcggcactttgggaggccaaggcaggcggctgggaggtggaagttgtagcgagccgagatcaggccactgcactccagcctgggcaccattgagcactg

SEQ ID NO: 51374 - DNA, 120 bp, synthetic construct
  source 1..120: mol_type = other DNA
tgggtatatacccaaaggattataaatcatgctgctataaagacacatgcacacgtatgtttattgcagcactattcacaatagcaaagacttggaaccaacccaaatatccatcaatga

SEQ ID NO: 51375 - DNA, 120 bp, synthetic construct
  source 1..120: mol_type = other DNA
agtaataaatgtatacattgtggttacttccattttttgctatttgaaactctttataaacatttatatacccaaaggattataaatcatgctgctataaagacacatgcacacgtatgt

SEQ ID NO: 51376 - DNA, 120 bp, synthetic construct; identical to SEQ ID NO: 30256
  source 1..120: mol_type = other DNA

SEQ ID NO: 51377 - DNA, 120 bp, synthetic construct; identical to SEQ ID NO: 30254
  source 1..120: mol_type = other DNA

SEQ ID NO: 51378 - DNA, 120 bp, synthetic construct
  source 1..120: mol_type = other DNA
gtctatcattgttggacatttgggttggttccaagtctttgctattgtgaatagtgccgcaataaacatacgtgtgcatgtgtctttatagcagcatgatttataatcctttgggtatat

SEQ ID NO: 51379 - DNA, 120 bp, synthetic construct
  source 1..120: mol_type = other DNA
tctctgttttggtaccagtaccaggctgttttggttactgtagccttgtagtatagtttgaagtcaggtagtgtgatgcctccagctttgttcttttggcttaggattgacttggcaatg

SEQ ID NO: 51380 - DNA, 120 bp, synthetic construct
  source 1..120: mol_type = other DNA
agggatgaagctgacttgatcatggtggataagctttttgatgtgctgctggattcggtttgccagtattttattgaggatttttgcatcaatgttcatcaaggatattggtctaaaatt

SEQ ID NO: 51381 - DNA, 120 bp, synthetic construct
  source 1..120: mol_type = other DNA
ctttgagtgagattcttaatcctgagttctagtttgattgcactgtggtctgagagatagtttgttataatttctgttcttttacatttgctgaggagagctttacttccaagtatgtgg

SEQ ID NO: 51382 - DNA, 120 bp, synthetic construct
  source 1..120: mol_type = other DNA
tgattttgcagcggctggtaccggttgttcctttccatgtttagcgcttccttcaggagctcttttagggcaggcctggtggtgacaaaatctctcagcatttgcttgtctataaagtat

SEQ ID NO: 51383 - DNA, 120 bp, synthetic construct
  source 1..120: mol_type = other DNA
gttctgttgctggtgaggaactgcgttcctttggaggaggagaggcgctctgcattttagagtttccagtttttctgttctgttttttccccatctttgtggttttatctacttttggtc

SEQ ID NO: 51384 - DNA, 120 bp, synthetic construct; identical to SEQ ID NO: 30255
  source 1..120: mol_type = other DNA

SEQ ID NO: 51385 - DNA, 120 bp, synthetic construct
  source 1..120: mol_type = other DNA
atagcatactatctattttaagtatgtgatatgcgattgctttttatcacatactcacatatcacagcctcaagctgcagggcagctcaaatgatgaaagtggaagacaggccgggtgcg

SEQ ID NO: 51386 - DNA, 120 bp, synthetic construct
  source 1..120: mol_type = other DNA
atccttcatgaatggcttggtgctcttcccatggtaatgagttcatatgagatctggttgttttaaagagcttggcacctcctcctcctctctctcgcttcctctcttgccatgtgatgt

SEQ ID NO: 51387 - DNA, 120 bp, synthetic construct; identical to SEQ ID NO: 30257
  source 1..120: mol_type = other DNA

SEQ ID NO: 51388 - DNA, 120 bp, synthetic construct; identical to SEQ ID NO: 30258
  source 1..120: mol_type = other DNA

SEQ ID NO: 51389 - DNA, 120 bp, synthetic construct; identical to SEQ ID NO: 30259
  source 1..120: mol_type = other DNA

SEQ ID NO: 51390 - DNA, 120 bp, synthetic construct
  source 1..120: mol_type = other DNA
tggatggagtggacggatggaatggacagatggagttgatggatggaatggatggatggatggatggagtggagtggacagatggaatggacggatagaatggatggatggaatggatgg

SEQ ID NO: 51391 - DNA, 120 bp, synthetic construct; identical to SEQ ID NO: 30260
  source 1..120: mol_type = other DNA

SEQ ID NO: 51392 - DNA, 120 bp, synthetic construct
  source 1..120: mol_type = other DNA
gaaaaaagtagcttttttgtctttcacttattaattcagtcaaaaaataatattactgtctagcaggctgggcgtggtggctcatgcctgtaatcccagcactttgggagaccaaggtgg

SEQ ID NO: 51393 - DNA, 120 bp, synthetic construct; identical to SEQ ID NO: 30261
  source 1..120: mol_type = other DNA

SEQ ID NO: 51394 - DNA, 120 bp, synthetic construct
  source 1..120: mol_type = other DNA
tatatatagtatattatatatatacaattttttttgagacagagtcttgccctgtttcccaggcttgagcgcaatgccgtgatctcggctcactgcaacctctgcctcccaggttcaagt

SEQ ID NO: 51395 - DNA, 120 bp, synthetic construct
  source 1..120: mol_type = other DNA
agaaaaagatttatgagttaaaatgcagcagaggccaggtgcagtggctcccatctataacgccagcactttgggaggctgagggggataggattgcttgaagccaggagttcgagacca

SEQ ID NO: 51396 - DNA, 120 bp, synthetic construct
  source 1..120: mol_type = other DNA
ccatctgtgttgaccccacagattctatgaagggtgacttccacaatccctagcacactggggagcacacagtacatacttatcaaaagtcttaaattaagtctcactgatgccctaaaa

SEQ ID NO: 51397 - DNA, 120 bp, synthetic construct; identical to SEQ ID NO: 30262
  source 1..120: mol_type = other DNA

SEQ ID NO: 51398 - DNA, 120 bp, synthetic construct; identical to SEQ ID NO: 30236
  source 1..120: mol_type = other DNA

SEQ ID NO: 51399 - DNA, 120 bp, synthetic construct
  source 1..120: mol_type = other DNA
gtggttttgatttgcatttctctgatggccagtgatgatgagcattttttcatgtgttttttgtttgcataaatgtcttcttttgagaagtgtctgttcatgtcctttgcccactttttg

SEQ ID NO: 51400 - DNA, 120 bp, synthetic construct
  source 1..120: mol_type = other DNA
agcagtggtttgtagttctccttgaagaggtccttcacatcccttgtaagttggattcctaggtattttattctttttgaagcaattgtaaatgggagttcactcatgatttggctgttt

SEQ ID NO: 51401 - DNA, 120 bp, synthetic construct; identical to SEQ ID NO: 30237
  source 1..120: mol_type = other DNA

SEQ ID NO: 51402 - DNA, 120 bp, synthetic construct
  source 1..120: mol_type = other DNA
attcccacctatgagtgagaatatgcggtgtttggttttttgttcttgcgatagtttactgagaatgatgatttccaatttcatccatgtccctacaaagcacaggaactcatcattttt

SEQ ID NO: 51403 - DNA, 120 bp, synthetic construct
  source 1..120: mol_type = other DNA
aagtccttgcccatgcctgtgtcctgaatggtaatgcctaggttttcttctagggtttttatggttttaggtctaacgtttaagtctttaatccatcttgaattaatttttgtataaggt

SEQ ID NO: 51404 - DNA, 120 bp, synthetic construct
  source 1..120: mol_type = other DNA
acacaagatagtaggaatgacaagttttttgggggcacagtctaagttgatctggtgtctggaatgagactggggcctaataaaaaggagcgtctatacaggagctcaaatggcctgtac

SEQ ID NO: 51405 - DNA, 120 bp, synthetic construct
  source 1..120: mol_type = other DNA
tgggaggccagattgaagtccgggccaggaacaatggtaattgtgggacttaacaaagagtgagtacagctgaaggagccagggagcagaaagtatatgcgtcagctatgaggaagaaaa

SEQ ID NO: 51406 - DNA, 120 bp, synthetic construct
  source 1..120: mol_type = other DNA
gaactgggcaggtggggataactaaaaggagtgcttaaaagagtattgtctaagttggcatgagagtgggggttttaagaggtttagaagcctggccgtcaatacccacaacagttatgg

SEQ ID NO: 51407 - DNA, 120 bp, synthetic construct
  source 1..120: mol_type = other DNA
tctcttttggagtggaggtgtcaaaatttacaaattagggtcaatagtagactagagtttgcttcacagtgaccaagctgaagttttctttatttttccctccctcccctcctcttccct

SEQ ID NO: 51408 - DNA, 120 bp, synthetic construct
  source 1..120: mol_type = other DNA
ttggggaagttcttctggataatatcctgcagagtgttttccaacttgattccattctccgtgtcactttcaggtacaccaatcagatgtagatttggtcttttcacatagtcccatatt

SEQ ID NO: 51409 - DNA, 120 bp, synthetic construct
  source 1..120: mol_type = other DNA
caccatagaatactatgcagccataaaaaatgaagagttcatgtcctttgtagggacatggatgaaactggaaaccatcattctcagcaaactatcgcaaggacaaaaaaccaaacaccg

SEQ ID NO: 51410 - DNA, 120 bp, synthetic construct; identical to SEQ ID NO: 30238
  source 1..120: mol_type = other DNA

SEQ ID NO: 51411 - DNA, 120 bp, synthetic construct; identical to SEQ ID NO: 30239
  source 1..120: mol_type = other DNA

SEQ ID NO: 51412 - DNA, 120 bp, synthetic construct
  source 1..120: mol_type = other DNA
gtgtttctcatttactatctcttcaatacaatatattttatttgcactggaaattttaaaaaaatatttttaaggccgggtgcggtggctcacgcctgtaatcccagcactttgggaggc

SEQ ID NO: 51413 - DNA, 120 bp, synthetic construct; identical to SEQ ID NO: 32223
  source 1..120: mol_type = other DNA

SEQ ID NO: 51414 - DNA, 120 bp, synthetic construct
  source 1..120: mol_type = other DNA
gcagtgagccaagatcacgccactgcactccagcctgggtgacagagcgagactccatttcaaaaaaaaagatgtttatcttccttactcagataccatataaaaaagctgggattttgc

SEQ ID NO: 51415 - DNA, 120 bp, synthetic construct; identical to SEQ ID NO: 32224
  source 1..120: mol_type = other DNA

SEQ ID NO: 51416 - DNA, 120 bp, synthetic construct
  source 1..120: mol_type = other DNA
acgccattctcctgcctcagtctcccgagtagctgggactacaggagcccgccaccaagcctggctgatctttttttttttttttttttttgtatttttagtagagacagggtttcaccg

SEQ ID NO: 51417 - DNA, 120 bp, synthetic construct; identical to SEQ ID NO: 32225
  source 1..120: mol_type = other DNA

SEQ ID NO: 51418 - DNA, 120 bp, synthetic construct; identical to SEQ ID NO: 32226
  source 1..120: mol_type = other DNA

SEQ ID NO: 51419 - DNA, 120 bp, synthetic construct; identical to SEQ ID NO: 32227
  source 1..120: mol_type = other DNA

SEQ ID NO: 51420 - DNA, 120 bp, synthetic construct; identical to SEQ ID NO: 32228
  source 1..120: mol_type = other DNA

SEQ ID NO: 51421 - DNA, 120 bp, synthetic construct
  source 1..120: mol_type = other DNA
tcccgagtagctgggacttcaggcgcccaacaccacgcccggctaatttttgtatgtttagtagagacggggtttccaccttgttagcaggatggtctccatctcccgacctcgtgatct

SEQ ID NO: 51422 - DNA, 120 bp, synthetic construct
  source 1..120: mol_type = other DNA
tgagccaggatcgcgccactgcactccagcctgagcgacagagcaagactccgtctcaaaaataaaataaaattaaattaaattaaataaaaattaaaaaattcatagagaggtgactag

SEQ ID NO: 51423 - DNA, 120 bp, synthetic construct; identical to SEQ ID NO: 32229
  source 1..120: mol_type = other DNA

SEQ ID NO: 51424 - DNA, 120 bp, synthetic construct; identical to SEQ ID NO: 32230
  source 1..120: mol_type = other DNA

SEQ ID NO: 51425 - DNA, 120 bp, synthetic construct; identical to SEQ ID NO: 32231
  source 1..120: mol_type = other DNA

SEQ ID NO: 51426 - DNA, 120 bp, synthetic construct; identical to SEQ ID NO: 32232
  source 1..120: mol_type = other DNA

SEQ ID NO: 51427 - DNA, 120 bp, synthetic construct; identical to SEQ ID NO: 32233
  source 1..120: mol_type = other DNA

SEQ ID NO: 51428 - DNA, 120 bp, synthetic construct; identical to SEQ ID NO: 32234
  source 1..120: mol_type = other DNA

SEQ ID NO: 51429 - DNA, 120 bp, synthetic construct; identical to SEQ ID NO: 32235
  source 1..120: mol_type = other DNA

SEQ ID NO: 51430 - DNA, 120 bp, synthetic construct; identical to SEQ ID NO: 32318
  source 1..120: mol_type = other DNA

SEQ ID NO: 51431 - DNA, 120 bp, synthetic construct
  source 1..120: mol_type = other DNA
gtaagtcgagattgcttcactgcactccagcctgggcgacacagcgagactctgtctcaaaaaacaaacaaacaaacaaacaaacaaacaaacaaaaaacttcttaaataagtgaaacac

SEQ ID NO: 51432 - DNA, 120 bp, synthetic construct; identical to SEQ ID NO: 32236
  source 1..120: mol_type = other DNA

SEQ ID NO: 51433 - DNA, 120 bp, synthetic construct; identical to SEQ ID NO: 32237
  source 1..120: mol_type = other DNA

SEQ ID NO: 51434 - DNA, 120 bp, synthetic construct; identical to SEQ ID NO: 32238
  source 1..120: mol_type = other DNA

SEQ ID NO: 51435 - DNA, 120 bp, synthetic construct; identical to SEQ ID NO: 32239
  source 1..120: mol_type = other DNA

SEQ ID NO: 51436 - DNA, 120 bp, synthetic construct; identical to SEQ ID NO: 32240
  source 1..120: mol_type = other DNA

SEQ ID NO: 51437 - DNA, 120 bp, synthetic construct
  source 1..120: mol_type = other DNA
tccatttttgcactctgtttttttgatatatatatgtaatttttaagatagtgtttaaggggccaggtgtggtggctcacacctgtaatcccagcactttgggagactgaggcgggtgga

SEQ ID NO: 51438 - DNA, 120 bp, synthetic construct
  source 1..120: mol_type = other DNA
gtatagtgtttcattcagaggctttctcagtgcttaataaactgttcatagcagatgctcaccaagttttttttttttttttttttttgagacagagtctcgctctgtcatccaggctgg

SEQ ID NO: 51439 - DNA, 120 bp, synthetic construct; identical to SEQ ID NO: 32241
  source 1..120: mol_type = other DNA

SEQ ID NO: 51440 - DNA, 120 bp, synthetic construct; identical to SEQ ID NO: 32242
  source 1..120: mol_type = other DNA

SEQ ID NO: 51441 - DNA, 120 bp, synthetic construct; identical to SEQ ID NO: 32243
  source 1..120: mol_type = other DNA

SEQ ID NO: 51442 - DNA, 120 bp, synthetic construct; identical to SEQ ID NO: 32244
  source 1..120: mol_type = other DNA

SEQ ID NO: 51443 - DNA, 120 bp, synthetic construct; identical to SEQ ID NO: 32245
  source 1..120: mol_type = other DNA

SEQ ID NO: 51444 - DNA, 120 bp, synthetic construct; identical to SEQ ID NO: 32246
  source 1..120: mol_type = other DNA

SEQ ID NO: 51445 - DNA, 120 bp, synthetic construct; identical to SEQ ID NO: 32327
  source 1..120: mol_type = other DNA

SEQ ID NO: 51446 - DNA, 120 bp, synthetic construct; identical to SEQ ID NO: 32247
  source 1..120: mol_type = other DNA

SEQ ID NO: 51447 - DNA, 120 bp, synthetic construct; identical to SEQ ID NO: 32248
  source 1..120: mol_type = other DNA

SEQ ID NO: 51448 - DNA, 120 bp, synthetic construct; identical to SEQ ID NO: 32249
  source 1..120: mol_type = other DNA

SEQ ID NO: 51449 - DNA, 120 bp, synthetic construct; identical to SEQ ID NO: 32250
  source 1..120: mol_type = other DNA

SEQ ID NO: 51450 - DNA, 120 bp, synthetic construct; identical to SEQ ID NO: 32251
  source 1..120: mol_type = other DNA

SEQ ID NO: 51451 - DNA, 120 bp, synthetic construct; identical to SEQ ID NO: 32252
  source 1..120: mol_type = other DNA

SEQ ID NO: 51452 - DNA, 120 bp, synthetic construct; identical to SEQ ID NO: 32253
  source 1..120: mol_type = other DNA

SEQ ID NO: 51453 - DNA, 120 bp, synthetic construct; identical to SEQ ID NO: 32254
  source 1..120: mol_type = other DNA

SEQ ID NO: 51454 - DNA, 120 bp, synthetic construct; identical to SEQ ID NO: 32328
  source 1..120: mol_type = other DNA

SEQ ID NO: 51455 - DNA, 120 bp, synthetic construct; identical to SEQ ID NO: 32329
  source 1..120: mol_type = other DNA

SEQ ID NO: 51456 - DNA, 120 bp, synthetic construct
  source 1..120: mol_type = other DNA
tgcgatctggttttgagtggaccctggaggacttctgtcccaattacaagctctctaactccaccgagaagtgaaactgaaggaatggataaaaatgtctaatgatctcactaatagtgt

SEQ ID NO: 51457 - DNA, 120 bp, synthetic construct; identical to SEQ ID NO: 32331
  source 1..120: mol_type = other DNA

SEQ ID NO: 51458 - DNA, 120 bp, synthetic construct
  source 1..120: mol_type = other DNA
ggctgaggttgcagtgagccaagataatgccactgcactccagcatgagtgacacagcaaaatcctctctccctctctcaaaaaaaaaaaaattacctaaaatcatagaagtttagtatt

SEQ ID NO: 51459 - DNA, 120 bp, synthetic construct
  source 1..120: mol_type = other DNA
ctgtcttaattcctttcatggcaagaacaatcaagaacaagaagaagcttatttgttcccttctgtccaaaacccatcacaggactgcacatcacatgtattcctcaggcctctttagtg

SEQ ID NO: 51460 - DNA, 120 bp, synthetic construct; identical to SEQ ID NO: 32260
  source 1..120: mol_type = other DNA

SEQ ID NO: 51461 - DNA, 120 bp, synthetic construct
  source 1..120: mol_type = other DNA
agaagagagggagggagggagtggggaaggaaggaaggaaggaaggagtataaaagccagactgaatgggagggaggaagggagggagagaaagagggagggagggagggaggaaggaag

SEQ ID NO: 51462 - DNA, 120 bp, synthetic construct; identical to SEQ ID NO: 32261
  source 1..120: mol_type = other DNA

SEQ ID NO: 51463 - DNA, 120 bp, synthetic construct
  source 1..120: mol_type = other DNA
ctactcttttataaccaaaaaaagttattatgaaaataaagctttttcttgacactacttacgatctccgcggcagagcagtggccccagtgtataagctgcttcggaatgtggtcggcc

SEQ ID NO: 51464 - DNA, 120 bp, synthetic construct
  source 1..120: mol_type = other DNA
gattcaaaaccaaatacatactacacccttataagtaatacatagactaatgagtgtgaaagtggtctgtgaaacactgctcccagtagttcaggcaacaaacacaggccgggcacagtg

SEQ ID NO: 51465 - DNA, 120 bp, synthetic construct
  source 1..120: mol_type = other DNA
ggatatccatcactttgagcagttatcctctgtggtgggaacattacaattctcttctggctattttgaaatatccaataaattactgttaactataatttctctagttctatcaaatac

SEQ ID NO: 51466 - DNA, 120 bp, synthetic construct; identical to SEQ ID NO: 1785
  source 1..120: mol_type = other DNA

SEQ ID NO: 51467 - DNA, 120 bp, synthetic construct; identical to SEQ ID NO: 1786
  source 1..120: mol_type = other DNA

SEQ ID NO: 51468 - DNA, 120 bp, synthetic construct; identical to SEQ ID NO: 1787
  source 1..120: mol_type = other DNA

SEQ ID NO: 51469 - DNA, 120 bp, synthetic construct; identical to SEQ ID NO: 1788
  source 1..120: mol_type = other DNA

SEQ ID NO: 51470 - DNA, 120 bp, synthetic construct
  source 1..120: mol_type = other DNA
cccagtctctactaaaaatacaaaaattagccaggtgtggcactcggctgtaatcccagttactcgggaggctgaggcaggagaatcgcttgaatccgggaggcgcaggttgcagtgagc

SEQ ID NO: 51471 - DNA, 120 bp, synthetic construct
  source 1..120: mol_type = other DNA
gaatgaccattacattttttatttattaatttattattattattattattattattattttgaggtggagtcttgctctgtcgcccaggctggagtgcagtggcgcgatctcagctcact

SEQ ID NO: 51472 - DNA, 120 bp, synthetic construct
  source 1..120: mol_type = other DNA
taaatctttggtcataaaatttaatccttagattaactgatcatatttcatcaaaacttgtatttcagcttgcttgaacatactttagttaccttattgtaccagcttgtctgacattta

SEQ ID NO: 51473 - DNA, 120 bp, synthetic construct
  source 1..120: mol_type = other DNA
ttctcagcactgacaatgattaaatgatagagtcagacactaactcagatctatagaactgcatattaggacaagggatgctgccaggggttgggagtgaagattggggtgatggactga

SEQ ID NO: 51474 - DNA, 120 bp, synthetic construct
  source 1..120: mol_type = other DNA
aaagacacaggacagaatcactgaacttgaggacccaccaataggctttatctaacctgaccaaaaaagagaaaacagacggaatataaaaagaactgagccatagggtcctatcagaca

SEQ ID NO: 51475 - DNA, 120 bp, synthetic construct
  source 1..120: mol_type = other DNA
gtttttcaaaaagaaaggaaaatataacaaaggattcttggaacatcaggaaaaaaatgaaaagagaagaaatatggataaatgtaatagactatccttatcaatttttgaaatgacata

SEQ ID NO: 51476 - DNA, 120 bp, synthetic construct
  source 1..120: mol_type = other DNA
catagggcaaacattactcctaaagctgcagagacaagtgaaaacagcatcacagctaatggagccaaagcagatggtggagtctggtaaaagcacttagaatgtaactgactaattgat

SEQ ID NO: 51477 - DNA, 120 bp, synthetic construct
  source 1..120: mol_type = other DNA
aaaaatgagtatacgatgcttctcctcttcccgcaccttatcatcaatcacatcagtacattacctgtatagtaacaggagattaaaaatgaaagagctgtcaattttagaccctattta

SEQ ID NO: 51478 - DNA, 120 bp, synthetic construct
  source 1..120: mol_type = other DNA
cggctaattttttgtatttttagtagagacgtggtttccccgtggtagccaggatggtctggatctcctgaacttgtgatccgcccgcctcggcctcccaaagtgctgggattacaggca

SEQ ID NO: 51479 - DNA, 120 bp, synthetic construct; identical to SEQ ID NO: 1789
  source 1..120: mol_type = other DNA

SEQ ID NO: 51480 - DNA, 120 bp, synthetic construct
  source 1..120: mol_type = other DNA
ggaaaccatcattctcagcaaactaccgcaaggacaaaaaaacaaacactgcatgttctcactcataggtgggaattgaacaatgagaacacttggacacaggaaggggaacatcacaca

SEQ ID NO: 51481 - DNA, 120 bp, synthetic construct
  source 1..120: mol_type = other DNA
acactgcagaatacacattcttctcaaatacaaatgcacaattcattaagttaaaccacattctaggccacagaacactttaccaaatttaaaagaatagaaatcacaaaaggcatgttc

SEQ ID NO: 51482 - DNA, 120 bp, synthetic construct
  source 1..120: mol_type = other DNA
ggcgagccaaacaaacctcaacatatttaaaagaactaaaatcatacaaagtatattctctaagcataatggaatcaaactggaaatcaataccagaaagagaaaaagaaaatctctaaa

SEQ ID NO: 51483 - DNA, 120 bp, synthetic construct
  source 1..120: mol_type = other DNA
tctcgaactcctgacctcaaatgatccatctgcctcagcctcccacagtgctgggatcacaggcgtgagccaccctgccgggccttactggagaattctaccaaatgtttaaataaaaat

SEQ ID NO: 51484 - DNA, 120 bp, synthetic construct; identical to SEQ ID NO: 32339
  source 1..120: mol_type = other DNA

SEQ ID NO: 51485 - DNA, 120 bp, synthetic construct; identical to SEQ ID NO: 32340
  source 1..120: mol_type = other DNA

SEQ ID NO: 51486 - DNA, 120 bp, synthetic construct; identical to SEQ ID NO: 1790
  source 1..120: mol_type = other DNA

SEQ ID NO: 51487 - DNA, 120 bp, synthetic construct
  source 1..120: mol_type = other DNA
aagtggctttattatgctaccgacatatactgtttttgtttttttaagacaaggtgttgctctgctgcccaagctggaggcagtgaagcaatcacagctcactgcagcctggacttcctg

SEQ ID NO: 51488 - DNA, 120 bp, synthetic construct
  source 1..120: mol_type = other DNA
gtggtcagggctttgaactaagagccacgggagggaccctggccttttctccctcaaacgcatctcgcagcccgagggccgcgccccggccccgtgaacccctgtagcctccaggagtgg

SEQ ID NO: 51489 - DNA, 120 bp, synthetic construct
  source 1..120: mol_type = other DNA
agaggccttgagcttctaacagcactttccaggcggtgaccctgagcatctgactgcctgctgacatcatttctgatgtatctctgtcacttgattacttatattgttttgatgaaataa

SEQ ID NO: 51490 - DNA, 120 bp, synthetic construct
  source 1..120: mol_type = other DNA
gctgggactacaggcacacaccaccacacctggctaatttttgtatttttttagtagagacgggggtttcaccatgttggccaggctggtcttgaactcccaacctcaggtgatccaccc

SEQ ID NO: 51491 - DNA, 120 bp, synthetic construct
  source 1..120: mol_type = other DNA
aacacttaaatcagcctacagttgggcaaaatcatctaacacaatgcctattttataataaagtgttgaatatctcatgtcatttattaactactgtactgagagtaaaaaagaaaataa

SEQ ID NO: 51492 - DNA, 120 bp, synthetic construct
  source 1..120: mol_type = other DNA
gcacggtggctcatgcctgtaatcccagcactttgggaggctgaggtgggtggatcaccttagttcgggagttcaagaccagctttaccaacatggagaaaccctgtctgtactaaaaat

SEQ ID NO: 51493 - DNA, 120 bp, synthetic construct
  source 1..120: mol_type = other DNA
gcctgcctcagcctcccacagtgctgggattacaggcgtgagccaccgtctgtttttaatgcttgctctgtctcttcaaagtgtgttttttgccttgaacttttttctttttcttttttt

SEQ ID NO: 51494 - DNA, 120 bp, synthetic construct
  source 1..120: mol_type = other DNA
acccagtcaagctaggtgtcaaactcacagaagtgtggggatccttctctgtctgggtcttcctggagtttttaattctcagatgtgtccacatcaaacatccaacaattcgtcaattaa

SEQ ID NO: 51495 - DNA, 120 bp, synthetic construct
  source 1..120: mol_type = other DNA
ctataatcaagctgtgttcatttctttttttcctttttttttttttttgagatgcagtcttgctctgtcgtcaggctggagtgcaatggcgcaaccttggctcactgcaacctctgcctc

SEQ ID NO: 51496 - DNA, 120 bp, synthetic construct
  source 1..120: mol_type = other DNA
accagccataagaaccagaaaaaatatctccagatgttgagtcagtgtccaaaggtttgcatttctgaattacagacatgtgatacatatgacccaacatcatttttatagtgtatgaaa

SEQ ID NO: 51497 - DNA, 120 bp, synthetic construct
  source 1..120: mol_type = other DNA
tgagatcatgccactgggctccagcctgggcgacagagcaagactccgtctcaaaaaaaaaaaaaaaagaaaatgtgtcacggctttataaacagggacccttctagtacaaaaatcata

SEQ ID NO: 51498 - DNA, 120 bp, synthetic construct
  source 1..120: mol_type = other DNA
tacacttattcactttacaatcatcatcaccaccaccaaagaaaatcacagtcattgtaagagatcttaaaggtcctctagtttctagctgatatcccattacctcttcaaaaatcttac

SEQ ID NO: 51499 - DNA, 120 bp, synthetic construct
  source 1..120: mol_type = other DNA
actatattgtggtcatttttaaaagaaagaaggggaaacagggaggaagatacagaggggagaagaaagaaacaggaacagcttcagtcacatagtgacagaggttcagaaattttgaag

SEQ ID NO: 51500 - DNA, 120 bp, synthetic construct
  source 1..120: mol_type = other DNA
accaccagctcagggccaagacttccataattacatggtgttaatgagcatttagtctgcattcagagaagagttaggggccatgagaatcacaacttttcaagtatttcaaaggccaag

SEQ ID NO: 51501 - DNA, 120 bp, synthetic construct
  source 1..120: mol_type = other DNA
gatcgtgccactgcactccagcctgggcgacagagcgagactccgtctcaaaaaaacaaacaagcaaacaaacaaacacctatccaaacataaacatccattatttgtgactctgtcatc

SEQ ID NO: 51502 - DNA, 120 bp, synthetic construct
  source 1..120: mol_type = other DNA
ctacgttactgactttgggaatgaaatagtaaatagcctttatttgtagccctatttgaaaataatttaaaagtgctttcttaaaacccttatctgcaatgattattgtacacatcatga

SEQ ID NO: 51503 - DNA, 120 bp, synthetic construct
  source 1..120: mol_type = other DNA
ctcccgggttcacgccattctcctgcctcagcctgccgagtagctggaactacaggcgcccgccaccatgcctggctaattttttgcatttttagtagagacggggtttcaccatgttag

SEQ ID NO: 51504 - DNA, 120 bp, synthetic construct
  source 1..120: mol_type = other DNA
catttgctttcttcaactttgaaaacaggcaagctaaagtgacctaggatggcccttacctgtctgtgatgccgcaggagtctatctggaggtccctgaaactccccagcgccccctgct

SEQ ID NO: 51505 - DNA, 120 bp, synthetic construct; identical to SEQ ID NO: 1805
  source 1..120: mol_type = other DNA

SEQ ID NO: 51506 - DNA, 120 bp, synthetic construct
  source 1..120: mol_type = other DNA
tatagcttttaaaaattttatcctttgccttattttaaaaaagaagcctgcttatattgattctgtaagtattgtctctttcaaacttgtgagatataatttcttactttcttttcccaa

SEQ ID NO: 51507 - DNA, 120 bp, synthetic construct
  source 1..120: mol_type = other DNA
ctctgctcactgcaagctccaccacccaggttcacagcattctcctgcctcagcctcccgagtggctgggactacaggcacgcgccaccacaccctgctaatttttttttttttgtattt

SEQ ID NO: 51508 - DNA, 120 bp, synthetic construct
  source 1..120: mol_type = other DNA
tccacccacctcagcctctcaaagtgctgggattacaggtgagagccaccgcgtctggcctaaactttctattaaaataaatctagtgagatccagaaacccacatccaccagtgatttg

SEQ ID NO: 51509 - DNA, 120 bp, synthetic construct
  source 1..120: mol_type = other DNA
gagatctccaaaccggcctagcagctccttcctcgctaacgtggtgggaacggtggcgcacaacatcatgcagaagcgcggcttccgggaaggccggggcctcggggagcacctgcaggg

SEQ ID NO: 51510 - DNA, 120 bp, synthetic construct; identical to SEQ ID NO: 1806
  source 1..120: mol_type = other DNA

SEQ ID NO: 51511 - DNA, 120 bp, synthetic construct; identical to SEQ ID NO: 1807
  source 1..120: mol_type = other DNA

SEQ ID NO: 51512 - DNA, 120 bp, synthetic construct; identical to SEQ ID NO: 1808
  source 1..120: mol_type = other DNA

SEQ ID NO: 51513 - DNA, 120 bp, synthetic construct
  source 1..120: mol_type = other DNA
ggtgggaggtggcgtcagggaggaacccagtaaacagctctggccttgcaggtgtaacactttaggcctctgtcttcctgaggcgttgttcctgcatgttgtcccagcgtcttccctctc

SEQ ID NO: 51514 - DNA, 120 bp, synthetic construct
  source 1..120: mol_type = other DNA
agagtgctgggattacaggcgtgggccaccacgcctggagatagatagatagatagatagatagatagatagatagatagatatatgtaatctttttcagtatattctcagggtgtgttt

SEQ ID NO: 51515 - DNA, 120 bp, synthetic construct
  source 1..120: mol_type = other DNA
ttcctacccaacatagtactggatgtcctcgcccgagcaatcaggcaagagagagaaataaaaggcatctaaataggagaaaaagaggtcaaactgtctctgtttgcagatgatatgatt

SEQ ID NO: 51516 - DNA, 120 bp, synthetic construct
  source 1..120: mol_type = other DNA
gctggatgtggtggcacgtgcctgtagtccaggctaatcaggaggctgaggtgggggaacctcttaaagcctgggaggttgaggctgtatcgtgtcattgcactccagcctgggcaacag

SEQ ID NO: 51517 - DNA, 120 bp, synthetic construct
  source 1..120: mol_type = other DNA
atgtacatatataccatggaatactatgtagtcataaaaaaagatgagataatgtcatttctagcaacatggatggagctggaggccattatccaaagtgaactaacacaggaacagaaa

SEQ ID NO: 51518 - DNA, 120 bp, synthetic construct
  source 1..120: mol_type = other DNA
tgtctgtaatcccagaactttgggaggccgaggcagtcaaatcacaaggtcaggagatcgagaccatcctggcaaacatggtgaaaaccccgtctctactaaaaatacaaaaaattagct

SEQ ID NO: 51519 - DNA, 120 bp, synthetic construct
  source 1..120: mol_type = other DNA
tactgatgaggtaaaatgcaatgtacaggactgcatgtatataacaagtctctattactagatctatacttctgtttacatacaatttttattactaagaaaggctgaatatatttacct

SEQ ID NO: 51520 - DNA, 120 bp, synthetic construct
  source 1..120: mol_type = other DNA
tgacaccatgactttggggtcaggatttcaacatatgaatctggggtggggaagcaaacattcaatactttgcaccagtgtaacaccaattatactggattcatttaatatgtttgtctc

SEQ ID NO: 51521 - DNA, 120 bp, synthetic construct; identical to SEQ ID NO: 32361
  source 1..120: mol_type = other DNA

SEQ ID NO: 51522 - DNA, 120 bp, synthetic construct
  source 1..120: mol_type = other DNA
aattaatcctgtcaaataatttggtaacaaaatgaattgtctttgatggtaaagttaaatgttaaggtatttaaaatcactagaggtattctgtgctttcttttacctgataatatgtca

SEQ ID NO: 51523 - DNA, 120 bp, synthetic construct
  source 1..120: mol_type = other DNA
tttgaattcttttaccaccctgtgaattgtagaaaattgaaagcaggcaaatgattattgtccatagacatgcaaatgaattttgtctggcaggaatacaattgaacttcttcctggttc

SEQ ID NO: 51524 - DNA, 120 bp, synthetic construct
  source 1..120: mol_type = other DNA
aacaaaatcttatttagcctctttcttgtttccaggagtgtttttcttgaggaccttggagacatttctttgaaatgtaaacaccaagaaaggcagtgctcctatctccttgtctccgtg

SEQ ID NO: 51525 - DNA, 120 bp, synthetic construct
  source 1..120: mol_type = other DNA
ggtcttgaaatcgtgcttttataccacaacatttaatagcagtatagtcacgtgtgcctcttacagccaaaaggaatctttttttgagtatgattaccccctggtctcaagcagaagtca

SEQ ID NO: 51526 - DNA, 120 bp, synthetic construct
  source 1..120: mol_type = other DNA
tctaaaaggaagcagcaatctgttcctctagtgggggcatggagcatctcactgcctcactcactcactaattaccaaatgatttccgtgtggatatgtcaggtttatgggaatacaact

SEQ ID NO: 51527 - DNA, 120 bp, synthetic construct
  source 1..120: mol_type = other DNA
taagattgttgtttgtttctcatcctctttaatttacatattcttagtgtgtataagatagtgatcatgcttattttctgccttatggacacttgtttgttccggcagaatttcagaaat

SEQ ID NO: 51528 - DNA, 120 bp, synthetic construct
  source 1..120: mol_type = other DNA
ccatagtacacatgtaatcactggactattacatattttttatctttttatcagctgtatatttcttgacctcatcatttaggtgggtagctgcctgctacaacagagaggcagggcttc

SEQ ID NO: 51529 - DNA, 120 bp, synthetic construct
  source 1..120: mol_type = other DNA
gtggagccttgttatcactcttccctttggtgtttcctttttcatgtatcttgatggtatttttcatttttatgatctcagcagggtgctgttcatagtaaaacttagacttcaaaccca

SEQ ID NO: 51530 - DNA, 120 bp, synthetic construct
  source 1..120: mol_type = other DNA
tcctggctaacatggtgaaaccccgtctctaccaaaaatataaaaaattagccgggcatggtggtgggaacctgtagtcccaggtactcgggaggctgaggcgggagaatggcgtgaacc

SEQ ID NO: 51531 - DNA, 120 bp, synthetic construct
  source 1..120: mol_type = other DNA
gaagaagtcaacacacattttctgccacattgaaattttcagccatgtagtaaatttaccctttgtgggtcatatgatctcttttgcagcactcaactctgacacgaagtaccaatgtgg

SEQ ID NO: 51532 - DNA, 120 bp, synthetic construct
  source 1..120: mol_type = other DNA
aaattaagatccaagtaactggaatctccctttgcttggaaatgatgagtgtgtttgtccacggtgaagttgacctgcgtgtcgaggagctcgatgaggacggaatgccagtgctggtcg

SEQ ID NO: 51533 - DNA, 120 bp, synthetic construct
  source 1..120: mol_type = other DNA
gatattagaaagcaattctaaatataaatatgtcatacagtagcacattgaaaatgtgtgcatcaatatgccacaccacacacacatagacacacattgtatttctaagccattcattga

SEQ ID NO: 51534 - DNA, 120 bp, synthetic construct
  source 1..120: mol_type = other DNA
atggccttaacacctctgttttggttcttcctgctgtagcttgtcagaactccaatgctgccacactctctcagcactctgtcagggtcttataaattcactataaatgtcacatatgtt

SEQ ID NO: 51535 - DNA, 120 bp, synthetic construct
  source 1..120: mol_type = other DNA
aagttttcttcccgaaaaggttttttctggattattgcaacctatacatttctttttctcattctatgtttactattactctccaacagcagtattgatcttctaaggcatgtgaagtac

SEQ ID NO: 51536 - DNA, 120 bp, synthetic construct
  source 1..120: mol_type = other DNA
ataaataggaaatgtagtgggatactggaaaattaatgtcacttattatgtttacgataaaatccaacgttcctcaaagttttcagaatgaaagccttgctatccaaaatgaataaagaa

SEQ ID NO: 51537 - DNA, 120 bp, synthetic construct
  source 1..120: mol_type = other DNA
gataaagaactttgtcatacaaggaagaactgtgtcagaagtaattttgctaaaatgtgttatgtcctcattcatacagctaatattcactgaaagccttccatatgcaggtgaaagata

SEQ ID NO: 51538 - DNA, 120 bp, synthetic construct
  source 1..120: mol_type = other DNA
tgatcacttggagactttagaacgtgagcctcaaccagaccaggaatcaggatttctgtggttgagacccaggggtttgcatatttaataagctaactaggtagctgtgatgacacgaag

SEQ ID NO: 51539 - DNA, 120 bp, synthetic construct
  source 1..120: mol_type = other DNA
ctgggtaaatacatgggagtggaattgctgagctatatattaagtgtatatttagcttagaagaatgccaaattgttttccaaagtgatagtatcattttcacatttcccaccagcaatg

SEQ ID NO: 51540 - DNA, 120 bp, synthetic construct
  source 1..120: mol_type = other DNA
ttttgctgtgttgcccaggctgggcaatcaagtaatctgcctgccttggcctcctaaagtcctgggattacaggcatgagccactgtgaccagctttatttatttttaaaaaaatttgtt

SEQ ID NO: 51541 - DNA, 120 bp, synthetic construct; identical to SEQ ID NO: 32376
  source 1..120: mol_type = other DNA

SEQ ID NO: 51542 - DNA, 120 bp, synthetic construct
  source 1..120: mol_type = other DNA
gaagaggagagaaaaaggagtataaaacaagtgaaccaaatataaaacagagagtaacatgtcagctacaatttcacatatgtcagtaattacatttaatataagtggactaaatatacc

SEQ ID NO: 51543 - DNA, 120 bp, synthetic construct
  source 1..120: mol_type = other DNA
aggactgattggtaatagcatagctatgtaagacagtctgaatgacatataaaactatttgaagactaagttataagaaaatgtaacagaaaatgcatgaataaagaattacctgtgagt

SEQ ID NO: 51544 - DNA, 120 bp, synthetic construct
  source 1..120: mol_type = other DNA
gcgtacttggaacatctgggtgttaataactgcctttctactacataaagatgcatcaagtatcagatggaagaatggaaacataactgtaaaatcttatatttgctatttttactagag

SEQ ID NO: 51545 - DNA, 120 bp, synthetic construct; identical to SEQ ID NO: 32380
  source 1..120: mol_type = other DNA

SEQ ID NO: 51546 - DNA, 120 bp, synthetic construct; identical to SEQ ID NO: 32381
  source 1..120: mol_type = other DNA

SEQ ID NO: 51547 - DNA, 120 bp, synthetic construct
  source 1..120: mol_type = other DNA
atgaactgggttgtacaggagttaagtaataaaatggaaataatagtatctgagatattaaatgctgtatgaatgacagacgttgttatcatgctttagaaaattaatattctgcagggc

SEQ ID NO: 51548 - DNA, 120 bp, synthetic construct; identical to SEQ ID NO: 32383
  source 1..120: mol_type = other DNA

SEQ ID NO: 51549 - DNA, 120 bp, synthetic construct
  source 1..120: mol_type = other DNA
cattgggaaggatcagagtgcaaagcaaacaaagttgttttagatatttttttcattgttctcagatttttaagaatatggcatgtgtgagaacaaggaaagggttaatgctattttgca

SEQ ID NO: 51550 - DNA, 120 bp, synthetic construct
  source 1..120: mol_type = other DNA
cccagcctcaagtaatttgcccacctgggcctcccaaaatgctaggattacagtcattaagccaccatgcccagccagagataatcatttcactcttgttccaactaaagggtcatgtac

SEQ ID NO: 51551 - DNA, 120 bp, synthetic construct
  source 1..120: mol_type = other DNA
tatttattatattcaaagtttgcttcgagagcttgcagagcagacatgagttcatacgtgagcacatgaccactacggacagaaagaatggcgaacacaaagacctattcctgctttgtt

SEQ ID NO: 51552 - DNA, 120 bp, synthetic construct
  source 1..120: mol_type = other DNA
gatagttgtggttgagtatgaaatacccagattgacagccataagcagaaaaaaatctgtcaaggtaagactcatcaacaactatttttaagaagactgttagaaatttgttatttttcc

SEQ ID NO: 51553 - DNA, 120 bp, synthetic construct
  source 1..120: mol_type = other DNA
tgaatcatgtacaaaaaaatatgattaatgaatgaatgaacaccaaggcaagagtagggtcttatgcagaccagaccgatcattccttcatgattactcactaaggaaggtgactcatgg

SEQ ID NO: 51554 - DNA, 120 bp, synthetic construct
  source 1..120: mol_type = other DNA
attaattagctgtgagagccatggtatgtcacctgaggcttcagtttagctggaaagcatgctacaaagtactatggggccaggcacggtggctcatgcctgtaatctcagcactttggg

SEQ ID NO: 51555 - DNA, 120 bp, synthetic construct
  source 1..120: mol_type = other DNA
cattagttaaatgttaaaatacctttttagaaagcaggcaattcatctaacttgtcatttgacttggatctgggacaaatttcctgtgtgagatcgatcagcatgtcttcttgctctcag

SEQ ID NO: 51556 - DNA, 120 bp, synthetic construct
  source 1..120: mol_type = other DNA
aatcatttgaaaagcaaacaaaattatttcaccatatttttacacttgtaatcatgtataatacgttctaagaaaaagccatctctacctataaaatactgcataagatgcaattgtata

SEQ ID NO: 51557 - DNA, 120 bp, synthetic construct
  source 1..120: mol_type = other DNA
aagcacccatttcctagccactcccagcccttcccctaaactacctttgaaaaatccctaatctatgagccttcgatgagactgacttgaacaataacttcatctctaatgtggtgtggc

SEQ ID NO: 51558 - DNA, 120 bp, synthetic construct
  source 1..120: mol_type = other DNA
gtctaaaacaccaaaagcaatggcaactaaagccaaaattgacaaatgggatctaattaaactaaagagcttctgcatagtaaaagaaactaccatcagagtgaacaggcaacctacaga

SEQ ID NO: 51559 - DNA, 120 bp, synthetic construct
  source 1..120: mol_type = other DNA
cctgcacgttgtacacatgtaccctagaacttaaagtatataaaaaaaaaagatctgcatagttttggatggtatatatttaacatgatcttcctgttctagatagataaacctctagat

SEQ ID NO: 51560 - DNA, 120 bp, synthetic construct
  source 1..120: mol_type = other DNA
agcctctcgagtagctgggattatagatgcctgccaccacgcccagctaatttttgtatttttagtagagactgggtttcaccatgttggccaggctggtctggaactactaagttcaga

SEQ ID NO: 51561 - DNA, 120 bp, synthetic construct; identical to SEQ ID NO: 32404
  source 1..120: mol_type = other DNA

SEQ ID NO: 51562 - DNA, 120 bp, synthetic construct; identical to SEQ ID NO: 32405
  source 1..120: mol_type = other DNA

SEQ ID NO: 51563 - DNA, 120 bp, synthetic construct; identical to SEQ ID NO: 32406
  source 1..120: mol_type = other DNA

SEQ ID NO: 51564 - DNA, 120 bp, synthetic construct
  source 1..120: mol_type = other DNA
cctctaactacatacactttggaaaaggaagatgttttcctactctgtctttctcgaagagttgcgtctggtcctactcaagtctgcagagggtcagtttcctgttcacttgctcacagc

SEQ ID NO: 51565 - DNA, 120 bp, synthetic construct
  source 1..120: mol_type = other DNA
tcccccctccccccttctgccccttcctcccttccttccttccttccttccttctggtgtgaactgcaccagcaccctgcccctcgcccctctcacctgcatctccttttcatcctttct

SEQ ID NO: 51566 - DNA, 120 bp, synthetic construct
  source 1..120: mol_type = other DNA
aggctctgcttgtgtgacatgagctcattactgagcctctctaaagttgtatttcttcatcccaagttaatgatgaaaaagtaaataatagaatgcagctaaaattctaaaaatctcacc

SEQ ID NO: 51567 - DNA, 120 bp, synthetic construct; identical to SEQ ID NO: 32409
  source 1..120: mol_type = other DNA

SEQ ID NO: 51568 - DNA, 120 bp, synthetic construct
  source 1..120: mol_type = other DNA
tctcctcagtcttctgcaatcaggcatctactcttatccattcatcaatttactgatgaactcagatctatcactaatttatacagattattttgttttcattttcacaataatcctata

SEQ ID NO: 51569 - DNA, 120 bp, synthetic construct
  source 1..120: mol_type = other DNA
cccatagtacaaattaatgagatgtgatagggctaatttctctgtttagagatgttttaactgtgacttgacaatactgacatgcaagctcttcaggagaacctagttttcatttgagct

SEQ ID NO: 51570 - DNA, 120 bp, synthetic construct
  source 1..120: mol_type = other DNA
tatgaggaaataaggtattacctgaaaggggtcccgatccagatcccaaaaaagggttcttggaccttgtgcaagaaacaaattgggacaagtccagaaagtgaaagcaagtttattaag

SEQ ID NO: 51571 - DNA, 120 bp, synthetic construct
  source 1..120: mol_type = other DNA
aactgagtttcaaatactggcaggcaaagagtaggcaagccattgtagctcatggtaattcagaaaggcatctggaaatggagccatctcagaagtcgtttacatgacagaagagaaatt

SEQ ID NO: 51572 - DNA, 120 bp, synthetic construct
  source 1..120: mol_type = other DNA
cattcacaaggttcagccttatagtgcgtgactggattccacatccaccctgcattttgtaatcgaaggggaggaagctcacaggtgttgagcaccttgtgcttggccaggtgtttgtta

SEQ ID NO: 51573 - DNA, 120 bp, synthetic construct
  source 1..120: mol_type = other DNA
tagaaaaatatcttgaagttcattcacagcaagtatgtttacctcattatttctcaaggctgcatgctattccagagtataaatgtaccatgaccactgaaagagaactgtactaacata

SEQ ID NO: 51574 - DNA, 120 bp, synthetic construct
  source 1..120: mol_type = other DNA
cccaggctggagtgcagtgacgcaatctcggctcactgcaagctccacctcccgggttcacagcattctcctgcctcagcctcctgagtagctgggactacaggcacccgccaccacacc

SEQ ID NO: 51575 - DNA, 120 bp, synthetic construct
  source 1..120: mol_type = other DNA
cagactctcactcactctgtcactcagcctagagtgcagtggcgcaatcttgtctcactgcaaactccacctccagggttcaagagattctcctgcctcagcataccaagtagctggaat

SEQ ID NO: 51576 - DNA, 120 bp, synthetic construct
  source 1..120: mol_type = other DNA
gtacaccacattttccttatccattcatccacagatggacacttcagttgattccaaatcttggctattatgaataatactgcaatgaacatggttgtacagatatctaaaagacatacg

SEQ ID NO: 51577 - DNA, 120 bp, synthetic construct; identical to SEQ ID NO: 32416
  source 1..120: mol_type = other DNA

SEQ ID NO: 51578 - DNA, 120 bp, synthetic construct
  source 1..120: mol_type = other DNA
tttttccttctttttcttgtctaattgctctggatagaactttcagtactgtgttgaaagaagtggtgagagtgggcatccttgtcttgtttggatctcagaggaagagttttcaacttt

SEQ ID NO: 51579 - DNA, 120 bp, synthetic construct
  source 1..120: mol_type = other DNA
acttattcatagtagtctgttaagatcctttgtatttctgtaatattggttgtaatgttgcctctttcatttctgattttgagacttttttcttaaagatttgtctattttgtttatatg

SEQ ID NO: 51580 - DNA, 120 bp, synthetic construct
  source 1..120: mol_type = other DNA
tatttgccttatatattcagatattccatcatttggtgcacacatatttacaagtgttacattctctgggttaacttatcccgttatccttcttcttttttttttttttttttttttttt

SEQ ID NO: 51581 - DNA, 120 bp, synthetic construct
  source 1..120: mol_type = other DNA
tgtggttaccaggaggctgacataaaatatcttagggttgcagcaagtttttttaacttgaatacaacttaaccatgatcacacacaaaaattcaacatttttacccacccacactttgt

SEQ ID NO: 51582 - DNA, 120 bp, synthetic construct
  source 1..120: mol_type = other DNA
tgatcatagctcactgcaacctcaaactcctgggctcaagcgactctcccacctcggcctcccaaagcgctgacattataggtatgagccacgacacccagcctattgtttctttaacta

SEQ ID NO: 51583 - DNA, 120 bp, synthetic construct
  source 1..120: mol_type = other DNA
tgattttctgttcctgtgttaattcacttgggataatggcctccaactgcgtccatggtgctacaaaggacatgatttcattactttttatggctgcatagtattccatggtgtgtatgt

SEQ ID NO: 51584 - DNA, 120 bp, synthetic construct; identical to SEQ ID NO: 32419
  source 1..120: mol_type = other DNA

SEQ ID NO: 51585 - DNA, 120 bp, synthetic construct
  source 1..120: mol_type = other DNA
ggtgatcaacctcccaaagtgctgggattacaggcatgaggcaccacgccggcctaggtgattttcttatgtgcgttttcaaggatcaaataataataatttttacttggttcctatttt

SEQ ID NO: 51586 - DNA, 120 bp, synthetic construct
  source 1..120: mol_type = other DNA
tatctgccaagcacagagttaagctcattaagtggataatcttatttttcctcacacaattatgctcattttataaatgagaaagctagaactttgagaagttaaatcacccaactttac

SEQ ID NO: 51587 - DNA, 120 bp, synthetic construct; identical to SEQ ID NO: 32420
  source 1..120: mol_type = other DNA

SEQ ID NO: 51588 - DNA, 120 bp, synthetic construct
  source 1..120: mol_type = other DNA
gacccttaatttgtgaagaaggcccacaagtattagaaagatccatttgtagaggtgtcacttgatgtgacattccttgctagcacagatccatctcaaacaaacttctaaagcttgggc

SEQ ID NO: 51589 - DNA, 120 bp, synthetic construct
  source 1..120: mol_type = other DNA
tgcagctgtttgggctgacaccacacctggcagcagggctgacgtgtcctgcagacctgctcttcctctgactcactgtgtcgctgcccatcactggctcacagcttggtagctacccag

SEQ ID NO: 51590 - DNA, 120 bp, synthetic construct
  source 1..120: mol_type = other DNA
cagataagcagagaatacggtcgaagttgcttatttctttttatctaaataaggtcagttctttattgaaaatgactacattcatatggtgcataaaatatgtggcaatttacagaaaga

SEQ ID NO: 51591 - DNA, 120 bp, synthetic construct
  source 1..120: mol_type = other DNA
ttactactactatatatatgtatatatatatatacacacacacatgattatcccagaaaattatcttttatcttccctcttctgttgtttattcttttgaccttgtttgagtaatggcac

SEQ ID NO: 51592 - DNA, 120 bp, synthetic construct; identical to SEQ ID NO: 32425
  source 1..120: mol_type = other DNA

SEQ ID NO: 51593 - DNA, 120 bp, synthetic construct
  source 1..120: mol_type = other DNA
ctcctgaattgttttccaacaacccatgaggtaacgctttctccaaggcctgccattctcaagtctcttcgggtctgtgtcttataactgaacactcacaagaaccatctctggtttgtt

SEQ ID NO: 51594 - DNA, 120 bp, synthetic construct
  source 1..120: mol_type = other DNA
aaccttatatccaattaaggtcacattctgaggtactgggagttaggattccaacatatgtttttgggaaaccacaagtcaacccagaatagagatgcagggatgaaaggcaggcacagt

SEQ ID NO: 51595 - DNA, 120 bp, synthetic construct
  source 1..120: mol_type = other DNA
aaaaaaaaaaaaaattagccaagtgtggtggcacacgcctgtagtcccagctactaaggaggctgacgcagaagaattgcttgaacctgggaggcagaggctgcagtgagccaagattgt

SEQ ID NO: 51596 - DNA, 120 bp, synthetic construct
  source 1..120: mol_type = other DNA
tcaatttgcagccattggtatttatttgacacaagtggagtccagccaccagctcctttattgaaacagaaaaagtataaaaatggtagaggaggaagttatttaaacatagctgttact

SEQ ID NO: 51597 - DNA, 120 bp, synthetic construct
  source 1..120: mol_type = other DNA
ttgttatttttctagtctaatagaattaggggacactcgaaaaccacagcttctttaataatcaatgtctagaaaaagagagtactctataaacaattcccaagccgaggagtcagaaca

SEQ ID NO: 51598 - DNA, 120 bp, synthetic construct
  source 1..120: mol_type = other DNA
agagacagtgcacagatttctttagccctcagtaggaactacttccacagtttcttctctctgctcattcctccttccaacttaacttttcaggatgtaacagaattccacgtacccact

SEQ ID NO: 51599 - DNA, 120 bp, synthetic construct
  source 1..120: mol_type = other DNA
gggattacaggcacgagccactgggcccagcctattttatggctgttttaaaagagttgggagaaggtgagggagatgctaacagccaacccatcatcttaggctggatgttgtacattg

SEQ ID NO: 51600 - DNA, 120 bp, synthetic construct
  source 1..120: mol_type = other DNA
cagcctctcccccataacaaatgtttcttctccacttcaccctcctccccctgcctctgacaagacattgcacctgagttaaataaagtgtcacaattctaccccacagatcctatgaat

SEQ ID NO: 51601 - DNA, 120 bp, synthetic construct
  source 1..120: mol_type = other DNA
aacttcccatgactatagcatctagtcattaagtggcagcactgttacagagtatgtattgactttgtttacaggggaaataatgcacaggtaaatcatcatcatcatcattacgattat

SEQ ID NO: 51602 - DNA, 120 bp, synthetic construct
  source 1..120: mol_type = other DNA
ttaaaggcaagtagtacaaacactcctattaaatggcaatgatggtcagattagatgagaaagcaagatccaactatatgttgcctacaagaaacacactttaaataaaaaaggctcaaa

SEQ ID NO: 51603 - DNA, 120 bp, synthetic construct
  source 1..120: mol_type = other DNA
ccacctagcctaaaatctaaagagatatgaacctcacagggagagatgtgagcaggatctcaccttacatagatgaaaccagaggtcagtaagaaaagttcagctggaatagttaacaaa

SEQ ID NO: 51604 - DNA, 120 bp, synthetic construct
  source 1..120: mol_type = other DNA
agtcaaccaaaatcccctagtccaccccctaaaaaaaaagagatggtaatatttacatttttcctaaggatattatgtagttaaactaattatagtttatgaaattgctgttaaagcctc

SEQ ID NO: 51605 - DNA, 120 bp, synthetic construct
  source 1..120: mol_type = other DNA
agaactgcatgacagttgagctgtcacatgttatcactggatttttttgaacaggaaaaaagtgaaacgacaacatttttagaaggaagaatgcaaactgtaagagagcgatgcgaaaat

SEQ ID NO: 51606 - DNA, 120 bp, synthetic construct
  source 1..120: mol_type = other DNA
aatgcaatctcagctcactgcaacctccacctcccaggttcaagcgattctcctgcctgagctacccgagtagctgggattcctggcgtgcaccaccacgtccagctaatttttgtattt

SEQ ID NO: 51607 - DNA, 120 bp, synthetic construct
  source 1..120: mol_type = other DNA
gagccttctcacttactacttgctataactgcagtaggttccccaagctcattatttctcagctgcaatacaagtctgctatgagtgtaatattcatacgtgccctattgcattgcccct

SEQ ID NO: 51608 - DNA, 120 bp, synthetic construct
  source 1..120: mol_type = other DNA
gaatcagaccagccaaatatttgttctcatgtctaatctatattaacatccttatgaatattttgtttgtttgaatgccacttcctgtcatagtactaacaacctattttagatgaattt

SEQ ID NO: 51609 - DNA, 120 bp, synthetic construct; identical to SEQ ID NO: 1828
  source 1..120: mol_type = other DNA

SEQ ID NO: 51610 - DNA, 120 bp, synthetic construct; identical to SEQ ID NO: 1829
  source 1..120: mol_type = other DNA

SEQ ID NO: 51611 - DNA, 120 bp, synthetic construct; identical to SEQ ID NO: 1830
  source 1..120: mol_type = other DNA

SEQ ID NO: 51612 - DNA, 120 bp, synthetic construct
  source 1..120: mol_type = other DNA
aaaattaggcataaaattgaactttagttttcagtgaagtatgaataaaatagtgaagagctctccaggttgacaattatgggaacaattctaaaactactcatcagctgattgcgactc

SEQ ID NO: 51613 - DNA, 120 bp, synthetic construct
  source 1..120: mol_type = other DNA
ctctttcaccttcccaaatgaaaacgctgaacccactaacaataacctccattaccagcccctggcaacaactattctatttcttgtctctatgaatttgactactctaggtacctcata

SEQ ID NO: 51614 - DNA, 120 bp, synthetic construct
  source 1..120: mol_type = other DNA
ctccaaacctgggcaacagagcaagactgtgtttcaaaaagagaaagagaaagagagaagaggggaaaagaaaaaaagaggaaaggaaaaaagcaaggaaggaaggaaggaggaggagaa

SEQ ID NO: 51615 - DNA, 120 bp, synthetic construct
  source 1..120: mol_type = other DNA
agccacttgagcaaatccgtcagaatcattctgcaggtataaatttttaaatcacaaactcatgagggaaaatgtaacttcatttctccataacccagaaagctttctagtaggagctgg

SEQ ID NO: 51616 - DNA, 120 bp, synthetic construct
  source 1..120: mol_type = other DNA
tcaaaagctcccatcatgagtttctggctgacttacgccaggactcacagaatgattcatccctacatgaaaaagtattttcaccagcctcaaaggttttcaggaattactagatcaaag

SEQ ID NO: 51617 - DNA, 120 bp, synthetic construct
  source 1..120: mol_type = other DNA
tttatacctcaaagaaccatttagagtcactgattcatgtccataaagcaggaactttccgaaatttagtaagaatagctaagtacaaatctaaaaaaaaaattacatacttcagaaact

SEQ ID NO: 51618 - DNA, 120 bp, synthetic construct
  source 1..120: mol_type = other DNA
gactctgtctccaaaaaaaaaaaaaaaaaaaaaaaaaaaacccaacagcaaaaaaaacagataactaagactttggccctacaatatttacactctgcatggaaaacaacccaccaaata

SEQ ID NO: 51619 - DNA, 120 bp, synthetic construct
  source 1..120: mol_type = other DNA
tgttcactgcattgtttccaagtatttaaaatccctgaagaagtaagtaatccatgtgttttacgccatttcaacagaaatgtcttaggcaatgtttatctttgctgcttacagatcccc

SEQ ID NO: 51620 - DNA, 120 bp, synthetic construct
  source 1..120: mol_type = other DNA
ggcctcttttggataagactagccaagttacagatgaagacaacagggtcttagctgtcagtgagatagccctctttgatcttgggaaattctgaaggaatttctcatttcaaaataaga

SEQ ID NO: 51621 - DNA, 120 bp, synthetic construct
  source 1..120: mol_type = other DNA
aatgttttcttcaattctactcaaaaccttatttttttgccctaagtctttgtcagcttatttcagtcttatttttacatgtaatataccacagagttcttcttagcttcaagtgatgca

SEQ ID NO: 51622 - DNA, 120 bp, synthetic construct
  source 1..120: mol_type = other DNA
gcactgggctgcacaacagggaaactacttgttttctgcctgttaatttttagctctgagatctttacactccactggagaaaggctttaatgtctgagacagggggtcattatttgtta

SEQ ID NO: 51623 - DNA, 120 bp, synthetic construct
  source 1..120: mol_type = other DNA
gtggatggatcaggaggtgaggagatccagaccaccttggctaacatggtgaaaccccgtatctactaaaaaaaaaaaaaaatacaaaaaattagtcgggcctggtggcgggtgcctgta

SEQ ID NO: 51624 - DNA, 120 bp, synthetic construct
  source 1..120: mol_type = other DNA
ggaaacccagcaggaccagaaagccgaagtgatcaacttattcctgtcaaatacattcttggagtttcaaatgtgaacaaatatgcttattctgaattttacttccttctgcaaagtaat

SEQ ID NO: 51625 - DNA, 120 bp, synthetic construct
  source 1..120: mol_type = other DNA
atcactgcgggctacttgcctacaggagatggaggctcctcctttttgcctgataacttgagcattgcaggaacttgctctgcctttccaaatcacgctagaccagagggtttctggctt

SEQ ID NO: 51626 - DNA, 120 bp, synthetic construct
  source 1..120: mol_type = other DNA
tgtgaaggttacttcagaaggtaaggttctccagatgtgatcaaagaccctgagacgaggaaattatcttgaattatctggctgggtcttaaataccatcagaactgcccttgtaagaga

SEQ ID NO: 51627 - DNA, 120 bp, synthetic construct
  source 1..120: mol_type = other DNA
tgcccataccttcttcaggccacgtctggatgttcatctggatacggcgctattccattcttcccatttcatcacctgtcttttcagttcttaatgtaccttaacattatcttaatgaga

SEQ ID NO: 51628 - DNA, 120 bp, synthetic construct
  source 1..120: mol_type = other DNA
atcatcatctcactgtaggtcctcatgttaacgacctaactaatccttacagccaatgcttccttattgactgtccccagccacacacacaccttacgtatcaccagagcagaaacggtt

SEQ ID NO: 51629 - DNA, 120 bp, synthetic construct
  source 1..120: mol_type = other DNA
ttttttttttttgagacggagccttgccctgttgcccaggctaatttttttttgtatttttagtagacacggggtttcaccatgttagccaggatggtatcgatctcctgacctcgtgac

SEQ ID NO: 51630 - DNA, 120 bp, synthetic construct
  source 1..120: mol_type = other DNA
gcatgcctgtatcaaaacatctcatgtagcccatcgatatatacacctactatgtaaccacaaaattaaaagctaaaaaaattaaaaataataataattctttctatgcacctctgagag

SEQ ID NO: 51631 - DNA, 120 bp, synthetic construct
  source 1..120: mol_type = other DNA
ttacagtgaggctgggcacagtggccaagatgggcggatcacaaggtcaggagtttgagacgagcctggccaacatggtgaaacttcatctctagtaaaaatacaaaaattagctgggca

SEQ ID NO: 51632 - DNA, 120 bp, synthetic construct
  source 1..120: mol_type = other DNA
cagagcagaaaagctgaaaattctaaaaatcagagcacctcttctcctccaaaggaacgcaactcctcgccagcaacggaacaaagctggatggagaatgactttgacgagttgagagaa

SEQ ID NO: 51633 - DNA, 120 bp, synthetic construct
  source 1..120: mol_type = other DNA
tcacatccagccaaactaagcttcataactgaaggagaaataaaatcctttacagacaagcaaatgctgagagattttgtcaccaccaggcctgccttacaagagctcctgaaggaagca

SEQ ID NO: 51634 - DNA, 120 bp, synthetic construct
  source 1..120: mol_type = other DNA
tgaatgactactgggtacattgagaaatgaaggcagaaataaagatgttctttgaaaccaacgagaacaaacacacaacataccagaatctctgggacacatttaaagcagtgtgtagag

SEQ ID NO: 51635 - DNA, 120 bp, synthetic construct
  source 1..120: mol_type = other DNA
gacgcttcatgctaaaaactctcaacaaattaggtattgatggcacctatctcaaaataataagagctatctatgacaaacccacagccaatatcatactgaatggacaaaaactggaag

SEQ ID NO: 51636 - DNA, 120 bp, synthetic construct
  source 1..120: mol_type = other DNA
gaacagaacagagccctcagaaataatgccgcatatctacaactatctgatctttgagaaacctgacaaaaataagcattggggaaaggattccctatttaataaacggtgctgggaaaa

SEQ ID NO: 51637 - DNA, 120 bp, synthetic construct
  source 1..120: mol_type = other DNA
ataacaagacttggaaccaacccaaatgtcaatcaatgatagactggattaagaaaatgtggcacatatacaccatggaatactatgcagccataaaaaatgatgagttcatgtcctttg

SEQ ID NO: 51638 - DNA, 120 bp, synthetic construct
  source 1..120: mol_type = other DNA
atactaaataaaatgcaacaggaaaatcaaagggatgaacgtcacatggcataaagaaggaggtagaggacatctgcctagccttccaagaacaaaacaaattgacaatcaaccctggcc

SEQ ID NO: 51639 - DNA, 120 bp, synthetic construct
  source 1..120: mol_type = other DNA
gcttataagagctttcttaacacagctgtggacttttctcctggtgttgtacagcagttcaaattagctcaagaatcataaaccctatatttgaacagctatataatattatatatttat

SEQ ID NO: 51640 - DNA, 120 bp, synthetic construct
  source 1..120: mol_type = other DNA
tgtttgttcagtttccaaaggaatccttccattttggtctagtgttccataaacattgactttacatgaaaaggacagtgaagagatctcttgaaccggccagaaagttgaagctcaagg

SEQ ID NO: 51641 - DNA, 120 bp, synthetic construct
  source 1..120: mol_type = other DNA
tccttgacaaaagacatttaaaacaaacaattccatgctttatatgtcaagtgaaaaggaatattttttctacagtgacagagcagacttgacatgtgcacaatcatgtacaaccaagcg

SEQ ID NO: 51642 - DNA, 120 bp, synthetic construct; identical to SEQ ID NO: 1837
  source 1..120: mol_type = other DNA

SEQ ID NO: 51643 - DNA, 120 bp, synthetic construct
  source 1..120: mol_type = other DNA
agcgttcaatctttctcttgatgcttcctgctgttttcagggactcaatgagagcagtaagtgacctttcactcactgcaagtctatgggcactgaagttaggaaaatatttcccttcat

SEQ ID NO: 51644 - DNA, 120 bp, synthetic construct
  source 1..120: mol_type = other DNA
aagtaatcacaactatgcaacaaaaacaggaaaggtggtggcaggatctcagatttcatttttctccaggaaggtctttttgaagccctgtttattcaatagtaagagtgacctctagtg

SEQ ID NO: 51645 - DNA, 120 bp, synthetic construct
  source 1..120: mol_type = other DNA
tgataaaatatgggtacattatgttttgctcatctgtctggaatatcatcattatattagaatcatagcccattctagaaataaaagcttcctaggtgtttaccaaattaagtaaaataa

SEQ ID NO: 51646 - DNA, 120 bp, synthetic construct
  source 1..120: mol_type = other DNA
cgacggccgctctgcgtcgctcctgctctcactcccgtcccctgcgcggctctgacgctgctctgcctcccctgtccagtctctagctctcttcctcacgcaccagcagcctccctcggc

SEQ ID NO: 51647 - DNA, 120 bp, synthetic construct
  source 1..120: mol_type = other DNA
tgggaggcagggggcgggggggtctttctctttttctcttcctctgcttctcaaattcacagtaggggcaaagattgacaaactcactcacattaccaccaccgcgagtttccaaaaaag

SEQ ID NO: 51648 - DNA, 120 bp, synthetic construct
  source 1..120: mol_type = other DNA
tttacaacattggaggaatatgtttatgaatattattcccaatacataaaatatacattttacacacttataggtacactcaaaatttgttccaaattgttcatgtctagtaaacatata

SEQ ID NO: 51649 - DNA, 120 bp, synthetic construct
  source 1..120: mol_type = other DNA
accaatgatacaaaacaggctgacaggctggtatgtatccttatgtatccttgttttggctcttcttcttcttttttttttttgagacagagtctcgctctgtcgcctagactggagtgc

SEQ ID NO: 51650 - DNA, 120 bp, synthetic construct
  source 1..120: mol_type = other DNA
tggaagagtagagggtggttctgaggacctccacaaagaatggccagcacatcctagaacactgatacttatcaaatttaaaaaaaaaaagtttatttttgttttgtgcattcatgttct

SEQ ID NO: 51651 - DNA, 120 bp, synthetic construct
  source 1..120: mol_type = other DNA
cttggctgggtgcggtggctcatgcctgtaatcccagaactttgggaggccgaggtgggcggatcacgaggtcaggaaatcgagaccatcctggctaacatggtgaaacctcatctccac

SEQ ID NO: 51652 - DNA, 120 bp, synthetic construct
  source 1..120: mol_type = other DNA
caagacatagaacatttccatcactccagaaacttcccttgtgtttctctgcagtcaactcccatcccacctcaacccaggtaactactgatacaatttctactgctatatcttagtttc

SEQ ID NO: 51653 - DNA, 120 bp, synthetic construct
  source 1..120: mol_type = other DNA
ctatttcatcgctgcattgtatattattgtgtaatattgtaatattatcactgtttttgttactctagcatttgctttagggattacaccatacagatgttttaacttaaagataacttg

SEQ ID NO: 51654 - DNA, 120 bp, synthetic construct; identical to SEQ ID NO: 1779
  source 1..120: mol_type = other DNA

SEQ ID NO: 51655 - DNA, 120 bp, synthetic construct
  source 1..120: mol_type = other DNA
agatatacatatagtactaaagagatatgcagtgcatgtgcgatattaaaatttcaggcccggcgcagtggcttacgcctgtgataccagcgctttaggaggctgaggtgggcagatcat

SEQ ID NO: 51656 - DNA, 120 bp, synthetic construct
  source 1..120: mol_type = other DNA
cactgcagattaagatgaacattgtagattggagcatattatgggagcaaggcaacctgtagaattggtcaggaactagacatctcaggacctgcattctaacccatttttgtcagtaat

SEQ ID NO: 51657 - DNA, 120 bp, synthetic construct
  source 1..120: mol_type = other DNA
aacagtgtttacaaatactttcatcttgccccagattggccaatgaggtagtaggttaaacagccaattcatcatgttttgatttaaaatgtgtccatatcattcttccccaaattcaag

SEQ ID NO: 51658 - DNA, 120 bp, synthetic construct
  source 1..120: mol_type = other DNA
agtgccaggagttcagtccacgcatgacaacttactagtactgcctacttgaagagattagctcttacaaccttatctttgtctcatctataaaactgagggagcaggttaaaaaaatct

SEQ ID NO: 51659 - DNA, 120 bp, synthetic construct
  source 1..120: mol_type = other DNA
aatgagtttattttcaaataagaagattaagtctaaaaatcagtgcaaaagattgatggtgatgatgtatcaatgcaatttgatgcatccgtttcgctgtcttgcaaaaggtgcagtgac

SEQ ID NO: 51660 - DNA, 120 bp, synthetic construct
  source 1..120: mol_type = other DNA
cacaagttacaaaaactgtaattacaaattacaaagaaaaacaggcagacaatcttgtattgacatcctcttgcatcttgttacctaccaatgttctgttccattataaaattcaatact

SEQ ID NO: 51661 - DNA, 120 bp, synthetic construct
  source 1..120: mol_type = other DNA
gagaaaagaataaaacatcataattttttttcttttttctttttagagagagggtctcactctgtcgcccacgctggagtgcagtggcatgatcacagctaactgtagccttgatcctcc

SEQ ID NO: 51662 - DNA, 120 bp, synthetic construct
  source 1..120: mol_type = other DNA
gggattacaggcgtgagccaacgcgcccggccgataatatacttttcaaacgcagtagggtcgcatatatgtaatcaatccctattaccaaaaatattgcaggcatatttattcattttt

SEQ ID NO: 51663 - DNA, 120 bp, synthetic construct
  source 1..120: mol_type = other DNA
tccacagactccttttcatcccctcgttcaggctaagaatttctcagcggaagagaacactgctaagatgtttccttacgtttactccgtcaatcttgccagtgatatttgaccaccagc

SEQ ID NO: 51664 - DNA, 120 bp, synthetic construct; identical to SEQ ID NO: 1798
  source 1..120: mol_type = other DNA

SEQ ID NO: 51665 - DNA, 120 bp, synthetic construct; identical to SEQ ID NO: 1781
  source 1..120: mol_type = other DNA

SEQ ID NO: 51666 - DNA, 120 bp, synthetic construct
  source 1..120: mol_type = other DNA
cgatcccctcgttccttcactccaggagaggtcaccctgaatctttacctgtttggcaactatttccattgtcagggttatgaaaggcaggtttttaacagatttgttcaagtgcagatg

SEQ ID NO: 51667 - DNA, 120 bp, synthetic construct
  source 1..120: mol_type = other DNA
caccgcggggttccccacaacagttcttccctaaatgagaggcttgggaaatttttctttttcttctctcacttttccctttttactcttctttggttttactctagtacatttagatcc

SEQ ID NO: 51668 - DNA, 120 bp, synthetic construct
  source 1..120: mol_type = other DNA
tgtcaggattacaggcatgagccactgcgcccggccagacttctctttaaaaccctgaataaaaaccttgagcaattgtttaatttggagctgatgaaacagagaactttcttacatctt

SEQ ID NO: 51669 - DNA, 120 bp, synthetic construct
  source 1..120: mol_type = other DNA
ccgtctctactaaaaataaaaataaaaaaaaataaaaaataaaaaaaattagccgggcatggtggtgggtgcctgcagtctcagctacttgggaggctgaggcaggagaatggcgtgaac

SEQ ID NO: 51670 - DNA, 120 bp, synthetic construct; identical to SEQ ID NO: 1799
  source 1..120: mol_type = other DNA

SEQ ID NO: 51671 - DNA, 120 bp, synthetic construct; identical to SEQ ID NO: 1800
  source 1..120: mol_type = other DNA

SEQ ID NO: 51672 - DNA, 120 bp, synthetic construct
  source 1..120: mol_type = other DNA
catccttgaatgaaaacattaacaccttcaattccatgtctcctttatttggaaggaaacaaagatgtatataataaatattattcaactttttgatcctaatattaaagtatagttcat

SEQ ID NO: 51673 - DNA, 120 bp, synthetic construct
  source 1..120: mol_type = other DNA
cttttaagtaccactacaaaagctcaagaagccaccttcaaataattaatcatttagaaggggaagctattttataagcaattcctatgatgccatcagctaccaccctatccacgatgt

SEQ ID NO: 51674 - DNA, 120 bp, synthetic construct
  source 1..120: mol_type = other DNA
atgcatcaggattttgatgtctatctagcttgtacctaatctgcaaacttcctaaaaagaaaaataaatggcatttaaaattaaagtggtattttataaaactcttgatacagattctag

SEQ ID NO: 51675 - DNA, 120 bp, synthetic construct
  source 1..120: mol_type = other DNA
cctcccaaagtgctgggattataggcgtgagccaccgtgtccagcctaatcagagattttgtagatttttttctagacatgaaatttttgtgctgtgtacctaacaaacttaaagcttgg

SEQ ID NO: 51676 - DNA, 120 bp, synthetic construct
  source 1..120: mol_type = other DNA
agtccaacggtcttgttttaagtacatttagagaatgagaccaaaccttaaatatcctgggagataaagtaatagtgaaatcctttcctgtttttttatttttcactttttaaagttttt

SEQ ID NO: 51677 - DNA, 120 bp, synthetic construct
  source 1..120: mol_type = other DNA
ttacatttcaaacagcaatcatgagggttttaatatctccacatcctcaccaacatttattattatcattcttttaaattacagctatacttgtctgtgtgaagaggtatttcattgtga

SEQ ID NO: 51678 - DNA, 120 bp, synthetic construct
  source 1..120: mol_type = other DNA
tgggcagtgtgaatctatcaaatttcttcttcttaaagattgttttggctattctgcatcatttaaattttcatatgaaatcagcttgtcaatttcaggaaagaagccagctgggatatt

SEQ ID NO: 51679 - DNA, 120 bp, synthetic construct
  source 1..120: mol_type = other DNA
tttctgggatcatttccactttgtcttgatgtatagtcatttttatatgtgactggatttgctttggtaatactctgttcagggttttcacatctatctacttaaatgatattggtctgt

SEQ ID NO: 51680 - DNA, 120 bp, synthetic construct
  source 1..120: mol_type = other DNA
ggcttgatttacaggtagcatgttgtctaacctagaatatgttccatgaacacttgagaagaatatacattctgctattgttaagtggtgtgttctacagatgtgtgttagaatgattgc

SEQ ID NO: 51681 - DNA, 120 bp, synthetic construct
  source 1..120: mol_type = other DNA
tcagtagcattaattaaattcacaatgttgtgcaattatcacctcttttgatatccaaaatttttcatcttcccaaaattaaactctattcattaagcaataactctccattgccccctc

SEQ ID NO: 51682 - DNA, 120 bp, synthetic construct
  source 1..120: mol_type = other DNA
gcttttagatttaaaactttgattcattttgagttaattttggtaagggtctaacttcaatctttgcatgtgaacatccacttttcctacctttatgttgaatagactgttacttcccta

SEQ ID NO: 51683 - DNA, 120 bp, synthetic construct
  source 1..120: mol_type = other DNA
tttttcagcaacaattaagataatcatgttttttttcccctctcattctattaatcttgtgtaatatgttgactgattttcatttgttgaaccactcctgaaatcctgggataaatccta

SEQ ID NO: 51684 - DNA, 120 bp, synthetic construct
  source 1..120: mol_type = other DNA
ttgatacaaccaaacaatgtgtaatgatcaaatcagggtaactgagatatccatcaccttaaacatttatcatttctttttgttaggaacattccagttccactcttctagttattttga

SEQ ID NO: 51685 - DNA, 120 bp, synthetic construct
  source 1..120: mol_type = other DNA
tttgtagtaaaacctctgcttacaagtagggcacagggtgggaaaggtaacttcttgccttgcctctcctggtggagaaactgttccttacaagtaagctggagtgagggcaattgggac

SEQ ID NO: 51686 - DNA, 120 bp, synthetic construct
  source 1..120: mol_type = other DNA
aattttatatcaagttaattccaaaaatgtgtttagtacacacatacacatacacacaccccccaaatatatctgtaaataaaaagacaatgttgggtgatgatcattgtcttggaatac

SEQ ID NO: 51687 - DNA, 120 bp, synthetic construct; identical to SEQ ID NO: 32255
  source 1..120: mol_type = other DNA

SEQ ID NO: 51688 - DNA, 120 bp, synthetic construct; identical to SEQ ID NO: 32256
  source 1..120: mol_type = other DNA

SEQ ID NO: 51689 - DNA, 120 bp, synthetic construct
  source 1..120: mol_type = other DNA
ggtgataatttgtgatttagtccagttttaattagattgcatccttattcgctttaaaacacttaagaatgaacaagtgagagctttaatctgtgtagctcctacgttagaatagtttca

SEQ ID NO: 51690 - DNA, 120 bp, synthetic construct
  source 1..120: mol_type = other DNA
aaacaaacaaacaaaagaaatgtcacataagaagcacacagcaagctcctggaacctaccaggttatcagcaaatagtaccaataagcagtagttgttggcaactgttgctctcagtaca

SEQ ID NO: 51691 - DNA, 120 bp, synthetic construct
  source 1..120: mol_type = other DNA
ggtgtggcagttcacacctgtaatcccagcactttgggaacccgaggcaggcggatcacttgaggccaggagttgaagaccagcctggtcaacatggcaaaaccccacctctaccaaaaa

SEQ ID NO: 51692 - DNA, 120 bp, synthetic construct; identical to SEQ ID NO: 1801
  source 1..120: mol_type = other DNA

SEQ ID NO: 51693 - DNA, 120 bp, synthetic construct
  source 1..120: mol_type = other DNA
taggcgcagtggctcacgcctgtaatcccagcagtttgggaggccaaggcggacggatcatgaggtcaggagatccagaccatcctggctaacacggtgaaaccccgtctctactaaaaa

SEQ ID NO: 51694 - DNA, 120 bp, synthetic construct
  source 1..120: mol_type = other DNA
gcttctaacccagtggtcattccttgaccctatccctgcagatcccctagtcccagctgccccaaaagaagggaaaagaatcaataagtgttatgttaaagaaaacagagatgaagataa

SEQ ID NO: 51695 - DNA, 120 bp, synthetic construct
  source 1..120: mol_type = other DNA
cctgctattgcagttcagaagggacaagaagtatgtgtctgattgtgaagagatgaatgtcgagaagaattcaactccattccatataaatgaattaaatgtctggacagacctgccaga

SEQ ID NO: 51696 - DNA, 120 bp, synthetic construct
  source 1..120: mol_type = other DNA
taacatatctgtcaagagctgtgaggagtctgagatttcaccctacttgcaagctaacaatttagcttgccacagattaatggatgctgatagaaaacacaaaatttccgggtcagagtt

SEQ ID NO: 51697 - DNA, 120 bp, synthetic construct
  source 1..120: mol_type = other DNA
ccagccaagcaagtaataagttaaaacaaagatgattcattttctataaactaatgcttcagtaaggaaacacagatcttcagtactgactgtgcctttatggtatgtgtgttttcctga

SEQ ID NO: 51698 - DNA, 120 bp, synthetic construct; identical to SEQ ID NO: 51464
  source 1..120: mol_type = other DNA

SEQ ID NO: 51699 - DNA, 120 bp, synthetic construct; identical to SEQ ID NO: 51465
  source 1..120: mol_type = other DNA

SEQ ID NO: 51700 - DNA, 120 bp, synthetic construct
  source 1..120: mol_type = other DNA
ctttatttaaggcaaagtagagccataagtttgggaggttgcaaagaaagctaaaagggagaaatgttgagtcaactttttaacttttttttcttctttttttttttttttcgagacaga

SEQ ID NO: 51701 - DNA, 120 bp, synthetic construct
  source 1..120: mol_type = other DNA
gatactgagtcatactatccacgacagtagtgagtcaatccatttatttggctgtccttaattctcttgaataagttttgtaattttttccataaaagtactgcagttattccacagaac

SEQ ID NO: 51702 - DNA, 120 bp, synthetic construct
  source 1..120: mol_type = other DNA
tttcacctgtgttagccaggatggtctcgatcttctgaccttgtgatctgcccgcctcggcctcccaaagtgctgggattacaggcgtgagccacggcgccctgccacttctttatatat

SEQ ID NO: 51703 - DNA, 120 bp, synthetic construct; identical to SEQ ID NO: 1802
  source 1..120: mol_type = other DNA

SEQ ID NO: 51704 - DNA, 120 bp, synthetic construct; identical to SEQ ID NO: 1803
  source 1..120: mol_type = other DNA

SEQ ID NO: 51705 - DNA, 120 bp, synthetic construct; identical to SEQ ID NO: 32265
  source 1..120: mol_type = other DNA

SEQ ID NO: 51706 - DNA, 120 bp, synthetic construct
  source 1..120: mol_type = other DNA
taaataccagagtaatttgcacactaaagataaaatctatttgaaattatgaaatgttcattgagaaagtttaatattatacaaagacattgatttatctcatcccatctttttgctaac

SEQ ID NO: 51707 - DNA, 120 bp, synthetic construct
  source 1..120: mol_type = other DNA
aaatttacatctaaatctcccatattccccataaagtagtaaaaatgtatttttttagaaacagtaacaaaaagatgtaagtgggtgaacttctagactgataaaagatcttgtagactt

SEQ ID NO: 51708 - DNA, 120 bp, synthetic construct
  source 1..120: mol_type = other DNA
cagtgagccgagattgtgccactgcactccagccagggcgacagagtgagactccatctccaaaacaataacaacaacaaaaaacctttttaacacaaaagaaaactaaaataatttgtc

SEQ ID NO: 51709 - DNA, 120 bp, synthetic construct
  source 1..120: mol_type = other DNA
cctaaagctgcagagacaactgaaaacagcatcacggctaatggtgccaaagcagatggtggagtctggtaaaagcacttaaaatgtaactgactaattgatggatactgagcaaggaca

SEQ ID NO: 51710 - DNA, 120 bp, synthetic construct
  source 1..120: mol_type = other DNA
cagctactggggaggctgaggcgggagaatggcgtgaacccgggagacggagcttgcagtcagctgagatggcgccactgcactccagcctgggctacagagcgagactctctcaaaaaa

SEQ ID NO: 51711 - DNA, 120 bp, synthetic construct; identical to SEQ ID NO: 51478
  source 1..120: mol_type = other DNA

SEQ ID NO: 51712 - DNA, 120 bp, synthetic construct; identical to SEQ ID NO: 1789
  source 1..120: mol_type = other DNA

SEQ ID NO: 51713 - DNA, 120 bp, synthetic construct
  source 1..120: mol_type = other DNA
aaatgatgagttaatgggtgcagcacaccattaacatatggatacatatgtaacaaacctgcatgttgtgcacatgtaccctagaaattaaggtatgataataataaaataaaagactga

SEQ ID NO: 51714 - DNA, 120 bp, synthetic construct
  source 1..120: mol_type = other DNA
accaattttccacaatctgttgcagaaaatagaagcagagtgactatttcttaactcattccatgggccagcattaccctaatacccaaaccagcaaaaccttacaaaaaagtaaactgc

SEQ ID NO: 51715 - DNA, 120 bp, synthetic construct; identical to SEQ ID NO: 32274
  source 1..120: mol_type = other DNA

SEQ ID NO: 51716 - DNA, 120 bp, synthetic construct; identical to SEQ ID NO: 1804
  source 1..120: mol_type = other DNA

SEQ ID NO: 51717 - DNA, 120 bp, synthetic construct; identical to SEQ ID NO: 32275
  source 1..120: mol_type = other DNA

SEQ ID NO: 51718 - DNA, 120 bp, synthetic construct
  source 1..120: mol_type = other DNA
aaaaaaacccatagaaatggagaacatactagtggttattaacgagcaataggaggaattcttttttttttttttttttttttgagatggaacggagtcttgctctgtcgcccaggctgg

SEQ ID NO: 51719 - DNA, 120 bp, synthetic construct; identical to SEQ ID NO: 32276
  source 1..120: mol_type = other DNA

SEQ ID NO: 51720 - DNA, 120 bp, synthetic construct
  source 1..120: mol_type = other DNA
ttaatctaaagggaggaaacaaaggttccaagtagatttagaggaagactttgagaagagtaaggaggttaccggttcccactggtcttcatgaagaactgttagacccagcctgcccta

SEQ ID NO: 51721 - DNA, 120 bp, synthetic construct
  source 1..120: mol_type = other DNA
agttgttaaaaccatttttttatatcaacacaagcatggggccaaactgttactacctggacctttatctttttaaactcatctgcattttcctcatctgtatgtgcctctatttctttc

SEQ ID NO: 51722 - DNA, 120 bp, synthetic construct
  source 1..120: mol_type = other DNA
tcacaagtagctgggactacaggcacacaccaccacacctggctaatttttgtattttttggtagagacgggggtttcaccatgttggccaggctggtcttgaactcccaacctcaggtg

SEQ ID NO: 51723 - DNA, 120 bp, synthetic construct
  source 1..120: mol_type = other DNA
ttataaattaaaaatgcattttaatacatgtgacctactgaacctagctcaaaccagcctaacttaaatgtgctcagaacacttaaatcagcccacagttgggcaaaatcatctaacaca

SEQ ID NO: 51724 - DNA, 120 bp, synthetic construct
  source 1..120: mol_type = other DNA
aatcccagcactttgggaggctgaggtgggtggatcacctgagttcgggagttgaagaccagcctgaccaacatggagaaaccctgtctgtactaaaaatacaaaaattagccaggcatg

SEQ ID NO: 51725 - DNA, 120 bp, synthetic construct
  source 1..120: mol_type = other DNA
gatggtctcgatctcctgacctcgtgatccgcctgcctcagcctcccacagtgctgggattacaggcgtgagccaccgtctgtttttaatgcttgctctgtctcttcaaagtgtgttttt

SEQ ID NO: 51726 - DNA, 120 bp, synthetic construct; identical to SEQ ID NO: 51494
  source 1..120: mol_type = other DNA

SEQ ID NO: 51727 - DNA, 120 bp, synthetic construct
  source 1..120: mol_type = other DNA
gtgcaatcttctataatcaagctgtgttcatttctttttttcctttttttttttttttgagatgcagtcttgctctgtcgtcaggctggagtgcaatggcgcaaccttggctcactgcaa

SEQ ID NO: 51728 - DNA, 120 bp, synthetic construct; identical to SEQ ID NO: 51496
  source 1..120: mol_type = other DNA

SEQ ID NO: 51729 - DNA, 120 bp, synthetic construct
  source 1..120: mol_type = other DNA
gactaggtttggaatggagacaaatattgaggaaagtgactagaacttgtgctttatgtgaactgtttggctttttaaatgataatgtatacatgtattaatgtatagtatatattaatt

SEQ ID NO: 51730 - DNA, 120 bp, synthetic construct
  source 1..120: mol_type = other DNA
gcggaacttgcagtgagctgagatcatgacactgggctccagcctgggcgacagagcaagactccgtctcaaaaaacaaaaaacaaacaaacaaaaaaaagaaaatgtgtcacagcttta

SEQ ID NO: 51731 - DNA, 120 bp, synthetic construct; identical to SEQ ID NO: 51498
  source 1..120: mol_type = other DNA

SEQ ID NO: 51732 - DNA, 120 bp, synthetic construct; identical to SEQ ID NO: 51499
  source 1..120: mol_type = other DNA

SEQ ID NO: 51733 - DNA, 120 bp, synthetic construct; identical to SEQ ID NO: 51500
  source 1..120: mol_type = other DNA

SEQ ID NO: 51734 - DNA, 120 bp, synthetic construct
  source 1..120: mol_type = other DNA
ggctaacacggtgaaaccccgtctttactaaaaatacaaaaaattagccaggtgtggtggcgggcgcctgtagttccagctactcgggaggccgaggcatgagaatggcatgaacccagg

SEQ ID NO: 51735 - DNA, 120 bp, synthetic construct; identical to SEQ ID NO: 51502
  source 1..120: mol_type = other DNA

SEQ ID NO: 51736 - DNA, 120 bp, synthetic construct; identical to SEQ ID NO: 51503
  source 1..120: mol_type = other DNA

SEQ ID NO: 51737 - DNA, 120 bp, synthetic construct; identical to SEQ ID NO: 51504
  source 1..120: mol_type = other DNA

SEQ ID NO: 51738 - DNA, 120 bp, synthetic construct; identical to SEQ ID NO: 1805
  source 1..120: mol_type = other DNA

SEQ ID NO: 51739 - DNA, 120 bp, synthetic construct; identical to SEQ ID NO: 51506
  source 1..120: mol_type = other DNA

SEQ ID NO: 51740 - DNA, 120 bp, synthetic construct
  source 1..120: mol_type = other DNA
tctcatgctgtcacccaggctgcagtgcagtggtgtgatctctgctcactgcaagctccaccacccaggttcacagcattctcctgcctcagcctcccgagtggctgggactacagacac

SEQ ID NO: 51741 - DNA, 120 bp, synthetic construct; identical to SEQ ID NO: 51508
  source 1..120: mol_type = other DNA

SEQ ID NO: 51742 - DNA, 120 bp, synthetic construct
  source 1..120: mol_type = other DNA
gtgcacaacatcatgcagaagcgcggcttccgggaaggctggggcctcggggagcacctgcaggggcttcgagacgcctttccggtggggaagactagcaaatcaggcggcaagatcatc

SEQ ID NO: 51743 - DNA, 120 bp, synthetic construct; identical to SEQ ID NO: 1806
  source 1..120: mol_type = other DNA

SEQ ID NO: 51744 - DNA, 120 bp, synthetic construct; identical to SEQ ID NO: 1807
  source 1..120: mol_type = other DNA

SEQ ID NO: 51745 - DNA, 120 bp, synthetic construct; identical to SEQ ID NO: 1808
  source 1..120: mol_type = other DNA

SEQ ID NO: 51746 - DNA, 120 bp, synthetic construct
  source 1..120: mol_type = other DNA
aggaacccagtaaacagctctggccttgcaggtgtaacactttaggcctctgtcttcctgaggcgttgttcctgcatgttgtcccagcgtcttccctctctgtgtgtctctgcacctcca

SEQ ID NO: 51747 - DNA, 120 bp, synthetic construct
  source 1..120: mol_type = other DNA
aatcaaggtgctcttgggctccttatgaaggccctagggcagaatgtgtgtccaagcacatacaggttagagcagaattcaacttcttgtagttgtaggagtgaggtcccaattcatcac

SEQ ID NO: 51748 - DNA, 120 bp, synthetic construct
  source 1..120: mol_type = other DNA
cacagatgacatacaaatggaaaaacattccataatcatggataggaataataaatatggtttttaaccatattgggccatactgcccaaagcaatttatagattcaatgctattcctat

SEQ ID NO: 51749 - DNA, 120 bp, synthetic construct
  source 1..120: mol_type = other DNA
cctaccccattaaaaaacgggcaaaggacgtgaacagacacttttcaaaagaagacatacatgtggccaacaagcataagaaaaactcctcagcatcactagtcatgagataaatgcata

SEQ ID NO: 51750 - DNA, 120 bp, synthetic construct; identical to SEQ ID NO: 1809
  source 1..120: mol_type = other DNA

SEQ ID NO: 51751 - DNA, 120 bp, synthetic construct; identical to SEQ ID NO: 1810
  source 1..120: mol_type = other DNA

SEQ ID NO: 51752 - DNA, 120 bp, synthetic construct
  source 1..120: mol_type = other DNA
ttggattcacaggagcattctagaatacatagcagggttttgctgttattcctagtggttcttttaatttaaaaaaatccaaacttcctttataatcaaaagatccacttgtttccattt

SEQ ID NO: 51753 - DNA, 120 bp, synthetic construct
  source 1..120: mol_type = other DNA
tggctagagataaattatttcttagtatcaacttggtttaaatttgactagagactcaaaatgcaaagcaataaagataaaaagtggttccactgccagtgtcattcagttgccttctct

SEQ ID NO: 51754 - DNA, 120 bp, synthetic construct
  source 1..120: mol_type = other DNA
aaatctttaacatatattcgtgtgtttctgaattaacaaattatgattatagatataattatactgtcttttaaaagttattattcgctgggcatggtggctcatgcctgtaatcccagc

SEQ ID NO: 51755 - DNA, 120 bp, synthetic construct
  source 1..120: mol_type = other DNA
aatctggaggattatatgattctgcaggtttctgtgccttttaccttctttgaattttttttttttttttttttttttttttgagatggagtctcgctctgtcacccaggctggagtgca

SEQ ID NO: 51756 - DNA, 120 bp, synthetic construct
  source 1..120: mol_type = other DNA
acgggattgtaaaccatcatcttggactagttactttacagctgtgtagtgacagaagttaacttgcagaacattgataataatgcaaataatgcttgtccatagagatgcaaagtgtgt

SEQ ID NO: 51757 - DNA, 120 bp, synthetic construct
  source 1..120: mol_type = other DNA
acatagattctaacacccaggacttgcctgattgttccagaagtactgagataaggccccgccctctgaatttcttcacgggtcttgaaatcgtgcttttataccacaacatttaatagc

SEQ ID NO: 51758 - DNA, 120 bp, synthetic construct
  source 1..120: mol_type = other DNA
gaggaggaggacaggagaggaatgtgcctctaggtattgtctgttccatgaggtcctgaccctagttctttgggatggaggctggtatatgtttgtcaggaaatggagctcaaggatatt

SEQ ID NO: 51759 - DNA, 120 bp, synthetic construct
  source 1..120: mol_type = other DNA
ggttttcagatctaatagttatatgcaatgtttgcatatagtatttttagcatgaaaacattgatgtttttatatagtcaattatgtctatattgtattttacagcttctgagtttccaa

SEQ ID NO: 51760 - DNA, 120 bp, synthetic construct
  source 1..120: mol_type = other DNA
ggaaaacacttttcatgacaagaaaacatttgcagaagaaaatttaaaaaagaaaacatttgctgtaacgaactaaataccaaaagcttacaactaattggcgctgatccgtagtacaca

SEQ ID NO: 51761 - DNA, 120 bp, synthetic construct
  source 1..120: mol_type = other DNA
gacacggatgcccattggccaaacccatctttgtatctgtatctgagtaacgcatctccaacaaagccaacttcaataaccaggtcttttttctttttcctgttgagcagcacttaaatg

SEQ ID NO: 51762 - DNA, 120 bp, synthetic construct
  source 1..120: mol_type = other DNA
tttataactttttatgcataataaaaattactatattaggctgggtaaggtggctcatgcctgtaatcccagcattttgggaggccgaggcgagtgtatcgtctgaggtcaggagtttga

SEQ ID NO: 51763 - DNA, 120 bp, synthetic construct
  source 1..120: mol_type = other DNA
ggcgtaagctgcagtaagctgagattgcgccgctgcactccaacctgggagacaagagagagactctgtctcaaaaaaataaataaataaataaaactaaattactatattacatgggca

SEQ ID NO: 51764 - DNA, 120 bp, synthetic construct
  source 1..120: mol_type = other DNA
cttcagtttaatattatatgccaaagccacttatgccagtaaatatcacagtttttctggtttgttctgatccttcatacactttaaggtgtcctgtgaaggactggaagaatagatgct

SEQ ID NO: 51765 - DNA, 120 bp, synthetic construct
  source 1..120: mol_type = other DNA
gagcatcacagtttgcatccaactttccatcttacagagttgttttctcactttctccctatcttgaacacaataaccttaccctgtttttatttttttaagttcaattctacactttgt

SEQ ID NO: 51766 - DNA, 120 bp, synthetic construct
  source 1..120: mol_type = other DNA
ccattcactgaaggaaacaactgacaataatatattttctggtggcatcaggagttgatatatgtaatacccactgttagatttttctaacattttctcaaacttcatcatctagaaatg

SEQ ID NO: 51767 - DNA, 120 bp, synthetic construct
  source 1..120: mol_type = other DNA
aaagtaaaaagaaaaataagcaattgtcctttgaaaaatatatttatttaataaatgaagatgcatgaaaacctagtgaaatatgaaactatttgaagctgactagctgatgtcattcaa

SEQ ID NO: 51768 - DNA, 120 bp, synthetic construct
  source 1..120: mol_type = other DNA
actttctaaaaatcataaaacattctatgatttatgaagtcaatacataaaaatatgaaacaaaaaatgatgtttgggatggaaagcattgagttcaataagtcaacagtaacgagccca

SEQ ID NO: 51769 - DNA, 120 bp, synthetic construct
  source 1..120: mol_type = other DNA
agtctgtcaccattagatcaggagccacattttctagtacactagagtatatactgtgtgggcttgaatcctgactccatcctggaaaagttacatagcctctctctgcctcagtctact

SEQ ID NO: 51770 - DNA, 120 bp, synthetic construct
  source 1..120: mol_type = other DNA
acgtctctgaaaagctaagacataagtaattttgagttgctatttcctttatttccttaagccatattttaccttcacattttacttttattagaaacagagactcactccgttgcccat

SEQ ID NO: 51771 - DNA, 120 bp, synthetic construct
  source 1..120: mol_type = other DNA
aggcagaggttgcagtgagccaggattgctccactgcactccagcctgggcaacagagagagactccctctcaaaaaaacaacaacaaaacccacaattgccaatatggaaacatgaata

SEQ ID NO: 51772 - DNA, 120 bp, synthetic construct; identical to SEQ ID NO: 1811
  source 1..120: mol_type = other DNA

SEQ ID NO: 51773 - DNA, 120 bp, synthetic construct
  source 1..120: mol_type = other DNA
ttgaagcactggtcaactcccaaggagcaatgggcaagagacaaggtggccaagcagaaagtgacaggacagctatgaggctgggtcacgaagcaggggtctctgtagactcatcataat

SEQ ID NO: 51774 - DNA, 120 bp, synthetic construct
  source 1..120: mol_type = other DNA
aaacaaaagctatatgacaatttattaccagtagaactgggctaagacaaatattaaaaggagtctttctagctgaaagaatttgattcagaaagagcatgaaaatgcagagaaagtaaa

SEQ ID NO: 51775 - DNA, 120 bp, synthetic construct
  source 1..120: mol_type = other DNA
ggcaaggaacaggtgcagaattggtgccagtgatgcaaactagcacagcgtgtatatataaaagtgataaaacaattaaaggaactttacagaggtaggtagttctaacttcattagaac

SEQ ID NO: 51776 - DNA, 120 bp, synthetic construct
  source 1..120: mol_type = other DNA
aacactagcatggagtggaatgtaagcccttaaaatctgcactagcggactgggaattaaagagatggaaaggatactaaccacttgagaaaacaacaagaagaggactgttctattttt

SEQ ID NO: 51777 - DNA, 120 bp, synthetic construct
  source 1..120: mol_type = other DNA
atcatttaaactaagatccaaaagaggaagagtaaatagccagtcaagaacatagggaaggagcatttcaagcaggggagaccacaggcgtaaaggctttgagtcagtaaaaagctggat

SEQ ID NO: 51778 - DNA, 120 bp, synthetic construct
  source 1..120: mol_type = other DNA
caaaggaaaatgagcagatagacaactgagttttaagtgctcacagggccagtgaagagaggttggtaccagaggttggaactcctcagagtaggttgcggatacgtatttggaagttat

SEQ ID NO: 51779 - DNA, 120 bp, synthetic construct
  source 1..120: mol_type = other DNA
ttagctagttagcagtggtcacatattatctgtctgcatgtttgggtttttttactagtagtcccttacagccaacagcatgtgtttacagaagttaacggtgccagcagattgcatggc

SEQ ID NO: 51780 - DNA, 120 bp, synthetic construct
  source 1..120: mol_type = other DNA
atctcacggccggctttttgtttgtgttatattcatgtcggccccatcctttccacttttataacaaagaataggtgagaaaagaggctaactaaacacaggttcccaccaagtgaagat

SEQ ID NO: 51781 - DNA, 120 bp, synthetic construct
  source 1..120: mol_type = other DNA
aatgactataaacatggcaacctctatgaagttcacttttctaaaatgctatcccacagattcctccctaatcaagtggtaaagatgctcacaaaaagccacatcacatggcagggcaat

SEQ ID NO: 51782 - DNA, 120 bp, synthetic construct
  source 1..120: mol_type = other DNA
cactccagcctgggcaacagaggtagactccgtcacaaaaaaaaaaaaaaaaaaagaatgtaccaggcttaacaacaaaacgaagagaataaagatcagcctgcctcatatccaaccacc

SEQ ID NO: 51783 - DNA, 120 bp, synthetic construct; identical to SEQ ID NO: 1812
  source 1..120: mol_type = other DNA

SEQ ID NO: 51784 - DNA, 120 bp, synthetic construct
  source 1..120: mol_type = other DNA
taagcacatgaccactacggacaaaagaatggcgaacacaaatacctattcctgctttgttttattaaggtggaaaaatgaaccttctagaaggataagccagcttttatagaaatatgc

SEQ ID NO: 51785 - DNA, 120 bp, synthetic construct; identical to SEQ ID NO: 1813
  source 1..120: mol_type = other DNA

SEQ ID NO: 51786 - DNA, 120 bp, synthetic construct
  source 1..120: mol_type = other DNA
ccattagaatacaatgtttatcaacacaaaatgagaaaagtgtgactttgccttattctagcattattaaatgaactgaagtaggaattaagaaatgtgggtgatggttccagctttttc

SEQ ID NO: 51787 - DNA, 120 bp, synthetic construct
  source 1..120: mol_type = other DNA
taaatgatcacattagttaaatgttaaaatacctttttagaaagcaggcaattcatctaacttgtcatttgacttggatctgggacaaatttcctgtgtgagatcgatcagcatgtcttc

SEQ ID NO: 51788 - DNA, 120 bp, synthetic construct
  source 1..120: mol_type = other DNA
atacgttctaagaaaaagccatctctacctataaaatactgcataagatgcaattgtatattcctgtgtgtctctcacacagatccatcaatgaacaatattgccagcattgggaataag

SEQ ID NO: 51789 - DNA, 120 bp, synthetic construct
  source 1..120: mol_type = other DNA
tctttacagcaaataccatgttttttgttttgttttgtttttttgcagcgagcaggaagaacccatcgggcagtgacacaatcagaagagctactgtggcttgtagaaagcctggcatat

SEQ ID NO: 51790 - DNA, 120 bp, synthetic construct
  source 1..120: mol_type = other DNA
agctcagtgacaggcttcgccttttctgaacaggcagggatctcctgactgcaattcccaaccaatccccaaaactggcaaacttgattttttttaattaagcaagcttaatttgtaaaa

SEQ ID NO: 51791 - DNA, 120 bp, synthetic construct
  source 1..120: mol_type = other DNA
ccaaaatcatttcacccagaatacagaatgggtgggaggcattagtttacacagcgagtccctttccaacaaatagctaggtgcatcaggagactagataaaagcatgtttcttttacaa

SEQ ID NO: 51792 - DNA, 120 bp, synthetic construct
  source 1..120: mol_type = other DNA
cagccagaggcaacacatcacacagcagccagtttatatcctcacgtgtgtagttatatgttgaaaaaatgctgcagagcacttctgcaaatttgtgtgaatcttcccagagcaatagaa

SEQ ID NO: 51793 - DNA, 120 bp, synthetic construct
  source 1..120: mol_type = other DNA
gaccatcctggctaacacggtgaaaccctgtctctactaaaagtacataaaaattagcagggcatggtggcaggcgcctgcagtcccagctactcaggaggccgaggcaggagaatgaca

SEQ ID NO: 51794 - DNA, 120 bp, synthetic construct
  source 1..120: mol_type = other DNA
tgctctggtgttaagttcctcagaattctttatcaggatctatggttgtcccaatagggcattagtacctatgattggtcacgtctttcaatattcctcagcaaggctacattgaacgca

SEQ ID NO: 51795 - DNA, 120 bp, synthetic construct
  source 1..120: mol_type = other DNA
gaacaagacctgtcttgagcaaatactccatttccccagtaatattactgcagttacaatctatctcgaatcactttaaattggcccaaatgccaattgctgaaaatttaatcatttccc

SEQ ID NO: 51796 - DNA, 120 bp, synthetic construct; identical to SEQ ID NO: 1814
  source 1..120: mol_type = other DNA

SEQ ID NO: 51797 - DNA, 120 bp, synthetic construct; identical to SEQ ID NO: 1815
  source 1..120: mol_type = other DNA

SEQ ID NO: 51798 - DNA, 120 bp, synthetic construct; identical to SEQ ID NO: 1816
  source 1..120: mol_type = other DNA

SEQ ID NO: 51799 - DNA, 120 bp, synthetic construct
  source 1..120: mol_type = other DNA
agccccgcctgcatgacgcctttttttctggttacaaatctcttagtagatttattcccccttacatacctttccaaagggattttatggccttcacagttacctttctgccatttaaca

SEQ ID NO: 51800 - DNA, 120 bp, synthetic construct
  source 1..120: mol_type = other DNA
cttcctataagaccaccgtcctacaggattagtgccctactcttatgaccttatttaaccttaattacctcctgaaaggccctgtcttcagatatagtcacattcagggttaaggcttca

SEQ ID NO: 51801 - DNA, 120 bp, synthetic construct
  source 1..120: mol_type = other DNA
cacggcatggctgactaacctaccatgttcgattttccaagcagcatgcctagcaaagaggttttaaatttacttctaaaatgatgctggctctactttggggtagtttaaaaaattata

SEQ ID NO: 51802 - DNA, 120 bp, synthetic construct
  source 1..120: mol_type = other DNA
tgtttatggaccatctctcaacattatcttctctcacggtatgctctgaacccccagtgcctagcacaatgcctggtaccttgtgggttataagatatgattaaactaaggttcgtaaaa

SEQ ID NO: 51803 - DNA, 120 bp, synthetic construct
  source 1..120: mol_type = other DNA
gtgccactatgcccagctaattttaattttttgttgttgttcttgagatgaggtcttgctatgttgccctggttggtctaaaactcctgacctcggagttcgagcccagcctggccaata

SEQ ID NO: 51804 - DNA, 120 bp, synthetic construct
  source 1..120: mol_type = other DNA
cagactgacacctcatacggcagggtgtccctctgagacgaagcttccataggaacgaccaggcagcaacatttgctgttctgcaatatttgcggttgtgcagcctctgctggtgatacc

SEQ ID NO: 51805 - DNA, 120 bp, synthetic construct
  source 1..120: mol_type = other DNA
gactaacagcggatctcttggcagaaactctacaagccagaagaggtgggggccaatattcaacattctgaaagaaaagaattttcaacccagaatttcataaccagccaaactaagctt

SEQ ID NO: 51806 - DNA, 120 bp, synthetic construct
  source 1..120: mol_type = other DNA
tcctcagcaaatgtaaaagtgcaatcaaactagaactcaggattaagaaactcactgaaaaccgctcaactgcatggaaactgaacaatctgctcctgaatgactactgggtacattgag

SEQ ID NO: 51807 - DNA, 120 bp, synthetic construct
  source 1..120: mol_type = other DNA
actggcaaaccaaatccagcaacacatcaaaaagcttatacatcatgatcaagtgggcctcatccctgggatgcaaggctgattcaacatacacaaatcaataaacataatccagcatat

SEQ ID NO: 51808 - DNA, 120 bp, synthetic construct
  source 1..120: mol_type = other DNA
catggtactggtaccaaaacagagatatagaccaatggaacagaacagagccctcaggaataatgccgcatatctacaaccatctgatctttgacatacctgacaaaaacaagaaatggg

SEQ ID NO: 51809 - DNA, 120 bp, synthetic construct
  source 1..120: mol_type = other DNA
cctcaaggatctagaaccagaaataccatttgacccagtcatcccattactgggtatatacccagaggattataaatcatgctgctataaagacacatgcacgtgtgtttattgcgacac

SEQ ID NO: 51810 - DNA, 120 bp, synthetic construct; identical to SEQ ID NO: 1817
  source 1..120: mol_type = other DNA

SEQ ID NO: 51811 - DNA, 120 bp, synthetic construct; identical to SEQ ID NO: 1818
  source 1..120: mol_type = other DNA

SEQ ID NO: 51812 - DNA, 120 bp, synthetic construct
  source 1..120: mol_type = other DNA
ctgggctaggaaacaaggagcgcacaggctggggcccagagagtttacacgactcctgaggacaaccgactcagacggggtccgaagaaattcagatcggtgaatgggtgaaccacacag

SEQ ID NO: 51813 - DNA, 120 bp, synthetic construct
  source 1..120: mol_type = other DNA
tggcaaatcctcaaaagattaaaaatagaactatcatatgatccagcaatcttactttcgggtatatacacccccccaatataaaatgaagatgttaaagaaatattggctctcctatgt

SEQ ID NO: 51814 - DNA, 120 bp, synthetic construct
  source 1..120: mol_type = other DNA
atgaagcaaggttgaaagaaaataaggaagacaaggttttgtttttgtttcttgggtcttgctctaataaattcacaaaggagtttgaaaggtgatagcagctgggtgtttcatagccaa

SEQ ID NO: 51815 - DNA, 120 bp, synthetic construct
  source 1..120: mol_type = other DNA
caatcagacttctccgtattatttggcatcgctgcagggttcagactttgaatgaaggtagaaaattagccttcagcatacaaagtaaaatgtcaataataagaagtaagtggttactaa

SEQ ID NO: 51816 - DNA, 120 bp, synthetic construct
  source 1..120: mol_type = other DNA
ctcatccctatcatccccggacatgtcttcaaatcgtatgccgttgatcctcagatcaatctgtccttttctgggctctctacactcccatccgcccatgcactccccactactcttctt

SEQ ID NO: 51817 - DNA, 120 bp, synthetic construct
  source 1..120: mol_type = other DNA
ctctatcccaaagccacaatatgaacatccttgaggaataccaataagatcctttgacttcaagttccctgatgcaaatgagctccagctgcttcacttcagcctcattcccacggccaa

SEQ ID NO: 51818 - DNA, 120 bp, synthetic construct
  source 1..120: mol_type = other DNA
tgatccttcatcactcatatcacagagcttgaatcttctgaacatcaagtagataagaaacagctataaactccctttcagaaatttaaaataaagcgtatataattagctattttcctc

SEQ ID NO: 51819 - DNA, 120 bp, synthetic construct
  source 1..120: mol_type = other DNA
tgatcctacaggacctctggcaaccagaagctccaaacaatgcccaaagcaggtaacatgaaaaaagatttgggaaggataagaaatgcatattcctgaacctgaactcagaggtagcta

SEQ ID NO: 51820 - DNA, 120 bp, synthetic construct; identical to SEQ ID NO: 1819
  source 1..120: mol_type = other DNA

SEQ ID NO: 51821 - DNA, 120 bp, synthetic construct; identical to SEQ ID NO: 1820
  source 1..120: mol_type = other DNA

SEQ ID NO: 51822 - DNA, 120 bp, synthetic construct
  source 1..120: mol_type = other DNA
tgcagctgcccctgtggaaaactggtgttgccctccctttagttttgctgcagaaatgggtgattttaaacctgaaagtcaaagtatatttattagcttgatcatatgaaattgctgttt

SEQ ID NO: 51823 - DNA, 120 bp, synthetic construct
  source 1..120: mol_type = other DNA
atacatatattcattgtgggaatttcaaatgggagaatatcttaccttattctttgattttagaaaaatatcttgaagttcattcacagcaagtatgtttacctcattatttctcaaggc

SEQ ID NO: 51824 - DNA, 120 bp, synthetic construct
  source 1..120: mol_type = other DNA
tattattattatttgagacggagtcttgctctgtcgcccaggctggagtgcagtggcgcaatcttggctcactgcaagctccacctcccgggttcacagcattctccttcctcagcctcc

SEQ ID NO: 51825 - DNA, 120 bp, synthetic construct
  source 1..120: mol_type = other DNA
gtctgctctcaaactcctgacctcaggtgatctgcccaactcagcctctcaaagtgctggaattacaggcctgagccaccgcatccagcctctaggtatttttctaattggtaagactaa

SEQ ID NO: 51826 - DNA, 120 bp, synthetic construct
  source 1..120: mol_type = other DNA
catatatctttcttgagaaatgtcttttcaggtcttttgcccatttttaaaaagcacagttatttgttttcttgctattgagatgtttgagttgcctatgtattttaaatattaacccct

SEQ ID NO: 51827 - DNA, 120 bp, synthetic construct
  source 1..120: mol_type = other DNA
tattcgtaagtatcttattggattattttcttgatttctttttcagacacttcattattagtatatagaccacataactgatttttctgttgatgttgtactgtaactttattgaattta

SEQ ID NO: 51828 - DNA, 120 bp, synthetic construct
  source 1..120: mol_type = other DNA
atagagtttttgcatttatgctcatgaggatattggcctataattgtctttttttgtagtgtactttctgagtttggtatcaggataatgctggttttataaaatgagtttgaaagtatt

SEQ ID NO: 51829 - DNA, 120 bp, synthetic construct
  source 1..120: mol_type = other DNA
cagcaggcgagcaccatgcccagctaatttttgtattttagaagagatggggtttcatcatgttgtccagaatggtctcgatctcctgatcttgtgatctgcccaccttggcctcccaaa

SEQ ID NO: 51830 - DNA, 120 bp, synthetic construct; identical to SEQ ID NO: 1821
  source 1..120: mol_type = other DNA

SEQ ID NO: 51831 - DNA, 120 bp, synthetic construct; identical to SEQ ID NO: 1822
  source 1..120: mol_type = other DNA

SEQ ID NO: 51832 - DNA, 120 bp, synthetic construct; identical to SEQ ID NO: 1823
  source 1..120: mol_type = other DNA

SEQ ID NO: 51833 - DNA, 120 bp, synthetic construct; identical to SEQ ID NO: 1824
  source 1..120: mol_type = other DNA

SEQ ID NO: 51834 - DNA, 120 bp, synthetic construct
  source 1..120: mol_type = other DNA
aaattagagaggattaatatctttacattactgagtcttcatatccataaatgagaatttacgcagatctctttatatacctcatagtaatgttttaaccttttcttttcccatgtagct

SEQ ID NO: 51835 - DNA, 120 bp, synthetic construct; identical to SEQ ID NO: 1825
  source 1..120: mol_type = other DNA

SEQ ID NO: 51836 - DNA, 120 bp, synthetic construct
  source 1..120: mol_type = other DNA
gaggatactgcttgaaacaaaactgcttagaccagcacacttctctgatttgtcaatgtcactgatttaaaaatgaaagttaataccttttaagatatctgtacaattctagggcagctg

SEQ ID NO: 51837 - DNA, 120 bp, synthetic construct
  source 1..120: mol_type = other DNA
taataaaaccttcagaataaaggttttattattaaaactcagacccaattaaaattttacaaatgagaaagctagaactttgagaagttagattacccaactttacatagtttataactg

SEQ ID NO: 51838 - DNA, 120 bp, synthetic construct
  source 1..120: mol_type = other DNA
gtgtgtatataaatatatatatataaaaaattagaattaagtgagaatgtttcataaggacaaatacaccactaagtctctcactcctttgctattgtagaaatggagttaggaaacaag

SEQ ID NO: 51839 - DNA, 120 bp, synthetic construct
  source 1..120: mol_type = other DNA
ccgagtcagtccagacagctgctgcctctgggctcagtgctgatgggcagatctccaacctctgaccttccttctgcctcctccgttagttccactcacatttgctccagtcaggcccgg

SEQ ID NO: 51840 - DNA, 120 bp, synthetic construct
  source 1..120: mol_type = other DNA
cagaagcaagatgggatgtgaagctgtggcaatggtccaggtaagagatggtgggcaactgggctgtcatggtaataacagaggtgagggaaagttgtcagactccacatatactctgaa

SEQ ID NO: 51841 - DNA, 120 bp, synthetic construct
  source 1..120: mol_type = other DNA
tctagttttcttgggtatttctcaacacaaactcagtctagcccttgaagcgtcaatgtgaagcatgtaattagtaagaatgtggattgatatattaatccattcagataatcaaatgtc

SEQ ID NO: 51842 - DNA, 120 bp, synthetic construct
  source 1..120: mol_type = other DNA
ccagtggcagggaaggggcgtggggggctggggaggagatggggatagttattgggcacaaaaaaatagtaagaatgaataagacctaggatttgatagcacaacaaggtgactatagtc

SEQ ID NO: 51843 - DNA, 120 bp, synthetic construct
  source 1..120: mol_type = other DNA
atttcattgctttagtccaaaacaagtccaagagatgtgcagagccaggaaggatcattttcagtgtggttgttcaaaaaaggcatcctgggagaggatgaatttccctcattcattcag

SEQ ID NO: 51844 - DNA, 120 bp, synthetic construct; identical to SEQ ID NO: 1826
  source 1..120: mol_type = other DNA

SEQ ID NO: 51845 - DNA, 120 bp, synthetic construct; identical to SEQ ID NO: 1827
  source 1..120: mol_type = other DNA

SEQ ID NO: 51846 - DNA, 120 bp, synthetic construct
  source 1..120: mol_type = other DNA
cgctcatccaccttggacaaggaaaaggagactgttgggtattgaagaagatgcatgcagagcagaaaatttgctctttttgctctgaccaatgccacatctgaaacaaaaacataggca

SEQ ID NO: 51847 - DNA, 120 bp, synthetic construct; identical to SEQ ID NO: 51598
  source 1..120: mol_type = other DNA

SEQ ID NO: 51848 - DNA, 120 bp, synthetic construct
  source 1..120: mol_type = other DNA
gctgggattacaggcatgaggcactgggcccagcctattttatggttgttttaaaagagttgggagaaggtgaaggagatgctaacagccaacccatcatcttaggctggatgttgtaca

SEQ ID NO: 51849 - DNA, 120 bp, synthetic construct
  source 1..120: mol_type = other DNA
caagactgtaaggaagacaatgggataactgaaactacagcactttgtaactaaattattattcaaatgtgatgttatactcaatttttgttgtctttaaattaaaacaaatgaaagtct

SEQ ID NO: 51850 - DNA, 120 bp, synthetic construct
  source 1..120: mol_type = other DNA
tgtacagttatatctgtgttataattctgcatttacatcaggtcaaagttacatttcactatctggggcagggggctctgcaaaagaaaagtagaaaccctacagctggagcctgaattg

SEQ ID NO: 51851 - DNA, 120 bp, synthetic construct
  source 1..120: mol_type = other DNA
agtctttttcaactatgctgttttaaagtaaaaaatacagaaaccctccctcagaatctgtctttgtgtacatgttctatttcagcagtatttccttcaatcttagcaggttgaagcaga

SEQ ID NO: 51852 - DNA, 120 bp, synthetic construct
  source 1..120: mol_type = other DNA
ttttcaagttcatttggaacttttaccaaaatagaccattaaacgagtcattaaacaagtttcaacaaagttaaaatcatttaagtcatgtaaagtatatctttgtgatatacaatagat

SEQ ID NO: 51853 - DNA, 120 bp, synthetic construct
  source 1..120: mol_type = other DNA
atgggtgatgtgcaaatggggcatatgcggagagggctggaatggagtcagggcaccctgaggctgatggcacgcctctcattgtgttccatttcccacagatagtgtgtttactttctt

SEQ ID NO: 51854 - DNA, 120 bp, synthetic construct
  source 1..120: mol_type = other DNA
ccacaatcaagaaagagaatgacttcactaccacgacaatcctcctcattggtaccctttacagttatacatagcaaccactaatttgttttctatctctataatttcctcaattcctca

SEQ ID NO: 51855 - DNA, 120 bp, synthetic construct
  source 1..120: mol_type = other DNA
atttttttttacattttacaacaggcggagtctcgctctgttgcccaggccaagattcaatgcaatctcagctcactgcaacctccacctcccaggttcaagcgattctcctgcctcagc

SEQ ID NO: 51856 - DNA, 120 bp, synthetic construct; identical to SEQ ID NO: 51607
  source 1..120: mol_type = other DNA

SEQ ID NO: 51857 - DNA, 120 bp, synthetic construct; identical to SEQ ID NO: 51608
  source 1..120: mol_type = other DNA

SEQ ID NO: 51858 - DNA, 120 bp, synthetic construct; identical to SEQ ID NO: 1828
  source 1..120: mol_type = other DNA

SEQ ID NO: 51859 - DNA, 120 bp, synthetic construct; identical to SEQ ID NO: 1829
  source 1..120: mol_type = other DNA

SEQ ID NO: 51860 - DNA, 120 bp, synthetic construct; identical to SEQ ID NO: 1830
  source 1..120: mol_type = other DNA

SEQ ID NO: 51861 - DNA, 120 bp, synthetic construct
  source 1..120: mol_type = other DNA
gggaacaattctaaaactactcatcagctgattgcgactccttataaaattaatttaaacgcaccaaaagccatattgcatttatactatagaaggtaaaactggtacagccatttcata

SEQ ID NO: 51862 - DNA, 120 bp, synthetic construct; identical to SEQ ID NO: 1831
  source 1..120: mol_type = other DNA

SEQ ID NO: 51863 - DNA, 120 bp, synthetic construct
  source 1..120: mol_type = other DNA
agagaagaggggaaaagaaaaaaagagggaaggaaaaaagcaaggaaggaaggaaggagaaggaggaggaagggagggagggagggagggaagacagagaaagaaaaaagaaaaaaaaga

SEQ ID NO: 51864 - DNA, 120 bp, synthetic construct; identical to SEQ ID NO: 51615
  source 1..120: mol_type = other DNA

SEQ ID NO: 51865 - DNA, 120 bp, synthetic construct
  source 1..120: mol_type = other DNA
tttctggctgacttacgccaggactcacagaatgattcatccctacatgaaaaagtattttcaccagcctcaaaggttttcaggaattactagatcaaagaattgttaaagaaactttcc

SEQ ID NO: 51866 - DNA, 120 bp, synthetic construct; identical to SEQ ID NO: 1832
  source 1..120: mol_type = other DNA

SEQ ID NO: 51867 - DNA, 120 bp, synthetic construct; identical to SEQ ID NO: 1833
  source 1..120: mol_type = other DNA

SEQ ID NO: 51868 - DNA, 120 bp, synthetic construct
  source 1..120: mol_type = other DNA
ctaacgcatggttagttattgtacattcattttgcgactttaaaaaggagcaattgcagaggtgtcaagccacaaataacaatgctgtctaacttcgttagaccatgaaaacacatgggg

SEQ ID NO: 51869 - DNA, 120 bp, synthetic construct
  source 1..120: mol_type = other DNA
atcttagaaaggcatattcatatgacaaccagcataagaagcaaggaatctgaattacagaaaaataaactttaaactgaaactgctaatataataaatgcagaggagacacagggcagc

SEQ ID NO: 51870 - DNA, 120 bp, synthetic construct
  source 1..120: mol_type = other DNA
gctcacacctttgggaggccgaggtgggcataccacgaggtcaggacattgagaccatccgggccagcatggtgaaaccccttctctactaaaaatacaaaaattagcctggtgtggtgg

SEQ ID NO: 51871 - DNA, 120 bp, synthetic construct
  source 1..120: mol_type = other DNA
ggatatgaaaacactagagataatctatagccctcaataaatcactcccaatttggaactcctttgatgaatactccaggctaccacgagggagaagaaaaaagtcaaaaccaatttaaa

SEQ ID NO: 51872 - DNA, 120 bp, synthetic construct
  source 1..120: mol_type = other DNA
accgcactccagcctgggtgacagagcgagactccgtctcaaaaaaaaaaaaaagaacaagggcaataagaaaataggaaagcacaattatataaaatacagtagacacttttgaatctt

SEQ ID NO: 51873 - DNA, 120 bp, synthetic construct
  source 1..120: mol_type = other DNA
atgagagtcaccaaggagcaatacaaggaaaaaggcagactcaccatctcttcgattaagccttgaaaaccccgggccgtggctgctggacagctctgaggagctgctgaaggatgacct

SEQ ID NO: 51874 - DNA, 120 bp, synthetic construct
  source 1..120: mol_type = other DNA
tctattgcttcagctctggtctaaaagaattgctgggggttaagtagtgtttgacccagatcatcttatttgtcctaagaccataaggaccctcagagccttcttgcccctggtgttccc

SEQ ID NO: 51875 - DNA, 120 bp, synthetic construct
  source 1..120: mol_type = other DNA
aaatgtccccctcaatgtttatgccacaagagaggctttcttgatttccccagcacacatgctctctggataacactgtgcagtcgggattcccagatgtcagcaaatatgctacagagt

SEQ ID NO: 51876 - DNA, 120 bp, synthetic construct; identical to SEQ ID NO: 1834
  source 1..120: mol_type = other DNA

SEQ ID NO: 51877 - DNA, 120 bp, synthetic construct; identical to SEQ ID NO: 1835
  source 1..120: mol_type = other DNA

SEQ ID NO: 51878 - DNA, 120 bp, synthetic construct
  source 1..120: mol_type = other DNA
tttcaaaacagcatttcatttgagtatgttaattcttgcacttatttaataaaagtgtattgagcacctaccatgttcaaagcattatggggcataaagagagacatggttctaggttca

SEQ ID NO: 51879 - DNA, 120 bp, synthetic construct
  source 1..120: mol_type = other DNA
taaaggtgatgatgaacagagccccatacaaaagagaagagggtgtgaaaatggagtgaggcacccacaaggtgaggcacacgggcaaccacaggaagccggaagaaacgaagaatgcat

SEQ ID NO: 51880 - DNA, 120 bp, synthetic construct
  source 1..120: mol_type = other DNA
ttcatcttattatgaatctgaattgatctgtgcattgctatctagagggaatgcttcggaaaaagtacattttactcacagtgaacataagcagtgatggtcaatgtaaaaatctactgt

SEQ ID NO: 51881 - DNA, 120 bp, synthetic construct
  source 1..120: mol_type = other DNA
gaaattcaaatttcaggtcctggcattcaattccttccatcacctgttccccgttactctctgcactacagccgaatcccctacacatttctcagatgcgcttcctcctttaattggagt

SEQ ID NO: 51882 - DNA, 120 bp, synthetic construct
  source 1..120: mol_type = other DNA
tccacctgcctcaacctcccaaagtgctgggattacaggcgtgagccaccatgcccggtcaagtttacataaatttaagcatcttagtttgacgatctactctacagtcattacaacaat

SEQ ID NO: 51883 - DNA, 120 bp, synthetic construct
  source 1..120: mol_type = other DNA
ggagcatctgggagctgaagaaagagaacttcagtgatacttaagtaagggttaagagatgcactccaattgcattctgaagacagatcccaacaagaccaatgacatcagctagatttt

SEQ ID NO: 51884 - DNA, 120 bp, synthetic construct; identical to SEQ ID NO: 1836
  source 1..120: mol_type = other DNA

SEQ ID NO: 51885 - DNA, 120 bp, synthetic construct
  source 1..120: mol_type = other DNA
accatggcactagaactacatgacgcatgcacaagcttcagtagccaatccgatcaactggaagaaagggtatcagtgattgaggatcaaatgaatgaaatgaagcgagaaaagaagttt

SEQ ID NO: 51886 - DNA, 120 bp, synthetic construct
  source 1..120: mol_type = other DNA
atatcctaaatatatatgcacccagtacaggagcacccagactcataaagcaagtccttagaggtgtacaaacagacttagacttccacacaataataatgggagattttaacacaccac

SEQ ID NO: 51887 - DNA, 120 bp, synthetic construct
  source 1..120: mol_type = other DNA
actagcaagactaataaagaagaaaagagagaagaatcaaatagaaacaataaaaaatgacaaaggggatatcaccaccgatcccacagaaatacaaactaccatcagagaatactataa

SEQ ID NO: 51888 - DNA, 120 bp, synthetic construct
  source 1..120: mol_type = other DNA
gggcaatcaggcaggagaaggaaataaagggcattcaattaggaaaagaggaagtcaaattgtccctgtttgcagatgacatgattgtgtatttagaaaaccccatcgtctcagcccaaa

SEQ ID NO: 51889 - DNA, 120 bp, synthetic construct
  source 1..120: mol_type = other DNA
cctgacttcaaactatactacaaggctacagtaaccaaaacagcatggcactggtaccaaaacagagatatagaaaaacagaacagagccctcagaaataatgccacatatctacaacta

SEQ ID NO: 51890 - DNA, 120 bp, synthetic construct
  source 1..120: mol_type = other DNA
tgcaaggacaaaaaaccaaacaccgcatgttctcactcataggtgggaactgaacagcgagaacacatggacacaggaaggggaacactacacaacggggactgtcgcggggtgggggga

SEQ ID NO: 51891 - DNA, 120 bp, synthetic construct
  source 1..120: mol_type = other DNA
cttctctagaatgtgtcaactgtgatttatgaaataacatatgctatttttatattgcaatgtttgcttatctataggtaagagctcactatttcttatatcatgttataattatattca

SEQ ID NO: 51892 - DNA, 120 bp, synthetic construct
  source 1..120: mol_type = other DNA
acagcagttcaaattagctcaagaatcataaaccctatatttgaacagctatataatattatatatttattttcccatttgatgttgcattactttttctaccaatcttcttacaataaa

SEQ ID NO: 51893 - DNA, 120 bp, synthetic construct; identical to SEQ ID NO: 51640
  source 1..120: mol_type = other DNA

SEQ ID NO: 51894 - DNA, 120 bp, synthetic construct
  source 1..120: mol_type = other DNA
aaatacatttaaaacaaacaattccatgccttatatgtcaagtggaaaaggaatattttttctacagtgacagagcagacttgacatgtgcacagtcatgtacaaccaagcgtttgcaaa

SEQ ID NO: 51895 - DNA, 120 bp, synthetic construct; identical to SEQ ID NO: 1837
  source 1..120: mol_type = other DNA

SEQ ID NO: 51896 - DNA, 120 bp, synthetic construct; identical to SEQ ID NO: 1838
  source 1..120: mol_type = other DNA

SEQ ID NO: 51897 - DNA, 120 bp, synthetic construct; identical to SEQ ID NO: 1839
  source 1..120: mol_type = other DNA

SEQ ID NO: 51898 - DNA, 120 bp, synthetic construct; identical to SEQ ID NO: 32448
  source 1..120: mol_type = other DNA

SEQ ID NO: 51899 - DNA, 120 bp, synthetic construct; identical to SEQ ID NO: 32449
  source 1..120: mol_type = other DNA

SEQ ID NO: 51900 - DNA, 120 bp, synthetic construct; identical to SEQ ID NO: 32450
  source 1..120: mol_type = other DNA

SEQ ID NO: 51901 - DNA, 120 bp, synthetic construct
  source 1..120: mol_type = other DNA
tgcaccctgcactccagcttggcgacagagccagactccgtctcaagacaaaaaaaaaaaaaagtgaacttgggtgttcaaagtgttaggcttaatggagaaaggccaagaaacttctac

SEQ ID NO: 51902 - DNA, 120 bp, synthetic construct
  source 1..120: mol_type = other DNA
gcaatagcacatatttaggaagtgagtatatttatattggaacaaatgatgatactgaggtgtgtttgatgactagcttctggattataagaatgtaaatgtttgttaagacagactctt

SEQ ID NO: 51903 - DNA, 120 bp, synthetic construct; identical to SEQ ID NO: 32451
  source 1..120: mol_type = other DNA

SEQ ID NO: 51904 - DNA, 120 bp, synthetic construct
  source 1..120: mol_type = other DNA
tttataaatttttttgtgaaatgaatcagctagcctaaaatttaatccttccaaactacagtaggttaaaaaaaacaagtgaatggtaaacaagttgaaattttctttccagtttcttat

SEQ ID NO: 51905 - DNA, 120 bp, synthetic construct; identical to SEQ ID NO: 16966
  source 1..120: mol_type = other DNA

SEQ ID NO: 51906 - DNA, 120 bp, synthetic construct; identical to SEQ ID NO: 16967
  source 1..120: mol_type = other DNA

SEQ ID NO: 51907 - DNA, 120 bp, synthetic construct
  source 1..120: mol_type = other DNA
acctgcctcagcctcccagagtactaggaagacaggtgtgagccactgcacccagccttacctgctttcttaatattacaggttacatgattggtttcagcttatttatttattatctta

SEQ ID NO: 51908 - DNA, 120 bp, synthetic construct; identical to SEQ ID NO: 21417
  source 1..120: mol_type = other DNA

SEQ ID NO: 51909 - DNA, 120 bp, synthetic construct
  source 1..120: mol_type = other DNA
cgcttgaacccgggaggcagaggttgcagagagtcaaaattgtgccaccgcactccagcctgggcaaaaagaccaaacctccatctcaaaaaatatatatatatatattttttataatat

SEQ ID NO: 51910 - DNA, 120 bp, synthetic construct
  source 1..120: mol_type = other DNA
ttaaagaagcagcaaagtaagagcaaatcaaagccaaaattagtagaagaaaagaaataataaaaactggctagacatatgaagaaagatgaaactggatctcttccttacaccttacat

SEQ ID NO: 51911 - DNA, 120 bp, synthetic construct
  source 1..120: mol_type = other DNA
tattgcagcactattcacaatagcaaagactgagaaccaacccaaatgtccatcaatgatagactggattaagaaagtgtggcacatatacaccatggaatactatgcagccataaaaaa

SEQ ID NO: 51912 - DNA, 120 bp, synthetic construct; identical to SEQ ID NO: 21410
  source 1..120: mol_type = other DNA

SEQ ID NO: 51913 - DNA, 120 bp, synthetic construct
  source 1..120: mol_type = other DNA
ggacatctacaccgaaaacctatctgtacatcaccatcatcaaagaccaaaagtagataaaaccacaaagatggggaaaaaacagaacagaaaaactggaaactctaaaacgcagagcac

SEQ ID NO: 51914 - DNA, 120 bp, synthetic construct
  source 1..120: mol_type = other DNA
taaaatactttatagacaagcaaatgctgagagattttgtcaccaccaggcctgccctaaaagagctcctgaaggaagcgctaaacatggaaaggaacaaccggtaccagccgctgcaaa

SEQ ID NO: 51915 - DNA, 120 bp, synthetic construct
  source 1..120: mol_type = other DNA
cctgctcctgaatgactactggatacataacgaaatgaaggcagaaataaagatgttctttgaaaccaacgagaacaaagacaccacataccagaatctctgggacgcattcaaagcagt

SEQ ID NO: 51916 - DNA, 120 bp, synthetic construct
  source 1..120: mol_type = other DNA
atttattgagagtttttagcatgaagggttgttgaattttgtcaaaggctttttctgcatctattgagataatcatgtggtttttgtctttggctctgtttatatgatggattacattta

SEQ ID NO: 51917 - DNA, 120 bp, synthetic construct
  source 1..120: mol_type = other DNA
agcaatggggaaaggattccctatttaataaatggtgctgggaaaactggctagccatatgtagaaagctgaaactggatcccttccttacacgttatacaaaaatcaattcaagatgga

SEQ ID NO: 51918 - DNA, 120 bp, synthetic construct
  source 1..120: mol_type = other DNA
cacatgcacacgtatgtttattgtggcattattcacaatagcaaagacttggaaccaacccaaatgtccaacaatgatagactggattaagaaaatgtggcacatatacaccatggaata

SEQ ID NO: 51919 - DNA, 120 bp, synthetic construct; identical to SEQ ID NO: 21411
  source 1..120: mol_type = other DNA

SEQ ID NO: 51920 - DNA, 120 bp, synthetic construct; identical to SEQ ID NO: 21412
  source 1..120: mol_type = other DNA

SEQ ID NO: 51921 - DNA, 120 bp, synthetic construct
  source 1..120: mol_type = other DNA
ggcaagggcttcatgtctaaaacaccaaaagcaatggcaacaaaagccaaaattgacaaatgggatctaattaaactaaagagcttctgcacagcaaaagaaactaccatcagagtgaac

SEQ ID NO: 51922 - DNA, 120 bp, synthetic construct; identical to SEQ ID NO: 21413
  source 1..120: mol_type = other DNA

SEQ ID NO: 51923 - DNA, 120 bp, synthetic construct; identical to SEQ ID NO: 21414
  source 1..120: mol_type = other DNA

SEQ ID NO: 51924 - DNA, 120 bp, synthetic construct
  source 1..120: mol_type = other DNA
cacatcctctccagcacctgttgtttcctgactttttaatgattgccattctaactggtgtgagatggtatctcattgtggttttgctttgcatttctctgatggccagtgatgatgagc

SEQ ID NO: 51925 - DNA, 120 bp, synthetic construct
  source 1..120: mol_type = other DNA
ctctctgtctgttgttggtgtataagaatgcttgtgatttttgtacattgattttgtatcgtgagactctgctgaagttacttatcagcttaaggagattttgggctgagacaatggggt

SEQ ID NO: 51926 - DNA, 120 bp, synthetic construct
  source 1..120: mol_type = other DNA
tctttttggttggtaaactattgattattgccacaatttcagctcctgttattggtctattcagagattcaacttcttcctggtttagtcttgggagagtgtatgtgtccaggaatttat

SEQ ID NO: 51927 - DNA, 120 bp, synthetic construct
  source 1..120: mol_type = other DNA
ctgggtgctcctgtattgggttcatatatatttaggatagttagctcttcttgttgaattgatccctttaccattatgtaatggccttctttgtctcttttgatctttgttggtttaaag

SEQ ID NO: 51928 - DNA, 120 bp, synthetic construct
  source 1..120: mol_type = other DNA
gtagttctcgagccttgggtttcagctccatcagctcctttaagcacttctctgtattggttattctagttatacattcttctaaatttttttcaaagttttcaacttctttgcctttgg

SEQ ID NO: 51929 - DNA, 120 bp, synthetic construct
  source 1..120: mol_type = other DNA
gcgcgaacccgctgacctgcgcccactgtctggcactccctagtgagatgaacccggtacgtcacatggaaatgcagaaatcacccgtcttctgcgtcgctcacgctgggagctgtagac

SEQ ID NO: 51930 - DNA, 120 bp, synthetic construct
  source 1..120: mol_type = other DNA
cttgcttaggtaaacaaagcagccgggaagctcggactgggtggagcccaccacagctcaaggaggcctgcctgcctctgtaggctccacctctgggggcagggcacagacaaacaaaaa

SEQ ID NO: 51931 - DNA, 120 bp, synthetic construct
  source 1..120: mol_type = other DNA
gtatcagcaatggaagatgaaatgaagcgagaagggaagtttagagaaaaaagaataaaaagaaatgagcaaagcctccaagaaatatgggactatgtgaaaagaccaaatctacgtctg

SEQ ID NO: 51932 - DNA, 120 bp, synthetic construct
  source 1..120: mol_type = other DNA
gtcaacattagacagatcaacgagacagaaagtcaacaaggatacccaagaattgaactcagctctgcaccaagcggacctaatagacatgtacagaactctccaccccaaatcaacaga

SEQ ID NO: 51933 - DNA, 120 bp, synthetic construct
  source 1..120: mol_type = other DNA
ctctcccaagtctaaaccaggaagaagttgaatctgaatagaccaataacaggagctgaaattgtggcaataatcaatagtttaccaaccaaaaagagtccaggaccagatggattcaca

SEQ ID NO: 51934 - DNA, 120 bp, synthetic construct
  source 1..120: mol_type = other DNA
ggatacaaacaaatggaagaacattccatgctcatgggtaggaagaatcaatgtcatgaaaatggccatactgcccaaggtaatttacagattcaatgccatccccataaagctacctat

SEQ ID NO: 51935 - DNA, 120 bp, synthetic construct
  source 1..120: mol_type = other DNA
gccaaaaaacacatgaaaaaatgctcatcatcactggccatcagagaaatgcaaatcaaaaccacaatgagataccatctcacaccagttagaatggcgttcattaaaaagtcaggaaac

SEQ ID NO: 51936 - DNA, 120 bp, synthetic construct; identical to SEQ ID NO: 21415
  source 1..120: mol_type = other DNA

SEQ ID NO: 51937 - DNA, 120 bp, synthetic construct
  source 1..120: mol_type = other DNA
taatcccaactactcgggaggctgaggcaggagaatcgctggaaaccacccaggaggtggaggttgcagtgagccaagattgcaccattgcactccagcctgggtgacagggtgagattc

SEQ ID NO: 51938 - DNA, 120 bp, synthetic construct
  source 1..120: mol_type = other DNA
attaagtaaataatacaggaggctgaggcgggtggattgcttgaggtcaggagttcaagaccagcctcaccaacatggtgaaacccatctgtactaaaaatacaaaagttagttgagtgt

SEQ ID NO: 51939 - DNA, 120 bp, synthetic construct; identical to SEQ ID NO: 21416
  source 1..120: mol_type = other DNA

SEQ ID NO: 51940 - DNA, 120 bp, synthetic construct
  source 1..120: mol_type = other DNA
gttcattgtagattctggatattagccctttgtcagatgagtaggttgcgaaaattttctcccatgttgcaggttgcctgttcactctgatggtagtttcttttgctgtgcagaagctct

SEQ ID NO: 51941 - DNA, 120 bp, synthetic construct
  source 1..120: mol_type = other DNA
tttgggctgagatgatggggttttctagataaacaatcatgtcgtctgcaaacaaggacaatttgacttcctcttttcctaattgaataccctttatttccttctcctgcctgattgccc

SEQ ID NO: 51942 - DNA, 120 bp, synthetic construct
  source 1..120: mol_type = other DNA
aattttgttgatcctttcaaaaaaccagctcctggattcattgattttttgaagagttttttgtgtctctatttccttcagttctgctctgattttagttatttcttgccttctgctagc

SEQ ID NO: 51943 - DNA, 120 bp, synthetic construct
  source 1..120: mol_type = other DNA
tcctgaatacagcacactgaatacagctcttgactctttatccaatttgccagtctgtgtcttttaattggagcatttagtccatttacatttaaagttaatattgttatgtgtgaattt

SEQ ID NO: 51944 - DNA, 120 bp, synthetic construct
  source 1..120: mol_type = other DNA
gaggcttctgcattcttcatgtagttctcgagccttgggtttcagctccatcagctcctttaagcacttctctgtattggttattctagttatacattcttctaaatttttttcaaagtt

SEQ ID NO: 51945 - DNA, 120 bp, synthetic construct
  source 1..120: mol_type = other DNA
tcacgcacggtgcgcacacccactggcctgcgcccactgtctggcactccctagtgagatgaacccggtacctcagatggaaatgcagaaatcacccgtcttctgcgtcgctcacgctgg

SEQ ID NO: 51946 - DNA, 120 bp, synthetic construct
  source 1..120: mol_type = other DNA
aagacatcttgtgacagaatgcaaggcaccaacagggcagattttgcccattgtgttcactactctagcattactgcctggtgctaaataaatacttacttgttgactaaaagaatgaga

SEQ ID NO: 51947 - DNA, 120 bp, synthetic construct; identical to SEQ ID NO: 32975
  source 1..120: mol_type = other DNA

SEQ ID NO: 51948 - DNA, 120 bp, synthetic construct; identical to SEQ ID NO: 17408
  source 1..120: mol_type = other DNA

SEQ ID NO: 51949 - DNA, 120 bp, synthetic construct
  source 1..120: mol_type = other DNA
gttcaagcgatcctcctgcttcagcctcctgggtagctgggattataggtgtgcactatcacgcctggctaaattatagatagatagattagatagatagatagatagatagatagatag

SEQ ID NO: 51950 - DNA, 120 bp, synthetic construct
  source 1..120: mol_type = other DNA
ctgttaagacttcccttaagtaaatttttctggaggtactgtgttctggctatgtgttctggctttgtttctttttttttttttttttttgagacggagtctcgttctgtcgcccaggcg

SEQ ID NO: 51951 - DNA, 120 bp, synthetic construct; identical to SEQ ID NO: 29104
  source 1..120: mol_type = other DNA

SEQ ID NO: 51952 - DNA, 120 bp, synthetic construct; identical to SEQ ID NO: 29151
  source 1..120: mol_type = other DNA

SEQ ID NO: 51953 - DNA, 120 bp, synthetic construct
  source 1..120: mol_type = other DNA
gagaagtgaggagcccctccgcccggcagccaccccgtctgggaagtgaggagcgtctccgcccggcagccaccccgtccaggagggaggtagggggtcagccccccgccaggccagccg

SEQ ID NO: 51954 - DNA, 120 bp, synthetic construct; identical to SEQ ID NO: 29152
  source 1..120: mol_type = other DNA

SEQ ID NO: 51955 - DNA, 120 bp, synthetic construct; identical to SEQ ID NO: 13695
  source 1..120: mol_type = other DNA

SEQ ID NO: 51956 - DNA, 120 bp, synthetic construct
  source 1..120: mol_type = other DNA
catcctggcccgttctcaatgagctactgggcacacctcccagacggggcggtggccgggcagaggggctcctcacttcccagtaggggcggccgggcagaggcgcccctcacctcccgg

SEQ ID NO: 51957 - DNA, 120 bp, synthetic construct
  source 1..120: mol_type = other DNA
tccgtctgcaatcccggcacctcgggaggccgaggttggcggatcactcgcggttaggggctggagaccggcccggccaacacagcgaaaccccgtctccaccaaaaccaatcaggcgtg

SEQ ID NO: 51958 - DNA, 120 bp, synthetic construct; identical to SEQ ID NO: 16595
  source 1..120: mol_type = other DNA

SEQ ID NO: 51959 - DNA, 120 bp, synthetic construct; identical to SEQ ID NO: 16596
  source 1..120: mol_type = other DNA

SEQ ID NO: 51960 - DNA, 120 bp, synthetic construct; identical to SEQ ID NO: 16597
  source 1..120: mol_type = other DNA

SEQ ID NO: 51961 - DNA, 120 bp, synthetic construct
  source 1..120: mol_type = other DNA
catctgacaaagggctaatatctagaatctacaataaactcaaacaaatttacaagaaaaaaaacaaacaaccccatcaaaaagtgagcaaaggatacgaacagacacttctcaaaagaa

SEQ ID NO: 51962 - DNA, 120 bp, synthetic construct
  source 1..120: mol_type = other DNA
cctgcacgttgtgtacatgtaccctaaaacttaaagtataataataataaaattgaaaaaaaaaatggtcctttgcaaggtaattgtaaaaaaaaaacaaaaaaaaaaccagaaatctac

SEQ ID NO: 51963 - DNA, 120 bp, synthetic construct
  source 1..120: mol_type = other DNA
tttttttttttgagacggagtctcgctctgtcgcccaggctggagtgcagtggcgggatctcggctcactgcaagctccgcctcccgggttcacgccattctcctgcctcagcctcccaa

SEQ ID NO: 51964 - DNA, 120 bp, synthetic construct; identical to SEQ ID NO: 6036
  source 1..120: mol_type = other DNA

SEQ ID NO: 51965 - DNA, 120 bp, synthetic construct; identical to SEQ ID NO: 29924
  source 1..120: mol_type = other DNA

SEQ ID NO: 51966 - DNA, 120 bp, synthetic construct
  source 1..120: mol_type = other DNA
agtagagacagggtttcaccatgttggccaggttggtcttgaactcctgaactcaggtgatctgcctgcctgtatttggaatactttaatcatatttaagtagagatctgatgatgaaac

SEQ ID NO: 51967 - DNA, 120 bp, synthetic construct
  source 1..120: mol_type = other DNA
tttgtttacattttatttcttgaggccaacatggtgaaaccctgtctctactactaaaaatacaaaaattagccggacatggtggcatgcccctgtaatcccagctacttgggaggctga

SEQ ID NO: 51968 - DNA, 120 bp, synthetic construct; identical to SEQ ID NO: 29925
  source 1..120: mol_type = other DNA

SEQ ID NO: 51969 - DNA, 120 bp, synthetic construct
  source 1..120: mol_type = other DNA
cacaagacagggatgccctctctcaccactcctattcaacatagtgttggaagttctggccagggcaattaggcaggagaaggaaataaagggtattcaattaggaaaataggaagccaa

SEQ ID NO: 51970 - DNA, 120 bp, synthetic construct
  source 1..120: mol_type = other DNA
aacaggcaacctacaaaatgggagaaaatttttgcaacctactcatctgacaaagggctaatatccagaatctacaatgaactcaaacaaatttacaagaaaaaaacagacaaccccatc

SEQ ID NO: 51971 - DNA, 120 bp, synthetic construct; identical to SEQ ID NO: 13662
  source 1..120: mol_type = other DNA

SEQ ID NO: 51972 - DNA, 120 bp, synthetic construct; identical to SEQ ID NO: 16351
  source 1..120: mol_type = other DNA

SEQ ID NO: 51973 - DNA, 120 bp, synthetic construct
  source 1..120: mol_type = other DNA
actcctgagctcaagtgatcctcttgcttcagcctctcaaagtgctgggatcttgaattaaattttgtataaggtgtaaggaagggatccagttttagctttctacatatggctagccag

SEQ ID NO: 51974 - DNA, 120 bp, synthetic construct
  source 1..120: mol_type = other DNA
tatgtttatagcggcactattcacaatagcaaagacttggaaccaacctaaatgtctgacaacaatagactggattaagaaaatgtggtacatatacaccatggaatactatgcagccat

SEQ ID NO: 51975 - DNA, 120 bp, synthetic construct
  source 1..120: mol_type = other DNA
tttgggttggttccaagtctttgctgttgtcaatagtgctacaataaacatacgtgtgcatgtacagcagcatgatttctaatcctttgcatatatacccagtaatgggatagctgggtc

SEQ ID NO: 51976 - DNA, 120 bp, synthetic construct
  source 1..120: mol_type = other DNA
tgttctgttccattgatctatatctctgttttggtaccagtaccatgctgttttggttactgtagccttgtagtatagtttgaagtcaggtagtgtaatgcctccagctttgtttttttg

SEQ ID NO: 51977 - DNA, 120 bp, synthetic construct
  source 1..120: mol_type = other DNA
ctctgtttatatgctggattacatttattgatttgcgtatattgaaccagccttgcatcccagggatgaagcccacttcatcatggtggataagctttttgatgtgctgctggattcatt

SEQ ID NO: 51978 - DNA, 120 bp, synthetic construct
  source 1..120: mol_type = other DNA
gttttgagtgagattcttaatcctgagttctagtttgattgcactgtggtctgagagatagtttgttataatctctcttcttatacatttgctgaggagagctttacttccaagtatgtg

SEQ ID NO: 51979 - DNA, 120 bp, synthetic construct
  source 1..120: mol_type = other DNA
cttcacttatgaaggttagtttggctggatatgaagttctgggttgaaaattcttttctttaagatgttgaatattggcccccactctcttctggcttgtagggcttctgccgagagatc

SEQ ID NO: 51980 - DNA, 120 bp, synthetic construct
  source 1..120: mol_type = other DNA
tccttctaacagacaggaccctcagctacaggtctgttggaataccctgccgtgtgaggtgtcagtgtgcccctgctggggggtgcctcccagttaggctgctcgggggtcaggggtcag

SEQ ID NO: 51981 - DNA, 120 bp, synthetic construct
  source 1..120: mol_type = other DNA
atcatatattttctttctgagatagaacggtgggggcttctatttgtaattttcttaaatagcattattgcggcactattcacaatagcaaagacttggaaccaacccaaatgttcaaca

SEQ ID NO: 51982 - DNA, 120 bp, synthetic construct; identical to SEQ ID NO: 7851
  source 1..120: mol_type = other DNA

SEQ ID NO: 51983 - DNA, 120 bp, synthetic construct
  source 1..120: mol_type = other DNA
tcttttgttgccattgcttttggtgttttagacatgaagtccttgcccatgcctatgtcctgaatggtaatgcctaggttttcttctagggtttttatggttttaggtctaacgtttaag

SEQ ID NO: 51984 - DNA, 120 bp, synthetic construct
  source 1..120: mol_type = other DNA
ccacaacagtccccggtgtgtgacgttccccttcctgtgtccatgtgttcttattattcaattcccacctgagtgagaaaatgcagtgtttggttttttgtccttgtgacagtttgctga

SEQ ID NO: 51985 - DNA, 120 bp, synthetic construct
  source 1..120: mol_type = other DNA
ggtgatgcgggctcttttttggttccatatgaactttaaagtagttttcttccaattctgtgtagaaagtcattggtagcccaatggggacggcattgaatctgtaaattaccttgggca

SEQ ID NO: 51986 - DNA, 120 bp, synthetic construct; identical to SEQ ID NO: 3111
  source 1..120: mol_type = other DNA

SEQ ID NO: 51987 - DNA, 120 bp, synthetic construct
  source 1..120: mol_type = other DNA
atcgcttgagtccggaagtttgagaccagcctgggcaacataatgaaaccctgtctcttctaaaaatacaaaaaattagctgggcgtggtggcacacatctgtaatcccagctactcaag

SEQ ID NO: 51988 - DNA, 120 bp, synthetic construct; identical to SEQ ID NO: 10814
  source 1..120: mol_type = other DNA

SEQ ID NO: 51989 - DNA, 120 bp, synthetic construct
  source 1..120: mol_type = other DNA
gtaacctctccaagagtactgaactctccccatggttttgcaattgaatgctaatgaaaatgtaaaaaaataaaaataccgtgctattataactgttccggccgggcgcggtggctcacg

SEQ ID NO: 51990 - DNA, 120 bp, synthetic construct
  source 1..120: mol_type = other DNA
acatttgtgttggttccaagtctttgctatcgtgaatagtgccacaataaacatacgtgtgcatgtgtctttatagcagcatgatttatagtcctttgggtatatacccagtaatgggat

SEQ ID NO: 51991 - DNA, 120 bp, synthetic construct
  source 1..120: mol_type = other DNA
gattttctagtttatttgcatagaggtgttggtagtattctctgatggtagtttgtatttctgtgggatcggtggtgatatcccctttatcattttttattgcatctatttgattcttct

SEQ ID NO: 51992 - DNA, 120 bp, synthetic construct
  source 1..120: mol_type = other DNA
aggacttgctttatgaatctgggtgctcctgtattgggtgcatatatatttaggatagttagctcttcttgttgaattgatccctttacaattatgtaatggccttctttgtctcttttg

SEQ ID NO: 51993 - DNA, 120 bp, synthetic construct
  source 1..120: mol_type = other DNA
ggttccattctccccgtcactttcaggtaaaccaatcagacatagatttggtcttttcacgtagtcccatatttcttggaggctttgttcatttctttttattcttttttctctaaactt

SEQ ID NO: 51994 - DNA, 120 bp, synthetic construct; identical to SEQ ID NO: 31750
  source 1..120: mol_type = other DNA

SEQ ID NO: 51995 - DNA, 120 bp, synthetic construct
  source 1..120: mol_type = other DNA
accacaatgagataccatctcacaccagttagaatggcaatcattaaaaagtcaggaaacaacaggtgctggagaggatgtggagaaataggaacacttttacactgttggtgggactgt

SEQ ID NO: 51996 - DNA, 120 bp, synthetic construct
  source 1..120: mol_type = other DNA
tttcttcttttgttaaaagaacgaggagagaccttgggtttcattaccttagtttgaaaaacactataccctaatgtccctgtctgacagctttgaagggagcagtggttctcccagcac

SEQ ID NO: 51997 - DNA, 120 bp, synthetic construct
  source 1..120: mol_type = other DNA
tgaaaagaccaaatctacatctgattggtttacctgaaagtgatggggagaatggaaccaagttggaaaacactctgcaggatattatccaggagaacttccccaatctagcaaggcagg

SEQ ID NO: 51998 - DNA, 120 bp, synthetic construct
  source 1..120: mol_type = other DNA
catatatatttaggatagttagctcttcttgttgaattgatccctttacaattatgtaatggccttctttgtctcttttgatctttgatggtttaaagtctgttttatcagaggctagga

SEQ ID NO: 51999 - DNA, 120 bp, synthetic construct
  source 1..120: mol_type = other DNA
atttcttctagattttctagtttatttgcatagaggtgttggtagtattctctgatggtagtttgtatttctgtgggatcggtggtgatatcccctttatcattttttattgcatctatt

SEQ ID NO: 52000 - DNA, 120 bp, synthetic construct
  source 1..120: mol_type = other DNA
cagggcaatgaggcaggagaaggaaataaagggtattcaattaggaaaagaggaagtcaaattgtccctgtttgcagacgacatgattgtatatctagaaaaccccattgtctcagccca

SEQ ID NO: 52001 - DNA, 120 bp, synthetic construct
  source 1..120: mol_type = other DNA
atttacaagaaaaaaacaaaccaccccatcaaaaagtgggcgaaggacatgaacagacacctctcaaaagaagacatttatgcagccaaaaaacacatgaaaaaatgctcatcatcactg

SEQ ID NO: 52002 - DNA, 120 bp, synthetic construct; identical to SEQ ID NO: 31751
  source 1..120: mol_type = other DNA

SEQ ID NO: 52003 - DNA, 120 bp, synthetic construct; identical to SEQ ID NO: 32867
  source 1..120: mol_type = other DNA

SEQ ID NO: 52004 - DNA, 120 bp, synthetic construct; identical to SEQ ID NO: 11131
  source 1..120: mol_type = other DNA

SEQ ID NO: 52005 - DNA, 120 bp, synthetic construct; identical to SEQ ID NO: 11132
  source 1..120: mol_type = other DNA

SEQ ID NO: 52006 - DNA, 120 bp, synthetic construct; identical to SEQ ID NO: 11133
  source 1..120: mol_type = other DNA

SEQ ID NO: 52007 - DNA, 120 bp, synthetic construct
  source 1..120: mol_type = other DNA
tttgtttctttataattgaagacgtgctggtttcaaaggcaacccccaggatacccacctgcagggcacccaaccccagggcacccccaggtttgactgcgtcaggaacatggccttcct

SEQ ID NO: 52008 - DNA, 120 bp, synthetic construct; identical to SEQ ID NO: 23316
  source 1..120: mol_type = other DNA

SEQ ID NO: 52009 - DNA, 120 bp, synthetic construct; identical to SEQ ID NO: 23317
  source 1..120: mol_type = other DNA

SEQ ID NO: 52010 - DNA, 120 bp, synthetic construct; identical to SEQ ID NO: 23318
  source 1..120: mol_type = other DNA

SEQ ID NO: 52011 - DNA, 120 bp, synthetic construct; identical to SEQ ID NO: 23319
  source 1..120: mol_type = other DNA

SEQ ID NO: 52012 - DNA, 120 bp, synthetic construct; identical to SEQ ID NO: 23320
  source 1..120: mol_type = other DNA

SEQ ID NO: 52013 - DNA, 120 bp, synthetic construct; identical to SEQ ID NO: 23321
  source 1..120: mol_type = other DNA

SEQ ID NO: 52014 - DNA, 120 bp, synthetic construct; identical to SEQ ID NO: 23322
  source 1..120: mol_type = other DNA

SEQ ID NO: 52015 - DNA, 120 bp, synthetic construct
  source 1..120: mol_type = other DNA
ataaactcatgaaaagttgttcaacatgattagtcattaggaaaatcaaaacaaaacaaagcaaacgagggaggagccaagatggccgaataggaacagctccggtctacagctcccagc

SEQ ID NO: 52016 - DNA, 120 bp, synthetic construct
  source 1..120: mol_type = other DNA
tctaaaacgcagagcgcctctcctcctccaaaggaacgcagttcctcaccagcaacagaacaaagctggatggagaatgattttgacgagctgagagaagaaggcttcagacgatcaaat

SEQ ID NO: 52017 - DNA, 120 bp, synthetic construct
  source 1..120: mol_type = other DNA
ttatagacaagcaaatgttgagagattttgtcaccaccaggcctgccctaaaagagctcctgaaggaagcgctaaacatggaaaggaacaaccggtaccagccgctgcaaaatcatgcca

SEQ ID NO: 52018 - DNA, 120 bp, synthetic construct
  source 1..120: mol_type = other DNA
acgagaacaaagacaccacataccagaatctctgggacgcattcaaagcagtgtgtagagggaaatttatagcactaaatgcctacaagagaaagcaggaaagatccaaaattgacaccc

SEQ ID NO: 52019 - DNA, 120 bp, synthetic construct
  source 1..120: mol_type = other DNA
acagagccaaagacaaaaaccacatgattatctcaatagatgcagaaaaagcctttgacaaaattcaacaacccttcatgctaaaaactctcaataaattaggtattgatgggatgtatt

SEQ ID NO: 52020 - DNA, 120 bp, synthetic construct
  source 1..120: mol_type = other DNA
taaacgttaaacctaaaaccataaaaaccctagaagaaaacctaggcattaccattcaggacataggcgtgggcaaggacttcatgtccaaaacaccaaaagcaatggcaacaaaagaca

SEQ ID NO: 52021 - DNA, 120 bp, synthetic construct
  source 1..120: mol_type = other DNA
ggactgtggtggggtcgggggagcggggagggatagcattgggagatatacctaatgctagatgacacattagtgggtgcagcgcacaagcatggcacatgtatacatatgtaactaacc

SEQ ID NO: 52022 - DNA, 120 bp, synthetic construct; identical to SEQ ID NO: 28065
  source 1..120: mol_type = other DNA

SEQ ID NO: 52023 - DNA, 120 bp, synthetic construct; identical to SEQ ID NO: 28066
  source 1..120: mol_type = other DNA

SEQ ID NO: 52024 - DNA, 120 bp, synthetic construct; identical to SEQ ID NO: 28068
  source 1..120: mol_type = other DNA

SEQ ID NO: 52025 - DNA, 120 bp, synthetic construct
  source 1..120: mol_type = other DNA
acaccatggaatactatgcagccataaaaaatgatgacttcatgtccttgttagggacatggatgaaattggaaatcatcattctcagtaaactatcgcaagaacaaaaaaccaaacacc

SEQ ID NO: 52026 - DNA, 120 bp, synthetic construct; identical to SEQ ID NO: 28069
  source 1..120: mol_type = other DNA

SEQ ID NO: 52027 - DNA, 120 bp, synthetic construct
  source 1..120: mol_type = other DNA
ctctgtgatcagtttgggagcccagccctcaggtgcctcctgttccaatgcctgggtcttacctgactgcccttggccggccgggcgggcatgaaatccctgatttaagccggtggcttt

SEQ ID NO: 52028 - DNA, 120 bp, synthetic construct; identical to SEQ ID NO: 22693
  source 1..120: mol_type = other DNA

SEQ ID NO: 52029 - DNA, 120 bp, synthetic construct; identical to SEQ ID NO: 22694
  source 1..120: mol_type = other DNA

SEQ ID NO: 52030 - DNA, 120 bp, synthetic construct; identical to SEQ ID NO: 22695
  source 1..120: mol_type = other DNA

SEQ ID NO: 52031 - DNA, 120 bp, synthetic construct
  source 1..120: mol_type = other DNA
acactccctggaatggtaaattattctagtgcaacaactctagacaggaataagtcttgaataaagtgggagcaggcagggcaaaaacaaacccaaatcagtgtctgcttggcgataaaa

SEQ ID NO: 52032 - DNA, 120 bp, synthetic construct
  source 1..120: mol_type = other DNA
caatagtatcatgttcaacgtaaatacgtgctcctcacattgaattatggtctacacagacttgccggtcagtctgccctttctaacattgtttctacgggagaatgaattacagattcc

SEQ ID NO: 52033 - DNA, 120 bp, synthetic construct
  source 1..120: mol_type = other DNA
gtggtggttacaggggtgcttgtatcactccatccccagctttaggtgtatcagaacagagacaatgtgtttgctcttgcttttctagttcttttaattgtgatgttagggtgtcaattt

SEQ ID NO: 52034 - DNA, 120 bp, synthetic construct
  source 1..120: mol_type = other DNA
ctgtatgtttgggagaaagtaagggaagagaaaaagaatctctgcctggtaatccagagaattctcccagactttgttcaagacaatcaagttggtacctctacaagtctgcaagaacca

SEQ ID NO: 52035 - DNA, 120 bp, synthetic construct; identical to SEQ ID NO: 27844
  source 1..120: mol_type = other DNA

SEQ ID NO: 52036 - DNA, 120 bp, synthetic construct; identical to SEQ ID NO: 27845
  source 1..120: mol_type = other DNA

SEQ ID NO: 52037 - DNA, 120 bp, synthetic construct
  source 1..120: mol_type = other DNA
tgaactagtttacagtcccaccaacagtgtaaaagtgttcctatttctccacatcctctccagcacctgttgtttcctgactttttaatgatcgccattctcactggtgtgagatggtat

SEQ ID NO: 52038 - DNA, 120 bp, synthetic construct; identical to SEQ ID NO: 31809
  source 1..120: mol_type = other DNA

SEQ ID NO: 52039 - DNA, 120 bp, synthetic construct; identical to SEQ ID NO: 31810
  source 1..120: mol_type = other DNA

SEQ ID NO: 52040 - DNA, 120 bp, synthetic construct; identical to SEQ ID NO: 31811
  source 1..120: mol_type = other DNA

SEQ ID NO: 52041 - DNA, 120 bp, synthetic construct
  source 1..120: mol_type = other DNA
cttagcgaggcaggccaacgttcaaattcaggaaatacagagaacaccacaaagatactcctcgagaagagcaactccaagacacataattgtcagattcaccaaagttgaaatgaagga

SEQ ID NO: 52042 - DNA, 120 bp, synthetic construct
  source 1..120: mol_type = other DNA
cacttggacacagagtggggaacatcacacactggggcctgtagtagggtggggggagggggaagtgatagcattaggagatatacctaatgtaaatgacaagttaatggtggcagcaca

SEQ ID NO: 52043 - DNA, 120 bp, synthetic construct; identical to SEQ ID NO: 31813
  source 1..120: mol_type = other DNA

SEQ ID NO: 52044 - DNA, 120 bp, synthetic construct; identical to SEQ ID NO: 31814
  source 1..120: mol_type = other DNA

SEQ ID NO: 52045 - DNA, 120 bp, synthetic construct; identical to SEQ ID NO: 31815
  source 1..120: mol_type = other DNA

SEQ ID NO: 52046 - DNA, 120 bp, synthetic construct; identical to SEQ ID NO: 31816
  source 1..120: mol_type = other DNA

SEQ ID NO: 52047 - DNA, 120 bp, synthetic construct; identical to SEQ ID NO: 31817
  source 1..120: mol_type = other DNA

SEQ ID NO: 52048 - DNA, 120 bp, synthetic construct; identical to SEQ ID NO: 27337
  source 1..120: mol_type = other DNA

SEQ ID NO: 52049 - DNA, 120 bp, synthetic construct
  source 1..120: mol_type = other DNA
tctgttaaatccaacctaatgacaccttagcctcacgacaggttcccttctctccctcaactctctcttagggctcagactctcggtgacagcagttttttttttgtttttttttttgag

SEQ ID NO: 52050 - DNA, 120 bp, synthetic construct
  source 1..120: mol_type = other DNA
gcggcgctcgccggcgcggcggcaaagactgagacagctccgctgcccgctgaactccatcctcccggcggtcgggcggcggcggctgcggtcggtcgcggcagcggctccgcttcatat

SEQ ID NO: 52051 - DNA, 120 bp, synthetic construct; identical to SEQ ID NO: 27338
  source 1..120: mol_type = other DNA

SEQ ID NO: 52052 - DNA, 120 bp, synthetic construct; identical to SEQ ID NO: 27339
  source 1..120: mol_type = other DNA

SEQ ID NO: 52053 - DNA, 120 bp, synthetic construct; identical to SEQ ID NO: 27340
  source 1..120: mol_type = other DNA

SEQ ID NO: 52054 - DNA, 120 bp, synthetic construct; identical to SEQ ID NO: 27341
  source 1..120: mol_type = other DNA

SEQ ID NO: 52055 - DNA, 120 bp, synthetic construct; identical to SEQ ID NO: 27342
  source 1..120: mol_type = other DNA

SEQ ID NO: 52056 - DNA, 120 bp, synthetic construct; identical to SEQ ID NO: 27343
  source 1..120: mol_type = other DNA

SEQ ID NO: 52057 - DNA, 120 bp, synthetic construct; identical to SEQ ID NO: 27344
  source 1..120: mol_type = other DNA

SEQ ID NO: 52058 - DNA, 120 bp, synthetic construct; identical to SEQ ID NO: 27345
  source 1..120: mol_type = other DNA

SEQ ID NO: 52059 - DNA, 120 bp, synthetic construct; identical to SEQ ID NO: 27333
  source 1..120: mol_type = other DNA

SEQ ID NO: 52060 - DNA, 120 bp, synthetic construct; identical to SEQ ID NO: 27334
  source 1..120: mol_type = other DNA

SEQ ID NO: 52061 - DNA, 120 bp, synthetic construct; identical to SEQ ID NO: 27324
  source 1..120: mol_type = other DNA

SEQ ID NO: 52062 - DNA, 120 bp, synthetic construct; identical to SEQ ID NO: 27325
  source 1..120: mol_type = other DNA

SEQ ID NO: 52063 - DNA, 120 bp, synthetic construct; identical to SEQ ID NO: 27326
  source 1..120: mol_type = other DNA

SEQ ID NO: 52064 - DNA, 120 bp, synthetic construct; identical to SEQ ID NO: 27327
  source 1..120: mol_type = other DNA

SEQ ID NO: 52065 - DNA, 120 bp, synthetic construct; identical to SEQ ID NO: 27328
  source 1..120: mol_type = other DNA

SEQ ID NO: 52066 - DNA, 120 bp, synthetic construct; identical to SEQ ID NO: 27329
  source 1..120: mol_type = other DNA

SEQ ID NO: 52067 - DNA, 120 bp, synthetic construct; identical to SEQ ID NO: 27330
  source 1..120: mol_type = other DNA

SEQ ID NO: 52068 - DNA, 120 bp, synthetic construct; identical to SEQ ID NO: 27331
  source 1..120: mol_type = other DNA

SEQ ID NO: 52069 - DNA, 120 bp, synthetic construct; identical to SEQ ID NO: 27332
  source 1..120: mol_type = other DNA

SEQ ID NO: 52070 - DNA, 120 bp, synthetic construct; identical to SEQ ID NO: 27335
  source 1..120: mol_type = other DNA

SEQ ID NO: 52071 - DNA, 120 bp, synthetic construct; identical to SEQ ID NO: 27336
  source 1..120: mol_type = other DNA

SEQ ID NO: 52072 - DNA, 120 bp, synthetic construct; identical to SEQ ID NO: 7776
  source 1..120: mol_type = other DNA

SEQ ID NO: 52073 - DNA, 120 bp, synthetic construct
  source 1..120: mol_type = other DNA
ttcaaaccaaaggcaaagaagttgaaaactttgaaaaaaatttagaagaatgtataactagaataaccaatacagagaagtgcttaaaggagctgatggagctgaaaaccaagactcgag

SEQ ID NO: 52074 - DNA, 120 bp, synthetic construct
  source 1..120: mol_type = other DNA
gcaaaatcatgccaaaatgtaaagaccatcgagactaggaagaaactgcatcaactaacgagcaacatcaccagctaacatcataatgacaggatcaaattcacacataacaatattaac

SEQ ID NO: 52075 - DNA, 120 bp, synthetic construct
  source 1..120: mol_type = other DNA
cacaattaaaagaactagaaaagcaagagcaaacaattcaaaagctagcagaaggcaagaaataactaaaatcagagcagaactgaaggaaatagagacacaaaaaacccttcaaaaaat

SEQ ID NO: 52076 - DNA, 120 bp, synthetic construct; identical to SEQ ID NO: 41151
  source 1..120: mol_type = other DNA

SEQ ID NO: 52077 - DNA, 120 bp, synthetic construct
  source 1..120: mol_type = other DNA
tttaaacgttagacctaaaaccataaaaaccctagaagaaaacctaggcattaccattcaggacataggcgtgggcaaggacttcatgtccaaaacaccaaaagcaatggcaacaaaagc

SEQ ID NO: 52078 - DNA, 120 bp, synthetic construct; identical to SEQ ID NO: 7777
  source 1..120: mol_type = other DNA

SEQ ID NO: 52079 - DNA, 120 bp, synthetic construct; identical to SEQ ID NO: 7780
  source 1..120: mol_type = other DNA

SEQ ID NO: 52080 - DNA, 120 bp, synthetic construct
  source 1..120: mol_type = other DNA
ccagaaaggacatctacaccaaaaacccatctgtacatcaccatcatcaaagaccaaaagtagataaaaccacaaagatggggaaaaaacagaacagaaaaactggaaactctaaaacgc

SEQ ID NO: 52081 - DNA, 120 bp, synthetic construct
  source 1..120: mol_type = other DNA
ataagccagaagagagtgggggccaatattcaacattcttaaaggaaagaattttcaacccagaatttcatatccagccaaactaagcttcataagtgaaggagaaataaaatactttat

SEQ ID NO: 52082 - DNA, 120 bp, synthetic construct
  source 1..120: mol_type = other DNA
agaccacagtgcaatcaaactagaactcaggattaagaatctcagtcaaagccgctcaactacatggaaactgaacaacctgtacctgaatgactactgggtacataacgaaatgaaggc

SEQ ID NO: 52083 - DNA, 120 bp, synthetic construct
  source 1..120: mol_type = other DNA
ggctggttcaatatacacaaatcaataaatgtaatacagcatataaacagagccaaagacaaaaaccacatgattatctcaatagatgcagcaaaagcctttgacaaaattcaacaaccc

SEQ ID NO: 52084 - DNA, 120 bp, synthetic construct
  source 1..120: mol_type = other DNA
acaaagctggaggcatcacactacctgacttcaaactataccacaaggctacagtaaccaaaacagcatggtactggtaccaaaacagagatatagatcaatggaacagaacagagccct

SEQ ID NO: 52085 - DNA, 120 bp, synthetic construct
  source 1..120: mol_type = other DNA
aatcatgctgctataaagacacatgcacacgtatgtttattgcggcactattcacaatagcaaagacttggaaccaacccaaatgtccaacaatgatagattggattaagaaaatgtggc

SEQ ID NO: 52086 - DNA, 120 bp, synthetic construct
  source 1..120: mol_type = other DNA
cttgctttctgctagcttttgaatgtgtttgctcttgcttctctagtgcttttcattgtgaagttaggatgtcaattttagatctttcctgctttctcttgtgggcatttagtgctataa

SEQ ID NO: 52087 - DNA, 120 bp, synthetic construct
  source 1..120: mol_type = other DNA
tatgaatctgggtgctcctgcattgggtgtatgtatatttaggagagttagctcttcttgttgaattgatccctttaccattacgtaatggccttctttgtctcttttgatccttgttgg

SEQ ID NO: 52088 - DNA, 120 bp, synthetic construct; identical to SEQ ID NO: 7778
  source 1..120: mol_type = other DNA

SEQ ID NO: 52089 - DNA, 120 bp, synthetic construct; identical to SEQ ID NO: 7779
  source 1..120: mol_type = other DNA

SEQ ID NO: 52090 - DNA, 120 bp, synthetic construct
  source 1..120: mol_type = other DNA
gcagcatgatttatagtcctttggttatatacccagtaatgggatggctgggtcaaatgatatttgtagttctagatccctgaggaatcaccacactgactcccacaatggttgaactag

SEQ ID NO: 52091 - DNA, 120 bp, synthetic construct
  source 1..120: mol_type = other DNA
attttcacgatattgattcttcctacccatgagcatggaatgttcttccatttgtttgtatcctcttttatttcattgagcagtggtttgcagttctccttgaagaggtccttcacatcc

SEQ ID NO: 52092 - DNA, 120 bp, synthetic construct
  source 1..120: mol_type = other DNA
ggaatggtaccatttcctccttgtacctctggtagaattcggctgtgaatccatctggtcctggactctttttggttggtaagctattgattattgccacaatttcagctcgttattgat

SEQ ID NO: 52093 - DNA, 120 bp, synthetic construct
  source 1..120: mol_type = other DNA
ccttgttgactttctgtctcgttgatctgtctaatgttgacagtggggtgttaaagtctcccattattattgtgtgggagtctaagtctctttgcaggtcactcaggacttgctttgtga

SEQ ID NO: 52094 - DNA, 120 bp, synthetic construct
  source 1..120: mol_type = other DNA
cttagtctgatgggctttcctttgtgggtaacccgacctttctctctggctgcccttaacattttttccttcatttcaactttggtgaatctgacaattatgtgtcttggagttgctctt

SEQ ID NO: 52095 - DNA, 120 bp, synthetic construct
  source 1..120: mol_type = other DNA
tgcatgctgggagaaccactgctctcttcaaagctgtcagacagggacatttaagtctgcagggttactgctgtctttttgtctgtctgtgccctgcccccagaggtggagcctacagag

SEQ ID NO: 52096 - DNA, 120 bp, synthetic construct
  source 1..120: mol_type = other DNA
ttctgagggctctgttctattccattgatccatatctctgttttggtaccagtaccatgctgttttggttactgtagccttgtagtatagtttgaagtcaggtagcgtgatgcctccagc

SEQ ID NO: 52097 - DNA, 120 bp, synthetic construct
  source 1..120: mol_type = other DNA
acagacacttctcaaaagaagacatttatgcagccaaaaaacacatgacaaaatgctcatcatcactggccatcagagaaatgcaaatcaaaaccacaatgagataccatctcacaccag

SEQ ID NO: 52098 - DNA, 120 bp, synthetic construct; identical to SEQ ID NO: 7781
  source 1..120: mol_type = other DNA

SEQ ID NO: 52099 - DNA, 120 bp, synthetic construct; identical to SEQ ID NO: 7782
  source 1..120: mol_type = other DNA

SEQ ID NO: 52100 - DNA, 120 bp, synthetic construct; identical to SEQ ID NO: 7783
  source 1..120: mol_type = other DNA

SEQ ID NO: 52101 - DNA, 120 bp, synthetic construct; identical to SEQ ID NO: 7784
  source 1..120: mol_type = other DNA

SEQ ID NO: 52102 - DNA, 120 bp, synthetic construct
  source 1..120: mol_type = other DNA
cccagtaatgggatggctggatcaaatggcatttctagttttagatccctgaggaatcgtcacactgatttccacaattgttgaactagtttacagtcccaccaacagtgtaaaagtgtt

SEQ ID NO: 52103 - DNA, 120 bp, synthetic construct; identical to SEQ ID NO: 25733
  source 1..120: mol_type = other DNA

SEQ ID NO: 52104 - DNA, 120 bp, synthetic construct; identical to SEQ ID NO: 25734
  source 1..120: mol_type = other DNA

SEQ ID NO: 52105 - DNA, 120 bp, synthetic construct
  source 1..120: mol_type = other DNA
attccatggtgtatatgtgccacattttcttaatccagcctatcattgatggacatttgggttgattccaagtctttgaaaaagagcccgcattgccaagacaatcctaagccaaaagaa

SEQ ID NO: 52106 - DNA, 120 bp, synthetic construct; identical to SEQ ID NO: 25735
  source 1..120: mol_type = other DNA

SEQ ID NO: 52107 - DNA, 120 bp, synthetic construct; identical to SEQ ID NO: 25736
  source 1..120: mol_type = other DNA

SEQ ID NO: 52108 - DNA, 120 bp, synthetic construct
  source 1..120: mol_type = other DNA
tggtatctcattgtggttttgatttgcatttctctgatggccagtgacggtgaacattttttcatgtgttttttggctgcataaatgtcttctttctgataccaaagccgggcagagaca

SEQ ID NO: 52109 - DNA, 120 bp, synthetic construct; identical to SEQ ID NO: 25737
  source 1..120: mol_type = other DNA

SEQ ID NO: 52110 - DNA, 120 bp, synthetic construct; identical to SEQ ID NO: 29784
  source 1..120: mol_type = other DNA

SEQ ID NO: 52111 - DNA, 120 bp, synthetic construct
  source 1..120: mol_type = other DNA
atgtaccaccatgcttggcaaattttcaaattttttataaaaatgggatcttgccatgttgcccaggctggtatggaactcctggcctcaagtgatcctcccatatcagctttccaaact

SEQ ID NO: 52112 - DNA, 120 bp, synthetic construct
  source 1..120: mol_type = other DNA
ggctcaagagatcctccttcctcagcctcctaagtagctggaggtatgcaccaccacactcggctattttctttctttttctttctttctttctttctttctttctttctttctttcttt

SEQ ID NO: 52113 - DNA, 120 bp, synthetic construct
  source 1..120: mol_type = other DNA
ctttttaaaatttttaagtagagacaaagtctcagtctggctatgttgcccaagttggcctcaaactcctgagctcaagcgatcctaccaccagggcctcccaaagtgctgggattacag

SEQ ID NO: 52114 - DNA, 120 bp, synthetic construct; identical to SEQ ID NO: 6413
  source 1..120: mol_type = other DNA

SEQ ID NO: 52115 - DNA, 120 bp, synthetic construct; identical to SEQ ID NO: 32945
  source 1..120: mol_type = other DNA

SEQ ID NO: 52116 - DNA, 120 bp, synthetic construct; identical to SEQ ID NO: 32946
  source 1..120: mol_type = other DNA

SEQ ID NO: 52117 - DNA, 120 bp, synthetic construct
  source 1..120: mol_type = other DNA
agatcattcaaggctactatgaacacctttatgcgcataaactagaaagcctagaggagatgaataaattcttgaaaagatacaaccgggggaggagccaagatggccgaataggaacag

SEQ ID NO: 52118 - DNA, 120 bp, synthetic construct
  source 1..120: mol_type = other DNA
cagaacaaagctggatggagaatgactttgaagagctgagagaagaaggcttcagacgatcaaattactctgagctacgggaggacattcaaaccaaaggcaaagaagttgaaaactttg

SEQ ID NO: 52119 - DNA, 120 bp, synthetic construct
  source 1..120: mol_type = other DNA
gcgctaaacatggaaaggaacaaccggtaccagccgctgcaaaatcatgccaaaatgtaaagaccatcgagactaggaagaaactgcatcaactaatgagcaaaatcaccagctaacatc

SEQ ID NO: 52120 - DNA, 120 bp, synthetic construct
  source 1..120: mol_type = other DNA
ctcaaagccgctcaactacatggaaactgaacaacctgctccggaatgactactgggtacataacgaaatgaaggcagaaataaagatgttctttgaaaccaacgagaacaaagacacaa

SEQ ID NO: 52121 - DNA, 120 bp, synthetic construct
  source 1..120: mol_type = other DNA
caccatgatcaagtggacttcatccctgggatgcaaggctggttcaatatacgcaaatcaataaatgtaatccagcatataaacagagccaaagacaaaaaccacatgattatctcaata

SEQ ID NO: 52122 - DNA, 120 bp, synthetic construct
  source 1..120: mol_type = other DNA
atatgcggcattatttctgagggctctgttctgttccattgatctatatctctgttttggtaccagtaccatgctgttttggttactgtagccttgtagtatagtttgaagtcaggtagt

SEQ ID NO: 52123 - DNA, 120 bp, synthetic construct
  source 1..120: mol_type = other DNA
cagccataaaaaatgatgagttcatatcctttgtagggacatggatgaaattggaaaccatcattctcagtaaactatcgtaagaacaaaaaaccaaacaccgcatattctcactcatag

SEQ ID NO: 52124 - DNA, 120 bp, synthetic construct; identical to SEQ ID NO: 28894
  source 1..120: mol_type = other DNA

SEQ ID NO: 52125 - DNA, 120 bp, synthetic construct; identical to SEQ ID NO: 28895
  source 1..120: mol_type = other DNA

SEQ ID NO: 52126 - DNA, 120 bp, synthetic construct
  source 1..120: mol_type = other DNA
gatttttgtctttcttctcctcacaaagaggggtgtaaaggggaaaatcagttgcctgattcaagataatttcctctataagctccagattgtgaaacgttgaactgaccatggctgtgc

SEQ ID NO: 52127 - DNA, 120 bp, synthetic construct
  source 1..120: mol_type = other DNA
acaggaggtttgactttgctgcaaacaaggtaaagatactagtactgtttgacttcagaaagctgttttgctatattttctaataattgcatgtaatgtttttcatattctaatttcccc

SEQ ID NO: 52128 - DNA, 120 bp, synthetic construct
  source 1..120: mol_type = other DNA
aaattgcaacatatttgtagttgcctcgtggttgcaagctttttataagcactgtggctatttttcttcccaatccaactttagtgggggggtgtttgccacttacagtaccttgacatc

SEQ ID NO: 52129 - DNA, 120 bp, synthetic construct
  source 1..120: mol_type = other DNA
atttttcatgtctctgatgtagtccttatttgacataagtattttattcactgcttaattgttagatagattatagacagctgttactaagtaatactgctccattagggcagaaacaga

SEQ ID NO: 52130 - DNA, 120 bp, synthetic construct
  source 1..120: mol_type = other DNA
gaaagaaaaatgctcaggtaataacagagccttgaaaaatttggattttcaaaactacctatttatgtataggcctttagatcatctgatgttgaatactctttaagtgatctaaaggcc

SEQ ID NO: 52131 - DNA, 120 bp, synthetic construct
  source 1..120: mol_type = other DNA
tgggggagttacattaaccaccagagtttcagtctgtgtctaatgaaaacacagcagaagtggattcctttcagattaactaataaaacccttgtttttttccatgactgaggtcaagca

SEQ ID NO: 52132 - DNA, 120 bp, synthetic construct
  source 1..120: mol_type = other DNA
acagctgtaagctcataaggcctttgggagtatgaagcaaaatagatattcaaactactcagagcagtccctacaagataggaggtactatagcactagttttactaacgctggcaaata

SEQ ID NO: 52133 - DNA, 120 bp, synthetic construct
  source 1..120: mol_type = other DNA
ggtgctttagggaataatattattgctccaaaaatagtattaagacaaacataacattcattttttgtccaaacaatatgatttcttcaagtcagcatgatttaacatgaagaatggaaa

SEQ ID NO: 52134 - DNA, 120 bp, synthetic construct
  source 1..120: mol_type = other DNA
ttcagcaaaggtaactaaggtagaaaaacagagaaagggctaattttcagccacaagtttttacaggaactgacttctcaggagagccaaatttatttcaagtggatgtgaaataagtta

SEQ ID NO: 52135 - DNA, 120 bp, synthetic construct
  source 1..120: mol_type = other DNA
tgcacaatcttccaaacccaaattttcggaccttttctgcagactggtgaacttagtacttaaatatgaaacgccagttctgtctagagaacaaaatgagtttaatgcatagactcacct

SEQ ID NO: 52136 - DNA, 120 bp, synthetic construct
  source 1..120: mol_type = other DNA
ccacaatacacagctaatgccttaagaattgagaccaggttttgttttggcaattcctaagctgattcatagttaatagctgctgaaatttcagtaccttgtatataattatgaagcaag

SEQ ID NO: 52137 - DNA, 120 bp, synthetic construct
  source 1..120: mol_type = other DNA
aaaaatcacctttcagcaaaacctaaggaaacttcacgtcatctaacttgtttttcagctgttgaaggaggatgttcccatcttggtcagtcctatgcggatagagatgtctggaagcca

SEQ ID NO: 52138 - DNA, 120 bp, synthetic construct
  source 1..120: mol_type = other DNA
tcccctggttctcctggcccccctggaatctgtgaatcatgccctactggtcctcaggtataacaattacggtacttaaaaaattccctcataaaactatctagttcatcttctttcttt

SEQ ID NO: 52139 - DNA, 120 bp, synthetic construct
  source 1..120: mol_type = other DNA
tgatctcgagactcttttggcctcaaacagcctatgatcctatgtttgtaatgatgtagctactgcttagaaataatagcttaagtaagcgcataataggaaaaattggggggaactaac

SEQ ID NO: 52140 - DNA, 120 bp, synthetic construct
  source 1..120: mol_type = other DNA
aggatttctagtgtgccaataaatgtttttctgcactgagtttggctgccaagcgagaaattgcttcttcaccagtgcaatataaccctaacattgcagggattttcatagcattatgta

SEQ ID NO: 52141 - DNA, 120 bp, synthetic construct
  source 1..120: mol_type = other DNA
ctcactagggatctccaggataccaaggaccccctggtgaacctgggcaagctggtccttcagtaagtaacaattaaatttatatttagtaagtcgataattccatatggaacctacctt

SEQ ID NO: 52142 - DNA, 120 bp, synthetic construct
  source 1..120: mol_type = other DNA
ccaggacctcctggtgctataggtccatctggtcctgctggaaaagatgtaagtttttaaaacttaaataagaatacagcaaaatttaacttggtgtattctaaacagtatatgctttat

SEQ ID NO: 52143 - DNA, 120 bp, synthetic construct
  source 1..120: mol_type = other DNA
caaaggtccagctgggatacctggattccctggtatgaaaggacacagagtaagtagagtttctaagttgtttacaaggtattccactgggctatgtttacttgcctaaccaattttact

SEQ ID NO: 52144 - DNA, 120 bp, synthetic construct
  source 1..120: mol_type = other DNA
tgagccttaacttgttttctgaaatttacctgaattttacctattaggtgtgaataatggtaaccaattcagatattctattaacgcttccatgaaaaatgacaacttgaagagtctaga

SEQ ID NO: 52145 - DNA, 120 bp, synthetic construct
  source 1..120: mol_type = other DNA
ttctctttttagggtgctcggggtaatgacggtgctcgaggcagtgatggtcaaccagtaagtaactttctatctcttatgtgttgtagggtaatgagaagttatggattgtggattatt

SEQ ID NO: 52146 - DNA, 120 bp, synthetic construct
  source 1..120: mol_type = other DNA
taggaaactgataatgcaatcacacacacatagttacatttttctctgcctttacgattaatgattccttgctttacctgcagtatagagtcccactactccaacttttgggagatgtgt

SEQ ID NO: 52147 - DNA, 120 bp, synthetic construct
  source 1..120: mol_type = other DNA
cctggtggtaaaggcgaaatggtaagctgtccccactcctcagccttatctcatccacacattactggcttcttttgcattttgcatgacaatagatttgtgatatttaagtgagatatt

SEQ ID NO: 52148 - DNA, 120 bp, synthetic construct
  source 1..120: mol_type = other DNA
tatttgccactcaagaattatgaaaaagaattgaaatcctttggactgaaatacttgtctttcattattttcagggtgcccctgggttccgaggacctgctggaccaaatggcatcccag

SEQ ID NO: 52149 - DNA, 120 bp, synthetic construct
  source 1..120: mol_type = other DNA
aattttttattatttcattttaaatcacctaacaactgacttctttacttcagggcatgcccggaagtccaggaggaccaggaagtgatgggaaaccagggcctcccgtatgtacatttt

SEQ ID NO: 52150 - DNA, 120 bp, synthetic construct
  source 1..120: mol_type = other DNA
gaggacctggccctcaggtacgtagctttcctcaatttatttctagccttctaatagatgcgttcatctccaaccttctgacttctctctgtaatctgtattatttctacttccctaact

SEQ ID NO: 52151 - DNA, 120 bp, synthetic construct
  source 1..120: mol_type = other DNA
atgagaagcttttctataagccatgtttgaggtaattacctaatacaaatatgattctttctagggcttgcctggtacaggtggtcctccaggagaaaatggaaaacctggggaaccagt

SEQ ID NO: 52152 - DNA, 120 bp, synthetic construct
  source 1..120: mol_type = other DNA
ctgattcaaaatgatgcaagttaaggtgctttgtttttagctttgggttgtctaatatggttatttacatatttttgtcacagggtgatgctggtgcccctggtgaacgtggacctcctg

SEQ ID NO: 52153 - DNA, 120 bp, synthetic construct
  source 1..120: mol_type = other DNA
acatactcagtgaagaaaattcagtcaccaagggatacatactgcatgattccattcctacaatatttgcaaaataacttccttgtagagatgtagaacagattagtggttgctagcagt

SEQ ID NO: 52154 - DNA, 120 bp, synthetic construct
  source 1..120: mol_type = other DNA
gatatttgtatcttcaaaattaaaaaatatttttatttcctctagggtcctactggtcctattggtcctcctggcccagctggccagcctggagataaggtaacccttaatactacctgg

SEQ ID NO: 52155 - DNA, 120 bp, synthetic construct
  source 1..120: mol_type = other DNA
ccaggacctgctggtttccctggtgctcctgtaagtgtgaatatttatacatacatgtcccatagcccaggatctctatcttgctgaaaaattacaaaagtatagtcaagtttggtttct

SEQ ID NO: 52156 - DNA, 120 bp, synthetic construct
  source 1..120: mol_type = other DNA
ttcatatagggtcctcctggtccccaaggtgtcaaaggtgaacgtggcagtcctggtggacctgtaagtattgatcctcttaactattattgaaaagcattaattgatatcaacctgtat

SEQ ID NO: 52157 - DNA, 120 bp, synthetic construct
  source 1..120: mol_type = other DNA
tcagggtgtcaaggtgagtatagtcattttccactacactcttccttcctttggtagccttcagagatcacttaaccatatcaaggatgaaaagtttttctgtcactggagtaaattagc

SEQ ID NO: 52158 - DNA, 120 bp, synthetic construct
  source 1..120: mol_type = other DNA
accattttaattgatttcttaagttgaaacaaaatgtttttcattcctttgtatacagggtgaaagtgggaaaccaggagctaacggtctcagtggagaacgtggtccccctggacccca

SEQ ID NO: 52159 - DNA, 120 bp, synthetic construct
  source 1..120: mol_type = other DNA
agctggaaagagtggtgacagaggagaaagtgtgagttcccaaaagcagcatctgtcttgtttgtctatttccttcaataaagacatttgtaggtagaaggtagaatgtcagatctgcca

SEQ ID NO: 52160 - DNA, 120 bp, synthetic construct
  source 1..120: mol_type = other DNA
ctttggagccaaggatagaaacatcagttgttagggatccatgcaatgatcagtccaaaatgaaaacaaccacagaaacaaatctcatttcctatctgaagtgtctgttgatgggggatt

SEQ ID NO: 52161 - DNA, 120 bp, synthetic construct
  source 1..120: mol_type = other DNA
tcaggtatccatcgtatcagaataatgacatctgcccaattaaccaaataaaccctgtccacattgctatcccactagagatctcagaattacaacattcataattatctgcgtttatgt

SEQ ID NO: 52162 - DNA, 120 bp, synthetic construct
  source 1..120: mol_type = other DNA
gtatgtttggtagtctttcatcttcatggcaataggattacagagaaagctgcttagattagaatgggaacgaaaaaacatctactttcaatggaaagctgaaatagtactttaagaaag

SEQ ID NO: 52163 - DNA, 120 bp, synthetic construct
  source 1..120: mol_type = other DNA
attcaggagaatactgggttgaccctaaccaaggatgcaaattggatgctatcaaggtattctgtaatatggaaactggggaaacatgcataagtgccaatcctttgaatgttccacgga

SEQ ID NO: 52164 - DNA, 120 bp, synthetic construct
  source 1..120: mol_type = other DNA
taggatgaaataaagatagcatttggtatgaattacatacattgcatctactgattcattgcagggaatgttaaatgcaacaaaatggatcttagcctccagatgaaaaccagttgaaat

SEQ ID NO: 52165 - DNA, 120 bp, synthetic construct
  source 1..120: mol_type = other DNA
ctagcccatctgcagagcaatgactgtgctcaccagtaaaagataacctttctttctgaaatagtcaaatacgaaattagaaaagccctccctattttaactacctcaactggtcagaaa

SEQ ID NO: 52166 - DNA, 120 bp, synthetic construct; identical to SEQ ID NO: 13922
  source 1..120: mol_type = other DNA

SEQ ID NO: 52167 - DNA, 120 bp, synthetic construct; identical to SEQ ID NO: 13923
  source 1..120: mol_type = other DNA

SEQ ID NO: 52168 - DNA, 120 bp, synthetic construct
  source 1..120: mol_type = other DNA
ctcaggtgaaccacccacctcagcctcccgaagcactgggattagaggtgtgagccaccactcccagccaaataaattacattttaatctattccatctacaatctccaaatttataata

SEQ ID NO: 52169 - DNA, 120 bp, synthetic construct; identical to SEQ ID NO: 13924
  source 1..120: mol_type = other DNA

SEQ ID NO: 52170 - DNA, 120 bp, synthetic construct; identical to SEQ ID NO: 13925
  source 1..120: mol_type = other DNA

SEQ ID NO: 52171 - DNA, 120 bp, synthetic construct; identical to SEQ ID NO: 13926
  source 1..120: mol_type = other DNA

SEQ ID NO: 52172 - DNA, 120 bp, synthetic construct; identical to SEQ ID NO: 13927
  source 1..120: mol_type = other DNA

SEQ ID NO: 52173 - DNA, 120 bp, synthetic construct; identical to SEQ ID NO: 13928
  source 1..120: mol_type = other DNA

SEQ ID NO: 52174 - DNA, 120 bp, synthetic construct; identical to SEQ ID NO: 13929
  source 1..120: mol_type = other DNA

SEQ ID NO: 52175 - DNA, 120 bp, synthetic construct; identical to SEQ ID NO: 13930
  source 1..120: mol_type = other DNA

SEQ ID NO: 52176 - DNA, 120 bp, synthetic construct; identical to SEQ ID NO: 13931
  source 1..120: mol_type = other DNA

SEQ ID NO: 52177 - DNA, 120 bp, synthetic construct; identical to SEQ ID NO: 13932
  source 1..120: mol_type = other DNA

SEQ ID NO: 52178 - DNA, 120 bp, synthetic construct; identical to SEQ ID NO: 13933
  source 1..120: mol_type = other DNA

SEQ ID NO: 52179 - DNA, 120 bp, synthetic construct; identical to SEQ ID NO: 13934
  source 1..120: mol_type = other DNA

SEQ ID NO: 52180 - DNA, 120 bp, synthetic construct; identical to SEQ ID NO: 13935
  source 1..120: mol_type = other DNA

SEQ ID NO: 52181 - DNA, 120 bp, synthetic construct; identical to SEQ ID NO: 13936
  source 1..120: mol_type = other DNA

SEQ ID NO: 52182 - DNA, 120 bp, synthetic construct; identical to SEQ ID NO: 13937
  source 1..120: mol_type = other DNA

SEQ ID NO: 52183 - DNA, 120 bp, synthetic construct; identical to SEQ ID NO: 13938
  source 1..120: mol_type = other DNA

SEQ ID NO: 52184 - DNA, 120 bp, synthetic construct; identical to SEQ ID NO: 13939
  source 1..120: mol_type = other DNA

SEQ ID NO: 52185 - DNA, 120 bp, synthetic construct; identical to SEQ ID NO: 13940
  source 1..120: mol_type = other DNA

SEQ ID NO: 52186 - DNA, 120 bp, synthetic construct; identical to SEQ ID NO: 13941
  source 1..120: mol_type = other DNA

SEQ ID NO: 52187 - DNA, 120 bp, synthetic construct
  source 1..120: mol_type = other DNA
tttaaggaaggactcaagatcacaatggcaggatgtttaaataaatattcatgatgcaaagattagaaataaaatcctggctgggcacggcggctcacgcctgtaatcctagcacttggg

SEQ ID NO: 52188 - DNA, 120 bp, synthetic construct; identical to SEQ ID NO: 22029
  source 1..120: mol_type = other DNA

SEQ ID NO: 52189 - DNA, 120 bp, synthetic construct
  source 1..120: mol_type = other DNA
tagtatccaaagtttactaactggagtgaactgataatgctggtatgcgggtatttttttaaaatatattaatactagccgggcgcggtggctctctcctgtaatcccagcactttggga

SEQ ID NO: 52190 - DNA, 120 bp, synthetic construct
  source 1..120: mol_type = other DNA
gaggttgcagtgagctgagaacgcgtcactgtactccagcctgggtgacagagcaagacaccatcaaaaaaaaagaaaaaagaaaaggaaagaaaaggaaaaaagaaagaaagacagaga

SEQ ID NO: 52191 - DNA, 120 bp, synthetic construct
  source 1..120: mol_type = other DNA
cgcgcaccgtgcacgagccgaagcagggcgaggcattgcctcacttgggaagtgcaaggggtcagggagttccctttcctagtcaaagaaaggggtgacagagggcacctggaaaatcgg

SEQ ID NO: 52192 - DNA, 120 bp, synthetic construct
  source 1..120: mol_type = other DNA
attcaggaaatacagagaacgccacaaagatactcctcgagaagagcaactccaagacacataattgtcagattcaccaaagttgaaatgaaggaaaaaatgttaagggcaaccagagag

SEQ ID NO: 52193 - DNA, 120 bp, synthetic construct
  source 1..120: mol_type = other DNA
ggatacacaggaattgaactcagctctgcaccaagcagacctaatagacatctacagaactctccaccccaaatcaacagaatatacatttttttctgcaccacaccacacctattccaa

SEQ ID NO: 52194 - DNA, 120 bp, synthetic construct
  source 1..120: mol_type = other DNA
aacaggatctgaaattgtggcaataatcaatagcttaccaactaaaaagggtccaggaccagatggattcacagctgaattctaccagaggtacaaggaggaactggtaccattccttct

SEQ ID NO: 52195 - DNA, 120 bp, synthetic construct
  source 1..120: mol_type = other DNA
caagggatgtgaaggacctcttcaaggagaactacaaaccactgctcaaggaaataaaagaggatacaaacaaatggaagaatattccatgctcatgggtaggaagaatcaatatcgtga

SEQ ID NO: 52196 - DNA, 120 bp, synthetic construct
  source 1..120: mol_type = other DNA
cagccaaaaaacaatgaaaaaatgctcaccatcactggccatcagagaaatgcaaatcaaaaccacaatgagataccatctcacaccagttagaatggcaatcattaaaaagtcaggaaa

SEQ ID NO: 52197 - DNA, 120 bp, synthetic construct; identical to SEQ ID NO: 22028
  source 1..120: mol_type = other DNA

SEQ ID NO: 52198 - DNA, 120 bp, synthetic construct; identical to SEQ ID NO: 35120
  source 1..120: mol_type = other DNA

SEQ ID NO: 52199 - DNA, 120 bp, synthetic construct
  source 1..120: mol_type = other DNA
tgagttcattgtagattctggatattagccctttgtcagatgagtaggttgcgaaaattttctcccattttgtaggttgcctgttcactctgatggtagtttcttttgccgtgcagaaac

SEQ ID NO: 52200 - DNA, 120 bp, synthetic construct
  source 1..120: mol_type = other DNA
gagtagctgggattacaggtgcaagccaccacacctggtggtcattgtttatacatcttttcagtggagagagctaagaaatataaaaataaattcacatacaccctcccaagactgaac

SEQ ID NO: 52201 - DNA, 120 bp, synthetic construct; identical to SEQ ID NO: 35121
  source 1..120: mol_type = other DNA

SEQ ID NO: 52202 - DNA, 120 bp, synthetic construct; identical to SEQ ID NO: 35122
  source 1..120: mol_type = other DNA

SEQ ID NO: 52203 - DNA, 120 bp, synthetic construct
  source 1..120: mol_type = other DNA
aatgatgagctcatgtcctttgtggggacatggatgaaattggaaatcatcattctcagtaaactatctcaaggacaaaaaaccaagcaccacatgttctcactcataggtgggaattga

SEQ ID NO: 52204 - DNA, 120 bp, synthetic construct
  source 1..120: mol_type = other DNA
tgttcaattcccacctatgaatgagaacatgcagtgtttggtttcttgtccttgtgatagtttgctgagaatgatggtttccagcttcatccatgtccctacaaaggacatgaactcatc

SEQ ID NO: 52205 - DNA, 120 bp, synthetic construct
  source 1..120: mol_type = other DNA
ggcggaggtcgcagtgagttgagatcatgccattgcactccagcctgggcgacacaagtgagactttgtgtaaaaaaagaaaaaatacaataaggggcttgtttttcttttttttcatca

SEQ ID NO: 52206 - DNA, 120 bp, synthetic construct
  source 1..120: mol_type = other DNA
acatcattaagaaatgacacaggagatattacaactgacaccactgaaataaaaaagattattcaaggctactatgaacacctttatgtacataaactagaaaacctagaagagatggct

SEQ ID NO: 52207 - DNA, 120 bp, synthetic construct
  source 1..120: mol_type = other DNA
ttttttggctgcataaatgtcttcttttgagaagtgtctgttcatatactttgcccactttttgatggggttgtttgtttttttcttgtaaatttgtttgagttcattgtagattctgga

SEQ ID NO: 52208 - DNA, 120 bp, synthetic construct
  source 1..120: mol_type = other DNA
gattcttcctacccatgagcatggaatgttcttccatttgtttgtatgctcttttatttcattgagcagtggtttgtagttctccttgaagaggtccttcacatcccttgtaagttggat

SEQ ID NO: 52209 - DNA, 120 bp, synthetic construct; identical to SEQ ID NO: 35118
  source 1..120: mol_type = other DNA

SEQ ID NO: 52210 - DNA, 120 bp, synthetic construct
  source 1..120: mol_type = other DNA
tcagacgatcaaactactccgagctacaggaggaaattcaaaccaaaggcaaagaagttgaaaactttgaaaaaaatttagacgaaagtataactagaataatcaatacagagaagtgct

SEQ ID NO: 52211 - DNA, 120 bp, synthetic construct
  source 1..120: mol_type = other DNA
tccaattaaaagacacagactggcaagttggataaagagccaagacccatcagtgtgctgtattcaggaaacccatctcacgtgcagagacacacataggctcaaaataaaaggatggag

SEQ ID NO: 52212 - DNA, 120 bp, synthetic construct
  source 1..120: mol_type = other DNA
aaaagacggaatcctccctaactcattttatgaggctagcatcatcctgataccaaagccgggcagagacacaaccaaaaaagagaattttagaccaatatccttgatgaacattgatgc

SEQ ID NO: 52213 - DNA, 120 bp, synthetic construct
  source 1..120: mol_type = other DNA
tactgcccaaggcaatttatagattcaatgccatccccatcaagctaccaacgactttcttcacagaattggaaaaaactactttaaagttcatatggaaccaaaaaagagcccacatcg

SEQ ID NO: 52214 - DNA, 120 bp, synthetic construct
  source 1..120: mol_type = other DNA
tacgaacagttttacattgttggtgggactgtaaactagttcaaccattgtggaagtcagtgtggtgattcctcagggatctagaactagaaataccatttgacccagccatcccattac

SEQ ID NO: 52215 - DNA, 120 bp, synthetic construct
  source 1..120: mol_type = other DNA
ctgtgaagaaagtcattggtagcttgatggagatggcattgaatctataaattaccttgttatccaccatgatcaagagggcttcatccctgggatgcaaggctgattcaatatatgcaa

SEQ ID NO: 52216 - DNA, 120 bp, synthetic construct; identical to SEQ ID NO: 35119
  source 1..120: mol_type = other DNA

SEQ ID NO: 52217 - DNA, 120 bp, synthetic construct; identical to SEQ ID NO: 6453
  source 1..120: mol_type = other DNA

SEQ ID NO: 52218 - DNA, 120 bp, synthetic construct; identical to SEQ ID NO: 6454
  source 1..120: mol_type = other DNA

SEQ ID NO: 52219 - DNA, 120 bp, synthetic construct; identical to SEQ ID NO: 33119
  source 1..120: mol_type = other DNA

SEQ ID NO: 52220 - DNA, 120 bp, synthetic construct
  source 1..120: mol_type = other DNA
agttggacattttgcttttgtcagaacagacttttagaagcatgtggagagaccacttttcttagtgagttttgccaacgtctctccacctcccagggtgggacctatttggaagtcatc

SEQ ID NO: 52221 - DNA, 120 bp, synthetic construct; identical to SEQ ID NO: 33106
  source 1..120: mol_type = other DNA

SEQ ID NO: 52222 - DNA, 120 bp, synthetic construct; identical to SEQ ID NO: 33107
  source 1..120: mol_type = other DNA

SEQ ID NO: 52223 - DNA, 120 bp, synthetic construct; identical to SEQ ID NO: 33108
  source 1..120: mol_type = other DNA

SEQ ID NO: 52224 - DNA, 120 bp, synthetic construct; identical to SEQ ID NO: 33109
  source 1..120: mol_type = other DNA

SEQ ID NO: 52225 - DNA, 120 bp, synthetic construct; identical to SEQ ID NO: 33110
  source 1..120: mol_type = other DNA

SEQ ID NO: 52226 - DNA, 120 bp, synthetic construct; identical to SEQ ID NO: 33111
  source 1..120: mol_type = other DNA

SEQ ID NO: 52227 - DNA, 120 bp, synthetic construct; identical to SEQ ID NO: 33112
  source 1..120: mol_type = other DNA

SEQ ID NO: 52228 - DNA, 120 bp, synthetic construct; identical to SEQ ID NO: 33113
  source 1..120: mol_type = other DNA

SEQ ID NO: 52229 - DNA, 120 bp, synthetic construct
  source 1..120: mol_type = other DNA
tccagcatccatccatccatctattcatccatccatccatcctccatccatccatccatccatcatccatccatccaccatccatccatccaccatccatccatgcatccattcatccat

SEQ ID NO: 52230 - DNA, 120 bp, synthetic construct; identical to SEQ ID NO: 33114
  source 1..120: mol_type = other DNA

SEQ ID NO: 52231 - DNA, 120 bp, synthetic construct; identical to SEQ ID NO: 33115
  source 1..120: mol_type = other DNA

SEQ ID NO: 52232 - DNA, 120 bp, synthetic construct; identical to SEQ ID NO: 33116
  source 1..120: mol_type = other DNA

SEQ ID NO: 52233 - DNA, 120 bp, synthetic construct; identical to SEQ ID NO: 33117
  source 1..120: mol_type = other DNA

SEQ ID NO: 52234 - DNA, 120 bp, synthetic construct; identical to SEQ ID NO: 33118
  source 1..120: mol_type = other DNA

SEQ ID NO: 52235 - DNA, 120 bp, synthetic construct
  source 1..120: mol_type = other DNA
ataaacgtatctggtgcattaaagagcagtatgccgccagcatgtctcacctccagccctaaggcggttttcctctatctcagtagatgggatatacaatccggttttacaccaagacat

SEQ ID NO: 52236 - DNA, 120 bp, synthetic construct; identical to SEQ ID NO: 33120
  source 1..120: mol_type = other DNA

SEQ ID NO: 52237 - DNA, 120 bp, synthetic construct; identical to SEQ ID NO: 33121
  source 1..120: mol_type = other DNA

SEQ ID NO: 52238 - DNA, 120 bp, synthetic construct; identical to SEQ ID NO: 33122
  source 1..120: mol_type = other DNA

SEQ ID NO: 52239 - DNA, 120 bp, synthetic construct
  source 1..120: mol_type = other DNA
tttaaacatccacaagtagaaaagacgaatgaccgggaactgttaaagaacttcatttctctcgtttctctctctctctctttctctctgacacacacacacacacacacacacacacac

SEQ ID NO: 52240 - DNA, 120 bp, synthetic construct; identical to SEQ ID NO: 19539
  source 1..120: mol_type = other DNA

SEQ ID NO: 52241 - DNA, 120 bp, synthetic construct; identical to SEQ ID NO: 19540
  source 1..120: mol_type = other DNA

SEQ ID NO: 52242 - DNA, 120 bp, synthetic construct; identical to SEQ ID NO: 23370
  source 1..120: mol_type = other DNA

SEQ ID NO: 52243 - DNA, 120 bp, synthetic construct; identical to SEQ ID NO: 23371
  source 1..120: mol_type = other DNA

SEQ ID NO: 52244 - DNA, 120 bp, synthetic construct; identical to SEQ ID NO: 23372
  source 1..120: mol_type = other DNA

SEQ ID NO: 52245 - DNA, 120 bp, synthetic construct
  source 1..120: mol_type = other DNA
tgaggatcatagggggatgtgtgaggaccatagaggggacatgtgaggatcatgggggacatgtgaggatcatgggggggacgtgtgaggatcatgggaggacgtgaggatcatggaggg

SEQ ID NO: 52246 - DNA, 120 bp, synthetic construct; identical to SEQ ID NO: 23374
  source 1..120: mol_type = other DNA

SEQ ID NO: 52247 - DNA, 120 bp, synthetic construct; identical to SEQ ID NO: 23375
  source 1..120: mol_type = other DNA

SEQ ID NO: 52248 - DNA, 120 bp, synthetic construct; identical to SEQ ID NO: 23376
  source 1..120: mol_type = other DNA

SEQ ID NO: 52249 - DNA, 120 bp, synthetic construct; identical to SEQ ID NO: 24693
  source 1..120: mol_type = other DNA

SEQ ID NO: 52250 - DNA, 120 bp, synthetic construct
  source 1..120: mol_type = other DNA
aaatgttaagggcagccagagagaaaggtcgggttaccctcaaaggaaagcccatcagactaacagcggatctctcggcagaaaccctacaagccagaagagagtgggggccaatattca

SEQ ID NO: 52251 - DNA, 120 bp, synthetic construct
  source 1..120: mol_type = other DNA
cagacctaatagacatctacagaactctccaccccaaatcaacagaatatacatttttttcagcaccacaccacacctattccaaaattgaccacatagttggaagtaaagctctcctca

SEQ ID NO: 52252 - DNA, 120 bp, synthetic construct
  source 1..120: mol_type = other DNA
ttctgataccaaagccgggcagagacacaaccaaaaaagagaattttagaccaatatccttgatgaacattgatgcaaaaatcctcaataaaatactggcaaaccgaatccagcagcaca

SEQ ID NO: 52253 - DNA, 120 bp, synthetic construct
  source 1..120: mol_type = other DNA
aaaagaggagacaaacaaatggaagaacattccatgctcatgggtaggaagaatcaatatcgtgaaaatggccatactgcccaaggtaatttacagattcaatgccatccccatcaagct

SEQ ID NO: 52254 - DNA, 120 bp, synthetic construct
  source 1..120: mol_type = other DNA
tcatctcacaccagttagaatggcaatcattaaaaagtcaggaaacaacaggtgctggagaggatgcggagaaataggaacacttttacactgttggtgggactgtaaactagttcaacc

SEQ ID NO: 52255 - DNA, 120 bp, synthetic construct; identical to SEQ ID NO: 24694
  source 1..120: mol_type = other DNA

SEQ ID NO: 52256 - DNA, 120 bp, synthetic construct
  source 1..120: mol_type = other DNA
attctgtagaggttcttagatattgcctagtgctttgagtcacttggaataaacacaggtctccagtacaattcatcctgtaggcttgccttgggttcctgtggattaagaatggatttc

SEQ ID NO: 52257 - DNA, 120 bp, synthetic construct
  source 1..120: mol_type = other DNA
cctctctccctccccctccccctcctccaatgagaactgcttcccacctataatgcttgtcctcatacatgtttttggatggctatccattaacattatgctctaaaaaaaaaagatgaa

SEQ ID NO: 52258 - DNA, 120 bp, synthetic construct; identical to SEQ ID NO: 24692
  source 1..120: mol_type = other DNA

SEQ ID NO: 52259 - DNA, 120 bp, synthetic construct
  source 1..120: mol_type = other DNA
ggatggctgggtcaaatggtatttctatttctagatccttgaggaatcgccacactaacttccacagttgttgaactagtttacagtctcaccagcaatgtaaaagtgttcctatttctc

SEQ ID NO: 52260 - DNA, 120 bp, synthetic construct
  source 1..120: mol_type = other DNA
agtttttttcaaattctgtaaagaaagtcattggtagctttatagggatggcattgaatctttaaattaccttgggcagtatggccattttcatgatattgattcttcctacccatgagc

SEQ ID NO: 52261 - DNA, 120 bp, synthetic construct
  source 1..120: mol_type = other DNA
gtattgatgggacatatttcaaaataataagagctatctatgacaaacccacagccaatgtcatactgaatgggcaaaaactggaagcattccctttgaaaactggcacaagacagggat

SEQ ID NO: 52262 - DNA, 120 bp, synthetic construct
  source 1..120: mol_type = other DNA
tcatgccgatgcaaaatgtcagctcccacggccttgggcaactctactcctgtggctttgcagggtacagcctctctcccagcttttttcttttttttttttttttaaactttctttttt

SEQ ID NO: 52263 - DNA, 120 bp, synthetic construct
  source 1..120: mol_type = other DNA
gctgtgcagaagctctttagtttaattagatcccatttgtcaattttgtcttttgttgccattgcttttggtgttttagacatgaagtccttgcccatgcctatgtcctgaatagtattg

SEQ ID NO: 52264 - DNA, 120 bp, synthetic construct
  source 1..120: mol_type = other DNA
ccttgtaagttggattcctaggtattttattctctttgaagcaattgtgaatgggagttcactcatgatttggttctctgtttgtctgctgttgctgtataagaatgcttgtgatttttg

SEQ ID NO: 52265 - DNA, 120 bp, synthetic construct
  source 1..120: mol_type = other DNA
tagtttcagaaggaatggtaccagctcctccttgtacctctggtagaattcggctgtgaatccatctggtcctggactctttttgcttggtaagctattgattattgccacaatttcaga

SEQ ID NO: 52266 - DNA, 120 bp, synthetic construct
  source 1..120: mol_type = other DNA
agtgagattcttaatcctgagttctagtttgattgcactgtggtctgagagataagtttgttataatttctattcttttacatttgctgaggggagctttacttccaagtatgtggtcaa

SEQ ID NO: 52267 - DNA, 120 bp, synthetic construct
  source 1..120: mol_type = other DNA
gaaaattcttttctttaagaatgttgaatattggcccccactctcttctggcttgtagggtttctgccaagagatccgctgtcagtctgatgggcttccctttgagggtaacccgacctt

SEQ ID NO: 52268 - DNA, 120 bp, synthetic construct
  source 1..120: mol_type = other DNA
aggtgtcagtgtgcccctgctgggggtgcctcctagttaggctgctcggggttcaggggtcagggacccacttgaggaggcagtctgcccgttctcagatctccagctgcgtgatgggag

SEQ ID NO: 52269 - DNA, 120 bp, synthetic construct
  source 1..120: mol_type = other DNA
cctgacaaattgggtccagggtatgcctgagttctgagaccccctaaactgccctgggaggtagccctgcctttgtccccagcaacccagccaggtggcttagaaccggctcctgtgtcc

SEQ ID NO: 52270 - DNA, 120 bp, synthetic construct
  source 1..120: mol_type = other DNA
aggatcacgttgctataaaataggtttgaacaccatgtcccaagtgactgtaacggtcacagcttctacctcgtcaagactttttcctgctggtcttgcagcagctgcagcattagctcc

SEQ ID NO: 52271 - DNA, 120 bp, synthetic construct
  source 1..120: mol_type = other DNA
atttttctttctatgccttaaacttatcatttatgttacctaacaggaaaatgaaatgttctccctcgctctctctctctctctctctctctctctctccttccccctccttccctccct

SEQ ID NO: 52272 - DNA, 120 bp, synthetic construct; identical to SEQ ID NO: 20323
  source 1..120: mol_type = other DNA

SEQ ID NO: 52273 - DNA, 120 bp, synthetic construct; identical to SEQ ID NO: 20324
  source 1..120: mol_type = other DNA

SEQ ID NO: 52274 - DNA, 120 bp, synthetic construct
  source 1..120: mol_type = other DNA
tcccccttttctatttgacaaaaccgccatcgtcatcatggcccattctcaatgagctgtggggtacacctcccagacggggtggcggccgggcagaggggctcctcacttcccagaagg

SEQ ID NO: 52275 - DNA, 120 bp, synthetic construct
  source 1..120: mol_type = other DNA
gcaatccgggcacctcgggaggccgaggctggcagatcactcccggttaggagctggagaccagcccggccaacacagcgaaaccccgtctccaccaaaaaaatacgaaaaccagtcagg

SEQ ID NO: 52276 - DNA, 120 bp, synthetic construct; identical to SEQ ID NO: 20325
  source 1..120: mol_type = other DNA

SEQ ID NO: 52277 - DNA, 120 bp, synthetic construct; identical to SEQ ID NO: 20326
  source 1..120: mol_type = other DNA

SEQ ID NO: 52278 - DNA, 120 bp, synthetic construct; identical to SEQ ID NO: 20327
  source 1..120: mol_type = other DNA

SEQ ID NO: 52279 - DNA, 120 bp, synthetic construct
  source 1..120: mol_type = other DNA
ttcaagtttcttctgaagacaaattttaattgacacttgaaaaccaggaagagcatgaaaaagaggactcagtgtagcctctaaaggctgttgagcctgaagaggtgttggaatgccgtg

SEQ ID NO: 52280 - DNA, 120 bp, synthetic construct; identical to SEQ ID NO: 18736
  source 1..120: mol_type = other DNA

SEQ ID NO: 52281 - DNA, 120 bp, synthetic construct; identical to SEQ ID NO: 18737
  source 1..120: mol_type = other DNA

SEQ ID NO: 52282 - DNA, 120 bp, synthetic construct
  source 1..120: mol_type = other DNA
gtgacaacagcgagactccatctcaaaaaaaaaaggggggggggggggaaacaggggtggctttctggaatttagatttggagttttatgttataaaggtagatttggtgtagatattac

SEQ ID NO: 52283 - DNA, 120 bp, synthetic construct; identical to SEQ ID NO: 9102
  source 1..120: mol_type = other DNA

SEQ ID NO: 52284 - DNA, 120 bp, synthetic construct; identical to SEQ ID NO: 20556
  source 1..120: mol_type = other DNA

SEQ ID NO: 52285 - DNA, 120 bp, synthetic construct
  source 1..120: mol_type = other DNA
taggtatattcccaaaagaaacaaaatcaggatatcgaagagatatctgcactcccatgtgagccaccgcgcccggcctatttttagttttttgaggaactccaaactgttttccatagt

SEQ ID NO: 52286 - DNA, 120 bp, synthetic construct
  source 1..120: mol_type = other DNA
atgttgtaggttgcctgttcactctgatggtagtttcttttgctgtgcagaagctctttagtttaattagatcccatttgtcaattttgtcttctgttgccattgcttttggtgttttgg

SEQ ID NO: 52287 - DNA, 120 bp, synthetic construct; identical to SEQ ID NO: 20557
  source 1..120: mol_type = other DNA

SEQ ID NO: 52288 - DNA, 120 bp, synthetic construct
  source 1..120: mol_type = other DNA
gagggatagcattaggagatatacctaatgctaaatgacaagataatgggtgcagcacaccagcatggcacgtgtatatatatgtaactaacctacacattgtgcacatgtaccctaaaa

SEQ ID NO: 52289 - DNA, 120 bp, synthetic construct; identical to SEQ ID NO: 26969
  source 1..120: mol_type = other DNA

SEQ ID NO: 52290 - DNA, 120 bp, synthetic construct; identical to SEQ ID NO: 26970
  source 1..120: mol_type = other DNA

SEQ ID NO: 52291 - DNA, 120 bp, synthetic construct
  source 1..120: mol_type = other DNA
gtgaatagtgccgcaataaacatacgtgtgtgtgtgtctttatagtagcatgatttatagtcctttgggtatataccgagtagtgggatggctgggtcaaatggtatttctagttctaga

SEQ ID NO: 52292 - DNA, 120 bp, synthetic construct
  source 1..120: mol_type = other DNA
gttttttccaattctgtgaagaaagtcactggtagcttgatggggatggcattgaatgtataaattaccttgggaagtatggctattttcatgatattgattcttcctacccatgagcat

SEQ ID NO: 52293 - DNA, 120 bp, synthetic construct
  source 1..120: mol_type = other DNA
gtctctgcccagctttggtatcaggatgatgctggcctcataaaatgagttagggaggattccctctttttctattgattggaatagtttcagaaggagtggtaccagttcctcctcgta

SEQ ID NO: 52294 - DNA, 120 bp, synthetic construct; identical to SEQ ID NO: 26971
  source 1..120: mol_type = other DNA

SEQ ID NO: 52295 - DNA, 120 bp, synthetic construct; identical to SEQ ID NO: 26972
  source 1..120: mol_type = other DNA

SEQ ID NO: 52296 - DNA, 120 bp, synthetic construct
  source 1..120: mol_type = other DNA
gtttgtttttttcttgtaaatttgtttgagttcattgtagattctggatattagccctttgtcagatgagtaggttgcgaaaattttctcccattctgtaggtttcctgttcactccgat

SEQ ID NO: 52297 - DNA, 120 bp, synthetic construct
  source 1..120: mol_type = other DNA
acccagaatttcatatccaaccaaactaagcttcatgagtgaaggagaaataaaatactttacagacaagcaaatgctgagagattttgtcaccaccaggcctgccctaaaagagctcct

SEQ ID NO: 52298 - DNA, 120 bp, synthetic construct; identical to SEQ ID NO: 26973
  source 1..120: mol_type = other DNA

SEQ ID NO: 52299 - DNA, 120 bp, synthetic construct
  source 1..120: mol_type = other DNA
tggcaaatctcattgtggttttgatttgcatttgtctgatggccagtgatggtgagcattttttcatgtgtgttttggctgcataaatgtcttcttttgagaagtgtctgttcatgtcct

SEQ ID NO: 52300 - DNA, 120 bp, synthetic construct
  source 1..120: mol_type = other DNA
ctctgtctgttattggtgtataagaatgcttgtgatttttgtacattgattttgtatcctgagactttgctgaagttgcttatcagcttaaggagattttgggctgagacaatggggttt

SEQ ID NO: 52301 - DNA, 120 bp, synthetic construct
  source 1..120: mol_type = other DNA
ccttgtacctctggtagaattcggctgtgaatccatctggtcctggactcttcttggttggtaagctattgattattgccacaatttcagatcctgttattggtcttttcagagattgaa

SEQ ID NO: 52302 - DNA, 120 bp, synthetic construct
  source 1..120: mol_type = other DNA
agtctctttgtaggtcactcaggacttgctttatgaatcttggtgctcctgtattgggtgcatatatatttaggatagttagctcttcttgttgaattgatccctttagcaggatgtaat

SEQ ID NO: 52303 - DNA, 120 bp, synthetic construct
  source 1..120: mol_type = other DNA
gccatactgcccaaggtaatttacagattcaatgccatccccatcaagctaccactgactttcttcacagaattggaaaaaactactttaaagttcatatggaaccaaaaaagagcctgc

SEQ ID NO: 52304 - DNA, 120 bp, synthetic construct
  source 1..120: mol_type = other DNA
acttggaaccaacccaaatgcccatcagtgatagactggattaagaaaatgtgacacacatgcaccatggaatactgtgcagccataaaaaaggatgagtttatgtcctttgtacggaca

SEQ ID NO: 52305 - DNA, 120 bp, synthetic construct; identical to SEQ ID NO: 22448
  source 1..120: mol_type = other DNA

SEQ ID NO: 52306 - DNA, 120 bp, synthetic construct
  source 1..120: mol_type = other DNA
aataaataaataaataaataaataaataataataataataataaagacttgtgatcctctccctctccctctccctctccgtctccctctccctctccctctccctccctctccgtctcc

SEQ ID NO: 52307 - DNA, 120 bp, synthetic construct
  source 1..120: mol_type = other DNA
agaaagaagtagacatgggagacttttcattttgttctgcactaagaaaaattcctctgccttgggatcctgttgatctgtgaccttacccccaaccctgtgctctctgaaacatgtgct

SEQ ID NO: 52308 - DNA, 120 bp, synthetic construct; identical to SEQ ID NO: 11843
  source 1..120: mol_type = other DNA

SEQ ID NO: 52309 - DNA, 120 bp, synthetic construct; identical to SEQ ID NO: 11844
  source 1..120: mol_type = other DNA

SEQ ID NO: 52310 - DNA, 120 bp, synthetic construct
  source 1..120: mol_type = other DNA
ccccagactccttgtggaaagctgaggttgaagatctgtgctgtgatgaggggctccagatagcggtgagagatcccgcttcaagactgggttgggggtccagaccaggaggataagcct

SEQ ID NO: 52311 - DNA, 120 bp, synthetic construct
  source 1..120: mol_type = other DNA
gttctgtgttgtgttcataaactaccagcgggaccatctgttgagacttggtagcaaaggatttttgctggatgatgcaagcagtcaagcatttaatgaggaaacaaaaataacaggcca

SEQ ID NO: 52312 - DNA, 120 bp, synthetic construct
  source 1..120: mol_type = other DNA
aatagggatttgagttcttggtgacaccaagtcagggaggagacaaattagaaatgtcagtctgaagagagtggtaggtagccagatactgaaggaaagtagatgggaggatttggtaag

SEQ ID NO: 52313 - DNA, 120 bp, synthetic construct
  source 1..120: mol_type = other DNA
gaaacttttaatagggaatcttagattgagctttttaaagcctttcgaggttaggaagccaagccaagaacttccaaccagacttcacctgcagtgtctatagatttgggtgaattcctc

SEQ ID NO: 52314 - DNA, 120 bp, synthetic construct
  source 1..120: mol_type = other DNA
aagtcataaaaagactgtaatcatccttcagcagtttactcagttgcatgcaggtactgaattcttgttctgcttgatcttgggctagcaggtacatgaacccatcttttctcaaccagt

SEQ ID NO: 52315 - DNA, 120 bp, synthetic construct
  source 1..120: mol_type = other DNA
taaaaaaaatttttttttagtttttttttttttttttttttttgagacagagtcccactgtgttgctcaggctggagtgcagtggcacgatctcggctcactgcaacctccgcctcctgg

SEQ ID NO: 52316 - DNA, 120 bp, synthetic construct
  source 1..120: mol_type = other DNA
ttaccactagaccaaggagccctctagtggccctgtccgggcataacagaaggctcacacgcttgtcttctggtcacttctcaccgtgtcccttcagctcttatcactgtatggcctggt

SEQ ID NO: 52317 - DNA, 120 bp, synthetic construct
  source 1..120: mol_type = other DNA
ggtcaattctagccagctttgacctcataacataaaatttcttttctgcagactttcttgaggccaggagttcaagaccagcctgggaaacatagggataactttctgtatccattcaca

SEQ ID NO: 52318 - DNA, 120 bp, synthetic construct
  source 1..120: mol_type = other DNA
cacttagtatgactctgaggttgaaagttactgaaaacatcttgtaagcttttttaggccaatatattatcaaacgcaattaacaaaacacaactcactagtttatataagagctagttc

SEQ ID NO: 52319 - DNA, 120 bp, synthetic construct
  source 1..120: mol_type = other DNA
atccttggtaaagtcacatcaacaaggaaggaagcagacagaggcgcacttgttccttgcagttttgttttgatgtgctgattaaagtagcgcagagggcatgatcagcagggctccagt

SEQ ID NO: 52320 - DNA, 120 bp, synthetic construct
  source 1..120: mol_type = other DNA
attctcttggtagccatgactttctcaggcaggcgctttgaagggggctgggatcattttaggaatgtggccttgagctgttagaagccatgtgcagtatggcttacacctgtaatccca

SEQ ID NO: 52321 - DNA, 120 bp, synthetic construct
  source 1..120: mol_type = other DNA
aacccaggaggcggaggttgcagtgagccgagatcgcgccactgcactccagtctgtgtgacagagtgacagcccgtctcaaaaaataaataaataaataaataaataaataaataaata

SEQ ID NO: 52322 - DNA, 120 bp, synthetic construct
  source 1..120: mol_type = other DNA
catgagcaggttgacctgcagggggcctccaagcaggtgccaaggcagaatcggatgtgaccaggagaacacccttgaaggataaagcgaatgtgcgaccaccatgcaggtctggcccat

SEQ ID NO: 52323 - DNA, 120 bp, synthetic construct
  source 1..120: mol_type = other DNA
cagagtgctgccagaaagaggcgaggccccatctggatttgatggcatttttattgtggtgttgttttagagacagtgtctgtcgcccaggatggacgacatggtgcaatcatggctcac

SEQ ID NO: 52324 - DNA, 120 bp, synthetic construct
  source 1..120: mol_type = other DNA
cttcctgagcaggaggatgtgggtgaatagagaccaaagtgtcaatcactcttctgacagaggtgatagcagaatgaaaaactgatggaccccagatctttgcaaagagaacaaagtcag

SEQ ID NO: 52325 - DNA, 120 bp, synthetic construct
  source 1..120: mol_type = other DNA
ggatttttaagagtctcatttcactgatgttacttgcagtatatttatggaaaacattcctgtcttttttttttttttgagacggagtctcactctgttacccaggctggagtgcagtgg

SEQ ID NO: 52326 - DNA, 120 bp, synthetic construct
  source 1..120: mol_type = other DNA
tgttttattatccattcaggtgctaacggatggaagggttgtttctacctgttggccattgtggatgatgttgctatgcatattggggtacgagtatctggtttagtccctgttttcaat

SEQ ID NO: 52327 - DNA, 120 bp, synthetic construct
  source 1..120: mol_type = other DNA
cactgcactccaggctgagcgacagagtgagaccctgtttcaaaaaaacaaaaaaaaagcacatttcaaacatacacaaaagcagagagaattcccctcggtcctccggcctgcacccca

SEQ ID NO: 52328 - DNA, 120 bp, synthetic construct
  source 1..120: mol_type = other DNA
actgcattgtggcctgggcgtgttggcctttgagcctttggccttgagcacttccccatcccccatggctcttggccgttggggcccagttggccgcagagcctttggccttgagcactt

SEQ ID NO: 52329 - DNA, 120 bp, synthetic construct
  source 1..120: mol_type = other DNA
gccactgtgacctatctgtctcatcatctttttcttactggtttgtgtatgttcttggtaaactagcccttggtcttacacatcatttccaaggtactaaggactcttcaggggaaatac

SEQ ID NO: 52330 - DNA, 120 bp, synthetic construct
  source 1..120: mol_type = other DNA
tgcctttctaaaatggagcgtccagcagagagtgggatctcctatgccactgggagcccagggccccatcccagaaagacctctgagtgagcacaggggccctagaagaagtttccttgt

SEQ ID NO: 52331 - DNA, 120 bp, synthetic construct
  source 1..120: mol_type = other DNA
tgctgctgcttctgaggcactggggctggggcctgtgccttatcggctggaacgagttcatcctgcagcccatccacaacctgctcatgggtgacaccaaggagcagcgcatcctgaacc

SEQ ID NO: 52332 - DNA, 120 bp, synthetic construct
  source 1..120: mol_type = other DNA
caggggcgaggctcatcaccatcgagatcaaccccgactgtgccgccatcacccagcggatggtggatttcgctggcgtgaaggacaaggtgtgcatgcctgacccgttgtcagacctgg

SEQ ID NO: 52333 - DNA, 120 bp, synthetic construct
  source 1..120: mol_type = other DNA
ctgctcgtgcaaagaaagcatgtgtctcctgcagatcttcctcctgaggccccatcttgtgcattcccccaacccagccccactggcgaggaccctgagtgccccgagtgaggctagaca

SEQ ID NO: 52334 - DNA, 120 bp, synthetic construct
  source 1..120: mol_type = other DNA
ttcaaaacaacaaaaaacaacaaaaacttttctggaaagatccctgtcagccttgtggagtgtggagagggctgtggggagggcatttcagatgccctgaactcacgaggaggcactgaa

SEQ ID NO: 52335 - DNA, 120 bp, synthetic construct
  source 1..120: mol_type = other DNA
ctcctgagtagctaggactaaaggcatgcaccactacacctggctaatttaaaaattttttgtagaaatggggtctccctatgttgcccagactggtctcaaactcctggcctcaagcga

SEQ ID NO: 52336 - DNA, 120 bp, synthetic construct
  source 1..120: mol_type = other DNA
tggcgctttgttctacgtcttttcagctgacattgctaggacatttttttttttttctaaatgaaaacacatcatgattcatggtggtacttcctgctcaactccggaccttggggctgt

SEQ ID NO: 52337 - DNA, 120 bp, synthetic construct
  source 1..120: mol_type = other DNA
ttgtttccactcacccagctagcatttattgagcacctactgtgtgccacatgctgttctaagggatggatactcctgagatggatacaggagttgatgagagaaaggtccctgtcctca

SEQ ID NO: 52338 - DNA, 120 bp, synthetic construct
  source 1..120: mol_type = other DNA
aaattaagaatctaaatatttagatataactcgacttagtacatccttctcaactgccattcccctgctgcccttgacttgggcaccaaacattcaaagctccccttgacggacgctaac

SEQ ID NO: 52339 - DNA, 120 bp, synthetic construct
  source 1..120: mol_type = other DNA
cagaggcccgacacaagggagaagccagccacttgtgccagacctgagtggcagaaagcaaaaagttcctttgctgctttaatttttaaattttcttacaaaaatttaggtgtttaccaa

SEQ ID NO: 52340 - DNA, 120 bp, synthetic construct; identical to SEQ ID NO: 9051
  source 1..120: mol_type = other DNA

SEQ ID NO: 52341 - DNA, 120 bp, synthetic construct; identical to SEQ ID NO: 9052
  source 1..120: mol_type = other DNA

SEQ ID NO: 52342 - DNA, 120 bp, synthetic construct
  source 1..120: mol_type = other DNA
agctggatggagaatggctttgacgagttgagagaagaaggtttcagatgatcaaactactctgagctacaggaggaaacttaaaccaaaggcaaagaagttgaaaactttgaaaaaaat

SEQ ID NO: 52343 - DNA, 120 bp, synthetic construct
  source 1..120: mol_type = other DNA
gtgcagagacacacataggctcaaaataaaaggatggaggaagatctaccaagcaaatggaaaacaaaaaaaggcaggggttgcaatcctagtctctgataaaatagactttaaaccaac

SEQ ID NO: 52344 - DNA, 120 bp, synthetic construct
  source 1..120: mol_type = other DNA
aaactagaactcaggattaagaaactcactaaaaaccgctcaactacatggaaagtgaacaacttgctcctgaatgactaccgggtacataacgaaatgaaggcagaaataaagatgttc

SEQ ID NO: 52345 - DNA, 120 bp, synthetic construct
  source 1..120: mol_type = other DNA
ccagcatataaacagaaccaaagacaaaatccacatggttacctcaatagatgcagaaaaggcctttgacaaaattcaacaaccctttgtgctaaaaactctcaataaattaggttttga

SEQ ID NO: 52346 - DNA, 120 bp, synthetic construct
  source 1..120: mol_type = other DNA
gtcctcagaaataatgccgcgtacctacaactatctgatctttgacaaacctgacaaaaacaagcaatggggaaaggattccctatttaataaatggtgctgggaaaactggctagccat

SEQ ID NO: 52347 - DNA, 120 bp, synthetic construct
  source 1..120: mol_type = other DNA
tgtggcacatatacaccatggaatactatgcagccataaaaaatgatgagttcatgtcctttgtagggacatggatgaaattggaaatcatcattctcagtaaactatcacaagaacaaa

SEQ ID NO: 52348 - DNA, 120 bp, synthetic construct; identical to SEQ ID NO: 9048
  source 1..120: mol_type = other DNA

SEQ ID NO: 52349 - DNA, 120 bp, synthetic construct
  source 1..120: mol_type = other DNA
tttgagaagtgtctgttcatgtcctttgcccactttttgatggggttgttttcttgtaaatttgtttgagttcattctagattctggatattagccctttgtcagatgagtaggttgcaa

SEQ ID NO: 52350 - DNA, 120 bp, synthetic construct
  source 1..120: mol_type = other DNA
ggtccttcacatcccttgtaagttggattcctaggtattttattctctttgaagcaattgtgaatgggagttcactcatgattcggctctctgtttgtctgttgttggtgtgtaagaatg

SEQ ID NO: 52351 - DNA, 120 bp, synthetic construct
  source 1..120: mol_type = other DNA
tggtttagtcttgggagggtgtatgtgtcgaggaatttatcctttatttctagattttctagtttatttgtgtagaggtgtttgtagtattctctgatggtagtttgtatttctgtggga

SEQ ID NO: 52352 - DNA, 120 bp, synthetic construct
  source 1..120: mol_type = other DNA
acttgctttatgagtctgggtgcccttgtattgggtgcatatatatttaggatagttagctcttcctgctgaattgatccctttaccattatgtaatggccttctttgtctgttttgatc

SEQ ID NO: 52353 - DNA, 120 bp, synthetic construct
  source 1..120: mol_type = other DNA
tctactggataatatcctgcagagtgttttccaacttggttccattctccccatcactttcaggtataccaatcagatgtagatttggtcttttcacatagtcccgtatttcttggaggc

SEQ ID NO: 52354 - DNA, 120 bp, synthetic construct
  source 1..120: mol_type = other DNA
gcgcccctcccccagcctcgctgccgccttgcagtttgatctcagactgctctgctagcaatcagggagactccgtgggcgtaggaccctcggagccaggtgcgggatataatctcgtgg

SEQ ID NO: 52355 - DNA, 120 bp, synthetic construct
  source 1..120: mol_type = other DNA
cactaacctatcaaaataatagcttaaatacattacagggagaaaactgacacataagtaaaaatgctgtcaaaagaattaagggccgggcgcggtggctcacgcctgtaatcccagcac

SEQ ID NO: 52356 - DNA, 120 bp, synthetic construct; identical to SEQ ID NO: 2152
  source 1..120: mol_type = other DNA

SEQ ID NO: 52357 - DNA, 120 bp, synthetic construct
  source 1..120: mol_type = other DNA
tagaaagaagtagacatgggagacttttcattttgctctgtactaagaaaaattcttatcctgttgatctgtgaccttacccccaaccctgtgctctctgaaacatgtgctgtgtccact

SEQ ID NO: 52358 - DNA, 120 bp, synthetic construct
  source 1..120: mol_type = other DNA
gtgtccatttaggacacagtgaaggcaaatttggcttaatctcttactactctaagaaatgtattattttatggccagacactgtggctcacacctgtaatctcagcatctggggaggat

SEQ ID NO: 52359 - DNA, 120 bp, synthetic construct; identical to SEQ ID NO: 30043
  source 1..120: mol_type = other DNA

SEQ ID NO: 52360 - DNA, 120 bp, synthetic construct; identical to SEQ ID NO: 30044
  source 1..120: mol_type = other DNA

SEQ ID NO: 52361 - DNA, 120 bp, synthetic construct
  source 1..120: mol_type = other DNA
atctccacctcccaggctccagcgattctcccgcctcagcctcccaagtagctggaattacaggagcgtgctaccaatgcctggctaatttttttgtatttttttttttttttttttttt

SEQ ID NO: 52362 - DNA, 120 bp, synthetic construct; identical to SEQ ID NO: 30042
  source 1..120: mol_type = other DNA

SEQ ID NO: 52363 - DNA, 120 bp, synthetic construct
  source 1..120: mol_type = other DNA
taagagtcatcgccactccctaatctcaagtacccagggacacaaacactgtggaaggccacagggtcctctgcctaggaaaaccagagacctttgtttacttgtttatctgctgacctt

SEQ ID NO: 52364 - DNA, 120 bp, synthetic construct; identical to SEQ ID NO: 30030
  source 1..120: mol_type = other DNA

SEQ ID NO: 52365 - DNA, 120 bp, synthetic construct; identical to SEQ ID NO: 30031
  source 1..120: mol_type = other DNA

SEQ ID NO: 52366 - DNA, 120 bp, synthetic construct; identical to SEQ ID NO: 30032
  source 1..120: mol_type = other DNA

SEQ ID NO: 52367 - DNA, 120 bp, synthetic construct; identical to SEQ ID NO: 30033
  source 1..120: mol_type = other DNA

SEQ ID NO: 52368 - DNA, 120 bp, synthetic construct; identical to SEQ ID NO: 30034
  source 1..120: mol_type = other DNA

SEQ ID NO: 52369 - DNA, 120 bp, synthetic construct; identical to SEQ ID NO: 30035
  source 1..120: mol_type = other DNA

SEQ ID NO: 52370 - DNA, 120 bp, synthetic construct; identical to SEQ ID NO: 30036
  source 1..120: mol_type = other DNA

SEQ ID NO: 52371 - DNA, 120 bp, synthetic construct
  source 1..120: mol_type = other DNA
cgacagaccaggacaaggatgacagctaacaaatggatgtagctgaaaaggcaatgggaccacggtggtgcagctggggtttccaacgcctcggtcccagactcaaggactcaggtggag

SEQ ID NO: 52372 - DNA, 120 bp, synthetic construct; identical to SEQ ID NO: 30037
  source 1..120: mol_type = other DNA

SEQ ID NO: 52373 - DNA, 120 bp, synthetic construct; identical to SEQ ID NO: 30038
  source 1..120: mol_type = other DNA

SEQ ID NO: 52374 - DNA, 120 bp, synthetic construct; identical to SEQ ID NO: 30039
  source 1..120: mol_type = other DNA

SEQ ID NO: 52375 - DNA, 120 bp, synthetic construct; identical to SEQ ID NO: 30040
  source 1..120: mol_type = other DNA

SEQ ID NO: 52376 - DNA, 120 bp, synthetic construct
  source 1..120: mol_type = other DNA
gacgcacctggaaaatcgggtcactcccacccgaatattgagcttttccgaccggcttaaaaaacagcccaggccaggcgcggtggctcacgcctgtaatcccagcactttgggaggccg

SEQ ID NO: 52377 - DNA, 120 bp, synthetic construct
  source 1..120: mol_type = other DNA
caggggcacactgacacctcacacagcagggtattccaacagacctgcagctgagggtcctgtctgttagaaggaaaactaacaaacagaaaggacatccacaccaaaaacccatctgta

SEQ ID NO: 52378 - DNA, 120 bp, synthetic construct
  source 1..120: mol_type = other DNA
accctacaagccagaagagagtgggggccaatattcaacattcttaaagaaaagaattttcaacccagaatttcatatccagccaaactaagcttcataagtgaagaagaaataaaatac

SEQ ID NO: 52379 - DNA, 120 bp, synthetic construct
  source 1..120: mol_type = other DNA
tgcaatcaaactagaactcaggattaagaaactcactcaaaaccactcaactacatagaaactgaacaacctgctcctgaatgactactggatacataacgaaatgaaggcagaaataaa

SEQ ID NO: 52380 - DNA, 120 bp, synthetic construct
  source 1..120: mol_type = other DNA
cattttatgaggccagcatcatcctgataccaaagccgggcagagacacaaccaaaaaagagaattttagaccaatatccttgatgaacattgatgcaaaaattctcaataaaatactgg

SEQ ID NO: 52381 - DNA, 120 bp, synthetic construct
  source 1..120: mol_type = other DNA
aaaagggcccacatcaccaaggcaatcctaagccaaaagaacaaagctggaggcatcacactacctgacttcaaactatactacaaggctacagtaaccaaaacagcatggtactggtac

SEQ ID NO: 52382 - DNA, 120 bp, synthetic construct
  source 1..120: mol_type = other DNA
atatatccaaaggactacaaatcatgctgctataaagacacatgcacacgtatgtttattgcagcattattcacaatagcaaagacttggaaccaacccaaatgtccaacaatgatagac

SEQ ID NO: 52383 - DNA, 120 bp, synthetic construct
  source 1..120: mol_type = other DNA
caaaattgacaaatgggatctaattaaactaaagagcttcagcacagcaaaagaaaccaccatcagagtgaataggcaacctacagaatgggagaaaatttttgcaacctactcatctga

SEQ ID NO: 52384 - DNA, 120 bp, synthetic construct; identical to SEQ ID NO: 30041
  source 1..120: mol_type = other DNA

SEQ ID NO: 52385 - DNA, 120 bp, synthetic construct; identical to SEQ ID NO: 25567
  source 1..120: mol_type = other DNA

SEQ ID NO: 52386 - DNA, 120 bp, synthetic construct
  source 1..120: mol_type = other DNA
cctctctgtgcctccttttcctctttaaaatgtactctgtagtacatctaatgtacctaaaatgtactctatagtacattactgtactacagggtagtacagtactgtactttgagaagt

SEQ ID NO: 52387 - DNA, 120 bp, synthetic construct
  source 1..120: mol_type = other DNA
acattaaaataatttaagatataattcatacatcataaaattcaccatcaaaaaaggtacgtaggccgggcacagtggctcacacctgtaatcccagcactttgggaggccgaggcgggt

SEQ ID NO: 52388 - DNA, 120 bp, synthetic construct
  source 1..120: mol_type = other DNA
agctgagatgggaacccaagaagttgaggctagagagagctgtgattaagccactacacttcagcctgggcaacagagtgagacagtgtctcaaaaaaaattaaataaaaatgaaaagaa

SEQ ID NO: 52389 - DNA, 120 bp, synthetic construct; identical to SEQ ID NO: 9418
  source 1..120: mol_type = other DNA

SEQ ID NO: 52390 - DNA, 120 bp, synthetic construct; identical to SEQ ID NO: 9419
  source 1..120: mol_type = other DNA

SEQ ID NO: 52391 - DNA, 120 bp, synthetic construct
  source 1..120: mol_type = other DNA
tcccgcttttcctggttcactctccctggctcccactctccctggctcccactctccctggctgccactctccctggctgccactctccctggttcacactctccttggctgccactctc

SEQ ID NO: 52392 - DNA, 120 bp, synthetic construct; identical to SEQ ID NO: 9420
  source 1..120: mol_type = other DNA

SEQ ID NO: 52393 - DNA, 120 bp, synthetic construct; identical to SEQ ID NO: 9421
  source 1..120: mol_type = other DNA

SEQ ID NO: 52394 - DNA, 120 bp, synthetic construct; identical to SEQ ID NO: 9422
  source 1..120: mol_type = other DNA

SEQ ID NO: 52395 - DNA, 120 bp, synthetic construct
  source 1..120: mol_type = other DNA
gaccgtgccattgcactccagcctgagcaacagagcgagactccgtctcaaaaaaagaaaaaaaactcagagctttgaagtctatcataaaagaaaggcatgaaatcaaagtaattgcag

SEQ ID NO: 52396 - DNA, 120 bp, synthetic construct; identical to SEQ ID NO: 25426
  source 1..120: mol_type = other DNA

SEQ ID NO: 52397 - DNA, 120 bp, synthetic construct
  source 1..120: mol_type = other DNA
tgtgctacattttcttaatccagtctatcattgttggacatttgggttggttccaagtccttgctattgtgaataatgccgcaataaacatacgtgtgcatgtgtctttatagcagcatg

SEQ ID NO: 52398 - DNA, 120 bp, synthetic construct
  source 1..120: mol_type = other DNA
ccttggcctcccaaagtgcccagattgcagcctctgcccggccaccaccctgtctgggaggtgaggggcatctctgcctggccgcccatcgtctgggatgtgaggagcccctctgcccgg

SEQ ID NO: 52399 - DNA, 120 bp, synthetic construct
  source 1..120: mol_type = other DNA
ggtcagcctccacccggccaccaccccatccgggaggtggggggcgcctctgccctgccgccccttctgggaattgaggagcccctctgcccggccaccatcctgtctgggaggtgtacc

SEQ ID NO: 52400 - DNA, 120 bp, synthetic construct; identical to SEQ ID NO: 3542
  source 1..120: mol_type = other DNA

SEQ ID NO: 52401 - DNA, 120 bp, synthetic construct; identical to SEQ ID NO: 13210
  source 1..120: mol_type = other DNA

SEQ ID NO: 52402 - DNA, 120 bp, synthetic construct
  source 1..120: mol_type = other DNA
acatgttttcttggagttaataattgcatttttaaatttgtttgatgtctctatagaaaactggttttcggccaggtgcggtggctcacgcctgtaatcccagcactttgggaggccaag

SEQ ID NO: 52403 - DNA, 120 bp, synthetic construct; identical to SEQ ID NO: 15416
  source 1..120: mol_type = other DNA

SEQ ID NO: 52404 - DNA, 120 bp, synthetic construct
  source 1..120: mol_type = other DNA
acctataatttcaacaatttgggaggcaaaggtgggcagatcgcttgaggccagcagtttgagaccagcctgagcaacgtagtgagaccctgtctttacagaaaaaaattttaaaattag

SEQ ID NO: 52405 - DNA, 120 bp, synthetic construct
  source 1..120: mol_type = other DNA
agtcatgaagcacctcatatgtgtgtaatgtgctaaatactacaaggacaggcccagtgtgacgtgggagcacaaagagaagtatctacctcaaactgaggagaccaaggattacttctc

SEQ ID NO: 52406 - DNA, 120 bp, synthetic construct
  source 1..120: mol_type = other DNA
ctcgtataccttttggctattcgtatgtcttctttttttctttttcttttttttttttttttttttgagacaggtcttgctctgttacttaggctggagtgcagtggcaggactatggct

SEQ ID NO: 52407 - DNA, 120 bp, synthetic construct
  source 1..120: mol_type = other DNA
caggaagcagatgttgcagtcagctaagatgatgccactgcactcaagtctgggtgacagagcaagaccctgtcaaaaaaaaaaaaaaaaaaagtgcgtgaaagatttaaataggcccta

SEQ ID NO: 52408 - DNA, 120 bp, synthetic construct; identical to SEQ ID NO: 17437
  source 1..120: mol_type = other DNA

SEQ ID NO: 52409 - DNA, 120 bp, synthetic construct; identical to SEQ ID NO: 17438
  source 1..120: mol_type = other DNA

SEQ ID NO: 52410 - DNA, 120 bp, synthetic construct; identical to SEQ ID NO: 17439
  source 1..120: mol_type = other DNA

SEQ ID NO: 52411 - DNA, 120 bp, synthetic construct; identical to SEQ ID NO: 17440
  source 1..120: mol_type = other DNA

SEQ ID NO: 52412 - DNA, 120 bp, synthetic construct; identical to SEQ ID NO: 17441
  source 1..120: mol_type = other DNA

SEQ ID NO: 52413 - DNA, 120 bp, synthetic construct; identical to SEQ ID NO: 17442
  source 1..120: mol_type = other DNA

SEQ ID NO: 52414 - DNA, 120 bp, synthetic construct; identical to SEQ ID NO: 17443
  source 1..120: mol_type = other DNA

SEQ ID NO: 52415 - DNA, 120 bp, synthetic construct; identical to SEQ ID NO: 17444
  source 1..120: mol_type = other DNA

SEQ ID NO: 52416 - DNA, 120 bp, synthetic construct
  source 1..120: mol_type = other DNA
tattgtggaagaatgaccaagaagtatgaaattaatttttgtctaaactaattacctgcagagctgctcaaaatataaagctttcttgacttaacatttcataggcttctctgagacatt

SEQ ID NO: 52417 - DNA, 120 bp, synthetic construct
  source 1..120: mol_type = other DNA
tggagagttcacggtagttacatgtgtttgtttaaggtctgtcttcctttctagactaaactcttgctgttttgttcactgctgtacagctacacttagcatagtggctatctaggcaat

SEQ ID NO: 52418 - DNA, 120 bp, synthetic construct
  source 1..120: mol_type = other DNA
ggaccagcatcacattggtaatggtatagtagttatcaaatctcagagagcttccagaccacgtggattcctaacaagttcccaggtgatgctgatggtccaggagccacacttagaatc

SEQ ID NO: 52419 - DNA, 120 bp, synthetic construct
  source 1..120: mol_type = other DNA
ccctttatttaacttttttcctctgccttatttcaaacaagagttcaagtaacttgcaaatatatgtaaaatgtgacaaaatagtccagaaaaagaagactaagaagagacaaagtggag

SEQ ID NO: 52420 - DNA, 120 bp, synthetic construct
  source 1..120: mol_type = other DNA
tgtttcgatttcagggaatgcagtattaggctatttgcataatggagtaaactgaaggtgcttttaagcccacaggaagctcctcccaggtgattgcatcccaactcaagactccagcca

SEQ ID NO: 52421 - DNA, 120 bp, synthetic construct
  source 1..120: mol_type = other DNA
gaaggggaaggattccttcaggtgcctggatgctgagagtgatcatggcatcctgggtaaatagcttcattttcgtttgcatggcttgtcagcctacccagttttcattcatgcccttgt

SEQ ID NO: 52422 - DNA, 120 bp, synthetic construct
  source 1..120: mol_type = other DNA
tgtggtggagaagaactctctggggaagctttctgctaaagctttgctaatttttttcaaaacactctcataataagtagatgttattgttctttagccttctggaaaggaatcaagcaa

SEQ ID NO: 52423 - DNA, 120 bp, synthetic construct; identical to SEQ ID NO: 17453
  source 1..120: mol_type = other DNA

SEQ ID NO: 52424 - DNA, 120 bp, synthetic construct; identical to SEQ ID NO: 17454
  source 1..120: mol_type = other DNA

SEQ ID NO: 52425 - DNA, 120 bp, synthetic construct; identical to SEQ ID NO: 17455
  source 1..120: mol_type = other DNA

SEQ ID NO: 52426 - DNA, 120 bp, synthetic construct; identical to SEQ ID NO: 17456
  source 1..120: mol_type = other DNA

SEQ ID NO: 52427 - DNA, 120 bp, synthetic construct; identical to SEQ ID NO: 17457
  source 1..120: mol_type = other DNA

SEQ ID NO: 52428 - DNA, 120 bp, synthetic construct
  source 1..120: mol_type = other DNA
gtgcgatctcggctcactgcaacctccgcttcctgggttcaagcgattctcctgcttcagcctcctgcatagctgggactacaggcgcccgccaccacgcccagctaatttttatatttt

SEQ ID NO: 52429 - DNA, 120 bp, synthetic construct
  source 1..120: mol_type = other DNA
taaaaagacagttccactcccaccccgattcccacccctacacctttctgctaagttttctcaagcccccaccctgtctttgagctgttgtctctgaactctcacagtgcctctccatga

SEQ ID NO: 52430 - DNA, 120 bp, synthetic construct
  source 1..120: mol_type = other DNA
ggcctcccaaagtgctgggattacaggcgtgagccactgtacccggccgttattttatttatttatttatttgtttgttattttatttatttttttgagacggagtctcgccctgtcgcc

SEQ ID NO: 52431 - DNA, 120 bp, synthetic construct
  source 1..120: mol_type = other DNA
ctccttaattgttgccttctttgaactgttgctcccttggcctctctctttctggtcttatcctctcctttggttttgcttattacctccatatgtatctgaaacatagcttcccttcta

SEQ ID NO: 52432 - DNA, 120 bp, synthetic construct
  source 1..120: mol_type = other DNA
gagcatcttcattttaacgtgttcaagcccagctcatgatcctcctttttttttttttgagacagggtctccctgtcacccaggctgcagtgtaatggcatgatctcggcccactgcacc

SEQ ID NO: 52433 - DNA, 120 bp, synthetic construct
  source 1..120: mol_type = other DNA
caagagagggaaggtaaggttctagacagcaggattatgtctgttagttggttttatgtcacttttctagccaagctgtaccatcctgtttttgttggttggtgaatgcttccagctctt

SEQ ID NO: 52434 - DNA, 120 bp, synthetic construct
  source 1..120: mol_type = other DNA
ttgtgtgtatgctttggtgtgtgtgtgtgcgtggccatggtaaggggcgggattttaagtgtctctgcctacagtgctgagagccattaagtggagagcaagctgccaaaaactaaaaat

SEQ ID NO: 52435 - DNA, 120 bp, synthetic construct
  source 1..120: mol_type = other DNA
cacagtcttgcctttcactgcagtttctgtcagtcttcgtgcagcttgcacataccccaaccccgtccttgatggacatcatgctctggttgttgtttctttaaaaataaatatgtattt

SEQ ID NO: 52436 - DNA, 120 bp, synthetic construct
  source 1..120: mol_type = other DNA
tcttcctagagagaataattcactgcaaatgtttcatttctgctacctccattagttccctcctagctagaaaaactgatgcttgcttaatgttaccagttagagcagccctggctggtg

SEQ ID NO: 52437 - DNA, 120 bp, synthetic construct
  source 1..120: mol_type = other DNA
aaccctgttggaagaaagtgcccatggtttctctggttctgccagtttgacagtttatggaggcttttgaatcgtaatagcaatgtgagggtgaggtacacctacagacattaaataatt

SEQ ID NO: 52438 - DNA, 120 bp, synthetic construct
  source 1..120: mol_type = other DNA
aagaaaattctttcctttataaattacccagcctctagtattcctttatagcaacagtggtccccaaactttctggcaccagggaccagtttcatggcagaccatttttccacagatggt

SEQ ID NO: 52439 - DNA, 120 bp, synthetic construct; identical to SEQ ID NO: 24576
  source 1..120: mol_type = other DNA

SEQ ID NO: 52440 - DNA, 120 bp, synthetic construct
  source 1..120: mol_type = other DNA
agcgttactgtgaggattcggtgtacgcggaagcccattacagcctagagccctaattattaataggtgtgtgtgagagggaggcctcattattaccaggtgagagacagggagctggga

SEQ ID NO: 52441 - DNA, 120 bp, synthetic construct
  source 1..120: mol_type = other DNA
tgttgagtctggagcactggcggctattcttaggggtttctatatttaaaatggggcctgactggcttgaggtcatctccagacagctgttgtcctgtgcctcttattttggcaaggagg

SEQ ID NO: 52442 - DNA, 120 bp, synthetic construct
  source 1..120: mol_type = other DNA
gttctgttcatcgtaagagctaacaatgatacggttcttccttgatgccaggcaacatcccaaacaactttaattaatttatttaactctcccaccagccctatgagatagggcctgcga

SEQ ID NO: 52443 - DNA, 120 bp, synthetic construct
  source 1..120: mol_type = other DNA
attggccaagctggtcttgaactcctgacctcaggtgatccacccacctcggcttcccaaagtgctgggattacaggcgtgagccacctcttccggccaattttaatattttttttgtag

SEQ ID NO: 52444 - DNA, 120 bp, synthetic construct
  source 1..120: mol_type = other DNA
gttatttttatgccgtttaaccgtaggaagtcacttagacaccctgttccttcctcgtctgggcaatggtgatagtaatagttcctaccttttagagtggctataggagtaaagtgtgta

SEQ ID NO: 52445 - DNA, 120 bp, synthetic construct
  source 1..120: mol_type = other DNA
ctcaaagtgttgggattataggtgtgagccaccgtgcctggcccctacaatgatttttttttaagctgtatgtgtgtgcgtactgtaacatgtacagaaagcacataacaaacatgtaca

SEQ ID NO: 52446 - DNA, 120 bp, synthetic construct
  source 1..120: mol_type = other DNA
tattttattttatatatgttatgttgttatgttattgatggagtctgtttcttgttgcccaagttggagtgcaatggcacgatctcagctcattgcaacctctgcctcccgggttcaagt

SEQ ID NO: 52447 - DNA, 120 bp, synthetic construct
  source 1..120: mol_type = other DNA
tcgtgatctgcctgcctcggcctcccaaagtgctgggattacaggcatgagccactaggtccagccacttttttgtatttttaatagagacagggcttcaccatgttgtccaggctggtc

SEQ ID NO: 52448 - DNA, 120 bp, synthetic construct
  source 1..120: mol_type = other DNA
atgtagctcactcatgcactctccaaatacacactcagcactgggctcccatccctgtgtagctcacaattctgtgcagtcctgtccttttttattaggaacatttttttttcttttttt

SEQ ID NO: 52449 - DNA, 120 bp, synthetic construct
  source 1..120: mol_type = other DNA
tctctctctctctctctctctctctctttgtcgccctctcgctctctcttgctctctttctctctcgctctctctttctcactctttctctctttctttcctttctttcttttctttctt

SEQ ID NO: 52450 - DNA, 120 bp, synthetic construct
  source 1..120: mol_type = other DNA
atgctaacacaaccgtatgaggtaggtactattgttagtatcctcattttacaaaattggaaactgaggcccagaaaggttgagtaacttgcccaaagtcacacagctaggaagtgatgg

SEQ ID NO: 52451 - DNA, 120 bp, synthetic construct
  source 1..120: mol_type = other DNA
ccacctttgcctcccaaagtgctggaattataggcgtgagccaccatgcccggcttattttttattttttgtagagatgggggtcttgccgtgttgtccaggttggtctcaaactcctga

SEQ ID NO: 52452 - DNA, 120 bp, synthetic construct
  source 1..120: mol_type = other DNA
cctttcctctgtcctccatccttctcccaggatggtgaagggggacctggtacccagtgatccccaccccaggatcctaaatcatgacttacctgctaataaaaactcattggaaaagtg

SEQ ID NO: 52453 - DNA, 120 bp, synthetic construct; identical to SEQ ID NO: 34250
  source 1..120: mol_type = other DNA

SEQ ID NO: 52454 - DNA, 120 bp, synthetic construct
  source 1..120: mol_type = other DNA
acttactggctaaaagtaggagtcctgaagtctgtgttttttttttttgttttgttttttgttttttttttttttgagatggaatcttgctctgtcgcccaggctggagtgcagtggcgc

SEQ ID NO: 52455 - DNA, 120 bp, synthetic construct
  source 1..120: mol_type = other DNA
cagaatctacaatgaactcaacaaatttacaagaaataaacaaacaaccccatcaacaagtaggcagaggatatgaacagacacttctcaaaagaagacatttatgcagccaacagacac

SEQ ID NO: 52456 - DNA, 120 bp, synthetic construct
  source 1..120: mol_type = other DNA
acatgcagtgatgaacacagatgcaaaaatcctcaacacaatactagcaaatcaaatccaacagcacatcaaaaaatgatacacaatattaaggtgagctttaccccagggagtaaagga

SEQ ID NO: 52457 - DNA, 120 bp, synthetic construct; identical to SEQ ID NO: 25416
  source 1..120: mol_type = other DNA

SEQ ID NO: 52458 - DNA, 120 bp, synthetic construct
  source 1..120: mol_type = other DNA
ggctctgttctgttccattgatctatatctctgtttttgtaccagtaccatgctgttttggttactgtagccttgtagtatagtttgaagtcaggtagtgtgatgcctccagctttgttc

SEQ ID NO: 52459 - DNA, 120 bp, synthetic construct
  source 1..120: mol_type = other DNA
atgaagaaatgctcatcatcactggccatcagagaaatgcaaatcaaaaccactatgagatatcatctcacaccggttagaatggcaatcattaaaaagtcaggaaacaacaggtgctgg

SEQ ID NO: 52460 - DNA, 120 bp, synthetic construct; identical to SEQ ID NO: 25417
  source 1..120: mol_type = other DNA

SEQ ID NO: 52461 - DNA, 120 bp, synthetic construct
  source 1..120: mol_type = other DNA
gatggagctgcctgactcagtgtgtgagtgtgtgtgcgtgcatgtgtgtgtgtgtgtgtgtgtatgtgtctgtctgcctgtctctctcctcctggacccagggcagccaagggcagggat

SEQ ID NO: 52462 - DNA, 120 bp, synthetic construct; identical to SEQ ID NO: 31575
  source 1..120: mol_type = other DNA

SEQ ID NO: 52463 - DNA, 120 bp, synthetic construct; identical to SEQ ID NO: 31576
  source 1..120: mol_type = other DNA

SEQ ID NO: 52464 - DNA, 120 bp, synthetic construct; identical to SEQ ID NO: 31577
  source 1..120: mol_type = other DNA

SEQ ID NO: 52465 - DNA, 120 bp, synthetic construct; identical to SEQ ID NO: 31578
  source 1..120: mol_type = other DNA

SEQ ID NO: 52466 - DNA, 120 bp, synthetic construct; identical to SEQ ID NO: 31579
  source 1..120: mol_type = other DNA

SEQ ID NO: 52467 - DNA, 120 bp, synthetic construct
  source 1..120: mol_type = other DNA
gtttgatttgcatttctctaatggccagtgatgatgagcattttttcatgtgtcttttggctgcataaatgtcttcttttgagaagtgtctgttcatatcctttgcccactttttgatgg

SEQ ID NO: 52468 - DNA, 120 bp, synthetic construct
  source 1..120: mol_type = other DNA
ggtccttcatgtcccttgtaagttggattcctaggtattttattctctttgaagcaattgtgaatgggaattcactcatgatttggctctctgtttgtctgttattggtgtataagaagg

SEQ ID NO: 52469 - DNA, 120 bp, synthetic construct
  source 1..120: mol_type = other DNA
tgtcaaggatattggtctaaaattctcttttttggttgtgtctctgccacactttggtatcaggatgatgctggcctcataaaatgagttagggaggattccctctttttctattgattg

SEQ ID NO: 52470 - DNA, 120 bp, synthetic construct
  source 1..120: mol_type = other DNA
gtcaattttggaataggtgtggtgtggtgctgaaaaaaatgtatattctgttgatttggggtggagagttctgtagatgtctattaggtccgcttggtgcagacctgagttcaattcctg

SEQ ID NO: 52471 - DNA, 120 bp, synthetic construct
  source 1..120: mol_type = other DNA
ttggagttgctcttctcgaggagtatctttgcggcgttctctgtatttcctgaatctgaatgttggcctgccttgctagattggggaagttctcctggataatatcctgcagagtgtttt

SEQ ID NO: 52472 - DNA, 120 bp, synthetic construct
  source 1..120: mol_type = other DNA
tgcatagtattccatggtgaacatgtgccacattttcttaattcagtctatcattgttggacatttaggttggttccaagtcttgctattgtgaatagtgccgcaataaacatacgtgtg

SEQ ID NO: 52473 - DNA, 120 bp, synthetic construct
  source 1..120: mol_type = other DNA
tccatatgaactttaaagtagttttttctaattctgtgaagacagtcattggtagcttgatggggagggcaatgaatctataaattaccttgggcagtatggccattttcatgatattga

SEQ ID NO: 52474 - DNA, 120 bp, synthetic construct
  source 1..120: mol_type = other DNA
aatggtttcagaaggaatggtaccagctcctccttgtacctctagtagaattcggctgtgaatccgtctggtcctggactctttttgttggtaagctattgattattgccacaatttcag

SEQ ID NO: 52475 - DNA, 120 bp, synthetic construct; identical to SEQ ID NO: 31580
  source 1..120: mol_type = other DNA

SEQ ID NO: 52476 - DNA, 120 bp, synthetic construct
  source 1..120: mol_type = other DNA
aaagaaagaaagagagagaaaagaaaagaaagaaagaaaagaaagaaagaaggaaggaaggacgggagggggggagggagggaggaaggaagggaggaaggaaggagaaagaaagaaact

SEQ ID NO: 52477 - DNA, 120 bp, synthetic construct
  source 1..120: mol_type = other DNA
aagaatacaaagtgcactctgagcttctaatggcctcataaactgtccagtctctcagtgtagacctcttttttttttttttttttttttttgagacggagtctcgctctgtcgcccagg

SEQ ID NO: 52478 - DNA, 120 bp, synthetic construct; identical to SEQ ID NO: 13699
  source 1..120: mol_type = other DNA

SEQ ID NO: 52479 - DNA, 120 bp, synthetic construct; identical to SEQ ID NO: 17854
  source 1..120: mol_type = other DNA

SEQ ID NO: 52480 - DNA, 120 bp, synthetic construct
  source 1..120: mol_type = other DNA
aacaatgtaaaagtgttcctatttctccacatcctctcctgcacctgttgtttcctgactttttaatgattgccattctaactggtgtgagatggtatctcattgtggttttgatttgca

SEQ ID NO: 52481 - DNA, 120 bp, synthetic construct
  source 1..120: mol_type = other DNA
gcattgaatctgtaaattaccttgggcagtatggccattttcacaatattgattcttcctacccatgagcatggaatgttcttccatttgtttgtatcctcttttatttccttgagcagt

SEQ ID NO: 52482 - DNA, 120 bp, synthetic construct
  source 1..120: mol_type = other DNA
tgccacaatttcagctcctgttattggtctattaagagattcaacttcttccacatgaaggtataggtgttttgcttgtatcgcaagcatcaaagtgccctcacatgaacacgttagctt

SEQ ID NO: 52483 - DNA, 120 bp, synthetic construct; identical to SEQ ID NO: 11026
  source 1..120: mol_type = other DNA

SEQ ID NO: 52484 - DNA, 120 bp, synthetic construct; identical to SEQ ID NO: 11027
  source 1..120: mol_type = other DNA

SEQ ID NO: 52485 - DNA, 120 bp, synthetic construct
  source 1..120: mol_type = other DNA
ccaaaaaagagcccacatcgccaagtcaatccaaagccaaaagaacaaagctggaggcatcacactacctgacttcaaactatactacaaggctacagtaaccaaaacagcatggtactg

SEQ ID NO: 52486 - DNA, 120 bp, synthetic construct
  source 1..120: mol_type = other DNA
agaactagaaataccatttgacccagccatcccattactgggtatatacccaaaggactataaatcatgctgctataaagacacatgcacacgtatgtttattgcggcactattcacaat

SEQ ID NO: 52487 - DNA, 120 bp, synthetic construct
  source 1..120: mol_type = other DNA
gtcagataagtagattgcaaaaattttctcccattctgtaggtcgcctgttcactctgatggtagtttcttttgctgtacagaagctctttagtttaattagatcccatttgtcaatttt

SEQ ID NO: 52488 - DNA, 120 bp, synthetic construct; identical to SEQ ID NO: 29972
  source 1..120: mol_type = other DNA

SEQ ID NO: 52489 - DNA, 120 bp, synthetic construct; identical to SEQ ID NO: 29973
  source 1..120: mol_type = other DNA

SEQ ID NO: 52490 - DNA, 120 bp, synthetic construct; identical to SEQ ID NO: 29974
  source 1..120: mol_type = other DNA

SEQ ID NO: 52491 - DNA, 120 bp, synthetic construct
  source 1..120: mol_type = other DNA
actcctcagcaaatgtaaaagaacataaattataacaaactgtctctcagaccacactgcaatcaaactagaactcaggattaagaaactcactcaaaactgctcaactacatggaaact

SEQ ID NO: 52492 - DNA, 120 bp, synthetic construct
  source 1..120: mol_type = other DNA
gctggtaccattccttctgaaattattccaatcaatagaaaaaaagggaatcctccctaactcattttatgaggccagcatcatcctgatactggcctggcagagacacaacaaaaaaag

SEQ ID NO: 52493 - DNA, 120 bp, synthetic construct
  source 1..120: mol_type = other DNA
ttacagattcaatgccatccccatcaagctaccaatgactttcttcaaagaattggaaaaaactactttaaagttcatatggaaccaaaaaagagcccgcattgccaagtcaatcctaag

SEQ ID NO: 52494 - DNA, 120 bp, synthetic construct
  source 1..120: mol_type = other DNA
tagaatggcaatcattaaaaagtcaggaaacaacgggtgctggagaagatgtggagaaataggaacacttttacactgttggtgggactgtaaactagttcaaccattgtggaagttggt

SEQ ID NO: 52495 - DNA, 120 bp, synthetic construct
  source 1..120: mol_type = other DNA
cctcaagaagagcaactccaagacacataattgtcagattcaccaaagttgaaatgaaggaaaaaatgggaagggcagccagagagaaaggtcgggttacccacaaagggaagcctatca

SEQ ID NO: 52496 - DNA, 120 bp, synthetic construct
  source 1..120: mol_type = other DNA
atctcaaaataataagagctaattatgacaaacccacagccaatatcatactgaatgggcaaaaactggaagcattccctttgaaaactggcacaagacagggatgccctctctcaccac

SEQ ID NO: 52497 - DNA, 120 bp, synthetic construct
  source 1..120: mol_type = other DNA
aacagcatggtactggtaccaaaacagaggtatagaccaatgcaacaaaagagagccctcagaaataatgccacatatctacaaccatctgatctttgacaaacttgacacaaacaagaa

SEQ ID NO: 52498 - DNA, 120 bp, synthetic construct
  source 1..120: mol_type = other DNA
aaatgtggcacatatataccacagaatactatgcagccataaaaaatgatgagttcatgtcctttgtagggacatggatgaagctggaaaccatcattctcagcaaactatcacaaggac

SEQ ID NO: 52499 - DNA, 120 bp, synthetic construct
  source 1..120: mol_type = other DNA
gcacccctcggctttgcgggcgggcgagcggccctcaggcgggagcgcgccaggagaggaaagaaagagggcgagggaggagagggggagcctcgagacaggaagaagcgaggaggaggc

SEQ ID NO: 52500 - DNA, 120 bp, synthetic construct; identical to SEQ ID NO: 27209
  source 1..120: mol_type = other DNA

SEQ ID NO: 52501 - DNA, 120 bp, synthetic construct
  source 1..120: mol_type = other DNA
ttttctcccattttggaggttgcctgttcactctgatggtagtttcttttgctgtgcagaagctctttagtttaattagatcccatttgtcaattttggcttttgttgccattgcttttg

SEQ ID NO: 52502 - DNA, 120 bp, synthetic construct; identical to SEQ ID NO: 24981
  source 1..120: mol_type = other DNA

SEQ ID NO: 52503 - DNA, 120 bp, synthetic construct; identical to SEQ ID NO: 24982
  source 1..120: mol_type = other DNA

SEQ ID NO: 52504 - DNA, 120 bp, synthetic construct
  source 1..120: mol_type = other DNA
cactctgtgagtaatgtaagcccatccttgggctgttcaccaagtggtttacactctggaaaaagcatcagtttggttttaaacaaaggagatactatacagcaaaaagctcagagcctt

SEQ ID NO: 52505 - DNA, 120 bp, synthetic construct
  source 1..120: mol_type = other DNA
agttatttcacttagaataatagcctttaatctcatccaggtcactgcaaatgctattaattcattccttttttatggctgcatagtattccatcatagatatatataaatatatataaa

SEQ ID NO: 52506 - DNA, 120 bp, synthetic construct
  source 1..120: mol_type = other DNA
tcatgaaataaagagtcaacggggcaaacgtaatcgttatcttattttaagaaattgccacagccaccccaatcttaagtgatcaccaccctgatcagtcagcagccatcaacattgagg

SEQ ID NO: 52507 - DNA, 120 bp, synthetic construct
  source 1..120: mol_type = other DNA
ctatcacgagaatagcacgggaaagactggcccccatgattcaatcatttccccttgggtccctcccacaacacgtaggaattctgggagatacaattcaagtttagatttgggagggga

SEQ ID NO: 52508 - DNA, 120 bp, synthetic construct; identical to SEQ ID NO: 5179
  source 1..120: mol_type = other DNA

SEQ ID NO: 52509 - DNA, 120 bp, synthetic construct
  source 1..120: mol_type = other DNA
tttgacaaggcattgaagccatgattggttggcaacccatgattctcaaaggagaaaagggctaaaaggtctagaactagaaataccatttgacccagccatcccattactgggtacata

SEQ ID NO: 52510 - DNA, 120 bp, synthetic construct; identical to SEQ ID NO: 24706
  source 1..120: mol_type = other DNA

SEQ ID NO: 52511 - DNA, 120 bp, synthetic construct
  source 1..120: mol_type = other DNA
ttgggtacatacccagtaatgggatggctgggtcaaatggtatttctagtactagatccctgaggaatcgccacactgacttccacaatggttgaactagtttacagtcccaccaacagt

SEQ ID NO: 52512 - DNA, 120 bp, synthetic construct
  source 1..120: mol_type = other DNA
tttgtatcctcttttatttcattgagcagtggtttgtagttctccttgaagaggtccttcatgttccttgtaagttggattcctagttatttttttttctttgaagcaattgtgaatggg

SEQ ID NO: 52513 - DNA, 120 bp, synthetic construct
  source 1..120: mol_type = other DNA
aaaaaaagactaaatctttcaaccattgtggaagtcagtgtggcgattcctcagggatctagaactagaaattccatttgacccagccatcccattactgggtatatactcaaaggatta

SEQ ID NO: 52514 - DNA, 120 bp, synthetic construct; identical to SEQ ID NO: 24707
  source 1..120: mol_type = other DNA

SEQ ID NO: 52515 - DNA, 120 bp, synthetic construct; identical to SEQ ID NO: 24708
  source 1..120: mol_type = other DNA

SEQ ID NO: 52516 - DNA, 120 bp, synthetic construct
  source 1..120: mol_type = other DNA
cccggcagccgccccgtctgagaagtgaggagcctctccgcccggcagccaccccatctgggaagtgaggagcgtctccgcccagcagccaccccgtccgggagggaggtgggggggtca

SEQ ID NO: 52517 - DNA, 120 bp, synthetic construct; identical to SEQ ID NO: 24709
  source 1..120: mol_type = other DNA

SEQ ID NO: 52518 - DNA, 120 bp, synthetic construct; identical to SEQ ID NO: 24710
  source 1..120: mol_type = other DNA

SEQ ID NO: 52519 - DNA, 120 bp, synthetic construct; identical to SEQ ID NO: 24711
  source 1..120: mol_type = other DNA

SEQ ID NO: 52520 - DNA, 120 bp, synthetic construct; identical to SEQ ID NO: 27720
  source 1..120: mol_type = other DNA

SEQ ID NO: 52521 - DNA, 120 bp, synthetic construct; identical to SEQ ID NO: 27721
  source 1..120: mol_type = other DNA

SEQ ID NO: 52522 - DNA, 120 bp, synthetic construct; identical to SEQ ID NO: 27722
  source 1..120: mol_type = other DNA

SEQ ID NO: 52523 - DNA, 120 bp, synthetic construct
  source 1..120: mol_type = other DNA
ggtttcagcgagccgagatcgcgccactgcacaccagcccaggtgacagtgagtctttgtctcaaaaaaaaaaaaaaattttacgataaaatgcatcaatcttaagggttgagaatgaca

SEQ ID NO: 52524 - DNA, 120 bp, synthetic construct; identical to SEQ ID NO: 17159
  source 1..120: mol_type = other DNA

SEQ ID NO: 52525 - DNA, 120 bp, synthetic construct; identical to SEQ ID NO: 17160
  source 1..120: mol_type = other DNA

SEQ ID NO: 52526 - DNA, 120 bp, synthetic construct
  source 1..120: mol_type = other DNA
agtgctgaggaggactgggctccccagtgcctggtctgggattacgactctcgaggaaagcacgacttcatcggagaattctctaccaccttcgaggagatgcagaaggcctttgaggag

SEQ ID NO: 52527 - DNA, 120 bp, synthetic construct
  source 1..120: mol_type = other DNA
ggcctctgcttgttcctgccccaggcccagtgggactgtgtgaaccccaaatacaagcagaagagacgcagttataagaactcaggagtggtcgtcctggctgacctcaaggtgagaggt

SEQ ID NO: 52528 - DNA, 120 bp, synthetic construct
  source 1..120: mol_type = other DNA
atcaccagggcttaccttccacaaacacatttaacaacagacaaaacgtgaacgaggagaaactggagtgagcgtttgagtgaaccagccacagtctctacgtgtcatccaaggagcccg

SEQ ID NO: 52529 - DNA, 120 bp, synthetic construct
  source 1..120: mol_type = other DNA
ggctcccggcccactgcaggtggccattgacttcaccgcctccaatggagacccgcggaacagctgctccctgcactacatcaacccctaccagccgaacgagtacctgaaggcactggt

SEQ ID NO: 52530 - DNA, 120 bp, synthetic construct
  source 1..120: mol_type = other DNA
gttgcactgagctgagatcgcaccactgcagtccagcctggcctgtagagcaagactctgttttaaaaaagaaaaaagaaaacaacaaaaaacttcaactggcttcagcagaaaaaatgg

SEQ ID NO: 52531 - DNA, 120 bp, synthetic construct
  source 1..120: mol_type = other DNA
gaacagccagcgcagaggcccccaggcaggacagagctcaggagggcgggggcccagctggttgactacgtctccctcaaaggtgcaggtgtctcgggcacagggctgtccatcgcctca

SEQ ID NO: 52532 - DNA, 120 bp, synthetic construct
  source 1..120: mol_type = other DNA
agaaaagtggaggagtcaagatggccgaataggaacagctccggtctacagctcccagcgtgagcgacgcagaagacgggtgatttctgcatttccatctgaggtaccgggttcatctca

SEQ ID NO: 52533 - DNA, 120 bp, synthetic construct
  source 1..120: mol_type = other DNA
aaagtagataaaaccacaaagatggggaaaaaacagaacagaaaaactggaaactctaaaacgcagagcccctctcctcctccaaaggaacgcagttcctcaccagcaacggaacaaagc

SEQ ID NO: 52534 - DNA, 120 bp, synthetic construct
  source 1..120: mol_type = other DNA
gcttcataagtgaaggagaaataaaatactttatagacaagcaaatggtgagagattttgtcaccaccaggcctgccctaaaagagctcctgaaggaagcgctaaacatggaaaggaaca

SEQ ID NO: 52535 - DNA, 120 bp, synthetic construct
  source 1..120: mol_type = other DNA
tcaggattaagaatctcactcaaagccactcaactacatggaaactgaacaacctgctcctgaatgactactgggtacataacaaaatgaaggcagaaataaagatgttctttgaaacca

SEQ ID NO: 52536 - DNA, 120 bp, synthetic construct
  source 1..120: mol_type = other DNA
attgatgcaaaaatcctcaataaaatactggcaaaccgaatccagcagcacatcaaaaaggttatccaccatgatcaagtgggcttcatccctgggatgcaaggctggttcaatatacgc

SEQ ID NO: 52537 - DNA, 120 bp, synthetic construct
  source 1..120: mol_type = other DNA
actgctcaaggaaataaaagaggacacaaacaaatggaagaacattccatgctcatgggtaggaagaatcaatatcgtgaaaatggccatactgcccaaggtaatttacagattcaatgc

SEQ ID NO: 52538 - DNA, 120 bp, synthetic construct
  source 1..120: mol_type = other DNA
ggaagtcagtgtggcgattcctcagggatctagaactagaaataccatttgactcagccatcccattactgggtatatacccaaaggactataaatcatgctgctataaagacacatgca

SEQ ID NO: 52539 - DNA, 120 bp, synthetic construct
  source 1..120: mol_type = other DNA
agagtccaggaccagatggattcacagctgaattctaccagaggcatgaggaggaactggtagcattccttctgaaactattccaatcaatagaaaaagagggaatcctccctaactcat

SEQ ID NO: 52540 - DNA, 120 bp, synthetic construct
  source 1..120: mol_type = other DNA
atactgcccaaggtcatttatagattcaatgccattcccatcaagctaccaatgactttcttcacagaattggaaaaaactactttaaagttcatatggaaccaaaaaagagcccgcatc

SEQ ID NO: 52541 - DNA, 120 bp, synthetic construct
  source 1..120: mol_type = other DNA
aaaggatatgaacagacacttctcaaaagaagacatttatgcagccaaaaaacacatggaaaaatgctcatcatcactggccatcagagaaatgcaaatcaaaaccacaatgagatatca

SEQ ID NO: 52542 - DNA, 120 bp, synthetic construct; identical to SEQ ID NO: 12839
  source 1..120: mol_type = other DNA

SEQ ID NO: 52543 - DNA, 120 bp, synthetic construct; identical to SEQ ID NO: 12840
  source 1..120: mol_type = other DNA

SEQ ID NO: 52544 - DNA, 120 bp, synthetic construct; identical to SEQ ID NO: 12841
  source 1..120: mol_type = other DNA

SEQ ID NO: 52545 - DNA, 120 bp, synthetic construct; identical to SEQ ID NO: 12842
  source 1..120: mol_type = other DNA

SEQ ID NO: 52546 - DNA, 120 bp, synthetic construct
  source 1..120: mol_type = other DNA
ctgggttcaagtgattctcctgcctcagcctctcaagtagctaggattgaaggcatgaagtagaaacacaatttgacccagccgtcccattactgggtatatacccaaaggattataaaa

SEQ ID NO: 52547 - DNA, 120 bp, synthetic construct; identical to SEQ ID NO: 16019
  source 1..120: mol_type = other DNA

SEQ ID NO: 52548 - DNA, 120 bp, synthetic construct
  source 1..120: mol_type = other DNA
ctgtaattccagcactttaggaggtcaaggcaggtggatcacttgagcccaggagtttgagagcagtctgggcagcacgatgaaaccccatctctacaaaaaaatacaaacattacccag

SEQ ID NO: 52549 - DNA, 120 bp, synthetic construct
  source 1..120: mol_type = other DNA
aagcattaagagtttgaaggacagaagccaggcgtggtgactcacacctgtaatcccagtactttgggaggccgaggcaggcagactgcttgagctcacaagttcaagaccagcctcctg

SEQ ID NO: 52550 - DNA, 120 bp, synthetic construct; identical to SEQ ID NO: 16021
  source 1..120: mol_type = other DNA

SEQ ID NO: 52551 - DNA, 120 bp, synthetic construct
  source 1..120: mol_type = other DNA
aattaaaaccacaatgagataccatttcacaccagttagaatggcgatcattaaaaagtcagggaacaacaggtgctggagaggatgtggagaaataggaacacttttacactgttgatg

SEQ ID NO: 52552 - DNA, 120 bp, synthetic construct; identical to SEQ ID NO: 31666
  source 1..120: mol_type = other DNA

SEQ ID NO: 52553 - DNA, 120 bp, synthetic construct
  source 1..120: mol_type = other DNA
ttttggctgcataaatgtcttcctttgagaagtgtctgttcatgtcctttgcccactttttgatggggttgtttgtttttttcttgtaaatttgtttgagttcattgtagattctggata

SEQ ID NO: 52554 - DNA, 120 bp, synthetic construct
  source 1..120: mol_type = other DNA
atcccttgtaagttggattcctaggtattttattctttttaaagcaattgtgaatgggagttcactcatgatttggctctctgtttgtctgttgttggtgtataagaatgcttgtgattt

SEQ ID NO: 52555 - DNA, 120 bp, synthetic construct
  source 1..120: mol_type = other DNA
tttctgtgggatgggtggtgatatcccctttaacattttttattgcgtctgtttgattcttctctctttttttctttattagtcttgctagcggtctatcaattttgttgatcctttcaa

SEQ ID NO: 52556 - DNA, 120 bp, synthetic construct
  source 1..120: mol_type = other DNA
ttagagactaggattgcaacccctgcctttttttgttttccatttgcttggtagatctttctccatccttttattttgagcctatgtgtgtctctgtccatgagatgggtttcctgaata

SEQ ID NO: 52557 - DNA, 120 bp, synthetic construct
  source 1..120: mol_type = other DNA
tttctctaaacttcccttctcgcttcatttcattcatttcatcttccatcgttgataccctttcttccagttgatcgcatcggctcctgaggcttctgcattcttcacgtagttctcgag

SEQ ID NO: 52558 - DNA, 120 bp, synthetic construct
  source 1..120: mol_type = other DNA
ctggctcctttgtttacccaagcaagcctgggcaatggcgggcgcccctcccccagcctcactgccaccttgcagtttgatctcagactgctgtgctagcaatcagcaagactctgtggg

SEQ ID NO: 52559 - DNA, 120 bp, synthetic construct; identical to SEQ ID NO: 31667
  source 1..120: mol_type = other DNA

SEQ ID NO: 52560 - DNA, 120 bp, synthetic construct; identical to SEQ ID NO: 31668
  source 1..120: mol_type = other DNA

SEQ ID NO: 52561 - DNA, 120 bp, synthetic construct; identical to SEQ ID NO: 31669
  source 1..120: mol_type = other DNA

SEQ ID NO: 52562 - DNA, 120 bp, synthetic construct
  source 1..120: mol_type = other DNA
aagctctttagtttaattagatcctatttgtcaattttggcttttgttgccatcgcttttggtgttttagacatgaaggccttgcccatgcctatgtcctgaatggtaatgcctaggttt

SEQ ID NO: 52563 - DNA, 120 bp, synthetic construct
  source 1..120: mol_type = other DNA
acctgcaaacagggacaatttgacttcctcttttcctaattgaataccctttattttcttcccctgtctaattgccctggccagaacttccaacactatgctgaataggagtggtgagag

SEQ ID NO: 52564 - DNA, 120 bp, synthetic construct
  source 1..120: mol_type = other DNA
ctttattagtcttgctagcagtctatcaattttgttgatcctttcaaaaaaccagctcctggattcattaattttttgaagggttttttgtgtctctatttccttcagttctcctccgat

SEQ ID NO: 52565 - DNA, 120 bp, synthetic construct
  source 1..120: mol_type = other DNA
tttagtccatttacatttaaagataatattgttatgtgtcaatttgatcctgtcattatgatgttagctggttattttgatcgttagttgatgcagtttcttcctagcctcgatggtctt

SEQ ID NO: 52566 - DNA, 120 bp, synthetic construct
  source 1..120: mol_type = other DNA
tgtcaaagtcattctccatccagctttgttccgttgctggtgaggaactgccttcctttggaggacgagaggtgctttgctttttagagtttccagtttttctgctctgttttttcccca

SEQ ID NO: 52567 - DNA, 120 bp, synthetic construct
  source 1..120: mol_type = other DNA
caggagaatcgcttgaacccaggaggcagaggtttcagtgagccaatatcacaccactgtactccagcctgggcaacagagtgaaactctgtctcaataaaataaaataaaataaaataa

SEQ ID NO: 52568 - DNA, 120 bp, synthetic construct
  source 1..120: mol_type = other DNA
gtagttgctttcttaacctcatcaaattcatgaagatttagccgaggcccatggtgagtcttaagctggatatctctcatgttttaaaagatgggtgtttgaaggagcaactcacaagag

SEQ ID NO: 52569 - DNA, 120 bp, synthetic construct
  source 1..120: mol_type = other DNA
catagactgcaatgacttcccacattttattttattagctttttacctcttatatttaagtctttatctggagtttacttctgaagatgatgtgaagcatgcgtctaaacggaagggaag

SEQ ID NO: 52570 - DNA, 120 bp, synthetic construct
  source 1..120: mol_type = other DNA
taaccttacttttctttaaagacccttctccagcagccacatgctgagatagtgagagttaggacttcaacgtatgaatttggggggcaacaattttagccccaaatagtacctatgctt

SEQ ID NO: 52571 - DNA, 120 bp, synthetic construct
  source 1..120: mol_type = other DNA
cctacctattcccttgatccttgttagctggtgggtctttggggtaaaagagagatcttgagactccatatcctatattttttctagaaactccccacctgctttcaaacacacatatac

SEQ ID NO: 52572 - DNA, 120 bp, synthetic construct
  source 1..120: mol_type = other DNA
caggggagagtagccaacagagagatactcaggcctttgcagtccttcttttaagatttggaattgccacacagcaggtgctcttcagtcatttgaaagagaaaacttaacattttccta

SEQ ID NO: 52573 - DNA, 120 bp, synthetic construct
  source 1..120: mol_type = other DNA
cccaaagtactggaattacagatgtgagccactgctcccacctgaatcttaatcttaatgtgattcttttgcagactatagactagagtttgacatatgctggtgagagagagagagaga

SEQ ID NO: 52574 - DNA, 120 bp, synthetic construct
  source 1..120: mol_type = other DNA
atcagggctcttttatgctgccttgactatatgggtcctctcgtaactcccactctccattataaattcctaatttactctctctgcaccaagtctgtatttccctcactctgaatattt

SEQ ID NO: 52575 - DNA, 120 bp, synthetic construct
  source 1..120: mol_type = other DNA
atgagatgccagaaccacctatcatgactacctaactgactacctgctttctgttgactaactgctcttccttacccctccctaaattctgtattctcatatatgattgcatttctttcc

SEQ ID NO: 52576 - DNA, 120 bp, synthetic construct
  source 1..120: mol_type = other DNA
gaattctatccagccattggctattacaaataaagctacaagtaacatgttcatactttgtatggatacagtctttcatttctcttgtgtagatatctaggagtataatggctgggtagt

SEQ ID NO: 52577 - DNA, 120 bp, synthetic construct
  source 1..120: mol_type = other DNA
cctcagcctcctaagtaactgggattacaggcatgcaccaccacatgcagctaattttgtatttccattagagacagggtttctccatgttggtcaggctggtctcgaactcttgacctc

SEQ ID NO: 52578 - DNA, 120 bp, synthetic construct
  source 1..120: mol_type = other DNA
gcatcagttgtacatattaaggaatgaggggtgaggactttggtggaaattacacagatcttcctccaagccatgacttgacattggtattcttccgatgacttgatgtccttatgttta

SEQ ID NO: 52579 - DNA, 120 bp, synthetic construct
  source 1..120: mol_type = other DNA
tgcctgtttcctctatctacttttgctgcacctgctgtgatagtgattgttttgtgtatataggtaccattgccttcagagattaagggcgcacattgtgagcagaaataaaccaatgga

SEQ ID NO: 52580 - DNA, 120 bp, synthetic construct
  source 1..120: mol_type = other DNA
aatcataaagtggggaggcagagctacaaacaagctgtgggacttcaatcatacttgctttcttccatactattataagaataaaataaaaaaggaaggaagggagaggccgaggcaggc

SEQ ID NO: 52581 - DNA, 120 bp, synthetic construct
  source 1..120: mol_type = other DNA
cttgagctcctcttctcgttgtaaagtgcattgcacctataaagagaggagtgcagaatacttgtagaagtttgtggggggacagtgaaggacatttattggtctagttaatggtaatag

SEQ ID NO: 52582 - DNA, 120 bp, synthetic construct
  source 1..120: mol_type = other DNA
ctatctcctgacctcgcgatccgcctgccttggactcccaaagtgctgggattagaggcatgagccaccgcacctggacatgtttgtttttttcctggtgttctgagtgtcctgtggcaa

SEQ ID NO: 52583 - DNA, 120 bp, synthetic construct
  source 1..120: mol_type = other DNA
aaactttctgctttatgtacatatgaaagtagaggttccaaaatgttaagttaattgctatcgtcctctagcaagtctctacagaagtcagaaataggacagctactgtgaataggtact

SEQ ID NO: 52584 - DNA, 120 bp, synthetic construct
  source 1..120: mol_type = other DNA
tttctccctggactcctctctgtgggttcaaagtgaagaagtcttctgttgggttctcagctcatcttttcatcacttgcttctcttagataatgttcaaatactggttacaaataggag

SEQ ID NO: 52585 - DNA, 120 bp, synthetic construct
  source 1..120: mol_type = other DNA
gggattctgcaaggactgtgacatccaatgggagggtgcttatgtgtggtgtgtatagagacctaataagaactacttcaaagttttacagaacttgtcagaagtcttataactcgtacc

SEQ ID NO: 52586 - DNA, 120 bp, synthetic construct
  source 1..120: mol_type = other DNA
tttatggtttacttaaccctgtagttcagagttcttatgcagcgcaaaattttggggagcagaggaacctcttatttgtaggtcatctgtccactaaagttaccattggatgtcccatca

SEQ ID NO: 52587 - DNA, 120 bp, synthetic construct
  source 1..120: mol_type = other DNA
tgatttgcacaagagaatgctcaacttttccactccacattttactatgtaaggaatgaaaccaaaactgtgtatgtctctctgtctccagagcctttggtggaaacaagtccttctgcc

SEQ ID NO: 52588 - DNA, 120 bp, synthetic construct
  source 1..120: mol_type = other DNA
ttttggaattagctctaataagctcagcaaactttgtgtaagatctaattaaggggtatcttcttgtatgctaactcttccagatttcatcttactatttggtcatcattacatttgacc

SEQ ID NO: 52589 - DNA, 120 bp, synthetic construct
  source 1..120: mol_type = other DNA
tgctttccacagtggctgagctaattaacattcccatcaacagtgtataagcattcccttttcttcacagcctcgccagcatcggttgttttttgactttttaataacggccattcttac

SEQ ID NO: 52590 - DNA, 120 bp, synthetic construct
  source 1..120: mol_type = other DNA
tgaagcagagagggccctgctgtaccatgatctctgcacaggcagggtggggtatcttaggttgctagtcaatgtcaccaggtgtttcaaatacctggatttctgcctgggagtggagtg

SEQ ID NO: 52591 - DNA, 120 bp, synthetic construct
  source 1..120: mol_type = other DNA
aatttataaggaaaaaaggtttaattgactcacagttatccacggtttttaggggaggcctcaggaagcttacaattatggtggaaggcacatcttcacagggtggcaggagagagaatg

SEQ ID NO: 52592 - DNA, 120 bp, synthetic construct
  source 1..120: mol_type = other DNA
cctagcagagggttctccatgagggctctaaccctacagcaaatttctgcttggacatctaggtgtttccatatatcctctgaaatctaggtggaggtccccaaacttcaattcttgact

SEQ ID NO: 52593 - DNA, 120 bp, synthetic construct
  source 1..120: mol_type = other DNA
tgtgatgaaaaaattcctgaaactgtgtaatttataagggaaaaaggtttaattgactcacagttccacatggctggagagccctcaagaaacttgcaattatggcaggaggcacctcct

SEQ ID NO: 52594 - DNA, 120 bp, synthetic construct
  source 1..120: mol_type = other DNA
gccctgacccttcatagtctcgtgactttcacattgctctaataagatatcaaaatttgagtgaggggttcagttcctatctctgttctcccagtaatgcaacaaaaagggtaacttgtc

SEQ ID NO: 52595 - DNA, 120 bp, synthetic construct
  source 1..120: mol_type = other DNA
caatattcttagaagggtgaacacattcaggttacaatggaaaaattcttattcaggagacttcctctgcaatgttgtttgttcatagcagctgtggtagcacccgccaaatccaggaag

SEQ ID NO: 52596 - DNA, 120 bp, synthetic construct
  source 1..120: mol_type = other DNA
tcctgttaatgtagctatatttcttttggtataagattcaacagatgctccaaacccagttctaccccatgctggaggacctaagtacattgtggcatacccacttcttactggcagaaa

SEQ ID NO: 52597 - DNA, 120 bp, synthetic construct
  source 1..120: mol_type = other DNA
actttgcttttccaaccgtcttagcaaacggcacaccaggagattgtatcccacacctggcacgaagggtcctatgcccacggagacttgctcattgctaatacagcagtctgagatcaa

SEQ ID NO: 52598 - DNA, 120 bp, synthetic construct
  source 1..120: mol_type = other DNA
aaaaacagagcagaaaaactgaaaattctaaaatcagagcgcctcttctactctactccaaaggaacgcagctcctcaccagcaatgaaacatggagaatgactctgacgagctgagaga

SEQ ID NO: 52599 - DNA, 120 bp, synthetic construct
  source 1..120: mol_type = other DNA
gaagcactaaacatggaaaggaacaactggtaccacccactgcaaaaacatgccaaattgtaaagaccagcgaggctaggaagaaagtgcatcaactaacgagcaaaataaccagctaac

SEQ ID NO: 52600 - DNA, 120 bp, synthetic construct
  source 1..120: mol_type = other DNA
tcacaattaaaagaactagagaagcaagagcaaacacatttaaaagctagcagaaggcaagaaataactaagatcagagcagaactgaaggaaatagagacacaaaaaacccttcaaaaa

SEQ ID NO: 52601 - DNA, 120 bp, synthetic construct
  source 1..120: mol_type = other DNA
cactcctattcaacatagtgttggaagttctggccagggcaatcaggcaggagaaggaaataaagggtattcagttaggaaaagaggaaatcaaattgttcctgtttgcagatgatgtga

SEQ ID NO: 52602 - DNA, 120 bp, synthetic construct
  source 1..120: mol_type = other DNA
gcaaggacttcatgtctaaaacacccaaagcaatggcaacaaaagccaaaactgacaaatgggaactaattaaactaaagagcttctgcacagcaaaagaaactatcatcagagtgaata

SEQ ID NO: 52603 - DNA, 120 bp, synthetic construct
  source 1..120: mol_type = other DNA
agaaaacagcagaatcacagggcaaatgtccatgggagctgatgaagagagactcagtattcaaagacttttacaacttcataagcaaagcttaagactcagtgataggctcacgtgata

SEQ ID NO: 52604 - DNA, 120 bp, synthetic construct
  source 1..120: mol_type = other DNA
acccaatgtttagctcccacttaaaagtaagaacatgcagtatttggttttttgttcctgcattaattcatttaggataatggcctccagctacatccacattgcagcaaaggacatgat

SEQ ID NO: 52605 - DNA, 120 bp, synthetic construct
  source 1..120: mol_type = other DNA
tggctagtcagatatcccaggacaatttattgaataggaagttctttccccattgcttgtttttgttgagtttgtcaaagatcagatggctgtacgtggcactgtttctgggctctctat

SEQ ID NO: 52606 - DNA, 120 bp, synthetic construct
  source 1..120: mol_type = other DNA
gttgaattggttgaattggagtggtaagaataggcatccttgtcttgttccagttctcaatgggaatgcttctttttttttttttggtctgtttagtgtgatgctggttgtgcatttgtc

SEQ ID NO: 52607 - DNA, 120 bp, synthetic construct
  source 1..120: mol_type = other DNA
tgctagctgcggggttagtttatttacctttttctagttcctgtaggtgtgatgttagatcgttaatttgagatctttctagctttttgaggtgggtatttagtgctataatcttttgtc

SEQ ID NO: 52608 - DNA, 120 bp, synthetic construct
  source 1..120: mol_type = other DNA
gggctactggatcaggtcttgctatctttatatatgctgttctctctatcatcccttacttgtccttcacaactcagctcatgctatcttctgcagaaagcttttaaatgatagacccca

SEQ ID NO: 52609 - DNA, 120 bp, synthetic construct
  source 1..120: mol_type = other DNA
gaactggccaaccaaacggtcatccaaaattagagttttatacctttggtaactgttagccaccgtttctaatttcatatcgtaattatatgtcagacccaggccattatacatgctatc

SEQ ID NO: 52610 - DNA, 120 bp, synthetic construct
  source 1..120: mol_type = other DNA
cgtgtttcctaaattcccgaccaacatttctgaatgctgaacctttccaggtgggtgacctgcaggccctttaaatctaaatttaccaaattcagctcattatcttaacctcaaaatttt

SEQ ID NO: 52611 - DNA, 120 bp, synthetic construct
  source 1..120: mol_type = other DNA
ccaattgaaactttagttcaaaagcatccagtatgagggagcagtgaagtttgcattttcctgatgaaaatgttggaagaggtatttggctttgttggcggggagggcaatgatttatgc

SEQ ID NO: 52612 - DNA, 120 bp, synthetic construct
  source 1..120: mol_type = other DNA
gaggttcctccatattgttgtgtttggcaatcaatggttcatttcttttcattgctgagtattccatggtatgaatgtactacaatgttttttactcactcacctgtatgaatatcagaa

SEQ ID NO: 52613 - DNA, 120 bp, synthetic construct
  source 1..120: mol_type = other DNA
ttacagagtttccattgctatgtgtttgagttcactgctcttttcttctgcaatatatactttggagttaatcccatccagcagatttttaatatcagacattgtagtttttatctccat

SEQ ID NO: 52614 - DNA, 120 bp, synthetic construct
  source 1..120: mol_type = other DNA
gattggctaccaaggaacatccttatctgaatggttgaggttgtattgatctaaaaaatctccagagataatagtggacagttgctatcacttcttgggttcatggacctcatcaccatc

SEQ ID NO: 52615 - DNA, 120 bp, synthetic construct
  source 1..120: mol_type = other DNA
gtccacgtggacgcattatttagctcccatttgtcaatgaggacatgaggtctttgattttctgtgtctgagttgtttcacttaagataatggtcttcattcccatccatgttgctgcaa

SEQ ID NO: 52616 - DNA, 120 bp, synthetic construct
  source 1..120: mol_type = other DNA
agtgatgagaatatagtaggaaataagattagtcaaagttcctgtctccatggagcttataccgaaataatgcaaagtaggactataattaagtagtggatatattatttttgtcatccc

SEQ ID NO: 52617 - DNA, 120 bp, synthetic construct
  source 1..120: mol_type = other DNA
cagctaattattctgatgcaaaacctccctcagacaattaacttatctgagagactatgctgtcttttaagaacagggcaaactatcatgttcattctgtcttgttcactcacctgtcct

SEQ ID NO: 52618 - DNA, 120 bp, synthetic construct
  source 1..120: mol_type = other DNA
ttgaactatgagaacccatggacacagggaggggaacatctcacaatggggcttgtcgtgggttggaggggtaggggagggatagcattaggagaaatacctaatgtagatgatgggttg

SEQ ID NO: 52619 - DNA, 120 bp, synthetic construct
  source 1..120: mol_type = other DNA
acaaaaacacctatactaagttgatcattttcctagaaatgtaggccagtcacatacatttctttgcaatttacttttcttacatacaaaaatataagggacctccagctaactgcagga

SEQ ID NO: 52620 - DNA, 120 bp, synthetic construct
  source 1..120: mol_type = other DNA
cttgaggcacattttatctaggttgccttgtgatcagataaaacatatttaccccaccgcagaaaacagaaacttttttagtgatccaattgcagtctctctgatgtacccagaactact

SEQ ID NO: 52621 - DNA, 120 bp, synthetic construct
  source 1..120: mol_type = other DNA
gcaagatggtgagatgtccccgttaagatttttaaagggagttatagtgaaaatagaactgggaatataaagctagtgttaggataatcatgagaaagaaataactctctctggagctaa

SEQ ID NO: 52622 - DNA, 120 bp, synthetic construct
  source 1..120: mol_type = other DNA
ctgcatttattctatccccattttattgcccattcattgctccatgtcagttcaattctattctatttcggcttgagatatacccacaatataatgctagacatttttagtcaaaagcat

SEQ ID NO: 52623 - DNA, 120 bp, synthetic construct
  source 1..120: mol_type = other DNA
gatgcccacctctaactgtagcaatttagatctggcagatctagtgtggcccaagaatatgcatttctaataatcattccttgcagttaattatgcacagtaagcttggacaacaattgc

SEQ ID NO: 52624 - DNA, 120 bp, synthetic construct
  source 1..120: mol_type = other DNA
gctctttggacagatgatgtgcttagattatttacaatccaccaccaaaaaagatttggaaacaagattataatttgccattgataggaggtgaaactttagctagatggtaggatctcc

SEQ ID NO: 52625 - DNA, 120 bp, synthetic construct
  source 1..120: mol_type = other DNA
tctaaataaacatatgtgtttaccagtgagtttaatgccaataaaacagttcctattcagggtgccttatatctggtaagcagaactaccaactgggcagagggccaacccacagtccaa

SEQ ID NO: 52626 - DNA, 120 bp, synthetic construct
  source 1..120: mol_type = other DNA
actcatattttctggaaactagtcactttaagtaattcctagttttgcagtttagaggcttcttggatgatccctacagctgtttctggaaggaacctgagggatcatgcaccagacagt

SEQ ID NO: 52627 - DNA, 120 bp, synthetic construct
  source 1..120: mol_type = other DNA
aaatgactatccactcctgtaacaactcctcaaaatcattactatatattgctgtgggccagatttgtgcatttctaggattgtcccactgtggcagttatcggctgcagtatgtagcat

SEQ ID NO: 52628 - DNA, 120 bp, synthetic construct
  source 1..120: mol_type = other DNA
aggttaggcacctacccctgtcagaatgattcaataggctcaatctctcttaccccgttcccctcccaatccctccacatattaaaagctttctatctacctttttgcatttaaaaacct

SEQ ID NO: 52629 - DNA, 120 bp, synthetic construct
  source 1..120: mol_type = other DNA
aaatatatgtattttgatttaaatagtgtttaggtacttttttttttttttttttgagatggagtctggctctgtcgcccaggatggagtgcagtggcgtgatctcggctcactgcaagc

SEQ ID NO: 52630 - DNA, 120 bp, synthetic construct
  source 1..120: mol_type = other DNA
tttgggtttccatttccttaaatcaacagcatgttcagttacagcacattgctaagggttaattttcaaaccaatgagtggtgagaagggctagtgaaaataaaaggggaaaaacccaac

SEQ ID NO: 52631 - DNA, 120 bp, synthetic construct
  source 1..120: mol_type = other DNA
aatatttatgcagatacatacataattatagtgccacatttgaaatatcctacttttgtatattacagattgcatgaaatagcccagaatggaggttcagttgatctttaagagaactca

SEQ ID NO: 52632 - DNA, 120 bp, synthetic construct
  source 1..120: mol_type = other DNA
gggtgacatggggaacacctgtgaggcattcagaacagagcctgtcatacaataaatgccatgtcagtgtttgctcttattctcagtatacagagatctgctttgatcttttcatcttct

SEQ ID NO: 52633 - DNA, 120 bp, synthetic construct
  source 1..120: mol_type = other DNA
ctctagtttgagttatgataagttaaagcagtttaagaatttaacgaactcccctctccctgattaaatctacttgttagcactgtgttcttactgcaaatcccgttgccttgccagaag

SEQ ID NO: 52634 - DNA, 120 bp, synthetic construct
  source 1..120: mol_type = other DNA
cagatcatcgggagtgcactcagtccagagggacaaatgttcagagtctgcatcacctaatattacaagcatctttattgagactgatagaagtgaatttctcaggtcagaaaacagaag

SEQ ID NO: 52635 - DNA, 120 bp, synthetic construct
  source 1..120: mol_type = other DNA
tctaccattataatcattcctttcaagataaccttaacttccacaccccaatttctaactggcctggcaaaactcagacctttggtgcaaaatcctccatctctatgcctgagcccttgt

SEQ ID NO: 52636 - DNA, 120 bp, synthetic construct
  source 1..120: mol_type = other DNA
ccatcacttgagtaaattcaatacatggtttcaagtatattctagccctagcctgatccacagggaaggttctggaccacaagcaacatggcagagttgttcactcttgaggtaaaggag

SEQ ID NO: 52637 - DNA, 120 bp, synthetic construct
  source 1..120: mol_type = other DNA
ttagatacacaaaattaggacgtcaagaaagaatcacttccccccctcccgcaagttattccttaacaattctcctagggctatcagcactgggacatgagaggtttaatcaaatttgtg

SEQ ID NO: 52638 - DNA, 120 bp, synthetic construct
  source 1..120: mol_type = other DNA
tattacagtatgacctgtctcctgaactttgaagccatttctttccttcagaggagataagaaaatgtgtcttatcttaagtctggaagaaacacggagcccagtatcaagggagtggag

SEQ ID NO: 52639 - DNA, 120 bp, synthetic construct
  source 1..120: mol_type = other DNA
atggaggttttttattttgtgaagtgcattaataggtgatcacatttcatcctgggagagctgctggagaggaatattgatttagcctgttatggttgagtctttggggtcttgagcttc

SEQ ID NO: 52640 - DNA, 120 bp, synthetic construct
  source 1..120: mol_type = other DNA
cttatctacaccccttctttcacatcctaaatattttctttggataaatgtgtagggcaagatgaagaaaagaagagaaaaaagtagtcagagcttgggagtactgaaacgctttggact

SEQ ID NO: 52641 - DNA, 120 bp, synthetic construct
  source 1..120: mol_type = other DNA
tgaaagaattatatagtctagtggatggcaattctcttggtacagtactcacaggatgtcagaagtgctttgatttgcatgcaaatagaaactgcattcctaaaagacccttaattgaag

SEQ ID NO: 52642 - DNA, 120 bp, synthetic construct
  source 1..120: mol_type = other DNA
accagaataaaacatttaattcttcaacactcaaaggcatgtcaggtattgaaatccaagtaggcacttttgactaattgttagtagtttgtagaattcaaggattagggttggcttcct

SEQ ID NO: 52643 - DNA, 120 bp, synthetic construct
  source 1..120: mol_type = other DNA
gaccaagttataagaaaatgcttcagccaaaattaagtgttgagtttgatttgtgtaattgttagtttctttactagttgttccatcatttacacaattatttctatttgaaatgcagta

SEQ ID NO: 52644 - DNA, 120 bp, synthetic construct
  source 1..120: mol_type = other DNA
tagcaaggaaggcataccaatgcctagctcaggggatcaacaagtggcaagtacctcaactttcaggcaagatcatacttatcatcagtggagccaatagaacagatttatttaaatacc

SEQ ID NO: 52645 - DNA, 120 bp, synthetic construct
  source 1..120: mol_type = other DNA
agcaaatgtgtatgcacataacattggcctagaatatatactccatgctgttgaattaacatctaacatgtctacttggtctgggagtagtgtcttttttaagcagaaattagcatgaca

SEQ ID NO: 52646 - DNA, 120 bp, synthetic construct
  source 1..120: mol_type = other DNA
cactgatcaggcaggaattaagcacacagcaatccattcattcagtcatttttccagaagcatctcttgcatgcttgctatgttagagactttttgatagatgcaccaacttcttagagt

SEQ ID NO: 52647 - DNA, 120 bp, synthetic construct
  source 1..120: mol_type = other DNA
attcattttatcagagagtgactcataagtttagaaaacctttgatgacctggctcacaaagaatgtacttccaagtacacagggtccccagcctgatgtgtgtgcctgcattcatgcct

SEQ ID NO: 52648 - DNA, 120 bp, synthetic construct
  source 1..120: mol_type = other DNA
ccttggtcaagctctggactcctcagtacttccactgtcatatttgattaaaacataagtgatgaagggaggaaatatattatagtattcattgcatgggtaccttagggtaatgggact

SEQ ID NO: 52649 - DNA, 120 bp, synthetic construct
  source 1..120: mol_type = other DNA
ggagccatgaagcactttgaaatcaaatactgtttgtacttgaatatattaagtaagcgtgaggacttaaattaaactttgttcctctttaaaaaaatccttaccccaactctagcactg

SEQ ID NO: 52650 - DNA, 120 bp, synthetic construct
  source 1..120: mol_type = other DNA
aagcaaaagcctgtgatccttagcatgttggaaagttgctactctttaggataaggttgtccatgatgtctaggtcattccattcagctgcataaacaattcctttgatggatggctggt

SEQ ID NO: 52651 - DNA, 120 bp, synthetic construct
  source 1..120: mol_type = other DNA
caggtcatcatgtagacactgctttagctttttccttttccttctggctgtttttttgggcaggctaaacttattattttcattttgtagagtaatacatagaggcagatagcagctgat

SEQ ID NO: 52652 - DNA, 120 bp, synthetic construct
  source 1..120: mol_type = other DNA
atgggagggagagagagagagaaagagagagaaactagctcaagatcccaggagaaaagaggaaatacatatagtagccttagtggtgtgttaacaacttcagcctttaacattgagaag

SEQ ID NO: 52653 - DNA, 120 bp, synthetic construct
  source 1..120: mol_type = other DNA
agaagttcttgaacttcacaatagtgaattaaaattccatagaacagcccaaggggacttgtgttattattcagttattgtgaaatagtcctctatctacttttcttcctgccttcactt

SEQ ID NO: 52654 - DNA, 120 bp, synthetic construct
  source 1..120: mol_type = other DNA
aaattccattctatacattttagtagaaggacttagtagagggttagatcaaagagtccttatgttttttatggactacaagttgttgcaatgacaaggtatttgataagaattctcaaa

SEQ ID NO: 52655 - DNA, 120 bp, synthetic construct
  source 1..120: mol_type = other DNA
aatattaattgtgttcagtcccaaatgagctgttgcagaattagtttgcctgatggacaactttacatacttttggcatgcaatacttctctaattgggagatggcctttcttttgaaca

SEQ ID NO: 52656 - DNA, 120 bp, synthetic construct
  source 1..120: mol_type = other DNA
ctataatgcagactgaaatataagaccattttaatttatcaccaccatacagtaaaaattagcttatgatatgtaggttcctccaggattctgaacaacttgccacatagcagatgctca

SEQ ID NO: 52657 - DNA, 120 bp, synthetic construct
  source 1..120: mol_type = other DNA
tttacaggcagaacattttagtggtggagtctcatatctaggagaagaaacatttctgttcctcccatttcacagatatgtaagtgctgaagttaaaacaaggacacatggatgcctgtt

SEQ ID NO: 52658 - DNA, 120 bp, synthetic construct
  source 1..120: mol_type = other DNA
ttaatagctgttgcattattctgattctggaaaacactttgaaacatctacccttttaaactgaatctcagactgagtattaaagggtaaaattgcagtcacttatttgtggtcccataa

SEQ ID NO: 52659 - DNA, 120 bp, synthetic construct
  source 1..120: mol_type = other DNA
gaatgggggccggacttggtggctcacacctgtaattccagcactttggaaagccaaagcaggcagatctcttgaggtcaggagtttgagaccagcatggccaacatggtgaaaccccat

SEQ ID NO: 52660 - DNA, 120 bp, synthetic construct
  source 1..120: mol_type = other DNA
taaggactttgactgatcatttggtttaagtgcctagcatgacttaggttctctgtaaacaaatgctgagatgatgtttggggagcatgctctctattagggatcagcatctgtgaagct

SEQ ID NO: 52661 - DNA, 120 bp, synthetic construct
  source 1..120: mol_type = other DNA
gttattaaggatgtcatagggaattgatcagaatggagttctcggtgacacaacatgctcccaaaccttacttttccaacatagcttcataattctgtttgaagtaagatacctttccca

SEQ ID NO: 52662 - DNA, 120 bp, synthetic construct
  source 1..120: mol_type = other DNA
cataatgaagtacatttctatgcattcaccaactgtgtagtgagaacattactgtgtggacaacagtgggctatttcagtggggatacagcatggaattaggcattgtgttttccagatg

SEQ ID NO: 52663 - DNA, 120 bp, synthetic construct
  source 1..120: mol_type = other DNA
agaaacattctgctaaatactcagttgattatctgactaaagtaatttcactaaagtgtgaacaaagcttagtgacttgtctactctgtgctagccactggtataggctggaggtgcact

SEQ ID NO: 52664 - DNA, 120 bp, synthetic construct
  source 1..120: mol_type = other DNA
gcactcatcattttaaatgcatcaggggccagtgtagttaggagatatatagagagtactttaggcagtaaacagaggctttgtaacaatataatgtgtagtgggaaagaggattggaag

SEQ ID NO: 52665 - DNA, 120 bp, synthetic construct
  source 1..120: mol_type = other DNA
tttagaatcagaatagcacattatcagaagaaacatgcgaagctgatttcctggatacagaagcagaattcagacttctgtattaagatcatttcttccatagaagtctggtttcactca

SEQ ID NO: 52666 - DNA, 120 bp, synthetic construct
  source 1..120: mol_type = other DNA
tcgatgactacacttaaaccttgcagaaagaatagcacaatgaactcctttacttcaggaaattcgactcatggccagacttcttttctctatatgcctgtctatccccctgactgctga

SEQ ID NO: 52667 - DNA, 120 bp, synthetic construct
  source 1..120: mol_type = other DNA
ctgcatgcttcagttcctcttccaagaaaacaaaacaaaacatctgccagttacaagagctatatatttgaagaaaagtgacaagtaataggaaagcaactggaaatctgggcattatgg

SEQ ID NO: 52668 - DNA, 120 bp, synthetic construct
  source 1..120: mol_type = other DNA
acctgctaacatgtacagcaatgaaaacgagagttgctacagaaattaagtggctgcttttacctagttaataaatgtttgttcacctgggaatcaggaggctgaagttctagtctcaat

SEQ ID NO: 52669 - DNA, 120 bp, synthetic construct
  source 1..120: mol_type = other DNA
gcaatgcatttatattgtgggcaagccttggttaaaaaattatcagttcctgacagataagagacatctgagaaattagctgatggaagctgcggaaaaacaccacagccctcgagtcac

SEQ ID NO: 52670 - DNA, 120 bp, synthetic construct
  source 1..120: mol_type = other DNA
ttcgatggttactatcttggtgaaactggcagccctcaacagtaaatatcagtttgggctcaatgatatctggtaggccagggaaatctttagagtatctgcaaactttaaatagagcag

SEQ ID NO: 52671 - DNA, 120 bp, synthetic construct
  source 1..120: mol_type = other DNA
ggggaagaatcaccttttaaaaggaatttggtaatgaattctgtatcaattatttgctttttaatcttagcctctaggggatgatttaaagatagcttttatgccagtctaaaagtaaac

SEQ ID NO: 52672 - DNA, 120 bp, synthetic construct
  source 1..120: mol_type = other DNA
cttcaccgttttatctagaatgtagtaatggaacttgcttcatgggttctagtgttctagtaccagctctactgttaactggttgtgtaactttgtgcaggtcacataatcattctatgc

SEQ ID NO: 52673 - DNA, 120 bp, synthetic construct
  source 1..120: mol_type = other DNA
ccccccagcccccaacaacccaagctttccttttcctttttgttatttaggacacttgttctcatagcttttctatgtcagaactaatagttttagtgtaagcctaaccaacggcttgta

SEQ ID NO: 52674 - DNA, 120 bp, synthetic construct
  source 1..120: mol_type = other DNA
ggacacaagaatgctgactaaaataattcgggataaggtataatcatcatctttagccaaatctatgtttcttcgggtgtgtgtgtgtgtgtgtgtgtgtggtgtttccctcagtgccta

SEQ ID NO: 52675 - DNA, 120 bp, synthetic construct
  source 1..120: mol_type = other DNA
gaggttgcagtgagctgagatcatgccactgcactccaacctgggcgactacaggaccctgtctcaaaaaaaaaaaaaaaaagtacatatgggaaaaggagtcttcaaaaaatttttttg

SEQ ID NO: 52676 - DNA, 120 bp, synthetic construct
  source 1..120: mol_type = other DNA
ggaagtgaaaggtggtttttaggtagtgttcccagacttagaggcagcactctgaatttaataacagcactgaaacatccatcatgcttgcatgacacataggtactttctactctcact

SEQ ID NO: 52677 - DNA, 120 bp, synthetic construct
  source 1..120: mol_type = other DNA
tttaatttgatagggtaccatgcttgggaagattgaatttgaaggtcagcctgtggattttgtggatccaaataaacagaatttgattgctgaggtttcaaccaaggtgaggggttttcc

SEQ ID NO: 52678 - DNA, 120 bp, synthetic construct
  source 1..120: mol_type = other DNA
taacagtaaggtagatgaagaaccaggagaactttgtttcaggcagaaggaatggcttgccaagaggcatagaggtacagaacaacatagtatatttgaagagttacgcacagtttggga

SEQ ID NO: 52679 - DNA, 120 bp, synthetic construct
  source 1..120: mol_type = other DNA
ctcttccatcaccagtgtggcaatggaatttctcagagaaactctactttatccaagtagaaagtgagtgttattttgacaaaggcgattgaaattcttagaaaggaaggagtagaaaat

SEQ ID NO: 52680 - DNA, 120 bp, synthetic construct
  source 1..120: mol_type = other DNA
tgctaggtttcttctcaatgctttacactgattaatttattccatcttcagtgtaattatatgagatgggtattattaggaactcatttactgatgaagaaactagggtgtagagagatt

SEQ ID NO: 52681 - DNA, 120 bp, synthetic construct
  source 1..120: mol_type = other DNA
gaactgccttggtggtttagtctagcatttcctaaactggaaaacagtggtgtggagcaattcatcttaaaaaattctgtggtcaagcaaggttgcaaaatgctgcataagatattcctc

SEQ ID NO: 52682 - DNA, 120 bp, synthetic construct
  source 1..120: mol_type = other DNA
agatctgcctcccagccgtgcttcagacatagataatgattatgatatgctctgggatctttttatgaaatctaccatttaaatgcaaacaattgcacggcaacctaaagggactggtgg

SEQ ID NO: 52683 - DNA, 120 bp, synthetic construct
  source 1..120: mol_type = other DNA
tttgtggtatagagatgaccaaaaagctagagtctgtctgatagcatctcctttgggcttacatttattttgtaccacacgtttgtaggaatcatgccctgacagagtacgaactttcac

SEQ ID NO: 52684 - DNA, 120 bp, synthetic construct
  source 1..120: mol_type = other DNA
tctgacgtgggccaacttaacattttcagaaaatggatttatatctttttgcaactggtcgtgtgaaggtaacctactctcctgtcagtccagtcatggcatttgtaggcactgaaactt

SEQ ID NO: 52685 - DNA, 120 bp, synthetic construct
  source 1..120: mol_type = other DNA
tcatgtccttgagttaaaagaactggagtccaatggccaaatgtattttgctttacagttttaaaccgacaactcatggttccttatcatgaccttgggacccataagacctgcaggtct

SEQ ID NO: 52686 - DNA, 120 bp, synthetic construct
  source 1..120: mol_type = other DNA
agaaggtaagtgtgacttaagagccgaggaacctttagatcctcttggtttctcttttttgcctcaaacaatattaatttattaaacatcaggctttttcccatggcccaccctctacat

SEQ ID NO: 52687 - DNA, 120 bp, synthetic construct
  source 1..120: mol_type = other DNA
gattcactatttgagttattaatcaacaactatctcatatattcaatgttagtgggctgttggtccaaatctgtttgagccccatctgggtgggtctctgggacttacttggcactggtg

SEQ ID NO: 52688 - DNA, 120 bp, synthetic construct
  source 1..120: mol_type = other DNA
ggaagggtgttggaggggagagagggcatgcatgcacatacatagatgattcagacggcttcagaaaagaaccacaaggaatgcttagaggagttttgtatttaatctaaatatttttac

SEQ ID NO: 52689 - DNA, 120 bp, synthetic construct
  source 1..120: mol_type = other DNA
gataaagaaaggaaaagctaccaccattacatcagtcttaccgaagccagcactagttgcatctcgggttgaggtcagtatgtgggcttatttttggtttatgaattttggattgtccct

SEQ ID NO: 52690 - DNA, 120 bp, synthetic construct
  source 1..120: mol_type = other DNA
taggtttccaaagtccttattctaggatcaggaggtctgtccattggtcaggctggagaatttgattactcaggatctcaagctgtaaaagccatgaaggtgagagaatatgatccttac

SEQ ID NO: 52691 - DNA, 120 bp, synthetic construct
  source 1..120: mol_type = other DNA
agtgtaatgccattcaccagagaccaggctagtagagtcagcatagaatggcaacagaagactaggacagcaaacctgggaaaaatagttggccaaaggttttcttatttttctttttgt

SEQ ID NO: 52692 - DNA, 120 bp, synthetic construct
  source 1..120: mol_type = other DNA
tcttgagagatgactcgtattgaggaaagagcataggatttgaatcataacatttgaattagagccctaatattgccacttattagctatgtgacctttagcaaaccatttaaccttact

SEQ ID NO: 52693 - DNA, 120 bp, synthetic construct
  source 1..120: mol_type = other DNA
gaccactaccagctaatacaaaaatgcacgtagacacacagaccagtgtcactgtaaagtaactacacaaacaaaccaacataataaccagctaatagcacaatggcaggatcaaatcca

SEQ ID NO: 52694 - DNA, 120 bp, synthetic construct
  source 1..120: mol_type = other DNA
tgaccaaatgcttgtcttcctttaacttccattcactagtcctgttacggatctctacggcccacagataacctaaaagcttagttaccccatgtctttttatttaagtgtggtcattct

SEQ ID NO: 52695 - DNA, 120 bp, synthetic construct
  source 1..120: mol_type = other DNA
gtggctaggtagtggaaacacaaaccattttgaggataattttttagcccaggtaggtactcatatatttgggattttttaaattatagaatctcattatagaaatggactttaggagga

SEQ ID NO: 52696 - DNA, 120 bp, synthetic construct
  source 1..120: mol_type = other DNA
cagatctcctgaactgaaactaagaaccataccaacttgcaataacaaagcaatttttaccttgtttctgggatcaatcacatattttgcatgtgtgaattccctgcaaatgagaaattt

SEQ ID NO: 52697 - DNA, 120 bp, synthetic construct
  source 1..120: mol_type = other DNA
atgagggaataatagaacatttctagattcactctccccacataagttggtttacctgattgccagactctcttggtgtggtctgttctgccagtgtgctcagcttttaaaatgttgagt

SEQ ID NO: 52698 - DNA, 120 bp, synthetic construct
  source 1..120: mol_type = other DNA
tctatactctatttccacaaaatagaacagtgcctggaaataccaggagttcaataatgtctttgaagaatgattacacgtgcagccaagaaacctgtgtaacttacatggcagtcatag

SEQ ID NO: 52699 - DNA, 120 bp, synthetic construct
  source 1..120: mol_type = other DNA
cttttagcaggcaaccggaatgatgaattaatcattattaaattgttaacattggctactgaattttctaaccactttgagaacctcatcgtgggcagctgtggggacaaatgtgtcaca

SEQ ID NO: 52700 - DNA, 120 bp, synthetic construct
  source 1..120: mol_type = other DNA
ttgtgtcactgtctgtaacatggaaaatgttgatgccatgggtgttcacacaggtaggcaaagtatcttcaagaactatagtaatgctttcagttcatgtctttgatggccaaggcagtc

SEQ ID NO: 52701 - DNA, 120 bp, synthetic construct
  source 1..120: mol_type = other DNA
attacatggtatcaagtggtaagcagaattggcaaactttcaagaagctcattcatgtaaagaatgagagagaagctttgtatggttgtctggcaatgttgggagaagacttccggaggc

SEQ ID NO: 52702 - DNA, 120 bp, synthetic construct
  source 1..120: mol_type = other DNA
agcttgttgccagattgaggtaaattatattgctagctggctttgtttgcaggctaatctaaacgaatcaaaatctaggtggctaaagcaggctgtgaaaaatctgcttcctaattgcac

SEQ ID NO: 52703 - DNA, 120 bp, synthetic construct
  source 1..120: mol_type = other DNA
gagcgttgtagcaatgcatgtagtgcacagagagtaaattctcctgtgacctgtgcctctatactttgtatcatgactcctattattccgcaagtggctactaaatattgatgcagaaca

SEQ ID NO: 52704 - DNA, 120 bp, synthetic construct
  source 1..120: mol_type = other DNA
aagaattcaactttagtccattcatgcaaattgtggctctaacttcctgagacctcattccccacatctataaaagaagaggctggactagttcatctctcaggatccttccagctctaa

SEQ ID NO: 52705 - DNA, 120 bp, synthetic construct
  source 1..120: mol_type = other DNA
gtcccataacacagattatagcctaaacccaggccagccatttcagaaatgcatgtcactaatcacagaaaatatagattaaatctgtcaccaatacagggaaaaagaaaaagaaatgct

SEQ ID NO: 52706 - DNA, 120 bp, synthetic construct
  source 1..120: mol_type = other DNA
ggtccagtctgtagtgagccctatagtgccgctacactccagcctgggtaacagagtgagaacctgtttcaaaaagcaaaaatatatagagagagtattgaaaagcacaatttttgagca

SEQ ID NO: 52707 - DNA, 120 bp, synthetic construct
  source 1..120: mol_type = other DNA
aaaaggtctctatgcttcaaccttgaatttcttattttaatactatggtccagagcaggtacaggtgatttcctcatcaatctcagcaaatacagctgaactccctgagtggtaaaagac

SEQ ID NO: 52708 - DNA, 120 bp, synthetic construct
  source 1..120: mol_type = other DNA
ggcccacatgattatagggttttccatgtaattattttattggtcttactttcaggaaaaaaggccctacatttctcacttccctccactacttgcttctcatgcaaattaaatgccatg

SEQ ID NO: 52709 - DNA, 120 bp, synthetic construct
  source 1..120: mol_type = other DNA
gtgtaaattattgcctgctcgagtgctgggagaaggaactgatttctgtttgttagaggtcatcattactgttcatttcaacagcagccgggaacttggtgattttgacagagagtgtaa

SEQ ID NO: 52710 - DNA, 120 bp, synthetic construct
  source 1..120: mol_type = other DNA
agtggaacaatgagaacatatgagcacagggaggggaacatttcacaccggggcctgtcggggggtggggaggtaggggatgcatagcactaggagaaatacctaatgtagatgacaggt

SEQ ID NO: 52711 - DNA, 120 bp, synthetic construct
  source 1..120: mol_type = other DNA
gaagtcctctgtgaggaaatattctggaggaataaagccaagccagatccgacccataaattctcactgactattgtatgtttgtgtgaatgtggagtgaggtgataaaaatatgctatc

SEQ ID NO: 52712 - DNA, 120 bp, synthetic construct
  source 1..120: mol_type = other DNA
gctgtatattgaggagaaaatgcattccttttgcgctctactgtttttaaattgggacattcagttcagcatacaattaagccacattcaggtttctcttaacagactcttcacctctga

SEQ ID NO: 52713 - DNA, 120 bp, synthetic construct
  source 1..120: mol_type = other DNA
aaaccactccaattaagccacatgggggtgctagaaacttatagtatgccagtcacagcagtggaaaagacctggggtggaaaatagcagatgttattgtgatttaaatttccacttgac

SEQ ID NO: 52714 - DNA, 120 bp, synthetic construct
  source 1..120: mol_type = other DNA
gggaggcttagtcatcaaggtacgtactgctccaacagtaacaagagctccctattaatgacctatagctgacttacatattgcgagtttggagagaggctgagaagattagttgttctt

SEQ ID NO: 52715 - DNA, 120 bp, synthetic construct
  source 1..120: mol_type = other DNA
aaattgatggtcagtctctgacttgtgtttacatatagtcatctgaaatgaagttcagaatttgagtcccaaatagactatacccacgcatggacacagggaggggaacatcacacaccg

SEQ ID NO: 52716 - DNA, 120 bp, synthetic construct
  source 1..120: mol_type = other DNA
ctttgagtgcttgccccctcagaactcagtatgctgtctctaatacctgaatatagtagcaatggcaaccctcacaagacttctgaagcaatatctattcttaccagcttaggtaataac

SEQ ID NO: 52717 - DNA, 120 bp, synthetic construct
  source 1..120: mol_type = other DNA
tagtaaactgaggcactgagagattcagcagtttcctctacatcacatactaataaataacagaattgggatcaagtctaagcaggactccagaacccaggatacttgctatttaacccc

SEQ ID NO: 52718 - DNA, 120 bp, synthetic construct
  source 1..120: mol_type = other DNA
cttgcttcaagtgattatcttaaagaagatggccagcctctgcttttgctataccatgttaaatcatcaaagtgaaggttttctaccatttatgatgattgcttgttcttgtgcattcca

SEQ ID NO: 52719 - DNA, 120 bp, synthetic construct
  source 1..120: mol_type = other DNA
atgagaatggagatgattgaacactttagtggaacccattaatttgatttgcagaaaatggtcttatgtcttctcatattactactaactcacacgatattctaagcctcagtttcaccc

SEQ ID NO: 52720 - DNA, 120 bp, synthetic construct
  source 1..120: mol_type = other DNA
gctttgtgctagttccaaagccatttgttgatgaataatcaccagtcattgaatctataatataggtttataacctatacaaagagctatatatagacaggacacattaatggacatgtg

SEQ ID NO: 52721 - DNA, 120 bp, synthetic construct
  source 1..120: mol_type = other DNA
atttgtatgataatataacaaataaactttcttggtagaaagtgaaaatcatcatttcttagtgatggcaaaggagggggaattgtagtggagcaaaatgcatatgattcctggttgttc

SEQ ID NO: 52722 - DNA, 120 bp, synthetic construct
  source 1..120: mol_type = other DNA
gccttccatgtttagggaggtgtgagtaaaacaactcttgagcgtagaatggaattaaatttacgcaaaataggctgccagagctataattacagaagctagataattagttgctgaccc

SEQ ID NO: 52723 - DNA, 120 bp, synthetic construct
  source 1..120: mol_type = other DNA
aaaaaccccagataataaagatatctgctttccatgtaggtagtaagcctcatatcaacatagactgaatatgacatgtcaccaggaatttaattctagcattttcccacatcctcctaa

SEQ ID NO: 52724 - DNA, 120 bp, synthetic construct
  source 1..120: mol_type = other DNA
ttcatagtatggacttaacccgttaatccaattggctcaagcaaaagctatttgattggtatcagcatcctttttttttctttttttttgagacggagtctcgctctgtcgcccaggctg

SEQ ID NO: 52725 - DNA, 120 bp, synthetic construct
  source 1..120: mol_type = other DNA
attatggctcaaaaattgcaattaacctacattaagcgtttttcttcatcattattccttgtattcatagagcataattatgacattatattcaatactaaatgagtggctttaccagat

SEQ ID NO: 52726 - DNA, 120 bp, synthetic construct
  source 1..120: mol_type = other DNA
aattgcaaacccattccataattgtaggccaggtggagtgctcattttcacattagagcttgtgcaatctggagggaaatttggtttagtattactcgtgagttggtggatcagatgaaa

SEQ ID NO: 52727 - DNA, 120 bp, synthetic construct
  source 1..120: mol_type = other DNA
tgtgtgcttttgtgcaatatgctttcttcagctgatcacatttctagctgggcataaagctgtcttgatttacaacataatataaatggagtattccctattgaggtttcaaaaagcagt

SEQ ID NO: 52728 - DNA, 120 bp, synthetic construct
  source 1..120: mol_type = other DNA
gaagttgaagcagtttttggctcaccaagaaaatgtcctaagaatcaactagtgagattaaaatatgcaaggtgcaggtctagcttgatacatctgtttcaaaattctcacctagtatga

SEQ ID NO: 52729 - DNA, 120 bp, synthetic construct
  source 1..120: mol_type = other DNA
atcttagcatttgaagaacccgcacttatggtgctgccgtgttagcccatggtcacaattatagatgtgatggttcttttcaaggcatgtgttttaagtgtatctggatgactgttcttc

SEQ ID NO: 52730 - DNA, 120 bp, synthetic construct
  source 1..120: mol_type = other DNA
tcctcagtatgtttcccatacgtgccatgtccactgctgctctcaaacaatagccaatactgttgccattgcctattgtacacctgtcaactcctttatctacataaagttgaactttgt

SEQ ID NO: 52731 - DNA, 120 bp, synthetic construct
  source 1..120: mol_type = other DNA
gggagatttaacacactgatttgagacagaagagaatttaggtgcaatagaaaaagcaaattgactaggaagagctgtagctgcaaaaatttaaactaatactgacactggaaatccagg

SEQ ID NO: 52732 - DNA, 120 bp, synthetic construct
  source 1..120: mol_type = other DNA
tgtatgattctatgtccatcgttccaagcaaaagaggcagtaaaaagcacaagaagttcagtgtggatgacagcaaaccaaaaggcttcacaaatgaggcttggctttagttggactttg

SEQ ID NO: 52733 - DNA, 120 bp, synthetic construct
  source 1..120: mol_type = other DNA
ggtctaaacttgaatctctcttttctattaaatcctagtgagtccatgacagaagaaaccctgaaaagggcaaaggagattgggttctcagataagcagatttcaaaatgccttgggctc

SEQ ID NO: 52734 - DNA, 120 bp, synthetic construct
  source 1..120: mol_type = other DNA
atcccaccgctcagtgccacaggccacttaaatcctgcgcattaatttgcaagccaaagagatccttacgtataggtcattttgctcagattttagatttcatatacagctgcttttaga

SEQ ID NO: 52735 - DNA, 120 bp, synthetic construct
  source 1..120: mol_type = other DNA
aggcatcatgtgtgtcaggtatgatgatatgtttctgtactcagtcttttaagaactgccttaagataatgaaatcaaacaaatgaaaaattaaggacaatgactacatgatcatacaat

SEQ ID NO: 52736 - DNA, 120 bp, synthetic construct
  source 1..120: mol_type = other DNA
aactaagagcttcaggatatgttagtttaccaatctttggacaaatcttgaagtaggacaaaaatgttatatctttaccaccttagtcattgtcttagtccatttgtgctgctgtaacaa

SEQ ID NO: 52737 - DNA, 120 bp, synthetic construct
  source 1..120: mol_type = other DNA
tggcatcccagtagacgtgatattttgaggtgtttaggccattattacacttcagatttctttatagaaggtcactcactctgcatgggtggccttgccaagtttaaaaggatatgcttg

SEQ ID NO: 52738 - DNA, 120 bp, synthetic construct
  source 1..120: mol_type = other DNA
acaagatgatccctcataaatatcttgcagagtgattgaattggtcatctagacatacaataaacagcctctttctagtttgtgtgatgtggtttaatgataaacagttccagttccctg

SEQ ID NO: 52739 - DNA, 120 bp, synthetic construct
  source 1..120: mol_type = other DNA
cgaacaccttgtaaatccaggttcagtatgatagacagctggaaaaacaggttcttatcttcaagacattaacaataaaactagtatctgtgatataaatgtgaaaagtcaaatactaat

SEQ ID NO: 52740 - DNA, 120 bp, synthetic construct
  source 1..120: mol_type = other DNA
gttcagaaatattcttgtgctatggtaagttagtgatatcaggttttaaaaaacagaaaactaagatgggtaaaaaggatgcaaacagatctaggtatgattaatggaattttgggagct

SEQ ID NO: 52741 - DNA, 120 bp, synthetic construct
  source 1..120: mol_type = other DNA
ctgcactccagcgttcatgtacaagctctatacatgtatttgctagataagggatatgggtgagtcacttcacctttactgagcctcagtttctttagctgtaaaatggggacagtaata

SEQ ID NO: 52742 - DNA, 120 bp, synthetic construct
  source 1..120: mol_type = other DNA
caagttaggaagggacttcgactggaaatctatttcctcaccgtctcacgctggtttaccctcactgctacaacaacacctgtcttgagaaactttgagatttagtggactatttttttt

SEQ ID NO: 52743 - DNA, 120 bp, synthetic construct
  source 1..120: mol_type = other DNA
ttcataatgaagttattccaatggctgatattgtgagtgtattttccaggcatgtggtggctgcatcatatcagttggaggccagattccaaacaacctggcagttcctctatacaagaa

SEQ ID NO: 52744 - DNA, 120 bp, synthetic construct
  source 1..120: mol_type = other DNA
tgtggtcttctagtttaatgctttcccttcagggagtggccataggaagactacagttcttcatctagaagtgtagtgtaaggcatctccttaccaaacagagagggtagctttatatta

SEQ ID NO: 52745 - DNA, 120 bp, synthetic construct
  source 1..120: mol_type = other DNA
attcacatactgcacattgtattagcaaatattactttaaaaattgattcatttgcaatctggttgagggagtagcataacctgctttgacaacagagcagtaggctaagatcagctgtt

SEQ ID NO: 52746 - DNA, 120 bp, synthetic construct
  source 1..120: mol_type = other DNA
tagactccaggagtctaaaaggacaatgatttttgtttttctcatgaattagatgctggtcagggtatttctggaattcccagtctcaagggctgctcaaccatgctcaccattaacaag

SEQ ID NO: 52747 - DNA, 120 bp, synthetic construct
  source 1..120: mol_type = other DNA
tttatagcacctgttatatggtggcattgttctcagtatcaggaattgtaatcgtgaaaagaaagatatggtctctactgtcacataggacttctttttgctaggctcaacagacttcaa

SEQ ID NO: 52748 - DNA, 120 bp, synthetic construct
  source 1..120: mol_type = other DNA
ggtgaaagaggataaaggataactcctgagttttctgccttggataactgggtagacagtgatgccatttattgagatagggaacactgaggaaggagaaaagtatagagggaggaatta

SEQ ID NO: 52749 - DNA, 120 bp, synthetic construct
  source 1..120: mol_type = other DNA
tacagttacaaatgtcatactctagaagtggcataagacaaatcaactcgaggtaaaggatttcatctttggcccaataagaccaaaagaaaatgtcactctcattctgagttctcccac

SEQ ID NO: 52750 - DNA, 120 bp, synthetic construct
  source 1..120: mol_type = other DNA
tttctttctgaagttcccaatcgaatcctggtttttcttctttcttcatttcccatcctcctccctttttattgggttaataaaggcaaagtcaaacagagtaaagtggataaggataat

SEQ ID NO: 52751 - DNA, 120 bp, synthetic construct
  source 1..120: mol_type = other DNA
atactgtactggtaaaataatgctggtttgttggctttatttggctctaggtttgccagcatatgtgctttccctaaggttttctcagatatcaactattgcacatcgtcctgtactccc

SEQ ID NO: 52752 - DNA, 120 bp, synthetic construct
  source 1..120: mol_type = other DNA
aatatgaattggtttagttttactcttttcctattacttatacccatgctaatcagtggatgagggaggtaggctctcagccactcttagctgcctctacaggaaatctgttactgcaca

SEQ ID NO: 52753 - DNA, 120 bp, synthetic construct
  source 1..120: mol_type = other DNA
tgctttcccttctcacccttgacttcacctccaaacagcactttttgatatctcttttgagctccgagagccagccgtataaagaacttaacaaaaataatgactctgccttagtactca

SEQ ID NO: 52754 - DNA, 120 bp, synthetic construct
  source 1..120: mol_type = other DNA
actgtttccttctgaacataatatctaaccttgtagagtccagggcaacagaaaagcaacacaaaagaaatctctctggtttctttgcagtaccatgtaatttcagggcctgtacctccc

SEQ ID NO: 52755 - DNA, 120 bp, synthetic construct
  source 1..120: mol_type = other DNA
gtgttgctataacagaatacttgagtctgggtaacttgtagagaaaaggggtttacttggcttatgattctggtggctagatagtctaagattggaaagctgaatctggtaagggtctca

SEQ ID NO: 52756 - DNA, 120 bp, synthetic construct
  source 1..120: mol_type = other DNA
ttgagtgagatgattttactgagtaaaatgggtgaactgggaaagtaagattgaggccaggagggtagtataagataaagacagtgaggtctccaatgaagcaagaggacagaaggcctt

SEQ ID NO: 52757 - DNA, 120 bp, synthetic construct
  source 1..120: mol_type = other DNA
gacacatgatggtgctagtttagctggtaaatagaaatccaggacacaccttgttaggataaagcttgaattgtgccaactcttacatgacttttgtaaaaagggttagcctgtggggtt

SEQ ID NO: 52758 - DNA, 120 bp, synthetic construct
  source 1..120: mol_type = other DNA
cttccgggttcaagcaattctccccctcagccccccaagtagcccccaggtagctgggattataagcacatgccaccacgcccagctaatttttgcatttttagtagagatggggttttg

SEQ ID NO: 52759 - DNA, 120 bp, synthetic construct
  source 1..120: mol_type = other DNA
gagagaccaatgcccagtggactttgaaatcattccaataggaatatgcatgggccagattagaaacactggtccagactggtctcaggcgccctatttacagaattaatttgtgattat

SEQ ID NO: 52760 - DNA, 120 bp, synthetic construct
  source 1..120: mol_type = other DNA
atgcaaaattttaggactacttttaacctcctggggattatctaaaaactataatggaatcggccactggatgtccctcttcacttgtgttggggctgtgtcagctgaaggtttctttag

SEQ ID NO: 52761 - DNA, 120 bp, synthetic construct
  source 1..120: mol_type = other DNA
ccgctacagacatgagccaccgcagccggcccatgctgttttctttagcatggcaaatttgttttcagtggttatgttcattctgcatccatacatatgttatgggagttattgaaatat

SEQ ID NO: 52762 - DNA, 120 bp, synthetic construct
  source 1..120: mol_type = other DNA
gtccatgtgttcccattgttcaattcccacctatgagtgagaacatgcggtgtttggttttttgtccttgcaatagtttactgagaatgacgatttccaatatcatccatgtccctacaa

SEQ ID NO: 52763 - DNA, 120 bp, synthetic construct
  source 1..120: mol_type = other DNA
cggcgttatttctgagggctctgttccgttctattgatctatatctctgttttggtaccagtaccacgctgttttggttactgtagtcttatagtgtagtttgaagtcaggtagggtgat

SEQ ID NO: 52764 - DNA, 120 bp, synthetic construct
  source 1..120: mol_type = other DNA
atttctcagaaggctgtctcataagctctatgaaatggctccaaaccaattcagcagttacgcatttctgctactgaccggtaaattcatgcacggctgcatagtatatatgacacatac

SEQ ID NO: 52765 - DNA, 120 bp, synthetic construct
  source 1..120: mol_type = other DNA
ttttcccccttgccaattcatccatgtctatagtacctactcttctatctatagctaccacctgtaaatttacatcctcagccatcccatatttccaacaatctgctggatacctccact

SEQ ID NO: 52766 - DNA, 120 bp, synthetic construct
  source 1..120: mol_type = other DNA
ttattaagtcccaagtaggagaatatttgcccaacttccagttatggcttaaagtttaatgtgagacttgggggcattcagaggagaccatgcccttagtccacatcttcacatctaatc

SEQ ID NO: 52767 - DNA, 120 bp, synthetic construct
  source 1..120: mol_type = other DNA
ggtgagttattatgaagttccaagagaacttgttatatggcagtctttctaacttttaaatttcttctctctttcccaccctactcctttacacatacagactctctgtttctggtcttc

SEQ ID NO: 52768 - DNA, 120 bp, synthetic construct
  source 1..120: mol_type = other DNA
tgttttatgtgtcacaagtgttcaatacatgtttgatagaagtttataatgtgcctatggaagccaacacccagaccagaaggtagagtggtttcctggctgggaactgtcgatactgtc

SEQ ID NO: 52769 - DNA, 120 bp, synthetic construct
  source 1..120: mol_type = other DNA
catctaagctcatttctttctgtttggtcctaagtggaaatgaaaagctactttcctgggcatggttaaaattcatgttctataaggcagtcatgaataaccactgagcctgcctcagct

SEQ ID NO: 52770 - DNA, 120 bp, synthetic construct
  source 1..120: mol_type = other DNA
gaacactcatactaatgtaagaactgttactattcctgttcaacagatgaggaaactgcatcttagagttgttaagtaagatattcaaggtaacacagtttaataaggtgtggagcctca

SEQ ID NO: 52771 - DNA, 120 bp, synthetic construct
  source 1..120: mol_type = other DNA
cttttcagcaatcattccggccaagattccttggtgtggctgaacaattacacaatgaaggtttcaaggtatgttcattagttttaagttgttttctgtcagcatggaatctgtccacaa

SEQ ID NO: 52772 - DNA, 120 bp, synthetic construct
  source 1..120: mol_type = other DNA
cccagtggcatggccgtctcaagaaggacagaatcccagcctctcttccatcagaaagtaagaactaggcatactgttttctgaaataatttagaggattaactttgagaaccagtatat

SEQ ID NO: 52773 - DNA, 120 bp, synthetic construct
  source 1..120: mol_type = other DNA
ttgcactagaattccttcaagaacacaatataatccctatataagtgtaatttaaacatctacttagcaatagaggagggcagatggcagtcaactcagcatggcattgacttgaatggc

SEQ ID NO: 52774 - DNA, 120 bp, synthetic construct
  source 1..120: mol_type = other DNA
agaaagtccccatggtgaggtctgagacatgggagaaagtctccattacataaaaaacttttatgccttttatcccatacccctttgaaaactggggacagacacttgtgacttttgtct

SEQ ID NO: 52775 - DNA, 120 bp, synthetic construct
  source 1..120: mol_type = other DNA
tgtgacagaggcatttagagtatggacttttcttttctttttctttttctttttttctttttgagatggagtcacactctccaggctggagtgcagtggcacaatctcggctcactgcaa

SEQ ID NO: 52776 - DNA, 120 bp, synthetic construct
  source 1..120: mol_type = other DNA
gactcctgaccttaggtgatctgcctgcctcgacctcccaaagtactaggattacaggtataagccaccatgccctgctggttttattattttttaaatgaacagataaatattttaaaa

SEQ ID NO: 52777 - DNA, 120 bp, synthetic construct; identical to SEQ ID NO: 14607
  source 1..120: mol_type = other DNA

SEQ ID NO: 52778 - DNA, 120 bp, synthetic construct; identical to SEQ ID NO: 12031
  source 1..120: mol_type = other DNA

SEQ ID NO: 52779 - DNA, 120 bp, synthetic construct
  source 1..120: mol_type = other DNA
tactaaaatgacaaaaatgggtttctctgtctgacagccaaaagatcagcgcaggggctggagggggctggaagggagggaggttctgaggccaggagacccaggcccagcctctgtttc

SEQ ID NO: 52780 - DNA, 120 bp, synthetic construct
  source 1..120: mol_type = other DNA
cacgacacgcccacaacccacacgcccccagcccccaagggtcaataccctgagccccgctcacatacatctatatcctaacctccacatttatatatatataaaaatatatatgtatat

SEQ ID NO: 52781 - DNA, 120 bp, synthetic construct; identical to SEQ ID NO: 19904
  source 1..120: mol_type = other DNA

SEQ ID NO: 52782 - DNA, 120 bp, synthetic construct; identical to SEQ ID NO: 28983
  source 1..120: mol_type = other DNA

SEQ ID NO: 52783 - DNA, 120 bp, synthetic construct; identical to SEQ ID NO: 11258
  source 1..120: mol_type = other DNA

SEQ ID NO: 52784 - DNA, 120 bp, synthetic construct; identical to SEQ ID NO: 9300
  source 1..120: mol_type = other DNA

SEQ ID NO: 52785 - DNA, 120 bp, synthetic construct; identical to SEQ ID NO: 9288
  source 1..120: mol_type = other DNA

SEQ ID NO: 52786 - DNA, 120 bp, synthetic construct; identical to SEQ ID NO: 9289
  source 1..120: mol_type = other DNA

SEQ ID NO: 52787 - DNA, 120 bp, synthetic construct; identical to SEQ ID NO: 9290
  source 1..120: mol_type = other DNA

SEQ ID NO: 52788 - DNA, 120 bp, synthetic construct; identical to SEQ ID NO: 9291
  source 1..120: mol_type = other DNA

SEQ ID NO: 52789 - DNA, 120 bp, synthetic construct; identical to SEQ ID NO: 9292
  source 1..120: mol_type = other DNA

SEQ ID NO: 52790 - DNA, 120 bp, synthetic construct; identical to SEQ ID NO: 9283
  source 1..120: mol_type = other DNA

SEQ ID NO: 52791 - DNA, 120 bp, synthetic construct
  source 1..120: mol_type = other DNA
tcctgagttccaatcaactatattaagagagagccagcgctgcccttacaatatgttgcgtaaatatacactctcatcatggtgacagtaggtctttcagattttgttcgacagtttccc

SEQ ID NO: 52792 - DNA, 120 bp, synthetic construct; identical to SEQ ID NO: 328
  source 1..120: mol_type = other DNA

SEQ ID NO: 52793 - DNA, 120 bp, synthetic construct; identical to SEQ ID NO: 329
  source 1..120: mol_type = other DNA

SEQ ID NO: 52794 - DNA, 120 bp, synthetic construct
  source 1..120: mol_type = other DNA
tgtttggttgtgaatcaaatgtatacatcacctgtctttggaaccatctgatctgtctctgtccttctgtattctgtgttctagtgcgataaatcctatggtagcatgattctaggtcag

SEQ ID NO: 52795 - DNA, 120 bp, synthetic construct
  source 1..120: mol_type = other DNA
ttcccacctatgagtgagaacatgtggtgtttggttttttgtccttgtgatagtttgctgagaatgatggtttccagcttcatccatgtccctaaaaaggacatgaactcatcaattttt

SEQ ID NO: 52796 - DNA, 120 bp, synthetic construct
  source 1..120: mol_type = other DNA
tctatatctctgttttggtaccagtaccatgctgttttggttactgtagccttgtagtatagtttgaagtcaggtagtttgatgcctccagtttgttcttttggcttaggatagacttgg

SEQ ID NO: 52797 - DNA, 120 bp, synthetic construct
  source 1..120: mol_type = other DNA
taatcagcgaaaggtttcacctatttaagatgattagcacacatatgtacatttgagaaatatttcctaagaatgcaggctccttcctcagcactctgtccccaggatcctgatgagtgg

SEQ ID NO: 52798 - DNA, 120 bp, synthetic construct
  source 1..120: mol_type = other DNA
actctttctggcttcctaaaaatgtgaaaaattaaatgggagctatctttacattaaattatatgagcattagctgagcgtggtggcaattgcctgtggtcccagctactcgagaggctg

SEQ ID NO: 52799 - DNA, 120 bp, synthetic construct
  source 1..120: mol_type = other DNA
tgccataaatgacctttacattttgataagggatgcaaggtctctacacagatctaaatctagatctagatagatctggagggaaggtctttttgaaagtggggcttagtaggtggctga

SEQ ID NO: 52800 - DNA, 120 bp, synthetic construct
  source 1..120: mol_type = other DNA
tgatgttactattgtcattgtttggggtccctacgaactgcacccatataagacagaaaacttaatcaataaatgtgcgtgctttgactgctccatggactagacattccccttctgtct

SEQ ID NO: 52801 - DNA, 120 bp, synthetic construct
  source 1..120: mol_type = other DNA
gcagccattctgcagcccatggctgaaggagtaattttgactttcaagtttcactatttaagaaatacattttgtaaggtgagtccccacagacagtaattcctctgatggatctgaaca

SEQ ID NO: 52802 - DNA, 120 bp, synthetic construct
  source 1..120: mol_type = other DNA
tcatctgactcatttgttgtgatatgtgttttattgtggtggtctggaactgaacctgcaatatatttgaggaatgtctgtaacacgaagtgggcggcttaatacaacagaagtttttgg

SEQ ID NO: 52803 - DNA, 120 bp, synthetic construct; identical to SEQ ID NO: 330
  source 1..120: mol_type = other DNA

SEQ ID NO: 52804 - DNA, 120 bp, synthetic construct; identical to SEQ ID NO: 331
  source 1..120: mol_type = other DNA

SEQ ID NO: 52805 - DNA, 120 bp, synthetic construct
  source 1..120: mol_type = other DNA
ttggtgccagttacagtccgcaatgaagcgaagatattaagaagcaaagtgggccaggagaaattagagcagaaatatctctttcaatagtgagagaataggaaaaagaagtagaaaagc

SEQ ID NO: 52806 - DNA, 120 bp, synthetic construct
  source 1..120: mol_type = other DNA
agcttttgttcttattatttaataaagatgttatactgagccacatgtggtgactcaaacgtgtaatcccagcactttgggaggcctaggtgagcagatggcttgagtccaggagtttga

SEQ ID NO: 52807 - DNA, 120 bp, synthetic construct
  source 1..120: mol_type = other DNA
aatttacaataaagtatgattttaacaaaccaggctaggcgtggtggctcacgcttataatcccagcactttgaaaagcagaggcatgcagattgcttgaggccaggagttcaagactag

SEQ ID NO: 52808 - DNA, 120 bp, synthetic construct
  source 1..120: mol_type = other DNA
aatgagtgattcctctgcccaggcactataatacaggctacatgtgaattttaatcctgaaaacaaagttattaggtagttcccagttgttctatgtttgtctgttttgttttgcttgag

SEQ ID NO: 52809 - DNA, 120 bp, synthetic construct
  source 1..120: mol_type = other DNA
taataggtcacaaaaatgttagaagggcaggaaaagcaataggacaaaggcaaagttacgagagatcagggagctgctgtggctcccagtctacagcacaggagcctggagtgatggtga

SEQ ID NO: 52810 - DNA, 120 bp, synthetic construct
  source 1..120: mol_type = other DNA
tatgtcaggtggccgctgagagaagacttgaaaggagatgagcatagatgtatggacgctctttgttgcaccagtgtgataggtgatggagggacctattagatgggacatgggcagggg

SEQ ID NO: 52811 - DNA, 120 bp, synthetic construct; identical to SEQ ID NO: 332
  source 1..120: mol_type = other DNA

SEQ ID NO: 52812 - DNA, 120 bp, synthetic construct; identical to SEQ ID NO: 333
  source 1..120: mol_type = other DNA

SEQ ID NO: 52813 - DNA, 120 bp, synthetic construct
  source 1..120: mol_type = other DNA
catcacctgtctttggaaccatctgatctgtctctgtccttctgtattctgtgttctagtgcgataaatcctatggtagcatgattctaggtcaggagagattagataatgtgaagcctt

SEQ ID NO: 52814 - DNA, 120 bp, synthetic construct; identical to SEQ ID NO: 52795
  source 1..120: mol_type = other DNA

SEQ ID NO: 52815 - DNA, 120 bp, synthetic construct; identical to SEQ ID NO: 52796
  source 1..120: mol_type = other DNA

SEQ ID NO: 52816 - DNA, 120 bp, synthetic construct; identical to SEQ ID NO: 52797
  source 1..120: mol_type = other DNA

SEQ ID NO: 52817 - DNA, 120 bp, synthetic construct; identical to SEQ ID NO: 52798
  source 1..120: mol_type = other DNA

SEQ ID NO: 52818 - DNA, 120 bp, synthetic construct; identical to SEQ ID NO: 52799
  source 1..120: mol_type = other DNA

SEQ ID NO: 52819 - DNA, 120 bp, synthetic construct; identical to SEQ ID NO: 52800
  source 1..120: mol_type = other DNA

SEQ ID NO: 52820 - DNA, 120 bp, synthetic construct; identical to SEQ ID NO: 52801
  source 1..120: mol_type = other DNA

SEQ ID NO: 52821 - DNA, 120 bp, synthetic construct; identical to SEQ ID NO: 52802
  source 1..120: mol_type = other DNA

SEQ ID NO: 52822 - DNA, 120 bp, synthetic construct; identical to SEQ ID NO: 330
  source 1..120: mol_type = other DNA

SEQ ID NO: 52823 - DNA, 120 bp, synthetic construct; identical to SEQ ID NO: 331
  source 1..120: mol_type = other DNA

SEQ ID NO: 52824 - DNA, 120 bp, synthetic construct; identical to SEQ ID NO: 52805
  source 1..120: mol_type = other DNA

SEQ ID NO: 52825 - DNA, 120 bp, synthetic construct; identical to SEQ ID NO: 52806
  source 1..120: mol_type = other DNA

SEQ ID NO: 52826 - DNA, 120 bp, synthetic construct; identical to SEQ ID NO: 52807
  source 1..120: mol_type = other DNA

SEQ ID NO: 52827 - DNA, 120 bp, synthetic construct; identical to SEQ ID NO: 52808
  source 1..120: mol_type = other DNA

SEQ ID NO: 52828 - DNA, 120 bp, synthetic construct; identical to SEQ ID NO: 52809
  source 1..120: mol_type = other DNA

SEQ ID NO: 52829 - DNA, 120 bp, synthetic construct; identical to SEQ ID NO: 52810
  source 1..120: mol_type = other DNA

SEQ ID NO: 52830 - DNA, 120 bp, synthetic construct; identical to SEQ ID NO: 332
  source 1..120: mol_type = other DNA

SEQ ID NO: 52831 - DNA, 120 bp, synthetic construct
  source 1..120: mol_type = other DNA
tgatcccaaaatgtaacacagaatcttggcagcctccaaatgccagcacccagtaagagttaggagggcatcggggtccagcagacattgagaattttcgacaattgcatgcaaaaaata

SEQ ID NO: 52832 - DNA, 120 bp, synthetic construct; identical to SEQ ID NO: 9301
  source 1..120: mol_type = other DNA

SEQ ID NO: 52833 - DNA, 120 bp, synthetic construct
  source 1..120: mol_type = other DNA
tgatctttcttttccccacatttcccccttttcgacaaaaccgccatcatcatcatggctgtttctcgatggttgctgtctctttggagctgttgggtacacctgcagactaacaacaga

SEQ ID NO: 52834 - DNA, 120 bp, synthetic construct
  source 1..120: mol_type = other DNA
aagggggctttacacaggtttggaaaggaactgttagactggaatttaggttgatagtataaaatagcttacgatctcgtttctaaagtttgatttctagaccaaattctaatgcagtat

SEQ ID NO: 52835 - DNA, 120 bp, synthetic construct
  source 1..120: mol_type = other DNA
cccttctttttgcttaactgagttttgagtgttctattagttctttcaactatggcctgtctgtgggaattatagggaattcctgttgtatgtgaaactttccactgatgtaagaatttt

SEQ ID NO: 52836 - DNA, 120 bp, synthetic construct
  source 1..120: mol_type = other DNA
ggtcactaaggacttgctttatgaatctgggtgctcctgtattgggtgcatatatatttaggatagttagctcttcttgttgaattgatccctttatcattatgtaatggtcttctttgt

SEQ ID NO: 52837 - DNA, 120 bp, synthetic construct
  source 1..120: mol_type = other DNA
atagtcccatatttcttggaggctttgttcatttctttttattcttttttctctaaacttctcttctcacttcatttgattcatttgatcttccatctctgataccctttcttccagttg

SEQ ID NO: 52838 - DNA, 120 bp, synthetic construct
  source 1..120: mol_type = other DNA
accagataattataattttatttaactctttgtcttcttttctttccttccctccttcccttctgcctgcctgcttgccttccttctttgcttgcttccttcctttctccctcccttcct

SEQ ID NO: 52839 - DNA, 120 bp, synthetic construct; identical to SEQ ID NO: 9302
  source 1..120: mol_type = other DNA

SEQ ID NO: 52840 - DNA, 120 bp, synthetic construct; identical to SEQ ID NO: 9303
  source 1..120: mol_type = other DNA

SEQ ID NO: 52841 - DNA, 120 bp, synthetic construct
  source 1..120: mol_type = other DNA
atctcattgtggttttgatttgcatttctctgatggccagtgatgatgagcattttttcatgtgttttttggctgcataaatgtcttcttttgagaagtgtctgttcatgtccttcaccc

SEQ ID NO: 52842 - DNA, 120 bp, synthetic construct; identical to SEQ ID NO: 9304
  source 1..120: mol_type = other DNA

SEQ ID NO: 52843 - DNA, 120 bp, synthetic construct; identical to SEQ ID NO: 25455
  source 1..120: mol_type = other DNA

SEQ ID NO: 52844 - DNA, 120 bp, synthetic construct
  source 1..120: mol_type = other DNA
cagccccacaaagtgttaggattacagtcataagccaccatgcccagcctagaaattttcttcctatgactgcaaataatttcagtcccaaaggcttttagatgattgcaggaagaatct

SEQ ID NO: 52845 - DNA, 120 bp, synthetic construct; identical to SEQ ID NO: 25456
  source 1..120: mol_type = other DNA

SEQ ID NO: 52846 - DNA, 120 bp, synthetic construct
  source 1..120: mol_type = other DNA
gttcctatttctccacatcctctccagcacctgttgtttcctggctttttaatgattgccattctaactggtgtgagatggtatctcattgtggttttgatttgcatttctctgatggcc

SEQ ID NO: 52847 - DNA, 120 bp, synthetic construct
  source 1..120: mol_type = other DNA
tgtttattgcggcactattcccaatagcaaagacttggaaccaagccaaatgtccaacaatgatagactggattaagaaaatgtggcacatatacaccatggaatactatgcagccataa

SEQ ID NO: 52848 - DNA, 120 bp, synthetic construct; identical to SEQ ID NO: 20973
  source 1..120: mol_type = other DNA

SEQ ID NO: 52849 - DNA, 120 bp, synthetic construct; identical to SEQ ID NO: 20974
  source 1..120: mol_type = other DNA

SEQ ID NO: 52850 - DNA, 120 bp, synthetic construct; identical to SEQ ID NO: 20975
  source 1..120: mol_type = other DNA

SEQ ID NO: 52851 - DNA, 120 bp, synthetic construct; identical to SEQ ID NO: 20976
  source 1..120: mol_type = other DNA

SEQ ID NO: 52852 - DNA, 120 bp, synthetic construct; identical to SEQ ID NO: 20977
  source 1..120: mol_type = other DNA

SEQ ID NO: 52853 - DNA, 120 bp, synthetic construct
  source 1..120: mol_type = other DNA
ctttttgaggcttgttcaagaatcttcacttatgccgaaggtcatgaagatatcctcctatgttatctttttttttttttttttgagacggagtctcgctctgtggcccaggtgggagtg

SEQ ID NO: 52854 - DNA, 120 bp, synthetic construct
  source 1..120: mol_type = other DNA
catgcctataatcccagcaccttgggaaaccaaggcaagaggatcacttgaggccagcctgggcaacatagcaagaccccatctctacaaaatataaaaataaaaaaagtagttgaatgt

SEQ ID NO: 52855 - DNA, 120 bp, synthetic construct
  source 1..120: mol_type = other DNA
tatgtcttcccacttgcagataataaatgaggaatatttgctaacctttggtcatcaacttgacttaaaactgaaaatttggctgggcgcggtggctcacgcctgtaatcccagcacttt

SEQ ID NO: 52856 - DNA, 120 bp, synthetic construct
  source 1..120: mol_type = other DNA
tgacccacaaattccatctctaggcataaactgtagggttaaactcaaaacgcttacacagacagccatgtataattgtgtccgaaattggtgggttgttggtctgattgactcttcaag

SEQ ID NO: 52857 - DNA, 120 bp, synthetic construct
  source 1..120: mol_type = other DNA
attcttcaagtccccaccagattagctagatacagagtgcccattgggcatccacaaaccttgagctagacacagggtgctgattggtgcatccacaatcccttagctagacataatccg

SEQ ID NO: 52858 - DNA, 120 bp, synthetic construct; identical to SEQ ID NO: 9139
  source 1..120: mol_type = other DNA

SEQ ID NO: 52859 - DNA, 120 bp, synthetic construct
  source 1..120: mol_type = other DNA
cccctactgggaagtgaggagcccctctgcccggccaccaccccgtctgggaggtgtacccaacagctcattgagaacgggccatgatgacaatggcggttttgtggaatggaaagggga

SEQ ID NO: 52860 - DNA, 120 bp, synthetic construct
  source 1..120: mol_type = other DNA
tctatctcaaaaaaaaaaaaaaaaaattagtagtaagactagtaatagcagtaataggccactgctgctgaaggctgccgtggtcattcctgcggcccttagtgtgtccctccctcgcca

SEQ ID NO: 52861 - DNA, 120 bp, synthetic construct; identical to SEQ ID NO: 21939
  source 1..120: mol_type = other DNA

SEQ ID NO: 52862 - DNA, 120 bp, synthetic construct; identical to SEQ ID NO: 4734
  source 1..120: mol_type = other DNA

SEQ ID NO: 52863 - DNA, 120 bp, synthetic construct
  source 1..120: mol_type = other DNA
ctcaaactcctgacctcaggcgatccagccaccttggcctcccaagaattatttctttcactcagaaagaaatgtgggcttaaaaaaccaatctattattttaggaagaagcctacattg

SEQ ID NO: 52864 - DNA, 120 bp, synthetic construct
  source 1..120: mol_type = other DNA
ggggaggctgtgaaggcctgagaggcaagcggcatctctagctagggcctctctccagcactttttattttattttattttatttttatttttattttttgagatggagtctccctctgt

SEQ ID NO: 52865 - DNA, 120 bp, synthetic construct
  source 1..120: mol_type = other DNA
tagacccgccagagcccagccagagctctgctcagctctacgatgcactaatgggtcacggtgcttgattttagccaagcacatcatttagcgggtagcatcagctccttcttacaggtg

SEQ ID NO: 52866 - DNA, 120 bp, synthetic construct
  source 1..120: mol_type = other DNA
tctctctctttcttagacagagtttcgctgttgttttgcccaggctggagtgcaatggtgtgatcttggcataccgcaacccccacctcccaggttcaagtgattctcctgcctcagctt

SEQ ID NO: 52867 - DNA, 120 bp, synthetic construct
  source 1..120: mol_type = other DNA
cctggcaaggggccctgcctctcctatcatcctggcaactcttgctccaccacaaccccagggccagtgatccaagtacctgaagcctctgtgaccatagacctgggtgagtcctgctgt

SEQ ID NO: 52868 - DNA, 120 bp, synthetic construct
  source 1..120: mol_type = other DNA
gcagatcagtaatgatttactctattgattaagcattcccggcgggccaggcagagccctggctggagatacttggcctctgggtggcctttgtcccttgacccttgctatgagctcttc

SEQ ID NO: 52869 - DNA, 120 bp, synthetic construct
  source 1..120: mol_type = other DNA
ttttgaatcagccggtgtctcctgacaatgtcctgtgtcttcctcagccttgtgggacggacagaaccaagccctgttgaatttgggtccccatcttttttttttttttgagatggagtc

SEQ ID NO: 52870 - DNA, 120 bp, synthetic construct
  source 1..120: mol_type = other DNA
ttcctctgtagtacttagtagtaacaatagcaacaacaactaaaagctaaaactggctgagtgtggtggttcacacctgtaatcccagcactttgggaggccaaggcaggcagatcgctt

SEQ ID NO: 52871 - DNA, 120 bp, synthetic construct
  source 1..120: mol_type = other DNA
ttcacaccattctcctgcctcagcctccccagcagctgggactacaggagcatgccgcgccacctgtctaatttttcttttcttttttttttttttttttgagacggagtcttgctctgt

SEQ ID NO: 52872 - DNA, 120 bp, synthetic construct
  source 1..120: mol_type = other DNA
aagtcacacagcatgcaagtggcagactcagggttttgaaatcctgtttctccaatgccaaaggttatcctgataatctctagtgaaggccagggtgcccctggcaactagagggatatg

SEQ ID NO: 52873 - DNA, 120 bp, synthetic construct
  source 1..120: mol_type = other DNA
ggtgacacagtgacatcttgcatcttaaaagaagaaaagatgggtgtggtggctcatgcctgtaatcccaggaatttgggaggctgaagtggacagattgcttgagcccaggagtttgag

SEQ ID NO: 52874 - DNA, 120 bp, synthetic construct
  source 1..120: mol_type = other DNA
aagaaagaaagaaagaaagaaagaaggaaggaaggaaggaaggaaagaaagaaagaaccctgtccatatgccattttgcgcgtgtgtgaggatatctgtaggactgatttctgaaggtag

SEQ ID NO: 52875 - DNA, 120 bp, synthetic construct
  source 1..120: mol_type = other DNA
tcaagtgatccacatgcctcagcctctctaagtgctgggatgacaggcgtgagccaccacacccagcctggggtgatagtgttttcgatctgatacctctttcatttcctgaaggcagtt

SEQ ID NO: 52876 - DNA, 120 bp, synthetic construct
  source 1..120: mol_type = other DNA
tactgcattttatacatttttgaattgcttgataatgtttttctgaccggtagattttacaagagaactcagtgacttgaggctgggcacggtggctcacacctgtaatcccagcactgt

SEQ ID NO: 52877 - DNA, 120 bp, synthetic construct
  source 1..120: mol_type = other DNA
aagtagctgggattacaggcacgcgccaccacgcctggctaatttttttttttttttttttttttgagtagagacagagtttcaccatgttggccaggatggtctcgatctcttgacctt

SEQ ID NO: 52878 - DNA, 120 bp, synthetic construct
  source 1..120: mol_type = other DNA
gccactgcactccagcctgggtgacaagagcgaaacaagaaagaaagaaagaaagagagagagagagagagagagaaaaggaaggaaagaaaagaaagaaagaaagaaaggaaaagaaag

SEQ ID NO: 52879 - DNA, 120 bp, synthetic construct
  source 1..120: mol_type = other DNA
ctgaaaccctcctccccatttcacttggcagtacgaggagcgagtgctgaaaaaaatccgccggaaaatccggaacaagcagtcggcgcaagaaagcaggaagaagaagaaggaatatat

SEQ ID NO: 52880 - DNA, 120 bp, synthetic construct
  source 1..120: mol_type = other DNA
agcctgggcgacagagcgagactccatctcaaaaaacaaacaaacaaaaaaagaaacttgagtctcccaggatgcctggttgtcctgatatttcatcttctggaaacatcactgcctgaa

SEQ ID NO: 52881 - DNA, 120 bp, synthetic construct
  source 1..120: mol_type = other DNA
cagctggtgactggcatatgctgaatgtcgatgcgtcttcctcctttcaggatgtcagcttgcactgctcagaatcaggagttacagaggaaagtcttgcatctcgagaagcaaaacctg

SEQ ID NO: 52882 - DNA, 120 bp, synthetic construct
  source 1..120: mol_type = other DNA
taaaataaataataaagagccagaggcccttgaagaatggatggaatttggactttagcggggctgggggaccccggaaatggacgagaagcagaaccgaggccctttagggctcagcgg

SEQ ID NO: 52883 - DNA, 120 bp, synthetic construct
  source 1..120: mol_type = other DNA
caggaagccccggggcagactggggcttccaggacaccgcgaacctgaccaattcgacggaggagctggacaacgccaccctggtcctgaggaatgcaacagaggggctgggccaggtcg

SEQ ID NO: 52884 - DNA, 120 bp, synthetic construct
  source 1..120: mol_type = other DNA
ctgaaagagacccagacagagagacaggcagacacagcctaaaacagacctggacagacaggcagacgtagtctgaaacagacctgaacagacagacagacgcacacacacaacagatgc

SEQ ID NO: 52885 - DNA, 120 bp, synthetic construct; identical to SEQ ID NO: 8829
  source 1..120: mol_type = other DNA

SEQ ID NO: 52886 - DNA, 120 bp, synthetic construct; identical to SEQ ID NO: 8830
  source 1..120: mol_type = other DNA

SEQ ID NO: 52887 - DNA, 120 bp, synthetic construct
  source 1..120: mol_type = other DNA
taggaaagtgctgaattacatcaattaattggagaacagggtctggagtgttctgggagggactaaaaggattggaagccaggaaccaggctcctatatcagtaggaagcaattgtatga

SEQ ID NO: 52888 - DNA, 120 bp, synthetic construct; identical to SEQ ID NO: 28979
  source 1..120: mol_type = other DNA

SEQ ID NO: 52889 - DNA, 120 bp, synthetic construct; identical to SEQ ID NO: 28980
  source 1..120: mol_type = other DNA

SEQ ID NO: 52890 - DNA, 120 bp, synthetic construct; identical to SEQ ID NO: 28981
  source 1..120: mol_type = other DNA

SEQ ID NO: 52891 - DNA, 120 bp, synthetic construct
  source 1..120: mol_type = other DNA
acctttagtacctcttttttttttttttttttttttttttgagatggagtcttgctttgttaccaggctggaatgcagtgatgcgacctcagctcactgcagcttccgcctcccacgttc

SEQ ID NO: 52892 - DNA, 120 bp, synthetic construct; identical to SEQ ID NO: 28982
  source 1..120: mol_type = other DNA

SEQ ID NO: 52893 - DNA, 120 bp, synthetic construct; identical to SEQ ID NO: 3977
  source 1..120: mol_type = other DNA

SEQ ID NO: 52894 - DNA, 120 bp, synthetic construct; identical to SEQ ID NO: 15927
  source 1..120: mol_type = other DNA

SEQ ID NO: 52895 - DNA, 120 bp, synthetic construct; identical to SEQ ID NO: 15928
  source 1..120: mol_type = other DNA

SEQ ID NO: 52896 - DNA, 120 bp, synthetic construct; identical to SEQ ID NO: 27202
  source 1..120: mol_type = other DNA

SEQ ID NO: 52897 - DNA, 120 bp, synthetic construct; identical to SEQ ID NO: 27203
  source 1..120: mol_type = other DNA

SEQ ID NO: 52898 - DNA, 120 bp, synthetic construct
  source 1..120: mol_type = other DNA
ccttggtctcccaaagtgttgggattataggcgtgagccactgcacctggctaatcttgagatatttttaaaaaacaagtgccacatcatttgaaatcagtttctttgtataggagctgc

SEQ ID NO: 52899 - DNA, 120 bp, synthetic construct
  source 1..120: mol_type = other DNA
ccacttcggcctcctaaagtgctgagatgacaggcctgagccaccatgcccggccagtattttttatgatatcttttgacttcttcctatgagcaatgacaaatatatttcttttttttt

SEQ ID NO: 52900 - DNA, 120 bp, synthetic construct
  source 1..120: mol_type = other DNA
ctgagccaccgtgcctagctgacaaatatatttctatttccatcctttttatttttcttaatacttaaaaaaatgtacttatacctctgttatttgatttagtgattttatcttttggtc

SEQ ID NO: 52901 - DNA, 120 bp, synthetic construct
  source 1..120: mol_type = other DNA
gctataggtgtccatgacaaagatataagtaaaactgttacaagcagtgaatctgtatggatctgtagcaacctcaattcctgcctcctcagaagaaagaattcagctgaggggggcata

SEQ ID NO: 52902 - DNA, 120 bp, synthetic construct
  source 1..120: mol_type = other DNA
ctgcggccttccgcagtgtttgtgtccctgggtacttgagatcaaggagtggtgatgactctcaaccagcatgctgccttcaagcatctgtttaacaaagcacatcttgcaccgccctta

SEQ ID NO: 52903 - DNA, 120 bp, synthetic construct
  source 1..120: mol_type = other DNA
ccagcctgggcaccattgagcactgagtgaacgagactccgtctgcaatcccggcacctcgggaggccgaggctggcggatcactcgcgtttaggagctggagaccggcccggccaacac

SEQ ID NO: 52904 - DNA, 120 bp, synthetic construct; identical to SEQ ID NO: 24077
  source 1..120: mol_type = other DNA

SEQ ID NO: 52905 - DNA, 120 bp, synthetic construct; identical to SEQ ID NO: 23986
  source 1..120: mol_type = other DNA

SEQ ID NO: 52906 - DNA, 120 bp, synthetic construct; identical to SEQ ID NO: 23987
  source 1..120: mol_type = other DNA

SEQ ID NO: 52907 - DNA, 120 bp, synthetic construct
  source 1..120: mol_type = other DNA
acagtcctcacagaagtctagaatatagagagtgggaaagaagcagtgttcaaggagatattggctaagggtttttcagaatgaataaggcacgattcagattccagaagctgtttcctg

SEQ ID NO: 52908 - DNA, 120 bp, synthetic construct
  source 1..120: mol_type = other DNA
ttctgttccatcggtctgtatctttgttttggtaccagtaccatgctgttttggttactgtggccttgtagtatagtttgaagtcaggtaacgtgatgcctccagctttgttcttttggt

SEQ ID NO: 52909 - DNA, 120 bp, synthetic construct
  source 1..120: mol_type = other DNA
tcaatacctaatttattgagagtttttagcatgaagggctgttgaattttgtcaaaggccttttctgcatctattgagataatcatgtggtttttgtctttgtttctgtttatatgctgg

SEQ ID NO: 52910 - DNA, 120 bp, synthetic construct; identical to SEQ ID NO: 20458
  source 1..120: mol_type = other DNA

SEQ ID NO: 52911 - DNA, 120 bp, synthetic construct; identical to SEQ ID NO: 20459
  source 1..120: mol_type = other DNA

SEQ ID NO: 52912 - DNA, 120 bp, synthetic construct
  source 1..120: mol_type = other DNA
gtgtcagtgcgaggcaggtgtgagagggagagcagcatgtgttgaagcaggtgcactgcagaggcaggtgtgtgagtgtaagagaagtgtttgagggaatgacaggtgggggagatgcat

SEQ ID NO: 52913 - DNA, 120 bp, synthetic construct
  source 1..120: mol_type = other DNA
tttatggctgagcagtattacgtgtgtgtgtgtgtgtatatatatatatatatatatatatacacacacacacacacacagtatatatatatggcttttatggctgagtattacgtgtgt

SEQ ID NO: 52914 - DNA, 120 bp, synthetic construct
  source 1..120: mol_type = other DNA
ggctgtttctcaatgtgaagaggatgcgttttgaatgtttaacggtggttgcatagttaaaatgcacgctttttgcctttcgtgactttctctgggtgtaatactgatgcagggatttgt

SEQ ID NO: 52915 - DNA, 120 bp, synthetic construct
  source 1..120: mol_type = other DNA
cacttgaactcgggaggcggaggttgcagtgagccaagaccgtgccactgaactccagcctggaccacagactgagactccctctaaaaaaaaataaaaataaaaaaataaaaaataaaa

SEQ ID NO: 52916 - DNA, 120 bp, synthetic construct
  source 1..120: mol_type = other DNA
cttctatggtgacgttgcaggtattttcctgtttggactggagaaacatacacacacacacacacacacacacacacacacacacacacacacacaatgattagtgatgtaacctgtctg

SEQ ID NO: 52917 - DNA, 120 bp, synthetic construct; identical to SEQ ID NO: 33306
  source 1..120: mol_type = other DNA

SEQ ID NO: 52918 - DNA, 120 bp, synthetic construct; identical to SEQ ID NO: 33307
  source 1..120: mol_type = other DNA

SEQ ID NO: 52919 - DNA, 120 bp, synthetic construct
  source 1..120: mol_type = other DNA
ggtggatgagtgagtcagtggataaataaatggatgaacagatacataggtgaatggatggatggatggatggatggatggatgcatggatagatggatacgtagatgtgtacatggatg

SEQ ID NO: 52920 - DNA, 120 bp, synthetic construct
  source 1..120: mol_type = other DNA
tgtattggtagatggatgggtggatgggtggatggatggatggatgtattggtggatggatgggtggatgggtggatggatggatggatggatgatagatgggtggatgggaggatggat

SEQ ID NO: 52921 - DNA, 120 bp, synthetic construct; identical to SEQ ID NO: 17856
  source 1..120: mol_type = other DNA

SEQ ID NO: 52922 - DNA, 120 bp, synthetic construct; identical to SEQ ID NO: 17857
  source 1..120: mol_type = other DNA

SEQ ID NO: 52923 - DNA, 120 bp, synthetic construct
  source 1..120: mol_type = other DNA
gtatttttagtagagacggggtttcatcacgttagccaggctggtcttgaacccctgacttcaagtgatctacccgccttgacctccaaaagtgctgggatcacaggcatgagccactgc

SEQ ID NO: 52924 - DNA, 120 bp, synthetic construct; identical to SEQ ID NO: 7222
  source 1..120: mol_type = other DNA

SEQ ID NO: 52925 - DNA, 120 bp, synthetic construct; identical to SEQ ID NO: 7223
  source 1..120: mol_type = other DNA

SEQ ID NO: 52926 - DNA, 120 bp, synthetic construct; identical to SEQ ID NO: 7224
  source 1..120: mol_type = other DNA

SEQ ID NO: 52927 - DNA, 120 bp, synthetic construct; identical to SEQ ID NO: 7225
  source 1..120: mol_type = other DNA

SEQ ID NO: 52928 - DNA, 120 bp, synthetic construct; identical to SEQ ID NO: 7226
  source 1..120: mol_type = other DNA

SEQ ID NO: 52929 - DNA, 120 bp, synthetic construct
  source 1..120: mol_type = other DNA
ccatgcaagcccttcatttgtaacagcttccctgggggcatctcagaatccagcatccaaccagcctgctttttttttttttttttttttttttttgagacagagttttgctctcgttgc

SEQ ID NO: 52930 - DNA, 120 bp, synthetic construct
  source 1..120: mol_type = other DNA
ggggtaggagcctcaggagcccagactcatccctgctcaagctctggggtaggagcctcaggagcccaggctcatccctgctcagtctctggggtaggagcctcaggagcccaggctcat

SEQ ID NO: 52931 - DNA, 120 bp, synthetic construct
  source 1..120: mol_type = other DNA
ctcaagctctggggtaggagcctcaggagcccaggctcatccctgctcaagctctggggtaggagcctcaggagcccaggctcatccctgctcaggctctggggtaggagcctcaggagc

SEQ ID NO: 52932 - DNA, 120 bp, synthetic construct
  source 1..120: mol_type = other DNA
ccctgctccgtctctggggtaggagcctcaggatcccaggctcatccctgctcaggctctggggtaggagcctcaggatcccaggctcatccctgctcaagctctggggtaggagcctca

SEQ ID NO: 52933 - DNA, 120 bp, synthetic construct; identical to SEQ ID NO: 52931
  source 1..120: mol_type = other DNA

SEQ ID NO: 52934 - DNA, 120 bp, synthetic construct; identical to SEQ ID NO: 52932
  source 1..120: mol_type = other DNA

SEQ ID NO: 52935 - DNA, 120 bp, synthetic construct; identical to SEQ ID NO: 22244
  source 1..120: mol_type = other DNA

SEQ ID NO: 52936 - DNA, 120 bp, synthetic construct; identical to SEQ ID NO: 22240
  source 1..120: mol_type = other DNA

SEQ ID NO: 52937 - DNA, 120 bp, synthetic construct; identical to SEQ ID NO: 22241
  source 1..120: mol_type = other DNA

SEQ ID NO: 52938 - DNA, 120 bp, synthetic construct; identical to SEQ ID NO: 22242
  source 1..120: mol_type = other DNA

SEQ ID NO: 52939 - DNA, 120 bp, synthetic construct
  source 1..120: mol_type = other DNA
ctttaatgcaggttgagctgaagaaggtgctgggggcaggaggaagagataggggccgggctcagctgtgagtctggggccttaggggaaagtgacctccagccctggtgttccctccca

SEQ ID NO: 52940 - DNA, 120 bp, synthetic construct
  source 1..120: mol_type = other DNA
ccattacgccccagcgcctctcgggacgtcccgctaataagtgaccctctgtaaatgttaggaatgagtcaagtttactccgcgctgcagccttcccgttagcgggtggcgccgccgatg

SEQ ID NO: 52941 - DNA, 120 bp, synthetic construct
  source 1..120: mol_type = other DNA
aaacagtgaaacactcagcctcctgggctcagcgtgggcctctcacgcaaccaggcaccaccgtcccagcctctgagagcggctcagcagcatccctattatagtagctgcatcacgatt

SEQ ID NO: 52942 - DNA, 120 bp, synthetic construct
  source 1..120: mol_type = other DNA
ccaacactaacccggccccccacactaacccagtccccacactatcccggcccccacactaacccggcccccacactaacccagcccccaacactaacccagccccccacactaacccgg

SEQ ID NO: 52943 - DNA, 120 bp, synthetic construct
  source 1..120: mol_type = other DNA
ggtccacccacctggcggacttgcacccctactgcagcaagtgtggacctacttgtggtggggaagtccccagggtgcagcagaagccgtcccccaccacgggcatgtctgactccctct

SEQ ID NO: 52944 - DNA, 120 bp, synthetic construct
  source 1..120: mol_type = other DNA
tcatcacacacacgcactcacacatacactcacatacactcacacacacgcacgcacacatacactcatgacacacacgcacacactcatcacacatgctcatcacacacatgtacacac

SEQ ID NO: 52945 - DNA, 120 bp, synthetic construct; identical to SEQ ID NO: 22245
  source 1..120: mol_type = other DNA

SEQ ID NO: 52946 - DNA, 120 bp, synthetic construct; identical to SEQ ID NO: 22246
  source 1..120: mol_type = other DNA

SEQ ID NO: 52947 - DNA, 120 bp, synthetic construct; identical to SEQ ID NO: 22247
  source 1..120: mol_type = other DNA

SEQ ID NO: 52948 - DNA, 120 bp, synthetic construct; identical to SEQ ID NO: 28934
  source 1..120: mol_type = other DNA

SEQ ID NO: 52949 - DNA, 120 bp, synthetic construct
  source 1..120: mol_type = other DNA
gacctgaccgtcccccagcccgacacccgtaaagggtctgtgctgaggaggattagtaaaagaggaaggaatgcctcttgcagttgagacaagaggaaggcatctgtctcctgcctgtcc

SEQ ID NO: 52950 - DNA, 120 bp, synthetic construct; identical to SEQ ID NO: 28935
  source 1..120: mol_type = other DNA

SEQ ID NO: 52951 - DNA, 120 bp, synthetic construct
  source 1..120: mol_type = other DNA
agaagacgggtgatttctgcatttccatctgaggtaccgggttcatctcactagggagcgccagacagtgggcgcaggtcagtgggtgcgcgcaccgtgcgtgagcggaagcagggcaag

SEQ ID NO: 52952 - DNA, 120 bp, synthetic construct
  source 1..120: mol_type = other DNA
attcaaaccaaaggcaaagaagttgaaaactttgaaaaaaatttagaagaatgtataactagaataaccaatacagagaagtgcttaaaggagctgatggagctgaaagccaaggctcga

SEQ ID NO: 52953 - DNA, 120 bp, synthetic construct
  source 1..120: mol_type = other DNA
ctaggaagaaactgcatcaactaacgagcaaaatcaccaactaacatcataatgacaggatcaaattcacacataacaatattaactttaaatgtaaatggactaaatgctccaattaaa

SEQ ID NO: 52954 - DNA, 120 bp, synthetic construct
  source 1..120: mol_type = other DNA
aacgaaatgaaggcagaaataaagatgttctttgaaatcaatgagaacaaagacacaacataccagaatctctgggacgcattcaaagcagtgtgtagagggaaatttatagcactaaat

SEQ ID NO: 52955 - DNA, 120 bp, synthetic construct
  source 1..120: mol_type = other DNA
gggacgtatttcaaaataataagagctatctatgacaaacccacagccaatatcatactgaatgcgcaaaaactggaagcattccctttgaaaactggcacaagacagggatgccctctc

SEQ ID NO: 52956 - DNA, 120 bp, synthetic construct
  source 1..120: mol_type = other DNA
aaatggggctgggaaaactggctagccatatgtagaaagctgaaactggatgccttccttacaccttatacaaaaatcaattcaagatggattaaagacttaaacgttagacctaaaacc

SEQ ID NO: 52957 - DNA, 120 bp, synthetic construct
  source 1..120: mol_type = other DNA
atgatgagttcatgtcctttgtaggggcatagatgaaattggaaatcatcattctcagtaaactgttgcaagaacaaaaaaccaaaccgcatattctcactcataggtgggaattgaaca

SEQ ID NO: 52958 - DNA, 120 bp, synthetic construct
  source 1..120: mol_type = other DNA
aatacctcagtcaatgtctgagaacctctaaatggtaaaggtatgtatataattgtcagttaaaattatgttggccaggcgcggtagctcacgactgtaatcccagcactttgggaagct

SEQ ID NO: 52959 - DNA, 120 bp, synthetic construct
  source 1..120: mol_type = other DNA
gtgtatttggctcttatttcatgttgataatcctcatctcaggaataaatgagaattaaaaacatgcacaaggccgggcacagtggatcacaccagtaatgccagcattttgggaggctg

SEQ ID NO: 52960 - DNA, 120 bp, synthetic construct; identical to SEQ ID NO: 28937
  source 1..120: mol_type = other DNA

SEQ ID NO: 52961 - DNA, 120 bp, synthetic construct
  source 1..120: mol_type = other DNA
gatggccagtgatggtgagcattttttcatgtgttttttggctgcataaacgtcttcttttgagaagtgtctgttcatctccttcacccactttttgatggggttgtttttttcttgtaa

SEQ ID NO: 52962 - DNA, 120 bp, synthetic construct
  source 1..120: mol_type = other DNA
tgctggattcagtttgccggtattttattgaggatttttgcatcaatgttcatcaaggatattggtctaaaattctcttttttagttgtgtctctgcccggctttggtatcagaatgatg

SEQ ID NO: 52963 - DNA, 120 bp, synthetic construct
  source 1..120: mol_type = other DNA
ttccaactatgtggtcaattttggaataggtttggtgtggtgctgaaaaaaatgtatattctgttgatttggggtggagagttctgtagatgtctattaggtccgcttggtgcagagctg

SEQ ID NO: 52964 - DNA, 120 bp, synthetic construct
  source 1..120: mol_type = other DNA
ctattttatttctccttcacttatgaagcttagtttagctggatatgaaattctgggttgaaaattcttttctttaagaatgttgaatattggcccccactctcttctggcttgtagagt

SEQ ID NO: 52965 - DNA, 120 bp, synthetic construct
  source 1..120: mol_type = other DNA
ggtctttgatgatggtgatgtacagatgggtttttggtgtggatgtcctttctgtttcttagttttccttctaacagacaggaccctcagctgcaggtctgttggagtttgctagaggtc

SEQ ID NO: 52966 - DNA, 120 bp, synthetic construct; identical to SEQ ID NO: 11066
  source 1..120: mol_type = other DNA

SEQ ID NO: 52967 - DNA, 120 bp, synthetic construct; identical to SEQ ID NO: 11067
  source 1..120: mol_type = other DNA

SEQ ID NO: 52968 - DNA, 120 bp, synthetic construct; identical to SEQ ID NO: 11068
  source 1..120: mol_type = other DNA

SEQ ID NO: 52969 - DNA, 120 bp, synthetic construct
  source 1..120: mol_type = other DNA
gtggtgattcctcagggatctagaactagaaataccatttgacccagccatcccattattgggtatatacccaaaggattataaatcatgctgctataaagacacatgcacatgtatgtt

SEQ ID NO: 52970 - DNA, 120 bp, synthetic construct
  source 1..120: mol_type = other DNA
cggcgagaagatggcgacttcgaacaatccgcggaaattcagcgagaagatcgcgctgcacaatcagaagcaggcggaggagacggcggccttcgaggaggtcatgaaggacctgagcct

SEQ ID NO: 52971 - DNA, 120 bp, synthetic construct
  source 1..120: mol_type = other DNA
gtctctatggatttgcctgttctggacatttcatatcaatagaatcctacacagtgaggcgaatcctgcaccatgaagccttttgtgtctgccttcttttacttagcatagtgacttcaa

SEQ ID NO: 52972 - DNA, 120 bp, synthetic construct; identical to SEQ ID NO: 19633
  source 1..120: mol_type = other DNA

SEQ ID NO: 52973 - DNA, 120 bp, synthetic construct; identical to SEQ ID NO: 19634
  source 1..120: mol_type = other DNA

SEQ ID NO: 52974 - DNA, 120 bp, synthetic construct; identical to SEQ ID NO: 15650
  source 1..120: mol_type = other DNA

SEQ ID NO: 52975 - DNA, 120 bp, synthetic construct
  source 1..120: mol_type = other DNA
agtatggtgtaaacaagtataacgaaactttttttttttttttaaagagacagagtttctcccggtcacccaggcgagagtgcagtggtgcaatcatagctcactgtagccttgaactcc

SEQ ID NO: 52976 - DNA, 120 bp, synthetic construct; identical to SEQ ID NO: 15651
  source 1..120: mol_type = other DNA

SEQ ID NO: 52977 - DNA, 120 bp, synthetic construct
  source 1..120: mol_type = other DNA
ctcactgcactgtagcctggcaacagagtgagaccctgtctcaaaagaaaagaaaagcccattatagaaacacaggggttgaaacatcctataaattctaaactcagaggtggttctcct

SEQ ID NO: 52978 - DNA, 120 bp, synthetic construct; identical to SEQ ID NO: 15653
  source 1..120: mol_type = other DNA

SEQ ID NO: 52979 - DNA, 120 bp, synthetic construct
  source 1..120: mol_type = other DNA
ttacaagaaaaaaacaaacaaccccatcaaaaagtgggcgaaggatatgaacagacactcttcaaaagaagacatttatgcagctaaaagacacatgaaaaaatgctcatcatcactggc

SEQ ID NO: 52980 - DNA, 120 bp, synthetic construct
  source 1..120: mol_type = other DNA
acccaaagacagttttggttactgtttggttactcttcagctttgtgcttgggggcattttaaacagcaaaatcacgaacaaaacacacaaaactgcaaaaggtaagcaagctgcagtgc

SEQ ID NO: 52981 - DNA, 120 bp, synthetic construct
  source 1..120: mol_type = other DNA
aatcaggaaaagaacactgacttgtctttggtttcattctggtttttcattttccgcagacatcatatccctcagtgcactggctgtcacctccccctgcccgccacctgcacactgtgg

SEQ ID NO: 52982 - DNA, 120 bp, synthetic construct
  source 1..120: mol_type = other DNA
gtgaaggacagcacagctcctccctccctgccaagtgtcaggggcactaaaaacactgccatcaatgttctgatgtttaaatcatgttttgatgcaatgtttaaacaaatcaaaatgggt

SEQ ID NO: 52983 - DNA, 120 bp, synthetic construct
  source 1..120: mol_type = other DNA
accttaatttggcaccccagggaatcgctcctctggaattgtaaccttgcagggcaaaagctatcatttcaagattttttgggatcctgtgtccccggacagtgctgtaaatgtaggagg

SEQ ID NO: 52984 - DNA, 120 bp, synthetic construct
  source 1..120: mol_type = other DNA
caaacaaacaaaaccgggagtgcctggacacttagtgagaactggacaggggccatgggtcgaggagcaaaataatcaccaggacttgtggataacaggatcatgtgggtggtgggtccg

SEQ ID NO: 52985 - DNA, 120 bp, synthetic construct
  source 1..120: mol_type = other DNA
cttgtcccagccacgtttctgctgactgagcagccttcttcatgagctcacgcctttccagagaaatcccttaatgcctccattctgctggtggcatatatagggagggctcggccttgg

SEQ ID NO: 52986 - DNA, 120 bp, synthetic construct
  source 1..120: mol_type = other DNA
tatagacagcatgacaccaagggcagtgacctcattccacaggctgagtccagccagccagccaagcatcaccagccagacgattgaccctaacggaccaaccaacccgtaacgacccct

SEQ ID NO: 52987 - DNA, 120 bp, synthetic construct
  source 1..120: mol_type = other DNA
tgaaccctacctgaggaagccagtccccgacggcatagctgcatccgcttggaatgctttacaggcattgacaccttcgcctcacagcagcactttggaaccagtgtcctcattattcca

SEQ ID NO: 52988 - DNA, 120 bp, synthetic construct
  source 1..120: mol_type = other DNA
gagacaaccccccgcggggaatagcccggcaagtggccacgaggccaggctgaggtccagagaagcaggggcatgaatccataaatcccagggggcctggccatgggatgtgctggctgc

SEQ ID NO: 52989 - DNA, 120 bp, synthetic construct
  source 1..120: mol_type = other DNA
ggacccggtggcctcggaacgatggggtcgcctgcgtcccttccttctcctgagctcaagcgcctccctccacactgggctggaaggagaggttttgggggcagagcctctgatgggaaa

SEQ ID NO: 52990 - DNA, 120 bp, synthetic construct
  source 1..120: mol_type = other DNA
agcaggacctgcccggctgttgtgccatcgagtccccatttgtacagaagggggtgccctgtggttggcaacaacatgacccactgtgctttggggctgcggctggatgtttttgaaaat

SEQ ID NO: 52991 - DNA, 120 bp, synthetic construct
  source 1..120: mol_type = other DNA
catctcatctggcctccaagacatgcagcgtgacacctcccatctcccctcctggggcctcctgatgccatccttcctcggctctccaatcacaccccacccgggcggttcttaaactca

SEQ ID NO: 52992 - DNA, 120 bp, synthetic construct
  source 1..120: mol_type = other DNA
tgctccctggtatgcattcaggttgaattcagagagctctgcgtgccagtgtccagccccattcaccagggcacacggccatcgtggaaagatgggattggccagtacttcccaagcctg

SEQ ID NO: 52993 - DNA, 120 bp, synthetic construct
  source 1..120: mol_type = other DNA
gggtgactttggacagatctatcaacccctctgagtattcgatgtccgtctttgccagtcggctgaagctgggagaccgagtgcctgcggggagcctccagcccccagttcctttcaatc

SEQ ID NO: 52994 - DNA, 120 bp, synthetic construct
  source 1..120: mol_type = other DNA
tagtgaaggctccgtcagcgttagctcccaggctgctggggaggccagaaggccctgctctgtgggatttcctctgagaccctgggctaaggactgagtttgcaggggcaggaaatgtgg

SEQ ID NO: 52995 - DNA, 120 bp, synthetic construct
  source 1..120: mol_type = other DNA
ttattctgcagagctgtctgccccgggagcctgtgagcgctgtgcctttaccttggccaggagtgagagaaatcaatttccaaagcatcctggctggaaaatcttgctttccagagcagt

SEQ ID NO: 52996 - DNA, 120 bp, synthetic construct
  source 1..120: mol_type = other DNA
tttccaaataaggtcacatgcccaggttctggggtttggaacttagacacatgttttgggggacactgttccacccatgacaagtatggatgacgtccctgagatcctgtgtccttgcat

SEQ ID NO: 52997 - DNA, 120 bp, synthetic construct
  source 1..120: mol_type = other DNA
gtgagtgattatgtgtaggtgtgtgtgtgtatgagtgtgggtgtccctgtgtgtgtaggtgtatgtgtgtatgagtgtggtgtccctgtgagtggctgtgtgtgtgagtgtgtttgtatg

SEQ ID NO: 52998 - DNA, 120 bp, synthetic construct
  source 1..120: mol_type = other DNA
gccactcaggtgtcccaggcctgagctcatgaagggcagagggcattccctggcacccttgcagttcttcaggggtcctgagtgcgtagtgcccattaagtggcaatgttgatggggaca

SEQ ID NO: 52999 - DNA, 120 bp, synthetic construct
  source 1..120: mol_type = other DNA
acttcattcacggcatggatgtggccctcgtgttgctgattctcatagtttttggtgcatccttcttcactccatcagccgcgaggattttgtcttctgccgtcttgtgttttgacttcc

SEQ ID NO: 53000 - DNA, 120 bp, synthetic construct; identical to SEQ ID NO: 23696
  source 1..120: mol_type = other DNA

SEQ ID NO: 53001 - DNA, 120 bp, synthetic construct
  source 1..120: mol_type = other DNA
agtagaataagagaggccacggtgttgagtgtgaatgggatgttgagagataaggctagagatgctttgttaagggtcctgtgagcagggtaaagagtttggattcatcccaagggctct

SEQ ID NO: 53002 - DNA, 120 bp, synthetic construct
  source 1..120: mol_type = other DNA
ccatcaatttttctttcaatctacttgtccatcaatgtgtccatctgatcttccttccttccttcctttcttccctccttccttccattcatctatccattatttccccttccacctctc

SEQ ID NO: 53003 - DNA, 120 bp, synthetic construct
  source 1..120: mol_type = other DNA
ggtttaataggatcactctggctagggtgcaaatcatacacttagtggccaaggagggatgcagagagaccagttgggaggctactgcagagagtctcgtgagctgtgtttgtgcggtcc

SEQ ID NO: 53004 - DNA, 120 bp, synthetic construct
  source 1..120: mol_type = other DNA
gatgtagctggtgtgtgggaggcctatgggggcctcaggaaggggttgaaaaggatacagtaattttcaattaatttaacctgcatattttacaaatgaggtgagaaatcaccttgactt

SEQ ID NO: 53005 - DNA, 120 bp, synthetic construct
  source 1..120: mol_type = other DNA
gcccggcctgtcatgctttataaatcagtgcttacatcatctcactgaaccctaagaatgtcattgggaggtaggtgtggttattaattctatttaacagatgaagaaacaggctcaggg

SEQ ID NO: 53006 - DNA, 120 bp, synthetic construct
  source 1..120: mol_type = other DNA
gcagaactgggatttgaccgcaggcctaactccaaaaggctgctcttagccccaacctagactcaaatatttttttttttttgagatggagtcttgctctgtcacccaggctggagcaca

SEQ ID NO: 53007 - DNA, 120 bp, synthetic construct
  source 1..120: mol_type = other DNA
ttgtatggagcagagagactttgcagttcctcaataatgggggtttattctaaagacatctgtagaaacagggaaattagaaaactaggctacatggccacactcagagagtccaagtga

SEQ ID NO: 53008 - DNA, 120 bp, synthetic construct
  source 1..120: mol_type = other DNA
gtttgagtcctttctctctatgtatctgtcaggctatgctgcagtaacaaacagcccccaattcttggtggttgaaaacaacgaaacttatttctcactcatgaaagatgtctagtgctg

SEQ ID NO: 53009 - DNA, 120 bp, synthetic construct
  source 1..120: mol_type = other DNA
tatgggctgtaagttgcaccaaggtggggaccctatctgtattgctccccactgagttcatagttgacacatttgcttgaagtagaaatgaataatgaattagtagaaagaaacaggcag

SEQ ID NO: 53010 - DNA, 120 bp, synthetic construct
  source 1..120: mol_type = other DNA
agaaacaatgcttatcactggcttgctgttaataaatacatgggtaaatctctgttcgaggctctcagctctgaaggctatgagacccctgatttcccattccacatctccatatttctg

SEQ ID NO: 53011 - DNA, 120 bp, synthetic construct
  source 1..120: mol_type = other DNA
aaacaaagtcatcagggtgaagttgcctagtgaagtcacctaagccaacatgactggtatccttataggcacagaaatttagacatagaatcagccatgcactaagggaagatgatgtga

SEQ ID NO: 53012 - DNA, 120 bp, synthetic construct
  source 1..120: mol_type = other DNA
gcagccctgggatttattttatgttatttatttatttattttctttgagacagagttttgctcttgttgcctaggttggagtgcaatgccatgatcttggctcactgcatcctctgcctc

SEQ ID NO: 53013 - DNA, 120 bp, synthetic construct
  source 1..120: mol_type = other DNA
actccatctcaaaaaaaaaaaaaatagaaaagaaatgtgagtaaaggctgggcacccatgtggcagcgatggggccagtggtagggatctaagagcaactcactctaggacagtggttaa

SEQ ID NO: 53014 - DNA, 120 bp, synthetic construct
  source 1..120: mol_type = other DNA
aaatatttgttgaatgaataaatgggtagatgaatgaagcccagactctgccaaaccacccttctttacttgttcttccccaggcccactgagatgttcctctgtctgccatgcctcacg

SEQ ID NO: 53015 - DNA, 120 bp, synthetic construct
  source 1..120: mol_type = other DNA
ctgggaccacggccaagtgcttccggttttatacattacataattgaatcctcacaacctgttcacaggtattattagacatcattactgtccccattttatagaacaggaagttgaggc

SEQ ID NO: 53016 - DNA, 120 bp, synthetic construct
  source 1..120: mol_type = other DNA
tttttccctcctcctgcagctggcctggatagaaataaatgaagctaaggacagaagttgaagtagctgcttacggaccccacagctctgggacagtctgaaaccaggagaaaaagagaa

SEQ ID NO: 53017 - DNA, 120 bp, synthetic construct
  source 1..120: mol_type = other DNA
gagcagatacagcccctcacctgctcaccccaatctgtcccttttagggcttactttccagaagaaggacagacaataaataaatgaatatatgatttccagtagtgagaagtgctacaa

SEQ ID NO: 53018 - DNA, 120 bp, synthetic construct
  source 1..120: mol_type = other DNA
cacaggttagagtctgcaaagtgctgcttcaatttcatctgcatcagacaagtctgggcttcaatttcagctcttccacttattcacgtgggatctgtagcatgtcttttaattaacata

SEQ ID NO: 53019 - DNA, 120 bp, synthetic construct
  source 1..120: mol_type = other DNA
ggtttgagtgttagaatttgcaacatgctgcttccatttcagctgcatcagacaagcctgggctccagtttcagctctgccacttactggaatctgtaccatatttcttaattaacataa

SEQ ID NO: 53020 - DNA, 120 bp, synthetic construct
  source 1..120: mol_type = other DNA
aggtgatcaagttgtggagtgggggaatctacccttgctcctgtctgcaaatctgggaaccaagttttggggtctggcagcctatggagataattcatgctttgcagtcagatagagctg

SEQ ID NO: 53021 - DNA, 120 bp, synthetic construct
  source 1..120: mol_type = other DNA
taaggcaaaaaaccgtatgacttgtattcactactcagaagtaaccattattaagattttggtatgaatttggatttctctgtgtgtgtgtgtgtgtgtgtgtgtgtgtgtgtgtgtgta

SEQ ID NO: 53022 - DNA, 120 bp, synthetic construct
  source 1..120: mol_type = other DNA
tagccatgcccgacctgaaagccatcccttcctctttaatgtactatttttcttctaatgtggatctacaaaaacagagtttgggcagagtctaacaacaggaacaagagaagaaacaga

SEQ ID NO: 53023 - DNA, 120 bp, synthetic construct
  source 1..120: mol_type = other DNA
tttcttcatctgtaaaatgggcatattggtatctactgtcctgaggttccaatgtgcttattagcttgagggttgtcacactgcaactccagaaggctccaatcacaagactatgaaatg

SEQ ID NO: 53024 - DNA, 120 bp, synthetic construct
  source 1..120: mol_type = other DNA
aatgacatttcagaatcaaacattccccaaagtgttgcagagtgtctgttacatgaaaatggcccagtagaaacttaacaaacggctgtgatccaacagcagtggtcatagacacgtagt

SEQ ID NO: 53025 - DNA, 120 bp, synthetic construct
  source 1..120: mol_type = other DNA
accaagctcagctgattttttgcatttttagtagagacagggtttcactgtgttggccaggttagttttaaactcctgacctcatgacctgcctgcctcggcctcccaaagtgcagggat

SEQ ID NO: 53026 - DNA, 120 bp, synthetic construct
  source 1..120: mol_type = other DNA
tagagctggaggtgtccacagaaactggccaggcaggtccttgcaggccaggcctgtgtgacattttctggagagaagaccagcactttcattaagtagcccctggaaactctttcatca

SEQ ID NO: 53027 - DNA, 120 bp, synthetic construct
  source 1..120: mol_type = other DNA
tgtgtgtgtgtgtgagagagagagagagagagagagagtgacagcgagagagaaatgagaatcagcaagtacctgtgctaggagtagggcaacagaacccttactgagtcttacggttct

SEQ ID NO: 53028 - DNA, 120 bp, synthetic construct
  source 1..120: mol_type = other DNA
agggtttatgcctttcaaatctccttgaagaaattctttctttcttttttttttttccccccaagacagagtcttgctctgttgcccaggctggagtgcagtggtataatcttggctcac

SEQ ID NO: 53029 - DNA, 120 bp, synthetic construct
  source 1..120: mol_type = other DNA
gaccactgccctataatatgattcttcaggaatgttttaggtattcttgacctttcaggactccacttagaagcatcccctcacatttggaaaagtggaaaaccttgttgaatgagctaa

SEQ ID NO: 53030 - DNA, 120 bp, synthetic construct
  source 1..120: mol_type = other DNA
tcattcttcaatcaatacccattgagtgcctatttggatacttggcttagtacctgagtgatgaaataatctacagcaaacccccatggcactagtttataacaaacctgcacatgtatc

SEQ ID NO: 53031 - DNA, 120 bp, synthetic construct
  source 1..120: mol_type = other DNA
gtgaccacacctgctaacttttttattttttattttatgtagagatttggggggtgggggggtgtcttactgtgttgcccaggctggtctcgaactcttggcctcaagcaatcctcccgt

SEQ ID NO: 53032 - DNA, 120 bp, synthetic construct
  source 1..120: mol_type = other DNA
aggtaggtgacagagcaaccgctccgtgcttcagtttcctctaaaatgggagcaataatagtgccgctcagaggattgcagtgaagagtccaggacatgacgcttgtgaagtttagggca

SEQ ID NO: 53033 - DNA, 120 bp, synthetic construct
  source 1..120: mol_type = other DNA
ctccagcctgggcgacagagcaacactctgtctcagaaaaaaaaaaaattatgtctgtactaaaaagtccacaggaatgtttatggtagctttatccatactgcccacattgaaagcaac

SEQ ID NO: 53034 - DNA, 120 bp, synthetic construct
  source 1..120: mol_type = other DNA
tcagtggttgctgagggatctggaaaaaggggagagaagttaataggtgaagctcatgtaatgtcaaaacccttagactaccaaaacacagactgaatcttaatgcaaactctggccttt

SEQ ID NO: 53035 - DNA, 120 bp, synthetic construct
  source 1..120: mol_type = other DNA
aatcactctgcttgaatgcacttaataacagaatagtcacagtaccttcaattgatatgcacactctcactctttgcctagtcagaacttttcggaccctctgcttccagggagaaatag

SEQ ID NO: 53036 - DNA, 120 bp, synthetic construct
  source 1..120: mol_type = other DNA
ctcctagaaagaccttgcagtgtgggtagcacttaaaatggaacagatgatgtaggcaaatgcctttctttagatgaggcaatgtggaaaggaagcagagcagactgaccaagagcatgg

SEQ ID NO: 53037 - DNA, 120 bp, synthetic construct
  source 1..120: mol_type = other DNA
aaaaaaaaaaaaaaaaaagagagagagagagagaactgcattaatacagatggttccatattttctccagggatcatccgactgaggaggtgggtggggaggtgtgggacaaaatgggga

SEQ ID NO: 53038 - DNA, 120 bp, synthetic construct
  source 1..120: mol_type = other DNA
tgaggctgcagtgaactgtgattgcaccactgcacttcatcctgggggacagagtgagaccctgtccaaaaaaaaaagggagcttcacagggggaggtccacatgcataggttggggagt

SEQ ID NO: 53039 - DNA, 120 bp, synthetic construct
  source 1..120: mol_type = other DNA
attctgctcagtgttacgtcccctgtgcagaaatgtctattcagggtccctgcccaatttggtgttatcttattgtggttattgctgcttagcgctgttaacgtattgcatatcttttat

SEQ ID NO: 53040 - DNA, 120 bp, synthetic construct
  source 1..120: mol_type = other DNA
caaagtgctgggattacaggcatgagccaccgcgtctggcctacaacttttttccatagtgtatatcctaatttatctttacaccaacaatgcataagattttccctttatccaaatcca

SEQ ID NO: 53041 - DNA, 120 bp, synthetic construct
  source 1..120: mol_type = other DNA
ccttttttttttcgagatggagtctcgctctgtcgccaggctagagcgcagtagtatgatcttggcttactgcaacctctgcttcctgggttcaagtgagtctcctgcctcagcctccca

SEQ ID NO: 53042 - DNA, 120 bp, synthetic construct
  source 1..120: mol_type = other DNA
tgtaactttgtttctataaccaatccctcctatctgccctccttcccccagcctcaggaaaccactcctgtactttctgcttcttgaaggttaagtttttggattcatcataagtgaggt

SEQ ID NO: 53043 - DNA, 120 bp, synthetic construct
  source 1..120: mol_type = other DNA
gcccagctaatttttgtattactagagacggggtttcaccatgttggccaggctggtgtcaaactcctgacctcgtgagccaccatgcctagtctaagatgccttctctttgggttcgtt

SEQ ID NO: 53044 - DNA, 120 bp, synthetic construct
  source 1..120: mol_type = other DNA
tgcctgccttagcctcccaaagtgctgtgattacaggcgggagccactgtgcccagggcaaccctgtttttttttttttttttttaaatcaacttttattttgattaaattgcagcttag

SEQ ID NO: 53045 - DNA, 120 bp, synthetic construct
  source 1..120: mol_type = other DNA
gtcagttggtcacttgaacgtcttctttttctttatttttattttttattttttgagacagtgtctcactctgttgcccagactggagtgcagtggcgtgatcttggctcactgcaacct

SEQ ID NO: 53046 - DNA, 120 bp, synthetic construct
  source 1..120: mol_type = other DNA
ctattaacttaccagcatactattggctttagtgcatggcgtctatatattggtatttgttgctgggccgttatttagactgccttcttatttcttaactgtgttccaggtgggtaaagg

SEQ ID NO: 53047 - DNA, 120 bp, synthetic construct
  source 1..120: mol_type = other DNA
ttgctcaataaccaatagccatcagaaatactacaagaaattatgagtttggggctggaggagaaggtggtttagctcttcttcaagactcgtgccagtgtgagttttcagtgcttctga

SEQ ID NO: 53048 - DNA, 120 bp, synthetic construct
  source 1..120: mol_type = other DNA
tcacccatactcacttccccccatcctctgccaataggacagccaagagcacaagatcatcctctatgaaaaccccaacttcaccgggaagaagatggaaatcatagatgacgatgtacc

SEQ ID NO: 53049 - DNA, 120 bp, synthetic construct
  source 1..120: mol_type = other DNA
cctcccaaagtgcagggattacaggcatgagccactgtgcctgacctggaactgactcttaaattttcagaatttgtgtgaactggttgactaatcattggtagcttgaaaccagccaca

SEQ ID NO: 53050 - DNA, 120 bp, synthetic construct
  source 1..120: mol_type = other DNA
aatgctggaagggtggggtggaaagggtgtcctgcttacccttgggaagtggcaatggttgggaggcttcacccttcctagtggcttatggatgctctatctctctcccctcacctctct

SEQ ID NO: 53051 - DNA, 120 bp, synthetic construct
  source 1..120: mol_type = other DNA
atatagtgtatggtagagattcagtttttttttctttttggaagtccagtgtcttaaatcattcatgaaggagtccatttcctgcactgtggtgcaatgtcgccttgctgatctatcccc

SEQ ID NO: 53052 - DNA, 120 bp, synthetic construct
  source 1..120: mol_type = other DNA
gcacgttctgcacatgtatcccagaacttataataaaaaagaaaccagtaagtgctcaataaatgttactaacatctatttcttcattcattcttcaaccattacccactgagtgcctat

SEQ ID NO: 53053 - DNA, 120 bp, synthetic construct
  source 1..120: mol_type = other DNA
tggctattttttttttttttttaatttcatgtagagattggggggtggggggtggactccctgtgttttccaggctggtctcaaactcctggcctcaagcaatcctcccatctttgcctc

SEQ ID NO: 53054 - DNA, 120 bp, synthetic construct
  source 1..120: mol_type = other DNA
cttacctctctgagactctctttcctcatctgaccaagggccatacgggggtttttattccattggtaattctcagacacctggtcaccgagctgacacgaagtagttgctcaataaatg

SEQ ID NO: 53055 - DNA, 120 bp, synthetic construct
  source 1..120: mol_type = other DNA
acaatcatccccaatttaaaatttttatattaacagttaaaacagactgtcaaattattaaaagtcttttttttttttaagagacggggcgggagcgggggggggtctcactgtgttgcc

SEQ ID NO: 53056 - DNA, 120 bp, synthetic construct
  source 1..120: mol_type = other DNA
ttgttaactataatttccctgctgtactattgaatacaagaactttttttttttaggcagggtctcactctgtcacccaggctggagtgcagtagcgtaatcttggctcactgcaacctc

SEQ ID NO: 53057 - DNA, 120 bp, synthetic construct
  source 1..120: mol_type = other DNA
gcagtcactgatctcgggagaagctgaaaacacagtcatcagccctaggagaggggttttctgcacttccttggccatcgctggcctctggggtgtttcaagtttttctggaaaacagga

SEQ ID NO: 53058 - DNA, 120 bp, synthetic construct
  source 1..120: mol_type = other DNA
tcgtgccattgcaccccagactgggtgacagagtgagactctgtctcaaaaaaagcaaaacgaaacaaaaccaaaaaaaaaaaaacataaatagagacagggtctcactatgttgcccag

SEQ ID NO: 53059 - DNA, 120 bp, synthetic construct; identical to SEQ ID NO: 28164
  source 1..120: mol_type = other DNA

SEQ ID NO: 53060 - DNA, 120 bp, synthetic construct
  source 1..120: mol_type = other DNA
gtatatacccagtaatgggatggctgggtcagcaaagtctcaggatacaaaatcaatgtacaaaaatcacaagcattcttatacaccaacaacagacaaacagagagccaaatcatgagt

SEQ ID NO: 53061 - DNA, 120 bp, synthetic construct; identical to SEQ ID NO: 28165
  source 1..120: mol_type = other DNA

SEQ ID NO: 53062 - DNA, 120 bp, synthetic construct
  source 1..120: mol_type = other DNA
gctaacacggtatttttttctctactgaaaaaaaaaaaaaaaaatttagccaggcatggtggcatgcacctgtagtcccagctacttagcaggctgaggcaggagaatcacttgaacccg

SEQ ID NO: 53063 - DNA, 120 bp, synthetic construct; identical to SEQ ID NO: 28166
  source 1..120: mol_type = other DNA

SEQ ID NO: 53064 - DNA, 120 bp, synthetic construct; identical to SEQ ID NO: 28167
  source 1..120: mol_type = other DNA

SEQ ID NO: 53065 - DNA, 120 bp, synthetic construct; identical to SEQ ID NO: 28168
  source 1..120: mol_type = other DNA

SEQ ID NO: 53066 - DNA, 120 bp, synthetic construct
  source 1..120: mol_type = other DNA
tttttttctttttactatcttatcagatgccattatttagggttttttttttttttgtggagaccaggccttgctctgtcacccaggctggtatacagtggcaccatcacggctcactga

SEQ ID NO: 53067 - DNA, 120 bp, synthetic construct
  source 1..120: mol_type = other DNA
ctggtctcgaactcctgacctcaagtgatccacctacctcagcctcgcaaagtgctgggataacaggcgtgagccaccgcgcccagtcagaaaattttaatttgtgtgtcaggacttagt

SEQ ID NO: 53068 - DNA, 120 bp, synthetic construct
  source 1..120: mol_type = other DNA
ttttaagtttctgagtcttttttttataatcttttttttattattattatactttaagttttagggtacatgtgcaccttgtgcaggttagttacatatgtatacatgtgccatgctggt

SEQ ID NO: 53069 - DNA, 120 bp, synthetic construct
  source 1..120: mol_type = other DNA
tggtattgcctaggttttcttctagggtttttatggttttaggtctaacgtttaagtctttaatccatcttgaattgatttttgtataaggtataaggaagggatccagtttcagctttc

SEQ ID NO: 53070 - DNA, 120 bp, synthetic construct
  source 1..120: mol_type = other DNA
agattttgggctgagacaatggggttttctagatatacaatcatgtcatctgcaaacagggacaatttgacttcctcttttcctaactgaataccctttatttccttctcctgcctaatt

SEQ ID NO: 53071 - DNA, 120 bp, synthetic construct
  source 1..120: mol_type = other DNA
tattagtcttgctagcggtctatcaattttgttgatcctttcaaaaaaccagctcctggattcattaattttttgaagggtgttttgtgtctctatttccttcagttctgctgtgatttt

SEQ ID NO: 53072 - DNA, 120 bp, synthetic construct
  source 1..120: mol_type = other DNA
cttcatagatcttcctccatccttttattttgagcctatgtgtgtctctgcacatgagatgggtttcctgaatacagcacactgatgggtcttgactctttatccaatttgccagtctgt

SEQ ID NO: 53073 - DNA, 120 bp, synthetic construct
  source 1..120: mol_type = other DNA
taaacttcccttctcgcttcatttcattcatttcatcttccatcgctgataccctttcttccagttgattgcattggctcctgaggcttctgcattcttcacgtagttctcgagccttgg

SEQ ID NO: 53074 - DNA, 120 bp, synthetic construct
  source 1..120: mol_type = other DNA
actgctgtgctagcaatcagcgagactctgtgggcgtaggaccctccgagccaggtgcaggatataatctcgtggtgtaccgttttttaagcccgccggaaaagtgcagtattagggtgg

SEQ ID NO: 53075 - DNA, 120 bp, synthetic construct; identical to SEQ ID NO: 21943
  source 1..120: mol_type = other DNA

SEQ ID NO: 53076 - DNA, 120 bp, synthetic construct
  source 1..120: mol_type = other DNA
caaatggaagagcattccatgctcatgggtaggaagaatcaatatcatgaaaatggccacactgcccaaggtaatttacagattcaatgccatccccatcaagctaccaatgactttctt

SEQ ID NO: 53077 - DNA, 120 bp, synthetic construct
  source 1..120: mol_type = other DNA
tgagataccatctcacaccagttagaatggcaatcattaaaaagtcaagaaacaataggtgccggagaggatgtggagaaataggaacacttttacactgttggtgggactgtaaactag

SEQ ID NO: 53078 - DNA, 120 bp, synthetic construct; identical to SEQ ID NO: 13546
  source 1..120: mol_type = other DNA

SEQ ID NO: 53079 - DNA, 120 bp, synthetic construct; identical to SEQ ID NO: 13547
  source 1..120: mol_type = other DNA

SEQ ID NO: 53080 - DNA, 120 bp, synthetic construct; identical to SEQ ID NO: 13548
  source 1..120: mol_type = other DNA

SEQ ID NO: 53081 - DNA, 120 bp, synthetic construct; identical to SEQ ID NO: 7745
  source 1..120: mol_type = other DNA

SEQ ID NO: 53082 - DNA, 120 bp, synthetic construct; identical to SEQ ID NO: 7746
  source 1..120: mol_type = other DNA

SEQ ID NO: 53083 - DNA, 120 bp, synthetic construct; identical to SEQ ID NO: 7747
  source 1..120: mol_type = other DNA

SEQ ID NO: 53084 - DNA, 120 bp, synthetic construct
  source 1..120: mol_type = other DNA
taatttttgttttgtatttatgttgtacactgatgtaatttttccgcagtacaagaattcttttttttttgagatggagtctcactctgtcgccaggctggagtgcagtggtgtgatctt

SEQ ID NO: 53085 - DNA, 120 bp, synthetic construct
  source 1..120: mol_type = other DNA
ttccaactcctgttgtcctcacctgggacaggggaactgtgtgtggaccttccagtaactggatggatgtttgtcccatacatccattcatccatccacccatccacccatccatccatc

SEQ ID NO: 53086 - DNA, 120 bp, synthetic construct; identical to SEQ ID NO: 27121
  source 1..120: mol_type = other DNA

SEQ ID NO: 53087 - DNA, 120 bp, synthetic construct; identical to SEQ ID NO: 33320
  source 1..120: mol_type = other DNA

SEQ ID NO: 53088 - DNA, 120 bp, synthetic construct
  source 1..120: mol_type = other DNA
tgttgccccaaaatatgtttcttagttgtattttttttttcttttaagatggtctcattctgtttccaaggctggagtgcagtggtgcaatcttggctccctgcaacctccgtcttctag

SEQ ID NO: 53089 - DNA, 120 bp, synthetic construct
  source 1..120: mol_type = other DNA
cagctcactatcactgtaacctccgcctcccgtgttcaagctattctcctgccacagccttctgagtagctgggattataggcacccactaccgcgcccagctaatttttgtatttttag

SEQ ID NO: 53090 - DNA, 120 bp, synthetic construct
  source 1..120: mol_type = other DNA
gccgagatggcaccactgcactccagcctgggcaacagaatgagactcagtctcaaaaaaaaaaaaaaaaatttcagggcgagcaagtttattatgaaagtaaaatagtgaaagactagg

SEQ ID NO: 53091 - DNA, 120 bp, synthetic construct
  source 1..120: mol_type = other DNA
caggcgtgttggtgcgtgcctgtagtcccagctactcggaggctgaggcagtagaattgcttcaacttgggagacggaggttgcagtgagccgagatggcaccactgcactccagcctgg

SEQ ID NO: 53092 - DNA, 120 bp, synthetic construct
  source 1..120: mol_type = other DNA
acattagtttggtccataaaggcgggacaactcaaagtgggggcttccaggctataaatgaatttaaacattttctggttgacaattggttgagtttgtagctcctcctccttctcttct

SEQ ID NO: 53093 - DNA, 120 bp, synthetic construct; identical to SEQ ID NO: 33308
  source 1..120: mol_type = other DNA

SEQ ID NO: 53094 - DNA, 120 bp, synthetic construct; identical to SEQ ID NO: 33309
  source 1..120: mol_type = other DNA

SEQ ID NO: 53095 - DNA, 120 bp, synthetic construct; identical to SEQ ID NO: 33310
  source 1..120: mol_type = other DNA

SEQ ID NO: 53096 - DNA, 120 bp, synthetic construct
  source 1..120: mol_type = other DNA
ttgcactccagcctgggcaacaagagcaaaactctgtctccaaaaaaaaaaaaaaataataaattcaattaaataaaagcgagagggccacagacacaaacaacacaagtgtggtatttg

SEQ ID NO: 53097 - DNA, 120 bp, synthetic construct
  source 1..120: mol_type = other DNA
gcctcaacctccccaaagtgctgggattacaggcgtgagccactgcacctggcctgtttttttggttgttgttttgttttgtgttttttgttttgttttgtgtttctttttgttttgcct

SEQ ID NO: 53098 - DNA, 120 bp, synthetic construct; identical to SEQ ID NO: 33312
  source 1..120: mol_type = other DNA

SEQ ID NO: 53099 - DNA, 120 bp, synthetic construct; identical to SEQ ID NO: 33313
  source 1..120: mol_type = other DNA

SEQ ID NO: 53100 - DNA, 120 bp, synthetic construct; identical to SEQ ID NO: 33314
  source 1..120: mol_type = other DNA

SEQ ID NO: 53101 - DNA, 120 bp, synthetic construct; identical to SEQ ID NO: 33315
  source 1..120: mol_type = other DNA

SEQ ID NO: 53102 - DNA, 120 bp, synthetic construct; identical to SEQ ID NO: 33316
  source 1..120: mol_type = other DNA

SEQ ID NO: 53103 - DNA, 120 bp, synthetic construct; identical to SEQ ID NO: 33317
  source 1..120: mol_type = other DNA

SEQ ID NO: 53104 - DNA, 120 bp, synthetic construct; identical to SEQ ID NO: 33318
  source 1..120: mol_type = other DNA

SEQ ID NO: 53105 - DNA, 120 bp, synthetic construct; identical to SEQ ID NO: 33319
  source 1..120: mol_type = other DNA

SEQ ID NO: 53106 - DNA, 120 bp, synthetic construct
  source 1..120: mol_type = other DNA
ataggattacaggcacccaccaccatgcctggctaattttgtattttttttttagcagagatgaggtttcaccatgttagtgaggcttgtctcgaactcctgacctcagatgatgcgccc

SEQ ID NO: 53107 - DNA, 120 bp, synthetic construct
  source 1..120: mol_type = other DNA
tgcactccagcctgggcgacagggcgagactccatctcaaaacaaacaaaagaacggagaaaacgggagatcctacaggaatacacagtgatgctcacagggaatctttctagaatcttc

SEQ ID NO: 53108 - DNA, 120 bp, synthetic construct; identical to SEQ ID NO: 31384
  source 1..120: mol_type = other DNA

SEQ ID NO: 53109 - DNA, 120 bp, synthetic construct
  source 1..120: mol_type = other DNA
gaactacaaaccactgctcaatgaaataaaagaggatacaaccaaatggaagaacattccatgctcatgggtaggaagaatcaatatcgtgaaaatggccatactgcccaaggtaattta

SEQ ID NO: 53110 - DNA, 120 bp, synthetic construct
  source 1..120: mol_type = other DNA
ggtgctggagaggatgtggagaaataggaacactttttacactgttggtgggaatgtaaactagttcaaccattgtggaagtcagtgtggcgattcctcagggatctagaactagaaata

SEQ ID NO: 53111 - DNA, 120 bp, synthetic construct; identical to SEQ ID NO: 31385
  source 1..120: mol_type = other DNA

SEQ ID NO: 53112 - DNA, 120 bp, synthetic construct; identical to SEQ ID NO: 31386
  source 1..120: mol_type = other DNA

SEQ ID NO: 53113 - DNA, 120 bp, synthetic construct; identical to SEQ ID NO: 31387
  source 1..120: mol_type = other DNA

SEQ ID NO: 53114 - DNA, 120 bp, synthetic construct; identical to SEQ ID NO: 31388
  source 1..120: mol_type = other DNA

SEQ ID NO: 53115 - DNA, 120 bp, synthetic construct
  source 1..120: mol_type = other DNA
caacttattttgaccaagacttctccttcatcctaatagttcaagatttggtgaagcctatttccatagcagtcattccccttcctggtgttcactatcctgggataagagctgaggtat

SEQ ID NO: 53116 - DNA, 120 bp, synthetic construct; identical to SEQ ID NO: 31389
  source 1..120: mol_type = other DNA

SEQ ID NO: 53117 - DNA, 120 bp, synthetic construct
  source 1..120: mol_type = other DNA
ccccatctctaccaaaaaaaaaaaaaaaaaaatacaaaaattagctgggtgttgtggcacatgcccctcattccagctactcaggaggctgaggttagggggactgcttgagcccaggag

SEQ ID NO: 53118 - DNA, 120 bp, synthetic construct; identical to SEQ ID NO: 31390
  source 1..120: mol_type = other DNA

SEQ ID NO: 53119 - DNA, 120 bp, synthetic construct; identical to SEQ ID NO: 10245
  source 1..120: mol_type = other DNA

SEQ ID NO: 53120 - DNA, 120 bp, synthetic construct; identical to SEQ ID NO: 10246
  source 1..120: mol_type = other DNA

SEQ ID NO: 53121 - DNA, 120 bp, synthetic construct; identical to SEQ ID NO: 18404
  source 1..120: mol_type = other DNA

SEQ ID NO: 53122 - DNA, 120 bp, synthetic construct; identical to SEQ ID NO: 18405
  source 1..120: mol_type = other DNA

SEQ ID NO: 53123 - DNA, 120 bp, synthetic construct; identical to SEQ ID NO: 18406
  source 1..120: mol_type = other DNA

SEQ ID NO: 53124 - DNA, 120 bp, synthetic construct; identical to SEQ ID NO: 15486
  source 1..120: mol_type = other DNA

SEQ ID NO: 53125 - DNA, 120 bp, synthetic construct
  source 1..120: mol_type = other DNA
ggttattagccctttgtcagatgagtagattgcaaaaattttctcccattctgtaggttgagtgttgactctgatggtagtttcttgtgctgtgcagaagctctttagtttatttagatc

SEQ ID NO: 53126 - DNA, 120 bp, synthetic construct
  source 1..120: mol_type = other DNA
gcatatgagaatgcttgtgatttttgcacattgattttgtatcctgagactttgctgaagttgcccatcagcttaaggagatttggggctgagacgatggggttttctccatatacaatc

SEQ ID NO: 53127 - DNA, 120 bp, synthetic construct
  source 1..120: mol_type = other DNA
tgagcattttttcatgtgtcttttggctgcataaatgtcttcttttgagaagtgtctgttcatatcctttgcccactttttgatggggttgtttgtttttttcttgaaaatttgttggag

SEQ ID NO: 53128 - DNA, 120 bp, synthetic construct
  source 1..120: mol_type = other DNA
ggtgattcgggctcttttttggttccatatgaactttaaagtagttttttctaattctgtgaagaaagtcattggtaacttgaaggggatggcattgaatctataaattaccttgggcag

SEQ ID NO: 53129 - DNA, 120 bp, synthetic construct; identical to SEQ ID NO: 31022
  source 1..120: mol_type = other DNA

SEQ ID NO: 53130 - DNA, 120 bp, synthetic construct; identical to SEQ ID NO: 31023
  source 1..120: mol_type = other DNA

SEQ ID NO: 53131 - DNA, 120 bp, synthetic construct; identical to SEQ ID NO: 31024
  source 1..120: mol_type = other DNA

SEQ ID NO: 53132 - DNA, 120 bp, synthetic construct; identical to SEQ ID NO: 31025
  source 1..120: mol_type = other DNA

SEQ ID NO: 53133 - DNA, 120 bp, synthetic construct; identical to SEQ ID NO: 31026
  source 1..120: mol_type = other DNA

SEQ ID NO: 53134 - DNA, 120 bp, synthetic construct; identical to SEQ ID NO: 31027
  source 1..120: mol_type = other DNA

SEQ ID NO: 53135 - DNA, 120 bp, synthetic construct; identical to SEQ ID NO: 31028
  source 1..120: mol_type = other DNA

SEQ ID NO: 53136 - DNA, 120 bp, synthetic construct; identical to SEQ ID NO: 31029
  source 1..120: mol_type = other DNA

SEQ ID NO: 53137 - DNA, 120 bp, synthetic construct; identical to SEQ ID NO: 31030
  source 1..120: mol_type = other DNA

SEQ ID NO: 53138 - DNA, 120 bp, synthetic construct; identical to SEQ ID NO: 31031
  source 1..120: mol_type = other DNA

SEQ ID NO: 53139 - DNA, 120 bp, synthetic construct; identical to SEQ ID NO: 31013
  source 1..120: mol_type = other DNA

SEQ ID NO: 53140 - DNA, 120 bp, synthetic construct; identical to SEQ ID NO: 6166
  source 1..120: mol_type = other DNA

SEQ ID NO: 53141 - DNA, 120 bp, synthetic construct; identical to SEQ ID NO: 31033
  source 1..120: mol_type = other DNA

SEQ ID NO: 53142 - DNA, 120 bp, synthetic construct; identical to SEQ ID NO: 31034
  source 1..120: mol_type = other DNA

SEQ ID NO: 53143 - DNA, 120 bp, synthetic construct; identical to SEQ ID NO: 31035
  source 1..120: mol_type = other DNA

SEQ ID NO: 53144 - DNA, 120 bp, synthetic construct; identical to SEQ ID NO: 31036
  source 1..120: mol_type = other DNA

SEQ ID NO: 53145 - DNA, 120 bp, synthetic construct
  source 1..120: mol_type = other DNA
gaaaaagaggaatagcacataacttacctttcacaactgattctacagttttttttctttgatcacagcatttttttttatactttaagttctagggtacatgtgcacaatgtgcaggtt

SEQ ID NO: 53146 - DNA, 120 bp, synthetic construct; identical to SEQ ID NO: 31037
  source 1..120: mol_type = other DNA

SEQ ID NO: 53147 - DNA, 120 bp, synthetic construct; identical to SEQ ID NO: 31038
  source 1..120: mol_type = other DNA

SEQ ID NO: 53148 - DNA, 120 bp, synthetic construct
  source 1..120: mol_type = other DNA
cacaatagcaaagacttggaaccatcccaaatgtccaacaacgacagactggattaagaaactgtggtccatatacaccatggaatactacgcagccataaaaaatgatgagttcatgtc

SEQ ID NO: 53149 - DNA, 120 bp, synthetic construct; identical to SEQ ID NO: 31039
  source 1..120: mol_type = other DNA

SEQ ID NO: 53150 - DNA, 120 bp, synthetic construct
  source 1..120: mol_type = other DNA
ccccagccatgtggaactgtaagtcccattgaacctctttttattcccagttttgggtatgtctttatcagcagcattaaaaccaactaatacgggcagtgaaagatatttggggacctt

SEQ ID NO: 53151 - DNA, 120 bp, synthetic construct
  source 1..120: mol_type = other DNA
accttgggcagcatggccattttcacgatattgactcttcctacccatgagcatggaatgttcttccatttctttgtatcctcttttatttcattgagcagtggtttgtagttctccttg

SEQ ID NO: 53152 - DNA, 120 bp, synthetic construct
  source 1..120: mol_type = other DNA
cagaccacagtgcaatcaaactagaactcaggattaagaaactcactcagaaccgcttaactacacagaaactgaacaacctgctgctgaatgactactgggtacataacgaaatgaagg

SEQ ID NO: 53153 - DNA, 120 bp, synthetic construct
  source 1..120: mol_type = other DNA
aggctggttcaacatatacaaatcaataaatgtaatccagcatataaacagaaccaaagacaaaaaccacatgattatttcaatagatgcagaaaaggcctttgacaaaattcaacaacc

SEQ ID NO: 53154 - DNA, 120 bp, synthetic construct; identical to SEQ ID NO: 31040
  source 1..120: mol_type = other DNA

SEQ ID NO: 53155 - DNA, 120 bp, synthetic construct
  source 1..120: mol_type = other DNA
gatttgcatttctctgatggccagtgatggtgagcattttttcatgtgttttttggctgcataaatgtcttcctttgagaagtgtctgttcatgtcctttgcccactttttgatggggtt

SEQ ID NO: 53156 - DNA, 120 bp, synthetic construct
  source 1..120: mol_type = other DNA
aactctaagacctgggaatgtaggaattataggaaacagacccatgctaacatgctcaaagaaaaaaggtgtctagaacactgaagagagaggaagagggatgtgaggaagagggatgtg

SEQ ID NO: 53157 - DNA, 120 bp, synthetic construct; identical to SEQ ID NO: 31014
  source 1..120: mol_type = other DNA

SEQ ID NO: 53158 - DNA, 120 bp, synthetic construct
  source 1..120: mol_type = other DNA
cttcaaggagaactacaaaccactgctcaaggaaataaaagaggatacaaacaaacggaagaacattccatgctcatgggtaggaagaatcaatatcgtgaaaatggccatactgcccaa

SEQ ID NO: 53159 - DNA, 120 bp, synthetic construct
  source 1..120: mol_type = other DNA
gagataccatctcacaccagttagaatggcgatcattaaaaagtcaggaaacaacaggtgctggagaggatgtggagaaataggaacactacactgttggtgggactgtaaactagttca

SEQ ID NO: 53160 - DNA, 120 bp, synthetic construct; identical to SEQ ID NO: 31015
  source 1..120: mol_type = other DNA

SEQ ID NO: 53161 - DNA, 120 bp, synthetic construct
  source 1..120: mol_type = other DNA
gaaagctgaagctggatcccttccttacaccctatacaaaaatcaattcaagatggattaaagacttaaacgttagacctaaaaccataaaaaccctagaagaaaacctaggcattacca

SEQ ID NO: 53162 - DNA, 120 bp, synthetic construct
  source 1..120: mol_type = other DNA
tctcactcatacatgggaattgaaaaatgagaacacatggacacaggaaggggaacatcacactctggggactgctgtggggtggggggaggggggagggatagcattaggagatatgcc

SEQ ID NO: 53163 - DNA, 120 bp, synthetic construct
  source 1..120: mol_type = other DNA
agaatctttgtctgctcaagctgccataaaagaatatcatagaataagtggattaaacaacagacatttatttctcacagctgtggaagggggaagcaatcctcccacctcagcctccct

SEQ ID NO: 53164 - DNA, 120 bp, synthetic construct
  source 1..120: mol_type = other DNA
catcgacttaatacactaaggtgtataaatgtctaactaagactttaaaagatttcctgcagaagagacgtttgttggaaatgttgaactttaaaggaaaaattgtgcaaagaccctgct

SEQ ID NO: 53165 - DNA, 120 bp, synthetic construct; identical to SEQ ID NO: 31041
  source 1..120: mol_type = other DNA

SEQ ID NO: 53166 - DNA, 120 bp, synthetic construct
  source 1..120: mol_type = other DNA
ttagtaatacaatttcctctcttgctttctagaagactctacattgtcagttaaaacattttttaaaaagataatcaatggccgggcgcggtggctcacgcctgtaatcccagcactttg

SEQ ID NO: 53167 - DNA, 120 bp, synthetic construct; identical to SEQ ID NO: 31043
  source 1..120: mol_type = other DNA

SEQ ID NO: 53168 - DNA, 120 bp, synthetic construct; identical to SEQ ID NO: 31044
  source 1..120: mol_type = other DNA

SEQ ID NO: 53169 - DNA, 120 bp, synthetic construct; identical to SEQ ID NO: 31045
  source 1..120: mol_type = other DNA

SEQ ID NO: 53170 - DNA, 120 bp, synthetic construct; identical to SEQ ID NO: 31046
  source 1..120: mol_type = other DNA

SEQ ID NO: 53171 - DNA, 120 bp, synthetic construct; identical to SEQ ID NO: 31047
  source 1..120: mol_type = other DNA

SEQ ID NO: 53172 - DNA, 120 bp, synthetic construct; identical to SEQ ID NO: 31048
  source 1..120: mol_type = other DNA

SEQ ID NO: 53173 - DNA, 120 bp, synthetic construct; identical to SEQ ID NO: 31049
  source 1..120: mol_type = other DNA

SEQ ID NO: 53174 - DNA, 120 bp, synthetic construct
  source 1..120: mol_type = other DNA
cacccgaatactgcccttttccgacgggcttaaaaaacggtgcaccacgagattctatcccacacctggctcggagggtcctacacccacagagtctcgctgattgctagcacagcagtc

SEQ ID NO: 53175 - DNA, 120 bp, synthetic construct
  source 1..120: mol_type = other DNA
ataaaaagaaatgagcaaagcctccaagaaataagggactatgtgaaaagaccaaatctacgtctgattggtgtacctgaaagtgatggggagaatggaaccaagttggaaaacactctg

SEQ ID NO: 53176 - DNA, 120 bp, synthetic construct
  source 1..120: mol_type = other DNA
aatgctaaagggatcaattcaacaagaagagctaactatcctaaatatatatgcacccaatacaggagcaccaagattcataaagcaagtcctgagtgacctacaaagagacttagactc

SEQ ID NO: 53177 - DNA, 120 bp, synthetic construct
  source 1..120: mol_type = other DNA
agaagaatcaaatagacgcagtaataaatgataaaggggatatcaccaccgatcccacagaaatacaaactaccaacagggaatactacaaacacctctacgcaaataaactagaaaatc

SEQ ID NO: 53178 - DNA, 120 bp, synthetic construct
  source 1..120: mol_type = other DNA
gaggaagtcaaattgtccctgtttgcagacgacatgattgtatatccagaaaaccccaatgtctcagcccaaaatctccttaagctgataaacaacttcggcaaagtctcaggatgcaaa

SEQ ID NO: 53179 - DNA, 120 bp, synthetic construct
  source 1..120: mol_type = other DNA
catgggcaaggacttcatgtctaaaacacaaaaagcaatagcaacaaaagaaaaaattgacaaatgggatctaattaagagcttctgcacagcaaaagaaactaccatcagagtgaacag

SEQ ID NO: 53180 - DNA, 120 bp, synthetic construct
  source 1..120: mol_type = other DNA
tgtaactaacctgcacaatgggcacatgtacccaaaaacttaaagtatataaaaaaaaaaaaagtgtgtgccactccacccttgctctcttggccctgctctcgccatgtaatttgctgg

SEQ ID NO: 53181 - DNA, 120 bp, synthetic construct; identical to SEQ ID NO: 31016
  source 1..120: mol_type = other DNA

SEQ ID NO: 53182 - DNA, 120 bp, synthetic construct; identical to SEQ ID NO: 31017
  source 1..120: mol_type = other DNA

SEQ ID NO: 53183 - DNA, 120 bp, synthetic construct; identical to SEQ ID NO: 31050
  source 1..120: mol_type = other DNA

SEQ ID NO: 53184 - DNA, 120 bp, synthetic construct; identical to SEQ ID NO: 6161
  source 1..120: mol_type = other DNA

SEQ ID NO: 53185 - DNA, 120 bp, synthetic construct
  source 1..120: mol_type = other DNA
ggctggtcttgaactcctggccttgagcaatcttcccgccttggcttcccaaagtgctgcaatttatttttaatatagtaaaacaggggcaattagctcttccaaaccaactaataatac

SEQ ID NO: 53186 - DNA, 120 bp, synthetic construct
  source 1..120: mol_type = other DNA
gtgtgtgtgtgtgtgtgtgtgtgtgtgtgtgtattgttagtagagaaggggttgttagtagagaaggggttgttagtagagaaggggtttcaccgtgttagttaggatggtctcgatcaa

SEQ ID NO: 53187 - DNA, 120 bp, synthetic construct; identical to SEQ ID NO: 31020
  source 1..120: mol_type = other DNA

SEQ ID NO: 53188 - DNA, 120 bp, synthetic construct
  source 1..120: mol_type = other DNA
ttaaaactaaaagaatccatcattagaaagttagggcttacaaaatatagagaggtgtgtgtgtctgtgtgtgtgtgtatgtgtgtggggggtatgtatgtgtgggggggtatgtctctg

SEQ ID NO: 53189 - DNA, 120 bp, synthetic construct
  source 1..120: mol_type = other DNA
tcaggaggtggaggttacagtgagctgagatggcaccattgtactccagcatgggcaacagggcgagactccatctcaaaacaaaaaaccaaaaaaccacaactttgcatataaataaaa

SEQ ID NO: 53190 - DNA, 120 bp, synthetic construct
  source 1..120: mol_type = other DNA
tgctgctgataaagacatacccaagactgggtaatttataaagaaaagagttttaattgactcacagtttcacatggctggggaggcctcacaattatggcagaaggtaagcaggagcaa

SEQ ID NO: 53191 - DNA, 120 bp, synthetic construct
  source 1..120: mol_type = other DNA
ttgatggggttgtttgtttttttcttgtaaatttgtttgagttcattatagattgtggatattagccctttgtcagatgagtaggttgtgaaaattttctcccattttgtaggttgcctg

SEQ ID NO: 53192 - DNA, 120 bp, synthetic construct
  source 1..120: mol_type = other DNA
ttttatttccttgagcagtggtttgtagttctccttgaagaggtccttcacatcccttgtaagttggattcctaggtattttattctcttcgaagcaattgtgaatgggagttcactcct

SEQ ID NO: 53193 - DNA, 120 bp, synthetic construct
  source 1..120: mol_type = other DNA
tccctctttttctattgattggaatagtttcagaaggaatggtacaaattcctccttgtacctctggtagaattcggttgtgagtccatctggtcctgcactctttttcgttggtaagct

SEQ ID NO: 53194 - DNA, 120 bp, synthetic construct
  source 1..120: mol_type = other DNA
tggagagttctgtagatgtctattaggtccgcttggtgcagagctgagttaagttcctgggtatgcttgttgactttctgtcttgttgatctgtctaaagttgacagtggggtgttaaag

SEQ ID NO: 53195 - DNA, 120 bp, synthetic construct; identical to SEQ ID NO: 7430
  source 1..120: mol_type = other DNA

SEQ ID NO: 53196 - DNA, 120 bp, synthetic construct; identical to SEQ ID NO: 7431
  source 1..120: mol_type = other DNA

SEQ ID NO: 53197 - DNA, 120 bp, synthetic construct
  source 1..120: mol_type = other DNA
cagacctaatagacatcttcagaactctccaccccaaatcaacagaatatacattcttttcagcaccacaccacacctattccaaaatggatcacatagttggaagtaaagaactcctca

SEQ ID NO: 53198 - DNA, 120 bp, synthetic construct
  source 1..120: mol_type = other DNA
gtaccattacttctgaaactattccaatcaacagaaaaagagggaatcctccctaactcattttatgaggccagcatcattctgataccaaagcctggcagagacacaacaaaaaaagag

SEQ ID NO: 53199 - DNA, 120 bp, synthetic construct
  source 1..120: mol_type = other DNA
attcctcagggatctagaactagaaataccatttgattcagccattccattactgggtatatgcccaaaggattataaatcatgcagctataaagacacatgcacatgtatgtttatggc

SEQ ID NO: 53200 - DNA, 120 bp, synthetic construct
  source 1..120: mol_type = other DNA
caaaacttccagaggaataatcagacagcagcattcgtggttcacgaaaatctgctgttctgcagacaccgctgctgatacccaggcaaacagggtctggagtggacctctagcaaactc

SEQ ID NO: 53201 - DNA, 120 bp, synthetic construct
  source 1..120: mol_type = other DNA
acaaagggaagcccatcagactaacagcggatttctcggcagaaactctacaagtcagaagaaattgggggccaatattcaacattcttaaagaaaagaattttcaacccagaatttcat

SEQ ID NO: 53202 - DNA, 120 bp, synthetic construct
  source 1..120: mol_type = other DNA
ttataacaaactgtctctcagaacacagtgcaatcaaactagaactcaggattcagaaacggactcaaaaccgctcaactacgtggaaactgaacaacctgcactgggtacataacgaac

SEQ ID NO: 53203 - DNA, 120 bp, synthetic construct
  source 1..120: mol_type = other DNA
ttatgaggccgcctcatacctgataccaaagccgggcagagacacaatcaaaaaagagaattttagaccaatatccttgatgaacattgatgcaaaaatcctcaataaaatactggcaaa

SEQ ID NO: 53204 - DNA, 120 bp, synthetic construct
  source 1..120: mol_type = other DNA
tagactcaatgccatccccatgaagctaccaatgcctttcttcacagaattggaaaaaactactttaaagttcatatggaaccaaaaaagagcccgcatcgccaaatcaatcctaagcca

SEQ ID NO: 53205 - DNA, 120 bp, synthetic construct
  source 1..120: mol_type = other DNA
cgatcattaaaaagtcaggaaacaacaggtgctggagaggatgtggagaaataggaagacttttacactgttggtgggactgtaaactagttcaaccattgtggaagtcagtgtggcgat

SEQ ID NO: 53206 - DNA, 120 bp, synthetic construct
  source 1..120: mol_type = other DNA
tcttttttcaaggtttttaacttctttgccatgggttcgaacttcatcctttagctcatcatagtttaatcatctgaagccttcttctcttaactcgtcaaagtcattctctgtccagct

SEQ ID NO: 53207 - DNA, 120 bp, synthetic construct
  source 1..120: mol_type = other DNA
ctgaaactggatcccttccttacaccttatacaaaaattaattcaagatggattaaagacttaaataaacgttagacctaaaaccataaaaaccctagaagaaaacctaggcattatcat

SEQ ID NO: 53208 - DNA, 120 bp, synthetic construct
  source 1..120: mol_type = other DNA
ggtggaaattgaacactgagaacacatggacacaggaaggggaacatcacactctggggactgttgtggggtggggggaggggggagggatagcattaggagatatacctaatgctaaat

SEQ ID NO: 53209 - DNA, 120 bp, synthetic construct
  source 1..120: mol_type = other DNA
ggaggtggggggcacctctgcctggccgccacgtctggggggtgggggggcccctctgcccgtccaccaccccgtctgggaggtgtacccaacagctcattgagaacgggccatgatgac

SEQ ID NO: 53210 - DNA, 120 bp, synthetic construct
  source 1..120: mol_type = other DNA
agaacacaggccagaccagtctctgctgagtcttccatacttcctctcagagtcagaaaacccaagtgtctaacaccaaaagcaatggtaacaaaagccaaaattgacaaatgggatcta

SEQ ID NO: 53211 - DNA, 120 bp, synthetic construct; identical to SEQ ID NO: 7435
  source 1..120: mol_type = other DNA

SEQ ID NO: 53212 - DNA, 120 bp, synthetic construct
  source 1..120: mol_type = other DNA
caccagcaacggaacaaagctggacggagaatgactttgacgagctgagagaagaaggcttcagacgatcaaattactctgagctacaggaggacattcaaaccaaaggcaaaggagttg

SEQ ID NO: 53213 - DNA, 120 bp, synthetic construct
  source 1..120: mol_type = other DNA
gcctgccctaaaagagctcctgaaggaagtgctaaacatggaaaggaacaaccggtagcagccactgcaaaatcatgccaaaatgtaacgaccatcgagactaggaagaaactgcatcaa

SEQ ID NO: 53214 - DNA, 120 bp, synthetic construct
  source 1..120: mol_type = other DNA
aagagcaaacacattcaaaagctagcagaaagcaagaaataactgaaatcagagcagaactgaaggaaatagagacacaaaaaacccttcaaaaaattaatgaatccaggagctggtttt

SEQ ID NO: 53215 - DNA, 120 bp, synthetic construct
  source 1..120: mol_type = other DNA
caagacagggatgccctctctcaccactcctattcaacatagcgttggaagctctggccagggcaattaggcaggagaaggaaataaagggtattcaattaggaaaagaggaagtcaaat

SEQ ID NO: 53216 - DNA, 120 bp, synthetic construct
  source 1..120: mol_type = other DNA
gaaactaccatcagagtgaacaggcaacctacaaaatgggagaaaattttcgcaacctactcatctgacaaagggctaatatccagaatctacaatgaactcaaacaaattgacaagaaa

SEQ ID NO: 53217 - DNA, 120 bp, synthetic construct; identical to SEQ ID NO: 7436
  source 1..120: mol_type = other DNA

SEQ ID NO: 53218 - DNA, 120 bp, synthetic construct; identical to SEQ ID NO: 31725
  source 1..120: mol_type = other DNA

SEQ ID NO: 53219 - DNA, 120 bp, synthetic construct
  source 1..120: mol_type = other DNA
gaaagcaagaaataactaaaatcagagcacaactgaaggaaatagagacacaaaaaagtcttcaaaaaattaatgaatccaggagctggttttttgaaaggatcaacaaaattgatagac

SEQ ID NO: 53220 - DNA, 120 bp, synthetic construct
  source 1..120: mol_type = other DNA
atatgggcaaaaactggaagcattccctttgaaaactggcacaagacagggatgccctctctcaccactcctattcaacatagtgttggaagttctggccagggcaattaggcaggagaa

SEQ ID NO: 53221 - DNA, 120 bp, synthetic construct
  source 1..120: mol_type = other DNA
acaaaaattaattcaagatggattaaagacttaaatgttagacctaaaaccataaaaaccctagaagaaaacttaggcattagcattcaggacataggcatgggcaaggacttcatgtcc

SEQ ID NO: 53222 - DNA, 120 bp, synthetic construct
  source 1..120: mol_type = other DNA
ttttgttttttggttagttttgaattaaaaacatttcagtacatttatattttaagtgaaaggaatagtacaggggaggagccaagatggccgaataggaacagctccggtctacagctc

SEQ ID NO: 53223 - DNA, 120 bp, synthetic construct
  source 1..120: mol_type = other DNA
gaacgcagttcctcaccagcaatggaacaaagctgaatggagaatgactttgacgagctgagagaagaaggcttcagatgatcaaattactctgagctacgggaggacattcaaaccaaa

SEQ ID NO: 53224 - DNA, 120 bp, synthetic construct
  source 1..120: mol_type = other DNA
cataatgacaggatcaaattcacacataacaatattaactttaaatgtaaatggactaaatgctccaattaaaagacacagactggcaaattggataaagagtcaagacccatcaatgtg

SEQ ID NO: 53225 - DNA, 120 bp, synthetic construct; identical to SEQ ID NO: 53219
  source 1..120: mol_type = other DNA

SEQ ID NO: 53226 - DNA, 120 bp, synthetic construct
  source 1..120: mol_type = other DNA
gtctcagcccaaaatctccttaagctgataagcaacttcagcaaagtctcaggatacaaaaacaatgtacaaaaatcacaagcattcttatacaccaacaacagacaaacagagagccaa

SEQ ID NO: 53227 - DNA, 120 bp, synthetic construct
  source 1..120: mol_type = other DNA
atatgtagaaagctgaaataggatcccctccttacaccttatacaaaaatcaattcaagatggattaaagacttaaacgttagacctaaaaccataaaaaccctagaagaaaacctaggc

SEQ ID NO: 53228 - DNA, 120 bp, synthetic construct
  source 1..120: mol_type = other DNA
caagaagaaaaaaccaaacaccgtatattctcactcataggtgggaattgaacaatgagatcacatggacacaggaaggggaatatcacactctggggactgtggtggggtggggggagg

SEQ ID NO: 53229 - DNA, 120 bp, synthetic construct
  source 1..120: mol_type = other DNA
cacaggaaggggaacatcacacaccggggcctgttgtggggtggggggaggggggagggatagcattaggagatatacttaatgttaaatgacaagttaatgggtgcagcataccaacgt

SEQ ID NO: 53230 - DNA, 120 bp, synthetic construct
  source 1..120: mol_type = other DNA
attaactgtggtgaactcctcagaatcctcaaaaatccttgctataatacccaataagatttcaagattgtgatgttccccttcctgtgtccatgtgatctcactgttcaattcccacct

SEQ ID NO: 53231 - DNA, 120 bp, synthetic construct
  source 1..120: mol_type = other DNA
gtaactaacctgcacaatgtgcacatgtaccctaaaacttaaagcataataaaaaaaaaattaaaaaaaaaagatttcaagattttaaatttagtacaactattaaaaatgtgagagctg

SEQ ID NO: 53232 - DNA, 120 bp, synthetic construct; identical to SEQ ID NO: 31729
  source 1..120: mol_type = other DNA

SEQ ID NO: 53233 - DNA, 120 bp, synthetic construct; identical to SEQ ID NO: 31730
  source 1..120: mol_type = other DNA

SEQ ID NO: 53234 - DNA, 120 bp, synthetic construct
  source 1..120: mol_type = other DNA
taaaaactaccatcagagtgaacaggcaacctacaaaatgggagaaaattttcgcaacctactcatctgacaaagggctaatatccagaatctacaatgaactcaaacaaatttacaaga

SEQ ID NO: 53235 - DNA, 120 bp, synthetic construct
  source 1..120: mol_type = other DNA
atatttttcttcaaactttctgagtcatgactctgtcagagaatttctctttttttcgtgttctttcttttttttcttttggagatagggtcttgctatgtagcccaggctggagtacca

SEQ ID NO: 53236 - DNA, 120 bp, synthetic construct
  source 1..120: mol_type = other DNA
tctgtgttcccacccaaatcacgggtaaactcctattcacatttgcttcaaagagaataaaatacctaggaatctaacttacaagggacgagaaggacctcttcaagaacaactacaaac

SEQ ID NO: 53237 - DNA, 120 bp, synthetic construct
  source 1..120: mol_type = other DNA
acaaagggctaatatccagaatctacaatgaactcaaacaaatttacaagaaaaaaacaaccccatcaataagtgggtgagggatatgaacagacacttctcaaaagaagatatttatgt

SEQ ID NO: 53238 - DNA, 120 bp, synthetic construct
  source 1..120: mol_type = other DNA
atttatgagaacattaatatgctttctgtaagattatcaaatggtcacttcgattatgccattttactgatgagaaaaccacatgattatctcaatagatgcagaaaaagcctttgacaa

SEQ ID NO: 53239 - DNA, 120 bp, synthetic construct
  source 1..120: mol_type = other DNA
aacgccacatacctacaactatctgatctttgacaaacctgagaaaaacaagcaatggggaaaggattccctatttaataaatggtgctgggaaaactggctagccatatgtagaaagct

SEQ ID NO: 53240 - DNA, 120 bp, synthetic construct
  source 1..120: mol_type = other DNA
acaccatggaatactatgcagccataaaaaatgatgagttcatgtcctttgtagggacatggatgaaattggaaaccatcattctcagtaaactatcacaagaacaaaaaaccaaacacc

SEQ ID NO: 53241 - DNA, 120 bp, synthetic construct; identical to SEQ ID NO: 31731
  source 1..120: mol_type = other DNA

SEQ ID NO: 53242 - DNA, 120 bp, synthetic construct
  source 1..120: mol_type = other DNA
ctgaaaatttaactctgtgaagagtaatataaaaagcaccttctaaaaattccttgttgtgacacagggtctcatctgttgcccaggctggagtgcagtggcatgatcacagctctcatt

SEQ ID NO: 53243 - DNA, 120 bp, synthetic construct; identical to SEQ ID NO: 27116
  source 1..120: mol_type = other DNA

SEQ ID NO: 53244 - DNA, 120 bp, synthetic construct
  source 1..120: mol_type = other DNA
cttccacgaaacctgtccctggtgccaaaaaggctggggaccactgactaaagccaaggaataacccacatactttacatgggttcaagcatttactccgaaatgagatacaaatttata

SEQ ID NO: 53245 - DNA, 120 bp, synthetic construct; identical to SEQ ID NO: 18651
  source 1..120: mol_type = other DNA

SEQ ID NO: 53246 - DNA, 120 bp, synthetic construct; identical to SEQ ID NO: 18652
  source 1..120: mol_type = other DNA

SEQ ID NO: 53247 - DNA, 120 bp, synthetic construct; identical to SEQ ID NO: 18653
  source 1..120: mol_type = other DNA

SEQ ID NO: 53248 - DNA, 120 bp, synthetic construct; identical to SEQ ID NO: 18654
  source 1..120: mol_type = other DNA

SEQ ID NO: 53249 - DNA, 120 bp, synthetic construct; identical to SEQ ID NO: 15386
  source 1..120: mol_type = other DNA

SEQ ID NO: 53250 - DNA, 120 bp, synthetic construct; identical to SEQ ID NO: 15387
  source 1..120: mol_type = other DNA

SEQ ID NO: 53251 - DNA, 120 bp, synthetic construct
  source 1..120: mol_type = other DNA
aaagtgctggaattataagtgtgagccaccatgcctggcccaagaaaatatttttaacatttaaaaaagtagtttaggccaggcatggtgcttcacacctgtaatcccagcactttgaga

SEQ ID NO: 53252 - DNA, 120 bp, synthetic construct
  source 1..120: mol_type = other DNA
cctgcctgcctctttaggctccacctctgggggcacggcacagacaaacaaaaagacagcagtaacctctgcagacttaaatgtccctgtctgacagctttgaagagagcagtggttctc

SEQ ID NO: 53253 - DNA, 120 bp, synthetic construct
  source 1..120: mol_type = other DNA
gttgaaatgaaggaaaaaatgttaagggcagccagagagaaaggtcgggttaccctcaaagggaagcccatcagactaacagcggatctctcggcagaaaccctacaagccagaagagag

SEQ ID NO: 53254 - DNA, 120 bp, synthetic construct
  source 1..120: mol_type = other DNA
attgaactcagctctgcaccaagcggacctaacagacatctacagaactctccatcccaaatcaacagaatatacatttttttcagcaccacaccacacctattccaaaattgaccacat

SEQ ID NO: 53255 - DNA, 120 bp, synthetic construct
  source 1..120: mol_type = other DNA
ctagaccaggaagaagttgaatctctgaatagaccagtaacaggagctgaaattgtggcaataatcaatagtttaccaaccaaaaagagtccaggaccagatggattcacagccgaattc

SEQ ID NO: 53256 - DNA, 120 bp, synthetic construct
  source 1..120: mol_type = other DNA
actgcccaaggtaatttacagattcaatgccatccccatcaaactaccaatgactttcttcacagaattggaaaaaactactttaaagttcatatggaaccaaaaaagagcccgcattgc

SEQ ID NO: 53257 - DNA, 120 bp, synthetic construct
  source 1..120: mol_type = other DNA
tgaaaaaatgctcatcatcactggccatcagagaaatgcaaatcaaaaccacaatgagataccatctcacaccagttagaatgaatatcattaaaaagtcaggaaacaacaggtgctgga

SEQ ID NO: 53258 - DNA, 120 bp, synthetic construct; identical to SEQ ID NO: 15388
  source 1..120: mol_type = other DNA

SEQ ID NO: 53259 - DNA, 120 bp, synthetic construct; identical to SEQ ID NO: 15389
  source 1..120: mol_type = other DNA

SEQ ID NO: 53260 - DNA, 120 bp, synthetic construct
  source 1..120: mol_type = other DNA
gcctgaaatatttattaaactgtcatttatttcttctgttggttggttggttggtttcaaagacatcttgccctgtcactcaggctggagtgtagtggcatgatcagatctcactgcagc

SEQ ID NO: 53261 - DNA, 120 bp, synthetic construct
  source 1..120: mol_type = other DNA
caaagcctgtgcccctgatgtctgtccagagcacggcttccttctcggtggttcccagaggccgctgggcctcgcttcgtcctttttgggcagcgagtgtgtatgttaggggaacaggag

SEQ ID NO: 53262 - DNA, 120 bp, synthetic construct
  source 1..120: mol_type = other DNA
agctcatcatgaggctgtgtctctgtctgtgccatctaatagaggatattttcatcctcatggcgagaagggatggatttgttttcctcgtgaagtcggtgacgtttgcttttcaggttt

SEQ ID NO: 53263 - DNA, 120 bp, synthetic construct
  source 1..120: mol_type = other DNA
cagggccccatgtagggtccggagcttccctgccctccctggtgccagtcctgaccctaccacagccgaatgtctgcgtcagcacaggggcgtgtaggaagaaaaggcgtcctgcttagg

SEQ ID NO: 53264 - DNA, 120 bp, synthetic construct; identical to SEQ ID NO: 19375
  source 1..120: mol_type = other DNA

SEQ ID NO: 53265 - DNA, 120 bp, synthetic construct; identical to SEQ ID NO: 19376
  source 1..120: mol_type = other DNA

SEQ ID NO: 53266 - DNA, 120 bp, synthetic construct; identical to SEQ ID NO: 22282
  source 1..120: mol_type = other DNA

SEQ ID NO: 53267 - DNA, 120 bp, synthetic construct
  source 1..120: mol_type = other DNA
ggagaagaaacagacattgataaaagagtcacatattaagtgcaataaaagaggactacctacttcttttttttttttttttttttgagacggagtctcgctgtcgcccaggctggagtg

SEQ ID NO: 53268 - DNA, 120 bp, synthetic construct
  source 1..120: mol_type = other DNA
gggagggactcagttggaggtaatttaatcatgggggcatttgccctcatgctgttctcgtgatagtgagttctcatgatatctattggtaggccatataggtaataagaggataaatta

SEQ ID NO: 53269 - DNA, 120 bp, synthetic construct
  source 1..120: mol_type = other DNA
aacccaggtggcagaggttgcagtgagccaagattgcaccattgcactccgacatgggcaacaagagtgaaactccgtctcaaaaaaaaaacaaagaaacattattttgtagttgtatcg

SEQ ID NO: 53270 - DNA, 120 bp, synthetic construct; identical to SEQ ID NO: 15503
  source 1..120: mol_type = other DNA

SEQ ID NO: 53271 - DNA, 120 bp, synthetic construct; identical to SEQ ID NO: 15504
  source 1..120: mol_type = other DNA

SEQ ID NO: 53272 - DNA, 120 bp, synthetic construct; identical to SEQ ID NO: 15505
  source 1..120: mol_type = other DNA

SEQ ID NO: 53273 - DNA, 120 bp, synthetic construct; identical to SEQ ID NO: 15506
  source 1..120: mol_type = other DNA

SEQ ID NO: 53274 - DNA, 120 bp, synthetic construct; identical to SEQ ID NO: 15507
  source 1..120: mol_type = other DNA

SEQ ID NO: 53275 - DNA, 120 bp, synthetic construct
  source 1..120: mol_type = other DNA
cccaaagtgctgggattacaggcgtgagccaccgcgcctggcctccacacataagaacttaacataaatttctctcaggcacaaaatttctttaaaaaaatctataatgttaccttcagc

SEQ ID NO: 53276 - DNA, 120 bp, synthetic construct; identical to SEQ ID NO: 15508
  source 1..120: mol_type = other DNA

SEQ ID NO: 53277 - DNA, 120 bp, synthetic construct; identical to SEQ ID NO: 15509
  source 1..120: mol_type = other DNA

SEQ ID NO: 53278 - DNA, 120 bp, synthetic construct; identical to SEQ ID NO: 15510
  source 1..120: mol_type = other DNA

SEQ ID NO: 53279 - DNA, 120 bp, synthetic construct; identical to SEQ ID NO: 15511
  source 1..120: mol_type = other DNA

SEQ ID NO: 53280 - DNA, 120 bp, synthetic construct; identical to SEQ ID NO: 31573
  source 1..120: mol_type = other DNA

SEQ ID NO: 53281 - DNA, 120 bp, synthetic construct
  source 1..120: mol_type = other DNA
gctcctcacttctcagacagggcggccgggcagagacgctcctcacctcccagacagggttgcggccgggcagaggcgctcctcacatcccagatggggtggcggggcagaggcgctccc

SEQ ID NO: 53282 - DNA, 120 bp, synthetic construct; identical to SEQ ID NO: 21748
  source 1..120: mol_type = other DNA

SEQ ID NO: 53283 - DNA, 120 bp, synthetic construct
  source 1..120: mol_type = other DNA
cccctgacccccgagcagcctaactgggaggcaccccccagcaggggcacactgacacctcacactgcagggtattccaacagacctgcagctgagggtcctgtctgttagaaggaaaac

SEQ ID NO: 53284 - DNA, 120 bp, synthetic construct
  source 1..120: mol_type = other DNA
aggcctgccctaaaagaactcctgaaggaagtgctaaacatggaaaggaacaaccggtaccagccgctgcaaaatcatgccaaaatgtaaagaacatcgagactaggaagaaactgcatc

SEQ ID NO: 53285 - DNA, 120 bp, synthetic construct
  source 1..120: mol_type = other DNA
ctcaaagccgctcaactacatggaaactgaacaacctgctcctgaatgactactgggtacataacgaaatgaaggcagaaataaagatgttctttgaaaccaatgagaacaaagacacaa

SEQ ID NO: 53286 - DNA, 120 bp, synthetic construct
  source 1..120: mol_type = other DNA
aaacagagccaaagacaaaaaccacatgattatctcaatagatgcagaaaaagactttgacaaaattcaacaacccttcatgctaaaaactctcaataaattaggtattgatgggacgta

SEQ ID NO: 53287 - DNA, 120 bp, synthetic construct
  source 1..120: mol_type = other DNA
cctgagaaaaacaagcaatggggaaaggattccctatttaataaatggtgctgggaaaactggctagccatatgtagaaagctgaaactggatcccttccttacactttatacaaaaatc

SEQ ID NO: 53288 - DNA, 120 bp, synthetic construct
  source 1..120: mol_type = other DNA
gatatacctaatgctagatgacgagttagtgggtgcagcgcaccagcatggcacatgtatacatatgtaactaacctgcacaatgtacacatgtaccctaaaacttaaagtataataaaa

SEQ ID NO: 53289 - DNA, 120 bp, synthetic construct; identical to SEQ ID NO: 21749
  source 1..120: mol_type = other DNA

SEQ ID NO: 53290 - DNA, 120 bp, synthetic construct
  source 1..120: mol_type = other DNA
gcaagaaataactaagatcagagcataactgaaggaaatagagacacaaaaaacccttcaaaaaattaatgaatccaggagctggttttttgaaaagatcaacaaaattgatacaccgct

SEQ ID NO: 53291 - DNA, 120 bp, synthetic construct
  source 1..120: mol_type = other DNA
actggaaggattccctttgaaaactggcacaagacagggatgccctctctcaccgctcctattcaacatagtgttggaagttctggccagggtgatcaggcaggagaaggaaataaagga

SEQ ID NO: 53292 - DNA, 120 bp, synthetic construct
  source 1..120: mol_type = other DNA
attctgggaaaagaaagaaagagagagagagagagagagagagagaaagagagaaagagaaaggaaggaaggaagaaaggaagcaaggaaggaaggaaggaaagagagagagaaagaaag

SEQ ID NO: 53293 - DNA, 120 bp, synthetic construct
  source 1..120: mol_type = other DNA
aaagagagaggaaggaaggaaagagagagtggtgttaagagagagagaaaggaaggaaggaaagagagaggaaaacagaaagagagaggaaggaaggagagagaggaagaaagaaagaga

SEQ ID NO: 53294 - DNA, 120 bp, synthetic construct; identical to SEQ ID NO: 13068
  source 1..120: mol_type = other DNA

SEQ ID NO: 53295 - DNA, 120 bp, synthetic construct
  source 1..120: mol_type = other DNA
taaaaatcgaattaatgctaaaactccacgatggacaaccatctaaatttcaaggaaagacataattaaaccctgtattgcactacctgccttcctggcttgcctggtcctagtctctgc

SEQ ID NO: 53296 - DNA, 120 bp, synthetic construct
  source 1..120: mol_type = other DNA
aagatctggagtctagccccagacatgcggcttgacatccgttgggtcagtgattgtccctctcttggcctggagcagcctggcaggcagagggctggctgttgggaggagacaggtcga

SEQ ID NO: 53297 - DNA, 120 bp, synthetic construct; identical to SEQ ID NO: 22429
  source 1..120: mol_type = other DNA

SEQ ID NO: 53298 - DNA, 120 bp, synthetic construct
  source 1..120: mol_type = other DNA
acgggagtccgagctgacttcattcttcccctactacgtgcctcatccactttgagctcctgtattagtccattctcatgctgctaataaagacatatccatgactggataatttataaa

SEQ ID NO: 53299 - DNA, 120 bp, synthetic construct
  source 1..120: mol_type = other DNA
ttaattacatattttattttctgttttacactgatatttcctgtttacacacaagcttctaaccctaaatccagcttcccccaacccaggtgccccataggagttcctggtcactgctcc

SEQ ID NO: 53300 - DNA, 120 bp, synthetic construct
  source 1..120: mol_type = other DNA
gtatgatgctccctcttctgtcctatttaacatagaatcacagttgggaaggcaccggaccaattccatgaatgggaagtaatccctgttgaaaactagaaggtgtttttaaaaacagcc

SEQ ID NO: 53301 - DNA, 120 bp, synthetic construct
  source 1..120: mol_type = other DNA
ggtcattagcagccagctgaagacaatcttgtcttctcctgcatgtgcaggggatgcctcacatcccacacttgtttccttggggttcttagctccccagaagccctagtcctcctgaaa

SEQ ID NO: 53302 - DNA, 120 bp, synthetic construct
  source 1..120: mol_type = other DNA
gacgaggaaaccgagacacagggaaggttgccatctgcaacccagcccggtttttatcttgtttttctgtgttttaactttttatttagacttacagtttgaaacagtgctagaatcgga

SEQ ID NO: 53303 - DNA, 120 bp, synthetic construct
  source 1..120: mol_type = other DNA
ggctcctcagcccaagtaggcgctggggtcacgtgacgcgcgggcggaaccaaggggcggggaggaggcactttggcttcggagtcccctgcggggtcgcggtggccccgcaagaaggga

SEQ ID NO: 53304 - DNA, 120 bp, synthetic construct
  source 1..120: mol_type = other DNA
ggttcacaccattctcctgcctcggcctcccgagtagctgggactacaggcgcgcgccttcatgcgcagctaatttttgtgtttttagtagagacggggtttcaccatattggccaggct

SEQ ID NO: 53305 - DNA, 120 bp, synthetic construct
  source 1..120: mol_type = other DNA
catcattgttgaatgagtgaaggcagagttgaccccacgaaaatggaaaactcttctatgtggaaagcaaagcatcaggggaaaacatagtcaagaagagaaagggatgttcccgctgct

SEQ ID NO: 53306 - DNA, 120 bp, synthetic construct
  source 1..120: mol_type = other DNA
tctctctctctttttctctctctctgtctctttctctctttctttcttcagagtctcgctctgtcatccagactggatggagtgcagtgccatgatcttggctcactgctgcaaccactg

SEQ ID NO: 53307 - DNA, 120 bp, synthetic construct
  source 1..120: mol_type = other DNA
gaattttttattttatttatttatttttttgagacatggtctgattctgttgcccacactggagttcggtggcacgatcacagctcactgcagcctgacctcccaggctcaagcaatctt

SEQ ID NO: 53308 - DNA, 120 bp, synthetic construct
  source 1..120: mol_type = other DNA
caaaccacttttgaaaaaccctaacccacaggcctgcaatgaggttgatttgaataattactccatctcccttgtggcatggccaggccagcctcacatcaattcacttttttttttttt

SEQ ID NO: 53309 - DNA, 120 bp, synthetic construct; identical to SEQ ID NO: 22585
  source 1..120: mol_type = other DNA

SEQ ID NO: 53310 - DNA, 120 bp, synthetic construct; identical to SEQ ID NO: 22586
  source 1..120: mol_type = other DNA

SEQ ID NO: 53311 - DNA, 120 bp, synthetic construct; identical to SEQ ID NO: 11820
  source 1..120: mol_type = other DNA

SEQ ID NO: 53312 - DNA, 120 bp, synthetic construct
  source 1..120: mol_type = other DNA
acgatctcaataatgtattttagatgaacagattctcttaattttattagtcagtgtattatttatgggtagtgctttttattatttaagaaacatctttgaatcacccaatgccattac

SEQ ID NO: 53313 - DNA, 120 bp, synthetic construct; identical to SEQ ID NO: 35334
  source 1..120: mol_type = other DNA

SEQ ID NO: 53314 - DNA, 120 bp, synthetic construct; identical to SEQ ID NO: 35335
  source 1..120: mol_type = other DNA

SEQ ID NO: 53315 - DNA, 120 bp, synthetic construct; identical to SEQ ID NO: 35336
  source 1..120: mol_type = other DNA

SEQ ID NO: 53316 - DNA, 120 bp, synthetic construct; identical to SEQ ID NO: 35337
  source 1..120: mol_type = other DNA

SEQ ID NO: 53317 - DNA, 120 bp, synthetic construct; identical to SEQ ID NO: 35338
  source 1..120: mol_type = other DNA

SEQ ID NO: 53318 - DNA, 120 bp, synthetic construct; identical to SEQ ID NO: 35339
  source 1..120: mol_type = other DNA

SEQ ID NO: 53319 - DNA, 120 bp, synthetic construct; identical to SEQ ID NO: 35340
  source 1..120: mol_type = other DNA

SEQ ID NO: 53320 - DNA, 120 bp, synthetic construct
  source 1..120: mol_type = other DNA
aatccagtatatcactgatggacatttgggttggttgcaagtctttgctattgtgaatagtgccgcaataaatatacgtgtgcatgtgtctttatagcagcatgatttataatcctttgg

SEQ ID NO: 53321 - DNA, 120 bp, synthetic construct
  source 1..120: mol_type = other DNA
aagatcagatagttgtagatatgcggcattatttctgagggctctgttctgttctgttccattggtctgtatctctgttttggtaacagtaccatgctgttttggttactgtagccttgt

SEQ ID NO: 53322 - DNA, 120 bp, synthetic construct
  source 1..120: mol_type = other DNA
tcatgtggtttttgtctttggttctgtttatatgctggattacatttattggtttgcgaatgttgaaccagccttgcatcccggggatgaagcccacttgatcatggtcgataagctttt

SEQ ID NO: 53323 - DNA, 120 bp, synthetic construct
  source 1..120: mol_type = other DNA
cagaatagagccctcagaaacaatgccacatatctacaactatctgatctttgacaaacctgacaaaaacaagaaatggggaaaggattccctatttaataaatggtgctgggaaaactg

SEQ ID NO: 53324 - DNA, 120 bp, synthetic construct; identical to SEQ ID NO: 35237
  source 1..120: mol_type = other DNA

SEQ ID NO: 53325 - DNA, 120 bp, synthetic construct; identical to SEQ ID NO: 35238
  source 1..120: mol_type = other DNA

SEQ ID NO: 53326 - DNA, 120 bp, synthetic construct
  source 1..120: mol_type = other DNA
cacagcagcgtggggccccaccatcaggcggctgaggtgacggttcgctatctggatgtggtcgttgtgatagaggcggcggagaagggagtggaccaggtacaggaacacgaagccaat

SEQ ID NO: 53327 - DNA, 120 bp, synthetic construct
  source 1..120: mol_type = other DNA
ttacaggcgtgagccagtgtgcccggccgagctccaccttttctttgaggccttagtgtccagggctaccctttaggtccacacaagtcctgcccttttaattttatgattattagcaac

SEQ ID NO: 53328 - DNA, 120 bp, synthetic construct
  source 1..120: mol_type = other DNA
cttgatttttggctgcagtgaaagaatttcaaagagtcttaccaaatggcggaaagtaatatctttcaatgaaggtatggtgggccaaaacaaagacgtaaaggagagatttgagttaag

SEQ ID NO: 53329 - DNA, 120 bp, synthetic construct
  source 1..120: mol_type = other DNA
aagttagcggctgtgtctggcaactgttttctacacaaatattggtcctggtagtaggtctgatacatctgccacttgttagtagtcttgcagctagaggacaaaagacctcaacatgaa

SEQ ID NO: 53330 - DNA, 120 bp, synthetic construct; identical to SEQ ID NO: 35322
  source 1..120: mol_type = other DNA

SEQ ID NO: 53331 - DNA, 120 bp, synthetic construct; identical to SEQ ID NO: 35323
  source 1..120: mol_type = other DNA

SEQ ID NO: 53332 - DNA, 120 bp, synthetic construct
  source 1..120: mol_type = other DNA
cctttccttttgtttcctttccttttcttttttatctttttttttttttttttttcgagatggagtctccctatgtcgcccaggctgcagtgcagtggcaggatcttggctcactgcaac

SEQ ID NO: 53333 - DNA, 120 bp, synthetic construct; identical to SEQ ID NO: 35324
  source 1..120: mol_type = other DNA

SEQ ID NO: 53334 - DNA, 120 bp, synthetic construct; identical to SEQ ID NO: 35325
  source 1..120: mol_type = other DNA

SEQ ID NO: 53335 - DNA, 120 bp, synthetic construct; identical to SEQ ID NO: 35326
  source 1..120: mol_type = other DNA

SEQ ID NO: 53336 - DNA, 120 bp, synthetic construct; identical to SEQ ID NO: 35327
  source 1..120: mol_type = other DNA

SEQ ID NO: 53337 - DNA, 120 bp, synthetic construct; identical to SEQ ID NO: 35328
  source 1..120: mol_type = other DNA

SEQ ID NO: 53338 - DNA, 120 bp, synthetic construct
  source 1..120: mol_type = other DNA
tgcggaggaaactacatctgtgggcgggcggagcagaaaatcgtcattaattcttaaagctccaaaataatctcctttggctccatgtcttacatccaggccacactgaggcaaggggtg

SEQ ID NO: 53339 - DNA, 120 bp, synthetic construct
  source 1..120: mol_type = other DNA
tctggcgatacctagttcctgctgtttggttttgctccatttttttttcagcttcttatccagtttctcaccctttacttgtgctgctaccatcttctctccaggagggtcataaggttt

SEQ ID NO: 53340 - DNA, 120 bp, synthetic construct; identical to SEQ ID NO: 35634
  source 1..120: mol_type = other DNA

SEQ ID NO: 53341 - DNA, 120 bp, synthetic construct; identical to SEQ ID NO: 35635
  source 1..120: mol_type = other DNA

SEQ ID NO: 53342 - DNA, 120 bp, synthetic construct; identical to SEQ ID NO: 35636
  source 1..120: mol_type = other DNA

SEQ ID NO: 53343 - DNA, 120 bp, synthetic construct
  source 1..120: mol_type = other DNA
caggctgtctccccaggcactggcccagtagcacaccccacccagctgtcttggttccccactttcctttgctgcaccccaagctgactcctccatgcccttacaagacccctccccacc

SEQ ID NO: 53344 - DNA, 120 bp, synthetic construct; identical to SEQ ID NO: 35637
  source 1..120: mol_type = other DNA

SEQ ID NO: 53345 - DNA, 120 bp, synthetic construct
  source 1..120: mol_type = other DNA
ggatgctgcagtgagctatgaatgcacccctgagctccagcctgggtgacagagtgagaccctgcctctaaaataatgataatagtaattcaaataatctaaaatctttgtgaacatgta

SEQ ID NO: 53346 - DNA, 120 bp, synthetic construct
  source 1..120: mol_type = other DNA
tgtatggaatcaaggtttaagggatctagggctgtgcagtatgtgccttgttaacaaaatgtttacaggcagtatgcttcgtaaaagtcatcaccattctccattctcgataagccaggg

SEQ ID NO: 53347 - DNA, 120 bp, synthetic construct
  source 1..120: mol_type = other DNA
atcattgcatactgtaagcgggatgattttgccttccctacttgcttgttttaattctttgccaattttttcccagtcttttagatctaaagttccctgttctggaaactatgggcagaa

SEQ ID NO: 53348 - DNA, 120 bp, synthetic construct
  source 1..120: mol_type = other DNA
ggattaaccttcctttcctctacctgcatttctaaataatgaaaaggagctgttgtttgaattttatcagatgctattgtcagtcctgcgttggcaacctctgtctgcagaaatgtgtaa

SEQ ID NO: 53349 - DNA, 120 bp, synthetic construct
  source 1..120: mol_type = other DNA
tgctgggagatattaattggattcggccaaccctaggcatccctacttatgccatgtcaaatttgttctctatcttaagaggggatccagaatcaaatagtaaaagaacattaactccag

SEQ ID NO: 53350 - DNA, 120 bp, synthetic construct
  source 1..120: mol_type = other DNA
gaggcggggacagagttcaagaaaggaacggaaagttcacattgtgaaaatgtagcagagtctgtaatggctcggtcaacacaaagtgttgactacaatcaattacaggaggtaatatat

SEQ ID NO: 53351 - DNA, 120 bp, synthetic construct
  source 1..120: mol_type = other DNA
gcagttgagataagaggaaggcctctgtctcctgcctgcccctgggaactaaatgtctcagtataaaactcgattgtacatttgttctcttctgagataagagaaaacccgccctatggc

SEQ ID NO: 53352 - DNA, 120 bp, synthetic construct
  source 1..120: mol_type = other DNA
tgaacatgtaatataaccaaaacacaggttcattccctcatcgcttggagatccaattaacaagagcgtggtctgctataaagaaacggactttctgccatgcttgatttaggggaagac

SEQ ID NO: 53353 - DNA, 120 bp, synthetic construct; identical to SEQ ID NO: 35638
  source 1..120: mol_type = other DNA

SEQ ID NO: 53354 - DNA, 120 bp, synthetic construct; identical to SEQ ID NO: 35639
  source 1..120: mol_type = other DNA

SEQ ID NO: 53355 - DNA, 120 bp, synthetic construct
  source 1..120: mol_type = other DNA
ggcctcggggccgggaggaggcgccccgcggggtccgcatggcggcgcggcttcagggctgaatggatgctgcagatgcggggccagggggccggagagccgcctgcttgagttgtattc

SEQ ID NO: 53356 - DNA, 120 bp, synthetic construct; identical to SEQ ID NO: 35640
  source 1..120: mol_type = other DNA

SEQ ID NO: 53357 - DNA, 120 bp, synthetic construct
  source 1..120: mol_type = other DNA
tgtctgagaatggggagactgagcagaggacgacaggaaggatggcaatcactaaccgggttatgtctgattttcagctattccaggtgttaacaagttgtgttctctggtttttaaaat

SEQ ID NO: 53358 - DNA, 120 bp, synthetic construct
  source 1..120: mol_type = other DNA
tgtattttgcaatgtgagaagtacatgagatttgggagggggcaggggtggaatgatatgatttggatttgtgtccccacccaaatctcatgttgaattgtaatccctagtgttggagga

SEQ ID NO: 53359 - DNA, 120 bp, synthetic construct; identical to SEQ ID NO: 35641
  source 1..120: mol_type = other DNA

SEQ ID NO: 53360 - DNA, 120 bp, synthetic construct
  source 1..120: mol_type = other DNA
ctgcctagtggagctgtgagaagggggccaccatcctcaagacccccgaatcatagatccactgacaactcgcattatactcctggaaaagctgcagacattcaataccagcccaggaaa

SEQ ID NO: 53361 - DNA, 120 bp, synthetic construct; identical to SEQ ID NO: 35642
  source 1..120: mol_type = other DNA

SEQ ID NO: 53362 - DNA, 120 bp, synthetic construct; identical to SEQ ID NO: 35643
  source 1..120: mol_type = other DNA

SEQ ID NO: 53363 - DNA, 120 bp, synthetic construct; identical to SEQ ID NO: 35644
  source 1..120: mol_type = other DNA

SEQ ID NO: 53364 - DNA, 120 bp, synthetic construct; identical to SEQ ID NO: 35645
  source 1..120: mol_type = other DNA

SEQ ID NO: 53365 - DNA, 120 bp, synthetic construct; identical to SEQ ID NO: 30134
  source 1..120: mol_type = other DNA

SEQ ID NO: 53366 - DNA, 120 bp, synthetic construct; identical to SEQ ID NO: 30127
  source 1..120: mol_type = other DNA

SEQ ID NO: 53367 - DNA, 120 bp, synthetic construct; identical to SEQ ID NO: 30133
  source 1..120: mol_type = other DNA

SEQ ID NO: 53368 - DNA, 120 bp, synthetic construct
  source 1..120: mol_type = other DNA
attttattttcctcttaggacatatgccttactcctaggatactgtacctctccttagacagaatctttagggtcccaactgggtttctcagttgtttaccaacatttccccatctggct

SEQ ID NO: 53369 - DNA, 120 bp, synthetic construct; identical to SEQ ID NO: 30128
  source 1..120: mol_type = other DNA

SEQ ID NO: 53370 - DNA, 120 bp, synthetic construct; identical to SEQ ID NO: 30129
  source 1..120: mol_type = other DNA

SEQ ID NO: 53371 - DNA, 120 bp, synthetic construct; identical to SEQ ID NO: 30130
  source 1..120: mol_type = other DNA

SEQ ID NO: 53372 - DNA, 120 bp, synthetic construct; identical to SEQ ID NO: 30131
  source 1..120: mol_type = other DNA

SEQ ID NO: 53373 - DNA, 120 bp, synthetic construct; identical to SEQ ID NO: 30132
  source 1..120: mol_type = other DNA

SEQ ID NO: 53374 - DNA, 120 bp, synthetic construct
  source 1..120: mol_type = other DNA
ataaaagatttttaagatggtacacctgtatagggaacttacaataaatggagcttgcaggactggaagttgcctgggcgagttagtgagtgagtggtgagtgaatatgaaggcctagga

SEQ ID NO: 53375 - DNA, 120 bp, synthetic construct
  source 1..120: mol_type = other DNA
attgtgatgttagggtgtcagttttagatctttcccactttctcctgtgggcttttattgctataaatttccctcgaaacactgctttagctgtgtcccagagattctggtacgttgtgt

SEQ ID NO: 53376 - DNA, 120 bp, synthetic construct
  source 1..120: mol_type = other DNA
gtctttacaatttggtacatttttgcagtggctggtaccagttgttcctttccacatttagtgcttccttcaggagcttttgtaacaccggcctggtggtgacaaaatcactgagcattt

SEQ ID NO: 53377 - DNA, 120 bp, synthetic construct
  source 1..120: mol_type = other DNA
atatccagccaaactaaacttcataagtgaaagagaagtaaaatccttcacagacaagcaaatgctcagtgattttgtcaccaccaggccggtgttacaaaagctcctgaaggaagcact

SEQ ID NO: 53378 - DNA, 120 bp, synthetic construct; identical to SEQ ID NO: 53375
  source 1..120: mol_type = other DNA

SEQ ID NO: 53379 - DNA, 120 bp, synthetic construct
  source 1..120: mol_type = other DNA
tgcctgggcgagttagtgagtgagtggtgagtgaatatgaaggcctaggacattactggctgtgggtttgtcacagatagctcttattattttaagatgtgttccatcaatacctagttt

SEQ ID NO: 53380 - DNA, 120 bp, synthetic construct; identical to SEQ ID NO: 30132
  source 1..120: mol_type = other DNA

SEQ ID NO: 53381 - DNA, 120 bp, synthetic construct; identical to SEQ ID NO: 30131
  source 1..120: mol_type = other DNA

SEQ ID NO: 53382 - DNA, 120 bp, synthetic construct; identical to SEQ ID NO: 30130
  source 1..120: mol_type = other DNA

SEQ ID NO: 53383 - DNA, 120 bp, synthetic construct; identical to SEQ ID NO: 30129
  source 1..120: mol_type = other DNA

SEQ ID NO: 53384 - DNA, 120 bp, synthetic construct
  source 1..120: mol_type = other DNA
cccacagaaagtcatgaaaaacaagcagagacacaagagttgatagagaaaacaaaaactgtcaggcttatgcactaaagtatcaataattcatttaattatgaatggtctaccaagaga

SEQ ID NO: 53385 - DNA, 120 bp, synthetic construct
  source 1..120: mol_type = other DNA
gatccagccagatggggaaatgttggtaaacaactgagaaacccagttgggaccctaaagattctgtctaaggagaggtacagtatcctaggagtaaggcatatgtcctaagaggaaaat

SEQ ID NO: 53386 - DNA, 120 bp, synthetic construct; identical to SEQ ID NO: 30133
  source 1..120: mol_type = other DNA

SEQ ID NO: 53387 - DNA, 120 bp, synthetic construct; identical to SEQ ID NO: 30127
  source 1..120: mol_type = other DNA

SEQ ID NO: 53388 - DNA, 120 bp, synthetic construct; identical to SEQ ID NO: 30134
  source 1..120: mol_type = other DNA

SEQ ID NO: 53389 - DNA, 120 bp, synthetic construct; identical to SEQ ID NO: 25146
  source 1..120: mol_type = other DNA

SEQ ID NO: 53390 - DNA, 120 bp, synthetic construct; identical to SEQ ID NO: 25147
  source 1..120: mol_type = other DNA

SEQ ID NO: 53391 - DNA, 120 bp, synthetic construct; identical to SEQ ID NO: 25143
  source 1..120: mol_type = other DNA

SEQ ID NO: 53392 - DNA, 120 bp, synthetic construct; identical to SEQ ID NO: 25144
  source 1..120: mol_type = other DNA

SEQ ID NO: 53393 - DNA, 120 bp, synthetic construct; identical to SEQ ID NO: 25145
  source 1..120: mol_type = other DNA

SEQ ID NO: 53394 - DNA, 120 bp, synthetic construct
  source 1..120: mol_type = other DNA
tttttgttctttgtttgttttttttttgttttttgttttttttttgagacagtgtctccctcttgttgcccaggctggagtgcagtagtgcgatctctgctcactgcaacctccaccttc

SEQ ID NO: 53395 - DNA, 120 bp, synthetic construct; identical to SEQ ID NO: 22587
  source 1..120: mol_type = other DNA

SEQ ID NO: 53396 - DNA, 120 bp, synthetic construct; identical to SEQ ID NO: 19243
  source 1..120: mol_type = other DNA

SEQ ID NO: 53397 - DNA, 120 bp, synthetic construct; identical to SEQ ID NO: 19244
  source 1..120: mol_type = other DNA

SEQ ID NO: 53398 - DNA, 120 bp, synthetic construct; identical to SEQ ID NO: 19232
  source 1..120: mol_type = other DNA

SEQ ID NO: 53399 - DNA, 120 bp, synthetic construct; identical to SEQ ID NO: 19233
  source 1..120: mol_type = other DNA

SEQ ID NO: 53400 - DNA, 120 bp, synthetic construct; identical to SEQ ID NO: 19234
  source 1..120: mol_type = other DNA

SEQ ID NO: 53401 - DNA, 120 bp, synthetic construct; identical to SEQ ID NO: 19235
  source 1..120: mol_type = other DNA

SEQ ID NO: 53402 - DNA, 120 bp, synthetic construct; identical to SEQ ID NO: 19236
  source 1..120: mol_type = other DNA

SEQ ID NO: 53403 - DNA, 120 bp, synthetic construct; identical to SEQ ID NO: 19237
  source 1..120: mol_type = other DNA

SEQ ID NO: 53404 - DNA, 120 bp, synthetic construct; identical to SEQ ID NO: 19238
  source 1..120: mol_type = other DNA

SEQ ID NO: 53405 - DNA, 120 bp, synthetic construct; identical to SEQ ID NO: 19239
  source 1..120: mol_type = other DNA

SEQ ID NO: 53406 - DNA, 120 bp, synthetic construct; identical to SEQ ID NO: 19240
  source 1..120: mol_type = other DNA

SEQ ID NO: 53407 - DNA, 120 bp, synthetic construct; identical to SEQ ID NO: 19241
  source 1..120: mol_type = other DNA

SEQ ID NO: 53408 - DNA, 120 bp, synthetic construct; identical to SEQ ID NO: 19242
  source 1..120: mol_type = other DNA

SEQ ID NO: 53409 - DNA, 120 bp, synthetic construct; identical to SEQ ID NO: 19245
  source 1..120: mol_type = other DNA

SEQ ID NO: 53410 - DNA, 120 bp, synthetic construct; identical to SEQ ID NO: 19246
  source 1..120: mol_type = other DNA

SEQ ID NO: 53411 - DNA, 120 bp, synthetic construct
  source 1..120: mol_type = other DNA
tttggttctgtttatatgctggattacatttattgatttgcgtatgttgaaccagccttgcatcccagggatgaagctcagttgatcatggtggataagctttttgatgtgctgctgcat

SEQ ID NO: 53412 - DNA, 120 bp, synthetic construct; identical to SEQ ID NO: 7718
  source 1..120: mol_type = other DNA

SEQ ID NO: 53413 - DNA, 120 bp, synthetic construct
  source 1..120: mol_type = other DNA
catgatttataatcctttgggtatatacccagtaatgggatggctgggtcaaatggtatttctagttctagatccctgaggaatcaccacactgacttctacaatggttgaactagttta

SEQ ID NO: 53414 - DNA, 120 bp, synthetic construct; identical to SEQ ID NO: 18996
  source 1..120: mol_type = other DNA

SEQ ID NO: 53415 - DNA, 120 bp, synthetic construct; identical to SEQ ID NO: 18997
  source 1..120: mol_type = other DNA

SEQ ID NO: 53416 - DNA, 120 bp, synthetic construct; identical to SEQ ID NO: 18998
  source 1..120: mol_type = other DNA

SEQ ID NO: 53417 - DNA, 120 bp, synthetic construct; identical to SEQ ID NO: 18999
  source 1..120: mol_type = other DNA

SEQ ID NO: 53418 - DNA, 120 bp, synthetic construct; identical to SEQ ID NO: 19000
  source 1..120: mol_type = other DNA

SEQ ID NO: 53419 - DNA, 120 bp, synthetic construct; identical to SEQ ID NO: 19001
  source 1..120: mol_type = other DNA

SEQ ID NO: 53420 - DNA, 120 bp, synthetic construct; identical to SEQ ID NO: 19002
  source 1..120: mol_type = other DNA

SEQ ID NO: 53421 - DNA, 120 bp, synthetic construct; identical to SEQ ID NO: 19003
  source 1..120: mol_type = other DNA

SEQ ID NO: 53422 - DNA, 120 bp, synthetic construct; identical to SEQ ID NO: 19004
  source 1..120: mol_type = other DNA

SEQ ID NO: 53423 - DNA, 120 bp, synthetic construct
  source 1..120: mol_type = other DNA
gtgtttgtgtccctgggtacttgagattagggagtggtgatgactcttaacgagcatgctgccttcaagcatctgttcaacaaagcacatcttgcaccacctcaatccattcaaccctga

SEQ ID NO: 53424 - DNA, 120 bp, synthetic construct
  source 1..120: mol_type = other DNA
ggcaggagaatcaggcagggaggctgcagcgagctgagatggcagcagtacagtccagcttcagctcggcatcagtgggagaccgtggaaagagagggagagggagaccgtggggagagg

SEQ ID NO: 53425 - DNA, 120 bp, synthetic construct; identical to SEQ ID NO: 27046
  source 1..120: mol_type = other DNA

SEQ ID NO: 53426 - DNA, 120 bp, synthetic construct
  source 1..120: mol_type = other DNA
cagatggggtcgcggccgggcagaggcgctcctcacatcccagacggggcggcggggcagaggcgctccccacatctcagacgatgggcggccgggcagagacgctcctcacttcctagg

SEQ ID NO: 53427 - DNA, 120 bp, synthetic construct; identical to SEQ ID NO: 5603
  source 1..120: mol_type = other DNA

SEQ ID NO: 53428 - DNA, 120 bp, synthetic construct; identical to SEQ ID NO: 27048
  source 1..120: mol_type = other DNA

SEQ ID NO: 53429 - DNA, 120 bp, synthetic construct; identical to SEQ ID NO: 5604
  source 1..120: mol_type = other DNA

SEQ ID NO: 53430 - DNA, 120 bp, synthetic construct; identical to SEQ ID NO: 27050
  source 1..120: mol_type = other DNA

SEQ ID NO: 53431 - DNA, 120 bp, synthetic construct; identical to SEQ ID NO: 20637
  source 1..120: mol_type = other DNA

SEQ ID NO: 53432 - DNA, 120 bp, synthetic construct
  source 1..120: mol_type = other DNA
gtaaactagttcaaccattgtggaagtcagtgtggcgattcctcagggatctagaactctctgtgtttcttaatcacaacatgtgtcacactgagacctaattgttcccatatttggcta

SEQ ID NO: 53433 - DNA, 120 bp, synthetic construct; identical to SEQ ID NO: 20638
  source 1..120: mol_type = other DNA

SEQ ID NO: 53434 - DNA, 120 bp, synthetic construct
  source 1..120: mol_type = other DNA
tcttttggctgcataaatgtcttgttttgagaagtgtctgttgatatccttcacccactttttgatgaggttgtttgtttttttcttgtaaatttgagttcattgtagattctggataat

SEQ ID NO: 53435 - DNA, 120 bp, synthetic construct; identical to SEQ ID NO: 20639
  source 1..120: mol_type = other DNA

SEQ ID NO: 53436 - DNA, 120 bp, synthetic construct; identical to SEQ ID NO: 20640
  source 1..120: mol_type = other DNA

SEQ ID NO: 53437 - DNA, 120 bp, synthetic construct
  source 1..120: mol_type = other DNA
gccatgttggtgtgccgcacccattaactcatcatttagcattaggtatatctcctagtgctatcccccctgctcccccaaccccacaacagtccctggtgtgtgatgttccccttcctg

SEQ ID NO: 53438 - DNA, 120 bp, synthetic construct
  source 1..120: mol_type = other DNA
tgcctatgttctgaatggtattgcctaggttttcttgtagggtttttatggttttaagtctaacatgtaagtctttaatccatcttgaattaatttttgtataaggtataaggaagggat

SEQ ID NO: 53439 - DNA, 120 bp, synthetic construct
  source 1..120: mol_type = other DNA
ggagtggtgagagagggcttccctgtcttgtgccagttttcaaagggaatgcttccagttattgtccattcagtatgatattggctgtgggtttgtcatagatagctcttattattttga

SEQ ID NO: 53440 - DNA, 120 bp, synthetic construct
  source 1..120: mol_type = other DNA
atcattttttattgcgtcaatttgattcttctctcttttcttctttattagtcttgctagcgatctattaattttgttgatcttttcaaaaaaccagctcctggatacattgattttttg

SEQ ID NO: 53441 - DNA, 120 bp, synthetic construct
  source 1..120: mol_type = other DNA
ttcgaacttcctcctttagctcggagtagttcgatcttctgaaaccttcttctctcaacctgtcaaagttagtctccatccagctttgttccattgctggtgaggagctgcattcctttg

SEQ ID NO: 53442 - DNA, 120 bp, synthetic construct; identical to SEQ ID NO: 20641
  source 1..120: mol_type = other DNA

SEQ ID NO: 53443 - DNA, 120 bp, synthetic construct; identical to SEQ ID NO: 20642
  source 1..120: mol_type = other DNA

SEQ ID NO: 53444 - DNA, 120 bp, synthetic construct; identical to SEQ ID NO: 20643
  source 1..120: mol_type = other DNA

SEQ ID NO: 53445 - DNA, 120 bp, synthetic construct; identical to SEQ ID NO: 20644
  source 1..120: mol_type = other DNA

SEQ ID NO: 53446 - DNA, 120 bp, synthetic construct; identical to SEQ ID NO: 10791
  source 1..120: mol_type = other DNA

SEQ ID NO: 53447 - DNA, 120 bp, synthetic construct
  source 1..120: mol_type = other DNA
gttgggccaaatgatagttctgtttcaagttctttgagaaatctccacactgctttccacagtggctgaactaacttatattcctaccagcagtgtataagcgttcccttttctctgcag

SEQ ID NO: 53448 - DNA, 120 bp, synthetic construct
  source 1..120: mol_type = other DNA
ccactcctattcaacatagtgttggaagttctggccaaggcaattaggcaggagaaagaaataaagggtattcagttaggaaaagaggaagtcaaactgtccctgtttgcagatgacatg

SEQ ID NO: 53449 - DNA, 120 bp, synthetic construct
  source 1..120: mol_type = other DNA
gcaatactattcaggacataggcatgggcaaggacttcatgtctaaaacacctaaagcaatggcaacaaaagccaaaattgacaaatgggatctaattaaactaaagagcttctgcacag

SEQ ID NO: 53450 - DNA, 120 bp, synthetic construct
  source 1..120: mol_type = other DNA
tcgcaaggacaaaaaaaacaaacaccgcattttctcactcacaggtgggaattgaacaatgacaacacatggacacaggaaggggaacatcacactctggggactgttgtagggtggggg

SEQ ID NO: 53451 - DNA, 120 bp, synthetic construct; identical to SEQ ID NO: 10792
  source 1..120: mol_type = other DNA

SEQ ID NO: 53452 - DNA, 120 bp, synthetic construct
  source 1..120: mol_type = other DNA
gcagctgagggtcctgtctgttagaaggaaaactaacaaacagaaaggacatccacaccaaaaacccatctgtacatcgccatcatcaaagaccaaaagtagataaaaccacaaagacag

SEQ ID NO: 53453 - DNA, 120 bp, synthetic construct
  source 1..120: mol_type = other DNA
agtgacctacaacgagacttagactcccacacaataataatgagagactttaacaccccactgtcaacattagacagatcaacgagacagaaagttaacaaggatacccaggaattgaac

SEQ ID NO: 53454 - DNA, 120 bp, synthetic construct
  source 1..120: mol_type = other DNA
tagaaaatctagaagaaatggataaattcctcgacacatacaccctcccaagacgaaaccaagaagaagttgaatctctgaatacaccaataacaggctctgaaattgtggcaataatca

SEQ ID NO: 53455 - DNA, 120 bp, synthetic construct; identical to SEQ ID NO: 10794
  source 1..120: mol_type = other DNA

SEQ ID NO: 53456 - DNA, 120 bp, synthetic construct
  source 1..120: mol_type = other DNA
ggagactgaggagtgtgtattaagaaaatcccaaaggacccatagcttcttagaatttgaaggcactttcgaaaaggcaacctacaaaataggagaaaattttcacaacctactcatctg

SEQ ID NO: 53457 - DNA, 120 bp, synthetic construct
  source 1..120: mol_type = other DNA
actaacctgcacattgtgcacatgtaccctaaaactttaagtataataataataaaataaaataaaaagaatttgaaggcactttagagataatctaaaagaattgacttcttacaattt

SEQ ID NO: 53458 - DNA, 120 bp, synthetic construct; identical to SEQ ID NO: 10796
  source 1..120: mol_type = other DNA

SEQ ID NO: 53459 - DNA, 120 bp, synthetic construct
  source 1..120: mol_type = other DNA
acaagaaccaatacagagaagtgcttaaaggagttgatggagctgaaaaccaaggctcaagaactacgtgaagaatgcagaagcctcaggagccgatgcgatcaactggaagaaagggta

SEQ ID NO: 53460 - DNA, 120 bp, synthetic construct
  source 1..120: mol_type = other DNA
attggataaagaatcaagacccatcagtgtgctgtattcaggaaacccatctcacgtgcagagacacacataggctcaaaataaagggatggaggaagatctaccaagcaaatggaaaac

SEQ ID NO: 53461 - DNA, 120 bp, synthetic construct
  source 1..120: mol_type = other DNA
gaaaaaaagagagaagaatcaaatagatgcaataaaaaatgataaaggggatatcatcactgatcccacagaaatagaaactaccatcagagaatactacaaacacctctacgctaataa

SEQ ID NO: 53462 - DNA, 120 bp, synthetic construct
  source 1..120: mol_type = other DNA
attgtccctgtttgcagatgacatgattgtatatctagaaaaccccattgtctcagcccagaatctccttaagctgataagcaacttcagcaaaatctcaggatacaaaatcaatgtaca

SEQ ID NO: 53463 - DNA, 120 bp, synthetic construct
  source 1..120: mol_type = other DNA
catcagagtgaacaggcaacctacaaaatgggagaaaatttttgcaatctactcatctgacaaagggctaatatccagaatctacaatgaactcaaacacatttacaagaaaaaaacaac

SEQ ID NO: 53464 - DNA, 120 bp, synthetic construct
  source 1..120: mol_type = other DNA
cctgcacattgtgcacatgtaccctaaaccttaaagtataataataataaataaaaaataaaaaaataaaaaaagaagatatacaaatggccaacaaacatatgaaaaaatgcacatcac

SEQ ID NO: 53465 - DNA, 120 bp, synthetic construct; identical to SEQ ID NO: 10786
  source 1..120: mol_type = other DNA

SEQ ID NO: 53466 - DNA, 120 bp, synthetic construct
  source 1..120: mol_type = other DNA
ggggtttttatggttttaggtctaacatttaagtctttaatccatattgaattatgaaatgaagcgtgaagagaagtttagagaaaaaagaataaaaagaaacgaataaagcctccaaga

SEQ ID NO: 53467 - DNA, 120 bp, synthetic construct
  source 1..120: mol_type = other DNA
gagtcaagacccatcagagtgctgtattcaggaaacccatctcacatgcagagacatgcatagctcaaaataaagggatggaggaagatctaccaagcaaatggaaaacaaaaaaaaggc

SEQ ID NO: 53468 - DNA, 120 bp, synthetic construct
  source 1..120: mol_type = other DNA
gttccctttccgagtcaaagaaaggggtgacggacggcacctgaaaaatcgggtcactcccacccgaatactgcgcttttcctaggggcttaaaaaacggcgcaccacgagagtatatcc

SEQ ID NO: 53469 - DNA, 120 bp, synthetic construct
  source 1..120: mol_type = other DNA
gaagcctcaggagccgatgcgatcaactggaagaaagggtatcagcaatggaagatgaaatgaatgaaatgacgtgagaagggaagtttagagaaaaaagaataaaaagaaatgagcaaa

SEQ ID NO: 53470 - DNA, 120 bp, synthetic construct
  source 1..120: mol_type = other DNA
aagaatcaagacccatcagtgtgctgtattcaggaaacccatctcacgtgcagagacacacataggctcaaaataaagggatggaggaagatctaccaagcaaatggaaaacaaaaaaag

SEQ ID NO: 53471 - DNA, 120 bp, synthetic construct
  source 1..120: mol_type = other DNA
cactagcatgactaataaagaaaaagagaagaatcaaatagatgcaataaaaaatgataagggggatatcaccaccgatcccacagaaatacaaactaccatcagagaatactacaaaca

SEQ ID NO: 53472 - DNA, 120 bp, synthetic construct
  source 1..120: mol_type = other DNA
gcagacgacatgattgtatatctagaaaccccattgtctcagcccaaaatctccttaagctgataagcaacttcagcaaagtctcaggatacaaaatcaatgtacaaaaatcacaagcat

SEQ ID NO: 53473 - DNA, 120 bp, synthetic construct
  source 1..120: mol_type = other DNA
ttgacaaatgggatctaattaaactcaagagcttctgcacagcaaaacaaactaccatcagagtgaacaggcaacctacaaaatgggagaaaattttcacaacctactcatctgacaaag

SEQ ID NO: 53474 - DNA, 120 bp, synthetic construct; identical to SEQ ID NO: 10797
  source 1..120: mol_type = other DNA

SEQ ID NO: 53475 - DNA, 120 bp, synthetic construct
  source 1..120: mol_type = other DNA
atttgcatttctctgatggccagtgatgatgagcattttttcatgcgtcttttgattgcataaatgtcttcttttgaatagtgtctgttcatatcctttgcccactttttgatggagttg

SEQ ID NO: 53476 - DNA, 120 bp, synthetic construct
  source 1..120: mol_type = other DNA
tacaactgccccaccccaccaaaagaaaagcaaaaaacataggtatacatctaaccaaggaggtgaaagaaagatctctacaaggagaactacaaaacactgctcattgtagattctgga

SEQ ID NO: 53477 - DNA, 120 bp, synthetic construct
  source 1..120: mol_type = other DNA
tttgtacattgattttgtatcctgagattttgctgaagttgcttatcagcttaaggatattttgggctgagacaatggggtttctacatatacaatcatgtcatctgcaaacagggacaa

SEQ ID NO: 53478 - DNA, 120 bp, synthetic construct
  source 1..120: mol_type = other DNA
aactatcacaaggacaaaaaaccaaacaccgcatgttctcactcataggtgggaattgaacccatggacacaggaaggggaacatcacactctggggactgttgtggggtggcgggaggg

SEQ ID NO: 53479 - DNA, 120 bp, synthetic construct
  source 1..120: mol_type = other DNA
tacacattatatgcttttatcaaaatatcatatataccccataaataagtacaactattatgtatctatatgagaacacatggacacaggaaggggaacatcacactctggggactgctg

SEQ ID NO: 53480 - DNA, 120 bp, synthetic construct
  source 1..120: mol_type = other DNA
tggacggagaatgactttgacaagttgagagaaggcttcagacgatcaaactactccgagctacaggaggaaattcaaatcaaaggcaaagaagttaaaaactttgaaaaaaatatagac

SEQ ID NO: 53481 - DNA, 120 bp, synthetic construct
  source 1..120: mol_type = other DNA
aaagattcaagacccatcagtgtgctgtattcaggaaacccatctcttgtgcagagacacacataggctcaaaataaagggatggaggaagatctaccaagcaaatggaaaacaaaaaaa

SEQ ID NO: 53482 - DNA, 120 bp, synthetic construct
  source 1..120: mol_type = other DNA
tggttttttgaaaggatcaacaaaattgatagactgctagcaagactaagaaagacaaaaagagagaagaatcaaacagatccaataaaaaatgataaaggggatatcaccgccaatgcc

SEQ ID NO: 53483 - DNA, 120 bp, synthetic construct
  source 1..120: mol_type = other DNA
ccttaagctgataagcaacttcaacaaagtctcaggatacaaaatcaatgtgcaaaagtcacaagcattcttatacaccaataacagacaaacagagagccaaatcatgagtgaactccc

SEQ ID NO: 53484 - DNA, 120 bp, synthetic construct
  source 1..120: mol_type = other DNA
atccttcgcccattttttgatggggttgtttgattttttcttgtaaatttgtttaagttctttatcgattctggatattagccctttgtcagatgggtagattgaaaaaattttctccca

SEQ ID NO: 53485 - DNA, 120 bp, synthetic construct; identical to SEQ ID NO: 10798
  source 1..120: mol_type = other DNA

SEQ ID NO: 53486 - DNA, 120 bp, synthetic construct
  source 1..120: mol_type = other DNA
aaagcaatcctgagcaaaaagaacagaatagctattattttttttcccacacagttcactgatgtatagaatggctattattaaaaggacaaaaaataacagatgttggcgaggatgtgg

SEQ ID NO: 53487 - DNA, 120 bp, synthetic construct
  source 1..120: mol_type = other DNA
aatcaaaaccacaatgaggtaccatctcacaccagttagaatggcgatcattaaaaagtcaggaaacaacaggtgctggagaggatgtggagaaataggaacaattttacactgttggtg

SEQ ID NO: 53488 - DNA, 120 bp, synthetic construct; identical to SEQ ID NO: 10799
  source 1..120: mol_type = other DNA

SEQ ID NO: 53489 - DNA, 120 bp, synthetic construct; identical to SEQ ID NO: 10800
  source 1..120: mol_type = other DNA

SEQ ID NO: 53490 - DNA, 120 bp, synthetic construct
  source 1..120: mol_type = other DNA
tggtgtatatgtgccacattttcttaatccagtctatcattgttggacatttgggttggttccaagtctttgctcttgtgaagagtgccacaataaacatacgtgtgcatgtgtctttat

SEQ ID NO: 53491 - DNA, 120 bp, synthetic construct; identical to SEQ ID NO: 10801
  source 1..120: mol_type = other DNA

SEQ ID NO: 53492 - DNA, 120 bp, synthetic construct
  source 1..120: mol_type = other DNA
gaccatatacgagaaacctacagttaacatcatactgaatgggaaaaagttgaaagcattttctctaagaactggaacaagacaaggatgcccactttcgccattcctattcagcatagt

SEQ ID NO: 53493 - DNA, 120 bp, synthetic construct
  source 1..120: mol_type = other DNA
tttgggtatatacccagtaatggggtcactgggtcaaatggtatttctagttctagatccttgaggaatcgccacactgtcttcgacaatggttgaactagtttacagtcccaccaacag

SEQ ID NO: 53494 - DNA, 120 bp, synthetic construct
  source 1..120: mol_type = other DNA
tgcctccagctttgttcttttggcttaggattgtcttggcgatgcgggctcttttttggttccatatgaactttaaagtagttttttccaattctgtgaagaaagtcattggtagcttga

SEQ ID NO: 53495 - DNA, 120 bp, synthetic construct
  source 1..120: mol_type = other DNA
aatagtttcagaaggaatggtaccagctcctcctcatacctctggtagaattcggctgtgaatctgcctggtcctggactttttttgtttggtaggctcttaattattgcctcaatttca

SEQ ID NO: 53496 - DNA, 120 bp, synthetic construct
  source 1..120: mol_type = other DNA
tatgcaccaaatacaggaggccacagattaataaagcaagtccttagagacctacaaagagacttagactcccacacaataataatgggagacttaaacaccccactgtcaacattagac

SEQ ID NO: 53497 - DNA, 120 bp, synthetic construct
  source 1..120: mol_type = other DNA
acatatggctagccagttttcccagcaccatttattaaatatggactcctttccccattgtttgtttttttttttttttttttttttttttttgagacggagttttgctctgtcgcccag

SEQ ID NO: 53498 - DNA, 120 bp, synthetic construct
  source 1..120: mol_type = other DNA
gttttctagatatacaatcatgtcatctgcaaacagggacaatttgacttcctcttttcctaattgaataccctttatttccttctcctgcctgattgccctggccagagctcccaacac

SEQ ID NO: 53499 - DNA, 120 bp, synthetic construct
  source 1..120: mol_type = other DNA
tcaacagcccttcatgctaaaaactctcaataaattacgtattgatgggacatatctcaacataataagagctatttatgaccaaccgacagccaatatcatactgaatgggcaaaaact

SEQ ID NO: 53500 - DNA, 120 bp, synthetic construct
  source 1..120: mol_type = other DNA
aggattaaagacttaaatgttagacccaaaaccataaaaaccctagaagaaaacctaggcaataccattcaggacataggcatgggcaaggacttcatgtctaaaacaccaaaagcaatg

SEQ ID NO: 53501 - DNA, 120 bp, synthetic construct; identical to SEQ ID NO: 10802
  source 1..120: mol_type = other DNA

SEQ ID NO: 53502 - DNA, 120 bp, synthetic construct
  source 1..120: mol_type = other DNA
tttgtgggttgcctgttcactctgatggtagtttcttctgctgtgcagaagctcttgagtttaattagatcccatttgtcaattttggcttttgttgccattgcttttggtgttttagac

SEQ ID NO: 53503 - DNA, 120 bp, synthetic construct
  source 1..120: mol_type = other DNA
cctgcctaattgccctggccagaacttccaacactatgttgaataggagtggtgagagagggcatccctgtcttgtgccagttttcaaagggaatgcttccagtgtttgcccattcggta

SEQ ID NO: 53504 - DNA, 120 bp, synthetic construct
  source 1..120: mol_type = other DNA
tttacaaacctttagctagacacagagcgctgattggtgcatttttgcagagtgctgattggtgcgtttacaaacctttagctagactagacacagagcactgattggtgcatttacaat

SEQ ID NO: 53505 - DNA, 120 bp, synthetic construct
  source 1..120: mol_type = other DNA
ccctgccgccccgtccgggatgtgaggagcgtctctgcccggtcgccccgtctgagaagtgaggagaccctctgcctggcaaccgccccgtctgagaagtgaggagcccctccgcccggc

SEQ ID NO: 53506 - DNA, 120 bp, synthetic construct
  source 1..120: mol_type = other DNA
ctctgcgagaaacacccaagaatgatcaataaaaaaaaaaaaaaaaaaaaaagtcttgctacaaagtgcttagggtgtagctgatttactttcaggcacaagcctcttatctcgtttcat

SEQ ID NO: 53507 - DNA, 120 bp, synthetic construct
  source 1..120: mol_type = other DNA
gcctgggcaacagagagagactccatctcaaaaaaaaaaaaaaaaaaaagaatatttagttggaaaccattgccttctgttctcatgttagaaagaatgtggaatacatcctccaatttg

SEQ ID NO: 53508 - DNA, 120 bp, synthetic construct; identical to SEQ ID NO: 10787
  source 1..120: mol_type = other DNA

SEQ ID NO: 53509 - DNA, 120 bp, synthetic construct; identical to SEQ ID NO: 10788
  source 1..120: mol_type = other DNA

SEQ ID NO: 53510 - DNA, 120 bp, synthetic construct
  source 1..120: mol_type = other DNA
gtggggggaggggggagggatagcattaggagatacacctaatgttaaatgaccagttaatgggtgcagcacaccaacatggcacatgtatacatatgtaacaaacctgcacgttgtgca

SEQ ID NO: 53511 - DNA, 120 bp, synthetic construct
  source 1..120: mol_type = other DNA
aaatgggctaaatgctccaattaaaagacacagactggcaaattggataaagagtcaagacccatcagtgtgctgtattcaggaaacccatctcacgtgcagagacacgcatgggctcaa

SEQ ID NO: 53512 - DNA, 120 bp, synthetic construct
  source 1..120: mol_type = other DNA
gaagaaaagagagaagaatcaaatagatgcaataaaaaatgataaaggggatatcactaccaatcccacagaaatacaaactaccatcagagaatactattaacacctctaagcaaataa

SEQ ID NO: 53513 - DNA, 120 bp, synthetic construct
  source 1..120: mol_type = other DNA
tccctgtttgcagatgacattattgtatatctagaaaaccccatcgtctcagcccaaaatctccttaagctgataagcaacttcagcaaagtctcaggatacaaaatcaatgtgcaaaaa

SEQ ID NO: 53514 - DNA, 120 bp, synthetic construct; identical to SEQ ID NO: 10790
  source 1..120: mol_type = other DNA

SEQ ID NO: 53515 - DNA, 120 bp, synthetic construct; identical to SEQ ID NO: 32904
  source 1..120: mol_type = other DNA

SEQ ID NO: 53516 - DNA, 120 bp, synthetic construct
  source 1..120: mol_type = other DNA
gcatgatttatagtcgtttgggtatatacccagtaatgggatggctgggtcaaatggtatttctagttctagatccctgaggaatcgccacactgacttccacaatggttgaactagttt

SEQ ID NO: 53517 - DNA, 120 bp, synthetic construct
  source 1..120: mol_type = other DNA
ctgttttggcaccagtaccatactgttttggttactgtagccttgtagtatagtttgaagtcaggtattgtgatgcctccagctttgttcttttggcttaggattgacttggcaatgcgg

SEQ ID NO: 53518 - DNA, 120 bp, synthetic construct; identical to SEQ ID NO: 24228
  source 1..120: mol_type = other DNA

SEQ ID NO: 53519 - DNA, 120 bp, synthetic construct; identical to SEQ ID NO: 22487
  source 1..120: mol_type = other DNA

SEQ ID NO: 53520 - DNA, 120 bp, synthetic construct; identical to SEQ ID NO: 22488
  source 1..120: mol_type = other DNA

SEQ ID NO: 53521 - DNA, 120 bp, synthetic construct; identical to SEQ ID NO: 5488
  source 1..120: mol_type = other DNA

SEQ ID NO: 53522 - DNA, 120 bp, synthetic construct; identical to SEQ ID NO: 26312
  source 1..120: mol_type = other DNA

SEQ ID NO: 53523 - DNA, 120 bp, synthetic construct
  source 1..120: mol_type = other DNA
gagaggaggagagagagagaggaggagagagagagagagagaagagagagagagggggagagagagagagagaggaggagagagagagagggggagagagagagagagaggaggagagag

SEQ ID NO: 53524 - DNA, 120 bp, synthetic construct; identical to SEQ ID NO: 26313
  source 1..120: mol_type = other DNA

SEQ ID NO: 53525 - DNA, 120 bp, synthetic construct; identical to SEQ ID NO: 26314
  source 1..120: mol_type = other DNA

SEQ ID NO: 53526 - DNA, 120 bp, synthetic construct; identical to SEQ ID NO: 26300
  source 1..120: mol_type = other DNA

SEQ ID NO: 53527 - DNA, 120 bp, synthetic construct; identical to SEQ ID NO: 26301
  source 1..120: mol_type = other DNA

SEQ ID NO: 53528 - DNA, 120 bp, synthetic construct; identical to SEQ ID NO: 26302
  source 1..120: mol_type = other DNA

SEQ ID NO: 53529 - DNA, 120 bp, synthetic construct
  source 1..120: mol_type = other DNA
ctgtgggctaatgtattttgtttttttaagtcatggaatttgtggcaatttgttacagcagcaagaggaaactcacagggaggctgcagctcgttttgctccagggtaaacggattcttc

SEQ ID NO: 53530 - DNA, 120 bp, synthetic construct; identical to SEQ ID NO: 26303
  source 1..120: mol_type = other DNA

SEQ ID NO: 53531 - DNA, 120 bp, synthetic construct; identical to SEQ ID NO: 26304
  source 1..120: mol_type = other DNA

SEQ ID NO: 53532 - DNA, 120 bp, synthetic construct; identical to SEQ ID NO: 26305
  source 1..120: mol_type = other DNA

SEQ ID NO: 53533 - DNA, 120 bp, synthetic construct
  source 1..120: mol_type = other DNA
gaactcaaacaaatttacaagaaaaaaacaagcaaccccatcaacaagtggttgaaggatatgaacagacacttctcaaaagaagacatttatgcagccaaaaaacacatgaaaaaatgc

SEQ ID NO: 53534 - DNA, 120 bp, synthetic construct
  source 1..120: mol_type = other DNA
ggctggaaaccatcattctcagcaaactatcgcaaggacaaaaaagcaaactctgcatgttctcactcataggtgggaattgaacaatgagaacacatggacacaggaaggggaacatca

SEQ ID NO: 53535 - DNA, 120 bp, synthetic construct; identical to SEQ ID NO: 26306
  source 1..120: mol_type = other DNA

SEQ ID NO: 53536 - DNA, 120 bp, synthetic construct; identical to SEQ ID NO: 26307
  source 1..120: mol_type = other DNA

SEQ ID NO: 53537 - DNA, 120 bp, synthetic construct; identical to SEQ ID NO: 26308
  source 1..120: mol_type = other DNA

SEQ ID NO: 53538 - DNA, 120 bp, synthetic construct; identical to SEQ ID NO: 26309
  source 1..120: mol_type = other DNA

SEQ ID NO: 53539 - DNA, 120 bp, synthetic construct
  source 1..120: mol_type = other DNA
ttttttttttttttttttttaaagacagattctcactttgttgcccaggctggagtgtagtggcatgatctttgctcactgcagtctctgcctcctgggttcaagcaattctcctgcctc

SEQ ID NO: 53540 - DNA, 120 bp, synthetic construct; identical to SEQ ID NO: 4130
  source 1..120: mol_type = other DNA

SEQ ID NO: 53541 - DNA, 120 bp, synthetic construct
  source 1..120: mol_type = other DNA
ctggcctagaactcctggactgaagcaatactcccgcctcagcctctcaaagtactgggattacaggtgtgagccaccatgcctcgccaaaagtttttttttgtttttttttttattatt

SEQ ID NO: 53542 - DNA, 120 bp, synthetic construct
  source 1..120: mol_type = other DNA
gatggccagtgatggtgagcattttttcatgtgttttttggctgcataaatgtcttcttttgagaagtgtctgttcatgtccttcgcccactttttgatggggttgtttgttttttcttg

SEQ ID NO: 53543 - DNA, 120 bp, synthetic construct
  source 1..120: mol_type = other DNA
tatcctgagactttgctgaagttgcttatcagcttaaggagattttgggctgagaaagcaggaaaatccaaaactgacaccctaacatcacaattaaaagaactagaaaagcaagagcaa

SEQ ID NO: 53544 - DNA, 120 bp, synthetic construct
  source 1..120: mol_type = other DNA
tatctcaatagatgcagaaaaggcctttgacagaattcaacaacccttcatgctaaaaactctcaataaattaggtattgatgggacgtatctcaaaataataagagctatctatgacaa

SEQ ID NO: 53545 - DNA, 120 bp, synthetic construct; identical to SEQ ID NO: 33504
  source 1..120: mol_type = other DNA

SEQ ID NO: 53546 - DNA, 120 bp, synthetic construct; identical to SEQ ID NO: 33505
  source 1..120: mol_type = other DNA

SEQ ID NO: 53547 - DNA, 120 bp, synthetic construct; identical to SEQ ID NO: 33506
  source 1..120: mol_type = other DNA

SEQ ID NO: 53548 - DNA, 120 bp, synthetic construct; identical to SEQ ID NO: 11690
  source 1..120: mol_type = other DNA

SEQ ID NO: 53549 - DNA, 120 bp, synthetic construct; identical to SEQ ID NO: 16956
  source 1..120: mol_type = other DNA

SEQ ID NO: 53550 - DNA, 120 bp, synthetic construct; identical to SEQ ID NO: 16957
  source 1..120: mol_type = other DNA

SEQ ID NO: 53551 - DNA, 120 bp, synthetic construct; identical to SEQ ID NO: 16958
  source 1..120: mol_type = other DNA

SEQ ID NO: 53552 - DNA, 120 bp, synthetic construct; identical to SEQ ID NO: 16953
  source 1..120: mol_type = other DNA

SEQ ID NO: 53553 - DNA, 120 bp, synthetic construct; identical to SEQ ID NO: 16954
  source 1..120: mol_type = other DNA

SEQ ID NO: 53554 - DNA, 120 bp, synthetic construct; identical to SEQ ID NO: 16955
  source 1..120: mol_type = other DNA

SEQ ID NO: 53555 - DNA, 120 bp, synthetic construct; identical to SEQ ID NO: 11614
  source 1..120: mol_type = other DNA

SEQ ID NO: 53556 - DNA, 120 bp, synthetic construct; identical to SEQ ID NO: 15551
  source 1..120: mol_type = other DNA

SEQ ID NO: 53557 - DNA, 120 bp, synthetic construct; identical to SEQ ID NO: 2151
  source 1..120: mol_type = other DNA

SEQ ID NO: 53558 - DNA, 120 bp, synthetic construct; identical to SEQ ID NO: 12056
  source 1..120: mol_type = other DNA

SEQ ID NO: 53559 - DNA, 120 bp, synthetic construct; identical to SEQ ID NO: 6048
  source 1..120: mol_type = other DNA

SEQ ID NO: 53560 - DNA, 120 bp, synthetic construct; identical to SEQ ID NO: 7946
  source 1..120: mol_type = other DNA

SEQ ID NO: 53561 - DNA, 120 bp, synthetic construct; identical to SEQ ID NO: 17078
  source 1..120: mol_type = other DNA

SEQ ID NO: 53562 - DNA, 120 bp, synthetic construct; identical to SEQ ID NO: 17079
  source 1..120: mol_type = other DNA

SEQ ID NO: 53563 - DNA, 120 bp, synthetic construct; identical to SEQ ID NO: 10100
  source 1..120: mol_type = other DNA

SEQ ID NO: 53564 - DNA, 120 bp, synthetic construct; identical to SEQ ID NO: 10101
  source 1..120: mol_type = other DNA

SEQ ID NO: 53565 - DNA, 120 bp, synthetic construct
  source 1..120: mol_type = other DNA
cttgaactcctgacctcaggtgatccacccgcctcaacctcccaaagtgctgggtacatttgttgagtgatttttttacaacattaaaatatgtcatacgtaagttttaaaaccaagccc

SEQ ID NO: 53566 - DNA, 120 bp, synthetic construct; identical to SEQ ID NO: 18316
  source 1..120: mol_type = other DNA

SEQ ID NO: 53567 - DNA, 120 bp, synthetic construct; identical to SEQ ID NO: 11114
  source 1..120: mol_type = other DNA

SEQ ID NO: 53568 - DNA, 120 bp, synthetic construct; identical to SEQ ID NO: 11115
  source 1..120: mol_type = other DNA

SEQ ID NO: 53569 - DNA, 120 bp, synthetic construct; identical to SEQ ID NO: 30263
  source 1..120: mol_type = other DNA

SEQ ID NO: 53570 - DNA, 120 bp, synthetic construct; identical to SEQ ID NO: 14032
  source 1..120: mol_type = other DNA

SEQ ID NO: 53571 - DNA, 120 bp, synthetic construct; identical to SEQ ID NO: 14033
  source 1..120: mol_type = other DNA

SEQ ID NO: 53572 - DNA, 120 bp, synthetic construct; identical to SEQ ID NO: 14034
  source 1..120: mol_type = other DNA

SEQ ID NO: 53573 - DNA, 120 bp, synthetic construct
  source 1..120: mol_type = other DNA
gtgagctgagatcgcaccactgcactccagcctgggcgacaaaatgagaccccatctcaaaataaataaacaaaataaaatacactacttaggcagaagcatcctttcaaaggataaaag

SEQ ID NO: 53574 - DNA, 120 bp, synthetic construct; identical to SEQ ID NO: 35236
  source 1..120: mol_type = other DNA

SEQ ID NO: 53575 - DNA, 120 bp, synthetic construct
  source 1..120: mol_type = other DNA
gttccatagtacatgtgcaggatgtacaggtttgttacataggtaaacgtgtgtaccatggtggtttgctgcacctaggtattaagcccagcatgcattagctatttttcctaatgctat

SEQ ID NO: 53576 - DNA, 120 bp, synthetic construct; identical to SEQ ID NO: 29785
  source 1..120: mol_type = other DNA

SEQ ID NO: 53577 - DNA, 120 bp, synthetic construct; identical to SEQ ID NO: 29786
  source 1..120: mol_type = other DNA

SEQ ID NO: 53578 - DNA, 120 bp, synthetic construct
  source 1..120: mol_type = other DNA
cggttgaggtcacccaaatcttgattccagctggacgcccattaatctgggaaccctttgttagggttttagaagatgcatagatggaaagcaaatttgaactggaaaggataaaggtag

SEQ ID NO: 53579 - DNA, 120 bp, synthetic construct; identical to SEQ ID NO: 13228
  source 1..120: mol_type = other DNA

SEQ ID NO: 53580 - DNA, 120 bp, synthetic construct; identical to SEQ ID NO: 13229
  source 1..120: mol_type = other DNA

SEQ ID NO: 53581 - DNA, 120 bp, synthetic construct; identical to SEQ ID NO: 13230
  source 1..120: mol_type = other DNA

SEQ ID NO: 53582 - DNA, 120 bp, synthetic construct; identical to SEQ ID NO: 13231
  source 1..120: mol_type = other DNA

SEQ ID NO: 53583 - DNA, 120 bp, synthetic construct
  source 1..120: mol_type = other DNA
ctccgtctcaaaagaaaaaaaaaaaagcagccatgctaatgctaatgaccgctgccacttaccacacatagcaccaagtggtcaaagtgctttgtcctgtaatcttcatgtcagtctcca

SEQ ID NO: 53584 - DNA, 120 bp, synthetic construct
  source 1..120: mol_type = other DNA
gtgttgtggtgggggaggggtgggtttgtttatagtgttgtggtgggggaggggtgggttttgtttatagtgttgtggtgggggaggggtgggttttgtttatagtgttgtgttggggga

SEQ ID NO: 53585 - DNA, 120 bp, synthetic construct
  source 1..120: mol_type = other DNA
ttcagtggatctaatacatgcacaatgcgtgtgaccatcacctctgtctaattccagaatattcccaccgccccaaaaaggaaccccatacccatccagcagtcattgcccatcctcctt

SEQ ID NO: 53586 - DNA, 120 bp, synthetic construct
  source 1..120: mol_type = other DNA
caaagtgctgggattacaggcatgagctactgcacccagtcacctccattgtcttctttctgtttttctcactctgcatttttttgattcacctatctctctctctctctctctctctct

SEQ ID NO: 53587 - DNA, 120 bp, synthetic construct
  source 1..120: mol_type = other DNA
cactccagcgtgggtgacagagcgagactccgtctcaaaaaaaaaaaaaaaaagtttcacgaaaaagaaaaaaaaaggcagaaaatgcaattacttttgcaccaacctaacagaaaatga

SEQ ID NO: 53588 - DNA, 120 bp, synthetic construct
  source 1..120: mol_type = other DNA
aaagtgggactctgtccaaaaaaaaaaaaaaagggggggggggaaggggaggggagggaggaaggggaatatataatatctcaacattagttaccaaagtactgttttgatctcgagatt

SEQ ID NO: 53589 - DNA, 120 bp, synthetic construct
  source 1..120: mol_type = other DNA
ttctgagtcaaagaaaggggtgacggacgcacctggaaaatcgagtcactcccacccaaatattgcgcttttcagaccggcttaaaaaacggcacactacgagattatatcccgcacctg

SEQ ID NO: 53590 - DNA, 120 bp, synthetic construct
  source 1..120: mol_type = other DNA
tagcagaatgtataactagaacaaccaatacagagaagtgcttaaaggagctgatggagctgaaaaccaaggctcgagaactacgtgaagaatgcagaagcctcaggagctgatgagatc

SEQ ID NO: 53591 - DNA, 120 bp, synthetic construct
  source 1..120: mol_type = other DNA
agagtcaagaaccatcagtgtgctgtattcaggaaacccatctcacgggcagagacacacataggctcaaaataaaaggatggaggaagatctaccaagcaaatggaaaacaaaaaaagg

SEQ ID NO: 53592 - DNA, 120 bp, synthetic construct
  source 1..120: mol_type = other DNA
tgcccacaagagaaagcaggaaagatccaaaattgacaccctaacatcacaattaaaacaactagaaaagcaagagcaaacacattcaaaagctagcagaaggcaagaaataactaaaat

SEQ ID NO: 53593 - DNA, 120 bp, synthetic construct
  source 1..120: mol_type = other DNA
ctctcaatagatgcagaaaaagcctttgacaaaattcaacaacgcttcatgctaaaaactctcaataaattaggtattgatgggacgtatctcaaaataataagagctatctatgacaaa

SEQ ID NO: 53594 - DNA, 120 bp, synthetic construct
  source 1..120: mol_type = other DNA
ggctagccatatgtagaaagctgaaactggatcccttccttacaccttatacaaaaatcaatacaagatggattaaagacttaaacgttagacctaaaaccataaaaaccctagaagaaa

SEQ ID NO: 53595 - DNA, 120 bp, synthetic construct
  source 1..120: mol_type = other DNA
catatgtaactaacgtgcacaatgtgcacatgtaccctaaaacttaaagtataaaacaaaaaaaaaagaaatgctactgatttttgtacactgattttgtatcctgaaactttactgaat

SEQ ID NO: 53596 - DNA, 120 bp, synthetic construct; identical to SEQ ID NO: 12336
  source 1..120: mol_type = other DNA

SEQ ID NO: 53597 - DNA, 120 bp, synthetic construct
  source 1..120: mol_type = other DNA
gttagaaggaaaactaacaacagaaaggacatccacaccaaaaacccatctgtacatcaccatcatcaaagaccaaaagtagataaaaccacaaagatggggaaaaaacagaacagaaaa

SEQ ID NO: 53598 - DNA, 120 bp, synthetic construct
  source 1..120: mol_type = other DNA
agcttcctaagtgaaggagaaataaaatactttacagacaagcaaatgctgagagattctgtcaccaccaggcctgccctaaaagagctcctgaaggaagtgctaaacatggaaaggaac

SEQ ID NO: 53599 - DNA, 120 bp, synthetic construct
  source 1..120: mol_type = other DNA
gacgcattcaaagcagtgtgtagagggaaatttatagcactaaatgcccacaagagaaagcaggaaagatccaaaattgacaccctaacatcacaattaaaacaactagaaaagcaagag

SEQ ID NO: 53600 - DNA, 120 bp, synthetic construct
  source 1..120: mol_type = other DNA
gagccaaagacaaaaaccacatgattatctcaatagatgcagaaaaggcctttgacaaaattcaacaacccttcatgctaaaaactctcaataaattaggtattgatgggacgtatctca

SEQ ID NO: 53601 - DNA, 120 bp, synthetic construct; identical to SEQ ID NO: 53594
  source 1..120: mol_type = other DNA

SEQ ID NO: 53602 - DNA, 120 bp, synthetic construct
  source 1..120: mol_type = other DNA
gggactgttgtggggtggagggaggagggagggatagcactgggagatatacctaatgctagatgacgagttagtgggtgcagcgcaccagcatggcacatgtatacatatgtaactaac

SEQ ID NO: 53603 - DNA, 120 bp, synthetic construct; identical to SEQ ID NO: 12337
  source 1..120: mol_type = other DNA

SEQ ID NO: 53604 - DNA, 120 bp, synthetic construct
  source 1..120: mol_type = other DNA
ggcattaatttttctttcatttttttttttttttgagatagagtctcactcttgtcacccatgctggaatgcaatggcacgatctcagcttactgcaacttccacctcccaggttgaagc

SEQ ID NO: 53605 - DNA, 120 bp, synthetic construct; identical to SEQ ID NO: 25437
  source 1..120: mol_type = other DNA

SEQ ID NO: 53606 - DNA, 120 bp, synthetic construct
  source 1..120: mol_type = other DNA
gggagattcattatctctgcttcagcagcgccgcatttgagcttgttcatgcattcccccgccaaaggtctgcagtgttcaggggataaggtggagaggaaattagtatttgccatttgc

SEQ ID NO: 53607 - DNA, 120 bp, synthetic construct
  source 1..120: mol_type = other DNA
ttacaactaaaataaagaaagtcattccaacgagctgcacgaggaaaaagattaaaaataaacaacctccctcactaacccaccgcagacaccgaaagctcccacattcttccatcaggt

SEQ ID NO: 53608 - DNA, 120 bp, synthetic construct
  source 1..120: mol_type = other DNA
gcagacgctgccagtctgcctttaattagttgcacatcaccccctaacacaaagaaacacaaatccagatgtgtcttggcagctcccaattacaactttaatacttgtaaacaaactgtt

SEQ ID NO: 53609 - DNA, 120 bp, synthetic construct
  source 1..120: mol_type = other DNA
atgagtctccctccttccagctcagccagttagctggagcctacaggaggcattgggccctgcagccatgctctggggccaagaacccattaccccccacctcctcctcggtactcccca

SEQ ID NO: 53610 - DNA, 120 bp, synthetic construct; identical to SEQ ID NO: 33754
  source 1..120: mol_type = other DNA

SEQ ID NO: 53611 - DNA, 120 bp, synthetic construct; identical to SEQ ID NO: 33755
  source 1..120: mol_type = other DNA

SEQ ID NO: 53612 - DNA, 120 bp, synthetic construct; identical to SEQ ID NO: 33756
  source 1..120: mol_type = other DNA

SEQ ID NO: 53613 - DNA, 120 bp, synthetic construct; identical to SEQ ID NO: 34136
  source 1..120: mol_type = other DNA

SEQ ID NO: 53614 - DNA, 120 bp, synthetic construct; identical to SEQ ID NO: 34126
  source 1..120: mol_type = other DNA

SEQ ID NO: 53615 - DNA, 120 bp, synthetic construct; identical to SEQ ID NO: 34135
  source 1..120: mol_type = other DNA

SEQ ID NO: 53616 - DNA, 120 bp, synthetic construct
  source 1..120: mol_type = other DNA
cagtgagggggaccatcacgcacgtggtgggccaatcacaggcctcagacctggaaacgaacgctggtggggacctaccccatcggaatccaacaccttccctgagagggttggcttgat

SEQ ID NO: 53617 - DNA, 120 bp, synthetic construct
  source 1..120: mol_type = other DNA
attgatttgaaaatggccagctggtttccagggcaagtgtggatgctaggcctggctgttcttggatggttcccgtgaaataccgtttcaccacccccaaggccaacaggtttttgtgga

SEQ ID NO: 53618 - DNA, 120 bp, synthetic construct; identical to SEQ ID NO: 34127
  source 1..120: mol_type = other DNA

SEQ ID NO: 53619 - DNA, 120 bp, synthetic construct; identical to SEQ ID NO: 34128
  source 1..120: mol_type = other DNA

SEQ ID NO: 53620 - DNA, 120 bp, synthetic construct
  source 1..120: mol_type = other DNA
gaaggcagggctggcagctggtttggatcgggtgatgccttaaagtgtgggctgcaaagctggggcatctaggctcatcaacttcctgattcctccttccctagctgttgcccaacccac

SEQ ID NO: 53621 - DNA, 120 bp, synthetic construct
  source 1..120: mol_type = other DNA
acgactctgattccgcagatgagagcagcgacttaccactgatgaaggtaggcatttgccgcaacgaaggaagccaggccaagcccggcagccccaagaagcgagcagacacatccagac

SEQ ID NO: 53622 - DNA, 120 bp, synthetic construct
  source 1..120: mol_type = other DNA
acccagtcaaatgacgggcatggaggcaaaccaagagcctgtgtcccgattggttaaagctcaggcacctcgccccacaaagggcgtgctggttggcagacggggaccaatgagaaggct

SEQ ID NO: 53623 - DNA, 120 bp, synthetic construct; identical to SEQ ID NO: 34129
  source 1..120: mol_type = other DNA

SEQ ID NO: 53624 - DNA, 120 bp, synthetic construct; identical to SEQ ID NO: 34130
  source 1..120: mol_type = other DNA

SEQ ID NO: 53625 - DNA, 120 bp, synthetic construct; identical to SEQ ID NO: 34131
  source 1..120: mol_type = other DNA

SEQ ID NO: 53626 - DNA, 120 bp, synthetic construct; identical to SEQ ID NO: 34132
  source 1..120: mol_type = other DNA

SEQ ID NO: 53627 - DNA, 120 bp, synthetic construct; identical to SEQ ID NO: 34133
  source 1..120: mol_type = other DNA

SEQ ID NO: 53628 - DNA, 120 bp, synthetic construct
  source 1..120: mol_type = other DNA
ttccatattcagaccaccttctgcacaataatggggccataacatgtacaccctaggcccatggtacaccgcatggtcgggcggagccttctggttctaggggatgtaagtgcagaatcc

SEQ ID NO: 53629 - DNA, 120 bp, synthetic construct
  source 1..120: mol_type = other DNA
atgctcacgcgtgcacatgtgcgcgcgcgcgcgtgcacatgtgcgcgcgcgcgcgcgcacacacacacacacacacacacacacacgctaaccttgaatggtatctgcatttctattgtt

SEQ ID NO: 53630 - DNA, 120 bp, synthetic construct; identical to SEQ ID NO: 34131
  source 1..120: mol_type = other DNA

SEQ ID NO: 53631 - DNA, 120 bp, synthetic construct
  source 1..120: mol_type = other DNA
tttctgctggtgcggggggcgggggtgggctgtaggtacaggcggcgtcactggaactgactttcctttggggaagagaaccaaggaaagcctggccctggagccttctgtgcctttcca

SEQ ID NO: 53632 - DNA, 120 bp, synthetic construct; identical to SEQ ID NO: 34134
  source 1..120: mol_type = other DNA

SEQ ID NO: 53633 - DNA, 120 bp, synthetic construct
  source 1..120: mol_type = other DNA
ggagccagcctttttgccaccctccaggtcgaaaccggccccacaaacggacaccttgtcgggggagctcatggcgccagtccgggcagcctgggctgcggggagacggtcgtcctggta

SEQ ID NO: 53634 - DNA, 120 bp, synthetic construct
  source 1..120: mol_type = other DNA
ggtttcttcccagggctgctgtgcttaggcttttggggtttcttggacatcccctgtggccgcacaccagagaatggcgggaaggtggccggctccgggggagcggctgagagtctctct

SEQ ID NO: 53635 - DNA, 120 bp, synthetic construct
  source 1..120: mol_type = other DNA
tcatgtgcacctgtggccccctagcattgtgactccaggttggactccagcagtgcggcagccacagccaggccctgggagggcccatgtggctgagcaggacttaacagaaaagggctc

SEQ ID NO: 53636 - DNA, 120 bp, synthetic construct
  source 1..120: mol_type = other DNA
catggtgtgtgcaacactcacttcaaaggtcctggaacttgtcagtgaggaactgcatggccgctgaaagagagaggcagaaatggacactccagacccagggaaacagaaacccacgcc

SEQ ID NO: 53637 - DNA, 120 bp, synthetic construct
  source 1..120: mol_type = other DNA
cttccgcactccaggtatcttccctttggctcagcttcccaccaggatgtggtttctgtctccacctggctactgaagctaaggaggagatctgacagaatttggtaactaaggttcaaa

SEQ ID NO: 53638 - DNA, 120 bp, synthetic construct
  source 1..120: mol_type = other DNA
tgtcttggttagcgggtgtcgtggcaccctcccacgggagctccccacttctagatgaggcaccaaccagcgactctgaggtattaccactgcacccacacatgggagtgctgagacatc

SEQ ID NO: 53639 - DNA, 120 bp, synthetic construct; identical to SEQ ID NO: 34135
  source 1..120: mol_type = other DNA

SEQ ID NO: 53640 - DNA, 120 bp, synthetic construct
  source 1..120: mol_type = other DNA
ctaaaaagtcaggactattgggctataacttacacagaggtctgtgagatctcgtaaatgcgtatggctgtaaaaacaccagcacaatatatatagatatagagcatcgccatcccccgc

SEQ ID NO: 53641 - DNA, 120 bp, synthetic construct; identical to SEQ ID NO: 34136
  source 1..120: mol_type = other DNA

SEQ ID NO: 53642 - DNA, 120 bp, synthetic construct; identical to SEQ ID NO: 33601
  source 1..120: mol_type = other DNA

SEQ ID NO: 53643 - DNA, 120 bp, synthetic construct
  source 1..120: mol_type = other DNA
attatcctcattttaaaaaagactgagggccgggtgctgtggctcacgcttgtaatcctaacactttgggaggccgaggcaggcggatcacttgaggtcaggagtttgagaccagcctgg

SEQ ID NO: 53644 - DNA, 120 bp, synthetic construct; identical to SEQ ID NO: 18394
  source 1..120: mol_type = other DNA

SEQ ID NO: 53645 - DNA, 120 bp, synthetic construct; identical to SEQ ID NO: 18395
  source 1..120: mol_type = other DNA

SEQ ID NO: 53646 - DNA, 120 bp, synthetic construct; identical to SEQ ID NO: 23862
  source 1..120: mol_type = other DNA

SEQ ID NO: 53647 - DNA, 120 bp, synthetic construct
  source 1..120: mol_type = other DNA
gagatcacaccattgcactatagcctgggcaacgagagcaaaactccatctcaaaaacaaacaaacaaacaaaaaatcatatcgcaaggttaagtgtggtctcatctgggaggtggtgat

SEQ ID NO: 53648 - DNA, 120 bp, synthetic construct
  source 1..120: mol_type = other DNA
ggatggtctcaatctcctgaccttgtgatccgcctgtctcagcctcccaaagtgctgggattacaggtgtgagcccagccacgcccggccaattttttgtatttttagtagagacagagt

SEQ ID NO: 53649 - DNA, 120 bp, synthetic construct; identical to SEQ ID NO: 23863
  source 1..120: mol_type = other DNA

SEQ ID NO: 53650 - DNA, 120 bp, synthetic construct; identical to SEQ ID NO: 23864
  source 1..120: mol_type = other DNA

SEQ ID NO: 53651 - DNA, 120 bp, synthetic construct; identical to SEQ ID NO: 28117
  source 1..120: mol_type = other DNA

SEQ ID NO: 53652 - DNA, 120 bp, synthetic construct
  source 1..120: mol_type = other DNA
acatttttatgtttttatggtagcgtttttatggttttaaacatttaaagacttaaaaacatttaagtctttaatccatcttgaattaatttttgtgtaagatgtaaggaaggggtccag

SEQ ID NO: 53653 - DNA, 120 bp, synthetic construct
  source 1..120: mol_type = other DNA
ttcctaattgaataccctttatttccttctcctgcctaattgccctggccaggacttccaacactatgttgaataggagtggtgagagagggcgtccctgtgttgtgccagttttcaaag

SEQ ID NO: 53654 - DNA, 120 bp, synthetic construct; identical to SEQ ID NO: 28118
  source 1..120: mol_type = other DNA

SEQ ID NO: 53655 - DNA, 120 bp, synthetic construct; identical to SEQ ID NO: 18663
  source 1..120: mol_type = other DNA

SEQ ID NO: 53656 - DNA, 120 bp, synthetic construct
  source 1..120: mol_type = other DNA
aggagtttgagaccagcctgggcaacataacgagacctcattactaaagaaaacaaaagcaaaacacagtatacgctattcacagtatttactagacacatctgctgtgtgaggctccat

SEQ ID NO: 53657 - DNA, 120 bp, synthetic construct; identical to SEQ ID NO: 18664
  source 1..120: mol_type = other DNA

SEQ ID NO: 53658 - DNA, 120 bp, synthetic construct
  source 1..120: mol_type = other DNA
gaggtggaggttgcagtaagccgagattgtgccctgcactccatcctaggtgatagaggagactccatctcaaaaaaaaaaaaaaaaagaaaagtcaacttcaatccttgctagaaagaa

SEQ ID NO: 53659 - DNA, 120 bp, synthetic construct; identical to SEQ ID NO: 18519
  source 1..120: mol_type = other DNA

SEQ ID NO: 53660 - DNA, 120 bp, synthetic construct
  source 1..120: mol_type = other DNA
ccttttcattatttagtttttcagcttaagtgttctctttagagaagccttccctgactaccttactttatgttaccctctcatccaccactatgcagtcaccctccgaacactgcatca

SEQ ID NO: 53661 - DNA, 120 bp, synthetic construct
  source 1..120: mol_type = other DNA
atgtatattatgcagtatacatcatatgtatattatgcagtatacatcatatgtatattatgcagtatacatcatatgtatattatgcagtatacaccatatgtatattatgcagtatac

SEQ ID NO: 53662 - DNA, 120 bp, synthetic construct
  source 1..120: mol_type = other DNA
cccattctttccccctgagtccccaaagtccaatgtattattcttacacctttgaatcctcatagcttagctcctacatataagtgagaacatacagtgtttggctttccattcctgagt

SEQ ID NO: 53663 - DNA, 120 bp, synthetic construct
  source 1..120: mol_type = other DNA
gttcaaaatctgtaggccaggtcagtaggttggaacctcttgggcaggaattgatgccgcagtcttgaggtagaatttcttcttctctagaaaacattaatttggcttttaagccctttc

SEQ ID NO: 53664 - DNA, 120 bp, synthetic construct
  source 1..120: mol_type = other DNA
gtgtgattgcgtgtgctagctcaggtctctcttcctcttcttataaagtcaccagtttccatgacagcccattaatccaggaatggattaatatattaatgggggcaaaacccttcatag

SEQ ID NO: 53665 - DNA, 120 bp, synthetic construct
  source 1..120: mol_type = other DNA
ggtttaacttccgtccacttgacctagaactcctctgcttatacagatcaaataaggatttagtggactccatacctatttatttggcatctaggaacaccgtgatcaactagccaatgc

SEQ ID NO: 53666 - DNA, 120 bp, synthetic construct
  source 1..120: mol_type = other DNA
tattttccagccagaggtggacatttccaaggacaactcttaaggaagaagagagcccaacagtccctctctatcagtaaaagggctgagacatgtgagcagggctagactgtgctcttt

SEQ ID NO: 53667 - DNA, 120 bp, synthetic construct
  source 1..120: mol_type = other DNA
gcagaacttaaagatttgggaaattgccagtctgtccatattgcaaaatatgagaaagcatgttctggagacagcaccaagggtgtggccaagggaccatttgataagattagtatggat

SEQ ID NO: 53668 - DNA, 120 bp, synthetic construct
  source 1..120: mol_type = other DNA
cctgtttctcctttctggaatgggaatgtttatcctatgcctctccaaccactgtattttggaagcacataacatgtttgatttcataggttcgcagcaagaacagttggactcaggata

SEQ ID NO: 53669 - DNA, 120 bp, synthetic construct
  source 1..120: mol_type = other DNA
tctgagtccttgttggcccaatcctgtctctcctgttgccaaaaacatttctggaaccacaccccaggttcccaccccacatgactcttccatctcctgacagcatcctcgggaccttcc

SEQ ID NO: 53670 - DNA, 120 bp, synthetic construct
  source 1..120: mol_type = other DNA
ctcaatatgaagctgtagaccatctttatgtcctcttgggttagtgtctccacctggaggtgtttcagcacctaggacagaagccgggtttccatctggcttggtccgcagcccatgcac

SEQ ID NO: 53671 - DNA, 120 bp, synthetic construct
  source 1..120: mol_type = other DNA
tcaccactcgctccaaaaacagacccacagggtagagcctggaggtgggggcatccatagaaagggtcctcagctggatggggcttcctgtgctctctgcacccttcctaccgaagaccc

SEQ ID NO: 53672 - DNA, 120 bp, synthetic construct
  source 1..120: mol_type = other DNA
tggccttgatggcatctggcgacagttccgcattcaacaggagctccgccacgatgctggtgtactgttgagggcggctgaaggccagttcctgatagattttctggatacagttgtcgc

SEQ ID NO: 53673 - DNA, 120 bp, synthetic construct
  source 1..120: mol_type = other DNA
cacaggccctgacccgtatcccatcctccttgtccccaaggggaatcggcctgcagggagctgactgggggccctggtagaagctgcctgtttgtgttcgagctgcagccttttctcaga

SEQ ID NO: 53674 - DNA, 120 bp, synthetic construct
  source 1..120: mol_type = other DNA
attcccaaaagcgttctcctcctgccatggagtgggggctgtcgccactgtgacatcctcgtccagtccttcccccgtcctaatgacaacattcctgcaggtgactgactccaagcatca

SEQ ID NO: 53675 - DNA, 120 bp, synthetic construct
  source 1..120: mol_type = other DNA
accctcccctctcctggattagcggcttcacagctaaagccctcttgctgactgcccggaacctcttaacttcagtgcctctgagtcctgccctctctgcagcgagctgggatttgctct

SEQ ID NO: 53676 - DNA, 120 bp, synthetic construct
  source 1..120: mol_type = other DNA
agatggatggggcccttatcttatccaagagccttggattattcatctccttgcaaggtttatagcaaaaaacgagggaatgagttggcatgaattgtattaaaccacatgtattttttt

SEQ ID NO: 53677 - DNA, 120 bp, synthetic construct
  source 1..120: mol_type = other DNA
tggcaataatcaatagattaccaaccaaaaagagtccatgaccagatggattcacagccgaattataccagacgtacaaggaggaactggtaccattccttctgaaactattccaatcaa

SEQ ID NO: 53678 - DNA, 120 bp, synthetic construct
  source 1..120: mol_type = other DNA
taaaatacttaggaatccaacttacaagggatgcgaaggatctctttaaggagaactacaaaccactgctcaatgaaataaaagaggatacaaacaaatggaagaacattccatgctcat

SEQ ID NO: 53679 - DNA, 120 bp, synthetic construct
  source 1..120: mol_type = other DNA
ttttgcaacctactatctgacaaagggctaatatccagaatttacaatgaactcaaacaaatttacaagaaaaaaacaaacaaccccatcaaaaagtgggcaaaggatatgaacagacac

SEQ ID NO: 53680 - DNA, 120 bp, synthetic construct
  source 1..120: mol_type = other DNA
atacatcaagtctactctcttagagattttcaagtccgtggttattaaccacggttccatgtcacatcatcaatctcttggcctttttccccctggctaactgaaactttgtatcctttc

SEQ ID NO: 53681 - DNA, 120 bp, synthetic construct
  source 1..120: mol_type = other DNA
actgtcatcttcccccttttttatagaggccattctaaccagtgtcaggtgatacttcttttttttttttttttttcagacagagtctcactctgttgcccaggctggagtgcagtggcg

SEQ ID NO: 53682 - DNA, 120 bp, synthetic construct
  source 1..120: mol_type = other DNA
gttggccccttcaaggtaaagcactctgggaatctcttgcctcacagatactcaaaatataaaacaaaatcacctgtctccacatacactaacaccaggacacttctccttaacttacaa

SEQ ID NO: 53683 - DNA, 120 bp, synthetic construct
  source 1..120: mol_type = other DNA
ctggagctcagcctcaggctcattataaaaccatagagctataaacacaagacccacatcaactcaagtaggtatccactaaaaagaaaatgttacttgcacatcccagatggcatcact

SEQ ID NO: 53684 - DNA, 120 bp, synthetic construct
  source 1..120: mol_type = other DNA
tgggtggcttaaacaacagaaagttgttttttcacaattccagaggctagaagacttagatgaaggtgttcggggggatggtttctgctcaagcttctcttcttggtttattgaccaaat

SEQ ID NO: 53685 - DNA, 120 bp, synthetic construct
  source 1..120: mol_type = other DNA
gaatagagaacccagaaataaacccaaatagttacagccaactgaccttcaacaaagcagacaaaaacataaagtggggaaagggcatcctattccacaaatggtgctgggataattggc

SEQ ID NO: 53686 - DNA, 120 bp, synthetic construct
  source 1..120: mol_type = other DNA
tgatccagcaatccacccagaagaaaagaagtcattatacaaaaaagacacttgcacacgcatgtttatagcaacacagtttgcaagtgcaaaaacgtggaaccaacccaaacacccatc

SEQ ID NO: 53687 - DNA, 120 bp, synthetic construct
  source 1..120: mol_type = other DNA
tatttttccaaggtttattttaggatcccatgatctagtgctgactagaggagttggatgggtatctgtgagagccccataaacaaggaagccatctctgaggtctgtgcaccttgttgc

SEQ ID NO: 53688 - DNA, 120 bp, synthetic construct
  source 1..120: mol_type = other DNA
gtgagactaggcaggaaggcaagggacaaaatcacagcacccttgcatggcctcatgaggagcctggagccagcgctgggagtagagtcaagctgtccagagggcactgcttgctggaga

SEQ ID NO: 53689 - DNA, 120 bp, synthetic construct
  source 1..120: mol_type = other DNA
gtctagccagcgctggggattataccgctcaggcctcgggaacaaggcggcattgcgacccagcgagtagaggaaaacctgtaccaatgtctgcggacggtgcagagcagggatcaggga

SEQ ID NO: 53690 - DNA, 120 bp, synthetic construct
  source 1..120: mol_type = other DNA
gggtggagacatccatgccctgagcaaaaacagagccctgggaccccggatctgaaaccttgatgaccacttgggccagattccctgacttcttcagggaaaggtgacccccatctccac

SEQ ID NO: 53691 - DNA, 120 bp, synthetic construct
  source 1..120: mol_type = other DNA
cccgacccctccctgtggcctccattccccactgggtggtggagaaggagaaattgggcccccatggtgtcccttccccatagcactgcccgggtccctggcctcaccgtactggaagat

SEQ ID NO: 53692 - DNA, 120 bp, synthetic construct
  source 1..120: mol_type = other DNA
agagcccctggctgccctctcctccccacccttccccgccctgggcacagtgcctctggggcagcagcctctgcctgtctctgtgaagcatctatatcttctgcaggacagaaaccaagc

SEQ ID NO: 53693 - DNA, 120 bp, synthetic construct
  source 1..120: mol_type = other DNA
cttctgagaacaacggaaccaccagccacctgcgtccccacctgcctcctgccccggactgtccccatcaggaaggtttgccaggactgcagggaccctgagcgccctgagggaggctgt

SEQ ID NO: 53694 - DNA, 120 bp, synthetic construct
  source 1..120: mol_type = other DNA
tcaactttagtgcttctgagtcctgccctctctgcagtgagctggggttttctctgcactatcccctgccctggcagcaccacagaccagcatgtgctgcactccttccccatcctccaa

SEQ ID NO: 53695 - DNA, 120 bp, synthetic construct
  source 1..120: mol_type = other DNA
gtctcctcctggtggtcaacatgctgtgggttttgacaaatgtatgtaatttgtatccctccttgcaggatcctaggagtattttcactgtcttaaaaagaggaaaagaaaacctgtgct

SEQ ID NO: 53696 - DNA, 120 bp, synthetic construct
  source 1..120: mol_type = other DNA
attatttatttatttatttatttatttatttttgagacagagtctcactctgtcgcccaggctagagtgcaatggtgtgatctcggctcactgcgacctctgtctcccgggttcaagcaa

SEQ ID NO: 53697 - DNA, 120 bp, synthetic construct
  source 1..120: mol_type = other DNA
atgtccccgttatgtgtatgttacaccagcagtagttgtttcacagtcctcagtattctgttccgttttcttctttttgcctttcagcttccagtttccattgacatattctcaagctcg

SEQ ID NO: 53698 - DNA, 120 bp, synthetic construct
  source 1..120: mol_type = other DNA
atgctctggtgtatttcataatgaccattctttttctcttgctgcctgacatagacgagcttttctgatatttgcggtgagcacctcgtagagcttctggaggtgaaactcacataagtg

SEQ ID NO: 53699 - DNA, 120 bp, synthetic construct
  source 1..120: mol_type = other DNA
catcccccttttctgtcctaaaacgtgttgtccgtagttcagattcatagagccataaggggcctgtgacgactgagttgagggccgttctcagggtccccactgtcccatgaactccct

SEQ ID NO: 53700 - DNA, 120 bp, synthetic construct
  source 1..120: mol_type = other DNA
tgtgtaccgccacaccagccgaggccagagtggggctggactgccctgcagtagctgtggcccggggccagcctagaggaaggggccctttcatacccacggctcacacagctgcatgtc

SEQ ID NO: 53701 - DNA, 120 bp, synthetic construct; identical to SEQ ID NO: 15304
  source 1..120: mol_type = other DNA

SEQ ID NO: 53702 - DNA, 120 bp, synthetic construct; identical to SEQ ID NO: 15305
  source 1..120: mol_type = other DNA

SEQ ID NO: 53703 - DNA, 120 bp, synthetic construct
  source 1..120: mol_type = other DNA
actcactgctcaatggtgcccaggctggggtgcagtggcgtaatctcggctggctacaacctccacctcccagccgcctgccttggcctcccaatgtgccaagactgcagcctctgcccg

SEQ ID NO: 53704 - DNA, 120 bp, synthetic construct; identical to SEQ ID NO: 15306
  source 1..120: mol_type = other DNA

SEQ ID NO: 53705 - DNA, 120 bp, synthetic construct
  source 1..120: mol_type = other DNA
gtacaaacattaaaaatagacattttattacaagagtgtagagaagggagaccaatagaaggtaattgaaatacccccccctcactccagccctagtcctggtgcctggatatgtgcact

SEQ ID NO: 53706 - DNA, 120 bp, synthetic construct
  source 1..120: mol_type = other DNA
ttccgcttgcccatgccaaagataatcaccttctcacttaacaccttgtcgatagcaccatcaggggtgagaaaccgttcaggtaggaactcagatgggttgacccatagcttcctgtaa

SEQ ID NO: 53707 - DNA, 120 bp, synthetic construct
  source 1..120: mol_type = other DNA
acacaatggggtaaccataccagctccaaagaggtccaagacgatgttaatgatcttctcatctgacagctggacattggcgttctcatccagctgcttctcctgacagtgctcaatcag

SEQ ID NO: 53708 - DNA, 120 bp, synthetic construct
  source 1..120: mol_type = other DNA
gttgactaggctaagcagttcttggtggttgtggtcatagcgccggccaaagcaaatggcacagatgacattggtcactgataccaccacatacctgtaggggttaaagtgcccaggccc

SEQ ID NO: 53709 - DNA, 120 bp, synthetic construct
  source 1..120: mol_type = other DNA
aaataaacacataatcaaggtgtatcaccccgagtcctacccaccacacttaggaaaatcatgttctcaggggaattagggatcatctgatcctttagcctcatttaacatttgggggaa

SEQ ID NO: 53710 - DNA, 120 bp, synthetic construct
  source 1..120: mol_type = other DNA
gagatgtgactggtgagtttttagggactggtatttccagctccctgcagttggcaatctgtcaccctgattgtctcccagcaaaggacaaagaagatggtcaatgagataggaaaggcc

SEQ ID NO: 53711 - DNA, 120 bp, synthetic construct
  source 1..120: mol_type = other DNA
ccagccattacaaccctgccaatctcaagcacctgcctctacaggtacctttcttgggaccaatttacaatctctgggatccccaactatagaacctggaagctagtggggacagaaaga

SEQ ID NO: 53712 - DNA, 120 bp, synthetic construct
  source 1..120: mol_type = other DNA
agggtttgaggcctcgggtccccaaaggcctgaaaagtccaccagagccatggggctggcccttgctcgggcatgtgctgaccctggggaagaacccgcacctggcactgtcaaggatga

SEQ ID NO: 53713 - DNA, 120 bp, synthetic construct
  source 1..120: mol_type = other DNA
tatgagtgagaaagctttcattctgcagaaacctaaaccccaacagaggctaatccccagctctggtgtcacgttgcttccctgtgttcacactaaccttttccttctttgaaattggac

SEQ ID NO: 53714 - DNA, 120 bp, synthetic construct
  source 1..120: mol_type = other DNA
cagtagtgcctgcccttgcctagaagatgtgggaggttagtggggtcgcagacttgtgaatagacagtcttacataagagtgacatggggtataagaggggataattcatggggcagtta

SEQ ID NO: 53715 - DNA, 120 bp, synthetic construct
  source 1..120: mol_type = other DNA
tttatctgaaattgcctgcttcttggctccagagaacagccaagtgcgcagccaggcgcaaagagaagtttagtaaatacttgctgaagttaaagaacaggacgcaaggaagagggagga

SEQ ID NO: 53716 - DNA, 120 bp, synthetic construct
  source 1..120: mol_type = other DNA
aaaaaaaaaaaaaaaaaatcaaccaagacgtttgttacaggtgatggttcccccaggattctactgtggtatctaaggtggggtacctcaggcgattctgatgtgaatggctcagagacc

SEQ ID NO: 53717 - DNA, 120 bp, synthetic construct
  source 1..120: mol_type = other DNA
tgagctgagatcgcaccactgtactccagcctgggtgataggagccggagggtgtctcaaaaaaaaaaaaagaaagaaaagaaaaagaaataagcatcaaagttcagtttggttccttcc

SEQ ID NO: 53718 - DNA, 120 bp, synthetic construct
  source 1..120: mol_type = other DNA
ctgaccccaagttatccacctgccttggcttcccaaagtcctgggattacaggtgtgagccaccacatccagcctaacttacattcttaaagtgtcgaatgacttctagtgtagaattgt

SEQ ID NO: 53719 - DNA, 120 bp, synthetic construct
  source 1..120: mol_type = other DNA
cacatttccccctagcctgcctcccctgcctcaccagccctggcaactgctaatctactttctgtgtctatggatttgccttctctaaacatttcatataaatggaattacacaatgagt

SEQ ID NO: 53720 - DNA, 120 bp, synthetic construct
  source 1..120: mol_type = other DNA
tattaaatttaaaaatatccattaaaaaattttttttttgccggtctcagtggctcacgcctataatcccagcactttggggggccgacgcaggtggatcacaaggtcaggagttcaaga

SEQ ID NO: 53721 - DNA, 120 bp, synthetic construct; identical to SEQ ID NO: 21420
  source 1..120: mol_type = other DNA

SEQ ID NO: 53722 - DNA, 120 bp, synthetic construct
  source 1..120: mol_type = other DNA
tatataaatgaagtaagtactgatattaaaaaagaaaaagagggccaggcatggtggctcatgcctgtaatcccagcactttaggaggccaagatgggtggatcacctgaagtcaggaat

SEQ ID NO: 53723 - DNA, 120 bp, synthetic construct; identical to SEQ ID NO: 21421
  source 1..120: mol_type = other DNA

SEQ ID NO: 53724 - DNA, 120 bp, synthetic construct
  source 1..120: mol_type = other DNA
gagccgcttctgtttcttctcttccctctagccaccacgccccttcctttccgccatcctgcccccagtcttagctgcgcccctctcccaagcccggtcttggccctgccctttccctgg

SEQ ID NO: 53725 - DNA, 120 bp, synthetic construct
  source 1..120: mol_type = other DNA
agaggggaggagggtgagggaggcccctgctggtgtgagccgtggcctggcagcaaacagtggtctcttaccgatggaaaagggcacaaaagcatcactcttcttaaactgccccttctc

SEQ ID NO: 53726 - DNA, 120 bp, synthetic construct
  source 1..120: mol_type = other DNA
ggaaatgatagtccgaataggcaaaatggggtggatgatatggctccgcctatgagacggaagtagagcattcataacagaacagacatcagccattcgcattgttggagtaggatcctg

SEQ ID NO: 53727 - DNA, 120 bp, synthetic construct
  source 1..120: mol_type = other DNA
ccgtgatcttggctcattgcaacctctgccccccttcgcgccaccatgcccaactaatttttggatttttagtagagacggggtttgaccatgttggccaggctggtctcgaactcctga

SEQ ID NO: 53728 - DNA, 120 bp, synthetic construct
  source 1..120: mol_type = other DNA
tgggagcacctctgtaaggtgtgtgattggaaagggttggggaacacttatttgtgtgtcagggaacaatctgtctagatatttatgtgtttaaggtgttggttagggcagctgtccatg

SEQ ID NO: 53729 - DNA, 120 bp, synthetic construct; identical to SEQ ID NO: 19772
  source 1..120: mol_type = other DNA

SEQ ID NO: 53730 - DNA, 120 bp, synthetic construct; identical to SEQ ID NO: 19773
  source 1..120: mol_type = other DNA

SEQ ID NO: 53731 - DNA, 120 bp, synthetic construct
  source 1..120: mol_type = other DNA
gccgtgatcttggctcattgcaacctctgccccccttcgcgccaccacgtgcagctaatttttggatttttagtagagacagggtttgaccatgttggccaggctggtcttgaactcctg

SEQ ID NO: 53732 - DNA, 120 bp, synthetic construct; identical to SEQ ID NO: 53728
  source 1..120: mol_type = other DNA

SEQ ID NO: 53733 - DNA, 120 bp, synthetic construct
  source 1..120: mol_type = other DNA
cacgggcatggttggtgagtacggagcatggtgaagcatgatgggtggtattattaggagaaaagcatcaaattaaatttagcagagtttatttgagcaaagaagtgactcatgagttgg

SEQ ID NO: 53734 - DNA, 120 bp, synthetic construct
  source 1..120: mol_type = other DNA
accttttcttcatgtttttgttgttcccactgtaatgagcccactggatgtacaaagaatggctgcatatgagcatttaagactctttttttttctgagacagggcctcactctgtcagc

SEQ ID NO: 53735 - DNA, 120 bp, synthetic construct
  source 1..120: mol_type = other DNA
actcacagttccacatggctggggaggccccaggaaaatacaattcatggcaaaaggtgaatgagaagcaggaaacttacaatcatgatggaaggtgaaggagaagcaagtaccttcttc

SEQ ID NO: 53736 - DNA, 120 bp, synthetic construct
  source 1..120: mol_type = other DNA
gttggaaaagagggtcacctactggcattagagcagagatcagttagatttgtttacccataagtctgcatagctcctgaacaaggtgggaaacttacttttttgtggtctttttctagc

SEQ ID NO: 53737 - DNA, 120 bp, synthetic construct
  source 1..120: mol_type = other DNA
tctcttccaatggagttcaaggacagtttgtctggtgtcatttccaaagggcccaacctctaaattctagatcatgaaaggtctggttgtcatcaaccgatgtgtcatcaatgactcatt

SEQ ID NO: 53738 - DNA, 120 bp, synthetic construct
  source 1..120: mol_type = other DNA
ctactattaggttatagttgatttcattaattccttcttcaataccttatttaactgttttaccacttgtctagtgaaacaagtacctctgtcactggagagttctccaggaatgcccag

SEQ ID NO: 53739 - DNA, 120 bp, synthetic construct
  source 1..120: mol_type = other DNA
gggtagggagtgctcatcaacagtacacatagtgccctataccggtaactgccactggctcagtatttacctgggttatcactgcttaccatgcctgattttatgattaattatctactt

SEQ ID NO: 53740 - DNA, 120 bp, synthetic construct; identical to SEQ ID NO: 19775
  source 1..120: mol_type = other DNA

SEQ ID NO: 53741 - DNA, 120 bp, synthetic construct
  source 1..120: mol_type = other DNA
cataaatgtcttcttttgaaaagtgtctgttcatgtctttcgcccactttttgatggggttgtttttttcttgtaaatttgtttgagttcattgtagattctggatattagccctttgtc

SEQ ID NO: 53742 - DNA, 120 bp, synthetic construct; identical to SEQ ID NO: 19776
  source 1..120: mol_type = other DNA

SEQ ID NO: 53743 - DNA, 120 bp, synthetic construct
  source 1..120: mol_type = other DNA
ctccatctcaaaaaaaacccaaacagaaacaaacaaacaaacaaaattagtgatagtgatgctcagcctggggaaagcatttgtccagtggcacacaactgggaaaaggggaagctgaga

SEQ ID NO: 53744 - DNA, 120 bp, synthetic construct
  source 1..120: mol_type = other DNA
taaagcagggggatatttcagacagtgatgagaactacgttagattgagtggttaggggaagactgtcttgtttttttttctgagcagagacaatgaaagattcaggtggaaggcactag

SEQ ID NO: 53745 - DNA, 120 bp, synthetic construct
  source 1..120: mol_type = other DNA
actcaacattatgcctgtgagtttcagccacgttgtcgcctgtagctgtggtttgttcttttttgttgctgtatactagtctattgtgagaaccctcactgattgtctatatctatattg

SEQ ID NO: 53746 - DNA, 120 bp, synthetic construct
  source 1..120: mol_type = other DNA
cttgtggacaaggctgaggccttctctggccggggaaaaatcgccatggtcgacccattcttccggggatatggtgagagcctcagaggcactgggagggggcgggtggggggtgcatca

SEQ ID NO: 53747 - DNA, 120 bp, synthetic construct
  source 1..120: mol_type = other DNA
gagctgtgattgtaccactgcactccagcctggacaacagagcaagatcctgtctcaaacaaacaaacaaaccctcaaagacatataatttcatggatcaattgtgtctgtcaaagtcaa

SEQ ID NO: 53748 - DNA, 120 bp, synthetic construct
  source 1..120: mol_type = other DNA
caagtacagaataattcccagaagactggagagccctagatgtggaaagaagagattaagggggagtaataggtaggggtggaaagatggttttttatttgttttaaattagagacgggg

SEQ ID NO: 53749 - DNA, 120 bp, synthetic construct
  source 1..120: mol_type = other DNA
aggagagacggtgagacagggatagagacactgagagagagaatgaggcgtgatggggaggcagaaatagagtcagagagagactgagagaaggaagatgagcaaaaacaagacaaagaa

SEQ ID NO: 53750 - DNA, 120 bp, synthetic construct; identical to SEQ ID NO: 19777
  source 1..120: mol_type = other DNA

SEQ ID NO: 53751 - DNA, 120 bp, synthetic construct; identical to SEQ ID NO: 19778
  source 1..120: mol_type = other DNA

SEQ ID NO: 53752 - DNA, 120 bp, synthetic construct; identical to SEQ ID NO: 19779
  source 1..120: mol_type = other DNA

SEQ ID NO: 53753 - DNA, 120 bp, synthetic construct
  source 1..120: mol_type = other DNA
attggctcattcattcattcattcatgcattcatccatccttctacgaactaggtttcactcttatccttccatgagtcaacctttcaattcacccttaatccatccgtgatttccttca

SEQ ID NO: 53754 - DNA, 120 bp, synthetic construct
  source 1..120: mol_type = other DNA
caacctccaaaattgctgggattacaggcatgagccaccatgcctggcctgaaatgcctctttaaaatgagattcattggtcttcttttctgtacagagagagtctacagggagattgaa

SEQ ID NO: 53755 - DNA, 120 bp, synthetic construct
  source 1..120: mol_type = other DNA
cacaaaggacatgctcacaagggcaattattattataattagacataattgtgataagtgctctaaagggagctttgggagcacaaaataggaaatagtagctaatcttgtggtgggtcc

SEQ ID NO: 53756 - DNA, 120 bp, synthetic construct
  source 1..120: mol_type = other DNA
tgggaacatgtgtggtgatggcttgaatgtcaatgtcttctctcaattttgctatctgaagtttctttttttttttttgtcttcagacggagtcttcctgtgttgcccaggctggagtgc

SEQ ID NO: 53757 - DNA, 120 bp, synthetic construct
  source 1..120: mol_type = other DNA
ctgacaggtatagacagagaaaaagacaggagtagggctgccaggggcagaaagaaaggtataacccaagccaaaagggtactgcagccaaagaaattcgaaaggtgtccaaacagacgg

SEQ ID NO: 53758 - DNA, 120 bp, synthetic construct
  source 1..120: mol_type = other DNA
gctcatgcctgtaatcccactttgggaggccaaggcaggtggattatctgaggtcaggagctcgaggctagcctggccaatatgatgataccccatgtctactaaaaatagaagaaatta

SEQ ID NO: 53759 - DNA, 120 bp, synthetic construct
  source 1..120: mol_type = other DNA
gaactcaagtgattcacccaccttagcctcccaaagtgctgggattacaggcgtgagtcaccgtgcccagccatgtatatatataattttaaaaattaagctgaaattcacataacataa

SEQ ID NO: 53760 - DNA, 120 bp, synthetic construct
  source 1..120: mol_type = other DNA
cgtctatcaaaaagcccccttggcccaggttccctgagctgtgggattctgcactggtgctttggattccctgatatgttccttcaaatctgctgagaattaaataaacatctctaaagc

SEQ ID NO: 53761 - DNA, 120 bp, synthetic construct
  source 1..120: mol_type = other DNA
gatttaggtctttgcatgttaaattcagaataacaaactgtcaatagtttgaaatgttgtgttccttctttatttcatagccatttgctagaatttttggctgagggtaaacagtaaggg

SEQ ID NO: 53762 - DNA, 120 bp, synthetic construct
  source 1..120: mol_type = other DNA
cagctcttaaaggtggcatgtctggagttgttcattcctcctggtgggtttctggtctcgctggcttcaggagtgaagttgcagacctttgcggtgagtgttatagctcataaaggtagt

SEQ ID NO: 53763 - DNA, 120 bp, synthetic construct
  source 1..120: mol_type = other DNA
atttcagaagccatttcctgtaaacactgggtggcatctcatactattcctgattggttagtgtaaaaattatactcttcccctaagaaggtgcagagtcctcctttctcagcagtgagg

SEQ ID NO: 53764 - DNA, 120 bp, synthetic construct
  source 1..120: mol_type = other DNA
tatgatcagttggggcttgaagttgtagggtgtaattacactgatggggtagtaggtgcctcaggggcaggcctgataacaggttgcattgcattcatacaggggcttggaaagttaaga

SEQ ID NO: 53765 - DNA, 120 bp, synthetic construct
  source 1..120: mol_type = other DNA
gggatgtccaaaatttaactcaggtgtggcgaatccaagattccattcctgaaccttaacagcagtggggttagagaggattaccgagtatggtccttcccacaaagaggccatagatag

SEQ ID NO: 53766 - DNA, 120 bp, synthetic construct
  source 1..120: mol_type = other DNA
atgggtgaaatctaactgccactcctctccaggatagtgacctattctttgttccccccaaaggggccctatgatggaccaagggattattcttttggcacacctcagaggctttgacta

SEQ ID NO: 53767 - DNA, 120 bp, synthetic construct
  source 1..120: mol_type = other DNA
aagaggtcatctcaggtggcataaatctggactataatttgttggcagtcatgataccttggttccccatcctctgggagaaaagtggcagggttgggggctatgcctgtatgtatttga

SEQ ID NO: 53768 - DNA, 120 bp, synthetic construct
  source 1..120: mol_type = other DNA
aaagttcaagagatctagagtaccctgctggcatgaggcttccgaactgatagctaaaagtaaatcatccacgtactgaaggaacagagtgcctggacctgagaagtggcctagatcttg

SEQ ID NO: 53769 - DNA, 120 bp, synthetic construct
  source 1..120: mol_type = other DNA
tgaggaggtgggagaaatacctggttacaggctgtcccaggatttctcagatggtaacggaccttgaggaccgtcatccaggacaggagattaacactgagaaggccacaccagtgtcca

SEQ ID NO: 53770 - DNA, 120 bp, synthetic construct
  source 1..120: mol_type = other DNA
agagggagaagcggccatgtacccaggttgggccaaatttacctccccctacagcttgaagggggcataactgatagcccggggttttttgtggtcctttggagatttctttgcttattt

SEQ ID NO: 53771 - DNA, 120 bp, synthetic construct
  source 1..120: mol_type = other DNA
gagttggaagtgtgatgccttttgtcctcatttatatgaacaggaaggatagaatttctgaggatccccatatcctagcttcaggaatagtttttgttaggcctgcttgtctgaggaggg

SEQ ID NO: 53772 - DNA, 120 bp, synthetic construct
  source 1..120: mol_type = other DNA
cccagtatttagcccctgaattctaaggaaaaataggacagaacagcaagtgaaagggatccagtggtacttactgcttggcaataggcaaaagtcccttcattgtcaccaaaatgtgtc

SEQ ID NO: 53773 - DNA, 120 bp, synthetic construct
  source 1..120: mol_type = other DNA
atggcttcacctctcagtttagttgtgtacttgtttgtagttggaatttgcaaggcagaataatagggatgaggttagtccatgggtaattattagggcagttgcaccggtaaaacttca

SEQ ID NO: 53774 - DNA, 120 bp, synthetic construct
  source 1..120: mol_type = other DNA
cttagtaaatggacaaaacagtgacttcatttgctgttaactgtatctccttttctagctctcaaaaatctatggccctgtgttcactctgtattttggcctggaacgcatggtggtgct

SEQ ID NO: 53775 - DNA, 120 bp, synthetic construct
  source 1..120: mol_type = other DNA
gacattctacagtttttattgcttaggcatatcttagtgtagttctcatcagcttttatttctctgtaaatacagcattatttaaaaaatagtgttaattatttcttgttactctattga

SEQ ID NO: 53776 - DNA, 120 bp, synthetic construct
  source 1..120: mol_type = other DNA
aatggctagaaatacaacttaaaagggatgtgaaagacctcttcaaggagagctacaaaccactgctcagggaattaagagattacaaaaacaaatggaaaaacgttccatgctcatgaa

SEQ ID NO: 53777 - DNA, 120 bp, synthetic construct
  source 1..120: mol_type = other DNA
agctggagctgcatgtttttattcagtgcaggcacaatgctgaaaacctggagcccatgcaatctgtaggtaattaatatttattgttcccctttcagggaacatcaagaatggatgatc

SEQ ID NO: 53778 - DNA, 120 bp, synthetic construct
  source 1..120: mol_type = other DNA
cttggaaccaacccaaatgcccatcaatgacacactggataaagaaaatgtggcacatatacactgtggactactatgcagccattaaaaagaatgagttcatgtcctttgcagggacat

SEQ ID NO: 53779 - DNA, 120 bp, synthetic construct
  source 1..120: mol_type = other DNA
cctcccaagtagctgggattacaggcacccaccaccacactcgactaatttttgcatccttagcagagatggggttcaccatgttggccaggctggtcttgaactcctgacctcaggtga

SEQ ID NO: 53780 - DNA, 120 bp, synthetic construct
  source 1..120: mol_type = other DNA
atcaggattgtaagcaccccctggatccaggtaaggccaagttttttgcttcctgagaaaccacttacagtctttttttctgggaaatccaaaattctatattgaccaagccctgaagta

SEQ ID NO: 53781 - DNA, 120 bp, synthetic construct
  source 1..120: mol_type = other DNA
atcaggttgtgcaaactcttttaacctatgctatcatctccaaaatgttaatgtagtaattcataccatcttatatttcaagattgtagagaagaattgttgtaaaaagtaagagaatta

SEQ ID NO: 53782 - DNA, 120 bp, synthetic construct
  source 1..120: mol_type = other DNA
tcaggatataacagatgctgaagaggatgtggaaaaatagaaatgtttttactctgtttgtgggagcgtaaattagttcaatcattgtggaaggcagtgtggcaattcctcaaggatcta

SEQ ID NO: 53783 - DNA, 120 bp, synthetic construct
  source 1..120: mol_type = other DNA
caaccttgtcaaaacccaattgactataaatgtgtgaagggttttttttggggggctctcaattctactccattgatctatgtgtctgtcctaatgcctatagtacaccatcttgaagtc

SEQ ID NO: 53784 - DNA, 120 bp, synthetic construct
  source 1..120: mol_type = other DNA
tcctagtgaatgtaaagtggtatctcattatttatttatttatttatttattttgagacagagtctcactctgttgcctaggctcgagtgcagtagcatgatctcattcaagcaattctc

SEQ ID NO: 53785 - DNA, 120 bp, synthetic construct
  source 1..120: mol_type = other DNA
ttgaagagattctttcctcggactgaatggtctaggcacccttgatgaaagtaaattggccacagatgtttaggtttatttcttgatttcagttttattccattggtcttgatgtctatc

SEQ ID NO: 53786 - DNA, 120 bp, synthetic construct
  source 1..120: mol_type = other DNA
ttagatcactttgaggagtattgccatcttaacaatattaagtcttccaatcctggaacattgaagagttttcaatttatttaggtattagatattcttttttcctcttttgcaagggtc

SEQ ID NO: 53787 - DNA, 120 bp, synthetic construct
  source 1..120: mol_type = other DNA
tctgactggtatgagatgatatctcattgtggttttgatttgcatttctctgatgataagtgatgttcagcattttgtcatatgcttgttggccatgtgtatgtcttctttggaaggaca

SEQ ID NO: 53788 - DNA, 120 bp, synthetic construct
  source 1..120: mol_type = other DNA
tcactggagttgtatatcacttccaggagctttttggaaggttctttagggttttctaggcctgagatgggtcttctaggtctgagatggagcttctatatctactagtaaaagattagc

SEQ ID NO: 53789 - DNA, 120 bp, synthetic construct
  source 1..120: mol_type = other DNA
atatcctttccaacatctgttgtttcctgacttttaatgttcgccattctaactggcatgtgatggtatctcattgtggttttgatttgcattcttctaatgaccagtgatgacgagctt

SEQ ID NO: 53790 - DNA, 120 bp, synthetic construct
  source 1..120: mol_type = other DNA
ttgctgaggattgtcttggctatactggctcttccttggttccctatgaaaatgaaagtagttattttgaattctgtgaagaaactcaatggtagcttgatggggatggcattgaatcta

SEQ ID NO: 53791 - DNA, 120 bp, synthetic construct
  source 1..120: mol_type = other DNA
tatatgatggattacgtttattgatttgcatatgttgaaaaagccttgcatccccgggatgaagccaacttgatcgtggtggatgaagccaacttgatcgtggtggataagcttgttgat

SEQ ID NO: 53792 - DNA, 120 bp, synthetic construct
  source 1..120: mol_type = other DNA
gtgatgttagggtgtcaaatttagacctttcctgctttctcctgtgggtatttagtgctataaatttccatctacacactgctttaaatgtgtcccagaaattctggtgtgttgtgtctt

SEQ ID NO: 53793 - DNA, 120 bp, synthetic construct
  source 1..120: mol_type = other DNA
tgttagttggctcagtttcttcctagcaatgatggtctttacaatttgacacttttttacagtggctcataccagttgttcctttccatgtttagcacctcctgcaggagctcttgtaag

SEQ ID NO: 53794 - DNA, 120 bp, synthetic construct
  source 1..120: mol_type = other DNA
ttttgtctttgataatggtgacatacagatggtgttttggtctgggtttcctttctgtttgttagttttccttctaatagtcaggactctcaggtgcaggcctgttggagtttgctggag

SEQ ID NO: 53795 - DNA, 120 bp, synthetic construct
  source 1..120: mol_type = other DNA
cactgggagctgtagactggagctcttcctattcggccaccttggaacctcccagtatggccattttctcaatatttattattcctatccaagagcatggaatattttttccatttcttt

SEQ ID NO: 53796 - DNA, 120 bp, synthetic construct
  source 1..120: mol_type = other DNA
tggttccaagtctttgctattgtgaatagtgccgcaataaatgtacatgtgcatgtgtctttatagcagcatggtttataatcttttgggtatttacccagtaatgggatggctgggtca

SEQ ID NO: 53797 - DNA, 120 bp, synthetic construct
  source 1..120: mol_type = other DNA
ttatttctgagggctctgttctgttccattggtctatatccatatggtacaagtaccatgctgttttgtttactgtagccttgcagtatagttggaagtgaggtagcatgatgcctccag

SEQ ID NO: 53798 - DNA, 120 bp, synthetic construct
  source 1..120: mol_type = other DNA
ctgtgcatttgtcataaatagctcttattatttttagatacgtcccatcaatacctaatttattgagagtttttagcatgacgggttattgaattttgttgaaggccttttctgtatcta

SEQ ID NO: 53799 - DNA, 120 bp, synthetic construct
  source 1..120: mol_type = other DNA
tcaaaatatcagctcctggattcattgatttttttaaagggttttttgtgtctctatctctttcagtactgctctgatcttagttatttcttgccttctgctagctttggaatttgtttg

SEQ ID NO: 53800 - DNA, 120 bp, synthetic construct
  source 1..120: mol_type = other DNA
ttgagcctatttgtgtctctgcatgtgagatgcatctcctgaatacagcacactgatgggtcttgactttttatccgattttacagtgtgtggcttttaattggggcacttagcccattt

SEQ ID NO: 53801 - DNA, 120 bp, synthetic construct
  source 1..120: mol_type = other DNA
ttgatcactgataccctttcttccacttggttttattgactattgaagcttctgcatgcatcatgaagttctcattccatggtttttggttccatcaggtcatttaaggtcttctctaca

SEQ ID NO: 53802 - DNA, 120 bp, synthetic construct
  source 1..120: mol_type = other DNA
tgggacccactgagccaggcacgggagagaatcttctagtctgcctgttgctaagaccatgggaaaagcacagtatttgagtgagagtgtcctgcttttccaggtatcatctctcacggc

SEQ ID NO: 53803 - DNA, 120 bp, synthetic construct
  source 1..120: mol_type = other DNA
tgggtgcatataatttaggatagttagctcttcttgttacattgtgtctggattttgttccttctggtgcgttcgtggtcttgttgacttcagaaatgaagctgtggacctttgtggtga

SEQ ID NO: 53804 - DNA, 120 bp, synthetic construct
  source 1..120: mol_type = other DNA
tgcagtttcttcacagagtcaatgatctttacaatttggtgtgtttttgcagtggctggtaccaatttttcctttccatatttagtgcttccttcatggattcttgtaaggcaggcctgg

SEQ ID NO: 53805 - DNA, 120 bp, synthetic construct
  source 1..120: mol_type = other DNA
ctaagaaacctctttggctccaagtactctgcaggggtaagggaggggagagttggtggtggcctaaacttctaatccaggtgagtggatgctttgaatgcctcatgatctgtctgagtg

SEQ ID NO: 53806 - DNA, 120 bp, synthetic construct
  source 1..120: mol_type = other DNA
tttcacataacgggtctgtacttacttttatcagctgaatgccatcatgaggctgtttgtccacattttcctccccaggtatcttagatgtctttcacgatttctgtggatttttcttct

SEQ ID NO: 53807 - DNA, 120 bp, synthetic construct
  source 1..120: mol_type = other DNA
gctcaggagtttgagaccagcctgggcaacatggtgaaaccctgtctctaccaacaaagcagtcaacaaacaaaaccaaagtaatataatttcctcaactatgcaaactaattcatatta

SEQ ID NO: 53808 - DNA, 120 bp, synthetic construct
  source 1..120: mol_type = other DNA
tgtggtaattctatttctaattctcgaacgtcttaatgtttttcttaacagctgcaccattttacattacattcccatcagtaggacatgagggttccaatttcttcacattctcacttg

SEQ ID NO: 53809 - DNA, 120 bp, synthetic construct
  source 1..120: mol_type = other DNA
agttctctttctctgcgtcctcaccagcgttggctgtcttttgtctttttgatgatagcaattctaactggagtgagctgatatctcattgtggctttgatttgaatttccttgctgata

SEQ ID NO: 53810 - DNA, 120 bp, synthetic construct
  source 1..120: mol_type = other DNA
attaattataactatttttgtaccaattagaatttccactccccttcacccactcactgtccctcccagcctctggtaaccatctttctaccctgtatctccatgggctcaattgttttg

SEQ ID NO: 53811 - DNA, 120 bp, synthetic construct
  source 1..120: mol_type = other DNA
gaataccttttattttatttctttctcttgcctgattgccctggtcagaacttccaatattatgttaaatagaagtggtgagagagggcatccttgtcttgtgccagttttcaaagggaa

SEQ ID NO: 53812 - DNA, 120 bp, synthetic construct
  source 1..120: mol_type = other DNA
agaaggaatggtaccagctcctctttgtacctctggtagaattcggctgtgaatccttcaggtcctgggcttttttttgcttggtgggctattccttgctgcctcaatttcagaacttgt

SEQ ID NO: 53813 - DNA, 120 bp, synthetic construct
  source 1..120: mol_type = other DNA
accttctgtctcattgatctgtctaatattgacagtggggtgttaaagcctccatctattattgtgtgggagcctaagcctctttgtaggtctttaagaacttgctttatgaatctgggt

SEQ ID NO: 53814 - DNA, 120 bp, synthetic construct
  source 1..120: mol_type = other DNA
gaatctgacaattatgtgtcttggggttgcccttcttgaggagtatcattgtgggtgttttctgtatttcctgaatttgaatgttggtctgtcttgctagattgtggaagttctcctgga

SEQ ID NO: 53815 - DNA, 120 bp, synthetic construct; identical to SEQ ID NO: 11034
  source 1..120: mol_type = other DNA

SEQ ID NO: 53816 - DNA, 120 bp, synthetic construct; identical to SEQ ID NO: 11035
  source 1..120: mol_type = other DNA

SEQ ID NO: 53817 - DNA, 120 bp, synthetic construct; identical to SEQ ID NO: 11036
  source 1..120: mol_type = other DNA

SEQ ID NO: 53818 - DNA, 120 bp, synthetic construct; identical to SEQ ID NO: 11037
  source 1..120: mol_type = other DNA

SEQ ID NO: 53819 - DNA, 120 bp, synthetic construct
  source 1..120: mol_type = other DNA
aataaacatacgtgtgcatgtgtctttatagcagcatgatttatagtcctttgggtatatacccagtaatgggatggctgggtcaaatggtatttctaattctagatccctgaggaatcg

SEQ ID NO: 53820 - DNA, 120 bp, synthetic construct
  source 1..120: mol_type = other DNA
gccactgcactccagcctgggcgacagagtgagactccatctcaaaaaaaaaaaaaaaaaaaaaaaatctttaatccatcttgaattgatttttgtataaggtgtaaggaagggatccag

SEQ ID NO: 53821 - DNA, 120 bp, synthetic construct
  source 1..120: mol_type = other DNA
tagataaacaatcatgtcgtctgcaaacagggacaatttgacttcctcttttcctaattgaatcccctttatttccttctcctgcctgattgccctggccagaacttccaaatcaacaga

SEQ ID NO: 53822 - DNA, 120 bp, synthetic construct
  source 1..120: mol_type = other DNA
tccttgatgaacattcatgcaaaaatcctcaataaaatactggcaaaccgaatccagcagcacatcaaaaagcttatccaccatgatcaagtgggcttcatccctgggatgcaaggctgg

SEQ ID NO: 53823 - DNA, 120 bp, synthetic construct
  source 1..120: mol_type = other DNA
ttgcagtgagccaagattgtgccattgcactctagcctgggtgacagagtgggaccctgtctcagaaaagaaaaaaaaggaaaagaaaagaaaagaaaaaaaggacatctttgcacagta

SEQ ID NO: 53824 - DNA, 120 bp, synthetic construct
  source 1..120: mol_type = other DNA
tggcagtaagcatagtacccaacagatggttctccaacccacatcccttctctccctcccctatatagtgatcctcagtgtctattgttcccatctttaggttcatgtgtattcaatgtt

SEQ ID NO: 53825 - DNA, 120 bp, synthetic construct
  source 1..120: mol_type = other DNA
taattgccattctgactggtgtgagatggtacctccttgtgattttgatttggatttctctgatgattagtgatgttgaacattttttcatatgtttgttggctgcttgtatgtcatctt

SEQ ID NO: 53826 - DNA, 120 bp, synthetic construct; identical to SEQ ID NO: 11038
  source 1..120: mol_type = other DNA

SEQ ID NO: 53827 - DNA, 120 bp, synthetic construct; identical to SEQ ID NO: 11039
  source 1..120: mol_type = other DNA

SEQ ID NO: 53828 - DNA, 120 bp, synthetic construct
  source 1..120: mol_type = other DNA
tgttttttgactgcataaatgtcttcttttgagaagtgtctgttcatgtcctttgcccactttttgatggggttgtttgtttttttcttgtaaatttgtttgagttcattgtagattctg

SEQ ID NO: 53829 - DNA, 120 bp, synthetic construct
  source 1..120: mol_type = other DNA
ggtgtataagaatgcttgtgatttttgtacattgattttgtatcctgagactttgctgaagttgtttatcagcttaaggagattttgggctgagatgatggggttttctagatatacaat

SEQ ID NO: 53830 - DNA, 120 bp, synthetic construct
  source 1..120: mol_type = other DNA
tggtagaattcggctgtgaatccgtctggtcctggactctttttggttggtaagctattgattattgccacaatttcagctcctgttattggtctattcagagattcaacttcttcctgg

SEQ ID NO: 53831 - DNA, 120 bp, synthetic construct
  source 1..120: mol_type = other DNA
gtctcccattattaatgtgtgggagtctaagtctctttgtaggtcactcaggatttgctttatgaatcttggtgctcctgtattgggtgcatatatatttagcatagttagctcttcttg

SEQ ID NO: 53832 - DNA, 120 bp, synthetic construct
  source 1..120: mol_type = other DNA
tcttttcacatagtcccatatttcttggaggctttgctcatttctttttattctttttactctaaacttcccttctcgctacatttcatcttccattgctgataccctttcttccagttg

SEQ ID NO: 53833 - DNA, 120 bp, synthetic construct
  source 1..120: mol_type = other DNA
gcccctcccccagccttgctgccaccttgcagtttgatctcagactgctgtgctagcaattagtgagactccgtgggcgtaggaccctccgagccaggtgcgggatataatctcgtggtg

SEQ ID NO: 53834 - DNA, 120 bp, synthetic construct
  source 1..120: mol_type = other DNA
ttaggttgtttcaaagtcttagccattgtaaacagtgctgcaacaaacacaagagtgcagatgtctctttgatatagttatttcctttcttttgggtatatacccagtagtagggttgtt

SEQ ID NO: 53835 - DNA, 120 bp, synthetic construct
  source 1..120: mol_type = other DNA
gatgcctcaaaatcatggtggaaggcaaatgaggagaaaagtcacatcttacatggtggcagacagagatctttgcaggggaagtcccatttataaaaccatcagatcttgtaagactta

SEQ ID NO: 53836 - DNA, 120 bp, synthetic construct
  source 1..120: mol_type = other DNA
tgcctgattgctcttgctaggtcatctagtagtatgaagaataacaatggcaatagtggacatccttgtcatgttcatgatcttacagaaaatgctttcagttttccccactcagtatgg

SEQ ID NO: 53837 - DNA, 120 bp, synthetic construct
  source 1..120: mol_type = other DNA
tacaggtttgatcttggtactggtcattgcatgttcaggttttggatttcttcctggttcaatctcaataggtcatatatgtctaaggatttgtccatttcttctagattttccaattta

SEQ ID NO: 53838 - DNA, 120 bp, synthetic construct
  source 1..120: mol_type = other DNA
gagacacacttaacaaggaggttaaagatacagggattgaaatgtatggcctgcagtgcctttgacacacttcacaggccctgactatctgcttgatagttttgaaaaggcctggtccag

SEQ ID NO: 53839 - DNA, 120 bp, synthetic construct
  source 1..120: mol_type = other DNA
gagtggtgtaggtttgagcaattacttgttgacagttatgttctatcttttctttattatttggaagaaatgtggctcagttaagagttgcacaagcacgcagttgcagcactggctctt

SEQ ID NO: 53840 - DNA, 120 bp, synthetic construct
  source 1..120: mol_type = other DNA
tttcaaagatcttcaaaggcaaacaagaattgagagtcaggatgtacagggatgcagaaaaagtcatccttaaggtccaggactgtaaaccactctgcttcctctggtatttgggaaagc

SEQ ID NO: 53841 - DNA, 120 bp, synthetic construct
  source 1..120: mol_type = other DNA
ttttttaaagtgtccttgtagactgcactggaagcaagccctattagacatataattttcccaacttttcccttttccagagcctccaatgtccacttgcctggtatgcttcctcaatgc

SEQ ID NO: 53842 - DNA, 120 bp, synthetic construct
  source 1..120: mol_type = other DNA
atcatggccaggcggtactgcagaaaaatataagtcatttctttctttgaccctttcttagagggtcaaattggtcctaattctccagaatacatcttaggggtgtttttgccttggggg

SEQ ID NO: 53843 - DNA, 120 bp, synthetic construct
  source 1..120: mol_type = other DNA
aggcaatttttctaaatctgcttccacaagagtctctgtatcaattactgaatgtccattgaggttttttcctcagtcacctgggaggaaccatctatcatcctgtcctgaagggagttc

SEQ ID NO: 53844 - DNA, 120 bp, synthetic construct
  source 1..120: mol_type = other DNA
aggagttcgggacaacagctttctgcctctagtcagccctcagcttccccaagaaaattggaagtggaagctggctccaggcagaccaacattcccaatagaagggttggttgttagaaa

SEQ ID NO: 53845 - DNA, 120 bp, synthetic construct
  source 1..120: mol_type = other DNA
agagtgaaaacagagctcccatacaaagggaggggacccaaagggggttgccctttggttttcatttgctcttgcttatctaattctttaggattcatcattagattgtttatttgaaaa

SEQ ID NO: 53846 - DNA, 120 bp, synthetic construct
  source 1..120: mol_type = other DNA
ctttcatttcttcctgccttcctttattgataataattttctctgcatatatgtgtacagatttttcttaatgcctagcttaaggcacagttacacatttgtgcatctgtagcagtcctc

SEQ ID NO: 53847 - DNA, 120 bp, synthetic construct
  source 1..120: mol_type = other DNA
ttttcccaggaatgttgtgattttgttgtcatggcttgcaagtctttggtttttcctagataattaatatttttgttgttgttataaacttacaaaatgccttttgatttctttgtactt

SEQ ID NO: 53848 - DNA, 120 bp, synthetic construct
  source 1..120: mol_type = other DNA
tagctctctgaggttctcctacctctggaatcttgagaccaatttttgtcttggcagctttacaattgccttctatcacatggtttctgtattcatccagacactctagttgccatctca

SEQ ID NO: 53849 - DNA, 120 bp, synthetic construct
  source 1..120: mol_type = other DNA
tagctcacatactatacaaaaacaggtggcaggatggacttgtgcagagagtattgtttattgatgcccaatataagactttcctgtccagtagaattttctgcaaagatgctcgattga

SEQ ID NO: 53850 - DNA, 120 bp, synthetic construct
  source 1..120: mol_type = other DNA
aagatcctgacctaataagttggaatctgccagatctctccattgaaggagttctgcttttatgtgtaaatgatgaaaatctatggcatgacactttaagacagaacaccctgtttccaa

SEQ ID NO: 53851 - DNA, 120 bp, synthetic construct
  source 1..120: mol_type = other DNA
tggctgtgtagtattccatggtgtatatgtgccatattttcttaatccagtctatcattgttggatatttgggttgattccaagtcgttgctattgtgagtagtgctgcaataaatatac

SEQ ID NO: 53852 - DNA, 120 bp, synthetic construct
  source 1..120: mol_type = other DNA
cttgtttttgtcaagtttgtcaaagatcagatcattgtagatgtgtggtattatttctgttggctctgttctgttccattggtctacatctctgttttggtaccagtaccatgctgtttt

SEQ ID NO: 53853 - DNA, 120 bp, synthetic construct; identical to SEQ ID NO: 11040
  source 1..120: mol_type = other DNA

SEQ ID NO: 53854 - DNA, 120 bp, synthetic construct
  source 1..120: mol_type = other DNA
agttactctttgtacatgatcaagagcactgttctgaatgcctgtgttttctccgctggtgatacatcctcattattcggccagattagtgggttttggagaattaatccaattcttcca

SEQ ID NO: 53855 - DNA, 120 bp, synthetic construct
  source 1..120: mol_type = other DNA
atcagtccattctttcattgctataaagaaccacctgagactgggtaatttatgaagaaaagaggttatttgactcacagttccacaggctgtacaggaagaatggctgggaggactcag

SEQ ID NO: 53856 - DNA, 120 bp, synthetic construct
  source 1..120: mol_type = other DNA
agttcatcttgttcaaaaggagaagcatgatataaaacttgaaacctagtgtgttggggactgatgatgagtggctatgcctagagttgagagtaggggaggtgaagagtgtaaaatgtg

SEQ ID NO: 53857 - DNA, 120 bp, synthetic construct
  source 1..120: mol_type = other DNA
tcactatctgtgatgcttcttctgacccgtcatctcacattttcccttcccccaagatctagtgaacattcagcctccattaaaaaagtttcactgtgcaaatatatctgctattcccca

SEQ ID NO: 53858 - DNA, 120 bp, synthetic construct
  source 1..120: mol_type = other DNA
tcctgatctgcctgcctcagcctcccaaagtgctgggattacaggagtgagacactgtgcctggtctaatgttactttaaagtgtcattactttatctctaaataaagaatcaggttact

SEQ ID NO: 53859 - DNA, 120 bp, synthetic construct
  source 1..120: mol_type = other DNA
tattttcctaccaagtaatatgccagcaaaacctctaaggtgatagaaacataggcaaataattcagagagttaatagaagagaaagtggaaatgggtattacattaatggaaagataca

SEQ ID NO: 53860 - DNA, 120 bp, synthetic construct
  source 1..120: mol_type = other DNA
ccatgcgggcaagtccttctcctgcacaaattcgttttcctgaagataacaaagaaaggaagtagttactccttgtgtttaactgtgactgtgacaaacagtcatttgtgacttgcacaa

SEQ ID NO: 53861 - DNA, 120 bp, synthetic construct
  source 1..120: mol_type = other DNA
ggaaggtctctgtccttgtcatgttggtatctacagtgccaaatataaagcagacataaaagatcaaagaataaaggaaggagattccatggccagagacttagcacacaaaacacaggt

SEQ ID NO: 53862 - DNA, 120 bp, synthetic construct
  source 1..120: mol_type = other DNA
gttgtgccctggaagtaacaaaacagataatctgatttataaagaagtccagaagtgaggagaagtagtggacatcacgtagcgccataacgttgatctatagatgaggaaactcaggtc

SEQ ID NO: 53863 - DNA, 120 bp, synthetic construct
  source 1..120: mol_type = other DNA
actgagtgtgactattattgtgtaaaagaaaaatctttgttttggggcattacatactgcagtattgaggtgtagatagacccttgtattgagaaagaaaaacctcttctggttgtgtgc

SEQ ID NO: 53864 - DNA, 120 bp, synthetic construct
  source 1..120: mol_type = other DNA
gcagaccaaaatatcttatgaatacagaagtcctgaacaataagtaacagaacaaatccagctgtttgtgtatacttatgtatatttagtgagggatgtgaggccagtatatacaatcat

SEQ ID NO: 53865 - DNA, 120 bp, synthetic construct
  source 1..120: mol_type = other DNA
ccccagtttgctagccttatttagggaaggtacaggagtctgatcacttggaatgacatgagccttctgggggctgggattttatgaaaataccaactatctgtttcataacaaatgtag

SEQ ID NO: 53866 - DNA, 120 bp, synthetic construct
  source 1..120: mol_type = other DNA
ccccaaacaaaatagcagaaagtccatcaagctgccacatgtatgagttttgcacttctctcatcttgtgttgttagagggttggaaccaaaccagcactatggaaatttcagaagtaca

SEQ ID NO: 53867 - DNA, 120 bp, synthetic construct
  source 1..120: mol_type = other DNA
ggtatgagagatgagaattttcatctccatctctattccatatatagacacacgcccacaaagttatatgtgtacacacagacacacccacacacgtacacacacacaattctcctcctt

SEQ ID NO: 53868 - DNA, 120 bp, synthetic construct
  source 1..120: mol_type = other DNA
aaatgctgagtctttgaatctgaggaatagatctttctcaaaccttttttttttctgtcttcacatctcacagtttcctggccctgtaaagtgtcgccgagtacaggggttcttaggctc

SEQ ID NO: 53869 - DNA, 120 bp, synthetic construct
  source 1..120: mol_type = other DNA
tgccatactgtttctactgatctctgtcatcctcctccattgtacaaagatgtcattttaaattgtgtcatcaaatttagacagattacagctgatgacacagaaatttaaagaatgagc

SEQ ID NO: 53870 - DNA, 120 bp, synthetic construct
  source 1..120: mol_type = other DNA
ctatcaagaactaccccactcttgcaataacaacatgagtatatttatgaggtcagaacactgatgacctagtcatgttttgttaggctgcacccacaaacactgttgcattgggcattc

SEQ ID NO: 53871 - DNA, 120 bp, synthetic construct
  source 1..120: mol_type = other DNA
atacaaagtgaagagaaatggcaattattaatacaaaaacttgaggcattaactgcctatattggataaagaagagtaggggcaatgcaaatgccaaggccaagggactaatcgaataaa

SEQ ID NO: 53872 - DNA, 120 bp, synthetic construct
  source 1..120: mol_type = other DNA
ggtaattttctcaaatgccagctgtactagcaatgtattgggtttgtgaacacactcaagaccttccgattagctggggtgatgtgggtatggtgttagctgagatacgataaaagtttt

SEQ ID NO: 53873 - DNA, 120 bp, synthetic construct
  source 1..120: mol_type = other DNA
tgataccagtggttggaaccgagtttctacaagcctcatcactgtggactatagggctctgggatggtaaataaacctgaaaggcagtgttggctacaagtactgtaacttttatgtgag

SEQ ID NO: 53874 - DNA, 120 bp, synthetic construct
  source 1..120: mol_type = other DNA
ggtggtggatacatgagtgcttgtgtcattccatccccagtttcaattgactcagaacagagagagagactttgtttatttgggagaaattaagggaagggaacaagagtttctggtaat

SEQ ID NO: 53875 - DNA, 120 bp, synthetic construct
  source 1..120: mol_type = other DNA
caagaagctgatagaacaccaagcagattaaacccaatgaagactacttccaggaatttaataataaaactcccaaagatgtcctgaattgtattgcccagattttctgctagggttttt

SEQ ID NO: 53876 - DNA, 120 bp, synthetic construct
  source 1..120: mol_type = other DNA
aaagagctcactcatcacaaccaagtgggatttatccctgtatgcaagggtgctttaacatatgccaattaattgatgtggtacatcatatcaacagaataaagaacgaaagcatatggt

SEQ ID NO: 53877 - DNA, 120 bp, synthetic construct
  source 1..120: mol_type = other DNA
cactcaaaagtgggagttgaacaatgagaacacatggacacagggagggaaacatgacacaccagggcctgttggggggtggggagcaaggggagggagagcactgggacaaatacttaa

SEQ ID NO: 53878 - DNA, 120 bp, synthetic construct
  source 1..120: mol_type = other DNA
aagattggtccagatatcagttgtgtctgtttatatcagcaatgagcaatatgaaaataaaatcaaggaaatagttacatttgcaatagcatcaaaagggccaaaagccctgagaaccta

SEQ ID NO: 53879 - DNA, 120 bp, synthetic construct
  source 1..120: mol_type = other DNA
agtaagggtttaatgcccagaatccataaacaattacctacagttcaacaacaaatgacaagcaacccagtatagaaataagcaaagggccaggtgtggtgcctcacaactgcaatccca

SEQ ID NO: 53880 - DNA, 120 bp, synthetic construct
  source 1..120: mol_type = other DNA
taactatttaatgatatagtatgtttctgtggagtgataaaaaagttttgaaagtagagaggaatggtagttgtgatgcagggcaggcgagtcccaatgtggagcttagcctgggagggt

SEQ ID NO: 53881 - DNA, 120 bp, synthetic construct
  source 1..120: mol_type = other DNA
tctcacaggttacctgataaacatcaacctccaactcctttgtgcaaattcattttaggttacactaaattaaaccttctctcttccatccaccaactctttcccaccactcacctctcc

SEQ ID NO: 53882 - DNA, 120 bp, synthetic construct
  source 1..120: mol_type = other DNA
ttctcattgttcaattcccacctatgaatgagaatatgcagtgtttggtttttttgtccttgtgatagtatgctgagaacgatggtttctagcttcatccatgtccctacaaagaacatg

SEQ ID NO: 53883 - DNA, 120 bp, synthetic construct
  source 1..120: mol_type = other DNA
ctgttttgttccattggtctatatctctgttttggtaccagtaccaagctgttttggttaatgcagccttgtagaatagtttgaagtcaggtagcctgatgcctccagctttgttctttt

SEQ ID NO: 53884 - DNA, 120 bp, synthetic construct
  source 1..120: mol_type = other DNA
cagggatgatgcccacttgatcgtggtggataagctttttatgtgctgctggattcagtttgccgtaatttattgaggattcttgcattgatgttcatcagggatattggtctaaaattc

SEQ ID NO: 53885 - DNA, 120 bp, synthetic construct
  source 1..120: mol_type = other DNA
tctcttgtgggtatttagtgctataaatttccctctacacactgcattaaatgtgtcccagagattctggtatgttgtgtctttgttctcattggtttcaaagaacatctttatttctgc

SEQ ID NO: 53886 - DNA, 120 bp, synthetic construct
  source 1..120: mol_type = other DNA
ctggtagtgacaaaatctctcagcatttgcttgtatgtaaaggattttatttctccttcacttatgaagcttagtttggctggatatgaaattctgggttgaaaattcttttctttaaga

SEQ ID NO: 53887 - DNA, 120 bp, synthetic construct
  source 1..120: mol_type = other DNA
gtacagatggggttttggtgtggatgtcctttctgtttgttagatttccttctaacagtcaggatcctcagccgcgagtctgctggaggtccactccagaccctgtttgcctgggtatca

SEQ ID NO: 53888 - DNA, 120 bp, synthetic construct
  source 1..120: mol_type = other DNA
gggagttcagaatcctgaagttttcattgaatcttttcatcagggtgagaaaattctgatctttataatcaaatcgtttctggaaaacaacggagcagatcacattgcagggagcacagc

SEQ ID NO: 53889 - DNA, 120 bp, synthetic construct
  source 1..120: mol_type = other DNA
tcggtgaaggaatctctaaaatgaaattgctgtaaccaagtgactagtgaacataaatggaaagggtgcccaaattcacatctataggtcctaaataagagtgacacgaaatgaaagggt

SEQ ID NO: 53890 - DNA, 120 bp, synthetic construct
  source 1..120: mol_type = other DNA
tataacttggttcatatttcatgaagtgtgatgaggtcactttcaccatgtccactttccaagtgttctctggtgaaatgttctggtggaggtaatgcagatttatgctatgggggaaac

SEQ ID NO: 53891 - DNA, 120 bp, synthetic construct
  source 1..120: mol_type = other DNA
gaattttgtacataaatgtgatggtgattgttatagctgccacttatagatggcctgtgatgtgccacgcaatgacccaggcaattggtacacaaatcacacagttcatcctcacttcaa

SEQ ID NO: 53892 - DNA, 120 bp, synthetic construct
  source 1..120: mol_type = other DNA
atacaatgaccccaatgtttctgtattcacaaaatgcatcaactcactccgctatttctgacaatgacagacttagaaagacaaaagaggccaggtacggtggctcacacatgtaatccc

SEQ ID NO: 53893 - DNA, 120 bp, synthetic construct
  source 1..120: mol_type = other DNA
tccttcttcatttcataaccatttgctataatttttggctgaaggtaaatggtaaggtattgtgggatctggtcagcagcccacaaagcaactgggctctctcttttttcccaggtggat

SEQ ID NO: 53894 - DNA, 120 bp, synthetic construct
  source 1..120: mol_type = other DNA
ctgttgtaaaggaaataactgtgggttcaggaccagcaaaagcagataagtggtagaaaagaagttatagacttccatttttagatccacaaagtactgttttaattatactatagctac

SEQ ID NO: 53895 - DNA, 120 bp, synthetic construct
  source 1..120: mol_type = other DNA
gttttttttttttttttttttttttttgagacagagtcttactctgtagctcaggctggagtgcagtggtacaatcttggctcactgcaacctccatctcccaggtccccattcaagaaa

SEQ ID NO: 53896 - DNA, 120 bp, synthetic construct
  source 1..120: mol_type = other DNA
atggaaagaaatggaaggagatccggcgtttctccctcatgacgctgcggaattttgggatggggaagaggagcattgaggaccgtgttcaagaggaagcccgctgccttgtggaggagt

SEQ ID NO: 53897 - DNA, 120 bp, synthetic construct
  source 1..120: mol_type = other DNA
tcctgtagcataattctgtgaaatacccaaatgtcaatttataaaatgatttatttaacaagattttacttattagtaataactctgtaatctgcattccctatgtatgatttggctctg

SEQ ID NO: 53898 - DNA, 120 bp, synthetic construct
  source 1..120: mol_type = other DNA
ggctctgttctgctcagcccacaggcagccagacttcaaggttatctcacttgttccctgaacatcgctgttatcctgttttttttttcaaggtgcagatttcatattgtttaaacaatt

SEQ ID NO: 53899 - DNA, 120 bp, synthetic construct
  source 1..120: mol_type = other DNA
atgaagcaaaaaaagagcctgtatagccaagacaatcctaagcaaaaacaaagctggaggcatcattctacctgacttcaaacaatactacaaggctacagtaaccaaacagcatggtac

SEQ ID NO: 53900 - DNA, 120 bp, synthetic construct
  source 1..120: mol_type = other DNA
gttcatgtcctttgcaggaacatggatgaagctggaaatcatcatcctcagcaactaacacaggaacagaaaaccaaactccacatgtttgcactcataaatgggagttgaacaatgaga

SEQ ID NO: 53901 - DNA, 120 bp, synthetic construct
  source 1..120: mol_type = other DNA
ctttggttcctctctactggttcaacacatgactctttcagctattcattatatataaaaagctttgaaatctccaactattcttgccctttccatctcagtgccttgctgtctactgac

SEQ ID NO: 53902 - DNA, 120 bp, synthetic construct
  source 1..120: mol_type = other DNA
tagaagctgccaagaaacactgaatagggcaggggtgtttgatatctcagttgggatcctagctgatgagatagctgggttaggaatgacaaaattattggttttatggtgtatgaacca

SEQ ID NO: 53903 - DNA, 120 bp, synthetic construct
  source 1..120: mol_type = other DNA
aaaatgtaaacaaaagcttagttatgtgactgcttgtgaatttgtgatttgttgactagttctgtgtttactaaggatgtttaactggtcaatcagtaatgcttgagaagcactttaagt

SEQ ID NO: 53904 - DNA, 120 bp, synthetic construct
  source 1..120: mol_type = other DNA
tctcaccactcctattcaacatagtattggaagctctggccagggcagtcaggcaagagaaagaaatgaagtattgaaataggaagagagaaagtcaaactgtctctattcgcagatgac

SEQ ID NO: 53905 - DNA, 120 bp, synthetic construct
  source 1..120: mol_type = other DNA
ggataaagaaaatgtggcacatatacaccatggaatacagtgctgccataaaaaaggatgagttcatgtcctctgcagggatatgggtgaagctggaaaccatcatcctcagcaaactaa

SEQ ID NO: 53906 - DNA, 120 bp, synthetic construct
  source 1..120: mol_type = other DNA
tctgggtcccttgaatcttcatatgaaatttagaatacacttgtcaattttctcaaaggagccaatggggattttgacacgattgcattaaatcagtagatcagggaattatgccatttt

SEQ ID NO: 53907 - DNA, 120 bp, synthetic construct
  source 1..120: mol_type = other DNA
tgaatatagagtgttatctcattgtggttttatttatttattcatttatttagagacagagtcttactctgtcacccaggctggagtgcagtggcatgatctcagctccctgcaacttcc

SEQ ID NO: 53908 - DNA, 120 bp, synthetic construct
  source 1..120: mol_type = other DNA
ctcactgatacagaaattaagtagaaattacttaggcaaatagtaagcatttgggagtcctcagtaaggtttttctttatactggaaagcagccccaaatcattttctaacaaagagcag

SEQ ID NO: 53909 - DNA, 120 bp, synthetic construct
  source 1..120: mol_type = other DNA
tatctcctaatgctatccctccccactctgccaccccacaacaggccccagtgtgatgttccccttcctgtgaccatgtgttctcattgttcaattcccacctatgagtgagaacatgcg

SEQ ID NO: 53910 - DNA, 120 bp, synthetic construct
  source 1..120: mol_type = other DNA
tatcttgtaaatttgtttgagttctctgtagatcctggatattagccctttgtcagacaagagggttgcaaaaattttctcccattctgtaggttgcttgttcactctgatggtagtttc

SEQ ID NO: 53911 - DNA, 120 bp, synthetic construct
  source 1..120: mol_type = other DNA
atcatgtcatctgcaaacagggacaatttgacttcctcttttccttattgaataccctttatttctttctcttgcctgactgccctggccagaacttccaacactgtgttgaataggagt

SEQ ID NO: 53912 - DNA, 120 bp, synthetic construct
  source 1..120: mol_type = other DNA
aatcttgggagagtgtatttgtcgaggaatttatccatttcttccagattttctagtttatttttgtacaggtgtttatagtattctctgatggtagtttgtatttctgtgggatcggtg

SEQ ID NO: 53913 - DNA, 120 bp, synthetic construct
  source 1..120: mol_type = other DNA
tttgcttggtagatctttctccatccctttattgtgagcctatgtgagtctctgcatgtgagatgggttttctgtgtacagcacaccgatgggtcttgactctttatccaatttgccact

SEQ ID NO: 53914 - DNA, 120 bp, synthetic construct
  source 1..120: mol_type = other DNA
ttccatcacttataccctttcttccagttgatcaaatcggctatagaggcttatgcattcatcacgtagttcttgtgccatgattttcagctccatcaggtcctttaaggacttctctgc

SEQ ID NO: 53915 - DNA, 120 bp, synthetic construct
  source 1..120: mol_type = other DNA
ataatctcctggtttgccatttgctaagaccatcagaaaagcacagtattagggtggaagtgaccttattttccagatgccttctgtccttggctaagaaagggaattctctgacccctt

SEQ ID NO: 53916 - DNA, 120 bp, synthetic construct
  source 1..120: mol_type = other DNA
ggttttgatttgcatttctctgatgattagtgatgttgagtgttttctcatatgcttgttggccatgtgtgtgtcttctttggaaggacatatgtcctttgcccactttttaatggggtt

SEQ ID NO: 53917 - DNA, 120 bp, synthetic construct
  source 1..120: mol_type = other DNA
tgtaccagttacatgctctcttggttactgtagcttacagtatagtttgaagtcaatgtgaagcttcccactgttctttttgtttaggattgctttggatttgggctcttctttggttcc

SEQ ID NO: 53918 - DNA, 120 bp, synthetic construct
  source 1..120: mol_type = other DNA
aggctgagcatccttttagcttgacaaggttctctttgtatgtgatctgatttttttctctagctgcctttaaaattattttttagccttgactttggacagcctggtgagtaaatgcct

SEQ ID NO: 53919 - DNA, 120 bp, synthetic construct
  source 1..120: mol_type = other DNA
ttatgagcaaaagccagctgtgactaggacaacttgatatagcacagcttgatccttgttttctgggggaacttctctgtttcctcagataatctgttcatctgtggaattcagagtagt

SEQ ID NO: 53920 - DNA, 120 bp, synthetic construct
  source 1..120: mol_type = other DNA
atcttgcaaaacagaaactttatacccatttaataataactcttggccgggcattgtagatcatgtctgtaatcccagcactttgggaggttgaggtgggcagattggatgagctcagga

SEQ ID NO: 53921 - DNA, 120 bp, synthetic construct
  source 1..120: mol_type = other DNA
tataaataacccaaaagaataacccaccacgcctggttaattttttgtatctttagtagaaactgagtttcaccatgttggccaggctggtctcaaactcctgaccctgtgatccaccca

SEQ ID NO: 53922 - DNA, 120 bp, synthetic construct
  source 1..120: mol_type = other DNA
atgttagggtgttgattttagatctttcctgctttctcctctggacatttagtgctataattttccctctaaacactgctttagctgtgtcttggagattctggtacactgtgtccttgt

SEQ ID NO: 53923 - DNA, 120 bp, synthetic construct
  source 1..120: mol_type = other DNA
atttagtgtttccttcaggagctcttgtaaggcaggcttggtgatgacaaaatccccttgtggtgatgggcttccctttgtggtaacccgacctttctttctggcttcccttaacatttt

SEQ ID NO: 53924 - DNA, 120 bp, synthetic construct
  source 1..120: mol_type = other DNA
ggcccttctgctgcaggtctgctggagtttgcttgaggtccactccaaaccttgtttgactgggtatcaccagaggaggccacagaacagcaaagattgctgtgtgtttattcctctgga

SEQ ID NO: 53925 - DNA, 120 bp, synthetic construct; identical to SEQ ID NO: 11041
  source 1..120: mol_type = other DNA

SEQ ID NO: 53926 - DNA, 120 bp, synthetic construct; identical to SEQ ID NO: 11042
  source 1..120: mol_type = other DNA

SEQ ID NO: 53927 - DNA, 120 bp, synthetic construct; identical to SEQ ID NO: 11043
  source 1..120: mol_type = other DNA

SEQ ID NO: 53928 - DNA, 120 bp, synthetic construct
  source 1..120: mol_type = other DNA
agaaatgaagacagcatggcagtagcaaaagcagtagaactctggtccaatgtgtctggatttatggcaggaagagacaagataaattggcctgggattgcatgttggttttattatgag

SEQ ID NO: 53929 - DNA, 120 bp, synthetic construct
  source 1..120: mol_type = other DNA
tagtctgttctcatgctgctaataaagacatacctgagacagggtaactcataaaggaaagaggtttaatggactgtcaattccacacggctggaaaggcctcacaataagtctctgata

SEQ ID NO: 53930 - DNA, 120 bp, synthetic construct
  source 1..120: mol_type = other DNA
aatttatcaaggatgaaaagttaatcagtgtcccttaaatcctcccaatattggtatttggaagtaccgagggtcaaagatggtggagaatgaggctgaaaaaggaggctctccctgcct

SEQ ID NO: 53931 - DNA, 120 bp, synthetic construct
  source 1..120: mol_type = other DNA
gggaaatggaaaattacaaattgaaataaagagacattgttaagcccaggaaagtacaaaaataaaatttaatcatagttgtcttaccagagaaccatatttgtgtagtcagaatgatgt

SEQ ID NO: 53932 - DNA, 120 bp, synthetic construct
  source 1..120: mol_type = other DNA
gttattattgactatagtcacccttttgtgctatcatatagtagatcttattcatctccacctcccctccccccacactaccctttcgagtctctggtaaccatctttctacactttatg

SEQ ID NO: 53933 - DNA, 120 bp, synthetic construct
  source 1..120: mol_type = other DNA
gcagaagctttttaacttgatgtgatcccatttgttcatgtttgctttgaatgcctgtgcttgtagggtattgctcgaaaaatttttgcctagaccaatgtcctggagattttccctagt

SEQ ID NO: 53934 - DNA, 120 bp, synthetic construct
  source 1..120: mol_type = other DNA
ttcctccagttttgttccttttgcttaggatagttttgactattctgggtcttttgtgggtccatatacattttaggatttattttttctatttctgtgaagaatgccattgatattttg

SEQ ID NO: 53935 - DNA, 120 bp, synthetic construct
  source 1..120: mol_type = other DNA
tggtaaaattcagcagtgaagctagccagtcttgggattttctctactgggatgattttatttctcgtttgatctttgtgctggttattgcatgttcagattttggatttcttcctggtt

SEQ ID NO: 53936 - DNA, 120 bp, synthetic construct
  source 1..120: mol_type = other DNA
atgaatttcaatgtttccttgttgattttctatctggatgacctgtccaatgctgaaagtggggtgttgaagtctccaggtattattatattggggcctatctctctctagttctaatta

SEQ ID NO: 53937 - DNA, 120 bp, synthetic construct
  source 1..120: mol_type = other DNA
atctcattcccaaggtaagtttgtttctcctacactgcaactccatgttttcgaagtccccaaattcatagtatcatttttaaacctctaccatcaccgggtgagagaagtgcataactc

SEQ ID NO: 53938 - DNA, 120 bp, synthetic construct
  source 1..120: mol_type = other DNA
tatctttgactgggtaatttataaataaaagagtttcattttggctcatggctctgcaggctgtgcaagaggcataatgtgggcaggcatctactcctagtaaggacttcaggtagcttt

SEQ ID NO: 53939 - DNA, 120 bp, synthetic construct
  source 1..120: mol_type = other DNA
tcaaggggaaaaagcaatgagacttggtaaggttgcaattactaatgtcatcttttgaagaagacagaattgataatttacttagagattatggggcttaccctagtggtcactgagtta

SEQ ID NO: 53940 - DNA, 120 bp, synthetic construct
  source 1..120: mol_type = other DNA
attccaaagactggctttcaactttcccagaatttttttgttttagctcttatatctagatcaatgacatatttcaaattaatttttatttcataatatgaagtaatagtggtcatgctt

SEQ ID NO: 53941 - DNA, 120 bp, synthetic construct
  source 1..120: mol_type = other DNA
caaacaaactgcatggcaatgacaagaactcaatagttttatccttgccactacacttgttaccatcccagaagatgtcatttgaaattcaatcatatgtttattcacaaatgccctgtg

SEQ ID NO: 53942 - DNA, 120 bp, synthetic construct
  source 1..120: mol_type = other DNA
gtacatgatcaagagcactgttctgaatgcctgtgtacaccctgctcatgatacatcctaattattgggccagattagtggactttggggagttaatccaattcttccaaattgagaaag

SEQ ID NO: 53943 - DNA, 120 bp, synthetic construct
  source 1..120: mol_type = other DNA
tgtattagtccactcttacattgccttaaagaactacctgagattgggtaatttatgaagaaaagaggtttaattcactcacagatccacaggctgtacaggaagcatggctgggagacc

SEQ ID NO: 53944 - DNA, 120 bp, synthetic construct
  source 1..120: mol_type = other DNA
ggatttgaagagtgtaaggagtgatgtggatcatcagactggaaacagaatgtgagggtccagatcaatccattgggaccttatcctataggacatacagggaagccatttaaagtttta

SEQ ID NO: 53945 - DNA, 120 bp, synthetic construct
  source 1..120: mol_type = other DNA
gcattatccatctttcactatctgtaatgccttttctcacctgtcatctcacattttcccttccctgaagatctagtgaacattcgacctccattacggagagtttcctatgtttcactg

SEQ ID NO: 53946 - DNA, 120 bp, synthetic construct
  source 1..120: mol_type = other DNA
ccactgcgcctggcctggtgttactttgaagtgtcattactttatctctaaataaagaatcagattacttttattacttcatgtttccaacttagaatgatgtaatgaagtataaataca

SEQ ID NO: 53947 - DNA, 120 bp, synthetic construct
  source 1..120: mol_type = other DNA
tcccatcatcgggaacctcttccagttggaattgaagaatattcccaagtccttcacccgggtaagagaaatagtgttgattttagggagaataactcagcaattggatctggtatgtgt

SEQ ID NO: 53948 - DNA, 120 bp, synthetic construct
  source 1..120: mol_type = other DNA
tgtacgtgggctcgcagcgcatggtggtgatgcacggctacaaggcggtgaaggaagcgctgctggactacaaggacgagttctcgggcagaggcgacctccccgcgttccatgcgcaca

SEQ ID NO: 53949 - DNA, 120 bp, synthetic construct
  source 1..120: mol_type = other DNA
tgctcttgccctatttatttgtccagcgtacatttctgaacattgtgaacgtcgaatgggccaacaaatctaaaaattaaatgagctgataaagaacgccgtcagcacagagcagacgct

SEQ ID NO: 53950 - DNA, 120 bp, synthetic construct
  source 1..120: mol_type = other DNA
tcagctaatgaagctgcataggacatgacccttgtttaccgcagaatgcccagagctggcaggatgtcttatatgcaggaagtacccaaaatgtatttattgaggaagtgatgatggata

SEQ ID NO: 53951 - DNA, 120 bp, synthetic construct
  source 1..120: mol_type = other DNA
ttatacacctgtaaatcctgccctgctctccaaggccctctgtagcccatttctccccaaaatgggtatttagaataaccttctgctggcccctctgccttaggaatcatttttaataat

SEQ ID NO: 53952 - DNA, 120 bp, synthetic construct
  source 1..120: mol_type = other DNA
ttagaaaaagaaggaaaatttgggttatatgtgatagacaggactgcaaaagccaaacaacatagcttcgaggggtgtttgattagacagcccaaatattcctcccagagacatctctgg

SEQ ID NO: 53953 - DNA, 120 bp, synthetic construct
  source 1..120: mol_type = other DNA
tcccaccttggtgaaacttcttgtatccttgtcttgtcctttcctatggcttgtggctcaagaacaaatgtggagcccacactgatttcccaggactgtctgagcatcttctccaccagt

SEQ ID NO: 53954 - DNA, 120 bp, synthetic construct
  source 1..120: mol_type = other DNA
ctccataaataacctctttatgacagagaagataatgtcccagttccccccaagtaagacctggtcttctaggcagagcaggtggggaggttggagctggaggggagggtccttgctggg

SEQ ID NO: 53955 - DNA, 120 bp, synthetic construct
  source 1..120: mol_type = other DNA
tgcagtgatccgagattgcaccccactgcactctagcctgacaacagagcaagaatcagtctaaaaaaaaaattgtagagacaagttgttactatgttttgtaggctggtcttgaactcc

SEQ ID NO: 53956 - DNA, 120 bp, synthetic construct; identical to SEQ ID NO: 11491
  source 1..120: mol_type = other DNA

SEQ ID NO: 53957 - DNA, 120 bp, synthetic construct; identical to SEQ ID NO: 11492
  source 1..120: mol_type = other DNA

SEQ ID NO: 53958 - DNA, 120 bp, synthetic construct
  source 1..120: mol_type = other DNA
tcactgtgtgccctgtttctattgacaacatgacccaaatgtgctcttccctgttcagagaagttacataacatcttttagcagcaatcctgggaatgaagtgttgttgtaggtggattt

SEQ ID NO: 53959 - DNA, 120 bp, synthetic construct
  source 1..120: mol_type = other DNA
tccccgctcatgagtgtgtggaggacaccctgaaccccccgctttcaaacaagttttcaaattgtttgaggtcaggatttctcaaactgattcctttctttgcatatgagtatttgaaaa

SEQ ID NO: 53960 - DNA, 120 bp, synthetic construct; identical to SEQ ID NO: 19780
  source 1..120: mol_type = other DNA

SEQ ID NO: 53961 - DNA, 120 bp, synthetic construct
  source 1..120: mol_type = other DNA
cacacatacacacatacatacatacatcatacatacatacacacatacatacatacacacatacatacataaaacgtattttttaaaaaaacaagaagtcattcaagctctatccaagaa

SEQ ID NO: 53962 - DNA, 120 bp, synthetic construct
  source 1..120: mol_type = other DNA
tgacccacttcctcccagaccctggctaattcttttttttttttcctcttccccccccccttttttttttttttttttttttttttgagacggaatcttgctctgtcacccaggctgaag

SEQ ID NO: 53963 - DNA, 120 bp, synthetic construct
  source 1..120: mol_type = other DNA
caggccttagcaactggcatcccaagccctagctacagacatctcagacccttaaatccagaagctcaggcctttgccaggaccccatctcatatcatagtggactagaccccttcacca

SEQ ID NO: 53964 - DNA, 120 bp, synthetic construct
  source 1..120: mol_type = other DNA
gacaggaaaatcacttgaacccaggaggcggaggttgcagtgagccgagattgcaccattgtacagagagagactctgtctcaaaaaaaataatgataataatttaacagccaggggcag

SEQ ID NO: 53965 - DNA, 120 bp, synthetic construct; identical to SEQ ID NO: 19783
  source 1..120: mol_type = other DNA

SEQ ID NO: 53966 - DNA, 120 bp, synthetic construct
  source 1..120: mol_type = other DNA
agagctgccacttgtacccagattgtctggatcctaaaatcaatagcctaaaaagataataatttgcctcttacaccccaccaagaaattctgttcaattctgttgagctgagagggaag

SEQ ID NO: 53967 - DNA, 120 bp, synthetic construct
  source 1..120: mol_type = other DNA
cctcttgtgttttccttcactccaagctcagggagaaatacagccctgtgttcactgtgtacatgggtcccggccagtggtggttttatgtggacacgaagcagtgaaggaagccttgat

SEQ ID NO: 53968 - DNA, 120 bp, synthetic construct
  source 1..120: mol_type = other DNA
tatgcacccatagccaaccctcataccccttatagctaaccttatttctcatcttcctatacttatacacatacctaacccataggtctctgcctccttcacttaggtagatctctttct

SEQ ID NO: 53969 - DNA, 120 bp, synthetic construct
  source 1..120: mol_type = other DNA
ggccactaggtgactgggtggttatggagctctcagtcacgagaagatgggccttggcgggagaaagctctggaatggaagaagagggaaaatattaagaatccactgagatttctggca

SEQ ID NO: 53970 - DNA, 120 bp, synthetic construct
  source 1..120: mol_type = other DNA
aaaattagataagaggtagaaatagagacacattttctctacacctgaggctccttgcctggtctctatgggtgattaacaggtctatataaaagcttcaaatgcccatgtaccccagaa

SEQ ID NO: 53971 - DNA, 120 bp, synthetic construct
  source 1..120: mol_type = other DNA
tgggttcacgactctgtcctccatcttcaaagccagcagcgtagcttcttcaagcctctgtttgcttctggcatcacatcttttattctttttcattattttggagagtcttcctctctt

SEQ ID NO: 53972 - DNA, 120 bp, synthetic construct
  source 1..120: mol_type = other DNA
gccaatatggtgaaaccctttctctactaaaaatgcaaaaattagccaggtatggtagcgcaaacctgtaatcccagctacttgggggactgaggcatgagaatcgtttgatcccaggag

SEQ ID NO: 53973 - DNA, 120 bp, synthetic construct
  source 1..120: mol_type = other DNA
ggcttccctaacaaaaacacctgttttattttgttttgttttgttttgtgcccttgtccgctatattttctggccccttccagctaagattcacgaagagattaaccaggtgattggacc

SEQ ID NO: 53974 - DNA, 120 bp, synthetic construct
  source 1..120: mol_type = other DNA
aaatttgcccaacagacactcatttgcctactcatgtcataaaatctttatgcagcaacattttaagtgtatgttggcatggcacagtggctcatgcctgtaatcccagcactttgggag

SEQ ID NO: 53975 - DNA, 120 bp, synthetic construct
  source 1..120: mol_type = other DNA
ccgcatggaactctttctctacttcacctccacccttcagaacttctctctatgctcgctggtgccacttgtggacatcgatatcacccccaagctctcaggctttggcaacatcacccc

SEQ ID NO: 53976 - DNA, 120 bp, synthetic construct
  source 1..120: mol_type = other DNA
aacaaacaaatggaagaacattccatgctcatgggtaggaggaatcaatatcatgaaaatggccatactgcccaaggtaatttatagattcaatgccatccccatcaagctaccaatgac

SEQ ID NO: 53977 - DNA, 120 bp, synthetic construct
  source 1..120: mol_type = other DNA
gaaataccatttgaccctgccatcccattactgggtatatacccaaaggactataaatcatgctgctataaagacacatgcacacatatgtttattgcggcactattcacaatagcaaag

SEQ ID NO: 53978 - DNA, 120 bp, synthetic construct; identical to SEQ ID NO: 11714
  source 1..120: mol_type = other DNA

SEQ ID NO: 53979 - DNA, 120 bp, synthetic construct
  source 1..120: mol_type = other DNA
agaccagcctgaccaacacagagaaaccccgtctctactaaaaatacaaaatcagctgggtgtggtggtgcacgtctcaaaaaaaaaaaaaaaaaaaaaaaagaaccacagtgctgaatt

SEQ ID NO: 53980 - DNA, 120 bp, synthetic construct
  source 1..120: mol_type = other DNA
aataaaaaaaaaaaaggacaaacatcttccaacagaaatgccatcatgatggtgatctcaaagagttttgtgagcccacagtgaggccacatctgctgtctctgaccccaatcagctctt

SEQ ID NO: 53981 - DNA, 120 bp, synthetic construct; identical to SEQ ID NO: 27797
  source 1..120: mol_type = other DNA

SEQ ID NO: 53982 - DNA, 120 bp, synthetic construct
  source 1..120: mol_type = other DNA
tctcagcaaactatcacaaggacaaaaaatcaaacaccacatgttctcactcataggcgggaattgaacaatgagaacacttggacacaggaaggggaacatcacacaccggggcctgtt

SEQ ID NO: 53983 - DNA, 120 bp, synthetic construct
  source 1..120: mol_type = other DNA
atcgactgttttttattaagtgttcattgcatcgagacagttgggtgttgaggatggaatgcaagaggtgtagggaaacatgttttctgtctcccagaaatatgaaaggagatgggctga

SEQ ID NO: 53984 - DNA, 120 bp, synthetic construct
  source 1..120: mol_type = other DNA
cccttgactcaacctttagaacaacgggtttttctggttgaagaagtcctcctaagcttaatttcagggggatctgcaacagttaaacaagcatattgagaagcattaaataaacaaaag

SEQ ID NO: 53985 - DNA, 120 bp, synthetic construct
  source 1..120: mol_type = other DNA
gccagaggaccacttttattcagggctgagtcccctgtctgggcacatataatacagctacactgctggcctaaagccacaaataatatggaatatggaaataatatggaaactatttct

SEQ ID NO: 53986 - DNA, 120 bp, synthetic construct
  source 1..120: mol_type = other DNA
aagtgctgggattacaggcatgagccaccatgcctggctgggaacaacattaatagagttataattgggttgaaaaggagcccagctggatggagctaggcacctggaaggtgaggtcag

SEQ ID NO: 53987 - DNA, 120 bp, synthetic construct
  source 1..120: mol_type = other DNA
gggtttcttacttaggggccacccctcaactagtagtacacaggatacttttgtgggctggtcattgaaatcctgctatgcttattttgctatgagaattgtaagctacagatcctttct

SEQ ID NO: 53988 - DNA, 120 bp, synthetic construct
  source 1..120: mol_type = other DNA
attaaaaaaatctctaaatataaaaatacaagcaaataattatacaaccacatgactgtcctgtagattaagagaggcagaatatgcttgaaccaggctggttcagggagggctcccttc

SEQ ID NO: 53989 - DNA, 120 bp, synthetic construct
  source 1..120: mol_type = other DNA
cgtgtctcttcataccacaaagaatcccaattttggcagaggtctgaaaacagtgtgggtgatatgcacctagtatttggtgttatatttggaaggcaatatgatagtgttttaagactt

SEQ ID NO: 53990 - DNA, 120 bp, synthetic construct
  source 1..120: mol_type = other DNA
aagataattgattgggccacgagctccagatcggacagagctgaaaggagaggaaagacattttaggtaaatcagatcaatgtagggcatcacagtttagatgaagagaaatctaagtga

SEQ ID NO: 53991 - DNA, 120 bp, synthetic construct
  source 1..120: mol_type = other DNA
cactggtctgtttgatcaggactggattaggacctttagagacctggaacatagaaataaatataatgcctgctccaaccatgtaattcacaaccaaaaccaatatgaaaggagtgtgag

SEQ ID NO: 53992 - DNA, 120 bp, synthetic construct
  source 1..120: mol_type = other DNA
cctaataaatttctaggcagaaatttttattcagtggatctgaaggaggctgagaattggcatttgatctgatgtaggtgatccacagaccgcagactgactttctagcatgccaggttt

SEQ ID NO: 53993 - DNA, 120 bp, synthetic construct
  source 1..120: mol_type = other DNA
atttcatgtgctgtctctgactcattctcatatctccttccccaaaccccactttctgcatttctaccaaatgaattctcttgctctaaacatgagcagtcttcatgttaaaagcattct

SEQ ID NO: 53994 - DNA, 120 bp, synthetic construct
  source 1..120: mol_type = other DNA
tgaagtgtccagaataggcaaatccatagaagcagaaagttgattagtggttgcatatgatgacagggtttgtgacagggggctgatagctaaaaatgtatgaggtctctagattgacaa

SEQ ID NO: 53995 - DNA, 120 bp, synthetic construct
  source 1..120: mol_type = other DNA
tatagtgagtgaccacatatccctggtctgcccaggacaaactcagattacacctgtttttactgcataagtgtagatagcaaataataggcttgccctacctatagtgtttttaccacc

SEQ ID NO: 53996 - DNA, 120 bp, synthetic construct
  source 1..120: mol_type = other DNA
aggcagctcaaattcagtggactaccccttggaaagggactgtgatcttattttatacctgtccccaccagattcattctttaagtttcttattaaaactcatgttattttcatacctcc

SEQ ID NO: 53997 - DNA, 120 bp, synthetic construct
  source 1..120: mol_type = other DNA
aaaacagcccacttcatctaaatgatgcttaatgatgaaagaactgaaggcttccctcctaagattaggaacaattcaaaaattcaccacatttactcaacattatactgggaagtccta

SEQ ID NO: 53998 - DNA, 120 bp, synthetic construct
  source 1..120: mol_type = other DNA
aggaaatattaatacattgatcacctcaaaataaaaaatagtttgctctgatatggaccctgtcagagaaaaagacttgtgactgtaggatagcaggagggagccacatggagacagagt

SEQ ID NO: 53999 - DNA, 120 bp, synthetic construct
  source 1..120: mol_type = other DNA
cattctccataatgtttcatatgtttaaaatattttattttaaaaagaatattaaaccaacaaagatcaaaagagacaaagatgggcattacataatggtgatgggatcaatacaacagg

SEQ ID NO: 54000 - DNA, 120 bp, synthetic construct
  source 1..120: mol_type = other DNA
tagagacacaacaaacccttcaaaaaatcagtgaatccaggagctggttttttgaaaaaggtcaacaaaatagatagactgctagcaagactaataaagaaaaaagaagaatcaaataga

SEQ ID NO: 54001 - DNA, 120 bp, synthetic construct
  source 1..120: mol_type = other DNA
aaccccatcgtctcagccccaaaactccttaagctgataagcaacttcaggaaagtctcaggatacaaaatcaatttacaaaaatcacaagcattcctacacaccaataatagacaaaca

SEQ ID NO: 54002 - DNA, 120 bp, synthetic construct
  source 1..120: mol_type = other DNA
ctcatcatcactggtcattagagaaatgcaaatcaaaaccacaatgagataccatctcatgccaggtagtatggtgatcattaaaaagtcaggaaacaacagatgctggagaggatgtgg

SEQ ID NO: 54003 - DNA, 120 bp, synthetic construct
  source 1..120: mol_type = other DNA
aaataaaatcacagtccatcagcccgccagtggttaagaatattcagcatttcttcaaattcagcaggaaggtatagacaaagaaatgcttatatacccttctattaaaaagtcttggct

SEQ ID NO: 54004 - DNA, 120 bp, synthetic construct
  source 1..120: mol_type = other DNA
gcatgcagattcccattgcaatactctacacccaaataaatatcttcttctttcagagaacttctctctgtttgtagttaggttgacaagagcttcatcccaagaggctttgggctgaga

SEQ ID NO: 54005 - DNA, 120 bp, synthetic construct
  source 1..120: mol_type = other DNA
cacttgctcagagttttcactgaaacttaaaaacaaaccttcctgtatcgacatttcaggggtgacattttaactgtgcaaacaaaggtcccaggaatgtgcatcttgggggtacatcta

SEQ ID NO: 54006 - DNA, 120 bp, synthetic construct
  source 1..120: mol_type = other DNA
tactaactaagtatgactgtaccttcctgggaacctgcatagagcaaaaagaaaaccttctttatggcgctcacaaagtttgcacatcaagttctgagcatcaggttgctgatctacctg

SEQ ID NO: 54007 - DNA, 120 bp, synthetic construct
  source 1..120: mol_type = other DNA
cctgttttaggatctggttcttcttaaaccgtcattcacagagaggtcttggaggagtcacagagtccttatttctacagattgacaactgtgctcaaggcttccattgacctcatagaa

SEQ ID NO: 54008 - DNA, 120 bp, synthetic construct
  source 1..120: mol_type = other DNA
cagagaggcaaattaggaaaatgtagctgaaaagcatggtgtgtataaatggatccatatgcttcatatgggcttttagctaaaaggtaggggccttcgaatgtccacattccctcctgt

SEQ ID NO: 54009 - DNA, 120 bp, synthetic construct
  source 1..120: mol_type = other DNA
ttttgctgtcatcactggctcacagtcttgcttactcctctgccctgagcgtttaacataacctgctaagcaggtttgtttgaaataggggtattaaaatgaacgttgggaaggtatatt

SEQ ID NO: 54010 - DNA, 120 bp, synthetic construct
  source 1..120: mol_type = other DNA
tttgtagcatccaacacttaagctactgctccttgaacatcttttttttttttttttttttttgagacagcctcactctgtcacccaggctgaagtgcactggcatgatctcagctcact

SEQ ID NO: 54011 - DNA, 120 bp, synthetic construct
  source 1..120: mol_type = other DNA
tacttaatctataagctgggtaaatactggatagtaaaagcactcaccatccatcgtttaacaaaatatttatggagcactgactctgtgccaggcctgagacaaattcttgtggactcg

SEQ ID NO: 54012 - DNA, 120 bp, synthetic construct
  source 1..120: mol_type = other DNA
aagatggcaaccatctccatcctcctcctctcccaagcacaaagtgtacttaaggggtagagttgcatattaaatacaccggtcctggaaataagacttataggctattgcttaatatga

SEQ ID NO: 54013 - DNA, 120 bp, synthetic construct
  source 1..120: mol_type = other DNA
taaatagttaatgaaacataaaaaccacagagttacatgttaggggttcttacttaagaacaacccccctccacctcccaaccagtagtacacaggatacttttgtgggctggtcattga

SEQ ID NO: 54014 - DNA, 120 bp, synthetic construct
  source 1..120: mol_type = other DNA
tataaatcatatgaatttctccctgcctagccaagttcctgacacatggcaagcactatctttttggtgactgagtgattcaaagtgaagtacagcgagtggtctctgatttcgtattag

SEQ ID NO: 54015 - DNA, 120 bp, synthetic construct
  source 1..120: mol_type = other DNA
ttttttgtgataaaaagacttacaagcaaatgattgtacaaccacacgattgtcatgtagattaagagaggcagaatatgcttgaaccagcctgggtcagggtgagctccatttccctgg

SEQ ID NO: 54016 - DNA, 120 bp, synthetic construct
  source 1..120: mol_type = other DNA
aggtacacaatttgagttctagttaaagttatgaagagaatagaaccccacactcagccccatcccctccttttggaatagtttcctagttgttgcttcagggctggactgtaatcttca

SEQ ID NO: 54017 - DNA, 120 bp, synthetic construct
  source 1..120: mol_type = other DNA
cccagtgtgtgatattccccttcctgtgtccatgtgttctcattgttcaattcccacctacgagtgagaacatacagtgtttggttttttgtccttgccatagtttgctgagaatgatgg

SEQ ID NO: 54018 - DNA, 120 bp, synthetic construct
  source 1..120: mol_type = other DNA
gcagaagctctttagtttcattagatcccatttgtcaattttggcttttgttgccattgcttttggtgttttagacatgaagtccttgcccatgcctctgtattgaatgatattgcctag

SEQ ID NO: 54019 - DNA, 120 bp, synthetic construct
  source 1..120: mol_type = other DNA
attggctgtgggtttgtcataaatttgctcttattattttgagataggttccatcaatacctaatttattcagagtttttagcatgaagggctgttgaattttgttaaaggccttttctg

SEQ ID NO: 54020 - DNA, 120 bp, synthetic construct
  source 1..120: mol_type = other DNA
ttctcttgtaggcatttagtgctataaatttccctctacacattgctttgaatgtggcccagagattctggtatgttgtgtctttgttcttgttggtttcaaagaacatctttatttctg

SEQ ID NO: 54021 - DNA, 120 bp, synthetic construct
  source 1..120: mol_type = other DNA
gctgattattttgctcgttagttgatgcagtttctccttagcctcgatggtctttacaatttggcatgtttttgcagtggctggtaccagttgttcctttccatgtttagtgcttccttc

SEQ ID NO: 54022 - DNA, 120 bp, synthetic construct
  source 1..120: mol_type = other DNA
ctctgatttttagatttttcagtttttctgctgtttttcccccatctttgtgtttttatctacctttgatctttgatgatggtgatgtacagatgggttttggtgtggatgtcctttctg

SEQ ID NO: 54023 - DNA, 120 bp, synthetic construct
  source 1..120: mol_type = other DNA
ggaaatgcagaaatcattcgtcttctgtgttgctcacgctgggagctgtagactggagctgttcctgtttggccatcttctcgccacactcctttttttttttttttttttttttttttt

SEQ ID NO: 54024 - DNA, 120 bp, synthetic construct
  source 1..120: mol_type = other DNA
tttctctatatatgtttgagggaacttaaaggaccaatactgagctacagatcacctcttgctactcaaagtgtgtttcatggaccagcagcaccagccacatctgggagcttattagaa

SEQ ID NO: 54025 - DNA, 120 bp, synthetic construct
  source 1..120: mol_type = other DNA
taggcagatagatgattgacagatagatagacagacagaagtagatgtagacatggacatgtttaaagtggtatactggagtctgctgagtcctgctctctagaaccaattgttaaatat

SEQ ID NO: 54026 - DNA, 120 bp, synthetic construct
  source 1..120: mol_type = other DNA
tacagctttctggccaaagagttgccggttccatctctggtcataactgcttacccaggaagaagtactggatcttttattcttctacctttttcttcagcagtgtccgtatagattaat

SEQ ID NO: 54027 - DNA, 120 bp, synthetic construct
  source 1..120: mol_type = other DNA
attttctctaccagtaataagaataagaacatcatgattctcaactggaacccattccttttatcatgtttgcccttctttcaggccggcgactgagcaagggcaggtctatacatagga

SEQ ID NO: 54028 - DNA, 120 bp, synthetic construct
  source 1..120: mol_type = other DNA
gaaagaaataatagcccacatacttattgagagaaataatggatctaagaaaccaaattttaggaacttcttagtgctctccacaaaggggtcttgtggattgttgagagagtcgatgtt

SEQ ID NO: 54029 - DNA, 120 bp, synthetic construct
  source 1..120: mol_type = other DNA
agaaaaaccatgaagggattgaaattgttccaagttccccattgtaactttcccatcttacccaatgcaaggcaacaagtaccaaatgcttgcttacccacagttccatatccactacac

SEQ ID NO: 54030 - DNA, 120 bp, synthetic construct
  source 1..120: mol_type = other DNA
ccccttggaaacggactgtgatcttactttctacctgtccccagattcattctttacatttctaattaagactcatcttattttcatacctccttgagttttccgctggtgaaggttgga

SEQ ID NO: 54031 - DNA, 120 bp, synthetic construct
  source 1..120: mol_type = other DNA
atcacatttaatgatgaaggactgaatggtttttccaagatcaagaagaactaaaaaatgcccactctcaacattcttactaaagagcatacctgatgtcttaatacactagacaagaaa

SEQ ID NO: 54032 - DNA, 120 bp, synthetic construct
  source 1..120: mol_type = other DNA
agttttatggtggtgtgcgacttccagtgtgttatcttctaatcacggacagttgaattgacactgtcaggtattaggtgtgtttgtggcaatttggcaagtaaaacccagcaattatca

SEQ ID NO: 54033 - DNA, 120 bp, synthetic construct
  source 1..120: mol_type = other DNA
tgctttggtgatggatgaaggcactgacactacagatacggcacaacttgctatttttattagaggtattgatgatgaatataatgtcactgaagaaatcgaaatgtcaccatgctatta

SEQ ID NO: 54034 - DNA, 120 bp, synthetic construct
  source 1..120: mol_type = other DNA
ttgattttgcctctttactggacttttgtaagacctgtcttcccaatgacaaatatcccttgcttcacaatcacaccttgttcatgtcattgctttttggcagcacttacatttgtgagc

SEQ ID NO: 54035 - DNA, 120 bp, synthetic construct
  source 1..120: mol_type = other DNA
agctgagttttgacaatatgcctacctttccaaaatggtgttggaacatttggacagccatagtccacagaaaatgaaccttgatctaaatctcataacttatgcaaatattaacacaaa

SEQ ID NO: 54036 - DNA, 120 bp, synthetic construct
  source 1..120: mol_type = other DNA
aagacagaataacattctttcactagcactgttctgatcacgtcgggatctgtgatggccagcacagggagttgaccttcatacgttctgtgtggggacaacggagctgattaaacttca

SEQ ID NO: 54037 - DNA, 120 bp, synthetic construct
  source 1..120: mol_type = other DNA
aagtggtttcccaatctgtttctctattatctctcaacccttctttcaaaagcacatgttaaattcagtctaaatgaaggagttttggcttttaattgaaagtgaatcaatgtgggaagg

SEQ ID NO: 54038 - DNA, 120 bp, synthetic construct
  source 1..120: mol_type = other DNA
taaatagaataaaccctacctctaattggggctgaaaacagttgcgtccaatgaaatcaggcctgctatctttcactggcagttgaaggaagctattcagagatgtcttaagggaaagac

SEQ ID NO: 54039 - DNA, 120 bp, synthetic construct
  source 1..120: mol_type = other DNA
tctttctttctctctctctctttctttcttcctttctgtcttgttctgttgaccaagctggagtgcagtggtgcgatcacagctcaatacagccttgacttcctgggttcatacaatcct

SEQ ID NO: 54040 - DNA, 120 bp, synthetic construct
  source 1..120: mol_type = other DNA
atttgctcagaaatgtttatgctttttcttccctctaagctctgaccctgttttaggatctagcccttcttaaacgttcattcacagagaggccttggaggagtcatggagtccttattt

SEQ ID NO: 54041 - DNA, 120 bp, synthetic construct
  source 1..120: mol_type = other DNA
attcccacttcagttccctcctttgttgtcacagccatgtcaaatcaatgacactaatctctgctcctgaactttaaacacattacctgacctctcaggtgaggacaagctattgagtta

SEQ ID NO: 54042 - DNA, 120 bp, synthetic construct
  source 1..120: mol_type = other DNA
ggatgccaggaatcccaccagtgagagggtttgccctcctgtactgtaacataaaggggaaaaatatgtaaaatccaaattggctttcatggctcctgccttttcaggctgctagtagat

SEQ ID NO: 54043 - DNA, 120 bp, synthetic construct
  source 1..120: mol_type = other DNA
ccaacacttcagctacttctccttgaacatctcttttgatcttcaaaacagataagggaaaaggggcccgattagcaccccaagtccaaggaaacaaagagaggagtttggacagttact

SEQ ID NO: 54044 - DNA, 120 bp, synthetic construct
  source 1..120: mol_type = other DNA
ggacagggtcagcctggattggagcacgctgtacttcagtcatgtttccttttgcttgtatttctgttctgggacaccccatttgtcttctccttagtacttacaattgcattcttggtc

SEQ ID NO: 54045 - DNA, 120 bp, synthetic construct; identical to SEQ ID NO: 14644
  source 1..120: mol_type = other DNA

SEQ ID NO: 54046 - DNA, 120 bp, synthetic construct; identical to SEQ ID NO: 7559
  source 1..120: mol_type = other DNA

SEQ ID NO: 54047 - DNA, 120 bp, synthetic construct
  source 1..120: mol_type = other DNA
caagatgtgaggggccggattctgtgccttggtttatcaatgtccccacatggagataactgaatgagaccctgtccaaacagcattcaagaggagcctccatgaactgtgccactggtg

SEQ ID NO: 54048 - DNA, 120 bp, synthetic construct; identical to SEQ ID NO: 7560
  source 1..120: mol_type = other DNA

SEQ ID NO: 54049 - DNA, 120 bp, synthetic construct; identical to SEQ ID NO: 7561
  source 1..120: mol_type = other DNA

SEQ ID NO: 54050 - DNA, 120 bp, synthetic construct; identical to SEQ ID NO: 7586
  source 1..120: mol_type = other DNA

SEQ ID NO: 54051 - DNA, 120 bp, synthetic construct
  source 1..120: mol_type = other DNA
gtagaatggggtctgagaggaggcagcctcggataatggggacaagcagccttgaggcaatgtttcttctatcttacagccctattatcctttggcctttatcagatggtatgaacatcc

SEQ ID NO: 54052 - DNA, 120 bp, synthetic construct; identical to SEQ ID NO: 7587
  source 1..120: mol_type = other DNA

SEQ ID NO: 54053 - DNA, 120 bp, synthetic construct; identical to SEQ ID NO: 7588
  source 1..120: mol_type = other DNA

SEQ ID NO: 54054 - DNA, 120 bp, synthetic construct; identical to SEQ ID NO: 7558
  source 1..120: mol_type = other DNA

SEQ ID NO: 54055 - DNA, 120 bp, synthetic construct
  source 1..120: mol_type = other DNA
ggttgtttgtttttttcttgtaaatttgtttgagttcattgtagattctggatattagccctttgtcagatgagtaggttgcgaaaattttctcccattttgtaggttgcctgcagccct

SEQ ID NO: 54056 - DNA, 120 bp, synthetic construct; identical to SEQ ID NO: 19619
  source 1..120: mol_type = other DNA

SEQ ID NO: 54057 - DNA, 120 bp, synthetic construct
  source 1..120: mol_type = other DNA
gtcaaggacagcttctgaaaagagaagggagtggccaacttttattcaggcaggtaacaaggccgactgggacatgttagtgaggaagagcaagataggaggaaggtgcctccagaaaag

SEQ ID NO: 54058 - DNA, 120 bp, synthetic construct
  source 1..120: mol_type = other DNA
tctcctcactcactcattcctctcctcactcactcattctcctcactcactcattcctcttcccactcactcattcctctcctcactcactcattcctctcctcactcactcattcctct

SEQ ID NO: 54059 - DNA, 120 bp, synthetic construct
  source 1..120: mol_type = other DNA
aggagaggaatgagtgagtgaggagaggaatgagtgagtgaggagaggaatgagtgagtgaggagaggaatgagtgagtgaggagaagaatgagtgagtgaggagaggaatgagtgagcg

SEQ ID NO: 54060 - DNA, 120 bp, synthetic construct
  source 1..120: mol_type = other DNA
ggcagaggaatgagtgagcggggagaggaatgagtgagcggggagaggaatgagtgagcggggagaggaatgagtgagcggggagaggaatgagtgagtgggcagaggaatgagtgagtg

SEQ ID NO: 54061 - DNA, 120 bp, synthetic construct; identical to SEQ ID NO: 19608
  source 1..120: mol_type = other DNA

SEQ ID NO: 54062 - DNA, 120 bp, synthetic construct; identical to SEQ ID NO: 19609
  source 1..120: mol_type = other DNA

SEQ ID NO: 54063 - DNA, 120 bp, synthetic construct; identical to SEQ ID NO: 19610
  source 1..120: mol_type = other DNA

SEQ ID NO: 54064 - DNA, 120 bp, synthetic construct; identical to SEQ ID NO: 19611
  source 1..120: mol_type = other DNA

SEQ ID NO: 54065 - DNA, 120 bp, synthetic construct; identical to SEQ ID NO: 19612
  source 1..120: mol_type = other DNA

SEQ ID NO: 54066 - DNA, 120 bp, synthetic construct; identical to SEQ ID NO: 19613
  source 1..120: mol_type = other DNA

SEQ ID NO: 54067 - DNA, 120 bp, synthetic construct
  source 1..120: mol_type = other DNA
tgttcttttggcttaggattgacttggcgatgcgggctcctttttggtgccatatgaactttaaagtagttttttccaattctgtgaagaaagtcattggtagcttgatggggatggcat

SEQ ID NO: 54068 - DNA, 120 bp, synthetic construct
  source 1..120: mol_type = other DNA
ttggaaatcatcattctcagtaaactatcgcaaagacaaaaaaaccaaacaccgcatgttctcactcataggtgggaattgaacaatgagaacacatggacacaggaaggggaacatcac

SEQ ID NO: 54069 - DNA, 120 bp, synthetic construct
  source 1..120: mol_type = other DNA
agataaaatagcaaatttttttgattgaggtagaattcacataccacgaaattcaccatttcaaagtgtccaattcaatagcatttagtgcactcacagtgtcgtgctaccttcgtcact

SEQ ID NO: 54070 - DNA, 120 bp, synthetic construct
  source 1..120: mol_type = other DNA
ctctgagcacaccacagacccttctaggaccaacccaaccgtactctatggaccttttcctataaactccagaggaggtgagggaaagagagctggaacttggaccatctacaatgtccc

SEQ ID NO: 54071 - DNA, 120 bp, synthetic construct
  source 1..120: mol_type = other DNA
cagacccatggaacatgagggagagctcagaaaaagacatgagaataagtgaaaacttcacatttgataaagacagcccctgctcaaaccaaaatcctgggaaactgatggattttacag

SEQ ID NO: 54072 - DNA, 120 bp, synthetic construct
  source 1..120: mol_type = other DNA
cacgatggaatactatacagctacacaaaaggaggaaatagggatcactagtctcatcacattctgcaggctggaaggtaaatcagtacagacactgtggaaggcaaattggaaatatct

SEQ ID NO: 54073 - DNA, 120 bp, synthetic construct
  source 1..120: mol_type = other DNA
cgcctgtaatcccagcactttgggaggccaagggcggcagatcacaaggtcaggagttcaagaccagcctgtccaatatggtgaaaccccgtctctaataaaaatacaaaaaaattagcc

SEQ ID NO: 54074 - DNA, 120 bp, synthetic construct
  source 1..120: mol_type = other DNA
ttggaccctttcttttaaccacatccataattttgcttgaaatctggattttatactccaggacatgggtccaggcaaagattttctgtgttaagacctcaaaagcacaggcaatagaca

SEQ ID NO: 54075 - DNA, 120 bp, synthetic construct
  source 1..120: mol_type = other DNA
gcacttcagcctgggcgacagaacaagactctgtctcaaagaaagaaagaaaggaaagaagaaagagagaaagagagagagggagggagggaggaaggaaggaaggaagaaaggaaatgt

SEQ ID NO: 54076 - DNA, 120 bp, synthetic construct
  source 1..120: mol_type = other DNA
ctctccagtacgccctccacactagccctagaaagatcttcctggtacccagatgtgacctgtccctacactgctcaaacacttcccatggctccctattgccattgggctaaaactgaa

SEQ ID NO: 54077 - DNA, 120 bp, synthetic construct
  source 1..120: mol_type = other DNA
tctgtcctaagggcctataacctttccccagacagtcaggatgggtactaagtcctgcctgtggtcctctgctcctattcccactaggcaatagtggcagaatcaacaaaaacagctttt

SEQ ID NO: 54078 - DNA, 120 bp, synthetic construct
  source 1..120: mol_type = other DNA
agaaatagaaaatgtgccaagactcataatgtagggcccctctcttaggatgcaaactctgctgcacatacaagtgaaaacattacccttggagaaatttgacttgaggatgaagagcca

SEQ ID NO: 54079 - DNA, 120 bp, synthetic construct
  source 1..120: mol_type = other DNA
acagacatacacacacatacacaaaatcacagacttagaaacacaaacacacataaacatagacatagacacagacacacgcacacatagactaagtcacagacttagaaacacaggcac

SEQ ID NO: 54080 - DNA, 120 bp, synthetic construct
  source 1..120: mol_type = other DNA
gacacacactcagacacaactactgatagacataaacatagacatagacagaaacagacacaagcacaggcacagacaaagatatagacatagcattgacatagacatagccatagacga

SEQ ID NO: 54081 - DNA, 120 bp, synthetic construct
  source 1..120: mol_type = other DNA
aagggaggcaacaatttaatatacctgaagccccaggatcacctcccaccagcagccaggatctacctcctatcagtaaacagagtatccaggaacagatgaccccacagatacagggtg

SEQ ID NO: 54082 - DNA, 120 bp, synthetic construct
  source 1..120: mol_type = other DNA
ctgtgctctgtgtgccattagtcaactcattaccctcccctatatcctgcctgtcaaatcttcagaaacagttaagatgatgtgctttggagccatataattcacattagaaactctgct

SEQ ID NO: 54083 - DNA, 120 bp, synthetic construct
  source 1..120: mol_type = other DNA
ctgtgttggacttttggctttcgatgtcaaaatacaatgtggtgaaaatgatgagttaataactaacgaagctaagccttgtcttactccttggaaccctgcctgcattgtgaaccatgg

SEQ ID NO: 54084 - DNA, 120 bp, synthetic construct
  source 1..120: mol_type = other DNA
cacctgcagatactcacccagccagggctccaggaagctgtagaagaacttgtcctttggtgcaatggcagctgacataaatgaggacaatcaggggccatggaggcaggtgaaagaggg

SEQ ID NO: 54085 - DNA, 120 bp, synthetic construct
  source 1..120: mol_type = other DNA
cacagataagccccaaacttgaccagctctacatgaccccagttggaattatataccagatgtaaccaggtataacatatttcaggtgtaaccaggacccaggtgtaaatatacaaggca

SEQ ID NO: 54086 - DNA, 120 bp, synthetic construct
  source 1..120: mol_type = other DNA
cctttcccataagaactgagcttctgggactcatcgttgacatcatgaggaaaaggccaccttgataggaaaagcgacatggagaaagctaaagccaagagagaaagacagatttccagt

SEQ ID NO: 54087 - DNA, 120 bp, synthetic construct
  source 1..120: mol_type = other DNA
gggttgaggtctcttagggttccagggcagcccagaacaccagaacagggggtagatggcaatagagagaggagacgctgagatggaaattgatgaatacatgaaagaaagatgaagata

SEQ ID NO: 54088 - DNA, 120 bp, synthetic construct
  source 1..120: mol_type = other DNA
tctgtgcatccatgtgtccatgcatccatctattctattatctatctacctacgtgcctgtccatccatccatccatccatctatccatcctatctgtgcatctatctatctatcctatt

SEQ ID NO: 54089 - DNA, 120 bp, synthetic construct
  source 1..120: mol_type = other DNA
atgtgggaagacaggcaggaaaaggattcaatgcaggcctggagtgggaggacaaggaagtgagaagggcttgcgtaggcacctcacagaaatgaataagcagaggaatgagtaagatgc

SEQ ID NO: 54090 - DNA, 120 bp, synthetic construct; identical to SEQ ID NO: 19606
  source 1..120: mol_type = other DNA

SEQ ID NO: 54091 - DNA, 120 bp, synthetic construct
  source 1..120: mol_type = other DNA
atagacatagccatagacgaagacatagtcatagacacagacaaaaaacatggacatagacatacactgagacaaagacacaaacacagaaaaaagacaaaggcatagacgcagacacag

SEQ ID NO: 54092 - DNA, 120 bp, synthetic construct; identical to SEQ ID NO: 19607
  source 1..120: mol_type = other DNA

SEQ ID NO: 54093 - DNA, 120 bp, synthetic construct
  source 1..120: mol_type = other DNA
ccatactgattagcagtcgctcctcagtcccacctccccacagctgctgaaagccaccaatccgctatgcatctcttcagattggcctgttctggaaatttcgtataaaaggacagtaca

SEQ ID NO: 54094 - DNA, 120 bp, synthetic construct
  source 1..120: mol_type = other DNA
ggggtgggctcgggtctgggacggcagagaaactcactcattcctctgatcactcactcattcctcttcccactcattcctctcctcactcactcattcctctcctcactcactcattct

SEQ ID NO: 54095 - DNA, 120 bp, synthetic construct
  source 1..120: mol_type = other DNA
tctgcaaaatttcaagcagcctgtggctctctcatttcacagggcactctgccagaatcaccatctcagctttcttcctggtaatggtgcaagaaatgtctggctatccagtttcaaact

SEQ ID NO: 54096 - DNA, 120 bp, synthetic construct
  source 1..120: mol_type = other DNA
agaactttttcatcttcccaaactggaactctgtacacattaaactctaactccccattttcccctccccccagcctcaggcaacaaccattctactttctgtctttttaaatttcccta

SEQ ID NO: 54097 - DNA, 120 bp, synthetic construct
  source 1..120: mol_type = other DNA
aattgcttgaacctgagaggcagaggttgcaatgagctgagatagtaccactgcactccagcctgggtgacagagcaagacttcgtctcaagaaaaaaaaataataaaaaatatgttgta

SEQ ID NO: 54098 - DNA, 120 bp, synthetic construct
  source 1..120: mol_type = other DNA
gtattgaatttcattatcatcatcttttttgatggccaaattgtcccagatatggagaaggagacaaagcaagagaagaggctggtagacatgggcccagtcattcagaactttgtaggc

SEQ ID NO: 54099 - DNA, 120 bp, synthetic construct
  source 1..120: mol_type = other DNA
cagttattccccattcctcccttgccccagtcactggcaactactaatctgcatttttgtctctatgaatttacttattctggatttttcatataaatggaatcacacaatatgtgaccc

SEQ ID NO: 54100 - DNA, 120 bp, synthetic construct
  source 1..120: mol_type = other DNA
ttatcttttattttagattaagaggtacatgtgcaggcttcttacctgggtatactgcatgatactgtgaagtttggggtataaatgatgccatcacccaggtgctgagcacagtaccca

SEQ ID NO: 54101 - DNA, 120 bp, synthetic construct
  source 1..120: mol_type = other DNA
caagccatgtatttaccatggcaagagtcacatttcactatctggttggctggctaaaagcaagcactggtgatctctgctacaacaagctgttcgtgataggctttctcagcagagatg

SEQ ID NO: 54102 - DNA, 120 bp, synthetic construct
  source 1..120: mol_type = other DNA
caagggagtagtccatagtgtcctcttataatccttttattatctgtaataataagttgatagtaacgttcccactttcacttctgattgtagtaacttgattcttctcacttttcttca

SEQ ID NO: 54103 - DNA, 120 bp, synthetic construct
  source 1..120: mol_type = other DNA
gtgacttaccatatgatctatgctaaagaatgacccatgtgtacttgagaagaacatgtaatctgctgttgttaggtggagcttttagaacatgtctgtttggcataattatagtgttgt

SEQ ID NO: 54104 - DNA, 120 bp, synthetic construct
  source 1..120: mol_type = other DNA
tcagttattttcatagtgattaacgtgagattaaaattaatatcttaaagctattggaaattttcaaccattatttcttcaacttagttttccctctttgctcttctgggactccaatta

SEQ ID NO: 54105 - DNA, 120 bp, synthetic construct
  source 1..120: mol_type = other DNA
gaaagcctgtggtcttatcaggtcttttccaaccatgcatcctaccctgggtatgtgtaggttccctgttatatgtgagaactttttaaagcattgattccaaaacaaaattctcattcc

SEQ ID NO: 54106 - DNA, 120 bp, synthetic construct
  source 1..120: mol_type = other DNA
ggaggctatctggtagtgaagggatagatcaggtttggatttgctggggtcctgaggtgtctgtgtggtacacaaagggaaatgtctagagggcagtggttttatattgaagtctatgga

SEQ ID NO: 54107 - DNA, 120 bp, synthetic construct
  source 1..120: mol_type = other DNA
cattctcattctgctataaagacatacctgagactgggtaacttataatgaaaagaggtttaaccaactcatggttctattggctgtacagggttctgcttcttgggaggctgcaggaaa

SEQ ID NO: 54108 - DNA, 120 bp, synthetic construct
  source 1..120: mol_type = other DNA
aatttcattatcagttttccacaatctaattgcccctggaaaatcttgctcttgaggatccctttgaaagaatccactctcataaactaagtcttttatgaactcagtggagacctcaaa

SEQ ID NO: 54109 - DNA, 120 bp, synthetic construct
  source 1..120: mol_type = other DNA
agtttatatggggttatttgatgtttagaccatgaccatcatcatcagggcaaggaccctgtcttgtatacccaacacttctcacagggatggactcagggtaggtgctcaatgagaagt

SEQ ID NO: 54110 - DNA, 120 bp, synthetic construct
  source 1..120: mol_type = other DNA
caagcttccttgagttggaagagcacaccctgaactgatgcacctctcttcgagtctaaggctccttcctgatgatgcccccttcagcctgctccaaccactgcctctccttgcaatgcc

SEQ ID NO: 54111 - DNA, 120 bp, synthetic construct
  source 1..120: mol_type = other DNA
gtgtcacccactaacatgttgttccatcttccctattccagtaccctggactcatacctgaaagcagtgttcaaccttagcaaaatctccaaccagcgcatgaacaattttctacatcac

SEQ ID NO: 54112 - DNA, 120 bp, synthetic construct
  source 1..120: mol_type = other DNA
cttttttttccatttctgtgcccttatatttgcggtttatgtctttttttctttttcttttccttttttttattattatactttaagttctaggatacatgtgcacaacgtgcaggtttg

SEQ ID NO: 54113 - DNA, 120 bp, synthetic construct
  source 1..120: mol_type = other DNA
cttgtaaatttgtttgagttctttgtagattctggatattagccctttgtcagatgaggagattgcaaaaattttctcccatctgtaggctgtctgttcactctgatggtagtttctttt

SEQ ID NO: 54114 - DNA, 120 bp, synthetic construct
  source 1..120: mol_type = other DNA
tgggaaaatcatgtggtttttgtctttggttctctttatatgctggattacgttgattgatttgcgtatgttgaaccagccttgcatcccagggatgaagcccacttgatcatggtggat

SEQ ID NO: 54115 - DNA, 120 bp, synthetic construct; identical to SEQ ID NO: 7579
  source 1..120: mol_type = other DNA

SEQ ID NO: 54116 - DNA, 120 bp, synthetic construct; identical to SEQ ID NO: 7580
  source 1..120: mol_type = other DNA

SEQ ID NO: 54117 - DNA, 120 bp, synthetic construct; identical to SEQ ID NO: 7581
  source 1..120: mol_type = other DNA

SEQ ID NO: 54118 - DNA, 120 bp, synthetic construct; identical to SEQ ID NO: 7582
  source 1..120: mol_type = other DNA

SEQ ID NO: 54119 - DNA, 120 bp, synthetic construct; identical to SEQ ID NO: 7583
  source 1..120: mol_type = other DNA

SEQ ID NO: 54120 - DNA, 120 bp, synthetic construct
  source 1..120: mol_type = other DNA
caaagagagaaagtttgatttcttattttcctatttggatgctttttatttctttctcttgcctgattgctgtggctagcattcccagtactatgttaaataggagtggtgagagtaggc

SEQ ID NO: 54121 - DNA, 120 bp, synthetic construct; identical to SEQ ID NO: 7584
  source 1..120: mol_type = other DNA

SEQ ID NO: 54122 - DNA, 120 bp, synthetic construct; identical to SEQ ID NO: 7585
  source 1..120: mol_type = other DNA

SEQ ID NO: 54123 - DNA, 120 bp, synthetic construct; identical to SEQ ID NO: 29723
  source 1..120: mol_type = other DNA

SEQ ID NO: 54124 - DNA, 120 bp, synthetic construct
  source 1..120: mol_type = other DNA
ttctctgagcagtaggtctcaacaatgaacttaaaatattcagtaacctatgctgtagatggctgaagtctgggctacatcatttcatttatcgtgcacatgtagagtagatttccacat

SEQ ID NO: 54125 - DNA, 120 bp, synthetic construct
  source 1..120: mol_type = other DNA
ccattctaactggtgtgagatggtatctcattgtggttttgatttgcatttctctgatggccaaggagaactacaaaccagtgctcaaggaaataaaagaggatacaaacaaatggaaga

SEQ ID NO: 54126 - DNA, 120 bp, synthetic construct
  source 1..120: mol_type = other DNA
agccaaaaaacaccacattcttaaaggctgtaggatttctagatggtaaatgagcactggcttcaacttaaagtcaccagctgcattagcccctaagaagagaatctgtcctttgaagct

SEQ ID NO: 54127 - DNA, 120 bp, synthetic construct; identical to SEQ ID NO: 31561
  source 1..120: mol_type = other DNA

SEQ ID NO: 54128 - DNA, 120 bp, synthetic construct
  source 1..120: mol_type = other DNA
agcccctccgccccgcagctgccccgtctgagaagtgaggagcctctccgcccggcagccaccccatctgggaagtgaggagcgtctccgcccggcagccaccccatccgggagggaggt

SEQ ID NO: 54129 - DNA, 120 bp, synthetic construct; identical to SEQ ID NO: 31562
  source 1..120: mol_type = other DNA

SEQ ID NO: 54130 - DNA, 120 bp, synthetic construct; identical to SEQ ID NO: 6225
  source 1..120: mol_type = other DNA

SEQ ID NO: 54131 - DNA, 120 bp, synthetic construct; identical to SEQ ID NO: 30077
  source 1..120: mol_type = other DNA

SEQ ID NO: 54132 - DNA, 120 bp, synthetic construct; identical to SEQ ID NO: 30078
  source 1..120: mol_type = other DNA

SEQ ID NO: 54133 - DNA, 120 bp, synthetic construct; identical to SEQ ID NO: 20376
  source 1..120: mol_type = other DNA

SEQ ID NO: 54134 - DNA, 120 bp, synthetic construct
  source 1..120: mol_type = other DNA
gtctatcattgttggacatttgggttggttccaagtctttgctattgtgaatagtgccgcaataaacatacgtgtgcatgtgtctttatagcagcatgatttatagtcctttgggtatat

SEQ ID NO: 54135 - DNA, 120 bp, synthetic construct
  source 1..120: mol_type = other DNA
cagcatggtactggtaccaaaacagagatatagatcaatggaacagaacagagccctcagaaataatgccgcatatctacaactatctgatctttgacaaacctgagaaaaacaagcaat

SEQ ID NO: 54136 - DNA, 120 bp, synthetic construct
  source 1..120: mol_type = other DNA
tggattcggtttgccagtattttattgaggatttttgcatcaatgttcatcaaggatattggtctaaaattctcttttttggttgtgtctctgcccggctttggtgtcagaatgatgctg

SEQ ID NO: 54137 - DNA, 120 bp, synthetic construct
  source 1..120: mol_type = other DNA
ggtgtcaattttggatctttcctgctttctcttgtaggcatttagtgctataaatttccctctacacactgctttgaatgcgtcccagagattctggtatgtggtgtctttgttctcgtt

SEQ ID NO: 54138 - DNA, 120 bp, synthetic construct
  source 1..120: mol_type = other DNA
tttatccaatttgccagtctgtgtcttttaattgcagaatttagtccatttatatttaaagttaatattgttatgtgtgaatttgatcctgtcattatgatgttagctggtgattttgct

SEQ ID NO: 54139 - DNA, 120 bp, synthetic construct
  source 1..120: mol_type = other DNA
tagttatacattcttctaaatttttttcaaagttttcaacttctttgcctttggtttgaatgtcctcccgtagctcagagtaatttgattgtctgaagacttcttctctcagctcgtcaa

SEQ ID NO: 54140 - DNA, 120 bp, synthetic construct
  source 1..120: mol_type = other DNA
tgcgcccactgtctggcactccctagtgagatgaacccggtacctcagatggaaatgcagaaatcacccgtcttctgcgtcactcacgctgggagctgtagaccggagctgttcctattc

SEQ ID NO: 54141 - DNA, 120 bp, synthetic construct; identical to SEQ ID NO: 31766
  source 1..120: mol_type = other DNA

SEQ ID NO: 54142 - DNA, 120 bp, synthetic construct; identical to SEQ ID NO: 31767
  source 1..120: mol_type = other DNA

SEQ ID NO: 54143 - DNA, 120 bp, synthetic construct
  source 1..120: mol_type = other DNA
aaaagacaaaattgacaaatgagatctaattaaactaaagagcttctgcacagcaaaagaaactaccatcagagtgaacaggcaacctacaaaatgggagaaaatttttgcaatctactc

SEQ ID NO: 54144 - DNA, 120 bp, synthetic construct; identical to SEQ ID NO: 31768
  source 1..120: mol_type = other DNA

SEQ ID NO: 54145 - DNA, 120 bp, synthetic construct
  source 1..120: mol_type = other DNA
cttaatcccaggagctggagaccagcctgggcaacatagggagaacccgtctctacaaaaaaatttaaaaaaataaaaaaacttagccagatgtggtggtgcatacctatagtcccagtt

SEQ ID NO: 54146 - DNA, 120 bp, synthetic construct; identical to SEQ ID NO: 31769
  source 1..120: mol_type = other DNA

SEQ ID NO: 54147 - DNA, 120 bp, synthetic construct
  source 1..120: mol_type = other DNA
atagtcccatctacttggggggctgaagtgggaggatcacttgaacccaggagagtgagtccagcttgagcaacgtagcaagactctcatctcaaaaaataaaataaaataaaataaaat

SEQ ID NO: 54148 - DNA, 120 bp, synthetic construct; identical to SEQ ID NO: 31770
  source 1..120: mol_type = other DNA

SEQ ID NO: 54149 - DNA, 120 bp, synthetic construct
  source 1..120: mol_type = other DNA
ctgttttatcagaaactaggattgcaacccctgctgttttttttttttttgctttccctttgcttgctaagtattcctccatccctttattttgagcctatgtgtgtctttgcacgtgag

SEQ ID NO: 54150 - DNA, 120 bp, synthetic construct
  source 1..120: mol_type = other DNA
aaaggattataaatcatgctactatagagacacatgcacacgtatgtttattgtggcactattcacaatagcaaagacttggaaccaacccaaatgtccatcaatgatagactggattaa

SEQ ID NO: 54151 - DNA, 120 bp, synthetic construct; identical to SEQ ID NO: 18540
  source 1..120: mol_type = other DNA

SEQ ID NO: 54152 - DNA, 120 bp, synthetic construct; identical to SEQ ID NO: 19872
  source 1..120: mol_type = other DNA

SEQ ID NO: 54153 - DNA, 120 bp, synthetic construct; identical to SEQ ID NO: 28875
  source 1..120: mol_type = other DNA

SEQ ID NO: 54154 - DNA, 120 bp, synthetic construct
  source 1..120: mol_type = other DNA
atttgaacagtgttcctggtgacttactaaaaaccaagtcagctcaaagagtaaatttactcgaggaaagtaaatcaaaatatcttcttggccaactgaaattgactcaggcgagtctct

SEQ ID NO: 54155 - DNA, 120 bp, synthetic construct
  source 1..120: mol_type = other DNA
agtctcatattacaagctgacaaacccgctttttaaaggatctgccaataatttcttaaaactatatctacctctcccaaagttacttatactaagagtgtgaaaatgcaaacagcatta

SEQ ID NO: 54156 - DNA, 120 bp, synthetic construct; identical to SEQ ID NO: 22276
  source 1..120: mol_type = other DNA

SEQ ID NO: 54157 - DNA, 120 bp, synthetic construct; identical to SEQ ID NO: 1184
  source 1..120: mol_type = other DNA

SEQ ID NO: 54158 - DNA, 120 bp, synthetic construct; identical to SEQ ID NO: 22277
  source 1..120: mol_type = other DNA

SEQ ID NO: 54159 - DNA, 120 bp, synthetic construct; identical to SEQ ID NO: 22278
  source 1..120: mol_type = other DNA

SEQ ID NO: 54160 - DNA, 120 bp, synthetic construct; identical to SEQ ID NO: 22272
  source 1..120: mol_type = other DNA

SEQ ID NO: 54161 - DNA, 120 bp, synthetic construct; identical to SEQ ID NO: 22273
  source 1..120: mol_type = other DNA

SEQ ID NO: 54162 - DNA, 120 bp, synthetic construct; identical to SEQ ID NO: 22274
  source 1..120: mol_type = other DNA

SEQ ID NO: 54163 - DNA, 120 bp, synthetic construct; identical to SEQ ID NO: 22275
  source 1..120: mol_type = other DNA

SEQ ID NO: 54164 - DNA, 120 bp, synthetic construct; identical to SEQ ID NO: 14368
  source 1..120: mol_type = other DNA

SEQ ID NO: 54165 - DNA, 120 bp, synthetic construct
  source 1..120: mol_type = other DNA
tgcactccagctgggtgacagagcaagactgtttaaaacaaaacaaaacaaaacaaaacaaaacaaaacaaaacaaaacacaaggtcggggggttggtggggggcctttgtttcttgaag

SEQ ID NO: 54166 - DNA, 120 bp, synthetic construct; identical to SEQ ID NO: 27745
  source 1..120: mol_type = other DNA

SEQ ID NO: 54167 - DNA, 120 bp, synthetic construct; identical to SEQ ID NO: 27746
  source 1..120: mol_type = other DNA

SEQ ID NO: 54168 - DNA, 120 bp, synthetic construct; identical to SEQ ID NO: 27747
  source 1..120: mol_type = other DNA

SEQ ID NO: 54169 - DNA, 120 bp, synthetic construct; identical to SEQ ID NO: 27748
  source 1..120: mol_type = other DNA

SEQ ID NO: 54170 - DNA, 120 bp, synthetic construct; identical to SEQ ID NO: 27749
  source 1..120: mol_type = other DNA

SEQ ID NO: 54171 - DNA, 120 bp, synthetic construct; identical to SEQ ID NO: 7644
  source 1..120: mol_type = other DNA

SEQ ID NO: 54172 - DNA, 120 bp, synthetic construct; identical to SEQ ID NO: 7645
  source 1..120: mol_type = other DNA

SEQ ID NO: 54173 - DNA, 120 bp, synthetic construct
  source 1..120: mol_type = other DNA
accttgggaagacggtacttgcttcttcttagccttctaccacaattttaagtttcctgaggcctccccaatcatgtgaaactgtgagtcaatgaaacctccttctttataaattaccca

SEQ ID NO: 54174 - DNA, 120 bp, synthetic construct; identical to SEQ ID NO: 7646
  source 1..120: mol_type = other DNA

SEQ ID NO: 54175 - DNA, 120 bp, synthetic construct; identical to SEQ ID NO: 7647
  source 1..120: mol_type = other DNA

SEQ ID NO: 54176 - DNA, 120 bp, synthetic construct; identical to SEQ ID NO: 7648
  source 1..120: mol_type = other DNA

SEQ ID NO: 54177 - DNA, 120 bp, synthetic construct
  source 1..120: mol_type = other DNA
tatggttggaatgttttaaagttcatatattgaatcctaattgccaatgtgatggtattagggaggtggggtcttcttgaggtgattaggtcatgagaggtgagccctagtgagtgggat

SEQ ID NO: 54178 - DNA, 120 bp, synthetic construct
  source 1..120: mol_type = other DNA
tctcccagaacacatttccaaatcccattaaatggggagcaggtgggccaactgtgcctcaattccctacactcaatttcctcattgtaaaatggtgataataatagttctcacctcata

SEQ ID NO: 54179 - DNA, 120 bp, synthetic construct
  source 1..120: mol_type = other DNA
ccacattaccatttactagccgtgacacctcaggaatcaccctgctctgcacgcaggcagaggaaagatatcagattaaatgatctataaagaccttttcacttggaaagataaactgaa

SEQ ID NO: 54180 - DNA, 120 bp, synthetic construct
  source 1..120: mol_type = other DNA
ttacactgggaaaattaaagagtctaaagggccctaatattttaaaaggaaggactgctatattccaaccaaatacataatacaacattaaaccccataacagtttgaagacacaggtaa

SEQ ID NO: 54181 - DNA, 120 bp, synthetic construct
  source 1..120: mol_type = other DNA
ggttggttgttgacatctgtcactgaatgtcagagctgagagggacactaggattccatcccattttctagcacagtgtttcacacatggcagtggcttactaaatgtttgaaaagtaaa

SEQ ID NO: 54182 - DNA, 120 bp, synthetic construct
  source 1..120: mol_type = other DNA
gtcacacaaaatggtactctgaaaaaagtaagagttcggaagtctgaaagaaagtttctaatcagagctaggtgccttttttgtctggggacctgagcaacacacatttccagagaccta

SEQ ID NO: 54183 - DNA, 120 bp, synthetic construct
  source 1..120: mol_type = other DNA
actcagggcactgttgacatgtcaggcccctgacacctcagcccccttctggactttgagcactgatgaggataagagggaagccgaaatggggctgagagcagctcagtgctggcctgc

SEQ ID NO: 54184 - DNA, 120 bp, synthetic construct
  source 1..120: mol_type = other DNA
tccaggcctaggtcttcatttctgctatggatgctgtgaggattcatcacagtggctaggacatagcaagagtttaatcaatgagagtaaaaacccaataaaccatataatggggaagga

SEQ ID NO: 54185 - DNA, 120 bp, synthetic construct
  source 1..120: mol_type = other DNA
ggtgagctcctgagggcagcggccatgtatgctgactgctgtcttttaactcaacacagaacagcagctcaggaaatatttgctaatgaatgattgcaataaaagggtgcaaaataagat

SEQ ID NO: 54186 - DNA, 120 bp, synthetic construct
  source 1..120: mol_type = other DNA
ccaactcactgactgttgaaatcgccacaaaaacacatgtctgatggcatatggccatgggtgttctgttaatttatcatttcaatgtactttttatgtgccaggtagccgttcagccaa

SEQ ID NO: 54187 - DNA, 120 bp, synthetic construct
  source 1..120: mol_type = other DNA
tttctcatccctgcggatcctcccagcgttgccaaatagttacaaagtcagtcctttcaaaccactgcattttgaacttcctaaacctttaagagagcctttgtgtatggaaaagaacaa

SEQ ID NO: 54188 - DNA, 120 bp, synthetic construct
  source 1..120: mol_type = other DNA
atgtctcttattggagcataagaaacagtcctctccttgcgatagtttgctgagaatgatggttgctagcttcatccatgtccgtacaaaggacattaactcatcattttttatggctgc

SEQ ID NO: 54189 - DNA, 120 bp, synthetic construct; identical to SEQ ID NO: 26534
  source 1..120: mol_type = other DNA

SEQ ID NO: 54190 - DNA, 120 bp, synthetic construct; identical to SEQ ID NO: 32976
  source 1..120: mol_type = other DNA

SEQ ID NO: 54191 - DNA, 120 bp, synthetic construct; identical to SEQ ID NO: 32977
  source 1..120: mol_type = other DNA

SEQ ID NO: 54192 - DNA, 120 bp, synthetic construct
  source 1..120: mol_type = other DNA
ttggttcataaaaattatttcctataagccaaaccaaagcacagtcagtggccaacatggtgaaacccttctctactaaaaatacaacaattagccaggcatggtggcccgtacctgtag

SEQ ID NO: 54193 - DNA, 120 bp, synthetic construct; identical to SEQ ID NO: 13786
  source 1..120: mol_type = other DNA

SEQ ID NO: 54194 - DNA, 120 bp, synthetic construct; identical to SEQ ID NO: 13787
  source 1..120: mol_type = other DNA

SEQ ID NO: 54195 - DNA, 120 bp, synthetic construct; identical to SEQ ID NO: 13783
  source 1..120: mol_type = other DNA

SEQ ID NO: 54196 - DNA, 120 bp, synthetic construct; identical to SEQ ID NO: 13784
  source 1..120: mol_type = other DNA

SEQ ID NO: 54197 - DNA, 120 bp, synthetic construct
  source 1..120: mol_type = other DNA
gcatcgccaagtcaatcctaagccaaaagaacaaagctggaggcatcacactacctgacttcaaactatactacaaggctacagtaaccaaagcagcatggtactggtaccaaaacagag

SEQ ID NO: 54198 - DNA, 120 bp, synthetic construct
  source 1..120: mol_type = other DNA
atatatatatagagagagagagagagagagagagagagagagagagagaaagagacagaactaatagaccaggtgtggtagctcacgccctgtaatctcagcactttgggaagccaaggc

SEQ ID NO: 54199 - DNA, 120 bp, synthetic construct; identical to SEQ ID NO: 13785
  source 1..120: mol_type = other DNA

SEQ ID NO: 54200 - DNA, 120 bp, synthetic construct; identical to SEQ ID NO: 13788
  source 1..120: mol_type = other DNA

SEQ ID NO: 54201 - DNA, 120 bp, synthetic construct; identical to SEQ ID NO: 13789
  source 1..120: mol_type = other DNA

SEQ ID NO: 54202 - DNA, 120 bp, synthetic construct
  source 1..120: mol_type = other DNA
ttgctattgtgaatagtgtggcaataaacatacgtgtgcatgtgtctttatagcagcatgatttataatcctttgggtatatacccagtaatgggatggctgggtcaaatggtatttcta

SEQ ID NO: 54203 - DNA, 120 bp, synthetic construct
  source 1..120: mol_type = other DNA
ttaaagtagtttatttccaattctgtgaagaaagtcattggtagcttgatggggatggcattgaatctgtaaatgaccttgggcagtatggccattttcacgatattgattcttcctacc

SEQ ID NO: 54204 - DNA, 120 bp, synthetic construct; identical to SEQ ID NO: 34290
  source 1..120: mol_type = other DNA

SEQ ID NO: 54205 - DNA, 120 bp, synthetic construct; identical to SEQ ID NO: 34291
  source 1..120: mol_type = other DNA

SEQ ID NO: 54206 - DNA, 120 bp, synthetic construct
  source 1..120: mol_type = other DNA
tgatggccagtgatgatgagcatttcttcatgtgttttttggctgcataaatgtcttcttttgagaagtgtctgttcatgtcctttgcccactttttgatggggttttttgtttttttct

SEQ ID NO: 54207 - DNA, 120 bp, synthetic construct
  source 1..120: mol_type = other DNA
gtcattggtagcttgatggggatggcattgaatctgtaaatgaccttgggcagtatggccattttcacgatattgattcttcctacccatgagcatggaatgttcttccatttgtttgtg

SEQ ID NO: 54208 - DNA, 120 bp, synthetic construct
  source 1..120: mol_type = other DNA
tttggttggtaaactattgattattgccacaatttcagagcctgttattggtctattcagagattcaacttcttcctggtttagtcttgggagagtgtatgtgtcgaggaatttatccat

SEQ ID NO: 54209 - DNA, 120 bp, synthetic construct; identical to SEQ ID NO: 34292
  source 1..120: mol_type = other DNA

SEQ ID NO: 54210 - DNA, 120 bp, synthetic construct; identical to SEQ ID NO: 34293
  source 1..120: mol_type = other DNA

SEQ ID NO: 54211 - DNA, 120 bp, synthetic construct; identical to SEQ ID NO: 34294
  source 1..120: mol_type = other DNA

SEQ ID NO: 54212 - DNA, 120 bp, synthetic construct
  source 1..120: mol_type = other DNA
agtttttagcatgaagggttgttgaattttgtcaaaggctttttctgcatctattgagataatcatgtggtttttgtctttggctctgtttatatgcgggattacatttattgatttgcg

SEQ ID NO: 54213 - DNA, 120 bp, synthetic construct
  source 1..120: mol_type = other DNA
aacatctttatttctgccttcatttcgttatgtacccagtagtcattcaggagcaggttgttcagattccatgtagttgagcggctttgagtgagattcttaatcctgagttctagtttg

SEQ ID NO: 54214 - DNA, 120 bp, synthetic construct
  source 1..120: mol_type = other DNA
tggttattttgctcgttagttgatgcagtttcttcctagtctcgatggtctttacattttggcatgattttgcagtggctggtaccggttgttcctttccatgtttagcgcttccttcag

SEQ ID NO: 54215 - DNA, 120 bp, synthetic construct
  source 1..120: mol_type = other DNA
ccaaaattgacaaatgggatctaattaaactaaagagcttctgcacagcaaaagaaactaccatcagagtgaacaggcaacctacaacatgggagaaaattttcacaacctactcatctg

SEQ ID NO: 54216 - DNA, 120 bp, synthetic construct; identical to SEQ ID NO: 34295
  source 1..120: mol_type = other DNA

SEQ ID NO: 54217 - DNA, 120 bp, synthetic construct; identical to SEQ ID NO: 34296
  source 1..120: mol_type = other DNA

SEQ ID NO: 54218 - DNA, 120 bp, synthetic construct; identical to SEQ ID NO: 34297
  source 1..120: mol_type = other DNA

SEQ ID NO: 54219 - DNA, 120 bp, synthetic construct
  source 1..120: mol_type = other DNA
cagtaatggacacttctcaaaagaagacatttatgcagccaaaaagcacatgaaaaaatgctcaccatcactggccatcagagaaatgcaaatcaaaaccacaatgagataccatctcac

SEQ ID NO: 54220 - DNA, 120 bp, synthetic construct; identical to SEQ ID NO: 34298
  source 1..120: mol_type = other DNA

SEQ ID NO: 54221 - DNA, 120 bp, synthetic construct; identical to SEQ ID NO: 34299
  source 1..120: mol_type = other DNA

SEQ ID NO: 54222 - DNA, 120 bp, synthetic construct
  source 1..120: mol_type = other DNA
aaatgtaacaccccaaactataaaaaccctagaatacaacctacgcaataccattctggacaaaggaatgggcaaagatttcatgacaaagacaccaaaagcaattgcaacaaaaacaaa

SEQ ID NO: 54223 - DNA, 120 bp, synthetic construct; identical to SEQ ID NO: 6669
  source 1..120: mol_type = other DNA

SEQ ID NO: 54224 - DNA, 120 bp, synthetic construct
  source 1..120: mol_type = other DNA
cggcagtggtctctagccctttgctttcttctccatgagagccgtgcacatgaactgcttctagttcatcatctcggccctgtctcccaaacatttttagtaaaaaaaaaaaaaaaaaaa

SEQ ID NO: 54225 - DNA, 120 bp, synthetic construct; identical to SEQ ID NO: 34302
  source 1..120: mol_type = other DNA

SEQ ID NO: 54226 - DNA, 120 bp, synthetic construct; identical to SEQ ID NO: 34303
  source 1..120: mol_type = other DNA

SEQ ID NO: 54227 - DNA, 120 bp, synthetic construct; identical to SEQ ID NO: 34304
  source 1..120: mol_type = other DNA

SEQ ID NO: 54228 - DNA, 120 bp, synthetic construct
  source 1..120: mol_type = other DNA
cattcttccacatatggctagccagttaccccagcaccatttattgaatagggagtatttttcctattgcttgcttttgtcaattttgttgaagatcagatgtttggagacgtgaagcat

SEQ ID NO: 54229 - DNA, 120 bp, synthetic construct; identical to SEQ ID NO: 6672
  source 1..120: mol_type = other DNA

SEQ ID NO: 54230 - DNA, 120 bp, synthetic construct
  source 1..120: mol_type = other DNA
aggttgcaggaagctgagatagtgccactgcctccagcctgggtgacagagcgagactccatctcaaaaataaaaaaaaaaaaaaaggaagaaaagaaacagaagtgttatatagggact

SEQ ID NO: 54231 - DNA, 120 bp, synthetic construct
  source 1..120: mol_type = other DNA
gctgaaggtcaacagccccttagagataactctccaaccttcaaatatctgtaggttaaattactggtaaatcactgcacctttctaaatggaggaaaccgacattgtactgggaagcag

SEQ ID NO: 54232 - DNA, 120 bp, synthetic construct
  source 1..120: mol_type = other DNA
aacataggctataccattcaggacataggcatggacaaagacttcatgattaaaacaccaaaagcccttagagtgaacaggcaacctacagaatgggagaaaaattttttcagtctattc

SEQ ID NO: 54233 - DNA, 120 bp, synthetic construct
  source 1..120: mol_type = other DNA
tagcaaagactcagaaccaacccaaatgccaatctataatagaatggatacagaaaatgtgacacatatacactatggaatactatgcagctgtaaaaaaggatgagttaatgtcctttg

SEQ ID NO: 54234 - DNA, 120 bp, synthetic construct
  source 1..120: mol_type = other DNA
gtttcttgtaggcaacaaatcaatggttcttgttcttccatccattcagccagtctgttttttttttttttttttttttttgagacggatctcgctctgtcgcccaggccggactgcgga

SEQ ID NO: 54235 - DNA, 120 bp, synthetic construct; identical to SEQ ID NO: 34287
  source 1..120: mol_type = other DNA

SEQ ID NO: 54236 - DNA, 120 bp, synthetic construct
  source 1..120: mol_type = other DNA
catttgtcaattttggcttttgttgccattgcttttggtgtttaagacatgaagtccttgcccatgcctatgtcctgaatggtaatgcctaggttttcttctagggtttttatggtttta

SEQ ID NO: 54237 - DNA, 120 bp, synthetic construct
  source 1..120: mol_type = other DNA
gaatgcttccagtttttgcccattcagtatgatattgtctgtgggtttgtcatagatagctcttattattttgagatacatcccatcaatacctaatttattgagagtgtttagcatgaa

SEQ ID NO: 54238 - DNA, 120 bp, synthetic construct
  source 1..120: mol_type = other DNA
tcttgcttttctatttcctttaattgtgatgttaggttgtcaattttggatctttcctgttttctcttgtgggcatttagtgctataaatttccctctacacactgctttgaatgcgtcc

SEQ ID NO: 54239 - DNA, 120 bp, synthetic construct
  source 1..120: mol_type = other DNA
tcttgactatccaatttgccagtcaatgccttttaattggagcatttagtccatttacatttaaagttaatattgttatgtgtgaatttgatcctgtcattatgatgttagctggttatt

SEQ ID NO: 54240 - DNA, 120 bp, synthetic construct
  source 1..120: mol_type = other DNA
ctctcagcttgtcaaagtcattatccatccagctttgttccgttgctggtgaggaactgcattcctttggaggaggagagtcgctctgctttttagagtttccagtttttctgctctgtt

SEQ ID NO: 54241 - DNA, 120 bp, synthetic construct
  source 1..120: mol_type = other DNA
taatttaacttttttaccaaaaattatttgtgaaaattatatatgaaatatcttggccgggcgaggtggctcacgcttgtaatctcagcactttgggaggccgaggcgggcggatcacga

SEQ ID NO: 54242 - DNA, 120 bp, synthetic construct
  source 1..120: mol_type = other DNA
tatttttaaattgaaatattagatttatttacactacagttagttcaggccaggtgtggtggctcacgcctgtaatcccagcactttaggaggctgacgtgggctgatcacttgaggtca

SEQ ID NO: 54243 - DNA, 120 bp, synthetic construct
  source 1..120: mol_type = other DNA
tgatgcctccagctttgttcttttggcttaggattgacttggcaatgcggctcttttttggttccatatgaactttaaagtagttttttccaattctgtgaagaaagtcattggtagctt

SEQ ID NO: 54244 - DNA, 120 bp, synthetic construct
  source 1..120: mol_type = other DNA
cgtatattgaaccagccttgcatcccagggatgaagcccacttgatcatgatggataagctttttgatgtgctgctggattcggtttgccagtattttattgaggatttttgcatcaatg

SEQ ID NO: 54245 - DNA, 120 bp, synthetic construct
  source 1..120: mol_type = other DNA
tatgtacccagtagtcattcaggagcaggttgttcagtttccatgtagttgagcggctttgagtgagattcttaatcctgagttctagtttgattgcactgtggtctgagagacagtttg

SEQ ID NO: 54246 - DNA, 120 bp, synthetic construct; identical to SEQ ID NO: 51914
  source 1..120: mol_type = other DNA

SEQ ID NO: 54247 - DNA, 120 bp, synthetic construct
  source 1..120: mol_type = other DNA
tatcacactctggggactgtggtggggttgggggaggggggagggatagtattgggagatatacctaatgctagatgacacattagtgggtgcagcgcaccagcatggcacatgtataca

SEQ ID NO: 54248 - DNA, 120 bp, synthetic construct
  source 1..120: mol_type = other DNA
atcacttaaacccagcaggcagaggttgcagtgagctgagatcatgccagtgcaccactcgggctgggtgacagagtgaggctctgtcttaaaaaaaaaaaaaaaaaaaaaaaaaaaaaa

SEQ ID NO: 54249 - DNA, 120 bp, synthetic construct; identical to SEQ ID NO: 34289
  source 1..120: mol_type = other DNA

SEQ ID NO: 54250 - DNA, 120 bp, synthetic construct
  source 1..120: mol_type = other DNA
ctgagttagccgggagctgctggagtgtgtaactgttccagcaagcaaggctgttcattgtattcaacactatagaactgctatcactcctaatgtttttccctgtaagaaaaatgtaaa

SEQ ID NO: 54251 - DNA, 120 bp, synthetic construct
  source 1..120: mol_type = other DNA
tgtgtaacacgtctgtggctgtcgtgtgctgagctgcaaacacacaacagcatctcggcagcacctcccttcccatgtgtgtaacacgtctgtggctgtcgtgtgctgagctgaggtcac

SEQ ID NO: 54252 - DNA, 120 bp, synthetic construct
  source 1..120: mol_type = other DNA
cactggacttcctgattctttaatccagaagggtttgctatgttaacaacctggctgagcgagcgaggcagacggtcatgccgcagcttcacctgggcaacatttaaaggcagtaacttt

SEQ ID NO: 54253 - DNA, 120 bp, synthetic construct
  source 1..120: mol_type = other DNA
tgagctttgatgaagctgttcttcaccatgagaatgtactacctgaatgaattcagaggctgggtgtggtggctcacgcccgtaatcccaatactctgggaggctgaggcaggaggatta

SEQ ID NO: 54254 - DNA, 120 bp, synthetic construct
  source 1..120: mol_type = other DNA
acacttctgtggaggatggcggggatggcaccatctcctagttcggtcctgggactgaaccctaaactaaagagggaaacccagcggtggctcctgagggccctgatggcacgaccagct

SEQ ID NO: 54255 - DNA, 120 bp, synthetic construct; identical to SEQ ID NO: 26296
  source 1..120: mol_type = other DNA

SEQ ID NO: 54256 - DNA, 120 bp, synthetic construct; identical to SEQ ID NO: 26297
  source 1..120: mol_type = other DNA

SEQ ID NO: 54257 - DNA, 120 bp, synthetic construct; identical to SEQ ID NO: 26298
  source 1..120: mol_type = other DNA

SEQ ID NO: 54258 - DNA, 120 bp, synthetic construct; identical to SEQ ID NO: 26299
  source 1..120: mol_type = other DNA

SEQ ID NO: 54259 - DNA, 120 bp, synthetic construct
  source 1..120: mol_type = other DNA
ccgccttggcctcccaaagtgctgggattacaggcatgagccactgcacccagccttgagttgactttattgttaagttgtaagagttctttatatattatggatataagttaagttcta

SEQ ID NO: 54260 - DNA, 120 bp, synthetic construct
  source 1..120: mol_type = other DNA
gtgagaaacacccaagaattatcaataaaaaaataaattaaaaaaaaaaaaaaaagaaaatgatcaaaacaaatgacagggctcagggcaaggggcaaaactgttcccctgccaggctgt

SEQ ID NO: 54261 - DNA, 120 bp, synthetic construct
  source 1..120: mol_type = other DNA
aagaggtagaggttgcagtgagccaagatcacgccactgcactctagcctgggcaatagagcgagactccatctcaaaagaaaaaaaaaaatttcctctttcttaataacagacaacaaa

SEQ ID NO: 54262 - DNA, 120 bp, synthetic construct
  source 1..120: mol_type = other DNA
aacagtctacttgagtgataacatatataaaactttaagaactaaagattccattttgctgtaggccaggcatggtggcttacacctgtaatcccagcactttgggaggccaaggcaggc

SEQ ID NO: 54263 - DNA, 120 bp, synthetic construct; identical to SEQ ID NO: 32717
  source 1..120: mol_type = other DNA

SEQ ID NO: 54264 - DNA, 120 bp, synthetic construct; identical to SEQ ID NO: 32718
  source 1..120: mol_type = other DNA

SEQ ID NO: 54265 - DNA, 120 bp, synthetic construct
  source 1..120: mol_type = other DNA
attctgtgttctctcacctgaacccgggtcctgattctgtgtccatccccccgatcctgggtcctgattctgtgtccattcccccgatcctgggtcctgattctgtgtcctcccacctga

SEQ ID NO: 54266 - DNA, 120 bp, synthetic construct; identical to SEQ ID NO: 15383
  source 1..120: mol_type = other DNA

SEQ ID NO: 54267 - DNA, 120 bp, synthetic construct
  source 1..120: mol_type = other DNA
tgtgcatgtgtctttatagcagcatgatttataatcctttgggtatatgcccagtaatggtatggctgggtcaaatggtatttctagttctagatccatgaggaatcgccacactgtctt

SEQ ID NO: 54268 - DNA, 120 bp, synthetic construct
  source 1..120: mol_type = other DNA
tttaaagttcatatggaaccaaaaaagagcctgcattgcgaagacaatcctaagccaaaagaacaaaactggaggcaccacgctacctgacttcaaactatactacaaggctacagtaac

SEQ ID NO: 54269 - DNA, 120 bp, synthetic construct
  source 1..120: mol_type = other DNA
ttattgcggcactattcgcaatagcaaaaacttgataccaacccaaatgtccatcaatgatagactggattaagaaaatgtggcacatatacaccatggaatactatgcagccataaaaa

SEQ ID NO: 54270 - DNA, 120 bp, synthetic construct
  source 1..120: mol_type = other DNA
acattttagggaagaagtcactgaaagaagggccagaaagccgctttaaactcatgtccatggcagatcaaatggtactgatacaactttttcccttagaaaggtattatatcccattgc

SEQ ID NO: 54271 - DNA, 120 bp, synthetic construct
  source 1..120: mol_type = other DNA
gcttttgtggtaaatttctggagaaatcataaatgcaaagctcaatactgtaaatactgtactgttcacaggtacttgttggagaagtgaaatgtttgtattcagaccaacaaaattctg

SEQ ID NO: 54272 - DNA, 120 bp, synthetic construct
  source 1..120: mol_type = other DNA
actgtgcccttttcctaggacctcagtttcactgtcatataaataaaagtggcttctggaagttacctaatctgtcaaaagagtgatatcctatttaagttaaaatctagaaaactggtc

SEQ ID NO: 54273 - DNA, 120 bp, synthetic construct
  source 1..120: mol_type = other DNA
ctatttgggaggctgaggcagaaggatcccttgcgtcaggagtttgaggttgtagtaagctgtgattgttacactgcaatccagcctaggtgactaaatgaggtcacctcaaaaaaacaa

SEQ ID NO: 54274 - DNA, 120 bp, synthetic construct
  source 1..120: mol_type = other DNA
gagaaggtacaggactaaaggtttctgggtccctgtggttctaagtctataaatacgaaaaagaactaacttggtcagtccggtgggagaaaaatattatggttaataaagggaaggtgt

SEQ ID NO: 54275 - DNA, 120 bp, synthetic construct
  source 1..120: mol_type = other DNA
aatggcgttaagtaaacctgggaggtggagcttgcagtgagcctagatggggccactcactgcactccagcctgggcgacagaggagactccgtctcaaaacaaaaaaaaaagaaaaaaa

SEQ ID NO: 54276 - DNA, 120 bp, synthetic construct
  source 1..120: mol_type = other DNA
caaagattttagaaccttagtgatagaatactggtttaaaaagctgaatttgttaaatccctaagtgaactccaatgtttcaagaaaaaatattcaggacaaaacctgaaaattacactg

SEQ ID NO: 54277 - DNA, 120 bp, synthetic construct
  source 1..120: mol_type = other DNA
tgggccatttccagagggtggagtagcttcatgaactgaacattcatttggcacaacttcagctcctggatcaacttcattacagtggtagttaacagctgaataagcctatatttaaaa

SEQ ID NO: 54278 - DNA, 120 bp, synthetic construct
  source 1..120: mol_type = other DNA
aatgaaaaaaaagtactttatgtttctaatccctgatgttcttgttacttccatatataaaacctcacctttttcccaattttctggagttggcattgtggaaatctcagagatattagt

SEQ ID NO: 54279 - DNA, 120 bp, synthetic construct
  source 1..120: mol_type = other DNA
aatgtaagttaaattaatacatttgctatttctttgtcaaaatacttctagacagttttgtgtttgacaatattatagggtaatatgtagtcctcctacagatgctatggctttttctgt

SEQ ID NO: 54280 - DNA, 120 bp, synthetic construct
  source 1..120: mol_type = other DNA
tgtggaccagccattgcttaagcacacaaaaacctgagagaagaaggcactgttgctcccatgggagtttctaactgggttaaaaagaaagtaacaaaatgtaacacattaatacaaaaa

SEQ ID NO: 54281 - DNA, 120 bp, synthetic construct
  source 1..120: mol_type = other DNA
gccacctttcttttcaggcatttcctgcttatccaaattcagcagttcaggtcaccactggatatcagttccatgtatacaattaccaggtaatgtaagaaggaatgaaatgatttgctt

SEQ ID NO: 54282 - DNA, 120 bp, synthetic construct
  source 1..120: mol_type = other DNA
ccagatgcctcctcatataaattgctgacttctggatatattctggttcgggaatgggtagatttctgatgtggtttagtaggtatataaatcccgtgagcttcttgcatctaatttctc

SEQ ID NO: 54283 - DNA, 120 bp, synthetic construct
  source 1..120: mol_type = other DNA
tgagtactttatgtttctagtccatgacattcttgttacttttatattagaaacttcacccttctccacattttcgggagttggcaatgtggaaacctcaaagatactagctctttcagt

SEQ ID NO: 54284 - DNA, 120 bp, synthetic construct
  source 1..120: mol_type = other DNA
gagagattgcaaggtaagttaaattaatacatttgctatttccctgtcagaatatttctacactgttttttatcagacaatattataggacaatgtgtagttgtacacgcgttatggctt

SEQ ID NO: 54285 - DNA, 120 bp, synthetic construct
  source 1..120: mol_type = other DNA
caatgttttagtttatttttttactttcttgttaacccgattataaactcccatgggagcaacagtgccttttttgccctgaggtttttatttgcttaagcaatggcaggtccacttaat

SEQ ID NO: 54286 - DNA, 120 bp, synthetic construct
  source 1..120: mol_type = other DNA
tgctctgctttttagagtttccagtttttctgttctgttttttccccctctttgtggttttatctacttttggtctttgatgatggtgatgtacagatgggtttttggtgtggatgtcct

SEQ ID NO: 54287 - DNA, 120 bp, synthetic construct
  source 1..120: mol_type = other DNA
cccagaatttcatatccagccaaactaagcttcataagcgaaggagaaataaaatactttacagacaagcaaatgctgagagattttgtcaccaccaagcctgccttataagagctcctg

SEQ ID NO: 54288 - DNA, 120 bp, synthetic construct
  source 1..120: mol_type = other DNA
cggatgtaaaagaacagaaattataacaaactatctctcagaccacagtgcaatcaaactagaactcaggattaagaatctcactcaaaaccactcaactacatggaaactgaacaacct

SEQ ID NO: 54289 - DNA, 120 bp, synthetic construct
  source 1..120: mol_type = other DNA
cttcatcgctgggatgcaaggctggttcaatatacgcaaatcaataaatgtaatccagcatataaacagaaccaaagacaaaaaacacatgattatctcaatagatgcagaaaaagccct

SEQ ID NO: 54290 - DNA, 120 bp, synthetic construct
  source 1..120: mol_type = other DNA
ttgcttgtttttctcaggtttgtcaaagatcagatagttgtagatatgcggcgttatttctgagggctctgttctgttccattgatctatatctctgttttggtaccagtaccatgctgt

SEQ ID NO: 54291 - DNA, 120 bp, synthetic construct
  source 1..120: mol_type = other DNA
gacatgaagtcatcattttttatggcggcatagtattccatggtgtatatgtgccacattttcttaatccagtctatcattgttggacatttgggttggttccaagtctttgctattgtg

SEQ ID NO: 54292 - DNA, 120 bp, synthetic construct
  source 1..120: mol_type = other DNA
atcaatgtcaccaggatcagagaaattagatgccagaaactcaagcggtttatatatatatactaaatcacatcagaaatctacccattccagaaccagaatatatccagaagtcagcaa

SEQ ID NO: 54293 - DNA, 120 bp, synthetic construct
  source 1..120: mol_type = other DNA
gtggaaacctcaaaaatactagctctttcagtttattaccatagatatagttatgggtcatagatatacttgtatctatgagaagagatcctgagaatgactaccgtcaaacagccagct

SEQ ID NO: 54294 - DNA, 120 bp, synthetic construct
  source 1..120: mol_type = other DNA
attctccagtattggaatatagactgcaattagttttttggaatgaaatacagacaaagccataacatctatagaactacatattaccctacaatattgtctgatacaaaacagtctgga

SEQ ID NO: 54295 - DNA, 120 bp, synthetic construct
  source 1..120: mol_type = other DNA
aacattaacataaaaagtcacttaaaaatatttgtaggcatatatgacatggaaaaaaatcaagaatgaacaggaagtctatgtttggctaattcccttaatgtcaaggacaacataatc

SEQ ID NO: 54296 - DNA, 120 bp, synthetic construct
  source 1..120: mol_type = other DNA
atgaagaaagaaagattctatgacaagtgctacactttgggagtgaagggggaactaatgacaaaagaattgactatttcaccaaagtttaccttatactgtgtacttattcacacccag

SEQ ID NO: 54297 - DNA, 120 bp, synthetic construct
  source 1..120: mol_type = other DNA
atgtggttaagcaatggcaggtccatataatgacagactatataatcaaagaaaggtagtgttcatgtgactttacaattagcatgtatctgcatagaatctgcctctggctttaccagc

SEQ ID NO: 54298 - DNA, 120 bp, synthetic construct
  source 1..120: mol_type = other DNA
aacacgtagaagtagtgtagaatgaagacctctgtcttatttagaagtaatgaagtagtattttgagaggaatatacttggcaataacttttctgtagaagagatttctgagatgtggtg

SEQ ID NO: 54299 - DNA, 120 bp, synthetic construct
  source 1..120: mol_type = other DNA
tgaagtaacaaaataatagtgaaatagttatgcagtgtctctaatttgttgatattttccatgtacttgaaacttgtatggtatacctcttctttttccttctctgaacaatggctagaa

SEQ ID NO: 54300 - DNA, 120 bp, synthetic construct
  source 1..120: mol_type = other DNA
caatacttcaatagttttggtttccttttatttattgattgattttttaagattccaccttaggggcctgttgggtagcaaagggattatgttgtccttgacgttaagggaattagccaa

SEQ ID NO: 54301 - DNA, 120 bp, synthetic construct
  source 1..120: mol_type = other DNA
ctgtcaaactatatattgtcctataatattgtctgatacaaaacagtctagaaatattctgacagggaaatagcaaatgtattaatttaacttaccttgcaatctctcttaatggagcct

SEQ ID NO: 54302 - DNA, 120 bp, synthetic construct
  source 1..120: mol_type = other DNA
ctaaaaaggcactcttgctcccatgggagtttataatcgggttaacaagaaagtaacaacaacaaaaaaattaatataaagaatcacttaaaaatatttataggcatatatgacatggaa

SEQ ID NO: 54303 - DNA, 120 bp, synthetic construct
  source 1..120: mol_type = other DNA
accttttgtaatatttttgttatattgggaattatatttctttgtaattttaaaaagtggtttaccatattcatttttttctgcaacctttcttttcagccatttcctgcttatccaaga

SEQ ID NO: 54304 - DNA, 120 bp, synthetic construct
  source 1..120: mol_type = other DNA
ctttaggaactgcttataagggggaaagcagctccggtgatttggaggtaatactctcgttcactcctgttcttatttaagcgtcattaacagcaaagcaattctgtttctcttctataa

SEQ ID NO: 54305 - DNA, 120 bp, synthetic construct
  source 1..120: mol_type = other DNA
ggatgtttcattcagctatttcacagtaaagatgaaaactacatccagaagtaaaggagagaacaccacatctcagaaatctcttctacagaaatgttattgccaggtatattcctctca

SEQ ID NO: 54306 - DNA, 120 bp, synthetic construct
  source 1..120: mol_type = other DNA
gtacggtatacctcatcttctttttccttctgtgaacaatggctggaataaaagccctacttctatcatttactgtgagccattactgaatctgggtgtattgatgcatgctgcttacct

SEQ ID NO: 54307 - DNA, 120 bp, synthetic construct
  source 1..120: mol_type = other DNA
ttttttttaatttaagattccactgcactggcctgttggggcgcaaaggagttatgttgttcctccggtaaagcgaatgagtgaaacatatacctgctcttctttcttgattttttgtgt

SEQ ID NO: 54308 - DNA, 120 bp, synthetic construct
  source 1..120: mol_type = other DNA
agcctgaaaataaagtttacagaaagaatggattaatacggtaaaacattttctttaactagaaagaaatatcattcccaaaataacaaaaatacgaaaaaccttgaaatggtaattatt

SEQ ID NO: 54309 - DNA, 120 bp, synthetic construct
  source 1..120: mol_type = other DNA
acccagaagtcaagcaatttatatgaggaggcatctggaaatcactgcaagtaaagaatagctaggttaactgctaaccttagagaacaataaactaggcagacacataaggagggctgc

SEQ ID NO: 54310 - DNA, 120 bp, synthetic construct
  source 1..120: mol_type = other DNA
attacttacttctactatcttctgcacatccacgtcattaaaaaatgaaacaaatccatagctataaaggcagataaatgaagtataaaatcaccatcatacagtacatggttcagaact

SEQ ID NO: 54311 - DNA, 120 bp, synthetic construct
  source 1..120: mol_type = other DNA
acaaaaacagtgtttggcatgattttgccttctggtaaaatatagccttggctggttgcagctgatgaggactgggtgctggcctctctggagatggttgagtttggagtttcaggattt

SEQ ID NO: 54312 - DNA, 120 bp, synthetic construct
  source 1..120: mol_type = other DNA
tggctttactattttagctgacttatcttgaagatacttttaattaagaacgaattgaaacatcaggaaactatgaaacatcattaatttaaaaatcattggtgaagtgcctgttgacta

SEQ ID NO: 54313 - DNA, 120 bp, synthetic construct
  source 1..120: mol_type = other DNA
gcatcctacagtgtaaagacagcctcctaccataaggaagtatttggtgcacaatttgaaaagggtctggttaagaaaccttgtcaccgtgccacaagaattgaagaggaaaattcttct

SEQ ID NO: 54314 - DNA, 120 bp, synthetic construct
  source 1..120: mol_type = other DNA
ggcaaatacattccttgttacatgtggacaaccaagtgacaacgacagctaaaagctgcaaaaaaattatcgttatttaaactcctggcatgtcagctcctttgccagtattatctaatt

SEQ ID NO: 54315 - DNA, 120 bp, synthetic construct
  source 1..120: mol_type = other DNA
tggaatgggtgtggaaaagacagcactctacacaccatcagtgagaaaatactaatacgtgatttaccaagagtactttggaaaagctgtatcataatttgataagcggggatactcacc

SEQ ID NO: 54316 - DNA, 120 bp, synthetic construct
  source 1..120: mol_type = other DNA
catgctacaatatagaaggggacaccaaatctcaaaaacctattctacagtaaagtttttgctaagtacattcctgtcaaaatattactcaattacttctaaataatacagaggccttca

SEQ ID NO: 54317 - DNA, 120 bp, synthetic construct
  source 1..120: mol_type = other DNA
atgaatacacccagattacgtaatggctcaccgtaaatgtgagaaacagggcttttttgctagccatcgttcagaggacaaaaaagaagcagaggtataccctacctgtttcaagcacat

SEQ ID NO: 54318 - DNA, 120 bp, synthetic construct
  source 1..120: mol_type = other DNA
aaagaacagggagtataggttcggcgcattcactttatctgaagtacagcataactcctttgctccccaacaggccactgcggtggcaacttgaaaaaaaaaaaaaaaaaggaaaccaat

SEQ ID NO: 54319 - DNA, 120 bp, synthetic construct
  source 1..120: mol_type = other DNA
ggggaagagacaaatgacaaaacaagtgactgttgcaccggccaaagtctaccatatttatactgtgtacttatgcccacccagaagttatttcttacgctgctgataaggctctattaa

SEQ ID NO: 54320 - DNA, 120 bp, synthetic construct
  source 1..120: mol_type = other DNA
tactatggaaagtgtagatacaattccacagagggaaggatgactagaataaacaagagaacaggaacataagcagttcttacctgaacgtgctgagttacaggattcggcgtgatttgg

SEQ ID NO: 54321 - DNA, 120 bp, synthetic construct
  source 1..120: mol_type = other DNA
gtgctaggattagggcagtgtgacaactttattgattagcaaagaattcatatctgtgaacctgagtttaacttactgtctaagacaaggtggttaaaatttaagatgctctgcagtgta

SEQ ID NO: 54322 - DNA, 120 bp, synthetic construct
  source 1..120: mol_type = other DNA
tgcagctcagttcaggctcaggatttaaacttatcagagtacatcagcatggaattttaaccgaaggatacagtactttcttaaacctagtgccgctcatcaccgagtcttgtataatgc

SEQ ID NO: 54323 - DNA, 120 bp, synthetic construct
  source 1..120: mol_type = other DNA
gaaaggagggttcctgctttgttaattagagcctagaagttactgattctacacagctttactagagatcaaatctaaattgtcaaatcaactaaagccgaggttactgcatttctctat

SEQ ID NO: 54324 - DNA, 120 bp, synthetic construct
  source 1..120: mol_type = other DNA
gtggcgctcaaagctaacaaggtaagcaatgtacctcgttttctgcaacgtacttcacttttaccatggctcgagtagcagggattgttcaattccgactgtgtacttatacataattat

SEQ ID NO: 54325 - DNA, 120 bp, synthetic construct
  source 1..120: mol_type = other DNA
agcatataagtaacaaagcctcatcaagatgagccatccctgccctcaacacaaatgcaaaattccagcagtatataaagaatatagtttatattggaaatgcaagaatacttcacagga

SEQ ID NO: 54326 - DNA, 120 bp, synthetic construct
  source 1..120: mol_type = other DNA
tacttcaagtttctaatccctgacgttcttgttgttacttttatatgtaaaacctcaactttttcccaattttctggggttggtattgtggaaatctcaaggatattagttctttgaatg

SEQ ID NO: 54327 - DNA, 120 bp, synthetic construct
  source 1..120: mol_type = other DNA
ggaaggggaacagacaaatgacaaaagaagggactatttcaccagacaagtttaccttatttatactgtgtacttacgcccgcccagaagttatttcttacgctggtgataaggctctat

SEQ ID NO: 54328 - DNA, 120 bp, synthetic construct
  source 1..120: mol_type = other DNA
attgctaaccttcgggaagaataaactaggcagacacacgaagacagctgctttcaaatattttcggaactagttatgtggggggaaagcagttcgggtgttttagaggtaatactcttt

SEQ ID NO: 54329 - DNA, 120 bp, synthetic construct
  source 1..120: mol_type = other DNA
agtctgccatgtttcagctctttgacagcaaagataacaaaattcatgctgaaaccaagacaggaacaccaaatctcagaaactgttctgcagaaaagttactgctaagtaccctcctgt

SEQ ID NO: 54330 - DNA, 120 bp, synthetic construct
  source 1..120: mol_type = other DNA
tgaacgaagaacaaactaaacgttatttatcaccagtaagtgacaagagtatgtcaaatcctactttaaatatcaaagcaaccagcatcagagaaattacgtgccagaaactcacgggat

SEQ ID NO: 54331 - DNA, 120 bp, synthetic construct
  source 1..120: mol_type = other DNA
gatcaaaaactttccatcaccctgtctccaacccttcctgtctgtagttcatgaaactaggtgtccagtcaaaaataaacaggatcaaacaagctacgtgaggttactctgagtttggat

SEQ ID NO: 54332 - DNA, 120 bp, synthetic construct
  source 1..120: mol_type = other DNA
tactaccatgaggtggaaatttctcccccatttatccccgaatgaccagcagccctttgtcaaagatatttttagtacctatgggtcaaacctaaaagcaattctaaacctccaggaagt

SEQ ID NO: 54333 - DNA, 120 bp, synthetic construct
  source 1..120: mol_type = other DNA
ttctgaagtagtattcataagtaatatatacgttggagaaacaatatagcatagtgaaacaaataattcagtcaggagatctaggtttatgtcccttacaggtaagtggttataagccac

SEQ ID NO: 54334 - DNA, 120 bp, synthetic construct
  source 1..120: mol_type = other DNA
aaatgcactgattctcaactgggcaagatttttgagccccaggggcatttagcgacgtttagagattggctgtcacaactgagatgtattcctggaatctgatgggccgaaggccaggca

SEQ ID NO: 54335 - DNA, 120 bp, synthetic construct
  source 1..120: mol_type = other DNA
cttgaagatacggttaagaaaattacttcttgtgttttgtgtttttttgtttgtttgtttgttttattttattttatttttttgagacggagtctcgctctgtcgcccaggccggactgc

SEQ ID NO: 54336 - DNA, 120 bp, synthetic construct
  source 1..120: mol_type = other DNA
cgtatcctgcgaatgcagtattcttgcattgccaatataaactatattctttcctactggaattttgcatttgtgttgaggagagggttggaccatcttgatgaggctttgttgcttatg

SEQ ID NO: 54337 - DNA, 120 bp, synthetic construct
  source 1..120: mol_type = other DNA
tcctgacctcaagtgatccacccgcctcagcctcctaaagagattgattacaggcgtgagccaccgcgcccagcccatgatagtattgttttaatattgaaaaagtattcatcataagcg

SEQ ID NO: 54338 - DNA, 120 bp, synthetic construct
  source 1..120: mol_type = other DNA
ctgctgagagacttgcctccttggattgggagggccggaacttcttcaggaagtggttccctcctggtccttgtactactgggtggggtgggttggtggggtttgtgggggcctgagtgt

SEQ ID NO: 54339 - DNA, 120 bp, synthetic construct
  source 1..120: mol_type = other DNA
cttggttttccttacaccttagcctttggctcctttgaccactcgaagccccacagcgtgttccagcggacttcaccagcagacccagaagtggtgggtgaaacactgcctctgttcctc

SEQ ID NO: 54340 - DNA, 120 bp, synthetic construct
  source 1..120: mol_type = other DNA
tgtgatggcgctcaatgaacgctgggcatttaccaaactcacagaaatgcacacccaacattatctaccaattggacatttagtcaaagtttcctggtttatctacgggggaaagattgt

SEQ ID NO: 54341 - DNA, 120 bp, synthetic construct
  source 1..120: mol_type = other DNA
taagtacaagtgtgccaagatatttacacaaggacattcatggcattttttaaattttgttttgagactgagtctccctttgttgcctaggctggactgcagtggcaccatctcagctca

SEQ ID NO: 54342 - DNA, 120 bp, synthetic construct
  source 1..120: mol_type = other DNA
ttgggtgtatgtggtgtgtcacagagaggtgcacacagacgccagaaacctgaagtaaagatagaagaagagattaagaaatgtaaactcttttcttcaattttcaaagaggaaaaaagt

SEQ ID NO: 54343 - DNA, 120 bp, synthetic construct
  source 1..120: mol_type = other DNA
tttttgtatttttagtagagacggggtttcaccttgttagccaggatggtctcgatctcctgacctcatgatccacccgcctcggcctcccaaactgctgggattacaggcgtgagccac

SEQ ID NO: 54344 - DNA, 120 bp, synthetic construct
  source 1..120: mol_type = other DNA
ccccctacagacaatttaccaatcccttctcagttcattcagaaatcccaaacagaataaaacaaaacaaaataaattctgaaattcttgtagttttttctccttttcaattcccccttg

SEQ ID NO: 54345 - DNA, 120 bp, synthetic construct
  source 1..120: mol_type = other DNA
atcagcccactgtgaaaatcagaattatcagtcagactgattccgtgttactcaggaagaaaaatgttatttcaaaagatgctttgaacaccctagcgttagggaagaggattgtaacaa

SEQ ID NO: 54346 - DNA, 120 bp, synthetic construct
  source 1..120: mol_type = other DNA
gttcagttcttttccatagatggatgaaactgagattggaagctgctttggtagatacggttcagtgaaagaagtgaagataatcacgaatcgaactggtgtgtccaaagggtgagtaat

SEQ ID NO: 54347 - DNA, 120 bp, synthetic construct
  source 1..120: mol_type = other DNA
aattttgtttcctgattgcagggcccagcttcagctttttaccatggaaatttatctgtgactgaaaataaaacagtaacaaaactagaatcaattttcaagtctttacttccaagactt

SEQ ID NO: 54348 - DNA, 120 bp, synthetic construct
  source 1..120: mol_type = other DNA
cattcatcaatacacccacattcagtaatggctcacagtaaatgctacaaacaagtagggcttttcttctagccattgctcagagaaggaaaaagaagaagaggtgtaccccacacgttt

SEQ ID NO: 54349 - DNA, 120 bp, synthetic construct
  source 1..120: mol_type = other DNA
ctgtatctctacaagattcaggaaagtcagtctggatgtttcagctctttgacagcaaagataacaaaatacatgctgaaacaaagaagggaacaccaaatctcagaaattgttctacgg

SEQ ID NO: 54350 - DNA, 120 bp, synthetic construct
  source 1..120: mol_type = other DNA
gaaatgatttccagatgcctctgcatattaaattgctgacttccagatatattctggttctggaatgggtagatttctgatatgttttaggtatctgtaaatcccgcaagtttctggcat

SEQ ID NO: 54351 - DNA, 120 bp, synthetic construct
  source 1..120: mol_type = other DNA
tcctacttatcccgattcagcatttcaggtcaccactggatatcagttgcctgtatataattatcaggtaatgtaagagggagtaaaatgatttgctttcaggtattattggggccttta

SEQ ID NO: 54352 - DNA, 120 bp, synthetic construct
  source 1..120: mol_type = other DNA
gtcgttgttactttcttgttaacccgattatgaactcccatgggagcaagagtgccttttttgccctcaggtttttatgtgcctaagcaatggcaggtccacataatgatagactatata

SEQ ID NO: 54353 - DNA, 120 bp, synthetic construct
  source 1..120: mol_type = other DNA
gggtgtattcatgtatgctgctacctgtatgttttcaaacaataagaatttattgaaacatgtaagacattatactttctcttctccagtattggatcatagactgcacttagtttttcg

SEQ ID NO: 54354 - DNA, 120 bp, synthetic construct
  source 1..120: mol_type = other DNA
gaaacctcaaagatactacctctttcagtttcttaccatagatgtaattatgggtcatagatatacttgtatctatgaaaagagatccagagcattactatcttcaaacagccagctaaa

SEQ ID NO: 54355 - DNA, 120 bp, synthetic construct
  source 1..120: mol_type = other DNA
tggaatgggtagatttctgatgtggtttagtatatatataaaccccgtgagcttctggcgtctaatttctctgattctggttacactgatatttaaagtagggtttgacatactccatca

SEQ ID NO: 54356 - DNA, 120 bp, synthetic construct
  source 1..120: mol_type = other DNA
gcatttcctgcttatccaaattcaccatttcaagtcgccactggatatcagttccctgtatacaattatcaggtaatgtcagagggagtaaaatgatttgcttttaggtattattgaggc

SEQ ID NO: 54357 - DNA, 120 bp, synthetic construct
  source 1..120: mol_type = other DNA
ttctaaagtcacgtgaatactccctttctttgattatatagtctatcattatgtagacctgccattgcttaagcacataaaaacctgaggacaaaaaaggcactgttgctgccatgggag

SEQ ID NO: 54358 - DNA, 120 bp, synthetic construct; identical to SEQ ID NO: 54353
  source 1..120: mol_type = other DNA

SEQ ID NO: 54359 - DNA, 120 bp, synthetic construct; identical to SEQ ID NO: 54354
  source 1..120: mol_type = other DNA

SEQ ID NO: 54360 - DNA, 120 bp, synthetic construct; identical to SEQ ID NO: 54355
  source 1..120: mol_type = other DNA

SEQ ID NO: 54361 - DNA, 120 bp, synthetic construct; identical to SEQ ID NO: 54356
  source 1..120: mol_type = other DNA

SEQ ID NO: 54362 - DNA, 120 bp, synthetic construct; identical to SEQ ID NO: 54357
  source 1..120: mol_type = other DNA

SEQ ID NO: 54363 - DNA, 120 bp, synthetic construct; identical to SEQ ID NO: 54353
  source 1..120: mol_type = other DNA

SEQ ID NO: 54364 - DNA, 120 bp, synthetic construct; identical to SEQ ID NO: 54354
  source 1..120: mol_type = other DNA

SEQ ID NO: 54365 - DNA, 120 bp, synthetic construct; identical to SEQ ID NO: 54355
  source 1..120: mol_type = other DNA

SEQ ID NO: 54366 - DNA, 120 bp, synthetic construct; identical to SEQ ID NO: 54356
  source 1..120: mol_type = other DNA

SEQ ID NO: 54367 - DNA, 120 bp, synthetic construct; identical to SEQ ID NO: 54357
  source 1..120: mol_type = other DNA

SEQ ID NO: 54368 - DNA, 120 bp, synthetic construct
  source 1..120: mol_type = other DNA
gtgtacttattcacacccagaaattatgtcttacactggtgataaggttccactaagacagattgcaatgtaaggtaaatcaatacatttgcaatttcgctgtaagaatatttccagact

SEQ ID NO: 54369 - DNA, 120 bp, synthetic construct; identical to SEQ ID NO: 54293
  source 1..120: mol_type = other DNA

SEQ ID NO: 54370 - DNA, 120 bp, synthetic construct
  source 1..120: mol_type = other DNA
gatttccagatgcctcctcatataaattgctgacttctggatatttcctggttctggaatgggtagatttctgatgtggtttagtatatatatgtaaaccccgtgagcttctggcatcta

SEQ ID NO: 54371 - DNA, 120 bp, synthetic construct; identical to SEQ ID NO: 54303
  source 1..120: mol_type = other DNA

SEQ ID NO: 54372 - DNA, 120 bp, synthetic construct
  source 1..120: mol_type = other DNA
gaggcagattctatgcagatacatgctaattgtaaagtcacatgaacactacctttctttgattatatagtctgtcattatatggacctgccattgcttaaccacataaaaacctgaggg

SEQ ID NO: 54373 - DNA, 120 bp, synthetic construct; identical to SEQ ID NO: 54301
  source 1..120: mol_type = other DNA

SEQ ID NO: 54374 - DNA, 120 bp, synthetic construct
  source 1..120: mol_type = other DNA
tgtttctagtccatgacattcttgttacttttacattggaaacttcagctctctccacattttcgggatttcgcaatgtggaaacctcaaagatactagctctttcagtttattaccata

SEQ ID NO: 54375 - DNA, 120 bp, synthetic construct
  source 1..120: mol_type = other DNA
atggctgacttctggatatattctggttctggaatgggcagatttctgacgtggtttagtatatatatataaacccggtgagtttctggcatgtaatttctctgatcgtggttacattga

SEQ ID NO: 54376 - DNA, 120 bp, synthetic construct
  source 1..120: mol_type = other DNA
caactattcaggaaatttctataaacaagttaaaggcctcaataatacctgaaagcaaaccattttactacctcttacattacctgataattgtatacaggcaactgatatccagtggtg

SEQ ID NO: 54377 - DNA, 120 bp, synthetic construct
  source 1..120: mol_type = other DNA
gtttgttgttgttgttgttactttcttgttaacccgagtataaactcccatggcagcaacagtgccttttttgccctcagggttttatgtgcttaagcaatggcagctccacataatgat

SEQ ID NO: 54378 - DNA, 120 bp, synthetic construct
  source 1..120: mol_type = other DNA
tggctttgtctgtacttcattccaaaaaactaagtgcagtctataatccaatactggagaagaggaagtataatgtcttatatgtttcaataaatgcttattgtttgaaaacatacaggc

SEQ ID NO: 54379 - DNA, 120 bp, synthetic construct
  source 1..120: mol_type = other DNA
gataccatctcacaccagttagaatggcaatcatttaaaagtcaggagacaacaggtgctggagaagatgtggagaaacaggaacacttttacactgttggcgggactgtaaactagttc

SEQ ID NO: 54380 - DNA, 120 bp, synthetic construct
  source 1..120: mol_type = other DNA
aatatcgtgaaaatggccatactgcccaaggtaatttacagattcaatgccatccccatcaagctaccaatgcctttcttcacagaattggaaaaaactactttaaagttcacatggaac

SEQ ID NO: 54381 - DNA, 120 bp, synthetic construct
  source 1..120: mol_type = other DNA
acagaatcctccctaactcattttatgaggccagcatcattctgataccaaagccaggcagagacacaaccaaaaaagagaattttagaccaatatccttgatgaacattgatgcaaaaa

SEQ ID NO: 54382 - DNA, 120 bp, synthetic construct; identical to SEQ ID NO: 54288
  source 1..120: mol_type = other DNA

SEQ ID NO: 54383 - DNA, 120 bp, synthetic construct; identical to SEQ ID NO: 54287
  source 1..120: mol_type = other DNA

SEQ ID NO: 54384 - DNA, 120 bp, synthetic construct; identical to SEQ ID NO: 54286
  source 1..120: mol_type = other DNA

SEQ ID NO: 54385 - DNA, 120 bp, synthetic construct
  source 1..120: mol_type = other DNA
caagtaaaaacctcagggcaaaaaaggcactgttgctcccatgggagtttacaatcgggttaacaagaaagtaaaaaaataaactaaaacattgatataaaaatcacttaaaaatagtaa

SEQ ID NO: 54386 - DNA, 120 bp, synthetic construct
  source 1..120: mol_type = other DNA
aaaactaagtgcagtctataatccaatactggagaagaggaagtataatgtcttatatgtttcaataaatgcttattgtttgaaaacatacaggcagtagcatacatgaatacacccaga

SEQ ID NO: 54387 - DNA, 120 bp, synthetic construct; identical to SEQ ID NO: 54283
  source 1..120: mol_type = other DNA

SEQ ID NO: 54388 - DNA, 120 bp, synthetic construct
  source 1..120: mol_type = other DNA
actattattttgttacttcattttccgtcaaagaaaatgtctttaaagctaacacataaataaaacgaactaagaagaatataaacgtcctttatcaacattaagtgatggagtatgtca

SEQ ID NO: 54389 - DNA, 120 bp, synthetic construct
  source 1..120: mol_type = other DNA
gcatttcctgcttatccaagttcaccatttcaggtcaccactggatatcagttgcctgtatataattatcaggtaatgtaagaaggagtaaaattatttgctttcaggtattattgaggc

SEQ ID NO: 54390 - DNA, 120 bp, synthetic construct; identical to SEQ ID NO: 54285
  source 1..120: mol_type = other DNA

SEQ ID NO: 54391 - DNA, 120 bp, synthetic construct; identical to SEQ ID NO: 54386
  source 1..120: mol_type = other DNA

SEQ ID NO: 54392 - DNA, 120 bp, synthetic construct; identical to SEQ ID NO: 54283
  source 1..120: mol_type = other DNA

SEQ ID NO: 54393 - DNA, 120 bp, synthetic construct
  source 1..120: mol_type = other DNA
ttgacatactccatcacttaatgttgataaaggacgtttatattcttcttagttcgttttatttatgtgttagctttaaagacattttctttgacggaaaatgaagtaacaaaataatag

SEQ ID NO: 54394 - DNA, 120 bp, synthetic construct
  source 1..120: mol_type = other DNA
gccaacctttcttttcaggcatttcctgcttatccaagttcaccatttcaggtcaccactggatatcagttgcctgtatataattatcaggtaatgtaagaaggagtaaaattatttgct

SEQ ID NO: 54395 - DNA, 120 bp, synthetic construct; identical to SEQ ID NO: 54285
  source 1..120: mol_type = other DNA

SEQ ID NO: 54396 - DNA, 120 bp, synthetic construct
  source 1..120: mol_type = other DNA
cctataatattgtctgataaaaaacagtgtagaaatattctgacagggaaatagcaaatgtattaatttaacttaccttgcaatctctcttaatggagccttatcaccagtgtaagaaat

SEQ ID NO: 54397 - DNA, 120 bp, synthetic construct; identical to SEQ ID NO: 54283
  source 1..120: mol_type = other DNA

SEQ ID NO: 54398 - DNA, 120 bp, synthetic construct; identical to SEQ ID NO: 54393
  source 1..120: mol_type = other DNA

SEQ ID NO: 54399 - DNA, 120 bp, synthetic construct; identical to SEQ ID NO: 54389
  source 1..120: mol_type = other DNA

SEQ ID NO: 54400 - DNA, 120 bp, synthetic construct; identical to SEQ ID NO: 54285
  source 1..120: mol_type = other DNA

SEQ ID NO: 54401 - DNA, 120 bp, synthetic construct
  source 1..120: mol_type = other DNA
gaataagtacacagtataaggtaaactttggtgaaatagtcaattcttttgtcatttgttcccccttcacacccaaagtgtggcacatgacatagactatttctttcttcataaagtcag

SEQ ID NO: 54402 - DNA, 120 bp, synthetic construct
  source 1..120: mol_type = other DNA
tgatatggaaaataatccagaaagaacagaagtacatggtaggctaattcactttaccagaggtacaacctacctcctttgctccccaacagggcactgcggtggcatcttaaaaaaaaa

SEQ ID NO: 54403 - DNA, 120 bp, synthetic construct
  source 1..120: mol_type = other DNA
acatataggaagcagcatacatgaatacacccaaattcagtaatggctcaccgtaaatgttagaaacaagtagggctttgtctctagccattgttcagagaagaaaaaagaagaagaggt

SEQ ID NO: 54404 - DNA, 120 bp, synthetic construct
  source 1..120: mol_type = other DNA
aaggggacaccgaatctcataaaactgttgtagagaaaagttattgctaagtatatccctgtcaaaatattattccattacttctaaataataaagaggtcttaattctagactaatttt

SEQ ID NO: 54405 - DNA, 120 bp, synthetic construct
  source 1..120: mol_type = other DNA
ctcaaacactcccttaactacatttgtttcttagaatccttctacctctgattatgttgatacctggaagacgttttaaaacaaaaggctgccttaatgcatttcaacttttcgtttaaa

SEQ ID NO: 54406 - DNA, 120 bp, synthetic construct
  source 1..120: mol_type = other DNA
ccaatatcaaatcaaggaatttacactgcaatgggacttcttgggtattatacatattaccagcacatcaactacttccacacgcccacctatctaacagaacatatgtgacgccaggag

SEQ ID NO: 54407 - DNA, 120 bp, synthetic construct
  source 1..120: mol_type = other DNA
gaggcaggagaatggcgttaagtaaacctgggaggtggagcttgcagtgagcctagatggggccactcactgcactccagcctgggcgacagaggagactccgtctcaaaacaaaaaaaa

SEQ ID NO: 54408 - DNA, 120 bp, synthetic construct
  source 1..120: mol_type = other DNA
gccacattctcttccgcttcaccaactctgaatcaacctctctttctactcaactttttactgcttcattttaccccttttctcccttcacactgttcaggtgtatcatctgagtaaatc

SEQ ID NO: 54409 - DNA, 120 bp, synthetic construct
  source 1..120: mol_type = other DNA
attcacagatgaaaaaaaagctagtctttctgttttaagacacaaagtgatggttaaacatttccttttgaatgtaaagtgtgtagccagttttgacaaattctggcagttccactgaag

SEQ ID NO: 54410 - DNA, 120 bp, synthetic construct
  source 1..120: mol_type = other DNA
tcccaaataagcagaaaactctggaagtttcaaagcgagtcttttgtctaccaccaggtgagaactcaagtttaaaaaaatattttctgggctggacatggtggcatacgcctgtaatcc

SEQ ID NO: 54411 - DNA, 120 bp, synthetic construct
  source 1..120: mol_type = other DNA
agacagaaagagtccttttactttactgaaaatttctgattactactatagatctgaaagttgtcaaaaacttaaaccatttgttttgggtttaaacattataaataatgagaaaaaaga

SEQ ID NO: 54412 - DNA, 120 bp, synthetic construct
  source 1..120: mol_type = other DNA
actttgactcttctggacatattttactttacaaaaggaaatataacagactaaatctatttatagcaagtaactaatatttcaatgtttttataaaaacaattcccttcagatactctg

SEQ ID NO: 54413 - DNA, 120 bp, synthetic construct
  source 1..120: mol_type = other DNA
agaaaaaaagtttatttttattcatttatgcaaagacagtatcagcaataggtagtaggaacatttttctcagtttagaattaattttccattttgaaagggacttaatatcttctttac

SEQ ID NO: 54414 - DNA, 120 bp, synthetic construct
  source 1..120: mol_type = other DNA
gtatcagtatcatttgatctgccatggacatgtgtttaaagtggctttctggcccttctttcaatggcttcttccctaaaacgtggagactctaagttaatgtcgttactatgggccata

SEQ ID NO: 54415 - DNA, 120 bp, synthetic construct
  source 1..120: mol_type = other DNA
gaaagctaacaattttgatagtctgaacacaagcatttcacttctccaagaagtacctgtgaacagtacaatatttcagtattgagctttgcatttatgatttatctagaaatttacctc

SEQ ID NO: 54416 - DNA, 120 bp, synthetic construct
  source 1..120: mol_type = other DNA
cgttcactcattcccattcctccttgtaagacctctcacttctctctgcacgtctgcaggcaacatagagtgaaaagaaagttttgcatgtattttaaagttttatcttcctttctaaag

SEQ ID NO: 54417 - DNA, 120 bp, synthetic construct
  source 1..120: mol_type = other DNA
gactctgtctcaaaaaaaaaaaaaaaaatttctttttaactagctaagtgtggtggtgcacgtctgtcgtcctatttgggacgctgaggcagaaggatcccttgagtgcaggagtttgag

SEQ ID NO: 54418 - DNA, 120 bp, synthetic construct
  source 1..120: mol_type = other DNA
taggggggtgatttttggggtgatttaagtattctaaaattgattgtggtcatggttacacaactttgaatatatgaaaaaccagtgaaatgcaaactttaaataggtaaattgtattac

SEQ ID NO: 54419 - DNA, 120 bp, synthetic construct
  source 1..120: mol_type = other DNA
actgttggcatttgactgtaacccagtaaaccagtgtgggttttacctggcagtatattttctgctgccgagccttgatataatgtagtcaaatttagggaagaatcctgcagcagaaat

SEQ ID NO: 54420 - DNA, 120 bp, synthetic construct
  source 1..120: mol_type = other DNA
cagaagttgcagtgagccgagatcacaccactgcacttccagcctgggcgacaccgcaagaccctgtctcaaaaaaaaaagaaattcataaaaatgtgattcataattcctgccacatat

SEQ ID NO: 54421 - DNA, 120 bp, synthetic construct
  source 1..120: mol_type = other DNA
cttaactgtcactgtagtgaagttgatacaggaggtgatgttgtgctaaatgaatgctcaattcatgaagctaccccaccctctggaaatggcccacaaaaggcaaacatctaattttga

SEQ ID NO: 54422 - DNA, 120 bp, synthetic construct
  source 1..120: mol_type = other DNA
gtagttctctgggcctcttttcatagatatgactacatctgtgacccataatcatatctatggtgataagtaataaattgaaaaaactagtatccttgagatttccacaatgccaactcc

SEQ ID NO: 54423 - DNA, 120 bp, synthetic construct
  source 1..120: mol_type = other DNA
ctaagggcagtgtacaatccaaaactggagaaggacagtacgatgtcttatatgtttcgataaatacttattgtttgaaaacatataggaagcagcatacatgaatacacccaaattcag

SEQ ID NO: 54424 - DNA, 120 bp, synthetic construct; identical to SEQ ID NO: 54402
  source 1..120: mol_type = other DNA

SEQ ID NO: 54425 - DNA, 120 bp, synthetic construct; identical to SEQ ID NO: 54401
  source 1..120: mol_type = other DNA

SEQ ID NO: 54426 - DNA, 120 bp, synthetic construct
  source 1..120: mol_type = other DNA
gaagaatgaagtaggcagacacataaggagagctgctttcattcactttaggaactggttataaggaggaaagcagctctggtgctttggaggtaatactctcgtttactcctattctta

SEQ ID NO: 54427 - DNA, 120 bp, synthetic construct
  source 1..120: mol_type = other DNA
ccaactgggtggagcccaccacagctcaaggaggcctgcctgcctctgtaggctccacctctaggggcagggcacagacaaacaaaaagacagcagtaacctctgcagacttaaatgacc

SEQ ID NO: 54428 - DNA, 120 bp, synthetic construct
  source 1..120: mol_type = other DNA
aagaccaaatctacgtctgcttggtgtacctgaaagtgatcaggagaatggaaccaagctggaaaacactctgcaggatattatccaggagaacttccccaatctagcaaggcaggccaa

SEQ ID NO: 54429 - DNA, 120 bp, synthetic construct
  source 1..120: mol_type = other DNA
tttacatccgctgaggagagctttacttcccagtatgtggtcagttttggaataggtgtggtgtggtgctgaaaaaaaatgtatattctgttgatttggggtggagagttctgtagatgt

SEQ ID NO: 54430 - DNA, 120 bp, synthetic construct; identical to SEQ ID NO: 54381
  source 1..120: mol_type = other DNA

SEQ ID NO: 54431 - DNA, 120 bp, synthetic construct
  source 1..120: mol_type = other DNA
cccatcaagctaccaatgcctttcttcacagaattggaaaaaactactttaaagttcacatggaaccaaaaaagagcccgcattgccaagtcaatcctaagccaaaagaacaaagctgga

SEQ ID NO: 54432 - DNA, 120 bp, synthetic construct; identical to SEQ ID NO: 54379
  source 1..120: mol_type = other DNA

SEQ ID NO: 54433 - DNA, 120 bp, synthetic construct
  source 1..120: mol_type = other DNA
tttctaatttgttgatattttccatgtacttgaaacatgtatggtatacctcttatttttccttctctgaacaatgggtagaagaaaagctctacttgttactgtcatttactgtgagcc

SEQ ID NO: 54434 - DNA, 120 bp, synthetic construct
  source 1..120: mol_type = other DNA
ttttttttttttttttttttaaagatgccaccttaggggcctgttggggagcaaagggattatgttgtccttgacgttaagggaattagccaaacatagacttcctgttcattcttgatt

SEQ ID NO: 54435 - DNA, 120 bp, synthetic construct
  source 1..120: mol_type = other DNA
ccttatcaccagtgtaagacataatttctgggtgtgaataagtacacagtataaggtaaattttggtgaagtagtcagttctttgtcatttgttcccccttcacacccaaagtgtagcac

SEQ ID NO: 54436 - DNA, 120 bp, synthetic construct
  source 1..120: mol_type = other DNA
tgggagtttataatcgggttaacaagaaggaaacaacaacaaaaaaaacattaacataaaaagtcacttaaaaatatttgtaggcatatatgacatggaaaaaaatcaagaatgaacagg

SEQ ID NO: 54437 - DNA, 120 bp, synthetic construct; identical to SEQ ID NO: 54296
  source 1..120: mol_type = other DNA

SEQ ID NO: 54438 - DNA, 120 bp, synthetic construct; identical to SEQ ID NO: 54377
  source 1..120: mol_type = other DNA

SEQ ID NO: 54439 - DNA, 120 bp, synthetic construct
  source 1..120: mol_type = other DNA
gaaagcaaaccattttactacctcttacattacctgataattgtatacaggcaactgatatccagtggtgacctgaactggtgaatttggataagcaggaaatgcctgaaaaggttgcag

SEQ ID NO: 54440 - DNA, 120 bp, synthetic construct
  source 1..120: mol_type = other DNA
gattgccacatgcctcctcatataaatggctgacttctggatatattctggttctggaatgggcagatttctgacgtggtttagtatatatatataaacccggtgagtttctggcatgta

SEQ ID NO: 54441 - DNA, 120 bp, synthetic construct
  source 1..120: mol_type = other DNA
tctgtgctctgaaaagtgcagcataattttatttcagtctatctccctaagaaaattcatgaaagacactttggacgtttcatttagctatttgacagtaaagatgaaaactacatccag

SEQ ID NO: 54442 - DNA, 120 bp, synthetic construct
  source 1..120: mol_type = other DNA
ttgttactacattttccatcaaagaaaatgtcttttaagctaacacatcaatgaaatgaactaagaagaatataaacgttatttatcaacagtaagtgatagagtatgtcaaaccctact

SEQ ID NO: 54443 - DNA, 120 bp, synthetic construct; identical to SEQ ID NO: 54293
  source 1..120: mol_type = other DNA

SEQ ID NO: 54444 - DNA, 120 bp, synthetic construct; identical to SEQ ID NO: 54294
  source 1..120: mol_type = other DNA

SEQ ID NO: 54445 - DNA, 120 bp, synthetic construct
  source 1..120: mol_type = other DNA
acgttaagggaattagccaaacatagacttcctgttcattcttgatttttttccatgtcatatatgcctacaaatatttttaagtgatttttatgttaatttttttttgttgttgtttcc

SEQ ID NO: 54446 - DNA, 120 bp, synthetic construct; identical to SEQ ID NO: 54296
  source 1..120: mol_type = other DNA

SEQ ID NO: 54447 - DNA, 120 bp, synthetic construct; identical to SEQ ID NO: 54297
  source 1..120: mol_type = other DNA

SEQ ID NO: 54448 - DNA, 120 bp, synthetic construct; identical to SEQ ID NO: 54298
  source 1..120: mol_type = other DNA

SEQ ID NO: 54449 - DNA, 120 bp, synthetic construct
  source 1..120: mol_type = other DNA
ccccgtgagcttctggcatctaatttctctgatcctggttacattgatatttaaagtagggtttgacatactctgtcacctactgttgataaataacgtttatattcttcttagttcatt

SEQ ID NO: 54450 - DNA, 120 bp, synthetic construct
  source 1..120: mol_type = other DNA
ttctccaaattttcaggagttggcaatgtggaaacctccaagatactacctctttcagtttattaccatagatataattatgggtcatagatatacttgtatctatgaaaagagatccag

SEQ ID NO: 54451 - DNA, 120 bp, synthetic construct
  source 1..120: mol_type = other DNA
cacatcagtctggaagcatttttacagggaaatagcaaatgtattaatttaacttacattgaactctgtcttaatgcagccttatcaccagtgcaagaaataacttctgggtgggcataa

SEQ ID NO: 54452 - DNA, 120 bp, synthetic construct
  source 1..120: mol_type = other DNA
agaatcattaaaaatatttataggcatatgtgccacacaaaaaatcaagaaagaagagcaggtatatgtttcactcattcgctttaccggaggaacaacataactcctttgcgccccaac

SEQ ID NO: 54453 - DNA, 120 bp, synthetic construct; identical to SEQ ID NO: 54308
  source 1..120: mol_type = other DNA

SEQ ID NO: 54454 - DNA, 120 bp, synthetic construct; identical to SEQ ID NO: 54309
  source 1..120: mol_type = other DNA

SEQ ID NO: 54455 - DNA, 120 bp, synthetic construct
  source 1..120: mol_type = other DNA
gaccttctgaaccacgtactgtatgatggtgattttatgcttcatttgtctgcctttatagctatggatttgtttcgtttgttaatgacgtggatgtccagaagatagtaggagtaagta

SEQ ID NO: 54456 - DNA, 120 bp, synthetic construct
  source 1..120: mol_type = other DNA
tggtatttcacattatgtatgggttttgcctgcatacgtaattatgatgtctactttccaaattacagtctgctgcaaatcctgagactccaaactcaaccatctccagagaggccagca

SEQ ID NO: 54457 - DNA, 120 bp, synthetic construct
  source 1..120: mol_type = other DNA
gcaaagtgctttgagaatgacatgagatcacatctgtgaattcattttgtacgtataaagtggtacaagtggtgtgccaatgtaagttagtgtcctgttatttgaatttattttcagccg

SEQ ID NO: 54458 - DNA, 120 bp, synthetic construct; identical to SEQ ID NO: 54334
  source 1..120: mol_type = other DNA

SEQ ID NO: 54459 - DNA, 120 bp, synthetic construct; identical to SEQ ID NO: 54335
  source 1..120: mol_type = other DNA

SEQ ID NO: 54460 - DNA, 120 bp, synthetic construct; identical to SEQ ID NO: 54336
  source 1..120: mol_type = other DNA

SEQ ID NO: 54461 - DNA, 120 bp, synthetic construct
  source 1..120: mol_type = other DNA
aaaaattgtactgttgttttactgaattcccttatgatgaatactttttcagtattaaaactatcatgggctgggcgcggtggctcacgcctgtaatcccaacactttgggagactgagg

SEQ ID NO: 54462 - DNA, 120 bp, synthetic construct; identical to SEQ ID NO: 54338
  source 1..120: mol_type = other DNA

SEQ ID NO: 54463 - DNA, 120 bp, synthetic construct; identical to SEQ ID NO: 19361
  source 1..120: mol_type = other DNA

SEQ ID NO: 54464 - DNA, 120 bp, synthetic construct; identical to SEQ ID NO: 19362
  source 1..120: mol_type = other DNA

SEQ ID NO: 54465 - DNA, 120 bp, synthetic construct; identical to SEQ ID NO: 19363
  source 1..120: mol_type = other DNA

SEQ ID NO: 54466 - DNA, 120 bp, synthetic construct; identical to SEQ ID NO: 19364
  source 1..120: mol_type = other DNA

SEQ ID NO: 54467 - DNA, 120 bp, synthetic construct
  source 1..120: mol_type = other DNA
gggggcactagtaatatggctcacagtaactacattaagttagaatttctacattttagggaagaagtcactgaaagaagggccagaaagccgctttaaactcatgtccatggcagatca

SEQ ID NO: 54468 - DNA, 120 bp, synthetic construct
  source 1..120: mol_type = other DNA
taaatttctggagaaatcataaatgcaaagctcaatactgtaaatactgtactgttcacaggtacttgttggagaagtgaaatgtttgtattcagaccaacaaaattctgacctttcaaa

SEQ ID NO: 54469 - DNA, 120 bp, synthetic construct
  source 1..120: mol_type = other DNA
agtaatgtcccaaagacagctggtagaaaatgtaattctaaaaaatactgttttcactgactgaactgcatctaataggaaccacggcttgtgaacagctctccaatctgaaatttcatg

SEQ ID NO: 54470 - DNA, 120 bp, synthetic construct
  source 1..120: mol_type = other DNA
aaaaaaaaaaaaaaatctttttaactagccaagtgtagcggtgcatgtctgtagtcctaactatttgggaggctgaggcagaaggatcccttgcgtcaggagtttgaggttgtagtaagc

SEQ ID NO: 54471 - DNA, 120 bp, synthetic construct
  source 1..120: mol_type = other DNA
ttatgtatgattccatatacatgaaatgtccaggacaggaaaatccttagagaaagtaagtaaattagtggttgcctagggctgcacaggatgggggaaaatagcaggtgactgctaagg

SEQ ID NO: 54472 - DNA, 120 bp, synthetic construct
  source 1..120: mol_type = other DNA
ccagtcaactaactcttctctagttaaccctttcaattacaaatttctgctgaaggattcttccctaaagataactacattatgtcaaggttcagcagcagaaaatatactgccaggtaa

SEQ ID NO: 54473 - DNA, 120 bp, synthetic construct
  source 1..120: mol_type = other DNA
aaatcgagtatcaaatcaaggaatttacactccaatgggacttcagtgttatacatattaccaacacatcaactacttctacactcccgctcatttaagagaacatatgtgattcaagag

SEQ ID NO: 54474 - DNA, 120 bp, synthetic construct
  source 1..120: mol_type = other DNA
aaaaactttgttttaaatgaacagttgaaatacagtaaggcagccttctgttttagaatgtctttaaggcatcaacataatcagaagtagaagaactctaagaaactaatgtagtaagag

SEQ ID NO: 54475 - DNA, 120 bp, synthetic construct
  source 1..120: mol_type = other DNA
aacctcacctttttcccaattttctggagttggcattgtggaaatctcagagatattagttccttgaatttattaccatagatatgattatgggtcacagatacagtcatatctatgtaa

SEQ ID NO: 54476 - DNA, 120 bp, synthetic construct
  source 1..120: mol_type = other DNA
gacagttttgtgtttgacaatattatagggtaatatgtagtcctcctacagatgctatggctttttctgtacttcatttcgaagaactaagggctgtatataatccaaaactggaaaaga

SEQ ID NO: 54477 - DNA, 120 bp, synthetic construct
  source 1..120: mol_type = other DNA
gttgtgggctgcatataagtttcagtgtttggattagtccagacattctgaaactgtggtggaggaggatgattaaaaaccaaaggacgtggctgcacatgataagcacctttttgaaaa

SEQ ID NO: 54478 - DNA, 120 bp, synthetic construct
  source 1..120: mol_type = other DNA
tgatagatcctctacaaatactgctttttcttcatctgaactatgtcaatcaaaatgtgctaagattagggtagtgtgaaaacttcattgattaacaaagaattcatatccatgaacctg

SEQ ID NO: 54479 - DNA, 120 bp, synthetic construct
  source 1..120: mol_type = other DNA
tagatcagcatgaaattttaatgaaaggatatagtactttttttttttttttgagagagtctcgcccttgtcacccaggctggagtgcaatggcgtgatctcggctcactgcaacctctg

SEQ ID NO: 54480 - DNA, 120 bp, synthetic construct
  source 1..120: mol_type = other DNA
tacaggtaagtggttacaagccacttacttgccagccgtgtatctctgggcaaactgctttgagaaggaaatgagataacatctgtgaattcattttgtaaagtataaagtggtatatca

SEQ ID NO: 54481 - DNA, 120 bp, synthetic construct
  source 1..120: mol_type = other DNA
tgtgtcagattataagaggtcatgataatgcattgattctcaactggggaagatttttgagccctgggggcatttaacaacgtttagagattgcttgtcacaactgaggtgtattcctgg

SEQ ID NO: 54482 - DNA, 120 bp, synthetic construct
  source 1..120: mol_type = other DNA
tccttgttatatttggacaaccaagtgacaaagacagctaaaagctggaaaaaattattatgtaactcctgggatgtcagcttctttcacagtattatctaattcaattactatgtgaac

SEQ ID NO: 54483 - DNA, 120 bp, synthetic construct
  source 1..120: mol_type = other DNA
ctaccctatcattaagcttaaagtgaaatactagagtcatctccattgaaattaggaataaggtaagggcacctccttattactactatgtatttttttccactatgtatgacaaaggtg

SEQ ID NO: 54484 - DNA, 120 bp, synthetic construct
  source 1..120: mol_type = other DNA
acaatgcccacatcaattgaaagatgcaagttgtaaaatagtattatgcagcacggtgtaactcttgtaaaagttggcccatctatatgcaatacatgcataaaaataatctagaaggtc

SEQ ID NO: 54485 - DNA, 120 bp, synthetic construct
  source 1..120: mol_type = other DNA
agcgcgtgggagtgggggcggggtggggcagtcgggggtggggaacccgcaccccaaacctctgccagtagagaacccgaaccgggaaatgggtgcctcaagaaggccgtggcccttgca

SEQ ID NO: 54486 - DNA, 120 bp, synthetic construct; identical to SEQ ID NO: 17180
  source 1..120: mol_type = other DNA

SEQ ID NO: 54487 - DNA, 120 bp, synthetic construct; identical to SEQ ID NO: 17181
  source 1..120: mol_type = other DNA

SEQ ID NO: 54488 - DNA, 120 bp, synthetic construct; identical to SEQ ID NO: 11748
  source 1..120: mol_type = other DNA

SEQ ID NO: 54489 - DNA, 120 bp, synthetic construct; identical to SEQ ID NO: 12904
  source 1..120: mol_type = other DNA

SEQ ID NO: 54490 - DNA, 120 bp, synthetic construct
  source 1..120: mol_type = other DNA
ggaaccaagttggaaaacactctgcaggatattatccaggagaacttccccaatctagcaaggcaggccaacattcaaattaaggaaatacacagaacaccacaaagatactcctcaaga

SEQ ID NO: 54491 - DNA, 120 bp, synthetic construct
  source 1..120: mol_type = other DNA
agaaggcaagaaataagatcagagcagaactgaaggaaatagagacacaaaaaacccttcaaaaaattaatgaatccaggagctggttttttgaaaagatcaacaaaattgatagaccgc

SEQ ID NO: 54492 - DNA, 120 bp, synthetic construct
  source 1..120: mol_type = other DNA
tgggagttctggccagggcaatcaggcaggagaaggaaataaagggtattcaattaggaaaagaggaagtcaaattgtccctgtttgcagatgacatgattgtatatctagaaaacccca

SEQ ID NO: 54493 - DNA, 120 bp, synthetic construct
  source 1..120: mol_type = other DNA
acaggcatgggcaaggacttcatgtctaaaacaccaaaagcaatagcaacaaaagccaaaattgacaaatgggatctaattaaactaaagagcttctgcacagcaaaagaaactaccatc

SEQ ID NO: 54494 - DNA, 120 bp, synthetic construct
  source 1..120: mol_type = other DNA
taaatgtcgagttaatgggtgcagcacaccaacatggcacatgtatacatatgtaacaaaactgcacgttgtgcacatgtaccctaaaacttaaagtataataataataaaattaaaaaa

SEQ ID NO: 54495 - DNA, 120 bp, synthetic construct; identical to SEQ ID NO: 32183
  source 1..120: mol_type = other DNA

SEQ ID NO: 54496 - DNA, 120 bp, synthetic construct; identical to SEQ ID NO: 32184
  source 1..120: mol_type = other DNA

SEQ ID NO: 54497 - DNA, 120 bp, synthetic construct
  source 1..120: mol_type = other DNA
cctacctcccggcccttcagatagtgcaccagcctgcgacgcgtcgccggccgcttctgcttcttgggtagcagaggcccctctccgtccgccgccgctaaaccctgcgacgacgagctc

SEQ ID NO: 54498 - DNA, 120 bp, synthetic construct; identical to SEQ ID NO: 14468
  source 1..120: mol_type = other DNA

SEQ ID NO: 54499 - DNA, 120 bp, synthetic construct
  source 1..120: mol_type = other DNA
ccctgtctctctagcctcatctcattcaattttctcagtacttgatgattgttacactctagatgtactactgatttctttcggttatcagagaatttccgtgccaaattctgccctgcc

SEQ ID NO: 54500 - DNA, 120 bp, synthetic construct
  source 1..120: mol_type = other DNA
gcctcccaagtagctggggctacaggcatgtgccaccatgcccggctagttttttgtatttttagtagagacggggtttttaacttgatatactgaagaacagtggtattcagaattata

SEQ ID NO: 54501 - DNA, 120 bp, synthetic construct; identical to SEQ ID NO: 8983
  source 1..120: mol_type = other DNA

SEQ ID NO: 54502 - DNA, 120 bp, synthetic construct; identical to SEQ ID NO: 8984
  source 1..120: mol_type = other DNA

SEQ ID NO: 54503 - DNA, 120 bp, synthetic construct; identical to SEQ ID NO: 18399
  source 1..120: mol_type = other DNA

SEQ ID NO: 54504 - DNA, 120 bp, synthetic construct
  source 1..120: mol_type = other DNA
tggccctgccattctccccaggaggtaggtgtgcaggagagcattgtttttttttgtttgtttttgttttttttttttttggtttatttatttatttattttgagacagagtttcgctct

SEQ ID NO: 54505 - DNA, 120 bp, synthetic construct
  source 1..120: mol_type = other DNA
gggaattatgaattttataagtataatggtcgaaaaatttattctttttcttgaaggtagaatgtaatataaccccccccacccaacccccccgaggggatggggcgggttaagagagaa

SEQ ID NO: 54506 - DNA, 120 bp, synthetic construct
  source 1..120: mol_type = other DNA
gaaccagcctggcatcccagggatgaagcccacttgatcacagtggataagctttttgacgtgctgctggattcggtttgccagtattttactgaggatttttgcatcgattttcatcag

SEQ ID NO: 54507 - DNA, 120 bp, synthetic construct; identical to SEQ ID NO: 24501
  source 1..120: mol_type = other DNA

SEQ ID NO: 54508 - DNA, 120 bp, synthetic construct
  source 1..120: mol_type = other DNA
accacacctgggtaattttgtatttttaggagagatggggtttcaccatgttggtcaggctggtctcgaactcctgaactcagatgatctgtccgcctcaacttcccaaagtgctgggat

SEQ ID NO: 54509 - DNA, 120 bp, synthetic construct; identical to SEQ ID NO: 24502
  source 1..120: mol_type = other DNA

SEQ ID NO: 54510 - DNA, 120 bp, synthetic construct
  source 1..120: mol_type = other DNA
tgaccccccccacctccctcccggacggggtggctgccgggcggagacgctcctcacttcccagatggggtggctgccgggcggagaggctcctcacttctcagacggggcagctgccgg

SEQ ID NO: 54511 - DNA, 120 bp, synthetic construct
  source 1..120: mol_type = other DNA
ccttgggatcctgttgatctgtgaccttacccccaaccctgtgctcccttctttctttctttctttttctttctttccttccttccttccttctttctttctttctttctttctttcctt

SEQ ID NO: 54512 - DNA, 120 bp, synthetic construct; identical to SEQ ID NO: 24503
  source 1..120: mol_type = other DNA

SEQ ID NO: 54513 - DNA, 120 bp, synthetic construct
  source 1..120: mol_type = other DNA
tctagatccctgaggaatcgccacactgtcttccacaatggttgaactagtttacactcccaccaacagtgtaaaagtgttcctatttctccacaacctctccagcacctgttatttcct

SEQ ID NO: 54514 - DNA, 120 bp, synthetic construct
  source 1..120: mol_type = other DNA
tttggcttaggattgacttggcaatgccagctcttttttggttccatatgaactttaaagtagttttttccaattctgtgaagaaagtcattggtagcttgatggggatggcattgaatc

SEQ ID NO: 54515 - DNA, 120 bp, synthetic construct
  source 1..120: mol_type = other DNA
ttcttacataaaatccagacctctgtcatttcagctttggtggagtattttctcttcttcttcttcttcttcttcttcttcttctccttctccttcttctccttctccttctccctctcc

SEQ ID NO: 54516 - DNA, 120 bp, synthetic construct
  source 1..120: mol_type = other DNA
tatcattgttggacatttgcgttggttccaagtctttgctgttgtgaatagtgccgcaataaacatacgtgtgcatgtgtctttatagcagcatgatttatagtcctttgggtatatacc

SEQ ID NO: 54517 - DNA, 120 bp, synthetic construct
  source 1..120: mol_type = other DNA
ggttcagtttcagctttctacatatggctagccagttttcccagcaccatttattatatagggaatcctttccccattgcttgtttttctcaggtttgtcaaagatcagatagttgtaga

SEQ ID NO: 54518 - DNA, 120 bp, synthetic construct
  source 1..120: mol_type = other DNA
gatgagttcatgtcctttgtagggacatggatgaaattggaaatcatcattgtcagtaagctatcgcaaggacaaaaaaccaaacatcgcatgttctcgctcataggtaggaattgaaca

SEQ ID NO: 54519 - DNA, 120 bp, synthetic construct; identical to SEQ ID NO: 19039
  source 1..120: mol_type = other DNA

SEQ ID NO: 54520 - DNA, 120 bp, synthetic construct
  source 1..120: mol_type = other DNA
aacataccagaatctctgggacgcattcaaagcagtgtgtagagggaaatttacagcactaaatgcccacaagagaaagcaggaaagatccaaaattgacaccctaacatcacaattaaa

SEQ ID NO: 54521 - DNA, 120 bp, synthetic construct
  source 1..120: mol_type = other DNA
agacaaaaaccacatgattatctcaatagatgcagaaaaagcctttgacaaaattcaagaacccttcatgctaaaaactctcaataaattaggtattgatgggacatatttccaaataat

SEQ ID NO: 54522 - DNA, 120 bp, synthetic construct
  source 1..120: mol_type = other DNA
gtaccaaaacagagatatagatcaatggaacagaacagagccctcagaaataacgtcgcatatctacaactatctgatctttgacaaacctgagaaaaacaagcaatggggaaaggattc

SEQ ID NO: 54523 - DNA, 120 bp, synthetic construct
  source 1..120: mol_type = other DNA
ttattgcggcattattcacaatagcaaagacttggaaccaacccaaatgtccaacaatgatagactggattaagaaaatgtggcacatatacaccatggaatactatgcggccataaaaa

SEQ ID NO: 54524 - DNA, 120 bp, synthetic construct; identical to SEQ ID NO: 19040
  source 1..120: mol_type = other DNA

SEQ ID NO: 54525 - DNA, 120 bp, synthetic construct
  source 1..120: mol_type = other DNA
tgaatttgatcctgtcattatgatgttagctggttattttgctcattagttgatgccgtttcttcctaaccttgatggtctttacaatttgggatgtttttgcagtgtctggtaccagtt

SEQ ID NO: 54526 - DNA, 120 bp, synthetic construct
  source 1..120: mol_type = other DNA
gtggttttgatttgcatttctctgatggccagtgatgatgaacattttttcatgtgcacatgcacacgtatgcttattgtggcactattcacaatagcaaagacttggaaccaagccaaa

SEQ ID NO: 54527 - DNA, 120 bp, synthetic construct; identical to SEQ ID NO: 19042
  source 1..120: mol_type = other DNA

SEQ ID NO: 54528 - DNA, 120 bp, synthetic construct; identical to SEQ ID NO: 19043
  source 1..120: mol_type = other DNA

SEQ ID NO: 54529 - DNA, 120 bp, synthetic construct
  source 1..120: mol_type = other DNA
cacgcagatgggggaggcttttatggatcattccgtggcctttgagaacagatgctcttttataagccaaaaaagattgtctcattctttatgttgtagcctggcaaatgaactagctct

SEQ ID NO: 54530 - DNA, 120 bp, synthetic construct
  source 1..120: mol_type = other DNA
agaaattggaattgcaaaaatactactacttatgattaagagaaatatgggtaatggcatatttggttttcttgcactttggctcagagtagtttaccaaatgcattcctatcctgcaga

SEQ ID NO: 54531 - DNA, 120 bp, synthetic construct; identical to SEQ ID NO: 19044
  source 1..120: mol_type = other DNA

SEQ ID NO: 54532 - DNA, 120 bp, synthetic construct; identical to SEQ ID NO: 19029
  source 1..120: mol_type = other DNA

SEQ ID NO: 54533 - DNA, 120 bp, synthetic construct
  source 1..120: mol_type = other DNA
atccctgaggaatcgccacactgtcttccacaatggttaaactagtttacagtcccaccaacagtgtaaaagtgttcctatttctccacatcctctccagcacctgttgtttcctgactt

SEQ ID NO: 54534 - DNA, 120 bp, synthetic construct
  source 1..120: mol_type = other DNA
acaaaaatcaattcaagttggattgaagacttaaatgttagacctaaaaccataaaaaccagagaagaaaacctaggcattaccattcaggacataggcatggtcaaggacttcatgtct

SEQ ID NO: 54535 - DNA, 120 bp, synthetic construct; identical to SEQ ID NO: 19045
  source 1..120: mol_type = other DNA

SEQ ID NO: 54536 - DNA, 120 bp, synthetic construct
  source 1..120: mol_type = other DNA
tatccccagtaatgggatgcctgggtcaaatggtatttctagttctagatccctgaggaatcgccacactgacttccacaatggttgaactagtttacagtcccaccaacagtgtaaaag

SEQ ID NO: 54537 - DNA, 120 bp, synthetic construct; identical to SEQ ID NO: 19046
  source 1..120: mol_type = other DNA

SEQ ID NO: 54538 - DNA, 120 bp, synthetic construct
  source 1..120: mol_type = other DNA
acgcccacggagtctcgctgattgctagcacagcacggcagtctgagatcaaactgcaaggcggcagcgaggctgggggaggggcgcccgccattgcccaggcttgcttaggtaaacaaa

SEQ ID NO: 54539 - DNA, 120 bp, synthetic construct
  source 1..120: mol_type = other DNA
aagtttagagaaaaaagaataaaaagaaattagcaaagcctccaagaaatatgggactatgtgaaaagaccaaatctacgtctgattggtgtacctgaaagtgatggggagaatggaacc

SEQ ID NO: 54540 - DNA, 120 bp, synthetic construct
  source 1..120: mol_type = other DNA
caaagaagaccattacataatgctaaagggatcaattcaacaagaagagctaactatcctaaatatatatgcacccaatacaggagcaccaagattcataaagcaagtcctgagtgacct

SEQ ID NO: 54541 - DNA, 120 bp, synthetic construct
  source 1..120: mol_type = other DNA
agcatgactaataaagaaaaaaagagagaagaatcaaatagacacaataaaaaatgataagggggatatcaccactgatcccacagaaatacaaactaccatcagagaatactacaaaca

SEQ ID NO: 54542 - DNA, 120 bp, synthetic construct
  source 1..120: mol_type = other DNA
gcaattaggcaggagaaggaaataaagggtattcaattaggaaaagaggaagtcaaattgtccctgtttgcagacgacatgattgtatatctagaaaaccccattgtctcagcccaaaat

SEQ ID NO: 54543 - DNA, 120 bp, synthetic construct
  source 1..120: mol_type = other DNA
aaaatttttgcaacctactcatctgacaaagggctaatatccagaatctacaatgaatgcaaacaaatttacaagaaaataaacaaccccatcaaaaagtgggcaaagcacatgaacaga

SEQ ID NO: 54544 - DNA, 120 bp, synthetic construct; identical to SEQ ID NO: 19047
  source 1..120: mol_type = other DNA

SEQ ID NO: 54545 - DNA, 120 bp, synthetic construct
  source 1..120: mol_type = other DNA
cctctacacactgctttgaatgtgtcccagagattctggtatgttgtgtctttgttctcgttggtttcaaagaacatctttatttctgccttcattttgttatgtactcaatagtcattc

SEQ ID NO: 54546 - DNA, 120 bp, synthetic construct
  source 1..120: mol_type = other DNA
ttgcagtggctggtaccggttgttcctctccatatttagtgcttccttcaggagcttttttagggcaggcctggtggtgacaaaatctctcaacatttgcttatctgtaaagtattttat

SEQ ID NO: 54547 - DNA, 120 bp, synthetic construct; identical to SEQ ID NO: 19030
  source 1..120: mol_type = other DNA

SEQ ID NO: 54548 - DNA, 120 bp, synthetic construct; identical to SEQ ID NO: 19031
  source 1..120: mol_type = other DNA

SEQ ID NO: 54549 - DNA, 120 bp, synthetic construct
  source 1..120: mol_type = other DNA
atattaacaaatgtttattttctttgcttttaaaataccatctaagactgggcgcggtggcttacacctgtaatcccaacattttgggatgctgaggcgggtggatcgcctgagattagg

SEQ ID NO: 54550 - DNA, 120 bp, synthetic construct
  source 1..120: mol_type = other DNA
aaaaataaaaaaaacagtagatggtggtgtggatgtggtgaacgggaatacttctacactgctggtgggaatgtaaactagcacagccgccatggaaaacagtgtggaggttccttaaag

SEQ ID NO: 54551 - DNA, 120 bp, synthetic construct; identical to SEQ ID NO: 19033
  source 1..120: mol_type = other DNA

SEQ ID NO: 54552 - DNA, 120 bp, synthetic construct; identical to SEQ ID NO: 19034
  source 1..120: mol_type = other DNA

SEQ ID NO: 54553 - DNA, 120 bp, synthetic construct; identical to SEQ ID NO: 19035
  source 1..120: mol_type = other DNA

SEQ ID NO: 54554 - DNA, 120 bp, synthetic construct
  source 1..120: mol_type = other DNA
gccatcccattactgggtatatacccaaaggactataaatcatgctgctataaagacacatgcacatgtatgtttattgcggcactattcacagtagcaaagacttggaaccaacccaaa

SEQ ID NO: 54555 - DNA, 120 bp, synthetic construct; identical to SEQ ID NO: 19036
  source 1..120: mol_type = other DNA

SEQ ID NO: 54556 - DNA, 120 bp, synthetic construct; identical to SEQ ID NO: 19037
  source 1..120: mol_type = other DNA

SEQ ID NO: 54557 - DNA, 120 bp, synthetic construct; identical to SEQ ID NO: 11806
  source 1..120: mol_type = other DNA

SEQ ID NO: 54558 - DNA, 120 bp, synthetic construct
  source 1..120: mol_type = other DNA
ttgtaatgattgccattctaactggtgtgaaatgatatctcatagtggttttgatttgcatttctctgatggccagtgatgatgagcatttcttcatgtgttttttggctgcataaatgt

SEQ ID NO: 54559 - DNA, 120 bp, synthetic construct
  source 1..120: mol_type = other DNA
attttcacgatattgattcttcctacccatgagcatggaatgttcttccatttgtttgtgtcctcttttatttccttcagcagtggtttgtagttctccttgaagaggtccttcacatcc

SEQ ID NO: 54560 - DNA, 120 bp, synthetic construct; identical to SEQ ID NO: 11804
  source 1..120: mol_type = other DNA

SEQ ID NO: 54561 - DNA, 120 bp, synthetic construct; identical to SEQ ID NO: 11805
  source 1..120: mol_type = other DNA

SEQ ID NO: 54562 - DNA, 120 bp, synthetic construct
  source 1..120: mol_type = other DNA
gggggagggatagcattaggagatattcctaatgtaaatgacgatttaatgggtgcaacaccaacatggcacatgcatacatatgtaacaaacctgcacgttgtacacatgtaccctaga

SEQ ID NO: 54563 - DNA, 120 bp, synthetic construct; identical to SEQ ID NO: 11808
  source 1..120: mol_type = other DNA

SEQ ID NO: 54564 - DNA, 120 bp, synthetic construct
  source 1..120: mol_type = other DNA
cctatgagatgagaagttagttgtgaaaatctgggggaaaggtattccaagcagagtgaaaaccaagcacagagactcgaaatgaggataggcctggcatgttcaagaaagaaaaacaga

SEQ ID NO: 54565 - DNA, 120 bp, synthetic construct
  source 1..120: mol_type = other DNA
cctcccaaattgctgggattacaggcgtgagccaccatgcccggccatctgcatacctttttttttttttttttttttattaaactctaagttttagggtacatgtgcatattgtgcagg

SEQ ID NO: 54566 - DNA, 120 bp, synthetic construct
  source 1..120: mol_type = other DNA
ttgcgaaaattttctcccatgttgtaggttgcctgttcactctgatggtagtttcttttgctgtgcagaagctctttagtttaattagatcccatttgtcaattttggcttttgttgcca

SEQ ID NO: 54567 - DNA, 120 bp, synthetic construct
  source 1..120: mol_type = other DNA
tgatttggctctctgtttgtctgttgttggtgtataagaatgcttgtgattcttgtacattgattttgtatcctgagactttgctgaagttgcttatcagcttaaggagattttgggctg

SEQ ID NO: 54568 - DNA, 120 bp, synthetic construct
  source 1..120: mol_type = other DNA
acctctacgcaaataaactagaaaatctagaagaaatggatacattcctcgacacatacactctcccaagactaaaccaggaagaagttgaatctctgaatagaccaataacaggctctg

SEQ ID NO: 54569 - DNA, 120 bp, synthetic construct
  source 1..120: mol_type = other DNA
tcctgtattgggtgcataaatatttaggatagttagctcctcttgttgagttgatccctttaccattatgtaatggccttgtctcttttgatctttgttggtttaaagtctgttttatca

SEQ ID NO: 54570 - DNA, 120 bp, synthetic construct; identical to SEQ ID NO: 43774
  source 1..120: mol_type = other DNA

SEQ ID NO: 54571 - DNA, 120 bp, synthetic construct
  source 1..120: mol_type = other DNA
gagcttcccggctgctttgtttacctaagcaagcctgggcaatggcgggcgcccctcccccagcctcgttgccgccttgcagtttgatctcagactgctgtgctagcaatcagcgagatt

SEQ ID NO: 54572 - DNA, 120 bp, synthetic construct; identical to SEQ ID NO: 11810
  source 1..120: mol_type = other DNA

SEQ ID NO: 54573 - DNA, 120 bp, synthetic construct
  source 1..120: mol_type = other DNA
actattccaatcaatagaaaaagagggaatcctccctaactcattttatgagggcagcatcatcctgataccaaagccgggcagagacacaaccaaaaaagagaattttagaccaatatc

SEQ ID NO: 54574 - DNA, 120 bp, synthetic construct
  source 1..120: mol_type = other DNA
aaaacagcatggtactggtaccaaaacagagatatagatcaatggaacagagcagagccctcagaaataatgctgcatatctacaagtatctgatctttgacaaacctgaggaaaacaag

SEQ ID NO: 54575 - DNA, 120 bp, synthetic construct
  source 1..120: mol_type = other DNA
tacccaaaggactataaatcatgctgctataaagacacacgcacacgtatgtttattgtggcactattcacaatagcaaagacttggaaccaacccaaatgtccaacaatgatagactgg

SEQ ID NO: 54576 - DNA, 120 bp, synthetic construct
  source 1..120: mol_type = other DNA
actgtaagagaagagaaggagggaggagagcaagggttgaaaaactacctattgggtactatacttactacccaagtgatggttcagatgtaccccaaaccatagcatcaacacaatata

SEQ ID NO: 54577 - DNA, 120 bp, synthetic construct
  source 1..120: mol_type = other DNA
tgctggagcagctcacggagcaggtggacgtcccgttcggcgtgcgccgcctcttcacgcccacgcgtgggcaccgggtgctggggctggacgcgctgcaggcgggcggcaagtacgtgg

SEQ ID NO: 54578 - DNA, 120 bp, synthetic construct
  source 1..120: mol_type = other DNA
attaaactattgccctcccacggtttgtgtctgtaatcccattattgcagcctgtgtctgctttctgtgatctcagctgcttttctctcctgattctctgtttccttgtaggtttactta

SEQ ID NO: 54579 - DNA, 120 bp, synthetic construct; identical to SEQ ID NO: 20331
  source 1..120: mol_type = other DNA

SEQ ID NO: 54580 - DNA, 120 bp, synthetic construct; identical to SEQ ID NO: 20332
  source 1..120: mol_type = other DNA

SEQ ID NO: 54581 - DNA, 120 bp, synthetic construct; identical to SEQ ID NO: 20333
  source 1..120: mol_type = other DNA

SEQ ID NO: 54582 - DNA, 120 bp, synthetic construct; identical to SEQ ID NO: 20334
  source 1..120: mol_type = other DNA

SEQ ID NO: 54583 - DNA, 120 bp, synthetic construct; identical to SEQ ID NO: 20330
  source 1..120: mol_type = other DNA

SEQ ID NO: 54584 - DNA, 120 bp, synthetic construct
  source 1..120: mol_type = other DNA
cctacaaaggacatgaactcatccttttttatggctgcatagtgttgcatggtgtatatgtgccacattttcttaatccagtctatcactttggacatttgggttggttccaagtctttg

SEQ ID NO: 54585 - DNA, 120 bp, synthetic construct
  source 1..120: mol_type = other DNA
tggtaccagtaccatgctgttttggttactgtagccttgtagtatagtttgaagtcaggtagcgtgatgcctccagctttgttcttttggcttaggattgacgtggcgatgcgggctctt

SEQ ID NO: 54586 - DNA, 120 bp, synthetic construct
  source 1..120: mol_type = other DNA
tttattgaggatttttgcatcaatgttcatcaaggatattggtctaaaattctcttttttggttgtgtctctgcccggctttggtatcaggatgatgctggcttcataaaatgagttacg

SEQ ID NO: 54587 - DNA, 120 bp, synthetic construct
  source 1..120: mol_type = other DNA
agattcttaatcctgagttttagtttgattgcactgtggtctgagagataatttgttataatttctgttcttttacatttgctgaggagagctttacttccaagtatgtggtcaattttg

SEQ ID NO: 54588 - DNA, 120 bp, synthetic construct
  source 1..120: mol_type = other DNA
tctgctgttagtctgatgggcttccctttgagggtaacccgacctttctctctggctgtgcttaacattttttccttcatttcaactttggtgaatctgacaattatgtgtcttggagtt

SEQ ID NO: 54589 - DNA, 120 bp, synthetic construct
  source 1..120: mol_type = other DNA
agttaggctgctcgggggtcaggggtcagggacccacttgaggaggcagtctgcccgtcctcagatctccagctgtgtgctgggagaaccactgctctcttcaaagctgtcagacaggga

SEQ ID NO: 54590 - DNA, 120 bp, synthetic construct; identical to SEQ ID NO: 25884
  source 1..120: mol_type = other DNA

SEQ ID NO: 54591 - DNA, 120 bp, synthetic construct; identical to SEQ ID NO: 25885
  source 1..120: mol_type = other DNA

SEQ ID NO: 54592 - DNA, 120 bp, synthetic construct
  source 1..120: mol_type = other DNA
aactcctgacctcaggtgatccgcctgcctcagcctcccaaaatgtttggattacaggcctgagccactatgcccaacccttcagtgtcttttcacattttgtttaaaaacaagcaaata

SEQ ID NO: 54593 - DNA, 120 bp, synthetic construct
  source 1..120: mol_type = other DNA
caaattgtccctgtttgcagatgacatgattgtatatttagaaaaccccatcgtctcagcccaaaatctccttaagctgataagcaacttcagcaaagtttcaggatacaaagtcaatgt

SEQ ID NO: 54594 - DNA, 120 bp, synthetic construct
  source 1..120: mol_type = other DNA
accctagaagaaaacctaggcaatactatttgggacataggcatgggcaaggacttcatgtctaaaacaccaaaagcaatggcaacaaaagccaacattgacaaatgggatctaattaaa

SEQ ID NO: 54595 - DNA, 120 bp, synthetic construct
  source 1..120: mol_type = other DNA
caaacctgcacgttgtgcacatgtacccaagaacttaaagtataaaaaaaaaatttatatatcagggcaattaaaatcgttgttaaaaatttactgtaaatgatttttaacagcagccta

SEQ ID NO: 54596 - DNA, 120 bp, synthetic construct; identical to SEQ ID NO: 13647
  source 1..120: mol_type = other DNA

SEQ ID NO: 54597 - DNA, 120 bp, synthetic construct; identical to SEQ ID NO: 13648
  source 1..120: mol_type = other DNA

SEQ ID NO: 54598 - DNA, 120 bp, synthetic construct; identical to SEQ ID NO: 13649
  source 1..120: mol_type = other DNA

SEQ ID NO: 54599 - DNA, 120 bp, synthetic construct
  source 1..120: mol_type = other DNA
ctataaccttaccctcaaccccgtgctctctgaaacatgtgctgtgtccactaagggttaaatggattaagggtggtgcaagatgtgctttgttaaacagatgcttgaaggcagcatact

SEQ ID NO: 54600 - DNA, 120 bp, synthetic construct; identical to SEQ ID NO: 13650
  source 1..120: mol_type = other DNA

SEQ ID NO: 54601 - DNA, 120 bp, synthetic construct
  source 1..120: mol_type = other DNA
cttccacaatggttgaactagtttacagtctcaccaacagtgtaaaagtgttcctatttctccacatcctctccagcacctgttgtttcctgactttttaatgattgccattctaactgg

SEQ ID NO: 54602 - DNA, 120 bp, synthetic construct
  source 1..120: mol_type = other DNA
ctgtgaggaaagtcattggtagcttgatggggatggcattgaatctgtaaattatcttgggcagtatggccattttcacgatattgattcttcctacccatgagcatggaatgttcttcc

SEQ ID NO: 54603 - DNA, 120 bp, synthetic construct
  source 1..120: mol_type = other DNA
ccagttcctccttgtacctctggtagaattcggctgtgaatccatctggtcctggactctttttggttggtaaactattgattattgccacaatttcagctcctgttattggtctattca

SEQ ID NO: 54604 - DNA, 120 bp, synthetic construct
  source 1..120: mol_type = other DNA
cctgaggagagctttacttccaactatgtggtcagttttggaataggtatggtgtggtgctgaaaaaaatgtatattctgttgatttggggtggagagttctgtagatgtctattaggtc

SEQ ID NO: 54605 - DNA, 120 bp, synthetic construct
  source 1..120: mol_type = other DNA
cttaacattttttccttcatttcaactttggtgaatctgacaattatgtgtcttggagttgctcttctcgaggagtatctttgtggcgttctctgtatttcctgaatctgaacgtcggcc

SEQ ID NO: 54606 - DNA, 120 bp, synthetic construct
  source 1..120: mol_type = other DNA
tctttttgtttgtctgtgccctgcccccagaggtggagcctacagaggcaggcaggcttccttgagctgtggtgggctccacccagttcgagcttcctggctgctttgtttacctaagca

SEQ ID NO: 54607 - DNA, 120 bp, synthetic construct
  source 1..120: mol_type = other DNA
tcgcaagaacaaaaaaccaaacaccgcatattctcactcataggtgggaattgaacaatgagatcacatggacacaggaaggggaatatcacactctggggactgtggtggggagggggg

SEQ ID NO: 54608 - DNA, 120 bp, synthetic construct; identical to SEQ ID NO: 13651
  source 1..120: mol_type = other DNA

SEQ ID NO: 54609 - DNA, 120 bp, synthetic construct
  source 1..120: mol_type = other DNA
tcataggcgggaactgaacaatgagaacacatggacacaggaaggggaacatcacaccctggggactgttgtggggtggggggaggggggagggatagcattaggagatatacctaatgc

SEQ ID NO: 54610 - DNA, 120 bp, synthetic construct; identical to SEQ ID NO: 25865
  source 1..120: mol_type = other DNA

SEQ ID NO: 54611 - DNA, 120 bp, synthetic construct
  source 1..120: mol_type = other DNA
tctatattatattctgttggactggccctatttcagcctggtgacaccactggaaagtccttaattatagataatgtcctgttacgttatctgtgctagtgctctccctcattcctgtgt

SEQ ID NO: 54612 - DNA, 120 bp, synthetic construct
  source 1..120: mol_type = other DNA
aacacaacaaattaaaatgaaaagtgacatgagagtaaatgaatcaaaaggaaaaaacattgaaccagaggtgagggcagcacacccgcagcagctgtccaggcctgagccaatgcaacc

SEQ ID NO: 54613 - DNA, 120 bp, synthetic construct
  source 1..120: mol_type = other DNA
ccacacattccctcacaccccccacaccacacacccccacatacccccacacactcccatcccccacaccacacatcccgcacaccctccacaccacacatccccacacacctcacaccc

SEQ ID NO: 54614 - DNA, 120 bp, synthetic construct
  source 1..120: mol_type = other DNA
tctggatgggtctgtgacatggatgcttcatacacggttcttttattttttttttttttctcagatgcattctcgctctgtcacccaggctggagcgcagtggtgtggtatcggctcact

SEQ ID NO: 54615 - DNA, 120 bp, synthetic construct
  source 1..120: mol_type = other DNA
attctgacatgccacatttccattgtccatcagctcctttatttatttatttattttgagacaggctctcgctgtgttagccagcctggagtgcagtggcacagtcacggctcactataa

SEQ ID NO: 54616 - DNA, 120 bp, synthetic construct
  source 1..120: mol_type = other DNA
aagtcaggtaaattgttagtggttaataaatatgatgctttgcttccctaccactgctaaaaaggtaaactatcgcaagaacaaaaaaccaaacaccgcatattctcactcatacgtggg

SEQ ID NO: 54617 - DNA, 120 bp, synthetic construct; identical to SEQ ID NO: 12573
  source 1..120: mol_type = other DNA

SEQ ID NO: 54618 - DNA, 120 bp, synthetic construct; identical to SEQ ID NO: 12574
  source 1..120: mol_type = other DNA

SEQ ID NO: 54619 - DNA, 120 bp, synthetic construct; identical to SEQ ID NO: 12575
  source 1..120: mol_type = other DNA

SEQ ID NO: 54620 - DNA, 120 bp, synthetic construct; identical to SEQ ID NO: 12576
  source 1..120: mol_type = other DNA

SEQ ID NO: 54621 - DNA, 120 bp, synthetic construct; identical to SEQ ID NO: 8840
  source 1..120: mol_type = other DNA

SEQ ID NO: 54622 - DNA, 120 bp, synthetic construct; identical to SEQ ID NO: 8841
  source 1..120: mol_type = other DNA

SEQ ID NO: 54623 - DNA, 120 bp, synthetic construct; identical to SEQ ID NO: 13850
  source 1..120: mol_type = other DNA

SEQ ID NO: 54624 - DNA, 120 bp, synthetic construct; identical to SEQ ID NO: 13851
  source 1..120: mol_type = other DNA

SEQ ID NO: 54625 - DNA, 120 bp, synthetic construct
  source 1..120: mol_type = other DNA
caggagtcgatgcgatcaactggaagaaagggtatcagtgacggaagatgaaatgaatgaaatgaagcgagaagggaagtttagagaaaaaagaataaaaagaaacgaacaaagcctcca

SEQ ID NO: 54626 - DNA, 120 bp, synthetic construct
  source 1..120: mol_type = other DNA
aagagctcctgaaagaagcactaaacatggaaaggcacaaccggtaccagccgctgcaaaatcatgccaaaatgtaaagaccatcgagactaggaagaaactgcatcaactaacgagcaa

SEQ ID NO: 54627 - DNA, 120 bp, synthetic construct
  source 1..120: mol_type = other DNA
ttaaaagaactagaaaagcaagagcaaacacattcaaaagctagcaaaaggcaagaaataactaaaatcagagcagaactgaaggaaatagagacacaaaaaacccttcaaaaaattaat

SEQ ID NO: 54628 - DNA, 120 bp, synthetic construct
  source 1..120: mol_type = other DNA
ctatctatcacaaacccacagccaatatcatactgaatgggcaaaaactggaagcaatccctttgaaaactggcacaagacagggatgccctctctcaccactcctattcaacatagtgt

SEQ ID NO: 54629 - DNA, 120 bp, synthetic construct
  source 1..120: mol_type = other DNA
gatctttgacgaacctgagaaaaacaagcaatggggaaaggattccctatttaataaatggtgctgggaaaactggctagccatatgtagaaagctgaaactggatcccttccttacacc

SEQ ID NO: 54630 - DNA, 120 bp, synthetic construct
  source 1..120: mol_type = other DNA
tttattgcggcactattcacaatagcaaagacttggaaccaacccaaatgtccaacaatgatagactggattaagaaaatgtggcacatatacaccatggaatactatgcagccacaaaa

SEQ ID NO: 54631 - DNA, 120 bp, synthetic construct; identical to SEQ ID NO: 24916
  source 1..120: mol_type = other DNA

SEQ ID NO: 54632 - DNA, 120 bp, synthetic construct; identical to SEQ ID NO: 24917
  source 1..120: mol_type = other DNA

SEQ ID NO: 54633 - DNA, 120 bp, synthetic construct; identical to SEQ ID NO: 14057
  source 1..120: mol_type = other DNA

SEQ ID NO: 54634 - DNA, 120 bp, synthetic construct; identical to SEQ ID NO: 16309
  source 1..120: mol_type = other DNA

SEQ ID NO: 54635 - DNA, 120 bp, synthetic construct; identical to SEQ ID NO: 16310
  source 1..120: mol_type = other DNA

SEQ ID NO: 54636 - DNA, 120 bp, synthetic construct; identical to SEQ ID NO: 16311
  source 1..120: mol_type = other DNA

SEQ ID NO: 54637 - DNA, 120 bp, synthetic construct
  source 1..120: mol_type = other DNA
gtgaggggggtggggactggctctctttcagtgttgggggaagggagggctggacgtgcgatgaagggccgagatcggagtgtccggggtgcatggaggtggaggcagcgttgggctgta

SEQ ID NO: 54638 - DNA, 120 bp, synthetic construct
  source 1..120: mol_type = other DNA
aaccattgtggaagacagtgtggtgattcctcaaggatctagaactagatctagatctagatctagatctagaactagaactagaaataccatttgacccagccatcccattactgggca

SEQ ID NO: 54639 - DNA, 120 bp, synthetic construct; identical to SEQ ID NO: 12313
  source 1..120: mol_type = other DNA

SEQ ID NO: 54640 - DNA, 120 bp, synthetic construct
  source 1..120: mol_type = other DNA
caacatcctttcatgttaacaacccacaataatctaggcattgaaggaacacacttcaaaatgttaagggtcgcaaaaattttttcccatgttgtaggttgcctgttcactctgatggta

SEQ ID NO: 54641 - DNA, 120 bp, synthetic construct
  source 1..120: mol_type = other DNA
aaaaatgatgagttcatatcctttgtagggacatggatgaaattggaaaccatcattctcagtaaactatcgcaagaacaaaaaaccaaacaccgcatattctcactcataggtgggaat

SEQ ID NO: 54642 - DNA, 120 bp, synthetic construct
  source 1..120: mol_type = other DNA
aaccagggaggcggaggttgcagtgagctgagatcatgccactacactccagcctgggtgtcagagtgagactcggtctcaaaaaaaaaaaaaaaaaaaagtaaaaaaataatatgctgg

SEQ ID NO: 54643 - DNA, 120 bp, synthetic construct; identical to SEQ ID NO: 35146
  source 1..120: mol_type = other DNA

SEQ ID NO: 54644 - DNA, 120 bp, synthetic construct
  source 1..120: mol_type = other DNA
gcaggaggattgcttgaggccaggagttcgagaccagcctgagcaacatagttagaccctgtttcaccaaaaaccatatatatacgtatatatacacacatatatatacacacacgtata

SEQ ID NO: 54645 - DNA, 120 bp, synthetic construct
  source 1..120: mol_type = other DNA
tcagcctgccgagtgcctgcgattgcaggcgcgcaccaccacgcctgactggttttcgtatttttttggtggagacggggtttcgctgtgttggccgggctggtctccagctccaaactg

SEQ ID NO: 54646 - DNA, 120 bp, synthetic construct
  source 1..120: mol_type = other DNA
cagaaaggggggaaaggcggggaaaggattgagaaatcggatggttgccatgtctgtgtagaaagaggtagacacaggagacttttcattttgttctgtactaagaaaaattcttctgcc

SEQ ID NO: 54647 - DNA, 120 bp, synthetic construct; identical to SEQ ID NO: 29148
  source 1..120: mol_type = other DNA

SEQ ID NO: 54648 - DNA, 120 bp, synthetic construct; identical to SEQ ID NO: 8955
  source 1..120: mol_type = other DNA

SEQ ID NO: 54649 - DNA, 120 bp, synthetic construct; identical to SEQ ID NO: 8956
  source 1..120: mol_type = other DNA

SEQ ID NO: 54650 - DNA, 120 bp, synthetic construct
  source 1..120: mol_type = other DNA
ccgcaataaacatacgtgtgcatgtgtctttatagcagcatgatttatagtcatttgggtatatacccagtaatgggatggctgggtcaaatggtatttctagttctagatccctgagga

SEQ ID NO: 54651 - DNA, 120 bp, synthetic construct
  source 1..120: mol_type = other DNA
gcccgcatcgccaagtcaatcctaagtcaaaagaacaaagctggaggcatcacactacctgacttcaaactatactacaaggctacagtaaccaaaacagcatggtactggtaccaaaac

SEQ ID NO: 54652 - DNA, 120 bp, synthetic construct
  source 1..120: mol_type = other DNA
cgtgagccaccatgcctggcccacattttctttatcgaatccactattgatgggcacctaggctgatttaatgtctttgctattgtgaatagtgtgagcggaagaatttcatgatttgat

SEQ ID NO: 54653 - DNA, 120 bp, synthetic construct; identical to SEQ ID NO: 8957
  source 1..120: mol_type = other DNA

SEQ ID NO: 54654 - DNA, 120 bp, synthetic construct; identical to SEQ ID NO: 8958
  source 1..120: mol_type = other DNA

SEQ ID NO: 54655 - DNA, 120 bp, synthetic construct
  source 1..120: mol_type = other DNA
ggccaacacgatgaaaccccacctctactaaaaaaaaaaaaaaaatatatatatatatatatatatacacatacatatatacacacacaaaaattagctgagtgtggtggtgtgtgcctg

SEQ ID NO: 54656 - DNA, 120 bp, synthetic construct; identical to SEQ ID NO: 8959
  source 1..120: mol_type = other DNA

SEQ ID NO: 54657 - DNA, 120 bp, synthetic construct; identical to SEQ ID NO: 20375
  source 1..120: mol_type = other DNA

SEQ ID NO: 54658 - DNA, 120 bp, synthetic construct
  source 1..120: mol_type = other DNA
ttctactccacaaaaccgccattgtcatcatggcccgttctcaatgagctgccgggcacacctcccagacggggtggtggccgggcagaggggctcctcacctcccagtagggacggccg

SEQ ID NO: 54659 - DNA, 120 bp, synthetic construct
  source 1..120: mol_type = other DNA
gcgaaaccccgtctccaccaaaaaaatacgaaaaccagtcaggcgtggtggcgcgtgcctgcaatcgcaggcactcggcaagctgaggcaggagaatcaggctgggaggttgcagtgagc

SEQ ID NO: 54660 - DNA, 120 bp, synthetic construct; identical to SEQ ID NO: 12344
  source 1..120: mol_type = other DNA

SEQ ID NO: 54661 - DNA, 120 bp, synthetic construct
  source 1..120: mol_type = other DNA
aataaacatacgtgtgcatgtgtctttatagcagcatgatttatagtcctttgggtatatacccagtaatgggatggctgggtcaaatggtatttctagttctagatccccgaggaatcg

SEQ ID NO: 54662 - DNA, 120 bp, synthetic construct; identical to SEQ ID NO: 12345
  source 1..120: mol_type = other DNA

SEQ ID NO: 54663 - DNA, 120 bp, synthetic construct; identical to SEQ ID NO: 12346
  source 1..120: mol_type = other DNA

SEQ ID NO: 54664 - DNA, 120 bp, synthetic construct
  source 1..120: mol_type = other DNA
ggtcagctaatttttgtattttttggcagagatggggtttcaccatgttgcccaggctggtctcaaactcctaggcagaagcaattcgccttggccttccaaagtgttaagattacaggc

SEQ ID NO: 54665 - DNA, 120 bp, synthetic construct
  source 1..120: mol_type = other DNA
atccgcacaccttggcctgccaaagtgctaggatttacaggtgtgagccaccacacctggcctagttttctctttttttataatgtctttttctggttttgttcttggtaatgtttgact

SEQ ID NO: 54666 - DNA, 120 bp, synthetic construct; identical to SEQ ID NO: 12798
  source 1..120: mol_type = other DNA

SEQ ID NO: 54667 - DNA, 120 bp, synthetic construct; identical to SEQ ID NO: 12799
  source 1..120: mol_type = other DNA

SEQ ID NO: 54668 - DNA, 120 bp, synthetic construct; identical to SEQ ID NO: 12800
  source 1..120: mol_type = other DNA

SEQ ID NO: 54669 - DNA, 120 bp, synthetic construct; identical to SEQ ID NO: 12801
  source 1..120: mol_type = other DNA

SEQ ID NO: 54670 - DNA, 120 bp, synthetic construct; identical to SEQ ID NO: 12802
  source 1..120: mol_type = other DNA

SEQ ID NO: 54671 - DNA, 120 bp, synthetic construct; identical to SEQ ID NO: 12803
  source 1..120: mol_type = other DNA

SEQ ID NO: 54672 - DNA, 120 bp, synthetic construct; identical to SEQ ID NO: 12804
  source 1..120: mol_type = other DNA

SEQ ID NO: 54673 - DNA, 120 bp, synthetic construct; identical to SEQ ID NO: 12805
  source 1..120: mol_type = other DNA

SEQ ID NO: 54674 - DNA, 120 bp, synthetic construct; identical to SEQ ID NO: 12806
  source 1..120: mol_type = other DNA

SEQ ID NO: 54675 - DNA, 120 bp, synthetic construct; identical to SEQ ID NO: 12807
  source 1..120: mol_type = other DNA

SEQ ID NO: 54676 - DNA, 120 bp, synthetic construct; identical to SEQ ID NO: 12808
  source 1..120: mol_type = other DNA

SEQ ID NO: 54677 - DNA, 120 bp, synthetic construct; identical to SEQ ID NO: 12809
  source 1..120: mol_type = other DNA

SEQ ID NO: 54678 - DNA, 120 bp, synthetic construct; identical to SEQ ID NO: 12810
  source 1..120: mol_type = other DNA

SEQ ID NO: 54679 - DNA, 120 bp, synthetic construct; identical to SEQ ID NO: 12811
  source 1..120: mol_type = other DNA

SEQ ID NO: 54680 - DNA, 120 bp, synthetic construct; identical to SEQ ID NO: 12812
  source 1..120: mol_type = other DNA

SEQ ID NO: 54681 - DNA, 120 bp, synthetic construct; identical to SEQ ID NO: 12813
  source 1..120: mol_type = other DNA

SEQ ID NO: 54682 - DNA, 120 bp, synthetic construct; identical to SEQ ID NO: 12814
  source 1..120: mol_type = other DNA

SEQ ID NO: 54683 - DNA, 120 bp, synthetic construct; identical to SEQ ID NO: 12815
  source 1..120: mol_type = other DNA

SEQ ID NO: 54684 - DNA, 120 bp, synthetic construct; identical to SEQ ID NO: 12816
  source 1..120: mol_type = other DNA

SEQ ID NO: 54685 - DNA, 120 bp, synthetic construct; identical to SEQ ID NO: 12817
  source 1..120: mol_type = other DNA

SEQ ID NO: 54686 - DNA, 120 bp, synthetic construct; identical to SEQ ID NO: 12818
  source 1..120: mol_type = other DNA

SEQ ID NO: 54687 - DNA, 120 bp, synthetic construct; identical to SEQ ID NO: 12819
  source 1..120: mol_type = other DNA

SEQ ID NO: 54688 - DNA, 120 bp, synthetic construct
  source 1..120: mol_type = other DNA
ggcctgacagcctgagacagtcctgccgtccctgcgcttctcccacagctgggacatgggtgcaggcactccttctctcgccttccctttgccctccttgctttccttctcccctcttct

SEQ ID NO: 54689 - DNA, 120 bp, synthetic construct
  source 1..120: mol_type = other DNA
ggcaggcagagccggctgcacgcatgggcaaggacttctgttcctcatgtgtggacctgaccagagggaggcctcctccccgttctgctctgtgcagctcttgcagcccctgcagacgag

SEQ ID NO: 54690 - DNA, 120 bp, synthetic construct
  source 1..120: mol_type = other DNA
cctgggcaacagatcgagactccatctcaaaaaaaaaaaaaaaaaaggatggagaggacagtgtggtccacctctgtgggctggttgtcctagagattaaatggtgtttaatttaaagag

SEQ ID NO: 54691 - DNA, 120 bp, synthetic construct
  source 1..120: mol_type = other DNA
tcagtatcccagctgtgctggattccagttacacagatatatagcatttcatgtagctgcttctctcttgttaggtgtgcaagctatttgcagttttctgttttgagcatgactgtgata

SEQ ID NO: 54692 - DNA, 120 bp, synthetic construct
  source 1..120: mol_type = other DNA
gtcttgaaatcaggtgatccgccagccttggcatcccaaagagctgggattacaggcatgagccaccacgcctggcccatattggtgtttctaagtaaaaatcaaaggatttgtttactt

SEQ ID NO: 54693 - DNA, 120 bp, synthetic construct
  source 1..120: mol_type = other DNA
gtggttacttttggatttttgccagtctaacaggtgaaagcctggagattcttattcagtagtttgggctggggcctggccatgtgtatttttgaaaattttcgctggtgattttgctgc

SEQ ID NO: 54694 - DNA, 120 bp, synthetic construct
  source 1..120: mol_type = other DNA
aagacgcggtttgtgggtggctgaggggttgctccatgggggctccctccctccctcctttccttccttagatggacgaggtgggtcgcattctctgtaacctgtgcggtgtggttcctg

SEQ ID NO: 54695 - DNA, 120 bp, synthetic construct; identical to SEQ ID NO: 21387
  source 1..120: mol_type = other DNA

SEQ ID NO: 54696 - DNA, 120 bp, synthetic construct
  source 1..120: mol_type = other DNA
ccagtaatgggatggccgggtcaaatggtatttctaggtctagatccttgaggaatcgtcacactgtcttccacaatggatgaactagtttacagtcccaccaacagtgtaaaagtgttc

SEQ ID NO: 54697 - DNA, 120 bp, synthetic construct; identical to SEQ ID NO: 16594
  source 1..120: mol_type = other DNA

SEQ ID NO: 54698 - DNA, 120 bp, synthetic construct; identical to SEQ ID NO: 16593
  source 1..120: mol_type = other DNA

SEQ ID NO: 54699 - DNA, 120 bp, synthetic construct
  source 1..120: mol_type = other DNA
acaaaaactccatctcaaaaaaacccccaaagattcagagaagaatccatagatagaaaagcttcaggctccctctcccctctcccctctccccacggtctccctctccctctctttcca

SEQ ID NO: 54700 - DNA, 120 bp, synthetic construct
  source 1..120: mol_type = other DNA
cctactgggaagtgaggagcctctctgcccagtcagccgccccgtccgggaaggaggtgggggaggtcagccccccgcccggccagccgccccatccgggagggaggtaggggggtcagc

SEQ ID NO: 54701 - DNA, 120 bp, synthetic construct
  source 1..120: mol_type = other DNA
aagaaacacccaagaatgatcaattaaaaaaaaaaaaacccaaaaaaaacaaaatctggtggcagatgcctgtagtccagctactcaggaggctgaggtgggtggatcacctaagcctgg

SEQ ID NO: 54702 - DNA, 120 bp, synthetic construct; identical to SEQ ID NO: 19584
  source 1..120: mol_type = other DNA

SEQ ID NO: 54703 - DNA, 120 bp, synthetic construct; identical to SEQ ID NO: 26574
  source 1..120: mol_type = other DNA

SEQ ID NO: 54704 - DNA, 120 bp, synthetic construct
  source 1..120: mol_type = other DNA
gtgagcattttttcatgtggtttttggctgcataaatgtcttcttttgagaagtgtctgttcatgtcctttgcccactttttgatgggattgtttgtttttttcttgtaaatttgtttga

SEQ ID NO: 54705 - DNA, 120 bp, synthetic construct
  source 1..120: mol_type = other DNA
tttgtatcctgagactttgctgaagttgcttatcagcttaaggagattttgggctgagacgatggggttttctagatatacaatcatgttgtctgcaaacagggacaatttgacttcctc

SEQ ID NO: 54706 - DNA, 120 bp, synthetic construct; identical to SEQ ID NO: 26575
  source 1..120: mol_type = other DNA

SEQ ID NO: 54707 - DNA, 120 bp, synthetic construct
  source 1..120: mol_type = other DNA
aaaaaatctgattaagcttattttctttctttttttttacagtaaaccctttttttattatatacttttttagggtacatgtgcacaacatgcaggtttgttacgtatgtatacatgtgc

SEQ ID NO: 54708 - DNA, 120 bp, synthetic construct
  source 1..120: mol_type = other DNA
tatttctagttctagatccctgaggaatcgccacactgacttccacaatgactagtttacagtcccaccaacagtgtaaaagtgttcctatttctccacatcctctccagcacctgttgt

SEQ ID NO: 54709 - DNA, 120 bp, synthetic construct
  source 1..120: mol_type = other DNA
ttggcttaggattgacttggcgatgcgggctcttttttggttccatatgaactttaaagttggtttttccaattctgtgaagaaaggcattggtagcttgatggggatggcattgaatct

SEQ ID NO: 54710 - DNA, 120 bp, synthetic construct
  source 1..120: mol_type = other DNA
ttgatcatggtggataagcttcttgatgtgctgctggattcggtttgccagtattttcttgaggatttttgcatcaatgttcatcagggatattggtctaaaattctctttttttgttgt

SEQ ID NO: 54711 - DNA, 120 bp, synthetic construct; identical to SEQ ID NO: 27027
  source 1..120: mol_type = other DNA

SEQ ID NO: 54712 - DNA, 120 bp, synthetic construct; identical to SEQ ID NO: 27028
  source 1..120: mol_type = other DNA

SEQ ID NO: 54713 - DNA, 120 bp, synthetic construct; identical to SEQ ID NO: 10808
  source 1..120: mol_type = other DNA

SEQ ID NO: 54714 - DNA, 120 bp, synthetic construct
  source 1..120: mol_type = other DNA
atttacttgtaaaaagtcaagttttacttggtttcccccagaaacaaatgccttctaaattctaaacagctgggtttggtggtgcacctgtaatcccagctactcaggaggttggggcgg

SEQ ID NO: 54715 - DNA, 120 bp, synthetic construct; identical to SEQ ID NO: 33588
  source 1..120: mol_type = other DNA

SEQ ID NO: 54716 - DNA, 120 bp, synthetic construct; identical to SEQ ID NO: 33589
  source 1..120: mol_type = other DNA

SEQ ID NO: 54717 - DNA, 120 bp, synthetic construct; identical to SEQ ID NO: 32170
  source 1..120: mol_type = other DNA

SEQ ID NO: 54718 - DNA, 120 bp, synthetic construct
  source 1..120: mol_type = other DNA
tgcacttttgcgacgggcttaaaaaacggcgcaccacgagattatatcccgcacctggctcagagggtcctacgcccacggagtctcgctgattgctagcacagcagtctgagatcaaac

SEQ ID NO: 54719 - DNA, 120 bp, synthetic construct
  source 1..120: mol_type = other DNA
gaataaaaagaaatgagcaaagcctccaagatatatgggactatgtgaaaagaccaaatctacgtctgattggtgtacctgaaagtgatggggagaatggaaccaagttggaaaacactc

SEQ ID NO: 54720 - DNA, 120 bp, synthetic construct
  source 1..120: mol_type = other DNA
taatggtaaagggatcaattcagcaagaagagctaactatcctaaatatatatgcacccaatacaggagcaccaagattcataaagcaagtcctgagtgacctacaaagagacttagact

SEQ ID NO: 54721 - DNA, 120 bp, synthetic construct
  source 1..120: mol_type = other DNA
atccaggagctggttttttgaaaggatcaacaaaattgatagacctctagcaagactaataaagaaaaaaagagagaagaatcaaatagacgcaataaaaaatgataaaggggatatcac

SEQ ID NO: 54722 - DNA, 120 bp, synthetic construct
  source 1..120: mol_type = other DNA
ataaagagtattaaattaggaaaagaggaagtcaaattgtccctgtttgcagacgacatgattgtatatctagaaaaccccattgtctcagcccaaaatctccttaagctgataagcaac

SEQ ID NO: 54723 - DNA, 120 bp, synthetic construct
  source 1..120: mol_type = other DNA
aaaaccctagaagaaaacctaggcattaccattcaggacataggcatgggcaaggacttcatgtctaaaacaccaaaagcaatggcaacaaaagccaaaattggcaaatgggatctaatt

SEQ ID NO: 54724 - DNA, 120 bp, synthetic construct; identical to SEQ ID NO: 25951
  source 1..120: mol_type = other DNA

SEQ ID NO: 54725 - DNA, 120 bp, synthetic construct
  source 1..120: mol_type = other DNA
tacacccctggtgagcaggaagaagttagagcggtctttgccctttttccatcttctttagccaagaccttaagattaagaggcacatatacaccatggaatactatgcagccataaaaa

SEQ ID NO: 54726 - DNA, 120 bp, synthetic construct; identical to SEQ ID NO: 11539
  source 1..120: mol_type = other DNA

SEQ ID NO: 54727 - DNA, 120 bp, synthetic construct; identical to SEQ ID NO: 3199
  source 1..120: mol_type = other DNA

SEQ ID NO: 54728 - DNA, 120 bp, synthetic construct; identical to SEQ ID NO: 11541
  source 1..120: mol_type = other DNA

SEQ ID NO: 54729 - DNA, 120 bp, synthetic construct; identical to SEQ ID NO: 11542
  source 1..120: mol_type = other DNA

SEQ ID NO: 54730 - DNA, 120 bp, synthetic construct
  source 1..120: mol_type = other DNA
caagcctgggtgacagagtgagactccatctcaaaaaagaaaagaaaagaaaactctcacgcaatgttgggaagtcgggtaaaaaactgaccagcaaacaacaaatcactgcctgacatc

SEQ ID NO: 54731 - DNA, 120 bp, synthetic construct
  source 1..120: mol_type = other DNA
agtttgagactacctggacaacatggggaacccaggaggtggaggttgcagtgagttgagatcactccactgcactccagtttgggcaacagagaaagactctgtcaaaaaggaagggga

SEQ ID NO: 54732 - DNA, 120 bp, synthetic construct; identical to SEQ ID NO: 15716
  source 1..120: mol_type = other DNA

SEQ ID NO: 54733 - DNA, 120 bp, synthetic construct; identical to SEQ ID NO: 15717
  source 1..120: mol_type = other DNA

SEQ ID NO: 54734 - DNA, 120 bp, synthetic construct
  source 1..120: mol_type = other DNA
cctcggcctcccgaagcgctgggatgacaggcgtgagccgccgcgcccgcccattttttttaaacgtgttggggtttgggtttcagccacaggccttctgcgatgagaggaaacccagga

SEQ ID NO: 54735 - DNA, 120 bp, synthetic construct; identical to SEQ ID NO: 31053
  source 1..120: mol_type = other DNA

SEQ ID NO: 54736 - DNA, 120 bp, synthetic construct; identical to SEQ ID NO: 31054
  source 1..120: mol_type = other DNA

SEQ ID NO: 54737 - DNA, 120 bp, synthetic construct; identical to SEQ ID NO: 31055
  source 1..120: mol_type = other DNA

SEQ ID NO: 54738 - DNA, 120 bp, synthetic construct; identical to SEQ ID NO: 31056
  source 1..120: mol_type = other DNA

SEQ ID NO: 54739 - DNA, 120 bp, synthetic construct; identical to SEQ ID NO: 31078
  source 1..120: mol_type = other DNA

SEQ ID NO: 54740 - DNA, 120 bp, synthetic construct; identical to SEQ ID NO: 31079
  source 1..120: mol_type = other DNA

SEQ ID NO: 54741 - DNA, 120 bp, synthetic construct; identical to SEQ ID NO: 31057
  source 1..120: mol_type = other DNA

SEQ ID NO: 54742 - DNA, 120 bp, synthetic construct; identical to SEQ ID NO: 31058
  source 1..120: mol_type = other DNA

SEQ ID NO: 54743 - DNA, 120 bp, synthetic construct; identical to SEQ ID NO: 31059
  source 1..120: mol_type = other DNA

SEQ ID NO: 54744 - DNA, 120 bp, synthetic construct; identical to SEQ ID NO: 31060
  source 1..120: mol_type = other DNA

SEQ ID NO: 54745 - DNA, 120 bp, synthetic construct; identical to SEQ ID NO: 31061
  source 1..120: mol_type = other DNA

SEQ ID NO: 54746 - DNA, 120 bp, synthetic construct; identical to SEQ ID NO: 31062
  source 1..120: mol_type = other DNA

SEQ ID NO: 54747 - DNA, 120 bp, synthetic construct; identical to SEQ ID NO: 31063
  source 1..120: mol_type = other DNA

SEQ ID NO: 54748 - DNA, 120 bp, synthetic construct
  source 1..120: mol_type = other DNA
gatccagcacagagaggttgggagggtgactgagaggaaatgtgagagtgggctctttcccttaggttcttcatgagttgtttgtttcttagtgaaaaaggaaaaatttcagatactcat

SEQ ID NO: 54749 - DNA, 120 bp, synthetic construct
  source 1..120: mol_type = other DNA
ggcagagtgaaaagacagagcagtggatggggagatgggtggtatgatttgggccttcatttccatttgagtctgaagctcaaacgcctgcttgaaattcctagaatttcaaattttatt

SEQ ID NO: 54750 - DNA, 120 bp, synthetic construct
  source 1..120: mol_type = other DNA
cagagcagcctcaagtctttaaagacagaaagatttatttggctctctattcaatttatagatgagaaaaccaaggcccagagatgctaaatgaagcccccgaagtgacatggaccattg

SEQ ID NO: 54751 - DNA, 120 bp, synthetic construct
  source 1..120: mol_type = other DNA
ggaacatatgaagataacgctttgtcattggtgtcgataacgatatctttgctatgacaccaaagacacaggcaataaacgggaaaatagacaaatggggctgcactgacctctaaagca

SEQ ID NO: 54752 - DNA, 120 bp, synthetic construct
  source 1..120: mol_type = other DNA
cgtagcttgtagggcagctttacaatctcactgaggctctatgggttccttgcaccataaagtaatgggcttattctgaaagcaaatggtgatctcagcaaaattccactctaatgaggt

SEQ ID NO: 54753 - DNA, 120 bp, synthetic construct
  source 1..120: mol_type = other DNA
cagcctcgagaacaccaagacatatatttctgttgtttctaagtcacttggtgtatggtatttttttccagcactccacatacactcagattgcttgtgtctttgaagcccggataccat

SEQ ID NO: 54754 - DNA, 120 bp, synthetic construct
  source 1..120: mol_type = other DNA
tttcttttttttcttttctttttttttttttttttttgaggcagagtgtagatctgtcacccacgctggagtgcagtggtgcgatcttggctcactgcaacctccacctcccaggttgaa

SEQ ID NO: 54755 - DNA, 120 bp, synthetic construct
  source 1..120: mol_type = other DNA
gtaaaaattaaccaagaccttttaaaaatgtgaaggaagcacttattgaagactgttgaaatgggagtcagaacgttgcaacagggagagccgttggcctcaactttcctgaagccaaag

SEQ ID NO: 54756 - DNA, 120 bp, synthetic construct; identical to SEQ ID NO: 31056
  source 1..120: mol_type = other DNA

SEQ ID NO: 54757 - DNA, 120 bp, synthetic construct; identical to SEQ ID NO: 31078
  source 1..120: mol_type = other DNA

SEQ ID NO: 54758 - DNA, 120 bp, synthetic construct; identical to SEQ ID NO: 31079
  source 1..120: mol_type = other DNA

SEQ ID NO: 54759 - DNA, 120 bp, synthetic construct; identical to SEQ ID NO: 31057
  source 1..120: mol_type = other DNA

SEQ ID NO: 54760 - DNA, 120 bp, synthetic construct; identical to SEQ ID NO: 31080
  source 1..120: mol_type = other DNA

SEQ ID NO: 54761 - DNA, 120 bp, synthetic construct; identical to SEQ ID NO: 31059
  source 1..120: mol_type = other DNA

SEQ ID NO: 54762 - DNA, 120 bp, synthetic construct; identical to SEQ ID NO: 31060
  source 1..120: mol_type = other DNA

SEQ ID NO: 54763 - DNA, 120 bp, synthetic construct; identical to SEQ ID NO: 31061
  source 1..120: mol_type = other DNA

SEQ ID NO: 54764 - DNA, 120 bp, synthetic construct; identical to SEQ ID NO: 31062
  source 1..120: mol_type = other DNA

SEQ ID NO: 54765 - DNA, 120 bp, synthetic construct; identical to SEQ ID NO: 31063
  source 1..120: mol_type = other DNA

SEQ ID NO: 54766 - DNA, 120 bp, synthetic construct; identical to SEQ ID NO: 31053
  source 1..120: mol_type = other DNA

SEQ ID NO: 54767 - DNA, 120 bp, synthetic construct; identical to SEQ ID NO: 31054
  source 1..120: mol_type = other DNA

SEQ ID NO: 54768 - DNA, 120 bp, synthetic construct; identical to SEQ ID NO: 31055
  source 1..120: mol_type = other DNA

SEQ ID NO: 54769 - DNA, 120 bp, synthetic construct; identical to SEQ ID NO: 31056
  source 1..120: mol_type = other DNA

SEQ ID NO: 54770 - DNA, 120 bp, synthetic construct; identical to SEQ ID NO: 31078
  source 1..120: mol_type = other DNA

SEQ ID NO: 54771 - DNA, 120 bp, synthetic construct; identical to SEQ ID NO: 31079
  source 1..120: mol_type = other DNA

SEQ ID NO: 54772 - DNA, 120 bp, synthetic construct; identical to SEQ ID NO: 31057
  source 1..120: mol_type = other DNA

SEQ ID NO: 54773 - DNA, 120 bp, synthetic construct; identical to SEQ ID NO: 31080
  source 1..120: mol_type = other DNA

SEQ ID NO: 54774 - DNA, 120 bp, synthetic construct; identical to SEQ ID NO: 31081
  source 1..120: mol_type = other DNA

SEQ ID NO: 54775 - DNA, 120 bp, synthetic construct; identical to SEQ ID NO: 31060
  source 1..120: mol_type = other DNA

SEQ ID NO: 54776 - DNA, 120 bp, synthetic construct; identical to SEQ ID NO: 31082
  source 1..120: mol_type = other DNA

SEQ ID NO: 54777 - DNA, 120 bp, synthetic construct; identical to SEQ ID NO: 31083
  source 1..120: mol_type = other DNA

SEQ ID NO: 54778 - DNA, 120 bp, synthetic construct
  source 1..120: mol_type = other DNA
gtatctcctaggatgctcaggatgaatatcacaaagaagaaatacttccagaagagcaaggaaatagggagagaacagtagcagctaatgcaaagacaacaaatgatttacaacatgaga

SEQ ID NO: 54779 - DNA, 120 bp, synthetic construct
  source 1..120: mol_type = other DNA
gttctagacactgtgctaagcaatttacttgcatttatttcatttgaatcatgcagtaatttaataatgttgatacacttatctgcatttcccaaatggggaaaggccagttgatgctcc

SEQ ID NO: 54780 - DNA, 120 bp, synthetic construct
  source 1..120: mol_type = other DNA
gggtttacctgaataaattacctaagctctgtgagcatctgtaactcagcaacaaagcacagagagcagtacatttcctgtttaggtcacagtgaaagccctatgagttaatggtgtgaa

SEQ ID NO: 54781 - DNA, 120 bp, synthetic construct
  source 1..120: mol_type = other DNA
tttagttcatgatttgagacaaagcaattggagatatttataaatgggggaaggaggtgagtgtgggtgggatgggtgctgacttcacagtcttactatgtcagacataacgatggcatt

SEQ ID NO: 54782 - DNA, 120 bp, synthetic construct; identical to SEQ ID NO: 31226
  source 1..120: mol_type = other DNA

SEQ ID NO: 54783 - DNA, 120 bp, synthetic construct
  source 1..120: mol_type = other DNA
acaacaaacctgcttggtccaaagcactctgaaggatggagaaatactgactctgaattatatattctcaattagatcaatccttagatttcccagcccatcttacctggaacaggcacc

SEQ ID NO: 54784 - DNA, 120 bp, synthetic construct; identical to SEQ ID NO: 31227
  source 1..120: mol_type = other DNA

SEQ ID NO: 54785 - DNA, 120 bp, synthetic construct; identical to SEQ ID NO: 31228
  source 1..120: mol_type = other DNA

SEQ ID NO: 54786 - DNA, 120 bp, synthetic construct; identical to SEQ ID NO: 31229
  source 1..120: mol_type = other DNA

SEQ ID NO: 54787 - DNA, 120 bp, synthetic construct
  source 1..120: mol_type = other DNA
cgttttgttcttctgtaagtaatatgtctcctttcagactgctttttagttttatttttgtttttgagacgcagtctctctctgttgctcaggctggagtgcagtagggtgatctcggct

SEQ ID NO: 54788 - DNA, 120 bp, synthetic construct
  source 1..120: mol_type = other DNA
atattttctaaagtatcttgtgatttctcctctggaccatttagatacatgttcattgatgtcccaatatatggagatttttccagatgactctctgtattgatagttttgtaaattcca

SEQ ID NO: 54789 - DNA, 120 bp, synthetic construct; identical to SEQ ID NO: 31230
  source 1..120: mol_type = other DNA

SEQ ID NO: 54790 - DNA, 120 bp, synthetic construct
  source 1..120: mol_type = other DNA
gttatcaggacaccatgatgattgtgtggcgctggttaggaacatgggctttgaagagagggggattttatttcaaattgcatctttgccacttagtagccaggtgaccttgaacgtgtc

SEQ ID NO: 54791 - DNA, 120 bp, synthetic construct; identical to SEQ ID NO: 31124
  source 1..120: mol_type = other DNA

SEQ ID NO: 54792 - DNA, 120 bp, synthetic construct
  source 1..120: mol_type = other DNA
ccagcctgggcgacagagcaagactccatctcgaataaaagaagaaaagttttgagagagaggatagagctaaggaaggaatggcctattgttttccaaatttggtgagactataaacac

SEQ ID NO: 54793 - DNA, 120 bp, synthetic construct; identical to SEQ ID NO: 31125
  source 1..120: mol_type = other DNA

SEQ ID NO: 54794 - DNA, 120 bp, synthetic construct; identical to SEQ ID NO: 31126
  source 1..120: mol_type = other DNA

SEQ ID NO: 54795 - DNA, 120 bp, synthetic construct
  source 1..120: mol_type = other DNA
agggatgagttatttgaggaattccacaagccttgtacgtgtaccaaaagccttcctaaaacctttccgtgtgtgctgttttgtcattgcaggtcatggaggaatcataaacacattaca

SEQ ID NO: 54796 - DNA, 120 bp, synthetic construct
  source 1..120: mol_type = other DNA
gctcttcctgtttttggtgcctgttccaggtaagatgggctgggaaatctaaggattgatctaattgagaatatataattcagagtcagtatttctccatccttcagagtgctttggacc

SEQ ID NO: 54797 - DNA, 120 bp, synthetic construct; identical to SEQ ID NO: 31127
  source 1..120: mol_type = other DNA

SEQ ID NO: 54798 - DNA, 120 bp, synthetic construct
  source 1..120: mol_type = other DNA
actagttgacaagaaaaagtggcatttttcctcaccaaggaacttttatgaaatagtggtgttgccataaaaatgcctcccagtctatgaaggaacaggttagaccaggggttcacctgt

SEQ ID NO: 54799 - DNA, 120 bp, synthetic construct
  source 1..120: mol_type = other DNA
tttgtataacttatataatggtggttgtgacaagattaatggctgcaaaggagaatggctgagccaaccttcatcttagactatgtcaagatgaagaggagttgacaccctggattcccg

SEQ ID NO: 54800 - DNA, 120 bp, synthetic construct
  source 1..120: mol_type = other DNA
cagaaaaagtgatgtaaagattggttgagaacattggggaaatggtccagactagagatgaagatggaaggtagctgcatgcaggcatagataaccacatcccaaagatcatatgaagcc

SEQ ID NO: 54801 - DNA, 120 bp, synthetic construct; identical to SEQ ID NO: 31128
  source 1..120: mol_type = other DNA

SEQ ID NO: 54802 - DNA, 120 bp, synthetic construct; identical to SEQ ID NO: 12082
  source 1..120: mol_type = other DNA

SEQ ID NO: 54803 - DNA, 120 bp, synthetic construct; identical to SEQ ID NO: 12083
  source 1..120: mol_type = other DNA

SEQ ID NO: 54804 - DNA, 120 bp, synthetic construct; identical to SEQ ID NO: 31084
  source 1..120: mol_type = other DNA

SEQ ID NO: 54805 - DNA, 120 bp, synthetic construct; identical to SEQ ID NO: 31085
  source 1..120: mol_type = other DNA

SEQ ID NO: 54806 - DNA, 120 bp, synthetic construct; identical to SEQ ID NO: 31086
  source 1..120: mol_type = other DNA

SEQ ID NO: 54807 - DNA, 120 bp, synthetic construct; identical to SEQ ID NO: 31087
  source 1..120: mol_type = other DNA

SEQ ID NO: 54808 - DNA, 120 bp, synthetic construct; identical to SEQ ID NO: 31088
  source 1..120: mol_type = other DNA

SEQ ID NO: 54809 - DNA, 120 bp, synthetic construct; identical to SEQ ID NO: 31089
  source 1..120: mol_type = other DNA

SEQ ID NO: 54810 - DNA, 120 bp, synthetic construct; identical to SEQ ID NO: 31090
  source 1..120: mol_type = other DNA

SEQ ID NO: 54811 - DNA, 120 bp, synthetic construct; identical to SEQ ID NO: 31091
  source 1..120: mol_type = other DNA

SEQ ID NO: 54812 - DNA, 120 bp, synthetic construct; identical to SEQ ID NO: 31092
  source 1..120: mol_type = other DNA

SEQ ID NO: 54813 - DNA, 120 bp, synthetic construct
  source 1..120: mol_type = other DNA
actacaacctccacctcctgggttcaagtgattctcctgcctcagcctcctgagtagctgggactacaagtgtccaccaccatcttcagctaatatatatatatatatatacattttttt

SEQ ID NO: 54814 - DNA, 120 bp, synthetic construct; identical to SEQ ID NO: 31093
  source 1..120: mol_type = other DNA

SEQ ID NO: 54815 - DNA, 120 bp, synthetic construct; identical to SEQ ID NO: 31094
  source 1..120: mol_type = other DNA

SEQ ID NO: 54816 - DNA, 120 bp, synthetic construct; identical to SEQ ID NO: 31095
  source 1..120: mol_type = other DNA

SEQ ID NO: 54817 - DNA, 120 bp, synthetic construct; identical to SEQ ID NO: 31096
  source 1..120: mol_type = other DNA

SEQ ID NO: 54818 - DNA, 120 bp, synthetic construct; identical to SEQ ID NO: 31097
  source 1..120: mol_type = other DNA

SEQ ID NO: 54819 - DNA, 120 bp, synthetic construct; identical to SEQ ID NO: 31098
  source 1..120: mol_type = other DNA

SEQ ID NO: 54820 - DNA, 120 bp, synthetic construct; identical to SEQ ID NO: 31099
  source 1..120: mol_type = other DNA

SEQ ID NO: 54821 - DNA, 120 bp, synthetic construct; identical to SEQ ID NO: 31100
  source 1..120: mol_type = other DNA

SEQ ID NO: 54822 - DNA, 120 bp, synthetic construct
  source 1..120: mol_type = other DNA
atgtgaaattttccaaaataaaaagtttttaaaaagaaaaaactctgggccgggcatggtggctcatgtctgtaatcctagcaatttgggaggccggggtgggtcaatcacctgaggtca

SEQ ID NO: 54823 - DNA, 120 bp, synthetic construct
  source 1..120: mol_type = other DNA
atcttttccccacctttcctccctttctattccacaaaaccgccattgtcatcccggcccgttctcaatgagctgttgggtacacctcccagacggggtggtggccgggcagaggggctc

SEQ ID NO: 54824 - DNA, 120 bp, synthetic construct
  source 1..120: mol_type = other DNA
tggcggcggggcagagacgctcctcactttccagactgggcagccaggcagaggggctcctcacgtcccagacgatgggcggccaggcagagacgctcctcacttcccagacggggtggc

SEQ ID NO: 54825 - DNA, 120 bp, synthetic construct
  source 1..120: mol_type = other DNA
aaatgaatatttattgagagaatcccattttatagattaggaaactgaggtacaggctgatttagcaacttgctctaagttgcccaccaagtcagtggtggggccagaacttaaatgctg

SEQ ID NO: 54826 - DNA, 120 bp, synthetic construct; identical to SEQ ID NO: 31276
  source 1..120: mol_type = other DNA

SEQ ID NO: 54827 - DNA, 120 bp, synthetic construct; identical to SEQ ID NO: 31277
  source 1..120: mol_type = other DNA

SEQ ID NO: 54828 - DNA, 120 bp, synthetic construct; identical to SEQ ID NO: 31278
  source 1..120: mol_type = other DNA

SEQ ID NO: 54829 - DNA, 120 bp, synthetic construct
  source 1..120: mol_type = other DNA
tcccagctacttgggaggctaaggctggagaatagcgggaatccgggaggcggagcttgcaatgagctgagatcgcgccactgcactccagcctgggtgacagagcaagactccgtctca

SEQ ID NO: 54830 - DNA, 120 bp, synthetic construct; identical to SEQ ID NO: 31279
  source 1..120: mol_type = other DNA

SEQ ID NO: 54831 - DNA, 120 bp, synthetic construct; identical to SEQ ID NO: 31280
  source 1..120: mol_type = other DNA

SEQ ID NO: 54832 - DNA, 120 bp, synthetic construct; identical to SEQ ID NO: 31328
  source 1..120: mol_type = other DNA

SEQ ID NO: 54833 - DNA, 120 bp, synthetic construct; identical to SEQ ID NO: 31282
  source 1..120: mol_type = other DNA

SEQ ID NO: 54834 - DNA, 120 bp, synthetic construct; identical to SEQ ID NO: 31283
  source 1..120: mol_type = other DNA

SEQ ID NO: 54835 - DNA, 120 bp, synthetic construct; identical to SEQ ID NO: 31284
  source 1..120: mol_type = other DNA

SEQ ID NO: 54836 - DNA, 120 bp, synthetic construct; identical to SEQ ID NO: 31285
  source 1..120: mol_type = other DNA

SEQ ID NO: 54837 - DNA, 120 bp, synthetic construct
  source 1..120: mol_type = other DNA
ggactgcaaattaatgcagaaatagaaaaccaaatactgcatgttctcacttgtaagtgggagctaaacactggatactcatggacataaagatgggacatgggagactactagagtggg

SEQ ID NO: 54838 - DNA, 120 bp, synthetic construct; identical to SEQ ID NO: 31286
  source 1..120: mol_type = other DNA

SEQ ID NO: 54839 - DNA, 120 bp, synthetic construct; identical to SEQ ID NO: 31287
  source 1..120: mol_type = other DNA

SEQ ID NO: 54840 - DNA, 120 bp, synthetic construct
  source 1..120: mol_type = other DNA
tctgttgcccaggctggagggcagtggcatgatctctgctcactgcaacctccacctccggggtccaagcgattctcctgcctcagcctcctgagtagctgggactacaggtgtgcgcca

SEQ ID NO: 54841 - DNA, 120 bp, synthetic construct
  source 1..120: mol_type = other DNA
acagtttttttttttttctctgcagaaactctttagttaattcggctccacttgtcaatttttgtttttgttgcagttgcttttgaggacttagtcatgcattatttcccaaggccaatg

SEQ ID NO: 54842 - DNA, 120 bp, synthetic construct; identical to SEQ ID NO: 31288
  source 1..120: mol_type = other DNA

SEQ ID NO: 54843 - DNA, 120 bp, synthetic construct; identical to SEQ ID NO: 31289
  source 1..120: mol_type = other DNA

SEQ ID NO: 54844 - DNA, 120 bp, synthetic construct; identical to SEQ ID NO: 31276
  source 1..120: mol_type = other DNA

SEQ ID NO: 54845 - DNA, 120 bp, synthetic construct; identical to SEQ ID NO: 31277
  source 1..120: mol_type = other DNA

SEQ ID NO: 54846 - DNA, 120 bp, synthetic construct; identical to SEQ ID NO: 31278
  source 1..120: mol_type = other DNA

SEQ ID NO: 54847 - DNA, 120 bp, synthetic construct; identical to SEQ ID NO: 54829
  source 1..120: mol_type = other DNA

SEQ ID NO: 54848 - DNA, 120 bp, synthetic construct; identical to SEQ ID NO: 31279
  source 1..120: mol_type = other DNA

SEQ ID NO: 54849 - DNA, 120 bp, synthetic construct; identical to SEQ ID NO: 31280
  source 1..120: mol_type = other DNA

SEQ ID NO: 54850 - DNA, 120 bp, synthetic construct; identical to SEQ ID NO: 31281
  source 1..120: mol_type = other DNA

SEQ ID NO: 54851 - DNA, 120 bp, synthetic construct; identical to SEQ ID NO: 31282
  source 1..120: mol_type = other DNA

SEQ ID NO: 54852 - DNA, 120 bp, synthetic construct; identical to SEQ ID NO: 31283
  source 1..120: mol_type = other DNA

SEQ ID NO: 54853 - DNA, 120 bp, synthetic construct; identical to SEQ ID NO: 31284
  source 1..120: mol_type = other DNA

SEQ ID NO: 54854 - DNA, 120 bp, synthetic construct; identical to SEQ ID NO: 31285
  source 1..120: mol_type = other DNA

SEQ ID NO: 54855 - DNA, 120 bp, synthetic construct; identical to SEQ ID NO: 54837
  source 1..120: mol_type = other DNA

SEQ ID NO: 54856 - DNA, 120 bp, synthetic construct; identical to SEQ ID NO: 31286
  source 1..120: mol_type = other DNA

SEQ ID NO: 54857 - DNA, 120 bp, synthetic construct; identical to SEQ ID NO: 31287
  source 1..120: mol_type = other DNA

SEQ ID NO: 54858 - DNA, 120 bp, synthetic construct; identical to SEQ ID NO: 54840
  source 1..120: mol_type = other DNA

SEQ ID NO: 54859 - DNA, 120 bp, synthetic construct; identical to SEQ ID NO: 54841
  source 1..120: mol_type = other DNA

SEQ ID NO: 54860 - DNA, 120 bp, synthetic construct; identical to SEQ ID NO: 31288
  source 1..120: mol_type = other DNA

SEQ ID NO: 54861 - DNA, 120 bp, synthetic construct; identical to SEQ ID NO: 31289
  source 1..120: mol_type = other DNA

SEQ ID NO: 54862 - DNA, 120 bp, synthetic construct; identical to SEQ ID NO: 25306
  source 1..120: mol_type = other DNA

SEQ ID NO: 54863 - DNA, 120 bp, synthetic construct; identical to SEQ ID NO: 25307
  source 1..120: mol_type = other DNA

SEQ ID NO: 54864 - DNA, 120 bp, synthetic construct
  source 1..120: mol_type = other DNA
agattcctacggttgcagctgcttcttttctcctggcacagcccagtgtgactccttcacagctgtgttcatcctagtgatgaagtgtgtttgataaggaccaatagaggggcatctttg

SEQ ID NO: 54865 - DNA, 120 bp, synthetic construct
  source 1..120: mol_type = other DNA
tcagtgatttaagttgaaaacagtacatcagtacatggctcttgtacccagtgtcaggaatgtacaagatctttctattcaaaaatacaaactaaattatctgtaggcatggatgacagc

SEQ ID NO: 54866 - DNA, 120 bp, synthetic construct
  source 1..120: mol_type = other DNA
tgaacgtcttcaagatttagtgtcagccctcttctccaaacactgtaccaccagtagcaataaccgtatctttaagctggttctttctattgtcaccaaaccctggagctttgactgcca

SEQ ID NO: 54867 - DNA, 120 bp, synthetic construct
  source 1..120: mol_type = other DNA
cagcaccaaattttacatctttaccatcacttcaagtgaggtgaggagccagtagcctggacactggtctcatctggtgaaagactgtgggtaatggaagcatttctgtggggtggtggc

SEQ ID NO: 54868 - DNA, 120 bp, synthetic construct
  source 1..120: mol_type = other DNA
cccaggcaatggacagagccccatcccgggcactcaggagagggcctttcttgggaaaatgagtggcattcatcctggttcctccctctttcgatctaagggcagtttgagaaacaagca

SEQ ID NO: 54869 - DNA, 120 bp, synthetic construct; identical to SEQ ID NO: 31119
  source 1..120: mol_type = other DNA

SEQ ID NO: 54870 - DNA, 120 bp, synthetic construct
  source 1..120: mol_type = other DNA
catggtttttattttattttcataatatcaaggagaaaatgaaggttaggcatccaggtttaaaagttggtttcaatgggctgtccctgtcctgtgaacctgcagtggcctagtggcagg

SEQ ID NO: 54871 - DNA, 120 bp, synthetic construct
  source 1..120: mol_type = other DNA
ccaatttgtttataccttctagggcaaaagactggatgacatatggctccactcttaaggcaggtaacaggatcgcctataccaccaaaaacacctaacagggaaaaaacacacaaaaag

SEQ ID NO: 54872 - DNA, 120 bp, synthetic construct
  source 1..120: mol_type = other DNA
tgttagagtaaaagcatttttatctggatatagattttatccagacgtgatgacagagccaggactagggcgaagcgagggaggctctggcctcaggtataaaatgtaagcactaagata

SEQ ID NO: 54873 - DNA, 120 bp, synthetic construct
  source 1..120: mol_type = other DNA
agctggagctgtttaatttggatggtcaaaaataggataactccgggagtttacagaattcacagaatccattccaaccaagtgagcttgcaagtcatactctaagtctctgaacctgtg

SEQ ID NO: 54874 - DNA, 120 bp, synthetic construct
  source 1..120: mol_type = other DNA
ttttttttttttttgtatttttggtagagatagaatatcaccatgttggccagcctggtcttgaactcctggtctcaagtgattcgcctgccttggcctctcaaagtgttgggattacag

SEQ ID NO: 54875 - DNA, 120 bp, synthetic construct
  source 1..120: mol_type = other DNA
tttaaaaccgggagattaacttagatcatgtgaatgagaccaacgtaatccaagaatccttaaatgtggaaaagaaaggcagaacagtcagtgtctgggtgatgcgatgtgggaacgact

SEQ ID NO: 54876 - DNA, 120 bp, synthetic construct
  source 1..120: mol_type = other DNA
tttcatatccagctaaaccaagcttcataagtgaaggagaaataaaatcctttacagacaagcaaatgctgagagattttgtcaccaccaggcctgccttacaagagctcctgaaggaag

SEQ ID NO: 54877 - DNA, 120 bp, synthetic construct; identical to SEQ ID NO: 11198
  source 1..120: mol_type = other DNA

SEQ ID NO: 54878 - DNA, 120 bp, synthetic construct
  source 1..120: mol_type = other DNA
cctgccacggtctcccaaagtgctgggattacaggcatgagccaccacgccaagctcatttttcatagtttataaacagtctggaaaaaataggaagaattctagagactaaatattcaa

SEQ ID NO: 54879 - DNA, 120 bp, synthetic construct
  source 1..120: mol_type = other DNA
ctatcgcagaagtaagcatttggcaaacgttcagccattagcactcatttaaccctgttagcaatattcttttgaaaaaagtgccagtccttatgtgataaactaagaagcccattgaat

SEQ ID NO: 54880 - DNA, 120 bp, synthetic construct
  source 1..120: mol_type = other DNA
tctctactaaaagtacaaaaattagctgggtgtggtggcacatgcccgtaatcccagctacttgctatttgggaggctgaggcaggagaattgctcgaaccagggaggcggaggttgcag

SEQ ID NO: 54881 - DNA, 120 bp, synthetic construct
  source 1..120: mol_type = other DNA
acctgccttggcctcccaaagtgctgggattacaggcatgagccgccgtgctcagactaaagcttttctttatacgtgtgttcatgttgtaaaaattcattgaattatatacgtatgatt

SEQ ID NO: 54882 - DNA, 120 bp, synthetic construct; identical to SEQ ID NO: 32985
  source 1..120: mol_type = other DNA

SEQ ID NO: 54883 - DNA, 120 bp, synthetic construct; identical to SEQ ID NO: 32986
  source 1..120: mol_type = other DNA

SEQ ID NO: 54884 - DNA, 120 bp, synthetic construct; identical to SEQ ID NO: 32987
  source 1..120: mol_type = other DNA

SEQ ID NO: 54885 - DNA, 120 bp, synthetic construct; identical to SEQ ID NO: 32988
  source 1..120: mol_type = other DNA

SEQ ID NO: 54886 - DNA, 120 bp, synthetic construct
  source 1..120: mol_type = other DNA
ctccagcctaggtgacaagagtgaaactccatctcaaaaaaaaaaaaagggggggggggaagagaaaagtttaaagaagaaaattacagttatcccagtccctccatttggagacaatgt

SEQ ID NO: 54887 - DNA, 120 bp, synthetic construct; identical to SEQ ID NO: 32989
  source 1..120: mol_type = other DNA

SEQ ID NO: 54888 - DNA, 120 bp, synthetic construct
  source 1..120: mol_type = other DNA
gatctgccctcctcagcctcccaaagtgctgggattataggcgtgagccaccacactcagcccttttcactgcctttgatccacctcaggtctacatgattctccttacatagcttaaat

SEQ ID NO: 54889 - DNA, 120 bp, synthetic construct
  source 1..120: mol_type = other DNA
tacacccacggtgtctcgctgattgctagcacagcagtctgagatcaaacagcaaggcggcagcgaggctgggggaggggcgcccgccattgcccaggcttgcttaggtaaacaaagcag

SEQ ID NO: 54890 - DNA, 120 bp, synthetic construct
  source 1..120: mol_type = other DNA
atgcaatcaactggaagaaagggtatcagcaatggaagatgaaatgaagcgagaagggaagtttagagaaaaaagaataaaaagaaatgagcaaagcctccaagaaatatgggactatgt

SEQ ID NO: 54891 - DNA, 120 bp, synthetic construct
  source 1..120: mol_type = other DNA
taaaccaacaaagatcaaaagagacaaagaaggccattacataatggtaaagggatcaattcaacaagaagagctaactatcctaaatatatatgcacccaatacaggagcacaaagatt

SEQ ID NO: 54892 - DNA, 120 bp, synthetic construct
  source 1..120: mol_type = other DNA
ctctacgcaaataaactagaaaatctagaagaaatggataaattcctcgacacatacactctcccaagactaaaccaggaagaagttgaatctctgaatagaccaataacaggctctgaa

SEQ ID NO: 54893 - DNA, 120 bp, synthetic construct
  source 1..120: mol_type = other DNA
aataaaatacctaggaatccaacttacaagggatgtgaaggacctcttcaaggagaattacaaaccactgctcaaggaaataaaagaggatacaaacaaatggaagaacattccatgctc

SEQ ID NO: 54894 - DNA, 120 bp, synthetic construct
  source 1..120: mol_type = other DNA
gaggatgtggagaaataggaacacttttacactgttggtgggactgtaaactagttcaaccattgtggaagtcagtgtggagattcctcagggatctagaactagaaacaccattcgacc

SEQ ID NO: 54895 - DNA, 120 bp, synthetic construct; identical to SEQ ID NO: 9143
  source 1..120: mol_type = other DNA

SEQ ID NO: 54896 - DNA, 120 bp, synthetic construct
  source 1..120: mol_type = other DNA
agtctgagatcaaactgcaaggcggcaacgaggctgggggaggggcgcccgccattgcccaggcttgcttaggtaaacaaagcagccgggaagctcgaactgggtggagcccaccacagc

SEQ ID NO: 54897 - DNA, 120 bp, synthetic construct
  source 1..120: mol_type = other DNA
attatccaggagaacttccccaatctagcaaggcaggccaacgttcagattcaggaaattcagagaacgccacaaagatactcctcgagaagagcaactccaagacacataattgtcaga

SEQ ID NO: 54898 - DNA, 120 bp, synthetic construct
  source 1..120: mol_type = other DNA
agttggaagtaaagctctcctcagcaaatgtaaaagaacagaaattataacaaactatctctcagaccacagtgcaatcaaactagaactcaagattaagaatctcactcaaagccgctc

SEQ ID NO: 54899 - DNA, 120 bp, synthetic construct
  source 1..120: mol_type = other DNA
actcattttatgaggccagcatcattctgataccaaagccgggcagagacacaaccaaaaaagagaattttagaccaatatccttgatgaacactgatgcaaaaatcctcaataaaatac

SEQ ID NO: 54900 - DNA, 120 bp, synthetic construct
  source 1..120: mol_type = other DNA
ggtaatttacagattcaatgccatccccatcaagctaccaatgactttcttcacagaattggaaaaaactactctaaagttcatatggaaccaaaaaagagcccgcatcgccaagtcaat

SEQ ID NO: 54901 - DNA, 120 bp, synthetic construct
  source 1..120: mol_type = other DNA
aaaaacacatgaagaaatgctcatcatcactggccatcagagaaatgcaaatcaaaaccactatgagatatcatctcacaccagttagaatggcaatcattaaaaagtcaggaaacaaca

SEQ ID NO: 54902 - DNA, 120 bp, synthetic construct
  source 1..120: mol_type = other DNA
atatatatgtataattatatatcttttttttttttttgggacggagtctcacattggttgcccaggcacgatctcggctcactgcaacctccacttcccaggttcaagtgattctcctgc

SEQ ID NO: 54903 - DNA, 120 bp, synthetic construct
  source 1..120: mol_type = other DNA
tgcagtgagccgagatcccgccactgcactccagcctgggtgacagagcgagactcatctcaaaaaaaaaaaaaaattcttatttgtgcattcaaaagataactctttatacctcaaaac

SEQ ID NO: 54904 - DNA, 120 bp, synthetic construct
  source 1..120: mol_type = other DNA
attcttgccctgactggattgttggaagttttaaatgaatcacgtaaatacaaacatacacagacagcctcactgttatcaaaaaactgtccatcttttccaggtcttctgaggctgctc

SEQ ID NO: 54905 - DNA, 120 bp, synthetic construct
  source 1..120: mol_type = other DNA
tgctcatcatcactggccatcagagaaatgcaaatcaaaaccactatgagatatcatctcacaccagttagaatggcaatcattaaaaagtcaggaaacaacaggtgctggagaggatgc

SEQ ID NO: 54906 - DNA, 120 bp, synthetic construct
  source 1..120: mol_type = other DNA
caaaatcaatgtacaaaaatcacaagcattcttatacaccaacaacagacaaacagagagccaaatcatgggtgaactcccattcacaattgcttcaaagagaataaaatacctaggaat

SEQ ID NO: 54907 - DNA, 120 bp, synthetic construct
  source 1..120: mol_type = other DNA
gtgggcgaaggacatgaacagacacttctcaaaacaaatcttttaaaagaatttggatacttgagccagttctaacatgacagtgatgctactcttcagtagccttacagtaggaagaaa

SEQ ID NO: 54908 - DNA, 120 bp, synthetic construct
  source 1..120: mol_type = other DNA
gaagaggaggaagaagaggaagaagaggaaggaggagaaggagatgaagaggaagaggaagaagaagaagaaagaagaagaaaagaagaagaaaagagaagaagaagaagggagaagaga

SEQ ID NO: 54909 - DNA, 120 bp, synthetic construct; identical to SEQ ID NO: 9140
  source 1..120: mol_type = other DNA

SEQ ID NO: 54910 - DNA, 120 bp, synthetic construct
  source 1..120: mol_type = other DNA
agatggtatctcattgtggtttttatttgcatttctctgatggccagtgatggtgagcaatttttcatgtgttttttggctgcataaatgtcttcttttgagaagtgtctgttcatgtcc

SEQ ID NO: 54911 - DNA, 120 bp, synthetic construct; identical to SEQ ID NO: 9141
  source 1..120: mol_type = other DNA

SEQ ID NO: 54912 - DNA, 120 bp, synthetic construct
  source 1..120: mol_type = other DNA
taaaatactttacagacaagcaaatgctgagagatttcgccaccaccaggcctgacctaaaagagctcctgaaggaagcactaaacatggaaaggaacaaccggtaccagccactgcaaa

SEQ ID NO: 54913 - DNA, 120 bp, synthetic construct
  source 1..120: mol_type = other DNA
atgagaacaaagacacaacataccacaatctctgggacacattcaaagcagtgtgtagagggaaatttatagcactaaatgccctcaagagaaagcaggaaagatccaaaattgacaccc

SEQ ID NO: 54914 - DNA, 120 bp, synthetic construct
  source 1..120: mol_type = other DNA
aacagaaccaaagacaaaaaccacatgattatctcaacagatgcagaaaaggcctttgacaaaattcaagaacacttcatgctaaaaactctcaataaattaggtattgatgggacatat

SEQ ID NO: 54915 - DNA, 120 bp, synthetic construct
  source 1..120: mol_type = other DNA
taccaaaacagatatatagatcaacggaacagaacagagccctcagaaataacgccgcataactacaactatctgatctttgacaaacctgacaaaaacaagcaatggggaaacgattcc

SEQ ID NO: 54916 - DNA, 120 bp, synthetic construct
  source 1..120: mol_type = other DNA
ccagaaaaaatgatgagttcatgtcctttgtagggacatggatgaaactggaaatcatgattctcagtaaactatcgcaaggacagaaaaccaaacaccgcatgttctcactcataggtg

SEQ ID NO: 54917 - DNA, 120 bp, synthetic construct; identical to SEQ ID NO: 30115
  source 1..120: mol_type = other DNA

SEQ ID NO: 54918 - DNA, 120 bp, synthetic construct
  source 1..120: mol_type = other DNA
ccttctcatactcccaaagtgctgggtttataggcatgagccaccatgccagattttttctgtgattttaactatgctgattcacctgccactccccctgctccttctcctcctgtgcct

SEQ ID NO: 54919 - DNA, 120 bp, synthetic construct
  source 1..120: mol_type = other DNA
tttaagtccacatcctcatatggattctccttgggcagatctcctgcagaggaggaagagttagagaagggggagaagggaagaaggaaacacacgaactcacacacacacaaataaaca

SEQ ID NO: 54920 - DNA, 120 bp, synthetic construct; identical to SEQ ID NO: 11673
  source 1..120: mol_type = other DNA

SEQ ID NO: 54921 - DNA, 120 bp, synthetic construct
  source 1..120: mol_type = other DNA
ccctaatctcaagtacccagggacacaaatactgcggaaggccgcagggacctctgcctaggaaagccaggtattgtccaaggtttctccccatgtgatagtctgaaatatggcctcgtg

SEQ ID NO: 54922 - DNA, 120 bp, synthetic construct
  source 1..120: mol_type = other DNA
cagagtaaattactgcaaagtgggtggtttctaacagcttaaatttattttctgacagttctggaaagtagaaatatgaggtcagggtgtcaggagagctgtgctcccactgtaggctct

SEQ ID NO: 54923 - DNA, 120 bp, synthetic construct
  source 1..120: mol_type = other DNA
ggattgcaggcaggagccaccttgcctagcctataatattcctttgttctttttttaatgtctagaggacctgtaacgatatgccttctatcattgctcatattggtaattccagcctct

SEQ ID NO: 54924 - DNA, 120 bp, synthetic construct
  source 1..120: mol_type = other DNA
ctgtgaacactaagaaattgtaaattattcacttcttcatttaaaaaaaagttacttggccagaatgtggtggctcatgcctgtaatcccagcactttgggaggctgaggtgggcagatc

SEQ ID NO: 54925 - DNA, 120 bp, synthetic construct
  source 1..120: mol_type = other DNA
gtcccagtctatcattgatgggcatttgggttgattccacgtctttgctactgcagatagtgcttcaatgaacatacgcatgcatgcatctttgtaacaggatgatttatattcctttgg

SEQ ID NO: 54926 - DNA, 120 bp, synthetic construct
  source 1..120: mol_type = other DNA
tccttcgcccacttgttgatggggttgtttttttcttgtaaatttgtttgagttcattgtagattctggatattagccctttgtcagatgagtaggttgcaaaaattttctcccattttg

SEQ ID NO: 54927 - DNA, 120 bp, synthetic construct
  source 1..120: mol_type = other DNA
atcctgagactttgctgaagttgcttatcagcttaaggagattttgggctgagacgatggggttttctagatagacaatcatgttgtctgcaaacagggacaatttgacttcctcttttc

SEQ ID NO: 54928 - DNA, 120 bp, synthetic construct
  source 1..120: mol_type = other DNA
taatttctgttcttttacatttgttgaggagtgctttacttccaactatgtagtcaattttggagtaggtgtggtgtggtgctgcaaagaatgtatattctgttgatttggggtggagag

SEQ ID NO: 54929 - DNA, 120 bp, synthetic construct
  source 1..120: mol_type = other DNA
tttttccttcatttcaactttggtgaatctgacaattatgtgtcttggagttgctctctcgaggagtatctttgtcgcgtcctctgtatttcctgaatttgaatgttggcctgccttgct

SEQ ID NO: 54930 - DNA, 120 bp, synthetic construct
  source 1..120: mol_type = other DNA
acttaagtgatctgcccgcctcagcctaccaaagtgctgggattacaggcatgggccatcacgactggctggtgattaaaatatttttaaggttaaaagtgtaaatgttacaagaaagaa

SEQ ID NO: 54931 - DNA, 120 bp, synthetic construct
  source 1..120: mol_type = other DNA
tcttaccagcttctcacgaagtttcaggaccaggtccacgacctccacctcggacttgtctttcatccaggtctcgatgttctgcagggcaagacggggtctactgtcagcaaggcccct

SEQ ID NO: 54932 - DNA, 120 bp, synthetic construct
  source 1..120: mol_type = other DNA
aatttctagaacgacctccccaggggctgagcagcttttactctctgcctatggcttccaggctgggttgccctgacactgacagtgtgatgaccctccagccatcagtgaggggcagca

SEQ ID NO: 54933 - DNA, 120 bp, synthetic construct
  source 1..120: mol_type = other DNA
ggaaggagaaggaaataaagggtattcgattaggaaaagaggaagtcaaattgtccctgtttgcagatgacatgattgtatatctagaaaaccccatcgtctcagcccaaaatctcctta

SEQ ID NO: 54934 - DNA, 120 bp, synthetic construct
  source 1..120: mol_type = other DNA
gcaactaccatcagagtgaacaagcaacctacaggatgggagaaaattttcacaatctattcatctgacaaagggctaatatccagaatctacaatgaactcgaacaaatttacaagaaa

SEQ ID NO: 54935 - DNA, 120 bp, synthetic construct
  source 1..120: mol_type = other DNA
atgcggtgtttggttttctgtccttgcaatagtttgctcagaatgatggtttcccgtgtcatccatgtccctacaaaggacatgaactcatccttttttatggctgcatagtattccatg

SEQ ID NO: 54936 - DNA, 120 bp, synthetic construct; identical to SEQ ID NO: 26597
  source 1..120: mol_type = other DNA

SEQ ID NO: 54937 - DNA, 120 bp, synthetic construct; identical to SEQ ID NO: 23749
  source 1..120: mol_type = other DNA

SEQ ID NO: 54938 - DNA, 120 bp, synthetic construct; identical to SEQ ID NO: 23750
  source 1..120: mol_type = other DNA

SEQ ID NO: 54939 - DNA, 120 bp, synthetic construct
  source 1..120: mol_type = other DNA
tatttactcagtgcctgctatttgtcgggcatctcagtactagctgtgagagataccaagtgaaataagagaaggcttttattcttgagcagctcaaaatgtatcctgcccagttttacc

SEQ ID NO: 54940 - DNA, 120 bp, synthetic construct
  source 1..120: mol_type = other DNA
tgacctcaagtgatccgcccacctcagcctccccaagtgctaggattacaggtgtgagccactgcagctgtttttgttttctctttctttctttgttttgttttttggacacatggtctt

SEQ ID NO: 54941 - DNA, 120 bp, synthetic construct
  source 1..120: mol_type = other DNA
ccttggcaaagaaggacacttaaaaaagtaagtcatgcttctaacacaagggaagataactgtcttagaaacttccacagaagctgggtgcagtggctcacgtctgtgatcccagcactt

SEQ ID NO: 54942 - DNA, 120 bp, synthetic construct
  source 1..120: mol_type = other DNA
ttggcttttgttgccattgcttttggtgttttagtcacgaagtctttacccatgcctatatcctgaatggtctctaagaacttgctttatgaatctcagttctcctgtattgtgtgtata

SEQ ID NO: 54943 - DNA, 120 bp, synthetic construct; identical to SEQ ID NO: 12720
  source 1..120: mol_type = other DNA

SEQ ID NO: 54944 - DNA, 120 bp, synthetic construct; identical to SEQ ID NO: 12721
  source 1..120: mol_type = other DNA

SEQ ID NO: 54945 - DNA, 120 bp, synthetic construct
  source 1..120: mol_type = other DNA
tatccagtaatgggatggctggattaaatggtatttctagttctagatccttgaggagtcgccacactgtcttccacaatggttgaactagtttacactcccaacaacagtgtaaaagtg

SEQ ID NO: 54946 - DNA, 120 bp, synthetic construct; identical to SEQ ID NO: 9686
  source 1..120: mol_type = other DNA

SEQ ID NO: 54947 - DNA, 120 bp, synthetic construct; identical to SEQ ID NO: 15629
  source 1..120: mol_type = other DNA

SEQ ID NO: 54948 - DNA, 120 bp, synthetic construct
  source 1..120: mol_type = other DNA
gtccggccgcgaccccgtctgggaactgaggagtgtctctgccccaccgccagcccgtctgggaggtgaggagcatctctgcctggccgccccatctgagaagtgaggagcccctccgcc

SEQ ID NO: 54949 - DNA, 120 bp, synthetic construct; identical to SEQ ID NO: 15630
  source 1..120: mol_type = other DNA

SEQ ID NO: 54950 - DNA, 120 bp, synthetic construct; identical to SEQ ID NO: 15631
  source 1..120: mol_type = other DNA

SEQ ID NO: 54951 - DNA, 120 bp, synthetic construct
  source 1..120: mol_type = other DNA
ccttacgagaaacacccacaggtgtgtaggggcaacccacccctacatcttggtttttcagagaattacggagtctgcctttaaaaaggcaagctccggacactctgtgaagtagaatgg

SEQ ID NO: 54952 - DNA, 120 bp, synthetic construct; identical to SEQ ID NO: 15632
  source 1..120: mol_type = other DNA

SEQ ID NO: 54953 - DNA, 120 bp, synthetic construct; identical to SEQ ID NO: 12263
  source 1..120: mol_type = other DNA

SEQ ID NO: 54954 - DNA, 120 bp, synthetic construct; identical to SEQ ID NO: 12264
  source 1..120: mol_type = other DNA

SEQ ID NO: 54955 - DNA, 120 bp, synthetic construct; identical to SEQ ID NO: 12265
  source 1..120: mol_type = other DNA

SEQ ID NO: 54956 - DNA, 120 bp, synthetic construct
  source 1..120: mol_type = other DNA
tacatgggacgtatctcaaaataataagagctatctatgacaaacccatagccaatatcatactgaatgggcaaaaactggaagcattccctttgaaaactggcacaagacagggatgcc

SEQ ID NO: 54957 - DNA, 120 bp, synthetic construct
  source 1..120: mol_type = other DNA
aaaccataaaaactgtagaagaaaacctaggcattaccattcaggacataggcacgggcaaggacttcatgtctaaaacaccaaaagcaatggcaacaaaagccaaaattgacaaatggg

SEQ ID NO: 54958 - DNA, 120 bp, synthetic construct
  source 1..120: mol_type = other DNA
gcacattgtgcacatgtaccctaaaacttaaagtataataataaaaaaaaaaaagacagaactgtggcttggatagcagcaagacaggcagatccccacactgctactgctcagacccaa

SEQ ID NO: 54959 - DNA, 120 bp, synthetic construct
  source 1..120: mol_type = other DNA
aaataaaaattaaaaaaaaaacaggctctgaaattgtggcaataatcaatagcttaccaaccaaaaaaggtccaggaccagatggattcacagccgaattctaccaaaggtacaaggagg

SEQ ID NO: 54960 - DNA, 120 bp, synthetic construct
  source 1..120: mol_type = other DNA
tcaaggagaactacaaaccactgctcaatgaaataaaagaggatacaaacaaatggaagaacattccatgctcatgggtaggaagaatcaatatcatgaaaatggccataccggatggcc

SEQ ID NO: 54961 - DNA, 120 bp, synthetic construct
  source 1..120: mol_type = other DNA
cctgactcctgacccccgagcagcctaactgggaggcaccccccagcaggggcacactgacacctcacacggcagggtattccaacagacctgcagctgagggtcctgtctgttagaagg

SEQ ID NO: 54962 - DNA, 120 bp, synthetic construct
  source 1..120: mol_type = other DNA
aaatactttatagacaagcaaatgttgagagattttgtcaccaccaggcctgccctaaaagagctcctgaaggaagcgctaaacatggaaaggaacaaccggtaccagccgctgcaaaat

SEQ ID NO: 54963 - DNA, 120 bp, synthetic construct
  source 1..120: mol_type = other DNA
atgactactgggtacataacgaaatgaaggcagaaataaagatgttctttgaaaccaacgagaataaagacaccacataccagaatctctgggacgcattcaaagcagtgtgtagaggga

SEQ ID NO: 54964 - DNA, 120 bp, synthetic construct
  source 1..120: mol_type = other DNA
gagccaaagacaaaaaccacatgattatctcaatagatgcagaaaaagcctttgacaaaattcaacaacgcttcatgctaaaaactctcaataaattaggtattgatgggacgtatttca

SEQ ID NO: 54965 - DNA, 120 bp, synthetic construct
  source 1..120: mol_type = other DNA
aagatggattaaagatttaaacgttaaacctaaaaccataaaaaccctagaagaaaacctaggcattaccattcaggacataggcgtgggcaaggacttcatgtccaaaacaccaaaagc

SEQ ID NO: 54966 - DNA, 120 bp, synthetic construct
  source 1..120: mol_type = other DNA
tggacacaggaaggggaatatcacactctggggactgtggtggggtcgggggaggggggagggatagcattgggagatatacctaatgctagatgacacattagtgggtgcagcgcacca

SEQ ID NO: 54967 - DNA, 120 bp, synthetic construct
  source 1..120: mol_type = other DNA
caaacaaatttacaagaaaaaaacaaacaaccccatcaaaaagtcggcgaaggtcatgaacagacacttctcaaaagaagacatttatgcagccaaaaaacacatgaaaaaatgctcatc

SEQ ID NO: 54968 - DNA, 120 bp, synthetic construct; identical to SEQ ID NO: 12266
  source 1..120: mol_type = other DNA

SEQ ID NO: 54969 - DNA, 120 bp, synthetic construct; identical to SEQ ID NO: 6990
  source 1..120: mol_type = other DNA

SEQ ID NO: 54970 - DNA, 120 bp, synthetic construct; identical to SEQ ID NO: 6991
  source 1..120: mol_type = other DNA

SEQ ID NO: 54971 - DNA, 120 bp, synthetic construct; identical to SEQ ID NO: 6644
  source 1..120: mol_type = other DNA

SEQ ID NO: 54972 - DNA, 120 bp, synthetic construct; identical to SEQ ID NO: 23517
  source 1..120: mol_type = other DNA

SEQ ID NO: 54973 - DNA, 120 bp, synthetic construct
  source 1..120: mol_type = other DNA
tcatctgagatatggggagcgcctctgccccgccgccccgtctgggatgtgaagagcacctctgcccggccacgaccccgtctgggaggtgaggagcgtctccgccgggccaccccgtct

SEQ ID NO: 54974 - DNA, 120 bp, synthetic construct; identical to SEQ ID NO: 23518
  source 1..120: mol_type = other DNA

SEQ ID NO: 54975 - DNA, 120 bp, synthetic construct; identical to SEQ ID NO: 23534
  source 1..120: mol_type = other DNA

SEQ ID NO: 54976 - DNA, 120 bp, synthetic construct; identical to SEQ ID NO: 23535
  source 1..120: mol_type = other DNA

SEQ ID NO: 54977 - DNA, 120 bp, synthetic construct; identical to SEQ ID NO: 28923
  source 1..120: mol_type = other DNA

SEQ ID NO: 54978 - DNA, 120 bp, synthetic construct
  source 1..120: mol_type = other DNA
atttgttttgccagtattttattgaggatatttgcatcaatgttcctcaaggatattggtctaaaattctcttttttggttgtgtctctgcccggctttggtatcaggatgatgctggcc

SEQ ID NO: 54979 - DNA, 120 bp, synthetic construct
  source 1..120: mol_type = other DNA
aaagaccctagaagaaaacctaggctttaccattcgggacataggcatgggcaaggacttcgtgtctaaaacaccaaaagcaatggcaacaaaagccaaaattgacaaatgggatctaat

SEQ ID NO: 54980 - DNA, 120 bp, synthetic construct
  source 1..120: mol_type = other DNA
atgagaacacatggacacaggaaggggaacatcacactctggggcccgttgtggggtggggttaggggagagggatatcaatgggagatatacctaatgctagatgacgagttagtgggt

SEQ ID NO: 54981 - DNA, 120 bp, synthetic construct
  source 1..120: mol_type = other DNA
gatttctgcatttccatctgagctttgaagggagcagtggttctcccagcacgcagctgaagatctgagaaccggcagactgcctcttcaagtgggtccctaacccctgacccctgagca

SEQ ID NO: 54982 - DNA, 120 bp, synthetic construct
  source 1..120: mol_type = other DNA
tgaaggaaaaaatgttaagggcagccagagagaaaggtcgggttcccctcaaagggaagcccatcagactaacagcggatctctcggcagaaaccccacaagccagaagacagtggggac

SEQ ID NO: 54983 - DNA, 120 bp, synthetic construct
  source 1..120: mol_type = other DNA
caataataatgggagactttaacaccccactgtcaacattagacagatcaacgagacagaaagtcaacaaggatacccaggaattgaactcagctctgcaccaagaggacctaatacaca

SEQ ID NO: 54984 - DNA, 120 bp, synthetic construct
  source 1..120: mol_type = other DNA
aactcatttgatgaggccagcatcattctgataccaaagccgggcagagacacaaccaaacaagagaattttagaccaatatccttgatgaacattgatgcaaaaatcctcaataaaata

SEQ ID NO: 54985 - DNA, 120 bp, synthetic construct
  source 1..120: mol_type = other DNA
caccaacaacagacagagagccaaatcatgagtgaactcccattcacaactgcttcaaagagaataaaatacctaggaatccaccttacaagggatgtgaaggacctcttcaaggagaac

SEQ ID NO: 54986 - DNA, 120 bp, synthetic construct
  source 1..120: mol_type = other DNA
tgctcatcatcactggccatcagagaaatgcaaatcaaaaccactatgagataccatctcacaccagttagaatggcagtcattaaaaagtcaggaaacaacaggtgctggagaggatgt

SEQ ID NO: 54987 - DNA, 120 bp, synthetic construct; identical to SEQ ID NO: 28924
  source 1..120: mol_type = other DNA

SEQ ID NO: 54988 - DNA, 120 bp, synthetic construct
  source 1..120: mol_type = other DNA
acttttgttaacattatattttactttaaattaacaaataattggccaggtgtgatggctcatgcctgtaatcccagcactttaggaggccgaggagggcagatcgcgacatcaggcgtt

SEQ ID NO: 54989 - DNA, 120 bp, synthetic construct; identical to SEQ ID NO: 28925
  source 1..120: mol_type = other DNA

SEQ ID NO: 54990 - DNA, 120 bp, synthetic construct; identical to SEQ ID NO: 28913
  source 1..120: mol_type = other DNA

SEQ ID NO: 54991 - DNA, 120 bp, synthetic construct; identical to SEQ ID NO: 28914
  source 1..120: mol_type = other DNA

SEQ ID NO: 54992 - DNA, 120 bp, synthetic construct
  source 1..120: mol_type = other DNA
ctgcagacttaaatgtccctgtctgacagctttggagagagcggtggttctcccagtacgcagctggagatgaaattctgggttgaaaattcttttctttaagaatgttgaatattggcc

SEQ ID NO: 54993 - DNA, 120 bp, synthetic construct
  source 1..120: mol_type = other DNA
aagaaatatgggactatgtgaaaagaccaaatctacgtctgattggtgtacctgaaagtgatggggagaatggaaccgagttggaaaacactctgcaggatgttatccaggagaatttcc

SEQ ID NO: 54994 - DNA, 120 bp, synthetic construct
  source 1..120: mol_type = other DNA
caaagatcaaaagagacaaaaaagaccattacataatggtaaagggatcaattcaacaagaagagctaactatcctaaatatatatgcacccaatacaggagcacccagattcataaagc

SEQ ID NO: 54995 - DNA, 120 bp, synthetic construct
  source 1..120: mol_type = other DNA
acctctatgcaaataaactagaaaatctagaagaaatggataaattccttgacacatacactctcccaagactaaaccaggaagaagttgaatctctgaatagaccaataacaggatctg

SEQ ID NO: 54996 - DNA, 120 bp, synthetic construct
  source 1..120: mol_type = other DNA
aggaaaagaggaagttaaattgtccctgtttgcagatgacatgattatatatctagaaaaacccactgtctcagcccaaaatctccttaagctgataagcaacttcagcaaagtctcagc

SEQ ID NO: 54997 - DNA, 120 bp, synthetic construct
  source 1..120: mol_type = other DNA
tcaaacaaatttacaagaaaaaaacaacctcatcaaaaagtgggcgaaggacatgaacagacacttctcaaaagaagacacttatgcagccaaaaaacacatgaaaaaatgctcaccatc

SEQ ID NO: 54998 - DNA, 120 bp, synthetic construct; identical to SEQ ID NO: 28915
  source 1..120: mol_type = other DNA

SEQ ID NO: 54999 - DNA, 120 bp, synthetic construct
  source 1..120: mol_type = other DNA
attaacatatcactctttttcccaactacatatctgtgtgaggcttgattttcttcatagacttcaattaaaacaacatattgcggggaggagccaagatggccgaataggaacagctcc

SEQ ID NO: 55000 - DNA, 120 bp, synthetic construct
  source 1..120: mol_type = other DNA
gggtcctgtctgttagaaggaaaactaacaaacagaaaggacatccacaccaaaaactcatctgtacatcaccatcatcaaagaccaaaagtagataaaaccacaaagatggggaaaaaa

SEQ ID NO: 55001 - DNA, 120 bp, synthetic construct
  source 1..120: mol_type = other DNA
atatgcagccaaactaagcttcaaaagtgaaggagaaataaaatactttacagacaagcaaatgctgagagattttgtcaccaccaggcctgccctaaaagagctcctgaaggaagcgct

SEQ ID NO: 55002 - DNA, 120 bp, synthetic construct
  source 1..120: mol_type = other DNA
taatagacatctacagaagtctccaccccaaatcaacagaatatacatttttttcagcaccacaccacacctattccaaaattgaccacatacttggaagtaaagctctcctcagctaat

SEQ ID NO: 55003 - DNA, 120 bp, synthetic construct
  source 1..120: mol_type = other DNA
ccagaggtacaaggaggaattggtaccattccttctgaaactattccaatcaatagaaaaagagggaatcctccctaactcatttgatgaggccagcatcattctgatatcaaagccggg

SEQ ID NO: 55004 - DNA, 120 bp, synthetic construct
  source 1..120: mol_type = other DNA
ggaactaaaagaggatacacacaaatggaagaacattccatgctcatgggtaggaagaatcaatattgtgaaaatggccatactgcccaaggtaatttacagattcaatgccatccccat

SEQ ID NO: 55005 - DNA, 120 bp, synthetic construct
  source 1..120: mol_type = other DNA
atgctcaccgtcactggccatcagagaaatgctaatcaaaaccacaatgagataccatctcacaccagttagaatggcaatcattaaaaagtcaggaaacaacaggtgctggagaggatg

SEQ ID NO: 55006 - DNA, 120 bp, synthetic construct; identical to SEQ ID NO: 28916
  source 1..120: mol_type = other DNA

SEQ ID NO: 55007 - DNA, 120 bp, synthetic construct; identical to SEQ ID NO: 28917
  source 1..120: mol_type = other DNA

SEQ ID NO: 55008 - DNA, 120 bp, synthetic construct; identical to SEQ ID NO: 28918
  source 1..120: mol_type = other DNA

SEQ ID NO: 55009 - DNA, 120 bp, synthetic construct
  source 1..120: mol_type = other DNA
taatccagtctatcattattggacatttgggttggttccaagtctttgctatggtgaatggtgctgcaataaacctacatgtgcatgtgtctttatagcagcatgatttataatcctttg

SEQ ID NO: 55010 - DNA, 120 bp, synthetic construct; identical to SEQ ID NO: 5918
  source 1..120: mol_type = other DNA

SEQ ID NO: 55011 - DNA, 120 bp, synthetic construct
  source 1..120: mol_type = other DNA
ggaagaatttgtataattattgaagttctttgaaaactggtagcacttgcatataaaacctaaatgtcgggtcgggggaggggggagggatagcactgggagatatacctaatgctagat

SEQ ID NO: 55012 - DNA, 120 bp, synthetic construct
  source 1..120: mol_type = other DNA
acacacacacacacacacacacacacacacacacacttgttttgcctgaaaaactggcttgaataatgtgaattaatttaacacaataacttccagtgtagtagttaaagtgttccaaat

SEQ ID NO: 55013 - DNA, 120 bp, synthetic construct
  source 1..120: mol_type = other DNA
tctctgttgttttcctcaattatagaaactgttctttccaaagactgagcaaagaaaactatgaaatcgaggaggagaaagaggggagctgatatttagagcacccatcttcaaaacaca

SEQ ID NO: 55014 - DNA, 120 bp, synthetic construct
  source 1..120: mol_type = other DNA
cctcaccagcaacggaacaaagctggatggagaatgactttgacgagctgagagaagaaggcttcagtcgatcaaattactctgagctacgggaggacattctaaccaaaggcaaagaag

SEQ ID NO: 55015 - DNA, 120 bp, synthetic construct
  source 1..120: mol_type = other DNA
cacacataacactattaactttaaatgtaaatggacaaaatgctccaattaaaagacacagactggcaaattggataaagagtcaagacccatcagtgtgctgtattcaggaaacccatc

SEQ ID NO: 55016 - DNA, 120 bp, synthetic construct
  source 1..120: mol_type = other DNA
tttttgaaaggatcaacaaaattgatagaccgctagcaagactaataaagaaaaaaagagagaaggatcaaatagacgcaataaaaaatgataaaggggatatcaccacagatcccacag

SEQ ID NO: 55017 - DNA, 120 bp, synthetic construct
  source 1..120: mol_type = other DNA
ggaagttctggccagggcaattaggcaggagaaggaaataaagggtattcaattaggaaaagaggaagtcaaattgtccctgtttgcagacgacatgattgtatatccagaaaaccccat

SEQ ID NO: 55018 - DNA, 120 bp, synthetic construct
  source 1..120: mol_type = other DNA
accatcagagtgaacaggcaacctacagaatgggagaaaattttcgcaatctactcatctgacaaagggctaataatatccagaatctacaatgaactcaaacaaattcacaagaaaaaa

SEQ ID NO: 55019 - DNA, 120 bp, synthetic construct
  source 1..120: mol_type = other DNA
cctgcacaatgtgcacatgtactctaaaacttaaagtataatttaaaaaaaaaaagataattcaccatgatcaagtaggagttatcccagggttgcaaagatggttcatatatgcaaatc

SEQ ID NO: 55020 - DNA, 120 bp, synthetic construct; identical to SEQ ID NO: 22098
  source 1..120: mol_type = other DNA

SEQ ID NO: 55021 - DNA, 120 bp, synthetic construct; identical to SEQ ID NO: 22099
  source 1..120: mol_type = other DNA

SEQ ID NO: 55022 - DNA, 120 bp, synthetic construct; identical to SEQ ID NO: 22100
  source 1..120: mol_type = other DNA

SEQ ID NO: 55023 - DNA, 120 bp, synthetic construct; identical to SEQ ID NO: 22101
  source 1..120: mol_type = other DNA

SEQ ID NO: 55024 - DNA, 120 bp, synthetic construct; identical to SEQ ID NO: 22102
  source 1..120: mol_type = other DNA

SEQ ID NO: 55025 - DNA, 120 bp, synthetic construct
  source 1..120: mol_type = other DNA
ttgcctttacagaatgtaaaatgctttttttgtttgtttgttttttgtttttgagacagggtttcactccgtcatccaagctggagtgcagtggtgcaatctcagctcaccgcaacctct

SEQ ID NO: 55026 - DNA, 120 bp, synthetic construct; identical to SEQ ID NO: 13672
  source 1..120: mol_type = other DNA

SEQ ID NO: 55027 - DNA, 120 bp, synthetic construct
  source 1..120: mol_type = other DNA
caggtttgtcaaagatcgaatggttgtagatatgtggcattatttctgagggctctattctgtttcattggtctatatgtctgttttggtaccagtaccatgctgttttggttactgtag

SEQ ID NO: 55028 - DNA, 120 bp, synthetic construct
  source 1..120: mol_type = other DNA
ggatattggtctaaaattctcttttttttgtcgtgtctctgccaggctttagtatcaggatgatgctgccctcataaaatgagttagggaggattccttctttttctattgattggaatg

SEQ ID NO: 55029 - DNA, 120 bp, synthetic construct
  source 1..120: mol_type = other DNA
gagctgagattgcgccattgcactccagcttgggcaacaagagtgaaactccatgtcaaaacacaaacaaaaacatgagtttcttttttttttttttattttgcgtatgtcttttttttt

SEQ ID NO: 55030 - DNA, 120 bp, synthetic construct
  source 1..120: mol_type = other DNA
aaaattttctcccattttgtaggttgcctgttcactctgatggtagtttcttttgctgtgcagaagctctttagtttaattagatcccatttgtcaattttggcttttgttgccactgct

SEQ ID NO: 55031 - DNA, 120 bp, synthetic construct; identical to SEQ ID NO: 13673
  source 1..120: mol_type = other DNA

SEQ ID NO: 55032 - DNA, 120 bp, synthetic construct; identical to SEQ ID NO: 13674
  source 1..120: mol_type = other DNA

SEQ ID NO: 55033 - DNA, 120 bp, synthetic construct; identical to SEQ ID NO: 13675
  source 1..120: mol_type = other DNA

SEQ ID NO: 55034 - DNA, 120 bp, synthetic construct; identical to SEQ ID NO: 13676
  source 1..120: mol_type = other DNA

SEQ ID NO: 55035 - DNA, 120 bp, synthetic construct
  source 1..120: mol_type = other DNA
ggtgggagggcgaatctggcctgttagtccattttggaagcagaagtcttaatttttttttaaattcctaccttatcagggaccccatttagtctctgcctgctctaatagtcaactctt

SEQ ID NO: 55036 - DNA, 120 bp, synthetic construct
  source 1..120: mol_type = other DNA
taaatgtaaatggactaaatgctccaattaaaagacacagactggcaaactggataaagactcaagacccatcagtgtgctgtattcaggaaacccatctcatgtgcagtgacacacaca

SEQ ID NO: 55037 - DNA, 120 bp, synthetic construct
  source 1..120: mol_type = other DNA
atagtgacacaaaaaacccttcaaaaaattaaagaatccaggagctggttttttgaaaggatcaacaaaattgatagaccactagcaagactaataaagaaaaaaagagagaagaatcaa

SEQ ID NO: 55038 - DNA, 120 bp, synthetic construct
  source 1..120: mol_type = other DNA
aggaattcaaattgtccctttttgcagatgacatgattgtatatctagaaaaccccattgtctcagcccaaaatctccttaagctgataagcaacttcagcaaagtctcaggatacaaaa

SEQ ID NO: 55039 - DNA, 120 bp, synthetic construct
  source 1..120: mol_type = other DNA
aaaaaactaccatcagagtgaacaggtaacctacaaaatgggagaaaattttcacaacctactcatctgacaaagggctaatatccagaatctacaatgaactcaaacaaatttacaaga

SEQ ID NO: 55040 - DNA, 120 bp, synthetic construct
  source 1..120: mol_type = other DNA
ggcattaggagatatacctaatgctaaatgacgtgttaatgggtgcagcacaccagcatggcacatgtatacatatgtaactaacctgcacattgtgcacatgtaccctaaaacttaaag

SEQ ID NO: 55041 - DNA, 120 bp, synthetic construct; identical to SEQ ID NO: 30088
  source 1..120: mol_type = other DNA

SEQ ID NO: 55042 - DNA, 120 bp, synthetic construct; identical to SEQ ID NO: 30089
  source 1..120: mol_type = other DNA

SEQ ID NO: 55043 - DNA, 120 bp, synthetic construct; identical to SEQ ID NO: 30090
  source 1..120: mol_type = other DNA

SEQ ID NO: 55044 - DNA, 120 bp, synthetic construct
  source 1..120: mol_type = other DNA
cattttatcaagaattaacatttctaggcactgggttttttttattattttatttatttatttatgtttgagatggagtctcactctgttgcccaggctggagtgcagtggcacgatctc

SEQ ID NO: 55045 - DNA, 120 bp, synthetic construct
  source 1..120: mol_type = other DNA
aaagtgattacagtatgctgctacaatcactttcagaactagcgttttatgattctaggttgtacctacaattctttttttttttttttttttttttttttgagacggagtctcgctctg

SEQ ID NO: 55046 - DNA, 120 bp, synthetic construct; identical to SEQ ID NO: 30092
  source 1..120: mol_type = other DNA

SEQ ID NO: 55047 - DNA, 120 bp, synthetic construct; identical to SEQ ID NO: 30093
  source 1..120: mol_type = other DNA

SEQ ID NO: 55048 - DNA, 120 bp, synthetic construct; identical to SEQ ID NO: 30094
  source 1..120: mol_type = other DNA

SEQ ID NO: 55049 - DNA, 120 bp, synthetic construct
  source 1..120: mol_type = other DNA
tgataggtgcagcaaaccaccatggcacatgtatacctatgtaacaaacctacgcattctacacacatatcccaaaacttataagtaaaacagaaaaaaaaagaattagttttataaaaa

SEQ ID NO: 55050 - DNA, 120 bp, synthetic construct
  source 1..120: mol_type = other DNA
cgattctcctgcctcagcctcctgagtagctaggatcacaggtgcgtgccaccatgcccagctaatttttgtatttttagtagagatggggtttcgccatgttggccaggctggtctcaa

SEQ ID NO: 55051 - DNA, 120 bp, synthetic construct; identical to SEQ ID NO: 33877
  source 1..120: mol_type = other DNA

SEQ ID NO: 55052 - DNA, 120 bp, synthetic construct
  source 1..120: mol_type = other DNA
gtgcatacatgtgtgtatatgtatatgtgcatgtgtacgtgcatgcatgtgtgcatgtgcatgtacgctgactggtctaactagaaaagcttgagcttattgctcatgcataaatgctaa

SEQ ID NO: 55053 - DNA, 120 bp, synthetic construct; identical to SEQ ID NO: 33878
  source 1..120: mol_type = other DNA

SEQ ID NO: 55054 - DNA, 120 bp, synthetic construct; identical to SEQ ID NO: 14590
  source 1..120: mol_type = other DNA

SEQ ID NO: 55055 - DNA, 120 bp, synthetic construct; identical to SEQ ID NO: 26862
  source 1..120: mol_type = other DNA

SEQ ID NO: 55056 - DNA, 120 bp, synthetic construct; identical to SEQ ID NO: 26863
  source 1..120: mol_type = other DNA

SEQ ID NO: 55057 - DNA, 120 bp, synthetic construct
  source 1..120: mol_type = other DNA
gactagcctgaccaacatggtgaaaccccatctctactaaaaatacaaaatacaaaaattagccgggcgtggtggcgcgcacctggtcctagctacttgggagcctgaggcaggagaatc

SEQ ID NO: 55058 - DNA, 120 bp, synthetic construct; identical to SEQ ID NO: 26864
  source 1..120: mol_type = other DNA

SEQ ID NO: 55059 - DNA, 120 bp, synthetic construct
  source 1..120: mol_type = other DNA
aaatggtttggttaaggttgtttggtagtaaggtggaatgggtttggggctaggtttagctcagagtggtcaagttgagttgaaatctcctaagtgtaagttgggtgctttatgttaagc

SEQ ID NO: 55060 - DNA, 120 bp, synthetic construct; identical to SEQ ID NO: 13732
  source 1..120: mol_type = other DNA

SEQ ID NO: 55061 - DNA, 120 bp, synthetic construct; identical to SEQ ID NO: 13733
  source 1..120: mol_type = other DNA

SEQ ID NO: 55062 - DNA, 120 bp, synthetic construct; identical to SEQ ID NO: 13734
  source 1..120: mol_type = other DNA

SEQ ID NO: 55063 - DNA, 120 bp, synthetic construct; identical to SEQ ID NO: 7076
  source 1..120: mol_type = other DNA

SEQ ID NO: 55064 - DNA, 120 bp, synthetic construct; identical to SEQ ID NO: 14229
  source 1..120: mol_type = other DNA

SEQ ID NO: 55065 - DNA, 120 bp, synthetic construct
  source 1..120: mol_type = other DNA
tcctaaccgctttggtgtagtgatcacacaatttagaataagacttagaagactttccttttttttttttttccagagacagggcctccttctgttgcccaggctgcagtgcagtgacat

SEQ ID NO: 55066 - DNA, 120 bp, synthetic construct; identical to SEQ ID NO: 14230
  source 1..120: mol_type = other DNA

SEQ ID NO: 55067 - DNA, 120 bp, synthetic construct
  source 1..120: mol_type = other DNA
tgttttggcttacgatactgcagactgtacaagaagcatggtgccagtatctgcttctgatgaggcctcaggaagcttacaatcatggcagaaggaaaaagggagcaagtgtgtcacatg

SEQ ID NO: 55068 - DNA, 120 bp, synthetic construct
  source 1..120: mol_type = other DNA
tgccatcatgcctggctaattttttgtattgagatgcggtttcactgtgttgctcaggctggtctcaaattcctggcctcaactgatccccacacctcagccccccaaaatattgggatt

SEQ ID NO: 55069 - DNA, 120 bp, synthetic construct; identical to SEQ ID NO: 14231
  source 1..120: mol_type = other DNA

SEQ ID NO: 55070 - DNA, 120 bp, synthetic construct
  source 1..120: mol_type = other DNA
ttcatcaatgatcttagctagatcttctggataactggctgcagcttctacatcagcactcgctgcttcatcttgcacttttatgttacagaggtggcttcttaaacctcatgaaccaac

SEQ ID NO: 55071 - DNA, 120 bp, synthetic construct; identical to SEQ ID NO: 14232
  source 1..120: mol_type = other DNA

SEQ ID NO: 55072 - DNA, 120 bp, synthetic construct; identical to SEQ ID NO: 14233
  source 1..120: mol_type = other DNA

SEQ ID NO: 55073 - DNA, 120 bp, synthetic construct; identical to SEQ ID NO: 14234
  source 1..120: mol_type = other DNA

SEQ ID NO: 55074 - DNA, 120 bp, synthetic construct
  source 1..120: mol_type = other DNA
cgcctgtaatcccagctactcgggaggctgaggcaggagaatggcataacccgggaggcggagtttgcagtgagccaagatagcgccactacagtccggcctgggcaaaagagcaagact

SEQ ID NO: 55075 - DNA, 120 bp, synthetic construct; identical to SEQ ID NO: 14235
  source 1..120: mol_type = other DNA

SEQ ID NO: 55076 - DNA, 120 bp, synthetic construct; identical to SEQ ID NO: 14236
  source 1..120: mol_type = other DNA

SEQ ID NO: 55077 - DNA, 120 bp, synthetic construct; identical to SEQ ID NO: 14237
  source 1..120: mol_type = other DNA

SEQ ID NO: 55078 - DNA, 120 bp, synthetic construct; identical to SEQ ID NO: 14238
  source 1..120: mol_type = other DNA

SEQ ID NO: 55079 - DNA, 120 bp, synthetic construct
  source 1..120: mol_type = other DNA
tcaaattctgaaggcttatatgaaaagacaatgaggctctcaggaagaagggacaaaaactgaaaaagttgagcctgttcctcagtttccatccaaacggactcactgctatgggaattg

SEQ ID NO: 55080 - DNA, 120 bp, synthetic construct
  source 1..120: mol_type = other DNA
ctattctatctgctgtcttagttcttatttgccgtaaagtgtaacataatcccaggttctagggataaggacatggacatctttgggatgccgttattacacctactacacctagtaaaa

SEQ ID NO: 55081 - DNA, 120 bp, synthetic construct
  source 1..120: mol_type = other DNA
aattttccactgacttgtattcttactttttttttttttttttgaaacagagccttgctctgtcacccaggctggagtacagtggtgtgatctcgactcaactgcaacctctgcttccca

SEQ ID NO: 55082 - DNA, 120 bp, synthetic construct
  source 1..120: mol_type = other DNA
tgaattctgtaaactcccggagttatcctatttttgaccatccaaattaaacagctccagctcccattcctcattagtgtagacagccaaatgtttctcagaactccctacaggtgctta

SEQ ID NO: 55083 - DNA, 120 bp, synthetic construct
  source 1..120: mol_type = other DNA
cataattaacaaactctccaaaatttaaaccaagacagggtctaatcctgtgattgtccaactcagtcgcactcacctaccttgatgccaggatagtcagaccctgcctttatttagtca

SEQ ID NO: 55084 - DNA, 120 bp, synthetic construct
  source 1..120: mol_type = other DNA
agggcatgcaaggggaggatgcaggaggagcaaagcacacgttttaggaaaatgccgggaataaatggggaaggtcaaggaatccaaagaatacagatgcctgtgaccctggaaagcact

SEQ ID NO: 55085 - DNA, 120 bp, synthetic construct
  source 1..120: mol_type = other DNA
taatggcttgtttctaatatctaagtcctggtttcaacctcattcttctttttttatccctccctccctccctccctccctccctccctccttccctccctccctccccacctgcccgcc

SEQ ID NO: 55086 - DNA, 120 bp, synthetic construct
  source 1..120: mol_type = other DNA
ggtagaagaaaggaaagagaaagaaagaaagacatgctctagggagagaggaaaaagaaagacagaaaaaaagagagagagggaagaagagagagaagcaggagaaaaggatggagggga

SEQ ID NO: 55087 - DNA, 120 bp, synthetic construct
  source 1..120: mol_type = other DNA
tgtagtcacaatcccatcctcccattctccttctcagaggaaggaagtgggcatccatctgcctcatctctctcccgtggggaagatggggagtttcaggggaactttcacataaatttc

SEQ ID NO: 55088 - DNA, 120 bp, synthetic construct
  source 1..120: mol_type = other DNA
caaggaaacaaagccctgacaatcagagtgactccctggtgactaagctccagtcctggatgcatatttgtttagcagttctgacagcatctgacccagccctctctttgcataccccac

SEQ ID NO: 55089 - DNA, 120 bp, synthetic construct
  source 1..120: mol_type = other DNA
agtaagcattggcaatttcaagagcaggtacaatggactggacactagaaattttcttttcatgcaacagaacataggcatcctggaattcacatttctcaccttttgatgtattaagaa

SEQ ID NO: 55090 - DNA, 120 bp, synthetic construct
  source 1..120: mol_type = other DNA
gcaatgtgtggaatgggaggtggcctgttctaattcctagaatagtgctttacctttattaatgaattgtgataggaagcccaaggcagtgttcctcaccaataacttcagagaagtcag

SEQ ID NO: 55091 - DNA, 120 bp, synthetic construct
  source 1..120: mol_type = other DNA
ttcatcactaggatgaacacagctgtgaaggagtcacactgggctgtgccaggagaaaagaagcagctgcaaccgtaggaatcttcatgggaacagtcagcccagctgtccttgagcaac

SEQ ID NO: 55092 - DNA, 120 bp, synthetic construct; identical to SEQ ID NO: 14239
  source 1..120: mol_type = other DNA

SEQ ID NO: 55093 - DNA, 120 bp, synthetic construct; identical to SEQ ID NO: 14240
  source 1..120: mol_type = other DNA

SEQ ID NO: 55094 - DNA, 120 bp, synthetic construct; identical to SEQ ID NO: 14241
  source 1..120: mol_type = other DNA

SEQ ID NO: 55095 - DNA, 120 bp, synthetic construct; identical to SEQ ID NO: 14374
  source 1..120: mol_type = other DNA

SEQ ID NO: 55096 - DNA, 120 bp, synthetic construct
  source 1..120: mol_type = other DNA
aataaatgatttttgaaaaggattcgaaggaaaaattaggaaataattgtaagaaaataaagtccaggctgggcgtggtggctcacgcctgtaatccccgcactttgggaggccgaggca

SEQ ID NO: 55097 - DNA, 120 bp, synthetic construct
  source 1..120: mol_type = other DNA
atacagaacattatataaatattctctggccttactatctagcaaggcaggaaaaatagatcaatttgttctcactcataggtgggaattgaacaatgagaacacatggacacaggaagg

SEQ ID NO: 55098 - DNA, 120 bp, synthetic construct
  source 1..120: mol_type = other DNA
tacatctcagtgtccctcaagattcttagaacacagaacttgcccattcatttacatattgcgctgttgtggtagcgatcatatgacccaaagagcttcacatatttccctatgtggact

SEQ ID NO: 55099 - DNA, 120 bp, synthetic construct; identical to SEQ ID NO: 33353
  source 1..120: mol_type = other DNA

SEQ ID NO: 55100 - DNA, 120 bp, synthetic construct; identical to SEQ ID NO: 33354
  source 1..120: mol_type = other DNA

SEQ ID NO: 55101 - DNA, 120 bp, synthetic construct
  source 1..120: mol_type = other DNA
gtagcaacaaccactctgtagaaggctcccagggaaagacccataaggtctaccttgtttttgtttgtttgtttttgaaacacagagtctcactctgttgaccaggttggaatgcagtgg

SEQ ID NO: 55102 - DNA, 120 bp, synthetic construct; identical to SEQ ID NO: 33355
  source 1..120: mol_type = other DNA

SEQ ID NO: 55103 - DNA, 120 bp, synthetic construct; identical to SEQ ID NO: 33356
  source 1..120: mol_type = other DNA

SEQ ID NO: 55104 - DNA, 120 bp, synthetic construct; identical to SEQ ID NO: 33357
  source 1..120: mol_type = other DNA

SEQ ID NO: 55105 - DNA, 120 bp, synthetic construct; identical to SEQ ID NO: 33358
  source 1..120: mol_type = other DNA

SEQ ID NO: 55106 - DNA, 120 bp, synthetic construct; identical to SEQ ID NO: 33359
  source 1..120: mol_type = other DNA

SEQ ID NO: 55107 - DNA, 120 bp, synthetic construct; identical to SEQ ID NO: 33360
  source 1..120: mol_type = other DNA

SEQ ID NO: 55108 - DNA, 120 bp, synthetic construct; identical to SEQ ID NO: 33361
  source 1..120: mol_type = other DNA

SEQ ID NO: 55109 - DNA, 120 bp, synthetic construct
  source 1..120: mol_type = other DNA
agccgagatcgcaccactgcattccagcctaggtgacagagtgagactccgtctcaaaaagaaacaaaaaaataaacaaagaaaaggtactcaacatcactaatcatcagggaaatgcaa

SEQ ID NO: 55110 - DNA, 120 bp, synthetic construct
  source 1..120: mol_type = other DNA
cgaggtcgtgtcactgcattccacctgggtgacagagcaagattctgtctcaaaaaaaacaataataaataaataaataaaatgagcttggcatggtggtgcacgcctgtcatatcagcg

SEQ ID NO: 55111 - DNA, 120 bp, synthetic construct
  source 1..120: mol_type = other DNA
gaaggaagaaagagaaggagaaagaaaaagaggaagaagaaaggaggaaatagagaaaggaattaaggaaggaaagaaggaagcataatgggagggaaggaaggagtgacacagagagag

SEQ ID NO: 55112 - DNA, 120 bp, synthetic construct
  source 1..120: mol_type = other DNA
gaaggaagggagggaggaatttattcctcagagcctttgctgcatttaccaattctggttctgcccctatttgaccaaatatctgtggtgactctgagaattctgatttctaagataagg

SEQ ID NO: 55113 - DNA, 120 bp, synthetic construct
  source 1..120: mol_type = other DNA
gtgtgtgggtgtgtctgtgtgtgtacatacatatttctcagccccaatgccaacttcctagtcaataaagaaatctctaaaatcttccagctaaacttggaaaagcagcaagtatccatc

SEQ ID NO: 55114 - DNA, 120 bp, synthetic construct
  source 1..120: mol_type = other DNA
ccgagatcatgccattgcactccagcctgggcaaaaagagcaataatccttctcaaacaaacaaacaaacaaaaaaagtatccacactgcagcgtggaccagaagagatgaccttccagt

SEQ ID NO: 55115 - DNA, 120 bp, synthetic construct; identical to SEQ ID NO: 33364
  source 1..120: mol_type = other DNA

SEQ ID NO: 55116 - DNA, 120 bp, synthetic construct
  source 1..120: mol_type = other DNA
cgcctgtcatcctaacattttgggaggccgaggcggatggatcacctgaagtcaggagttcgagaccagcatgaccaacatgaagaaaacccatctctactaaaaatataaaattagccg

SEQ ID NO: 55117 - DNA, 120 bp, synthetic construct
  source 1..120: mol_type = other DNA
gcggatggatcacctgaggtcaggagttcgagaccaacatgaccaacatgaagaacacccatctctactaaaaatataaaattagccgagcgtggtggcacatgcctgtattcccagcta

SEQ ID NO: 55118 - DNA, 120 bp, synthetic construct
  source 1..120: mol_type = other DNA
gctttaccaatgtactgaaaccccgtctctacgaaaaatataaaaattagctggctgtggtggcagacacctgtaatcccagctactcaggaggctgagacaggagaatggcttgaaccc

SEQ ID NO: 55119 - DNA, 120 bp, synthetic construct
  source 1..120: mol_type = other DNA
ctggtctcaaacccctgagttcaagtgatcctactgacttagcctcccaaagtgcaggtattacaagcatgagccaccacacccagcctatttttattttatttttgtaggcacaggatc

SEQ ID NO: 55120 - DNA, 120 bp, synthetic construct; identical to SEQ ID NO: 33368
  source 1..120: mol_type = other DNA

SEQ ID NO: 55121 - DNA, 120 bp, synthetic construct
  source 1..120: mol_type = other DNA
cactgcactccagcctgggcaagagagtgagactccatctcaaaaaaaacaaaaaaacaaaaaaacacacaaacaaaaaaaaaacaagctgtgacctgaccacgttgcacacgtcatcag

SEQ ID NO: 55122 - DNA, 120 bp, synthetic construct; identical to SEQ ID NO: 33345
  source 1..120: mol_type = other DNA

SEQ ID NO: 55123 - DNA, 120 bp, synthetic construct; identical to SEQ ID NO: 33346
  source 1..120: mol_type = other DNA

SEQ ID NO: 55124 - DNA, 120 bp, synthetic construct; identical to SEQ ID NO: 33347
  source 1..120: mol_type = other DNA

SEQ ID NO: 55125 - DNA, 120 bp, synthetic construct; identical to SEQ ID NO: 2233
  source 1..120: mol_type = other DNA

SEQ ID NO: 55126 - DNA, 120 bp, synthetic construct
  source 1..120: mol_type = other DNA
agggaacagggagagagagggagggcaaacgagagagggagagagaaggaagaggaggaaatgggggaaagagagaaagagagatggagagggaacagggagagagagggagggcaaacg

SEQ ID NO: 55127 - DNA, 120 bp, synthetic construct
  source 1..120: mol_type = other DNA
gggagagagaaggaggaggaggaaatgggggaaagagagagaaagagagatggagagggaacggggagagagagggagggcaaacgagagagggagagagaaggaggagagggaggaaat

SEQ ID NO: 55128 - DNA, 120 bp, synthetic construct
  source 1..120: mol_type = other DNA
aacggggagagagagggagggcaaacgagagagggagagagaaggaagaggaggaaatgggggaaagagagagaaagagagatggagagggaacagggagagagagggagggcaaacgag

SEQ ID NO: 55129 - DNA, 120 bp, synthetic construct
  source 1..120: mol_type = other DNA
agagagaaggaagaggaggaaatgggggagagagaaagagagatggagagggaacggggagagagagggagggcaaacgagagggagagagaaggaagaggaggaaatgggggaaagaga

SEQ ID NO: 55130 - DNA, 120 bp, synthetic construct
  source 1..120: mol_type = other DNA
acggggagagagagggagggcaaacgagagagggagagagaaggaggagagggaggaaataggggaaagagagagaaagagagatggagagggaacggggagagagagggagggcaaacg

SEQ ID NO: 55131 - DNA, 120 bp, synthetic construct
  source 1..120: mol_type = other DNA
agagagggaaggaaggagagagggagggagggagagggagaatgggagagagagaagaggggagaaagcgagggagggagggggagagagagaagaaagagagaagagagaaagagagag

SEQ ID NO: 55132 - DNA, 120 bp, synthetic construct; identical to SEQ ID NO: 33349
  source 1..120: mol_type = other DNA

SEQ ID NO: 55133 - DNA, 120 bp, synthetic construct; identical to SEQ ID NO: 33350
  source 1..120: mol_type = other DNA

SEQ ID NO: 55134 - DNA, 120 bp, synthetic construct
  source 1..120: mol_type = other DNA
agcagttctcctgcaggcgcgtgtgtacacacacacacacacacacacacacacacacacacgaggtcttattttcactgctctacacagggtcctgagaacccttacttttaaagttgg

SEQ ID NO: 55135 - DNA, 120 bp, synthetic construct
  source 1..120: mol_type = other DNA
tccccagaagcagaagctgctctgcttcctgtacagcttgcagaaccatgagccaattaaacctcttttctttataaatcatccaatctcaggtacttctttatagcaatgcaagaacag

SEQ ID NO: 55136 - DNA, 120 bp, synthetic construct
  source 1..120: mol_type = other DNA
tgaactgatggatggatggatggatggatagatggatggatgaattgatagatgggtagtgatatggtttggatctgtgtcctcattcaaatctcaagttgaattggaatccccagtgct

SEQ ID NO: 55137 - DNA, 120 bp, synthetic construct; identical to SEQ ID NO: 33352
  source 1..120: mol_type = other DNA

SEQ ID NO: 55138 - DNA, 120 bp, synthetic construct
  source 1..120: mol_type = other DNA
atcccgagaacatgtaccccaggtggtcggggtgcagcttgattttatatattttaggaaggcatgagacatcaatcaaatacatttcagaaatacattggtttggttcagaaaggtggg

SEQ ID NO: 55139 - DNA, 120 bp, synthetic construct; identical to SEQ ID NO: 10065
  source 1..120: mol_type = other DNA

SEQ ID NO: 55140 - DNA, 120 bp, synthetic construct; identical to SEQ ID NO: 19845
  source 1..120: mol_type = other DNA

SEQ ID NO: 55141 - DNA, 120 bp, synthetic construct
  source 1..120: mol_type = other DNA
gtgggagatgtaaccaacagtctcatcattcattcattaaatcctttttttttttttttttttttttttgagactgagtttcgctcttgttgcccaggctggagtgcaatggtgccatct

SEQ ID NO: 55142 - DNA, 120 bp, synthetic construct; identical to SEQ ID NO: 22501
  source 1..120: mol_type = other DNA

SEQ ID NO: 55143 - DNA, 120 bp, synthetic construct; identical to SEQ ID NO: 22502
  source 1..120: mol_type = other DNA

SEQ ID NO: 55144 - DNA, 120 bp, synthetic construct
  source 1..120: mol_type = other DNA
ttattttcatgtataaaacaatttaacttgaaaacctaccttttaaaaattccccacttaggccgggcatggtggctcatgcctataatcccagcactttgggaggctgaggtaggcgga

SEQ ID NO: 55145 - DNA, 120 bp, synthetic construct
  source 1..120: mol_type = other DNA
attgtgtagagaattgcctcctcttactttttaatttaatttaattttttagagatggagtcttgctccatcacccaggctggagagcagtggcacgatcatagctcactgcacccttga

SEQ ID NO: 55146 - DNA, 120 bp, synthetic construct; identical to SEQ ID NO: 18320
  source 1..120: mol_type = other DNA

SEQ ID NO: 55147 - DNA, 120 bp, synthetic construct; identical to SEQ ID NO: 18321
  source 1..120: mol_type = other DNA

SEQ ID NO: 55148 - DNA, 120 bp, synthetic construct; identical to SEQ ID NO: 18322
  source 1..120: mol_type = other DNA

SEQ ID NO: 55149 - DNA, 120 bp, synthetic construct
  source 1..120: mol_type = other DNA
gatcctcccgcctcagcctcccaaagtgctgggattacaggcgtgagtcaccacgcccggcctagaaacatgacttgtaatgaaaaattaagttcttcaaaactcgagtttgacacatgc

SEQ ID NO: 55150 - DNA, 120 bp, synthetic construct; identical to SEQ ID NO: 18323
  source 1..120: mol_type = other DNA

SEQ ID NO: 55151 - DNA, 120 bp, synthetic construct; identical to SEQ ID NO: 18324
  source 1..120: mol_type = other DNA

SEQ ID NO: 55152 - DNA, 120 bp, synthetic construct
  source 1..120: mol_type = other DNA
gttcaagcaattctcctgtctcagcctcccgagtagctgggactacaggtacctgccaccatgcccagctaatttttgtatttttagtagagatggagtttcaccttgttggtcaggctg

SEQ ID NO: 55153 - DNA, 120 bp, synthetic construct; identical to SEQ ID NO: 18325
  source 1..120: mol_type = other DNA

SEQ ID NO: 55154 - DNA, 120 bp, synthetic construct; identical to SEQ ID NO: 18326
  source 1..120: mol_type = other DNA

SEQ ID NO: 55155 - DNA, 120 bp, synthetic construct; identical to SEQ ID NO: 18327
  source 1..120: mol_type = other DNA

SEQ ID NO: 55156 - DNA, 120 bp, synthetic construct; identical to SEQ ID NO: 18328
  source 1..120: mol_type = other DNA

SEQ ID NO: 55157 - DNA, 120 bp, synthetic construct; identical to SEQ ID NO: 18329
  source 1..120: mol_type = other DNA

SEQ ID NO: 55158 - DNA, 120 bp, synthetic construct; identical to SEQ ID NO: 18330
  source 1..120: mol_type = other DNA

SEQ ID NO: 55159 - DNA, 120 bp, synthetic construct; identical to SEQ ID NO: 18331
  source 1..120: mol_type = other DNA

SEQ ID NO: 55160 - DNA, 120 bp, synthetic construct; identical to SEQ ID NO: 18332
  source 1..120: mol_type = other DNA

SEQ ID NO: 55161 - DNA, 120 bp, synthetic construct; identical to SEQ ID NO: 18333
  source 1..120: mol_type = other DNA

SEQ ID NO: 55162 - DNA, 120 bp, synthetic construct
  source 1..120: mol_type = other DNA
gatggggtttcaccatgttggtcaggctggtctggaactcctgacctcaggtgatctgcctaccttggccttgggattgcaggcatgagccaccacgcccagcccggcgttaatttcctt

SEQ ID NO: 55163 - DNA, 120 bp, synthetic construct; identical to SEQ ID NO: 18334
  source 1..120: mol_type = other DNA

SEQ ID NO: 55164 - DNA, 120 bp, synthetic construct; identical to SEQ ID NO: 18335
  source 1..120: mol_type = other DNA

SEQ ID NO: 55165 - DNA, 120 bp, synthetic construct
  source 1..120: mol_type = other DNA
gccttccaaagtgctgggattacaggtgtgagccattgtgcccagcccaaaacttcatataaatagaattatacactctcctttcttgtgtctggcttctttcagtcaacataatgtatg

SEQ ID NO: 55166 - DNA, 120 bp, synthetic construct; identical to SEQ ID NO: 18336
  source 1..120: mol_type = other DNA

SEQ ID NO: 55167 - DNA, 120 bp, synthetic construct; identical to SEQ ID NO: 18337
  source 1..120: mol_type = other DNA

SEQ ID NO: 55168 - DNA, 120 bp, synthetic construct; identical to SEQ ID NO: 18338
  source 1..120: mol_type = other DNA

SEQ ID NO: 55169 - DNA, 120 bp, synthetic construct; identical to SEQ ID NO: 18339
  source 1..120: mol_type = other DNA

SEQ ID NO: 55170 - DNA, 120 bp, synthetic construct
  source 1..120: mol_type = other DNA
atggtgtgaacccgggaggcggagcttgcagtgagccgagatcgcgccactacactccagtctgggcgatagagcgagactccgtctcaaaaaaaaaaaaaaaaaaacctcctgggctca

SEQ ID NO: 55171 - DNA, 120 bp, synthetic construct; identical to SEQ ID NO: 18340
  source 1..120: mol_type = other DNA

SEQ ID NO: 55172 - DNA, 120 bp, synthetic construct
  source 1..120: mol_type = other DNA
cactgcaatctccacctcccaggtttaagcaattcttctgcctcagcctcccaagtagctgggattacaggcttgcgtcaccacacccggctaatttttgtagttttagtagagatgggg

SEQ ID NO: 55173 - DNA, 120 bp, synthetic construct
  source 1..120: mol_type = other DNA
ttctacaaccaacaagcctagtgcaaactaaccagcaaagaattattcttcctttaaatacaagatgagcctgtaaccccagctacttgtgaggctgaggcagaagaatcacttgaacct

SEQ ID NO: 55174 - DNA, 120 bp, synthetic construct
  source 1..120: mol_type = other DNA
cacactatactgtaagacagaaataaatgttattagaggcacaagaaaagtattctgtgacttctaataaagaaatgattaggccgggcgcggtggctcacgcctgtaatcccagcactt

SEQ ID NO: 55175 - DNA, 120 bp, synthetic construct; identical to SEQ ID NO: 20479
  source 1..120: mol_type = other DNA

SEQ ID NO: 55176 - DNA, 120 bp, synthetic construct; identical to SEQ ID NO: 18003
  source 1..120: mol_type = other DNA

SEQ ID NO: 55177 - DNA, 120 bp, synthetic construct; identical to SEQ ID NO: 18004
  source 1..120: mol_type = other DNA

SEQ ID NO: 55178 - DNA, 120 bp, synthetic construct
  source 1..120: mol_type = other DNA
agtctcatatttactgtttattgaatagcagtagtatctacttcatatgattgctttttgaggcagagtcttgctctgtcacccagactggagtgcagtggtgcaatcttggctcactgc

SEQ ID NO: 55179 - DNA, 120 bp, synthetic construct; identical to SEQ ID NO: 27085
  source 1..120: mol_type = other DNA

SEQ ID NO: 55180 - DNA, 120 bp, synthetic construct; identical to SEQ ID NO: 27086
  source 1..120: mol_type = other DNA

SEQ ID NO: 55181 - DNA, 120 bp, synthetic construct
  source 1..120: mol_type = other DNA
tttttcattttccttttccgttttctttttcttcttttctttcttttttgagacagggtcttgctctgtcactcaggctagagtgcagtggcacaatcacagctcgctgcagcctcaatc

SEQ ID NO: 55182 - DNA, 120 bp, synthetic construct
  source 1..120: mol_type = other DNA
gtctaatgctgggagtagggtgttgaagtccccaactattactatgttagagtgtacctttccctttagatctaataatattttctttgtatatctgggtgctccagtgttgggtacata

SEQ ID NO: 55183 - DNA, 120 bp, synthetic construct
  source 1..120: mol_type = other DNA
gttttttttttttttttcctccctagggaggatatagtggcgggatgcagccggggactctctgtaggaacagaatattatttaatacagaattccatgatccgaaagacctggatttca

SEQ ID NO: 55184 - DNA, 120 bp, synthetic construct; identical to SEQ ID NO: 34915
  source 1..120: mol_type = other DNA

SEQ ID NO: 55185 - DNA, 120 bp, synthetic construct; identical to SEQ ID NO: 34916
  source 1..120: mol_type = other DNA

SEQ ID NO: 55186 - DNA, 120 bp, synthetic construct; identical to SEQ ID NO: 34917
  source 1..120: mol_type = other DNA

SEQ ID NO: 55187 - DNA, 120 bp, synthetic construct; identical to SEQ ID NO: 34918
  source 1..120: mol_type = other DNA

SEQ ID NO: 55188 - DNA, 120 bp, synthetic construct
  source 1..120: mol_type = other DNA
agatcatgccactgcactctagcctgggagacagagcgagactccgcctcaaaaaaaataataagagccagtcacggtggctcacgcctgtaatcccagcactttgggagactgaggcgg

SEQ ID NO: 55189 - DNA, 120 bp, synthetic construct; identical to SEQ ID NO: 34919
  source 1..120: mol_type = other DNA

SEQ ID NO: 55190 - DNA, 120 bp, synthetic construct
  source 1..120: mol_type = other DNA
agccgagatcaccccactgcactccagcctcggcaacagagcgagactccatctcaaaaaaaaaaaagaaaagaaacataactaaaagtcatatatcttgttggcagtgaatcagtagaa

SEQ ID NO: 55191 - DNA, 120 bp, synthetic construct
  source 1..120: mol_type = other DNA
ttagtacagaacaaaatggagtctcccatgtccacttctttctacacagacacagcaacaatctgatttctctatcttttccccacatttcccccttttctactcgacaaaactgccatc

SEQ ID NO: 55192 - DNA, 120 bp, synthetic construct; identical to SEQ ID NO: 34920
  source 1..120: mol_type = other DNA

SEQ ID NO: 55193 - DNA, 120 bp, synthetic construct
  source 1..120: mol_type = other DNA
tgtaactctactagtaatttttttaaaaagcttatttaaaaaaaaaaaaaaaaacaagaagaatgtctccggccgggcgcggtggctcacgcctgtaatcccagcactttgggaggccga

SEQ ID NO: 55194 - DNA, 120 bp, synthetic construct
  source 1..120: mol_type = other DNA
cacacctcactctccaacttcccagcctctggtaaacatcattctactgtctatctccatgagttcaattgttataatttttttagatcccacaaataagtgaaaacatgcaacgtttgc

SEQ ID NO: 55195 - DNA, 120 bp, synthetic construct; identical to SEQ ID NO: 34921
  source 1..120: mol_type = other DNA

SEQ ID NO: 55196 - DNA, 120 bp, synthetic construct
  source 1..120: mol_type = other DNA
ggagacggaaaagagagtgctagatggagaattaacctctgaatcatgttatgcactagggacttagggttacttttggagtagtatggaaacaaatttaagaatagagtgtgcagtata

SEQ ID NO: 55197 - DNA, 120 bp, synthetic construct
  source 1..120: mol_type = other DNA
gccttccaattttggctgagaatcatcttagaaactgttttgatttcaggcatatatatacaaatgacatgctagtttatacctttaaaagtatatttgcatgtagcataatttggaagg

SEQ ID NO: 55198 - DNA, 120 bp, synthetic construct
  source 1..120: mol_type = other DNA
cgagaacgcaccactgcactccagccgaggcgacagtgcaagacttcgtctcaaaaaacaaaaacaaaacaaaaaaaaaaaaaaaaaagaggaagcaaactatgggctaaacatgctggt

SEQ ID NO: 55199 - DNA, 120 bp, synthetic construct
  source 1..120: mol_type = other DNA
ctgcctgtaagccaccaaatagccttgctggttttttgttttattgttttttttgtttttttttttttttgagatggagcctcgctctgtcgctcaggctggagtgcagtggcatcatct

SEQ ID NO: 55200 - DNA, 120 bp, synthetic construct; identical to SEQ ID NO: 34922
  source 1..120: mol_type = other DNA

SEQ ID NO: 55201 - DNA, 120 bp, synthetic construct; identical to SEQ ID NO: 34923
  source 1..120: mol_type = other DNA

SEQ ID NO: 55202 - DNA, 120 bp, synthetic construct; identical to SEQ ID NO: 34924
  source 1..120: mol_type = other DNA

SEQ ID NO: 55203 - DNA, 120 bp, synthetic construct; identical to SEQ ID NO: 34925
  source 1..120: mol_type = other DNA

SEQ ID NO: 55204 - DNA, 120 bp, synthetic construct; identical to SEQ ID NO: 34926
  source 1..120: mol_type = other DNA

SEQ ID NO: 55205 - DNA, 120 bp, synthetic construct; identical to SEQ ID NO: 34927
  source 1..120: mol_type = other DNA

SEQ ID NO: 55206 - DNA, 120 bp, synthetic construct; identical to SEQ ID NO: 34928
  source 1..120: mol_type = other DNA

SEQ ID NO: 55207 - DNA, 120 bp, synthetic construct; identical to SEQ ID NO: 34929
  source 1..120: mol_type = other DNA

SEQ ID NO: 55208 - DNA, 120 bp, synthetic construct
  source 1..120: mol_type = other DNA
gggccagaacttatggtaaccccataagagtgattctataatttttttttttttttttttttttttgagactgagtctcattctgttgcccgggctggagtgcagtggtgcgatctcggc

SEQ ID NO: 55209 - DNA, 120 bp, synthetic construct; identical to SEQ ID NO: 34930
  source 1..120: mol_type = other DNA

SEQ ID NO: 55210 - DNA, 120 bp, synthetic construct
  source 1..120: mol_type = other DNA
ttttcttgtaaatttgtttgagttcattgtagattctggatattagccctttgtcagatgagtagattgcgaaaattttctcccattctgtaggttgcctgttcactctgaaggtggttt

SEQ ID NO: 55211 - DNA, 120 bp, synthetic construct
  source 1..120: mol_type = other DNA
ttttgtacattgattttgtatcctgagactgctgaagttgtttatcagcttgaggagattttgtgctgagacaatggggttttctagatatacaatcatgtcatctgcaaacagggacaa

SEQ ID NO: 55212 - DNA, 120 bp, synthetic construct
  source 1..120: mol_type = other DNA
tggtttagtcttgggagggtgtatatgtcaaggaatttatccatttcttcaagattttctagtttatttgcgtagaggtgtttgtagtattctctgatggtagtttgtatttctgtggga

SEQ ID NO: 55213 - DNA, 120 bp, synthetic construct
  source 1..120: mol_type = other DNA
tggggtgttaaagtctcccattattaatgtgtgggattctaagtctctttgtaggtcactcaggacttgctttatgaatctgggtgctcctgtattgggtgcatatatatttaggatagt

SEQ ID NO: 55214 - DNA, 120 bp, synthetic construct
  source 1..120: mol_type = other DNA
atttcaactttggtgaatctgacaattatgtgtcttggagttgctcttctctaggagaatctttgtggcgttctctgtatttcctgaatctgaacgttggcctgccttgctagattgggg

SEQ ID NO: 55215 - DNA, 120 bp, synthetic construct
  source 1..120: mol_type = other DNA
cgttctcagatctccagctgcatgttgggagaaccactgctctcttcaaagctgtcagacagggacatttaagtctgcagaggttactgctgtctttttgtttgtctgtgccctgccccc

SEQ ID NO: 55216 - DNA, 120 bp, synthetic construct; identical to SEQ ID NO: 34931
  source 1..120: mol_type = other DNA

SEQ ID NO: 55217 - DNA, 120 bp, synthetic construct; identical to SEQ ID NO: 34932
  source 1..120: mol_type = other DNA

SEQ ID NO: 55218 - DNA, 120 bp, synthetic construct; identical to SEQ ID NO: 34933
  source 1..120: mol_type = other DNA

SEQ ID NO: 55219 - DNA, 120 bp, synthetic construct
  source 1..120: mol_type = other DNA
cacactgacttccacaatggttgaactagtttacagtcccaccaacagtgtaaaagtgttcctatttctccacatcctctccagcacctgttgtttcctgactttttaatgagtgccatt

SEQ ID NO: 55220 - DNA, 120 bp, synthetic construct
  source 1..120: mol_type = other DNA
ttccatttgtttgtatcctcttttatttccttgagcagcggtttgtagttctccttgaagaggtccttcacatcccttgtaagttggattcctagctattttcttctctttgaggcaatt

SEQ ID NO: 55221 - DNA, 120 bp, synthetic construct
  source 1..120: mol_type = other DNA
tgaatccatctgatcctggactctttttggttggtaagctattgattattgccacaatttcagatcctgttattggtctattcagagattcaacttcttcctggtttagtcttgggagag

SEQ ID NO: 55222 - DNA, 120 bp, synthetic construct; identical to SEQ ID NO: 55213
  source 1..120: mol_type = other DNA

SEQ ID NO: 55223 - DNA, 120 bp, synthetic construct
  source 1..120: mol_type = other DNA
ccttgctagattggggaaattctcctggataatatcctgcagagtgttttccaacttggttccattctccccatcatttcaggtacaccaatcagacgtagatttggtcttttcacatag

SEQ ID NO: 55224 - DNA, 120 bp, synthetic construct
  source 1..120: mol_type = other DNA
cagactgggatatttaagtctgcagaggttactgctgtctttttgtttgtctgtgccctgcccccagaggtggagcctacagaggcaggcaggcctccttgagctgtggtgggctccacc

SEQ ID NO: 55225 - DNA, 120 bp, synthetic construct; identical to SEQ ID NO: 34910
  source 1..120: mol_type = other DNA

SEQ ID NO: 55226 - DNA, 120 bp, synthetic construct
  source 1..120: mol_type = other DNA
cgatctcactcactgcaacctccgcctcctgggatcaagcaattctcctacctcagtgtcctgagtagctaggattataggcgcccaccaccacacccgactaatttttgtatttttagt

SEQ ID NO: 55227 - DNA, 120 bp, synthetic construct
  source 1..120: mol_type = other DNA
tctgccttttaattgatatggttaatgcatttacatttcatgcagtgggccctttgtgtctgcagttttcacatctggagacacaaccaacggagaaatagtggatgcagaacctgtgga

SEQ ID NO: 55228 - DNA, 120 bp, synthetic construct
  source 1..120: mol_type = other DNA
gaagtgtgttagctgttgaaacttctaagaagtctttggtttaactttctttcttttttttttttttgctttttttgagacggagtctcgctctgtcgcccaggctggagtgcagtggcg

SEQ ID NO: 55229 - DNA, 120 bp, synthetic construct; identical to SEQ ID NO: 34911
  source 1..120: mol_type = other DNA

SEQ ID NO: 55230 - DNA, 120 bp, synthetic construct
  source 1..120: mol_type = other DNA
aagcaaaaacaccatttatagttgagtgtgaatttttttctttttttgaaaccagtctcactctgttactcaggctggagtgcagtggcatgatcttggctcactgcaacctccgactcc

SEQ ID NO: 55231 - DNA, 120 bp, synthetic construct
  source 1..120: mol_type = other DNA
tgttttataaagaaaaataaaatttcaataaaatatcaaaacattcttggccgggcgtgggggctcacacctataatccctgcacttcagggggctgaggcaagtggatcgcttgagtcc

SEQ ID NO: 55232 - DNA, 120 bp, synthetic construct; identical to SEQ ID NO: 34912
  source 1..120: mol_type = other DNA

SEQ ID NO: 55233 - DNA, 120 bp, synthetic construct; identical to SEQ ID NO: 34913
  source 1..120: mol_type = other DNA

SEQ ID NO: 55234 - DNA, 120 bp, synthetic construct
  source 1..120: mol_type = other DNA
tgatttatagtcctttgggtatatacccagtaatgggatggctgggtcaaatggtatttctagttctagatccctgaggaatcgccacactgacttccgcaatggttgaaccagtttaca

SEQ ID NO: 55235 - DNA, 120 bp, synthetic construct
  source 1..120: mol_type = other DNA
gcggcattatttccgagggctctgttctgttccgttgatctatatctctgttttggtaccagtaccatgctcttttggttactgtaggcttgtagtatagtttgaagtcaggtagcgtga

SEQ ID NO: 55236 - DNA, 120 bp, synthetic construct
  source 1..120: mol_type = other DNA
tatgctcgattacatttattgacttgcgtatattgaaccagcctgtttggcagcatggtcattttcacaatattggttctacccttccatgagcatgggatgtggttccatgtgtttgtg

SEQ ID NO: 55237 - DNA, 120 bp, synthetic construct; identical to SEQ ID NO: 13755
  source 1..120: mol_type = other DNA

SEQ ID NO: 55238 - DNA, 120 bp, synthetic construct
  source 1..120: mol_type = other DNA
tgatatctcatagtggttttgatttgcatttctctgatggccagtgatgatgagcattttttcatgtgttttttggctgcataaatgtcttcttttgagaagtgtctgttcatgtccttc

SEQ ID NO: 55239 - DNA, 120 bp, synthetic construct
  source 1..120: mol_type = other DNA
cacatcccttgtaagttggattcctaggtattttattctctttgaagcaattgtgaatgggagttcactcatgatttggctctctgtttgtctgttgttggtgtataagaatgcttattg

SEQ ID NO: 55240 - DNA, 120 bp, synthetic construct
  source 1..120: mol_type = other DNA
aggaggaactggtaccattccttctgaaactattccaatcaatagaaaaagagggaaccctccctaactcattttatgaggccagcatcattctgataccaaagccgggcagagacacaa

SEQ ID NO: 55241 - DNA, 120 bp, synthetic construct
  source 1..120: mol_type = other DNA
actcaaacaaatttacaagaaaaaaacaaacaaccccatcaaaaaggtggcgaaggacatgaacagacacttctcaaaagaagacatttatgcagccaaaaaacacatgaaaaaatgctc

SEQ ID NO: 55242 - DNA, 120 bp, synthetic construct
  source 1..120: mol_type = other DNA
tttggctgcataaatgtcttcttttcagaagtgtctgttcatatccttcaaggctggttcaatatatgcaaatcaataaatgtaatccagcatataaacaaaaccaaagacaaaaaccac

SEQ ID NO: 55243 - DNA, 120 bp, synthetic construct
  source 1..120: mol_type = other DNA
atggaaccaaaaaagagcccgcatcgccaagtcaatcctaagccaaaagaacaaagctggaggcatcacgctacctgacttcaaactacactacaaggctacagtaaccaaaacagcatg

SEQ ID NO: 55244 - DNA, 120 bp, synthetic construct; identical to SEQ ID NO: 13754
  source 1..120: mol_type = other DNA

SEQ ID NO: 55245 - DNA, 120 bp, synthetic construct; identical to SEQ ID NO: 13756
  source 1..120: mol_type = other DNA

SEQ ID NO: 55246 - DNA, 120 bp, synthetic construct; identical to SEQ ID NO: 13757
  source 1..120: mol_type = other DNA

SEQ ID NO: 55247 - DNA, 120 bp, synthetic construct; identical to SEQ ID NO: 13758
  source 1..120: mol_type = other DNA

SEQ ID NO: 55248 - DNA, 120 bp, synthetic construct
  source 1..120: mol_type = other DNA
ttggaagttctggccagggcaatcaggcaggagaaggaaataaagggtattcaattaggaaaagaggaagtcaaattgtccctgtgtgcagacgacatgattgtttatctagaaaacccc

SEQ ID NO: 55249 - DNA, 120 bp, synthetic construct
  source 1..120: mol_type = other DNA
caacctacaacatgggagaaaattttcgcaacctactcatctgacaaatggctaatatccagaatctacaatgaactcaaacaaatttacaagaaaaaaacaaacaaccccatcaaaaag

SEQ ID NO: 55250 - DNA, 120 bp, synthetic construct; identical to SEQ ID NO: 13759
  source 1..120: mol_type = other DNA

SEQ ID NO: 55251 - DNA, 120 bp, synthetic construct; identical to SEQ ID NO: 13760
  source 1..120: mol_type = other DNA

SEQ ID NO: 55252 - DNA, 120 bp, synthetic construct; identical to SEQ ID NO: 13761
  source 1..120: mol_type = other DNA

SEQ ID NO: 55253 - DNA, 120 bp, synthetic construct; identical to SEQ ID NO: 13762
  source 1..120: mol_type = other DNA

SEQ ID NO: 55254 - DNA, 120 bp, synthetic construct; identical to SEQ ID NO: 13763
  source 1..120: mol_type = other DNA

SEQ ID NO: 55255 - DNA, 120 bp, synthetic construct; identical to SEQ ID NO: 14629
  source 1..120: mol_type = other DNA

SEQ ID NO: 55256 - DNA, 120 bp, synthetic construct; identical to SEQ ID NO: 14630
  source 1..120: mol_type = other DNA

SEQ ID NO: 55257 - DNA, 120 bp, synthetic construct; identical to SEQ ID NO: 14631
  source 1..120: mol_type = other DNA

SEQ ID NO: 55258 - DNA, 120 bp, synthetic construct
  source 1..120: mol_type = other DNA
ttaaagaaaatccaggccaggcctggtagcttatagctgtaatcctagcactttgggaggccaaggcaggacgattgcttgagcccaggaatcaggaaattttttttttttttttttgaa

SEQ ID NO: 55259 - DNA, 120 bp, synthetic construct
  source 1..120: mol_type = other DNA
cgtgtgcatgtgtctttatagcagcatgatttatagtcctttgggtatagagcccaggaatttgagaccatcccaggcaacaaagtgagaccttatttctactaaatacgtgcatacata

SEQ ID NO: 55260 - DNA, 120 bp, synthetic construct
  source 1..120: mol_type = other DNA
gatagtgattttaagcaaaaataaaaattttagaaaacctgaatctaggtcaggcacaatggctcacacctgtaatcccaacactttgggaggccaaggagggcagatcacttgagccca

SEQ ID NO: 55261 - DNA, 120 bp, synthetic construct
  source 1..120: mol_type = other DNA
ttttgcagatgagaaagagcccatcagagattactgaatcacctaaggccacaagtagagatgagatgtgggcattattgggaaatcagtagttcctactaggaatacactcttttctcc

SEQ ID NO: 55262 - DNA, 120 bp, synthetic construct
  source 1..120: mol_type = other DNA
ttttccactacttctcacattgctctaaaatgtatccttttgcaacaccaaattcctcgtgactgccactgcgtcatctctctggtcatctataaatggatgcttttacaaagcagcctg

SEQ ID NO: 55263 - DNA, 120 bp, synthetic construct
  source 1..120: mol_type = other DNA
gtgagaccctgtctcaaaaaaaaaaaaaaaaaattaaaatttaaaaactcttgaacaggctgagcacggtggctcacgcctgtaatcccagcactttgggaggccaaggtgggtggatct

SEQ ID NO: 55264 - DNA, 120 bp, synthetic construct; identical to SEQ ID NO: 12930
  source 1..120: mol_type = other DNA

SEQ ID NO: 55265 - DNA, 120 bp, synthetic construct; identical to SEQ ID NO: 12931
  source 1..120: mol_type = other DNA

SEQ ID NO: 55266 - DNA, 120 bp, synthetic construct; identical to SEQ ID NO: 9896
  source 1..120: mol_type = other DNA

SEQ ID NO: 55267 - DNA, 120 bp, synthetic construct; identical to SEQ ID NO: 9897
  source 1..120: mol_type = other DNA

SEQ ID NO: 55268 - DNA, 120 bp, synthetic construct
  source 1..120: mol_type = other DNA
tcttccttacggacaagtttggtatgtgttcatcagcacatgaatcctatgattttacatgtgtggtagcattagcattactcttccttatggacaagtttcgtacattttcatcagcac

SEQ ID NO: 55269 - DNA, 120 bp, synthetic construct
  source 1..120: mol_type = other DNA
cattagcattactcttctttatggacaagtttggtaatcctgtgattttacacgtgtggtagcattagcattactcttccttatgaacaagtttggtatgtgttcctcaccacatgaatc

SEQ ID NO: 55270 - DNA, 120 bp, synthetic construct
  source 1..120: mol_type = other DNA
ttttacatgtgtggtagcattagcattactcttccttatggacaagtttggtatgtgttcatcagcacgtgaatcctatgatttagcacatgtgcatcatttttgcattacttcattctg

SEQ ID NO: 55271 - DNA, 120 bp, synthetic construct
  source 1..120: mol_type = other DNA
ctcccgaatagctaggactataggcatgcaccaccacactcagccaatttttttctattttttgtagatacagggtttcaccatgttggccaggctggtctcaatctcttgacctagtca

SEQ ID NO: 55272 - DNA, 120 bp, synthetic construct; identical to SEQ ID NO: 9898
  source 1..120: mol_type = other DNA

SEQ ID NO: 55273 - DNA, 120 bp, synthetic construct; identical to SEQ ID NO: 9899
  source 1..120: mol_type = other DNA

SEQ ID NO: 55274 - DNA, 120 bp, synthetic construct; identical to SEQ ID NO: 9900
  source 1..120: mol_type = other DNA

SEQ ID NO: 55275 - DNA, 120 bp, synthetic construct; identical to SEQ ID NO: 9901
  source 1..120: mol_type = other DNA

SEQ ID NO: 55276 - DNA, 120 bp, synthetic construct; identical to SEQ ID NO: 9902
  source 1..120: mol_type = other DNA

SEQ ID NO: 55277 - DNA, 120 bp, synthetic construct; identical to SEQ ID NO: 9903
  source 1..120: mol_type = other DNA

SEQ ID NO: 55278 - DNA, 120 bp, synthetic construct; identical to SEQ ID NO: 9904
  source 1..120: mol_type = other DNA

SEQ ID NO: 55279 - DNA, 120 bp, synthetic construct; identical to SEQ ID NO: 9905
  source 1..120: mol_type = other DNA

SEQ ID NO: 55280 - DNA, 120 bp, synthetic construct; identical to SEQ ID NO: 9906
  source 1..120: mol_type = other DNA

SEQ ID NO: 55281 - DNA, 120 bp, synthetic construct; identical to SEQ ID NO: 9907
  source 1..120: mol_type = other DNA

SEQ ID NO: 55282 - DNA, 120 bp, synthetic construct; identical to SEQ ID NO: 9908
  source 1..120: mol_type = other DNA

SEQ ID NO: 55283 - DNA, 120 bp, synthetic construct; identical to SEQ ID NO: 9909
  source 1..120: mol_type = other DNA

SEQ ID NO: 55284 - DNA, 120 bp, synthetic construct; identical to SEQ ID NO: 9910
  source 1..120: mol_type = other DNA

SEQ ID NO: 55285 - DNA, 120 bp, synthetic construct; identical to SEQ ID NO: 9911
  source 1..120: mol_type = other DNA

SEQ ID NO: 55286 - DNA, 120 bp, synthetic construct
  source 1..120: mol_type = other DNA
tggttatcattaaaaagtcaggcaacaacagatgctggagaggatgtgaagaaacaccactgagggaagtgtaaattagttcaaccattgtggaagagtgtggtgattcctcaaggatct

SEQ ID NO: 55287 - DNA, 120 bp, synthetic construct
  source 1..120: mol_type = other DNA
caaaataataagagctatctatgacaaacccacagccaatatcatactgaatgggcataaactggaagcattccctttgaaaactggcacgacacagggatgccctctctcaccactcct

SEQ ID NO: 55288 - DNA, 120 bp, synthetic construct
  source 1..120: mol_type = other DNA
aacaccaaaagcaatggcaacaaaagacaaaattgacaaatgggatctgattaaactaaagagcttctgcacagcaaaagaaactaccatcagagtgaacaagcaacctataacatggga

SEQ ID NO: 55289 - DNA, 120 bp, synthetic construct
  source 1..120: mol_type = other DNA
gagttagtgggtgcagcgcaccagcatggcatatgtatacatatgtaactaacctgcacaatgtgcacatgtaccctaaaacttaaagtataaaaaaaaaataaataaaataaaaattat

SEQ ID NO: 55290 - DNA, 120 bp, synthetic construct
  source 1..120: mol_type = other DNA
gaatcccattatgaaaattaagaaaacacggaaactgctaaaatttcagatccaagaatgaatcttggagcaaggaaaagctatcaaggtcgcccgaaaggggcatctgttgggatcctg

SEQ ID NO: 55291 - DNA, 120 bp, synthetic construct
  source 1..120: mol_type = other DNA
aaagaagggaaggaaggaaagagaaggaaaacaagagagaaggagaagggagaaagaaaaaaggagaagtgaaggaagcagagagaagaaaacgagagagaagaaaaggaaaagagaggg

SEQ ID NO: 55292 - DNA, 120 bp, synthetic construct
  source 1..120: mol_type = other DNA
gcgtgcagatacatccaaattcccatcttattctcactcatcgcgtgtccgggcgtgctgggggtgcagatagcaacgtctctatggctcaccttagctcccagagaagatagggggagg

SEQ ID NO: 55293 - DNA, 120 bp, synthetic construct; identical to SEQ ID NO: 9883
  source 1..120: mol_type = other DNA

SEQ ID NO: 55294 - DNA, 120 bp, synthetic construct; identical to SEQ ID NO: 9884
  source 1..120: mol_type = other DNA

SEQ ID NO: 55295 - DNA, 120 bp, synthetic construct; identical to SEQ ID NO: 9885
  source 1..120: mol_type = other DNA

SEQ ID NO: 55296 - DNA, 120 bp, synthetic construct; identical to SEQ ID NO: 9912
  source 1..120: mol_type = other DNA

SEQ ID NO: 55297 - DNA, 120 bp, synthetic construct; identical to SEQ ID NO: 9913
  source 1..120: mol_type = other DNA

SEQ ID NO: 55298 - DNA, 120 bp, synthetic construct
  source 1..120: mol_type = other DNA
tagataaaattctattctcgtctctaaacactatggtaaacacctgccatcaacccacagaaactcctgggacccaataacactgaactagcaagattaacaggccacacacggagagtt

SEQ ID NO: 55299 - DNA, 120 bp, synthetic construct
  source 1..120: mol_type = other DNA
gaggggggacagggggatgggggagggggatgcgcaggtgcctgctgtgcatggaacccaagcccctcgcagagctcaggatgaacccagtttccaggcccggggccatcatcagccagg

SEQ ID NO: 55300 - DNA, 120 bp, synthetic construct; identical to SEQ ID NO: 9914
  source 1..120: mol_type = other DNA

SEQ ID NO: 55301 - DNA, 120 bp, synthetic construct; identical to SEQ ID NO: 9915
  source 1..120: mol_type = other DNA

SEQ ID NO: 55302 - DNA, 120 bp, synthetic construct
  source 1..120: mol_type = other DNA
atgcgttaatcagagaatctaaaggcaggcaaactatgaaaagaatctatagaggaaggactagctctgctgtaagcccactacacgcaaggtcacgcaggatgccactctcaagccaca

SEQ ID NO: 55303 - DNA, 120 bp, synthetic construct
  source 1..120: mol_type = other DNA
cacacttccatttcaggatattctgctggaatcaacagccccagactcacccccaacacctaccacattgaaaacaacgttttttcttgatgcatcaagcgaaagacagaaaaccaccct

SEQ ID NO: 55304 - DNA, 120 bp, synthetic construct
  source 1..120: mol_type = other DNA
caggcacatacacatgtgggggtgggggtgggggtgggggtgggggcgggggaggggatgggcagggcaggggaggggaagggggagaggatgggtgggaagggggagggggaggatggg

SEQ ID NO: 55305 - DNA, 120 bp, synthetic construct; identical to SEQ ID NO: 9916
  source 1..120: mol_type = other DNA

SEQ ID NO: 55306 - DNA, 120 bp, synthetic construct; identical to SEQ ID NO: 9917
  source 1..120: mol_type = other DNA

SEQ ID NO: 55307 - DNA, 120 bp, synthetic construct; identical to SEQ ID NO: 9918
  source 1..120: mol_type = other DNA

SEQ ID NO: 55308 - DNA, 120 bp, synthetic construct; identical to SEQ ID NO: 9919
  source 1..120: mol_type = other DNA

SEQ ID NO: 55309 - DNA, 120 bp, synthetic construct; identical to SEQ ID NO: 9920
  source 1..120: mol_type = other DNA

SEQ ID NO: 55310 - DNA, 120 bp, synthetic construct; identical to SEQ ID NO: 9921
  source 1..120: mol_type = other DNA

SEQ ID NO: 55311 - DNA, 120 bp, synthetic construct
  source 1..120: mol_type = other DNA
agtgtgactagttcacgccataaggttgaaaaatcacaagtgtaaacattgtgagccagagaccatctgtattgcggcttctgtcttcagagacaatggaaacctcttcttagacaagaa

SEQ ID NO: 55312 - DNA, 120 bp, synthetic construct
  source 1..120: mol_type = other DNA
ttgcattcaattctgggcattcggaatagacctaatgggggataaacctctcctccaacccattgcttagtcttcttagaggatgaaggattttacataccacgagtcagcatataaaag

SEQ ID NO: 55313 - DNA, 120 bp, synthetic construct; identical to SEQ ID NO: 9888
  source 1..120: mol_type = other DNA

SEQ ID NO: 55314 - DNA, 120 bp, synthetic construct; identical to SEQ ID NO: 9889
  source 1..120: mol_type = other DNA

SEQ ID NO: 55315 - DNA, 120 bp, synthetic construct; identical to SEQ ID NO: 9890
  source 1..120: mol_type = other DNA

SEQ ID NO: 55316 - DNA, 120 bp, synthetic construct; identical to SEQ ID NO: 9891
  source 1..120: mol_type = other DNA

SEQ ID NO: 55317 - DNA, 120 bp, synthetic construct
  source 1..120: mol_type = other DNA
caataaatacacaaaatcacaggactgagcattgagcattgtttccctttgtgtcctccagcctttaggacacattaaggaaagacatgattccaggattcccattagaaaggctgccct

SEQ ID NO: 55318 - DNA, 120 bp, synthetic construct; identical to SEQ ID NO: 9922
  source 1..120: mol_type = other DNA

SEQ ID NO: 55319 - DNA, 120 bp, synthetic construct; identical to SEQ ID NO: 9923
  source 1..120: mol_type = other DNA

SEQ ID NO: 55320 - DNA, 120 bp, synthetic construct; identical to SEQ ID NO: 9924
  source 1..120: mol_type = other DNA

SEQ ID NO: 55321 - DNA, 120 bp, synthetic construct; identical to SEQ ID NO: 9925
  source 1..120: mol_type = other DNA

SEQ ID NO: 55322 - DNA, 120 bp, synthetic construct; identical to SEQ ID NO: 9926
  source 1..120: mol_type = other DNA

SEQ ID NO: 55323 - DNA, 120 bp, synthetic construct; identical to SEQ ID NO: 9927
  source 1..120: mol_type = other DNA

SEQ ID NO: 55324 - DNA, 120 bp, synthetic construct; identical to SEQ ID NO: 9928
  source 1..120: mol_type = other DNA

SEQ ID NO: 55325 - DNA, 120 bp, synthetic construct; identical to SEQ ID NO: 9929
  source 1..120: mol_type = other DNA

SEQ ID NO: 55326 - DNA, 120 bp, synthetic construct; identical to SEQ ID NO: 9930
  source 1..120: mol_type = other DNA

SEQ ID NO: 55327 - DNA, 120 bp, synthetic construct; identical to SEQ ID NO: 9931
  source 1..120: mol_type = other DNA

SEQ ID NO: 55328 - DNA, 120 bp, synthetic construct; identical to SEQ ID NO: 9932
  source 1..120: mol_type = other DNA

SEQ ID NO: 55329 - DNA, 120 bp, synthetic construct; identical to SEQ ID NO: 9933
  source 1..120: mol_type = other DNA

SEQ ID NO: 55330 - DNA, 120 bp, synthetic construct; identical to SEQ ID NO: 9934
  source 1..120: mol_type = other DNA

SEQ ID NO: 55331 - DNA, 120 bp, synthetic construct; identical to SEQ ID NO: 9935
  source 1..120: mol_type = other DNA

SEQ ID NO: 55332 - DNA, 120 bp, synthetic construct; identical to SEQ ID NO: 9936
  source 1..120: mol_type = other DNA

SEQ ID NO: 55333 - DNA, 120 bp, synthetic construct; identical to SEQ ID NO: 9937
  source 1..120: mol_type = other DNA

SEQ ID NO: 55334 - DNA, 120 bp, synthetic construct
  source 1..120: mol_type = other DNA
acttgaacccaggaggcgaaggttgcaattagccgagattgcaccactgcaccccagcctgggcaacaagagtgaaacttggtccccaaaaaaaaaaaaaaaaaaaaaaaaaaatatata

SEQ ID NO: 55335 - DNA, 120 bp, synthetic construct; identical to SEQ ID NO: 9882
  source 1..120: mol_type = other DNA

SEQ ID NO: 55336 - DNA, 120 bp, synthetic construct
  source 1..120: mol_type = other DNA
ccacacgtatgttcattgcggcactattcacaatagcaaagacttggaaccaacccaaatgcccatcaatgatagactggattaagaaaatgtggcacatatacaccatggaacactatg

SEQ ID NO: 55337 - DNA, 120 bp, synthetic construct; identical to SEQ ID NO: 9886
  source 1..120: mol_type = other DNA

SEQ ID NO: 55338 - DNA, 120 bp, synthetic construct; identical to SEQ ID NO: 9887
  source 1..120: mol_type = other DNA

SEQ ID NO: 55339 - DNA, 120 bp, synthetic construct
  source 1..120: mol_type = other DNA
tatgttatactgactgaaaaggtcttaggttctgtcaggcccacagtgaggtgtggaagaataaaccaagggctgtcataaagtcatcgcttatccatgagcgatgagatgactaccaac

SEQ ID NO: 55340 - DNA, 120 bp, synthetic construct
  source 1..120: mol_type = other DNA
gccatccttttcaaatgcaggctgccagaaacgattccacttatcacagctgcgcaggagaaggcacggcacttcagccaggattgaaatctggaggagaacggtctatgagcagatgtc

SEQ ID NO: 55341 - DNA, 120 bp, synthetic construct; identical to SEQ ID NO: 9892
  source 1..120: mol_type = other DNA

SEQ ID NO: 55342 - DNA, 120 bp, synthetic construct; identical to SEQ ID NO: 9893
  source 1..120: mol_type = other DNA

SEQ ID NO: 55343 - DNA, 120 bp, synthetic construct; identical to SEQ ID NO: 9894
  source 1..120: mol_type = other DNA

SEQ ID NO: 55344 - DNA, 120 bp, synthetic construct; identical to SEQ ID NO: 9895
  source 1..120: mol_type = other DNA

SEQ ID NO: 55345 - DNA, 120 bp, synthetic construct; identical to SEQ ID NO: 7804
  source 1..120: mol_type = other DNA

SEQ ID NO: 55346 - DNA, 120 bp, synthetic construct
  source 1..120: mol_type = other DNA
atggctaactagaataaccaatgcagagaagtccttaaaggacctgatggagctaaaaaaccacagcacgagaactatgtgatgaatgcacaagtctcagtagccgattcgatcaactgg

SEQ ID NO: 55347 - DNA, 120 bp, synthetic construct
  source 1..120: mol_type = other DNA
acagactggcaaattggataaagagtcaagacccatcagtgtgctgtattcaggaaacccatctcacgtgcagagacacacataggctcaaaataaggggatggaggaagatctaccaag

SEQ ID NO: 55348 - DNA, 120 bp, synthetic construct
  source 1..120: mol_type = other DNA
aagatcacagcagagctgaaggaaatagagacacaaaaaacccttcaaaaattcaatgaatccaggagctggttttttgaaaagatcaacaaaatagatagaccgctagcttgactaata

SEQ ID NO: 55349 - DNA, 120 bp, synthetic construct
  source 1..120: mol_type = other DNA
taaattaggtattgatgggacatatctcaaaataattagagctatctatgacaaacccacagccaatatcatactcaatgggcaaaaattggaagcattcccttgaaaactggcacaaga

SEQ ID NO: 55350 - DNA, 120 bp, synthetic construct
  source 1..120: mol_type = other DNA
acaactatctgatctttgacaaacctgacaaaaacaagaaatggggaaaggattccctatttaataaatggtgctggaaaaactggctagccatatatagaaagctgaaactggatccct

SEQ ID NO: 55351 - DNA, 120 bp, synthetic construct
  source 1..120: mol_type = other DNA
aaaaaggatgagttcatgtcctttgtagggacatggatgaagctggaaaccatcattctcagcaaactatcgcaaggacaaaaaaaacaaacaccgcatgttcacactcataggtgggaa

SEQ ID NO: 55352 - DNA, 120 bp, synthetic construct; identical to SEQ ID NO: 7805
  source 1..120: mol_type = other DNA

SEQ ID NO: 55353 - DNA, 120 bp, synthetic construct; identical to SEQ ID NO: 15402
  source 1..120: mol_type = other DNA

SEQ ID NO: 55354 - DNA, 120 bp, synthetic construct
  source 1..120: mol_type = other DNA
tttatgttattgagttcagatctttctatgttttgtttttgtttttttcttgagatgggagtctcactctgtcgcccaggctggagtgcagttgtgcaatcttggctcactacaacctcc

SEQ ID NO: 55355 - DNA, 120 bp, synthetic construct; identical to SEQ ID NO: 55238
  source 1..120: mol_type = other DNA

SEQ ID NO: 55356 - DNA, 120 bp, synthetic construct
  source 1..120: mol_type = other DNA
tctgtttgtctgttgttggtgtataggaatgcttgtgatttttgtacattgattttgtatcctgagactttgctgaagttgcttatcagcttaaggagattttgggctgagacgatgggg

SEQ ID NO: 55357 - DNA, 120 bp, synthetic construct
  source 1..120: mol_type = other DNA
tctctgatggtagtctgtatttctgtgggatcggtggtgatatcccctttatcattttttattgtgtctatttgattcttctctctttttttctttattagtcttgctagcggtctatca

SEQ ID NO: 55358 - DNA, 120 bp, synthetic construct
  source 1..120: mol_type = other DNA
ttgttgaattgatccctttaccattatgtaatggccttctttgtctcttctgatctttgttggtttaaagtctgttttatcagagactaggattgcaacccctgcctttttttgttttcc

SEQ ID NO: 55359 - DNA, 120 bp, synthetic construct
  source 1..120: mol_type = other DNA
gttgatcgcatcggccaccatgcccggctattttttttaattttttaattttttaattttttgagacaatgtctcactctgtcactcatgctggagtgcagtggtgcgatctcagctcac

SEQ ID NO: 55360 - DNA, 120 bp, synthetic construct
  source 1..120: mol_type = other DNA
tctgtattagtccattttcataatgttgataaagacataaccaggactaggcaatttacaaaagaaagaggttaatggattcacatttccacgtggctggggaggccttccagtcgtggc

SEQ ID NO: 55361 - DNA, 120 bp, synthetic construct; identical to SEQ ID NO: 22073
  source 1..120: mol_type = other DNA

SEQ ID NO: 55362 - DNA, 120 bp, synthetic construct; identical to SEQ ID NO: 22074
  source 1..120: mol_type = other DNA

SEQ ID NO: 55363 - DNA, 120 bp, synthetic construct
  source 1..120: mol_type = other DNA
atccagtctatcattgttggacatttgggttggttccaagtctttgctattgtgaatagtgccgcaataaacatacgtgtgcatgtgtctctatagcagcatgatttatagtcctttggg

SEQ ID NO: 55364 - DNA, 120 bp, synthetic construct
  source 1..120: mol_type = other DNA
gcggcgttatttctgagggctctgttctgttccattgatctatatctctgttttggtaccagtagcgtgctgttttggttactgtagccttgtagtatagtttgaagtcaggtagtgtga

SEQ ID NO: 55365 - DNA, 120 bp, synthetic construct
  source 1..120: mol_type = other DNA
tttttctgcatctattgagataatcatgtggtttttgtctttggctctgtttatatgctggattacatttattgatttgcgtatattgaaccagccttgcatcccaggaatgaagcccac

SEQ ID NO: 55366 - DNA, 120 bp, synthetic construct
  source 1..120: mol_type = other DNA
agcggctttgagtgagattcttaatcctgagttctagtttgattgcactgtggtctgagagatagtttgttataatttctgttcttttacatttgctgaggagagctttacttccaagta

SEQ ID NO: 55367 - DNA, 120 bp, synthetic construct
  source 1..120: mol_type = other DNA
tgtgtcttggagttgctcttctcgaggagtatctttgtggcgttctctgtatttcctgaatctgaacgttggcttgccttgctagattggggaagttctcctggataatatcctgcagag

SEQ ID NO: 55368 - DNA, 120 bp, synthetic construct
  source 1..120: mol_type = other DNA
acttaagtctgcagaggttactgctgtctttttgtttgtctgtgccctgcccccagaggtggagcctacagaggcaggcaggcctccttgagctgtggtgggctgcacccagttggagct

SEQ ID NO: 55369 - DNA, 120 bp, synthetic construct
  source 1..120: mol_type = other DNA
cctgcaccatgctgctgctgagtctgcacttcactcactgtaaaaaggtctttagaccttgttgtatttttttaagtggtgaggccctttttgcaaataatatctgaaccccaaattcca

SEQ ID NO: 55370 - DNA, 120 bp, synthetic construct
  source 1..120: mol_type = other DNA
gagggtgccaattcagtccctaggatagcccaaaggctgagtaggtgaaatctttatcattcaaccacgagatggtatcatcttgaagctttctccattttgtgcactatttttaaacag

SEQ ID NO: 55371 - DNA, 120 bp, synthetic construct; identical to SEQ ID NO: 22075
  source 1..120: mol_type = other DNA

SEQ ID NO: 55372 - DNA, 120 bp, synthetic construct; identical to SEQ ID NO: 22076
  source 1..120: mol_type = other DNA

SEQ ID NO: 55373 - DNA, 120 bp, synthetic construct; identical to SEQ ID NO: 22077
  source 1..120: mol_type = other DNA

SEQ ID NO: 55374 - DNA, 120 bp, synthetic construct; identical to SEQ ID NO: 22078
  source 1..120: mol_type = other DNA

SEQ ID NO: 55375 - DNA, 120 bp, synthetic construct; identical to SEQ ID NO: 22079
  source 1..120: mol_type = other DNA

SEQ ID NO: 55376 - DNA, 120 bp, synthetic construct; identical to SEQ ID NO: 22080
  source 1..120: mol_type = other DNA

SEQ ID NO: 55377 - DNA, 120 bp, synthetic construct; identical to SEQ ID NO: 22081
  source 1..120: mol_type = other DNA

SEQ ID NO: 55378 - DNA, 120 bp, synthetic construct; identical to SEQ ID NO: 22082
  source 1..120: mol_type = other DNA

SEQ ID NO: 55379 - DNA, 120 bp, synthetic construct
  source 1..120: mol_type = other DNA
ctatgcttcccagcctgttagaatggcaaccttgcaggctgtaacccccttttaagaaataaagctctccatattctcactcataggtgggaagtgaacaatgaggtcacatggacacag

SEQ ID NO: 55380 - DNA, 120 bp, synthetic construct
  source 1..120: mol_type = other DNA
caggaaggggaatatcacactctggggactgttgtggggtggggggaggggggagggatagcatctggagatatacctaatgctagatgacggttagtgggttcagcgcaccagcatggc

SEQ ID NO: 55381 - DNA, 120 bp, synthetic construct
  source 1..120: mol_type = other DNA
ttgtaattggatgtggggtgatgatgggcatatgcttggaatatgccattgctcactttatttttgttcttcttcctacatttccctccctctttcccttctctttccttcccttccttt

SEQ ID NO: 55382 - DNA, 120 bp, synthetic construct
  source 1..120: mol_type = other DNA
aggctggattgaagtccatgccaggaacagtggtaattgtgggacactcaacaaagagtgagcacagctgaaggagccagggagcagaaagtatatgcctcaggtgtgaggaagaaaata

SEQ ID NO: 55383 - DNA, 120 bp, synthetic construct
  source 1..120: mol_type = other DNA
aggtaaaatgggggaattataaggagagtttataggctttaaaaggccatgctgtaacaggtgagtgataacaggctttaatcattttaaagagtgctgtgggatgggatattggcattg

SEQ ID NO: 55384 - DNA, 120 bp, synthetic construct
  source 1..120: mol_type = other DNA
aagaactttctgaaagttcttcatcaccctccatgatgccaaggaaagctgttcatagggagttgtttcaccagtggcaatctgctacgaaaagggcttctgggaaatgctggcatccag

SEQ ID NO: 55385 - DNA, 120 bp, synthetic construct
  source 1..120: mol_type = other DNA
aactccaaatctgcccccagactccataaagtcattactgatctttgaacagacagataaatgtatcaggaaagataaatacttaaaataactttgcagtcagtccttctgtaattaaat

SEQ ID NO: 55386 - DNA, 120 bp, synthetic construct
  source 1..120: mol_type = other DNA
ctttttttctttttttatttattttattttattattattatactttaagttttaggatacatgtgcacaatgtgcaggttagttacatatgtatacatgtgccatgctggtgtgctgcac

SEQ ID NO: 55387 - DNA, 120 bp, synthetic construct
  source 1..120: mol_type = other DNA
ttcactctgatggtagcttcttttgctgtgcagaagctctttagtttaattagatcccatttgtcaattttgtcttttgttgccattgcttttggtgttttggacatgaagtccttgccc

SEQ ID NO: 55388 - DNA, 120 bp, synthetic construct
  source 1..120: mol_type = other DNA
tgaggaatctgcacactgacttccacaatggttgaactagtttacagtcccaccaacagtgtaaaagtgttcctatttctccacatcctctccagcacctgttgtttcctgactttttaa

SEQ ID NO: 55389 - DNA, 120 bp, synthetic construct
  source 1..120: mol_type = other DNA
cttggcaatgtgggctcttttttggttccatatgaactttaaagtagttttttccaattctgtgaagaaagtcattggtagcttgatgggggtggcactgaatctataaattaccttggg

SEQ ID NO: 55390 - DNA, 120 bp, synthetic construct
  source 1..120: mol_type = other DNA
tcccagggatgaagcccacttgatcgtggtggataagctttttgatgtgctgctgaattcggtttgccagtattttattgagggtttttgcatcaatgttcatcaaggatatcggtctaa

SEQ ID NO: 55391 - DNA, 120 bp, synthetic construct
  source 1..120: mol_type = other DNA
ctgccttcatttcgttatgtacccagtagtcattcaggagcaggttgttcagtttccatgtagttgagcagttttgagtgagtttcttaatcctgagttctaatttgattgcactgtggt

SEQ ID NO: 55392 - DNA, 120 bp, synthetic construct
  source 1..120: mol_type = other DNA
atgaaattctgggttgaaaattcttttctttaagaatgttgaatattggccccagactctcttttggcttgtagagtttctgccaagagatcagctgttagtctgatgggcttccctttg

SEQ ID NO: 55393 - DNA, 120 bp, synthetic construct
  source 1..120: mol_type = other DNA
gccttggcctcccaaagtgctgggattatgggtgtgagccactgtccaatacttatagatttttgtcagaaatgctacaaaagcatatacttcactaaaaggaaattgaacccagatgga

SEQ ID NO: 55394 - DNA, 120 bp, synthetic construct
  source 1..120: mol_type = other DNA
aaaaacacatgaaaaaatgctcatcatcactggccatgagagaaatgtaaatcaaaaccacgataagataccatctcacaccagttagaatggcgatcattaaaaagtcaggaaacaaca

SEQ ID NO: 55395 - DNA, 120 bp, synthetic construct; identical to SEQ ID NO: 9383
  source 1..120: mol_type = other DNA

SEQ ID NO: 55396 - DNA, 120 bp, synthetic construct; identical to SEQ ID NO: 9384
  source 1..120: mol_type = other DNA

SEQ ID NO: 55397 - DNA, 120 bp, synthetic construct; identical to SEQ ID NO: 9385
  source 1..120: mol_type = other DNA

SEQ ID NO: 55398 - DNA, 120 bp, synthetic construct
  source 1..120: mol_type = other DNA
tctctgttttgggaccagtaccatactattttggttactgtagccttgtagtatagtttgaagtccggtagcatgatgcctccagctttgttcttttggcttaggattgacttggcaatg

SEQ ID NO: 55399 - DNA, 120 bp, synthetic construct; identical to SEQ ID NO: 7066
  source 1..120: mol_type = other DNA

SEQ ID NO: 55400 - DNA, 120 bp, synthetic construct; identical to SEQ ID NO: 7067
  source 1..120: mol_type = other DNA

SEQ ID NO: 55401 - DNA, 120 bp, synthetic construct; identical to SEQ ID NO: 12354
  source 1..120: mol_type = other DNA

SEQ ID NO: 55402 - DNA, 120 bp, synthetic construct; identical to SEQ ID NO: 12355
  source 1..120: mol_type = other DNA

SEQ ID NO: 55403 - DNA, 120 bp, synthetic construct
  source 1..120: mol_type = other DNA
tggtatctcttataaggactagttctgttggatcagggctccacccgtatgacctcatttaatcttaattacctccttaaaggccctatctccaaaacagtcaaatagcagataagggct

SEQ ID NO: 55404 - DNA, 120 bp, synthetic construct; identical to SEQ ID NO: 35647
  source 1..120: mol_type = other DNA

SEQ ID NO: 55405 - DNA, 120 bp, synthetic construct
  source 1..120: mol_type = other DNA
gatttctcaatcttttccccacctttcccgcctttctattccacaaaaccgccattgccatcctggcccgttctcaatgagctgttgggcacacctcccagacggggtggcggccgggca

SEQ ID NO: 55406 - DNA, 120 bp, synthetic construct; identical to SEQ ID NO: 25729
  source 1..120: mol_type = other DNA

SEQ ID NO: 55407 - DNA, 120 bp, synthetic construct
  source 1..120: mol_type = other DNA
tcctcaagtgggtctctgaaccctgacccccgagcagcctaactgggaggcacaccccagcagggtcacactgacacctcacacggcagggtattccaacagacctgcagctgagggtcc

SEQ ID NO: 55408 - DNA, 120 bp, synthetic construct
  source 1..120: mol_type = other DNA
aataaaatactttacagacaagcaaatgctgagagattttgtcaccaccaggcctgccctaaaagagctcctgaaggaagcgctaaacatggaaaggaacaacaggtaccagccgctgca

SEQ ID NO: 55409 - DNA, 120 bp, synthetic construct
  source 1..120: mol_type = other DNA
ctgaatgaactactgggtacataatgaaatgaaggcagaaataaagatgttctttgaaaccaacgagaacaaacacacaacataccagaatctctgggacgcattcaaagcagtgtgtag

SEQ ID NO: 55410 - DNA, 120 bp, synthetic construct
  source 1..120: mol_type = other DNA
agacacaacaaaaaaatagaattttagaccaatatccttgatgaacattgatgcaaaaatcctcaacaaaatactggcaaaacgaatccagcagcacatcaaaaagcttattcaccatga

SEQ ID NO: 55411 - DNA, 120 bp, synthetic construct
  source 1..120: mol_type = other DNA
actttcaagttcgtatggaaccaaaaaagagcccgcatcgccaagtcaatcctaagccaaaagaacaaagctggaggcatcacactacctgacttcaaactatactacaaggctacagta

SEQ ID NO: 55412 - DNA, 120 bp, synthetic construct
  source 1..120: mol_type = other DNA
aggaacacttttacactgttagtgggaccgtaaactagttcaaccattgtggaagtcagtgtggcgattcctcagggatctagaactggaaataccatttgacccagccatcccattact

SEQ ID NO: 55413 - DNA, 120 bp, synthetic construct
  source 1..120: mol_type = other DNA
ctacctgacttcaaactatactacaaggctacagtaaccaaaacagcatggtattgttaccaaaacggagatatagatcaatggaacagaacagagccctcagaaataacactgcatatc

SEQ ID NO: 55414 - DNA, 120 bp, synthetic construct
  source 1..120: mol_type = other DNA
accatttgacccagccatcccattaaggggtatatacccaaaggattataaatcatgctgctgtaaagacacaggcacacgtatgtttattgtagcactattcacaatagcagagacttg

SEQ ID NO: 55415 - DNA, 120 bp, synthetic construct; identical to SEQ ID NO: 12356
  source 1..120: mol_type = other DNA

SEQ ID NO: 55416 - DNA, 120 bp, synthetic construct
  source 1..120: mol_type = other DNA
gttctcaatgagctgttgggtacacctcccagacagggtggtggccgggcagaggggctcctcacttcccagtaggggcggctgggcagaggcgcccctcacctcccgggcggggcagct

SEQ ID NO: 55417 - DNA, 120 bp, synthetic construct
  source 1..120: mol_type = other DNA
ctcagcaggctgaggcaggagaatcaggcagggaggttgcagtgagccgagaaggcagcagtacagtccagcttcggctcagcatcagagggagaccgtggaaagagagggagagggaga

SEQ ID NO: 55418 - DNA, 120 bp, synthetic construct
  source 1..120: mol_type = other DNA
aacttcagttggggtgggggaaggggggggtggggggggggaatcacctttttttttttctactaacatttagcatttcttccttttataaatgtagagaacagatcaaatgttaacagt

SEQ ID NO: 55419 - DNA, 120 bp, synthetic construct
  source 1..120: mol_type = other DNA
cagtaatatgtgcttgttcttcctcgggtcaaacagtatcttgtgatatctgtgaagctttcccatagtgaaatctggaacattttaaagggagggacagatacttccctccagatctag

SEQ ID NO: 55420 - DNA, 120 bp, synthetic construct
  source 1..120: mol_type = other DNA
ttcaaacaattctcttgcctgagcctcccaagtagctgggattacaggcatgtgccaccatgcccagctaatgtgtgtgtgtgtgtgtgtgtgtgtatatatatatatatatatatatat

SEQ ID NO: 55421 - DNA, 120 bp, synthetic construct; identical to SEQ ID NO: 31338
  source 1..120: mol_type = other DNA

SEQ ID NO: 55422 - DNA, 120 bp, synthetic construct; identical to SEQ ID NO: 6179
  source 1..120: mol_type = other DNA

SEQ ID NO: 55423 - DNA, 120 bp, synthetic construct
  source 1..120: mol_type = other DNA
gaagtcaggtagtgtgatgcctccagctttgttcttttggcttaggattgacttggcgatgcgggctcttttttggttccatatgaactttaatgtagttttttccaattttgtgaagaa

SEQ ID NO: 55424 - DNA, 120 bp, synthetic construct
  source 1..120: mol_type = other DNA
agctttttgatgtgctgctgcattctgtttgccagtattttattgaggatttttgcatcagtgttcaccaaggacattggtctaaaattctcttttttggttgtgtctctgcccagcttt

SEQ ID NO: 55425 - DNA, 120 bp, synthetic construct; identical to SEQ ID NO: 31340
  source 1..120: mol_type = other DNA

SEQ ID NO: 55426 - DNA, 120 bp, synthetic construct
  source 1..120: mol_type = other DNA
ttacatcgtattctcttaccttcttaatctttacttcatcggtaataatagttcttttttcctttcttttctctctctttcccttccccccattcccctcccctcccctcccctcccctc

SEQ ID NO: 55427 - DNA, 120 bp, synthetic construct
  source 1..120: mol_type = other DNA
cctctgccccgccgctccgtctgggatgtgaggagcgcctctgcccggccgcgaccccgtctgggaggtgaggagcatctctgcccagccgccctgtctgagaagtgaggagcccctccg

SEQ ID NO: 55428 - DNA, 120 bp, synthetic construct; identical to SEQ ID NO: 24198
  source 1..120: mol_type = other DNA

SEQ ID NO: 55429 - DNA, 120 bp, synthetic construct
  source 1..120: mol_type = other DNA
ttagtctgttctacttttcttgaagacagaggaccgtaagggatataaaggtttcctgaaaaactgcttggctgatttgacaaataaaggctggtctgttatcagattgtatagaggtgg

SEQ ID NO: 55430 - DNA, 120 bp, synthetic construct
  source 1..120: mol_type = other DNA
gttgcccatagtgaaggaggcaaacacagagagaagagagcgtagagacacggagggaaggggttcgggtgttcttttttttttttttttttttaatttattttttattgataattcttg

SEQ ID NO: 55431 - DNA, 120 bp, synthetic construct
  source 1..120: mol_type = other DNA
gcggccgggcggagacgctcctcactttccagactgggcagccaggcagaggggctcctcacatcccagacgatgggcggccaggcagagacactcctcacttcccagacggggtggcgg

SEQ ID NO: 55432 - DNA, 120 bp, synthetic construct; identical to SEQ ID NO: 24199
  source 1..120: mol_type = other DNA

SEQ ID NO: 55433 - DNA, 120 bp, synthetic construct; identical to SEQ ID NO: 24200
  source 1..120: mol_type = other DNA

SEQ ID NO: 55434 - DNA, 120 bp, synthetic construct; identical to SEQ ID NO: 24201
  source 1..120: mol_type = other DNA

SEQ ID NO: 55435 - DNA, 120 bp, synthetic construct; identical to SEQ ID NO: 25046
  source 1..120: mol_type = other DNA

SEQ ID NO: 55436 - DNA, 120 bp, synthetic construct; identical to SEQ ID NO: 25047
  source 1..120: mol_type = other DNA

SEQ ID NO: 55437 - DNA, 120 bp, synthetic construct; identical to SEQ ID NO: 25048
  source 1..120: mol_type = other DNA

SEQ ID NO: 55438 - DNA, 120 bp, synthetic construct; identical to SEQ ID NO: 25049
  source 1..120: mol_type = other DNA

SEQ ID NO: 55439 - DNA, 120 bp, synthetic construct
  source 1..120: mol_type = other DNA
atttatctacctcacctgaaaaccagaattcaaataatcctcttttttttttaataattttttttttattattatacttcaagttttagggtacatgtgcacaatgtgcaggttagttac

SEQ ID NO: 55440 - DNA, 120 bp, synthetic construct
  source 1..120: mol_type = other DNA
tgtagattctggatattagccctttgtcagatgagtaggttgtgaaaattttctcccattttctgggtttcctgttcactctgatggtagtttcttttgctgtgcagaagctctttagtt

SEQ ID NO: 55441 - DNA, 120 bp, synthetic construct
  source 1..120: mol_type = other DNA
gttgcttatcagcttaaggagattttgggctgagacgatggggttttctagatatacaatcatgtcatctgcaaacagggacagtttgacttcctcttttcctaactgaataccctttat

SEQ ID NO: 55442 - DNA, 120 bp, synthetic construct
  source 1..120: mol_type = other DNA
agagtgtatgtgccgaggaatttatccatttcttctagattttctagtttatttgcgtagaggtgtttgtagtattctctgatggtagtttgtatttctgtgggatcggtggtgatatcc

SEQ ID NO: 55443 - DNA, 120 bp, synthetic construct
  source 1..120: mol_type = other DNA
agactaggaagaaactgcatcaactaacgagcaaaatcaccagctaacatcataatgacaggatcaaattcacacataacaatattaacttaaaatgtaaatggactaaatgctccaatt

SEQ ID NO: 55444 - DNA, 120 bp, synthetic construct; identical to SEQ ID NO: 12158
  source 1..120: mol_type = other DNA

SEQ ID NO: 55445 - DNA, 120 bp, synthetic construct; identical to SEQ ID NO: 12159
  source 1..120: mol_type = other DNA

SEQ ID NO: 55446 - DNA, 120 bp, synthetic construct; identical to SEQ ID NO: 12160
  source 1..120: mol_type = other DNA

SEQ ID NO: 55447 - DNA, 120 bp, synthetic construct
  source 1..120: mol_type = other DNA
ggcaaagaatatgaacagacacttctcaaaagaagacatttatgagaacaacaaacatatgaagaaaagctcatcatcgagttcatgtcctttgtagggacatggatgaaattggaaatc

SEQ ID NO: 55448 - DNA, 120 bp, synthetic construct
  source 1..120: mol_type = other DNA
gaaatacctaatgtacgtgacgggttgacaggtgcagcaaaccaccatggcacatgtatacctaggtacaaatctgcacgatctgcacatctatcccagaacttaaagtataatcttaaa

SEQ ID NO: 55449 - DNA, 120 bp, synthetic construct; identical to SEQ ID NO: 12162
  source 1..120: mol_type = other DNA

SEQ ID NO: 55450 - DNA, 120 bp, synthetic construct
  source 1..120: mol_type = other DNA
gaccacaggaccacaggaccacaggaccgaggtgaaattaaaattgctaatgaagttgagacagggatttgagatcaaccagtctgaccaaaatttattaggcgggaatttcctcttcct

SEQ ID NO: 55451 - DNA, 120 bp, synthetic construct; identical to SEQ ID NO: 12163
  source 1..120: mol_type = other DNA

SEQ ID NO: 55452 - DNA, 120 bp, synthetic construct
  source 1..120: mol_type = other DNA
ttactcattttccctgatttcaaggaaaccatagactggtcaacaagttaggtatataaacagatcattaaaatacaatgtgggccaggtgcagtggctcatgcctgtaatcccagcact

SEQ ID NO: 55453 - DNA, 120 bp, synthetic construct
  source 1..120: mol_type = other DNA
tgggtacacacccaaaggattataaatcatgctgctataaagacacgtgcacacgtatgtttattgtggcactattcacaatagcaaagacttggaaccaacccaagtgtccatcaatga

SEQ ID NO: 55454 - DNA, 120 bp, synthetic construct
  source 1..120: mol_type = other DNA
ggtctgtggcttcatttttgaagtcagcgagaccaagaacccaccagaaggaataaactctagtcacattttggcaacccagatgggacacattttggcgaccatgaagggacacatttt

SEQ ID NO: 55455 - DNA, 120 bp, synthetic construct; identical to SEQ ID NO: 12157
  source 1..120: mol_type = other DNA

SEQ ID NO: 55456 - DNA, 120 bp, synthetic construct; identical to SEQ ID NO: 12165
  source 1..120: mol_type = other DNA

SEQ ID NO: 55457 - DNA, 120 bp, synthetic construct
  source 1..120: mol_type = other DNA
aatcatgagtgaactcccattcacaattgcttcaaagagaataaaatacctaggaatccaacttccaggggatatgaaggacctcttcaaggagaactacaaaccactgctcaatgaaat

SEQ ID NO: 55458 - DNA, 120 bp, synthetic construct
  source 1..120: mol_type = other DNA
ctactcatctgacaaagggctaatatccagaatctacaaagaactcaaacaaatttacaagaaaaaaacaaacaaccccatcaaaaagtgggcaaacgataggaacagacacttctcaaa

SEQ ID NO: 55459 - DNA, 120 bp, synthetic construct
  source 1..120: mol_type = other DNA
acatgtaccctaaaacttaaagtataataataattaaaaaaaaaaaaagaaaaagagggaattctcccaaactcattttatgaggctagcatcatcctgataccaaagcctggcagagac

SEQ ID NO: 55460 - DNA, 120 bp, synthetic construct; identical to SEQ ID NO: 12167
  source 1..120: mol_type = other DNA

SEQ ID NO: 55461 - DNA, 120 bp, synthetic construct; identical to SEQ ID NO: 12168
  source 1..120: mol_type = other DNA

SEQ ID NO: 55462 - DNA, 120 bp, synthetic construct
  source 1..120: mol_type = other DNA
ccgccccccgttcctcccgacccctccacccgccctccctctcccaccgcccctcctcctcctccctaggcattaccattcaggacataggcatgggcaaagacttcatgtctaaaacac

SEQ ID NO: 55463 - DNA, 120 bp, synthetic construct
  source 1..120: mol_type = other DNA
gggaatgtcacactctggggactgttgtggggtggggagaggggggagggatagcattgggagatatacctaatgctagatgacgagttagtgggtgcagcgcaccagcatggcacatgt

SEQ ID NO: 55464 - DNA, 120 bp, synthetic construct
  source 1..120: mol_type = other DNA
ctattcaacacagtgttggaattctggccagggcaatcaggcaggtgaaagaaacaaagtgtattcaaataggaagagaggaagtcaaattgtctccctttgcagatgacatgattgtat

SEQ ID NO: 55465 - DNA, 120 bp, synthetic construct; identical to SEQ ID NO: 55453
  source 1..120: mol_type = other DNA

SEQ ID NO: 55466 - DNA, 120 bp, synthetic construct
  source 1..120: mol_type = other DNA
aagaattcaggaccaaaagaaataatttttaggtgactgaaaaacggtgtgcttaaagaagaaaaagaagttggggagggaggagccaagatggccgaataggaacagctccggtctaca

SEQ ID NO: 55467 - DNA, 120 bp, synthetic construct
  source 1..120: mol_type = other DNA
cctctcctcctccaaaggaacgcagttcctcaccagcaacggaacaaagctggatggagaattattttgacgagctgagagaagaaggcttcagatgatcaaattactctgagctacggg

SEQ ID NO: 55468 - DNA, 120 bp, synthetic construct
  source 1..120: mol_type = other DNA
aaatcaccagctaacatcataatgacaggatcaaattcacacataacaatattaactttaaatataaatggactaaattctgcaattaaaagacacagacgggcaagttggataaagagc

SEQ ID NO: 55469 - DNA, 120 bp, synthetic construct
  source 1..120: mol_type = other DNA
gcctacaagagaaagcaggaaagatccaaaattgacaccctaacatcacaattaaaagaactagaaaagcaagagcaaacacattcaaaagctagcagaaggcaagaaataactaaaatc

SEQ ID NO: 55470 - DNA, 120 bp, synthetic construct
  source 1..120: mol_type = other DNA
caagacaagaatgccctctctcaccgctcctattcaacatagtgttggaagttctggccagggcaatcaggcaggagaaggaaataaagggtattcaattaggaaaagaggaagtcaaat

SEQ ID NO: 55471 - DNA, 120 bp, synthetic construct
  source 1..120: mol_type = other DNA
acataggcgtgggcaaggacttcatgtccaaaacaccaaaagcaatggcaacaaaagccaaaattgacaaatgggatctaattaaactaaagagcttctgcacagcaaaagaaactacca

SEQ ID NO: 55472 - DNA, 120 bp, synthetic construct; identical to SEQ ID NO: 12166
  source 1..120: mol_type = other DNA

SEQ ID NO: 55473 - DNA, 120 bp, synthetic construct
  source 1..120: mol_type = other DNA
tcttgtttttgtcaggtttgtcaaagatcagatagttgtagatatgtggcattatttctgagggctctgttctgttccattggtctatatctctgttttgataccagtaccacgctgttt

SEQ ID NO: 55474 - DNA, 120 bp, synthetic construct
  source 1..120: mol_type = other DNA
gtgagtttgtcatagatagctcttattattttgagatacggcccatcaatacctaatttattgagagtttttagcatgaagggttgttgaattttgtcaaaggccttttctgcatctatt

SEQ ID NO: 55475 - DNA, 120 bp, synthetic construct; identical to SEQ ID NO: 12153
  source 1..120: mol_type = other DNA

SEQ ID NO: 55476 - DNA, 120 bp, synthetic construct
  source 1..120: mol_type = other DNA
tatatatagagagagtttctctctataatcactctatgtatctatagaatttatatagagaggaataggaacagctccggtctacagctcccagcgtgagctacgcagaagacgggtgat

SEQ ID NO: 55477 - DNA, 120 bp, synthetic construct
  source 1..120: mol_type = other DNA
accaaaaacccatctgtacatcaccatcaccatcatcaaagaccaaaagtagataaaaccacaacgatggggaaaaaacagaacagaaaaactggaaactctaaaaagcagagcgcctct

SEQ ID NO: 55478 - DNA, 120 bp, synthetic construct
  source 1..120: mol_type = other DNA
agcaggcctgccctaaaagagctcctgaaggaagcactaaacatggaaaggaacaaccggaaccagccactgcaaaatcatgccaaaatgtaaagaccatcgagactaggaagaaactgc

SEQ ID NO: 55479 - DNA, 120 bp, synthetic construct
  source 1..120: mol_type = other DNA
accctaacatcacaattaaaagaactagaaaagcaagagcaaacacattcaaaagctagcagaaggcaagaaataactaaaatcagagcagaactgaaggtaatagagacaccaaaaacc

SEQ ID NO: 55480 - DNA, 120 bp, synthetic construct
  source 1..120: mol_type = other DNA
ataaacagagccaaagacaaaaaccacatgattatctcaatagatgcagaaaaggcctttgacaaaattcaacaacccttcatgctaaaaactctcaataaattaggtattgatgggacg

SEQ ID NO: 55481 - DNA, 120 bp, synthetic construct
  source 1..120: mol_type = other DNA
ggaacagaacagagccctgagaaataacaccgcatatctacaactatctgatctttgacaaacctgagaaaaacaagcaatggggaaaggattccctatttaataaatggtgctgggaaa

SEQ ID NO: 55482 - DNA, 120 bp, synthetic construct
  source 1..120: mol_type = other DNA
aatgtggcacatatacaccatggaatactatgcagccataaaaaatgattagttcatgtcctttgtagggacatggatgaaattggaaatcatcattctcagtaaactatcgcaagaaca

SEQ ID NO: 55483 - DNA, 120 bp, synthetic construct
  source 1..120: mol_type = other DNA
atttagacgaatgtataactagaataaccaatacagagaagtgcttaaaggagctgatggagctgaaagccaaggctcgagaactacgtgaagaatgcagaaacctcaggagccaatgtg

SEQ ID NO: 55484 - DNA, 120 bp, synthetic construct
  source 1..120: mol_type = other DNA
accttaactgtaagtggactaaatgctccaattaaaagacacagactggcaaattggataaagagtcaagacccatcagtgtgctgtattcaggaaacccatctcatgtgcagagacaca

SEQ ID NO: 55485 - DNA, 120 bp, synthetic construct
  source 1..120: mol_type = other DNA
gaaatagagacacaaaaaacccttcaaaaaattaatgaatccaggagttggttttttgaaaggatcaacaaaattgatagaccactagcaagactaataaagaagaaaagagagaagaat

SEQ ID NO: 55486 - DNA, 120 bp, synthetic construct
  source 1..120: mol_type = other DNA
tactgaatgggcaaaaactggaagcattccctttgaaaactggcacaagacagggatgccctctctcaccactcctgttcaacacagtgttggaagttctggccagggcaattaggcagg

SEQ ID NO: 55487 - DNA, 120 bp, synthetic construct
  source 1..120: mol_type = other DNA
gctagccatatgtagaaagctgaaactggatctcttccttacaccttacacaaaagttaattcaagatggattaaagacttaaatgttagacctaaaaccataaaaaccctagaagaaaa

SEQ ID NO: 55488 - DNA, 120 bp, synthetic construct
  source 1..120: mol_type = other DNA
gaacaatgagaacacatggacacaggaaggggaacatcacactctggggactgttgtggggtggggggaggggggagggatagctttcggagatatacctaatgctaactgacgagttaa

SEQ ID NO: 55489 - DNA, 120 bp, synthetic construct
  source 1..120: mol_type = other DNA
atatctcctaaagctatccctcccccctccccacaccccacaacagtccccagagtgtgatgttccccttcctgtgtccatgtgttctcattgttcaattcccacctatgagtgagaata

SEQ ID NO: 55490 - DNA, 120 bp, synthetic construct
  source 1..120: mol_type = other DNA
aagaacattccatgctcatgggtaggaagaatcaatattgtgaaaatggccataccgcccaaggtaatttatagattcaatgccatccccatcaagctaccaatgactttcttcacagaa

SEQ ID NO: 55491 - DNA, 120 bp, synthetic construct; identical to SEQ ID NO: 12156
  source 1..120: mol_type = other DNA

SEQ ID NO: 55492 - DNA, 120 bp, synthetic construct
  source 1..120: mol_type = other DNA
tcccaccaacagtgtataagtgttcctatctctccacatcctctccagcacctgttgtttcctgactttttaatgattgccattctaactggtgtgagatggtatctcattgtggttttg

SEQ ID NO: 55493 - DNA, 120 bp, synthetic construct
  source 1..120: mol_type = other DNA
aaattaccttgggcagtatggccattttcatgatattgattcttcctacgcatgagcatggaatgttcttccatttgtttgtatcctcttttatttccttgagcagtggtttgtagttct

SEQ ID NO: 55494 - DNA, 120 bp, synthetic construct
  source 1..120: mol_type = other DNA
gtttgctgagaatgacggtttccagcttcatccatgtccctacacaggacatgaactcatccttttttatggctgcatagtattccatggtgtatatgtgccacattttcttaatccagt

SEQ ID NO: 55495 - DNA, 120 bp, synthetic construct
  source 1..120: mol_type = other DNA
tgaatctataaattaccctgggcagtatggccattttcatgatattgattcctcctatccacgagcatggaatgtccttctatttgtttgtatcctcttttatttcattgagcagtgata

SEQ ID NO: 55496 - DNA, 120 bp, synthetic construct
  source 1..120: mol_type = other DNA
aaagtgctggaattataggcatgagccaccatgcccagccaagggcctacctttttaacaaaaaattgctgattgagatataattcacatgctacaatgcactcattgaaagggtacaac

SEQ ID NO: 55497 - DNA, 120 bp, synthetic construct
  source 1..120: mol_type = other DNA
tttaatttgcatataatttgaccctgcagtttcacttctaggaatctatgcaacagaaatgctcaaacaaatatacagtgcaggccgggcatggtggctcatgcctgtaatcctagcact

SEQ ID NO: 55498 - DNA, 120 bp, synthetic construct
  source 1..120: mol_type = other DNA
atttttttttgttgttttattttgttttgttttgttttcgagatggagtctcagtctgtcacccaggctggagtacaatggcacaatcttggctcattgcaacctctgccgcctgggctc

SEQ ID NO: 55499 - DNA, 120 bp, synthetic construct
  source 1..120: mol_type = other DNA
cccccatcctttatcctactgggactcagggccctaacccagacaactcagatgctactgggacatatctgcacccccaatatattagggcttaaaacaagtaaaaggcctggggaatgg

SEQ ID NO: 55500 - DNA, 120 bp, synthetic construct
  source 1..120: mol_type = other DNA
gttctcccctgcagtccagccccacctgataggcagcccatgtttcttcaagagtttaaggaaccacagagccttgttggccccccaaattaatatatgctaaatcatccctttctatat

SEQ ID NO: 55501 - DNA, 120 bp, synthetic construct; identical to SEQ ID NO: 10875
  source 1..120: mol_type = other DNA

SEQ ID NO: 55502 - DNA, 120 bp, synthetic construct; identical to SEQ ID NO: 18759
  source 1..120: mol_type = other DNA

SEQ ID NO: 55503 - DNA, 120 bp, synthetic construct; identical to SEQ ID NO: 18760
  source 1..120: mol_type = other DNA

SEQ ID NO: 55504 - DNA, 120 bp, synthetic construct; identical to SEQ ID NO: 18761
  source 1..120: mol_type = other DNA

SEQ ID NO: 55505 - DNA, 120 bp, synthetic construct
  source 1..120: mol_type = other DNA
tcaaaaaacacatgaaaaaatgctcaccatcactggtcatcagagaaatgcaaattaaaaccacaatgagataccatctcacaccagttagaatggcaatcattaaaaagtcaggaaaca

SEQ ID NO: 55506 - DNA, 120 bp, synthetic construct; identical to SEQ ID NO: 4291
  source 1..120: mol_type = other DNA

SEQ ID NO: 55507 - DNA, 120 bp, synthetic construct; identical to SEQ ID NO: 18763
  source 1..120: mol_type = other DNA

SEQ ID NO: 55508 - DNA, 120 bp, synthetic construct; identical to SEQ ID NO: 18764
  source 1..120: mol_type = other DNA

SEQ ID NO: 55509 - DNA, 120 bp, synthetic construct
  source 1..120: mol_type = other DNA
gtccagcccaccagaaccagacttatgcctctagcctccaaactgggagaaaataaatttctgttgtttaggacatcagtttgttgtattttgttatggcagcccaaactgactaatatt

SEQ ID NO: 55510 - DNA, 120 bp, synthetic construct
  source 1..120: mol_type = other DNA
ttccttccttccttccttccttccttccttccttccttctttccttcctttttttctttcttttgagacagggtctcactctgatacccaggctggagtgcagtggcacaatctcagctc

SEQ ID NO: 55511 - DNA, 120 bp, synthetic construct
  source 1..120: mol_type = other DNA
attacaggcatgagccaccgtgcctggccagaaacattctttttattcgtttttattataattgtagtaagggccctggtaggggatttgaactgtttctttccacagtgtggaatgatg

SEQ ID NO: 55512 - DNA, 120 bp, synthetic construct; identical to SEQ ID NO: 18750
  source 1..120: mol_type = other DNA

SEQ ID NO: 55513 - DNA, 120 bp, synthetic construct; identical to SEQ ID NO: 4288
  source 1..120: mol_type = other DNA

SEQ ID NO: 55514 - DNA, 120 bp, synthetic construct
  source 1..120: mol_type = other DNA
gcctcagcctcccaaagtgctaggattacaggtgtgctccaccgtacccagccagggttagctgttctatatgcattgtctcattccatctctacaacacgattaaatatgagaaaactg

SEQ ID NO: 55515 - DNA, 120 bp, synthetic construct; identical to SEQ ID NO: 18752
  source 1..120: mol_type = other DNA

SEQ ID NO: 55516 - DNA, 120 bp, synthetic construct
  source 1..120: mol_type = other DNA
aagcctggcagagagacacaaccaaaaaagagaattttagaccaatatccttgatgaacattgatgcaaaaatcctcaataaaatactggcaaaacgaatccagcagcacatcaaaaagc

SEQ ID NO: 55517 - DNA, 120 bp, synthetic construct
  source 1..120: mol_type = other DNA
cgcatcgccaagtcaatcctaagccaaaagaacaaagctggaggcatcacactatctgacttcaaactatactacaaggctacagtaaccaaaacagcatggtactggtaccaaaacaga

SEQ ID NO: 55518 - DNA, 120 bp, synthetic construct
  source 1..120: mol_type = other DNA
ggcgattcctcagggatctagaaccagaaataccatttgacccagccatccaattactgggtatatacccaaaggactataaatcatgctgctataaagacacatgcacacgtatgttta

SEQ ID NO: 55519 - DNA, 120 bp, synthetic construct; identical to SEQ ID NO: 18753
  source 1..120: mol_type = other DNA

SEQ ID NO: 55520 - DNA, 120 bp, synthetic construct
  source 1..120: mol_type = other DNA
aaatcaccaccaccaccaccacatcaccatcaccaccaccaccatcaccatcaccaccacaatcaccaccaccacatcaccatcaccaccaccaccaccaccacatcacatcaccaccac

SEQ ID NO: 55521 - DNA, 120 bp, synthetic construct
  source 1..120: mol_type = other DNA
tttctctccttccttccttccctttctttctctccttcctttctctccttccttcctttctcttcttctctccttttctttctctctttcttttctttctctccttccttctttccttcc

SEQ ID NO: 55522 - DNA, 120 bp, synthetic construct; identical to SEQ ID NO: 18757
  source 1..120: mol_type = other DNA

SEQ ID NO: 55523 - DNA, 120 bp, synthetic construct
  source 1..120: mol_type = other DNA
agctggaaaccatcattctcagaaaactatcacaaggacaaaaaaaccaaacaccacatgttctcactcataggtgggaatcgaacaatgagaacacatggacacaggaaggggaacatc

SEQ ID NO: 55524 - DNA, 120 bp, synthetic construct; identical to SEQ ID NO: 18758
  source 1..120: mol_type = other DNA

SEQ ID NO: 55525 - DNA, 120 bp, synthetic construct; identical to SEQ ID NO: 30975
  source 1..120: mol_type = other DNA

SEQ ID NO: 55526 - DNA, 120 bp, synthetic construct; identical to SEQ ID NO: 30976
  source 1..120: mol_type = other DNA

SEQ ID NO: 55527 - DNA, 120 bp, synthetic construct; identical to SEQ ID NO: 30829
  source 1..120: mol_type = other DNA

SEQ ID NO: 55528 - DNA, 120 bp, synthetic construct; identical to SEQ ID NO: 30830
  source 1..120: mol_type = other DNA

SEQ ID NO: 55529 - DNA, 120 bp, synthetic construct; identical to SEQ ID NO: 30831
  source 1..120: mol_type = other DNA

SEQ ID NO: 55530 - DNA, 120 bp, synthetic construct; identical to SEQ ID NO: 30832
  source 1..120: mol_type = other DNA

SEQ ID NO: 55531 - DNA, 120 bp, synthetic construct; identical to SEQ ID NO: 30833
  source 1..120: mol_type = other DNA

SEQ ID NO: 55532 - DNA, 120 bp, synthetic construct
  source 1..120: mol_type = other DNA
tcgcccagtgctatccctcccccctccccccactccacaacagtccccagagtgtgatattccccttcctgtgtccatgtgatctcattgttcaattcccacctatgagtgagaatatgc

SEQ ID NO: 55533 - DNA, 120 bp, synthetic construct
  source 1..120: mol_type = other DNA
gtccttgcctatgcctatgtcctgaatggcaatgcctaggttttcttctagggtttttatggttttaggtctaacgtttaagtctttaatccatcttgaattgatttttgtataaggtgt

SEQ ID NO: 55534 - DNA, 120 bp, synthetic construct
  source 1..120: mol_type = other DNA
cttttctgcatctattaagataatcatgtggtttttgtctttggttctgtttatatgctggattacatttattgatttgcgtatattgaaccagccttgcatcccagggatgaagcccac

SEQ ID NO: 55535 - DNA, 120 bp, synthetic construct
  source 1..120: mol_type = other DNA
tttggatctttcctgctttctcttgtgggcatttagtgctataaatttacctctacacactgctttgaatgcgtcccagagattctggtatgttttgtctttgttctcttggtttcaaag

SEQ ID NO: 55536 - DNA, 120 bp, synthetic construct
  source 1..120: mol_type = other DNA
atgtttagcgcttccttcaggagctcttttagggcaggcctggtggtgacaaaatctctcagcatttgcttgtctgtaaagtattttatttctccttcacttaggaagcttagtttggct

SEQ ID NO: 55537 - DNA, 120 bp, synthetic construct; identical to SEQ ID NO: 30834
  source 1..120: mol_type = other DNA

SEQ ID NO: 55538 - DNA, 120 bp, synthetic construct; identical to SEQ ID NO: 30835
  source 1..120: mol_type = other DNA

SEQ ID NO: 55539 - DNA, 120 bp, synthetic construct; identical to SEQ ID NO: 30836
  source 1..120: mol_type = other DNA

SEQ ID NO: 55540 - DNA, 120 bp, synthetic construct; identical to SEQ ID NO: 30837
  source 1..120: mol_type = other DNA

SEQ ID NO: 55541 - DNA, 120 bp, synthetic construct; identical to SEQ ID NO: 30838
  source 1..120: mol_type = other DNA

SEQ ID NO: 55542 - DNA, 120 bp, synthetic construct; identical to SEQ ID NO: 30839
  source 1..120: mol_type = other DNA

SEQ ID NO: 55543 - DNA, 120 bp, synthetic construct; identical to SEQ ID NO: 30840
  source 1..120: mol_type = other DNA

SEQ ID NO: 55544 - DNA, 120 bp, synthetic construct; identical to SEQ ID NO: 30841
  source 1..120: mol_type = other DNA

SEQ ID NO: 55545 - DNA, 120 bp, synthetic construct; identical to SEQ ID NO: 30843
  source 1..120: mol_type = other DNA

SEQ ID NO: 55546 - DNA, 120 bp, synthetic construct; identical to SEQ ID NO: 30842
  source 1..120: mol_type = other DNA

SEQ ID NO: 55547 - DNA, 120 bp, synthetic construct; identical to SEQ ID NO: 30844
  source 1..120: mol_type = other DNA

SEQ ID NO: 55548 - DNA, 120 bp, synthetic construct; identical to SEQ ID NO: 30845
  source 1..120: mol_type = other DNA

SEQ ID NO: 55549 - DNA, 120 bp, synthetic construct; identical to SEQ ID NO: 30846
  source 1..120: mol_type = other DNA

SEQ ID NO: 55550 - DNA, 120 bp, synthetic construct; identical to SEQ ID NO: 30847
  source 1..120: mol_type = other DNA

SEQ ID NO: 55551 - DNA, 120 bp, synthetic construct; identical to SEQ ID NO: 30848
  source 1..120: mol_type = other DNA

SEQ ID NO: 55552 - DNA, 120 bp, synthetic construct; identical to SEQ ID NO: 30849
  source 1..120: mol_type = other DNA

SEQ ID NO: 55553 - DNA, 120 bp, synthetic construct; identical to SEQ ID NO: 30850
  source 1..120: mol_type = other DNA

SEQ ID NO: 55554 - DNA, 120 bp, synthetic construct; identical to SEQ ID NO: 30851
  source 1..120: mol_type = other DNA

SEQ ID NO: 55555 - DNA, 120 bp, synthetic construct
  source 1..120: mol_type = other DNA
atgtacacaatggaatactatttagccttaaaaaagaatgaaatcctgtcatttgtggaaacatggatggagctgggggacaccgtgacaaataagccaggtgcagaaagacaagcacag

SEQ ID NO: 55556 - DNA, 120 bp, synthetic construct; identical to SEQ ID NO: 30852
  source 1..120: mol_type = other DNA

SEQ ID NO: 55557 - DNA, 120 bp, synthetic construct; identical to SEQ ID NO: 30853
  source 1..120: mol_type = other DNA

SEQ ID NO: 55558 - DNA, 120 bp, synthetic construct; identical to SEQ ID NO: 30854
  source 1..120: mol_type = other DNA

SEQ ID NO: 55559 - DNA, 120 bp, synthetic construct; identical to SEQ ID NO: 30855
  source 1..120: mol_type = other DNA

SEQ ID NO: 55560 - DNA, 120 bp, synthetic construct; identical to SEQ ID NO: 30856
  source 1..120: mol_type = other DNA

SEQ ID NO: 55561 - DNA, 120 bp, synthetic construct; identical to SEQ ID NO: 30857
  source 1..120: mol_type = other DNA

SEQ ID NO: 55562 - DNA, 120 bp, synthetic construct; identical to SEQ ID NO: 30858
  source 1..120: mol_type = other DNA

SEQ ID NO: 55563 - DNA, 120 bp, synthetic construct; identical to SEQ ID NO: 30863
  source 1..120: mol_type = other DNA

SEQ ID NO: 55564 - DNA, 120 bp, synthetic construct; identical to SEQ ID NO: 30864
  source 1..120: mol_type = other DNA

SEQ ID NO: 55565 - DNA, 120 bp, synthetic construct; identical to SEQ ID NO: 30859
  source 1..120: mol_type = other DNA

SEQ ID NO: 55566 - DNA, 120 bp, synthetic construct; identical to SEQ ID NO: 30860
  source 1..120: mol_type = other DNA

SEQ ID NO: 55567 - DNA, 120 bp, synthetic construct
  source 1..120: mol_type = other DNA
ttccaaggcagaagaatttttcttagtacagaacaaaatggagtcccctatgtctacttctttctacacagacacagcatcaatctgatttctctatcttttcaccacatttcccccttt

SEQ ID NO: 55568 - DNA, 120 bp, synthetic construct; identical to SEQ ID NO: 30865
  source 1..120: mol_type = other DNA

SEQ ID NO: 55569 - DNA, 120 bp, synthetic construct; identical to SEQ ID NO: 30866
  source 1..120: mol_type = other DNA

SEQ ID NO: 55570 - DNA, 120 bp, synthetic construct; identical to SEQ ID NO: 30867
  source 1..120: mol_type = other DNA

SEQ ID NO: 55571 - DNA, 120 bp, synthetic construct; identical to SEQ ID NO: 30868
  source 1..120: mol_type = other DNA

SEQ ID NO: 55572 - DNA, 120 bp, synthetic construct; identical to SEQ ID NO: 30869
  source 1..120: mol_type = other DNA

SEQ ID NO: 55573 - DNA, 120 bp, synthetic construct; identical to SEQ ID NO: 30870
  source 1..120: mol_type = other DNA

SEQ ID NO: 55574 - DNA, 120 bp, synthetic construct; identical to SEQ ID NO: 30871
  source 1..120: mol_type = other DNA

SEQ ID NO: 55575 - DNA, 120 bp, synthetic construct
  source 1..120: mol_type = other DNA
gacggtgcctccactgtgtgtgtgaccaggacagacggcgcctccactgcgtgtgtgaccaggacagacggtgcctccactgtgtgagaccaggacagacgatgcctccactgtgtgtat

SEQ ID NO: 55576 - DNA, 120 bp, synthetic construct
  source 1..120: mol_type = other DNA
aggacagacgcctccactgtgtgagaccaggacagacgatgcctccactgtgtgtatgaccaggacagacggcgcctccactgtgtgtgaccaggacagacggcgcctccactgtgtgtg

SEQ ID NO: 55577 - DNA, 120 bp, synthetic construct
  source 1..120: mol_type = other DNA
gtgaccaggacagacgatgcctccactgtgtgtgtgaccaggacagacgatgcctccactgtgtgtgtgaccaggacagacgatgcctccactgtgtgtgtgaccaggacagacgatgcc

SEQ ID NO: 55578 - DNA, 120 bp, synthetic construct
  source 1..120: mol_type = other DNA
cactgtgtgtgaccaggacagacggcgcctccactgtgtgtgtgaccaggacagacgacgcctccactgtgtgtgtgaccgggacagacggcgcctccactgtgtgtgtgaccaggacag

SEQ ID NO: 55579 - DNA, 120 bp, synthetic construct; identical to SEQ ID NO: 30872
  source 1..120: mol_type = other DNA

SEQ ID NO: 55580 - DNA, 120 bp, synthetic construct
  source 1..120: mol_type = other DNA
gggcattcccgtttcaatgtctgtctgtgttgatattttcaaataatgcttggtctttccgtctgcaagtgctcaaactttatatatgtgtgtgtgtgtgtgtgtgtgtgtgtgtgtgtg

SEQ ID NO: 55581 - DNA, 120 bp, synthetic construct; identical to SEQ ID NO: 30873
  source 1..120: mol_type = other DNA

SEQ ID NO: 55582 - DNA, 120 bp, synthetic construct; identical to SEQ ID NO: 30874
  source 1..120: mol_type = other DNA

SEQ ID NO: 55583 - DNA, 120 bp, synthetic construct; identical to SEQ ID NO: 30875
  source 1..120: mol_type = other DNA

SEQ ID NO: 55584 - DNA, 120 bp, synthetic construct; identical to SEQ ID NO: 30878
  source 1..120: mol_type = other DNA

SEQ ID NO: 55585 - DNA, 120 bp, synthetic construct; identical to SEQ ID NO: 30879
  source 1..120: mol_type = other DNA

SEQ ID NO: 55586 - DNA, 120 bp, synthetic construct; identical to SEQ ID NO: 30880
  source 1..120: mol_type = other DNA

SEQ ID NO: 55587 - DNA, 120 bp, synthetic construct; identical to SEQ ID NO: 30881
  source 1..120: mol_type = other DNA

SEQ ID NO: 55588 - DNA, 120 bp, synthetic construct; identical to SEQ ID NO: 30882
  source 1..120: mol_type = other DNA

SEQ ID NO: 55589 - DNA, 120 bp, synthetic construct; identical to SEQ ID NO: 30861
  source 1..120: mol_type = other DNA

SEQ ID NO: 55590 - DNA, 120 bp, synthetic construct; identical to SEQ ID NO: 30862
  source 1..120: mol_type = other DNA

SEQ ID NO: 55591 - DNA, 120 bp, synthetic construct; identical to SEQ ID NO: 30883
  source 1..120: mol_type = other DNA

SEQ ID NO: 55592 - DNA, 120 bp, synthetic construct; identical to SEQ ID NO: 30884
  source 1..120: mol_type = other DNA

SEQ ID NO: 55593 - DNA, 120 bp, synthetic construct
  source 1..120: mol_type = other DNA
tttctaagtcttttaaaaataactgaattgtaatttgcatgcagtgaaatgtcgctgttgggtgttgggttcgatgagctctgaggaacgtattcctcagaaagcctctcttgccgctcc

SEQ ID NO: 55594 - DNA, 120 bp, synthetic construct
  source 1..120: mol_type = other DNA
tacccggaccccctgcacccccatactcggagttcctgttcttctctcccaccttgcccagaccccctgcacccccatactcggagttcctgttcttctctcccaccttgcccagacccc

SEQ ID NO: 55595 - DNA, 120 bp, synthetic construct
  source 1..120: mol_type = other DNA
ccaccttgcccagaccccctgcacccccatactcggagttcctgttcttctctccctccttgcccagaccccctgcacccccatactcggagttcctgttcttctctcccaccttacccg

SEQ ID NO: 55596 - DNA, 120 bp, synthetic construct; identical to SEQ ID NO: 55595
  source 1..120: mol_type = other DNA

SEQ ID NO: 55597 - DNA, 120 bp, synthetic construct
  source 1..120: mol_type = other DNA
tttctagggcctttgataatacaccagttagctgtgtcgtttcagctacttagaggcttgactctaatagcagatcccggctggtaattttccctttttggtttgtaattgtggagtaga

SEQ ID NO: 55598 - DNA, 120 bp, synthetic construct; identical to SEQ ID NO: 30885
  source 1..120: mol_type = other DNA

SEQ ID NO: 55599 - DNA, 120 bp, synthetic construct; identical to SEQ ID NO: 30886
  source 1..120: mol_type = other DNA

SEQ ID NO: 55600 - DNA, 120 bp, synthetic construct
  source 1..120: mol_type = other DNA
taaacgtgttctaggtgtgtttggggttaattggacctgttttcatgctgttcaccatggctgactttccatggttgctgccaaaccaggactgttgattatttcccaagctctaagaag

SEQ ID NO: 55601 - DNA, 120 bp, synthetic construct
  source 1..120: mol_type = other DNA
gcaggccttcaccctatgtggcatggagaggtcccctccagtgtgagacccacctccctgtgctcaggagagtcaagctgggagcccagggcaggccttcaccctctgtggcatgcagag

SEQ ID NO: 55602 - DNA, 120 bp, synthetic construct
  source 1..120: mol_type = other DNA
ggcgtcctctgcgtatgcgtcacagaaactcctccgcacaccagtttgtttccaaaaatatgtttacaatttggaaactaacttggaagtgaatcgttttggatgcaaaatggcaaatga

SEQ ID NO: 55603 - DNA, 120 bp, synthetic construct; identical to SEQ ID NO: 30892
  source 1..120: mol_type = other DNA

SEQ ID NO: 55604 - DNA, 120 bp, synthetic construct; identical to SEQ ID NO: 30893
  source 1..120: mol_type = other DNA

SEQ ID NO: 55605 - DNA, 120 bp, synthetic construct
  source 1..120: mol_type = other DNA
ttcatgtcctttgcccactttttgatggggttgtttgtttttttctcgtaaatttgtttgagttcattgtagattctggatattagccctttgtcagatgagtaggttgcgaaaattttc

SEQ ID NO: 55606 - DNA, 120 bp, synthetic construct
  source 1..120: mol_type = other DNA
ttttgtacattgattttgtatcctgagactttgctgaagttgcttatcagcttaaggagattttgggctgagacagtgggattttctagatatacaatcatgtcatctgcaaacagagac

SEQ ID NO: 55607 - DNA, 120 bp, synthetic construct
  source 1..120: mol_type = other DNA
tgtttgtaatattctctgatggtagtttgtatttctgtgggatcggtggtgatatcccctttatcattttttattgcatctatttgattcttttctctttttttctttattagtcttgct

SEQ ID NO: 55608 - DNA, 120 bp, synthetic construct
  source 1..120: mol_type = other DNA
acaaggattgcaacccctgcctttttttgttttccattggcttggtagatcttcctccatccttttattttgggcttatgtgtgtctctgcacgtgagatgggtttcctgaatacagcac

SEQ ID NO: 55609 - DNA, 120 bp, synthetic construct; identical to SEQ ID NO: 30894
  source 1..120: mol_type = other DNA

SEQ ID NO: 55610 - DNA, 120 bp, synthetic construct
  source 1..120: mol_type = other DNA
tagaaaaattaaagcttgagtgcactgtttgatctttaacaatgggaagagtgttttctgtccctgtgttagattgctaaggataatggcctccagctccatccatgttcctgcagggca

SEQ ID NO: 55611 - DNA, 120 bp, synthetic construct; identical to SEQ ID NO: 30895
  source 1..120: mol_type = other DNA

SEQ ID NO: 55612 - DNA, 120 bp, synthetic construct; identical to SEQ ID NO: 30896
  source 1..120: mol_type = other DNA

SEQ ID NO: 55613 - DNA, 120 bp, synthetic construct; identical to SEQ ID NO: 30897
  source 1..120: mol_type = other DNA

SEQ ID NO: 55614 - DNA, 120 bp, synthetic construct; identical to SEQ ID NO: 30898
  source 1..120: mol_type = other DNA

SEQ ID NO: 55615 - DNA, 120 bp, synthetic construct
  source 1..120: mol_type = other DNA
acagagctcacccaggtttcaccctctccattcctagatgtgtccttcacagtgttacctaaatctgcaattcttccttttttatttcaatagatttttggggaacaggtggtgtttggt

SEQ ID NO: 55616 - DNA, 120 bp, synthetic construct; identical to SEQ ID NO: 30899
  source 1..120: mol_type = other DNA

SEQ ID NO: 55617 - DNA, 120 bp, synthetic construct; identical to SEQ ID NO: 30900
  source 1..120: mol_type = other DNA

SEQ ID NO: 55618 - DNA, 120 bp, synthetic construct; identical to SEQ ID NO: 30901
  source 1..120: mol_type = other DNA

SEQ ID NO: 55619 - DNA, 120 bp, synthetic construct
  source 1..120: mol_type = other DNA
ctgtgtctagttctctcacgcatagcatcgtgtctagttctctcacacatagcgttgtgtctaattctctctcacatggcgccatgtctagttctctcacatggcatcgtgtctagttcc

SEQ ID NO: 55620 - DNA, 120 bp, synthetic construct
  source 1..120: mol_type = other DNA
agttctctcacatggcgccgtgtccagttctgtcacatggctccgtgtctggttctctcacatggcgccgtgtctagttctctgccacatggcgccgtgtctagttctctcacatggcgc

SEQ ID NO: 55621 - DNA, 120 bp, synthetic construct
  source 1..120: mol_type = other DNA
cacacagtgcatcgtgtctagttctctaacatggcgccatgtttagttctctcacatggtgccgtgtctagttctctcacatggcgccgtgtctagttctctcacatggtgctgtgtcta

SEQ ID NO: 55622 - DNA, 120 bp, synthetic construct
  source 1..120: mol_type = other DNA
tctctctcacatggcaccgtgtctagttctctcacatggtgccatgtctagttctctcacatggcaccgtgtctagttctctcacatgttgccgtgtctacttctctctcacacatagcg

SEQ ID NO: 55623 - DNA, 120 bp, synthetic construct
  source 1..120: mol_type = other DNA
gccatgtctagttctctcacatggcaccatgtctagttctctcacatggtgccgtgtctacttctttctcacacatagcatcatgtctagttctctctcacacagagcatcatgtctagt

SEQ ID NO: 55624 - DNA, 120 bp, synthetic construct
  source 1..120: mol_type = other DNA
gtgtctagttacctctcacatggtgctgtgtctagttctctctcacacatagcgtcatgtctagttgtttctcacacagagcatcgtgtctagttctctcacatggcgccgtgtctagtt

SEQ ID NO: 55625 - DNA, 120 bp, synthetic construct
  source 1..120: mol_type = other DNA
gtcatgtatagttctgtctcacacagagcatcgtgtctggttctctcacatggtgacgtgtctagttctctcacatggcgccgtgtctggttctctcgcatggcgccgtgtctagttctc

SEQ ID NO: 55626 - DNA, 120 bp, synthetic construct
  source 1..120: mol_type = other DNA
gagccagtcagcttctagagacttttcactccacactggtcttaggcatttgtaaaatactccattttaaccagtggaaatgacttgaattaactgtataattttaatttttcagggcaa

SEQ ID NO: 55627 - DNA, 120 bp, synthetic construct; identical to SEQ ID NO: 30904
  source 1..120: mol_type = other DNA

SEQ ID NO: 55628 - DNA, 120 bp, synthetic construct; identical to SEQ ID NO: 30905
  source 1..120: mol_type = other DNA

SEQ ID NO: 55629 - DNA, 120 bp, synthetic construct; identical to SEQ ID NO: 30906
  source 1..120: mol_type = other DNA

SEQ ID NO: 55630 - DNA, 120 bp, synthetic construct; identical to SEQ ID NO: 30907
  source 1..120: mol_type = other DNA

SEQ ID NO: 55631 - DNA, 120 bp, synthetic construct; identical to SEQ ID NO: 30908
  source 1..120: mol_type = other DNA

SEQ ID NO: 55632 - DNA, 120 bp, synthetic construct; identical to SEQ ID NO: 30909
  source 1..120: mol_type = other DNA

SEQ ID NO: 55633 - DNA, 120 bp, synthetic construct
  source 1..120: mol_type = other DNA
ataaaataaaataaaataaaataaaataaaataaaaaggtctgggtgcagtggctcacgcctgtaattccagcactttgggaggccgaggcggtggatcacttgaggtcaggagcttgag

SEQ ID NO: 55634 - DNA, 120 bp, synthetic construct; identical to SEQ ID NO: 30911
  source 1..120: mol_type = other DNA

SEQ ID NO: 55635 - DNA, 120 bp, synthetic construct; identical to SEQ ID NO: 30912
  source 1..120: mol_type = other DNA

SEQ ID NO: 55636 - DNA, 120 bp, synthetic construct; identical to SEQ ID NO: 30913
  source 1..120: mol_type = other DNA

SEQ ID NO: 55637 - DNA, 120 bp, synthetic construct
  source 1..120: mol_type = other DNA
tgtgtgtgtgtatgtgtgtgtggttctgttaggggaactagttttggttcagcgtgtgtgtgtgtgtgtgtctgtgtgtatgtgtgtgtggttctgttaggacgggaactagttttggtt

SEQ ID NO: 55638 - DNA, 120 bp, synthetic construct; identical to SEQ ID NO: 30914
  source 1..120: mol_type = other DNA

SEQ ID NO: 55639 - DNA, 120 bp, synthetic construct; identical to SEQ ID NO: 30915
  source 1..120: mol_type = other DNA

SEQ ID NO: 55640 - DNA, 120 bp, synthetic construct; identical to SEQ ID NO: 30916
  source 1..120: mol_type = other DNA

SEQ ID NO: 55641 - DNA, 120 bp, synthetic construct; identical to SEQ ID NO: 30917
  source 1..120: mol_type = other DNA

SEQ ID NO: 55642 - DNA, 120 bp, synthetic construct; identical to SEQ ID NO: 30918
  source 1..120: mol_type = other DNA

SEQ ID NO: 55643 - DNA, 120 bp, synthetic construct
  source 1..120: mol_type = other DNA
cactcggcagcttttaaaaatagagcgtgtgcgagtgcagcgtctccccaacagtggtctacactcgagaaactcagcagcgtttaaaaatagagcctgtacgagtgcagcgtctctcca

SEQ ID NO: 55644 - DNA, 120 bp, synthetic construct
  source 1..120: mol_type = other DNA
gtttaaaaatagagcctgtgcgagtgcagcgtctctccaacagtggtctacactggagaaactcggcagctttaaaaatagagcgtgtgtgagtgcagcgtctctccaacagtggtctac

SEQ ID NO: 55645 - DNA, 120 bp, synthetic construct; identical to SEQ ID NO: 30919
  source 1..120: mol_type = other DNA

SEQ ID NO: 55646 - DNA, 120 bp, synthetic construct; identical to SEQ ID NO: 30920
  source 1..120: mol_type = other DNA

SEQ ID NO: 55647 - DNA, 120 bp, synthetic construct; identical to SEQ ID NO: 30921
  source 1..120: mol_type = other DNA

SEQ ID NO: 55648 - DNA, 120 bp, synthetic construct; identical to SEQ ID NO: 30876
  source 1..120: mol_type = other DNA

SEQ ID NO: 55649 - DNA, 120 bp, synthetic construct
  source 1..120: mol_type = other DNA
tcatcccgaccccacgtgtcaccgcgagtggactcacacgctcatcccgaccccgcgtgtcacagcaagcgggttcacagcctcatcccgaccctgcgtgtcaccgcgagtggattcaca

SEQ ID NO: 55650 - DNA, 120 bp, synthetic construct
  source 1..120: mol_type = other DNA
gaggggactcacaccctcatcccgaccccacgtgtcaccgcgagtggactcacacgctcatcccgaccccgcgtgtcacagcaagcgggttcacagcctcatcccgaccctgcgtgtcac

SEQ ID NO: 55651 - DNA, 120 bp, synthetic construct; identical to SEQ ID NO: 30877
  source 1..120: mol_type = other DNA

SEQ ID NO: 55652 - DNA, 120 bp, synthetic construct; identical to SEQ ID NO: 30922
  source 1..120: mol_type = other DNA

SEQ ID NO: 55653 - DNA, 120 bp, synthetic construct; identical to SEQ ID NO: 30923
  source 1..120: mol_type = other DNA

SEQ ID NO: 55654 - DNA, 120 bp, synthetic construct; identical to SEQ ID NO: 30924
  source 1..120: mol_type = other DNA

SEQ ID NO: 55655 - DNA, 120 bp, synthetic construct; identical to SEQ ID NO: 30925
  source 1..120: mol_type = other DNA

SEQ ID NO: 55656 - DNA, 120 bp, synthetic construct; identical to SEQ ID NO: 30926
  source 1..120: mol_type = other DNA

SEQ ID NO: 55657 - DNA, 120 bp, synthetic construct; identical to SEQ ID NO: 30927
  source 1..120: mol_type = other DNA

SEQ ID NO: 55658 - DNA, 120 bp, synthetic construct; identical to SEQ ID NO: 30928
  source 1..120: mol_type = other DNA

SEQ ID NO: 55659 - DNA, 120 bp, synthetic construct; identical to SEQ ID NO: 30929
  source 1..120: mol_type = other DNA

SEQ ID NO: 55660 - DNA, 120 bp, synthetic construct; identical to SEQ ID NO: 30930
  source 1..120: mol_type = other DNA

SEQ ID NO: 55661 - DNA, 120 bp, synthetic construct; identical to SEQ ID NO: 30931
  source 1..120: mol_type = other DNA

SEQ ID NO: 55662 - DNA, 120 bp, synthetic construct; identical to SEQ ID NO: 30932
  source 1..120: mol_type = other DNA

SEQ ID NO: 55663 - DNA, 120 bp, synthetic construct; identical to SEQ ID NO: 30933
  source 1..120: mol_type = other DNA

SEQ ID NO: 55664 - DNA, 120 bp, synthetic construct; identical to SEQ ID NO: 30934
  source 1..120: mol_type = other DNA

SEQ ID NO: 55665 - DNA, 120 bp, synthetic construct; identical to SEQ ID NO: 30935
  source 1..120: mol_type = other DNA

SEQ ID NO: 55666 - DNA, 120 bp, synthetic construct; identical to SEQ ID NO: 30936
  source 1..120: mol_type = other DNA

SEQ ID NO: 55667 - DNA, 120 bp, synthetic construct; identical to SEQ ID NO: 30937
  source 1..120: mol_type = other DNA

SEQ ID NO: 55668 - DNA, 120 bp, synthetic construct
  source 1..120: mol_type = other DNA
atttcaatccaaagtgtctatcaggtcacttaataagtaaaacaaggaatcaaaaaccaggtagtaagaaaaggaatcggacgtgttggctgcttaagaggagagcctgggggcggaatg

SEQ ID NO: 55669 - DNA, 120 bp, synthetic construct
  source 1..120: mol_type = other DNA
ccacggagacctatgaacggaccagagggtcctggaatgatttcagagaaagtgatcaatgtctccacaaatgcagctaatgcatttgaagaattcgattattacctcatctttattggc

SEQ ID NO: 55670 - DNA, 120 bp, synthetic construct
  source 1..120: mol_type = other DNA
cactatggaatactatgcggccatgaaaagggacaagatcatgtattttgcagggacagggatggagctggaaaccatgatcctcagcaaactaacacaggaagagcgtgaccagtttct

SEQ ID NO: 55671 - DNA, 120 bp, synthetic construct; identical to SEQ ID NO: 30942
  source 1..120: mol_type = other DNA

SEQ ID NO: 55672 - DNA, 120 bp, synthetic construct
  source 1..120: mol_type = other DNA
ttctttttttttttttttttttttttttgagacgtagtttcactcttgtcactcaggctggagtgcagtggcgtgacctcggctgactgcaaccaccgtcttccaattcaggcaattcta

SEQ ID NO: 55673 - DNA, 120 bp, synthetic construct
  source 1..120: mol_type = other DNA
aatttacagtcccactaacagtgtaaaagtgttcctatttctccacatcctctccagcacctgttgtttcctgactttttaatgattgccattctaactggtgtgagatggtatctcact

SEQ ID NO: 55674 - DNA, 120 bp, synthetic construct
  source 1..120: mol_type = other DNA
gagcagtggtttttagttctcattaaagaggtcattcacatcccttgtaagttggattcctaggtattttattctctttgaagcaattatgaatgggagttcactcatgatttggctctc

SEQ ID NO: 55675 - DNA, 120 bp, synthetic construct; identical to SEQ ID NO: 30887
  source 1..120: mol_type = other DNA

SEQ ID NO: 55676 - DNA, 120 bp, synthetic construct; identical to SEQ ID NO: 30888
  source 1..120: mol_type = other DNA

SEQ ID NO: 55677 - DNA, 120 bp, synthetic construct; identical to SEQ ID NO: 30945
  source 1..120: mol_type = other DNA

SEQ ID NO: 55678 - DNA, 120 bp, synthetic construct; identical to SEQ ID NO: 30946
  source 1..120: mol_type = other DNA

SEQ ID NO: 55679 - DNA, 120 bp, synthetic construct; identical to SEQ ID NO: 30947
  source 1..120: mol_type = other DNA

SEQ ID NO: 55680 - DNA, 120 bp, synthetic construct; identical to SEQ ID NO: 30948
  source 1..120: mol_type = other DNA

SEQ ID NO: 55681 - DNA, 120 bp, synthetic construct; identical to SEQ ID NO: 30949
  source 1..120: mol_type = other DNA

SEQ ID NO: 55682 - DNA, 120 bp, synthetic construct; identical to SEQ ID NO: 30950
  source 1..120: mol_type = other DNA

SEQ ID NO: 55683 - DNA, 120 bp, synthetic construct
  source 1..120: mol_type = other DNA
agatacctttaaagttagacacatctaacatttgtggaacttaggatgccagggcttttcatctgaatttctggggtgcatttacagcttttctcctaaacatcacgcgtcccattctgg

SEQ ID NO: 55684 - DNA, 120 bp, synthetic construct; identical to SEQ ID NO: 6147
  source 1..120: mol_type = other DNA

SEQ ID NO: 55685 - DNA, 120 bp, synthetic construct; identical to SEQ ID NO: 30952
  source 1..120: mol_type = other DNA

SEQ ID NO: 55686 - DNA, 120 bp, synthetic construct; identical to SEQ ID NO: 30953
  source 1..120: mol_type = other DNA

SEQ ID NO: 55687 - DNA, 120 bp, synthetic construct
  source 1..120: mol_type = other DNA
gaactgagtcagttaaacctctttcctttataaattgcccagtctggggtatgtctttattagcagtgtgagaagagatgcatacaatacctccaattccctttcagcgcggtctgtatt

SEQ ID NO: 55688 - DNA, 120 bp, synthetic construct; identical to SEQ ID NO: 30955
  source 1..120: mol_type = other DNA

SEQ ID NO: 55689 - DNA, 120 bp, synthetic construct
  source 1..120: mol_type = other DNA
gtggtgttggggtgtctgcgcctcgttactgggggactggtgttggagtgtctgcgcctcgttactgggggactgtgtggtgttgggtgtctgcgcctcgttgctgggggactgtgtggt

SEQ ID NO: 55690 - DNA, 120 bp, synthetic construct; identical to SEQ ID NO: 30957
  source 1..120: mol_type = other DNA

SEQ ID NO: 55691 - DNA, 120 bp, synthetic construct; identical to SEQ ID NO: 30958
  source 1..120: mol_type = other DNA

SEQ ID NO: 55692 - DNA, 120 bp, synthetic construct; identical to SEQ ID NO: 30959
  source 1..120: mol_type = other DNA

SEQ ID NO: 55693 - DNA, 120 bp, synthetic construct; identical to SEQ ID NO: 30960
  source 1..120: mol_type = other DNA

SEQ ID NO: 55694 - DNA, 120 bp, synthetic construct; identical to SEQ ID NO: 30961
  source 1..120: mol_type = other DNA

SEQ ID NO: 55695 - DNA, 120 bp, synthetic construct; identical to SEQ ID NO: 30962
  source 1..120: mol_type = other DNA

SEQ ID NO: 55696 - DNA, 120 bp, synthetic construct; identical to SEQ ID NO: 30963
  source 1..120: mol_type = other DNA

SEQ ID NO: 55697 - DNA, 120 bp, synthetic construct
  source 1..120: mol_type = other DNA
ttccacaatggttgaactagtttacagtcccaccaacagtgtaaaagtgttcctatttctccacatcctctccagcacctgttgtttcctgactttttaatgatcgccattctaactggt

SEQ ID NO: 55698 - DNA, 120 bp, synthetic construct; identical to SEQ ID NO: 30889
  source 1..120: mol_type = other DNA

SEQ ID NO: 55699 - DNA, 120 bp, synthetic construct; identical to SEQ ID NO: 30891
  source 1..120: mol_type = other DNA

SEQ ID NO: 55700 - DNA, 120 bp, synthetic construct; identical to SEQ ID NO: 30890
  source 1..120: mol_type = other DNA

SEQ ID NO: 55701 - DNA, 120 bp, synthetic construct; identical to SEQ ID NO: 30964
  source 1..120: mol_type = other DNA

SEQ ID NO: 55702 - DNA, 120 bp, synthetic construct; identical to SEQ ID NO: 30965
  source 1..120: mol_type = other DNA

SEQ ID NO: 55703 - DNA, 120 bp, synthetic construct; identical to SEQ ID NO: 30966
  source 1..120: mol_type = other DNA

SEQ ID NO: 55704 - DNA, 120 bp, synthetic construct
  source 1..120: mol_type = other DNA
aaaataagatttttagaaagacatcgggcctgtgtaaatatatcctttagaaaattgacttcagagcgtgagcgacgcagaagacgggtgatttctgcatttccatctgaggtaccgggt

SEQ ID NO: 55705 - DNA, 120 bp, synthetic construct
  source 1..120: mol_type = other DNA
agaacgggcggactgcctcctcaagtgggtccctgacccctgacccccgagcagcctaactgggaggcaccccccagcaggggcacactgacacctcacacggcagggtattccaacaga

SEQ ID NO: 55706 - DNA, 120 bp, synthetic construct
  source 1..120: mol_type = other DNA
aaggagaaataaaatactttacagacaagcaaatgctgagagattttgtcaccaccaggcctgccctaaaagagctcctgaaggaagcgctaaacatggaaaggaacgaccggtaccagc

SEQ ID NO: 55707 - DNA, 120 bp, synthetic construct
  source 1..120: mol_type = other DNA
ctgctcaactacatggaaactaaacaacctgctcctgaatgactactgggtacataacgaaatgaaggcagaaataaagatgttctttgaaaccaacgagaacaaagacacaacaaacca

SEQ ID NO: 55708 - DNA, 120 bp, synthetic construct
  source 1..120: mol_type = other DNA
gaaatacgtcccatcaatacctaatttattgagagtttttagcatgaagggttgttgaattttgtcaaaggctttttctgcatctattgagataatcatgtggtttttgtctttggctct

SEQ ID NO: 55709 - DNA, 120 bp, synthetic construct
  source 1..120: mol_type = other DNA
tatagatcaatggaacagaacagagccctcagaaataacaccgcatacctacaactatctgatctttgacaaacctgagaaaaacaagcaatggggaaaggattccctatttaataaatg

SEQ ID NO: 55710 - DNA, 120 bp, synthetic construct
  source 1..120: mol_type = other DNA
cagccatcccattactgggtatatacccaaaggactataaatcatgctgctataaagacacatgcacacgtatgtttattgcggcattattcacaatagcaaagacttggaaccaagcca

SEQ ID NO: 55711 - DNA, 120 bp, synthetic construct; identical to SEQ ID NO: 30968
  source 1..120: mol_type = other DNA

SEQ ID NO: 55712 - DNA, 120 bp, synthetic construct; identical to SEQ ID NO: 30969
  source 1..120: mol_type = other DNA

SEQ ID NO: 55713 - DNA, 120 bp, synthetic construct
  source 1..120: mol_type = other DNA
acctcacattctctctgacttactgtggagcaggaattaagagcttgagccgagctcacattctctctgacttactgtggagcagggattaagagcttgagccaacctcacattctctct

SEQ ID NO: 55714 - DNA, 120 bp, synthetic construct; identical to SEQ ID NO: 30971
  source 1..120: mol_type = other DNA

SEQ ID NO: 55715 - DNA, 120 bp, synthetic construct; identical to SEQ ID NO: 30972
  source 1..120: mol_type = other DNA

SEQ ID NO: 55716 - DNA, 120 bp, synthetic construct
  source 1..120: mol_type = other DNA
ttcaggttttcagatattgtggagatggaagtactgttgaatctgcctcccatacccctcgaacccgccggtcctcacctgtgtcaccctcgaccccgccggccctcacctgtgtcaccc

SEQ ID NO: 55717 - DNA, 120 bp, synthetic construct; identical to SEQ ID NO: 30973
  source 1..120: mol_type = other DNA

SEQ ID NO: 55718 - DNA, 120 bp, synthetic construct; identical to SEQ ID NO: 30974
  source 1..120: mol_type = other DNA

SEQ ID NO: 55719 - DNA, 120 bp, synthetic construct; identical to SEQ ID NO: 30977
  source 1..120: mol_type = other DNA

SEQ ID NO: 55720 - DNA, 120 bp, synthetic construct; identical to SEQ ID NO: 30978
  source 1..120: mol_type = other DNA

SEQ ID NO: 55721 - DNA, 120 bp, synthetic construct
  source 1..120: mol_type = other DNA
gctgtgcctcattgccgagtgtgagaatgcaactaagtgaaagcaaatagaccttgtccgaaaaggcccaaaatagactctgcttgttatcatattaactttgcattttaactgtgaccc

SEQ ID NO: 55722 - DNA, 120 bp, synthetic construct
  source 1..120: mol_type = other DNA
cacctcctcgtcctccagagtcgtgtattgagtgcttactgagcgctgcctcctcatcctcctgagtcgagtattgagtgcttactgagcgctccctcctcatcctcctgagtcgtgtat

SEQ ID NO: 55723 - DNA, 120 bp, synthetic construct
  source 1..120: mol_type = other DNA
ctcgtcctccagagtcgtgtattgagtgcttactgagcactccctccttgtcctccggagtcgtatattgagtgcttactgagcgccacctcctcgtcctccagagtcgtgtattgagtg

SEQ ID NO: 55724 - DNA, 120 bp, synthetic construct
  source 1..120: mol_type = other DNA
gtcgtgtattgagtgcgcactgagcgccacctcctcatcctccagggtagtgtattgagtgcttactgagtgccacctcctcgtcctccagagtcgtgtattgagtgcttactgagcgct

SEQ ID NO: 55725 - DNA, 120 bp, synthetic construct
  source 1..120: mol_type = other DNA
cggagtcgtgtattgagtgcttactgagcgccacctccttgtcctccagagtcgtgtattgagagcttactgagcgctccctccttgtcctccagagtcgtgtattgagtgcttactgag

SEQ ID NO: 55726 - DNA, 120 bp, synthetic construct
  source 1..120: mol_type = other DNA
gcttactgagcgctccctccttgtcctctggagtcgtgtattgagtgcttactgagcgccccctcctcgtcctccagagtcgtgtattgagtgcttactgagcgccacctcctcgtcctc

SEQ ID NO: 55727 - DNA, 120 bp, synthetic construct
  source 1..120: mol_type = other DNA
tcctcgttctcctgagtcgtgtattgagtgcttactgagtgccacctcctcatcctccggagtcgtgtattgagtgcttactgagcgctccctcctcgtcctccagagtcgtgtattgcc

SEQ ID NO: 55728 - DNA, 120 bp, synthetic construct
  source 1..120: mol_type = other DNA
tccttgtcctccagagtcgtgtattgagaacttactgagcgccacctcctcgtcctccagagtcgtgtattgagtgcttactgagcgctccctccttgtcctccagagtcgtgtattgag

SEQ ID NO: 55729 - DNA, 120 bp, synthetic construct
  source 1..120: mol_type = other DNA
gagcgctccctccttgtcctccagagtcgtgtattgagaacttactgagcgccacctccttgtcctccagagtcgtgtattgagtgcttactgagcgctccctccttgtcctccagagtc

SEQ ID NO: 55730 - DNA, 120 bp, synthetic construct; identical to SEQ ID NO: 55723
  source 1..120: mol_type = other DNA

SEQ ID NO: 55731 - DNA, 120 bp, synthetic construct
  source 1..120: mol_type = other DNA
tgagcgctccctcctcatcctcctgagtcgtgtattgagtgcttactgagcgctccctcctcgttctcctgagtcgtgtattgagtgcttactgagcctcatcctccagggtagtgtatt

SEQ ID NO: 55732 - DNA, 120 bp, synthetic construct; identical to SEQ ID NO: 1728
  source 1..120: mol_type = other DNA

SEQ ID NO: 55733 - DNA, 120 bp, synthetic construct
  source 1..120: mol_type = other DNA
ttgagtgcttactgagcgctccctcatcgtcctcctgagtcgtgtattgagtgcttactgagcgctccctcctcgtcctcctgagtcgtgtattgagtgcttactgagtgccacctcctc

SEQ ID NO: 55734 - DNA, 120 bp, synthetic construct
  source 1..120: mol_type = other DNA
ttactgagcgccacctcctcgtcctccagagtcgtgtattgagtgcttactgagcgccacctcctcgtcctccagagtcgtgtattgagtgcttactgagcgctccctcctcgtcctcca

SEQ ID NO: 55735 - DNA, 120 bp, synthetic construct; identical to SEQ ID NO: 55725
  source 1..120: mol_type = other DNA

SEQ ID NO: 55736 - DNA, 120 bp, synthetic construct
  source 1..120: mol_type = other DNA
ctccggagtcgtgtattgagagcttactgagcgctccctccttgtcctccggagtcgtgtattgagtgcttactgagcgccacctccttgtcctccggagtcgtgtattgagtgcttact

SEQ ID NO: 55737 - DNA, 120 bp, synthetic construct; identical to SEQ ID NO: 2647
  source 1..120: mol_type = other DNA

SEQ ID NO: 55738 - DNA, 120 bp, synthetic construct; identical to SEQ ID NO: 30943
  source 1..120: mol_type = other DNA

SEQ ID NO: 55739 - DNA, 120 bp, synthetic construct; identical to SEQ ID NO: 30944
  source 1..120: mol_type = other DNA

SEQ ID NO: 55740 - DNA, 120 bp, synthetic construct; identical to SEQ ID NO: 22473
  source 1..120: mol_type = other DNA

SEQ ID NO: 55741 - DNA, 120 bp, synthetic construct; identical to SEQ ID NO: 22474
  source 1..120: mol_type = other DNA

SEQ ID NO: 55742 - DNA, 120 bp, synthetic construct
  source 1..120: mol_type = other DNA
aggcactagggataataatgttaacctccaaggaagctactatgaaaattttcttcctttctctccttccttcctttcttttccttccttccttccctccttccttccttcctctccttt

SEQ ID NO: 55743 - DNA, 120 bp, synthetic construct; identical to SEQ ID NO: 22475
  source 1..120: mol_type = other DNA

SEQ ID NO: 55744 - DNA, 120 bp, synthetic construct; identical to SEQ ID NO: 22476
  source 1..120: mol_type = other DNA

SEQ ID NO: 55745 - DNA, 120 bp, synthetic construct; identical to SEQ ID NO: 22477
  source 1..120: mol_type = other DNA

SEQ ID NO: 55746 - DNA, 120 bp, synthetic construct
  source 1..120: mol_type = other DNA
taggcgtgagctaccatgcccagccctggattcttgttctaaatcatctgaagataacccatatgtgatcagagaaaaaaggggaccctgtataactgagcaagccatgaaataatagaa

SEQ ID NO: 55747 - DNA, 120 bp, synthetic construct; identical to SEQ ID NO: 14652
  source 1..120: mol_type = other DNA

SEQ ID NO: 55748 - DNA, 120 bp, synthetic construct; identical to SEQ ID NO: 18281
  source 1..120: mol_type = other DNA

SEQ ID NO: 55749 - DNA, 120 bp, synthetic construct; identical to SEQ ID NO: 11243
  source 1..120: mol_type = other DNA

SEQ ID NO: 55750 - DNA, 120 bp, synthetic construct; identical to SEQ ID NO: 11244
  source 1..120: mol_type = other DNA

SEQ ID NO: 55751 - DNA, 120 bp, synthetic construct; identical to SEQ ID NO: 11245
  source 1..120: mol_type = other DNA

SEQ ID NO: 55752 - DNA, 120 bp, synthetic construct; identical to SEQ ID NO: 11246
  source 1..120: mol_type = other DNA

SEQ ID NO: 55753 - DNA, 120 bp, synthetic construct; identical to SEQ ID NO: 11247
  source 1..120: mol_type = other DNA

SEQ ID NO: 55754 - DNA, 120 bp, synthetic construct; identical to SEQ ID NO: 11250
  source 1..120: mol_type = other DNA

SEQ ID NO: 55755 - DNA, 120 bp, synthetic construct; identical to SEQ ID NO: 11248
  source 1..120: mol_type = other DNA

SEQ ID NO: 55756 - DNA, 120 bp, synthetic construct; identical to SEQ ID NO: 11249
  source 1..120: mol_type = other DNA

SEQ ID NO: 55757 - DNA, 120 bp, synthetic construct; identical to SEQ ID NO: 11245
  source 1..120: mol_type = other DNA

SEQ ID NO: 55758 - DNA, 120 bp, synthetic construct; identical to SEQ ID NO: 11246
  source 1..120: mol_type = other DNA

SEQ ID NO: 55759 - DNA, 120 bp, synthetic construct; identical to SEQ ID NO: 11247
  source 1..120: mol_type = other DNA

SEQ ID NO: 55760 - DNA, 120 bp, synthetic construct; identical to SEQ ID NO: 11250
  source 1..120: mol_type = other DNA

SEQ ID NO: 55761 - DNA, 120 bp, synthetic construct; identical to SEQ ID NO: 11251
  source 1..120: mol_type = other DNA

SEQ ID NO: 55762 - DNA, 120 bp, synthetic construct; identical to SEQ ID NO: 11252
  source 1..120: mol_type = other DNA

SEQ ID NO: 55763 - DNA, 120 bp, synthetic construct
  source 1..120: mol_type = other DNA
ggtatcatggacataggacagacagcaaggtaggggaggaatcctctcactgagaggaactctgagctaaagatgcttgtctgaaagtgagttctcagctgagacccagtgaggaggtct

SEQ ID NO: 55764 - DNA, 120 bp, synthetic construct
  source 1..120: mol_type = other DNA
aaaccagcaagtttttattggtgattttcaaaaggggagggagtgcacaaatagggtgtgggtcacagagatcacatccttcacaaggtaataaaatatcacaaggtaaatggaggcagg

SEQ ID NO: 55765 - DNA, 120 bp, synthetic construct
  source 1..120: mol_type = other DNA
attccggactcacatatagtttctgaaaattgtgagtgtcaccctctgacctgttcaaggcatcatcagggcaggctcgatacccccatccttcactgctggaaacattccgagattatc

SEQ ID NO: 55766 - DNA, 120 bp, synthetic construct; identical to SEQ ID NO: 11252
  source 1..120: mol_type = other DNA

SEQ ID NO: 55767 - DNA, 120 bp, synthetic construct; identical to SEQ ID NO: 11253
  source 1..120: mol_type = other DNA

SEQ ID NO: 55768 - DNA, 120 bp, synthetic construct; identical to SEQ ID NO: 55764
  source 1..120: mol_type = other DNA

SEQ ID NO: 55769 - DNA, 120 bp, synthetic construct; identical to SEQ ID NO: 11254
  source 1..120: mol_type = other DNA

SEQ ID NO: 55770 - DNA, 120 bp, synthetic construct; identical to SEQ ID NO: 11252
  source 1..120: mol_type = other DNA

SEQ ID NO: 55771 - DNA, 120 bp, synthetic construct
  source 1..120: mol_type = other DNA
gctgagtagcactgggtgagggtatcatggacataggacagacagcaaggtaggggaggaatcctctcactgagaggaactctgagctaaagatgcttgtctgaaagtgagttctcagct

SEQ ID NO: 55772 - DNA, 120 bp, synthetic construct; identical to SEQ ID NO: 55764
  source 1..120: mol_type = other DNA

SEQ ID NO: 55773 - DNA, 120 bp, synthetic construct
  source 1..120: mol_type = other DNA
ttctgaaaattgtgagtgtcaccctctgacctgttcaaggcatcatcagggcaggctcgatacccccatccttcactgctggaaacattccgagattatcatgggccacatttgtatcca

SEQ ID NO: 55774 - DNA, 120 bp, synthetic construct; identical to SEQ ID NO: 11252
  source 1..120: mol_type = other DNA

SEQ ID NO: 55775 - DNA, 120 bp, synthetic construct; identical to SEQ ID NO: 11253
  source 1..120: mol_type = other DNA

SEQ ID NO: 55776 - DNA, 120 bp, synthetic construct; identical to SEQ ID NO: 55764
  source 1..120: mol_type = other DNA

SEQ ID NO: 55777 - DNA, 120 bp, synthetic construct; identical to SEQ ID NO: 11254
  source 1..120: mol_type = other DNA

SEQ ID NO: 55778 - DNA, 120 bp, synthetic construct
  source 1..120: mol_type = other DNA
gtgtgtgatgactactgggacaccaatgatgccaatgtggtttgcaggcagctgggctgtggctgggccatgtcagccccaggaaatgcccggtttggccagggttcaggacccattgtc

SEQ ID NO: 55779 - DNA, 120 bp, synthetic construct; identical to SEQ ID NO: 7556
  source 1..120: mol_type = other DNA

SEQ ID NO: 55780 - DNA, 120 bp, synthetic construct
  source 1..120: mol_type = other DNA
ggattgacttggcgatgtgggctcttttttggttccatatgaactttaaaatagttttttccaattctgtgaagaaagtcattggtagcttgatggggatggcattgaatctgtaaatta

SEQ ID NO: 55781 - DNA, 120 bp, synthetic construct
  source 1..120: mol_type = other DNA
tgtgcacatgtaccctaaaacttaaagtataataataataaaaaaaaataaaacattaacttctacttaaaaaaaaaaaaaagaaagaataagcctgcaggaatgtggagtggggcaggc

SEQ ID NO: 55782 - DNA, 120 bp, synthetic construct
  source 1..120: mol_type = other DNA
aatagcaaaaccagtaaataaaaagaatggctagaggtcaagaacaaaaggagaatacaaggctcacgaatgtaatcctagcactttgggaggccaaggcgagtggatcacttgaggtca

SEQ ID NO: 55783 - DNA, 120 bp, synthetic construct; identical to SEQ ID NO: 33679
  source 1..120: mol_type = other DNA

SEQ ID NO: 55784 - DNA, 120 bp, synthetic construct
  source 1..120: mol_type = other DNA
atttacaaaaggcctttgacaaaattcaacaacccttcatgctaaaaactctcaataaattaggtattgatgggacatatctcaaaataataagagctatctatgacaaacccacagcca

SEQ ID NO: 55785 - DNA, 120 bp, synthetic construct
  source 1..120: mol_type = other DNA
taaaaccacaaaaactctagaagaaaacctaggcattaccattcaggacataggcatgggcaaggacttcatgtctacaacaccaaaagcaatggcaacaaaagccaaaattgacaaatg

SEQ ID NO: 55786 - DNA, 120 bp, synthetic construct
  source 1..120: mol_type = other DNA
atgaaattggaaatcatcattctcagtaaactatcacatggacaaaagaccaaacaccgcatgttctcactcataggtgggaattgaacaatgagaacacatggacacaggaaggggaac

SEQ ID NO: 55787 - DNA, 120 bp, synthetic construct
  source 1..120: mol_type = other DNA
tctacatgttcacctcatcttagggcacagtatagtaaatgatcttaacttgtttaaaatattttttcttggctgggcatggtggctcatgcctgtcatcccagcactttgggaggccga

SEQ ID NO: 55788 - DNA, 120 bp, synthetic construct
  source 1..120: mol_type = other DNA
gcctggtggggattatcgttgaatagacatagagtttcagttttgcaagatgagaagagttctggagatggatggtggtgatggcagcagaacaacgtaaatgtatgtaatgccatggaa

SEQ ID NO: 55789 - DNA, 120 bp, synthetic construct; identical to SEQ ID NO: 33681
  source 1..120: mol_type = other DNA

SEQ ID NO: 55790 - DNA, 120 bp, synthetic construct
  source 1..120: mol_type = other DNA
tgtagaagtgttcctatttctccacatcctctccagcacctgttgtttcctgacttttaaatgattgccattctaactggtgtgagatggtatctcattgtggttttgatttgcatttct

SEQ ID NO: 55791 - DNA, 120 bp, synthetic construct
  source 1..120: mol_type = other DNA
ttgaagaggtccttcacatcccttgtaagttgcattcctaggtattttattctctttgaagcaattgtgaatgggagttcactcatgatttggctctctgtttgtctgttgttggtgtat

SEQ ID NO: 55792 - DNA, 120 bp, synthetic construct; identical to SEQ ID NO: 33682
  source 1..120: mol_type = other DNA

SEQ ID NO: 55793 - DNA, 120 bp, synthetic construct
  source 1..120: mol_type = other DNA
cccaccaacagtgtaagagtgttcctatttctccacatcctctccagcacctgttgtttcctgactttttaatgattgccattctaactggtgtgagatgatatctcatagtggttttga

SEQ ID NO: 55794 - DNA, 120 bp, synthetic construct
  source 1..120: mol_type = other DNA
tttatagacaagcaaatgctgagagattttgtcaccaccaggcctgccctaaaagagctcctgaaggaagcgctaaacatggaaaggaacaaccggtaccagccgctgcaaaatcatgcc

SEQ ID NO: 55795 - DNA, 120 bp, synthetic construct
  source 1..120: mol_type = other DNA
aacgagaacaaagacaccacataccagaatctctgggacgcattcaaagcagtgtgtagagggaaatttatagcactaaatgcctacaagagaaagcaggaaagatccaaaattgacacc

SEQ ID NO: 55796 - DNA, 120 bp, synthetic construct
  source 1..120: mol_type = other DNA
tgggacgtatttcaaaataataagagctatctatgacaaacccacagccaatatcatactgaatgggcaaaaactggaagcattccctttaaaaactggcacaagacagggatgccctct

SEQ ID NO: 55797 - DNA, 120 bp, synthetic construct
  source 1..120: mol_type = other DNA
attttggcttttgttgccattgcttttggtgttttggacatgaagtccttgcccacgcctatgtcctgaatggtaatgcctaggttttcttctagggtttttatggttttaggtctaacg

SEQ ID NO: 55798 - DNA, 120 bp, synthetic construct
  source 1..120: mol_type = other DNA
tatcctccactgcaggataattccagtgcaaaggatgatctgtttgtttttttttttgtttttttttttttttgaggcagagtctggctctgttgcccgggctggagtgcagtgactcga

SEQ ID NO: 55799 - DNA, 120 bp, synthetic construct; identical to SEQ ID NO: 6568
  source 1..120: mol_type = other DNA

SEQ ID NO: 55800 - DNA, 120 bp, synthetic construct; identical to SEQ ID NO: 6569
  source 1..120: mol_type = other DNA

SEQ ID NO: 55801 - DNA, 120 bp, synthetic construct
  source 1..120: mol_type = other DNA
ctccactttcgtctatctctgttgctgctgagaagtcaatagtaaagatgactgttgctcctttgcaaaaaacacatgaaaaaatgctcaccatcactggccatcagagaaatgcaaatc

SEQ ID NO: 55802 - DNA, 120 bp, synthetic construct; identical to SEQ ID NO: 33668
  source 1..120: mol_type = other DNA

SEQ ID NO: 55803 - DNA, 120 bp, synthetic construct; identical to SEQ ID NO: 33686
  source 1..120: mol_type = other DNA

SEQ ID NO: 55804 - DNA, 120 bp, synthetic construct
  source 1..120: mol_type = other DNA
taaatagtgcctcaataaacatacatgtgcatgtgtctttatagcagcatgatttatagtcctttgggtatatacccagtaatgggatggctgggtcaaatggtatttctagttctagat

SEQ ID NO: 55805 - DNA, 120 bp, synthetic construct
  source 1..120: mol_type = other DNA
tttgtcaaagatcagatagtggtagatatgcggcgttacttctgagggctctgttctgttccattgatctatatgtctgttttggtaccagtaccatgctgttttggttactgtagcctt

SEQ ID NO: 55806 - DNA, 120 bp, synthetic construct; identical to SEQ ID NO: 33687
  source 1..120: mol_type = other DNA

SEQ ID NO: 55807 - DNA, 120 bp, synthetic construct; identical to SEQ ID NO: 33688
  source 1..120: mol_type = other DNA

SEQ ID NO: 55808 - DNA, 120 bp, synthetic construct; identical to SEQ ID NO: 6571
  source 1..120: mol_type = other DNA

SEQ ID NO: 55809 - DNA, 120 bp, synthetic construct
  source 1..120: mol_type = other DNA
tgaatgacaataaagttattaagtagcagtgattattgctcaagcttacatgtaaataaagagccaggataggctgagcactgtagctcttgcctgtaatcccagcactttgggaggctg

SEQ ID NO: 55810 - DNA, 120 bp, synthetic construct; identical to SEQ ID NO: 33691
  source 1..120: mol_type = other DNA

SEQ ID NO: 55811 - DNA, 120 bp, synthetic construct
  source 1..120: mol_type = other DNA
caatttcacccatgtgcctacaaaggacatgaactcatccttttttatggctgcatagtattgcatggtgtatatgtgccacattttcttaatccagtctatcattgttggacatttggg

SEQ ID NO: 55812 - DNA, 120 bp, synthetic construct
  source 1..120: mol_type = other DNA
aagctaccaatgcctttcttcacagaattggaaaaaactactttaaagttcatatggaaccaaaaaagagcccgcatcgccaagtcaatcctgagccaaaagaacaaagctggaggcatc

SEQ ID NO: 55813 - DNA, 120 bp, synthetic construct
  source 1..120: mol_type = other DNA
gcagtgagctgagatcgtgccactgcactgcagcctggatgacaaagcgagactctgtctcaaaaaataaataaaaaaaaaaataaaataaaggtacaagagtaaggggtcagttggctc

SEQ ID NO: 55814 - DNA, 120 bp, synthetic construct; identical to SEQ ID NO: 33693
  source 1..120: mol_type = other DNA

SEQ ID NO: 55815 - DNA, 120 bp, synthetic construct; identical to SEQ ID NO: 6573
  source 1..120: mol_type = other DNA

SEQ ID NO: 55816 - DNA, 120 bp, synthetic construct; identical to SEQ ID NO: 33695
  source 1..120: mol_type = other DNA

SEQ ID NO: 55817 - DNA, 120 bp, synthetic construct
  source 1..120: mol_type = other DNA
ggtaaaaacagaagtttacataagctgcttggaaacatagttcgtttcagatgctcaacgccagaactggtgtcagtttattagtggggatgccattactgggcagatgttcttttgaga

SEQ ID NO: 55818 - DNA, 120 bp, synthetic construct
  source 1..120: mol_type = other DNA
gtgcacacatatgtttattgcggctctattcacaatagcaaagacttggaaccaacccaaatgtccaacaatgatagactggattaagaaaatgtggcacatatacaccatggaatacta

SEQ ID NO: 55819 - DNA, 120 bp, synthetic construct; identical to SEQ ID NO: 33697
  source 1..120: mol_type = other DNA

SEQ ID NO: 55820 - DNA, 120 bp, synthetic construct; identical to SEQ ID NO: 33698
  source 1..120: mol_type = other DNA

SEQ ID NO: 55821 - DNA, 120 bp, synthetic construct; identical to SEQ ID NO: 33699
  source 1..120: mol_type = other DNA

SEQ ID NO: 55822 - DNA, 120 bp, synthetic construct; identical to SEQ ID NO: 33700
  source 1..120: mol_type = other DNA

SEQ ID NO: 55823 - DNA, 120 bp, synthetic construct; identical to SEQ ID NO: 33701
  source 1..120: mol_type = other DNA

SEQ ID NO: 55824 - DNA, 120 bp, synthetic construct
  source 1..120: mol_type = other DNA
aagcctggaggcagaggttgcagtgagctgagatcatgccactccagcctgggtgacaaaagcaaaattccatctcaaaaaaaaaaaagtatccaattgaggggaaaagttttgataaaa

SEQ ID NO: 55825 - DNA, 120 bp, synthetic construct; identical to SEQ ID NO: 33703
  source 1..120: mol_type = other DNA

SEQ ID NO: 55826 - DNA, 120 bp, synthetic construct
  source 1..120: mol_type = other DNA
gatatctcatagtggttttgatttgcattactctgatggccagtgatggtgaggattttttcatgtgttttttggctgcataaatgtcttcttttgagaagtgtctgttcatgtccttcg

SEQ ID NO: 55827 - DNA, 120 bp, synthetic construct
  source 1..120: mol_type = other DNA
gttggattcctaggtattttattctctttgaagcaattgtgaatgggagttcactcatgatttggctctctgtttgtctgttgttggtgtataagaatgcttgtgatttctgtacattga

SEQ ID NO: 55828 - DNA, 120 bp, synthetic construct
  source 1..120: mol_type = other DNA
ctttttggttggtaagctattgattattgccacaatttcagctcctgttattggtctattcagagattcaacttcttcctggtttagtcttgggagagtgtatgtgtcgaggaatgtatc

SEQ ID NO: 55829 - DNA, 120 bp, synthetic construct; identical to SEQ ID NO: 33704
  source 1..120: mol_type = other DNA

SEQ ID NO: 55830 - DNA, 120 bp, synthetic construct
  source 1..120: mol_type = other DNA
gtgtttattttacaaatttattcaattaaggactacttttttttcttgaggcggggtctcaatctgttgcccaggctgtagtgcagtggtgtgatccctgctgactgtaacctctgtctc

SEQ ID NO: 55831 - DNA, 120 bp, synthetic construct; identical to SEQ ID NO: 33705
  source 1..120: mol_type = other DNA

SEQ ID NO: 55832 - DNA, 120 bp, synthetic construct; identical to SEQ ID NO: 33669
  source 1..120: mol_type = other DNA

SEQ ID NO: 55833 - DNA, 120 bp, synthetic construct
  source 1..120: mol_type = other DNA
acaatagcaaagacttggaaccaacccaaatgtctcacaatgatacaatggatttagaaaatgtggcacatatacaccttggaatactatgcagccataaaaaaggatgagttcatgtcc

SEQ ID NO: 55834 - DNA, 120 bp, synthetic construct
  source 1..120: mol_type = other DNA
ttccttttttttttttttttttgaggcagagttttgctctttcacccagtctggagtgaaatggcatgatctcagctcactgcaacttccgttccctgggttcaagtgattctcctgtct

SEQ ID NO: 55835 - DNA, 120 bp, synthetic construct; identical to SEQ ID NO: 33707
  source 1..120: mol_type = other DNA

SEQ ID NO: 55836 - DNA, 120 bp, synthetic construct; identical to SEQ ID NO: 33708
  source 1..120: mol_type = other DNA

SEQ ID NO: 55837 - DNA, 120 bp, synthetic construct; identical to SEQ ID NO: 33709
  source 1..120: mol_type = other DNA

SEQ ID NO: 55838 - DNA, 120 bp, synthetic construct; identical to SEQ ID NO: 33710
  source 1..120: mol_type = other DNA

SEQ ID NO: 55839 - DNA, 120 bp, synthetic construct
  source 1..120: mol_type = other DNA
ctcaaaaaaatttacaagaaaaaaacaaacaaccccatcaaaaagtgggcgaagggcatgctattctctacataaatgttttcatgttcttgtttccagtgaagttggaattgtttcgta

SEQ ID NO: 55840 - DNA, 120 bp, synthetic construct
  source 1..120: mol_type = other DNA
tcagacatgcctcattatacctctctgacacttacatcaacacagactttaagtctgataagaagcactctacagcctcttctctctgaagcctgctagctaaaagcttcatctacatga

SEQ ID NO: 55841 - DNA, 120 bp, synthetic construct
  source 1..120: mol_type = other DNA
aaaaataaagtcattaccatacaatttggcaagtgttttaatagaagtgttaaaaaggctgagaagtggcctggcactgtggctcatgcctctaatcccagtactttgggaggccttagc

SEQ ID NO: 55842 - DNA, 120 bp, synthetic construct
  source 1..120: mol_type = other DNA
gcgttctgaaattgaggcaataataaatatcccaccaaccaacaaaagcccaggtccagatggaatcatagctgaattctactagcggtacaaagaagagctggtatcatttccactgaa

SEQ ID NO: 55843 - DNA, 120 bp, synthetic construct; identical to SEQ ID NO: 33712
  source 1..120: mol_type = other DNA

SEQ ID NO: 55844 - DNA, 120 bp, synthetic construct; identical to SEQ ID NO: 33713
  source 1..120: mol_type = other DNA

SEQ ID NO: 55845 - DNA, 120 bp, synthetic construct; identical to SEQ ID NO: 33670
  source 1..120: mol_type = other DNA

SEQ ID NO: 55846 - DNA, 120 bp, synthetic construct; identical to SEQ ID NO: 33671
  source 1..120: mol_type = other DNA

SEQ ID NO: 55847 - DNA, 120 bp, synthetic construct; identical to SEQ ID NO: 33714
  source 1..120: mol_type = other DNA

SEQ ID NO: 55848 - DNA, 120 bp, synthetic construct; identical to SEQ ID NO: 33715
  source 1..120: mol_type = other DNA

SEQ ID NO: 55849 - DNA, 120 bp, synthetic construct
  source 1..120: mol_type = other DNA
cactattcacaatagcaaagacttggaaccaacccaaatgtccaacaatgatagactggattaagaaaatgtggcatatatgcaccatggaatactatgcagtcataaaaaaggatgagt

SEQ ID NO: 55850 - DNA, 120 bp, synthetic construct
  source 1..120: mol_type = other DNA
gggttaccctcaaagggaagcccatcacactaacagcggatctctcggcagacaccctacaagccagaagagagtgggggccaatattcaacattcttaaagaaaagaattttcaaccca

SEQ ID NO: 55851 - DNA, 120 bp, synthetic construct
  source 1..120: mol_type = other DNA
gcaccacaccacacctattccacaactgaccacatacttggaagtaaagctctcctcagcaaatgtagaagaacagaaattataacaaactatctctcagaccacagtgcaatcaaacta

SEQ ID NO: 55852 - DNA, 120 bp, synthetic construct
  source 1..120: mol_type = other DNA
tttatgaggccagcatcatcctgatacgaaagcctggcagagacacaaccaaaaaagagaattttagaccaatatccttgatgaacactgatgcaaaaatcctcaataaaatactggcaa

SEQ ID NO: 55853 - DNA, 120 bp, synthetic construct
  source 1..120: mol_type = other DNA
accaatgcctttcttcacagaattggaaaaaactactttaaagttgatatggaaccaaaaaagagcccgcatcaccaagtcactcctaagccaaaagaacaaagctggaggcatcacact

SEQ ID NO: 55854 - DNA, 120 bp, synthetic construct; identical to SEQ ID NO: 33716
  source 1..120: mol_type = other DNA

SEQ ID NO: 55855 - DNA, 120 bp, synthetic construct; identical to SEQ ID NO: 33717
  source 1..120: mol_type = other DNA

SEQ ID NO: 55856 - DNA, 120 bp, synthetic construct; identical to SEQ ID NO: 33718
  source 1..120: mol_type = other DNA

SEQ ID NO: 55857 - DNA, 120 bp, synthetic construct
  source 1..120: mol_type = other DNA
taatgaccctcacactttcatgtaatatgctaatgtaaaagccgtgtcttcaagaaacatttgttgtacattaaaaaacaggcactcgcactttcagaggccgaggcgggcagatcacga

SEQ ID NO: 55858 - DNA, 120 bp, synthetic construct
  source 1..120: mol_type = other DNA
ctgggtaaataacagaattctgacagaaataaagaagttctttgaaaccaatgagaacaaagatacaatgtgccagaatctctgggacacagctaaagcagtgttgagagggaaatttac

SEQ ID NO: 55859 - DNA, 120 bp, synthetic construct; identical to SEQ ID NO: 33720
  source 1..120: mol_type = other DNA

SEQ ID NO: 55860 - DNA, 120 bp, synthetic construct; identical to SEQ ID NO: 6566
  source 1..120: mol_type = other DNA

SEQ ID NO: 55861 - DNA, 120 bp, synthetic construct; identical to SEQ ID NO: 33721
  source 1..120: mol_type = other DNA

SEQ ID NO: 55862 - DNA, 120 bp, synthetic construct; identical to SEQ ID NO: 33722
  source 1..120: mol_type = other DNA

SEQ ID NO: 55863 - DNA, 120 bp, synthetic construct
  source 1..120: mol_type = other DNA
ggagcccatatagccaagacaatcctaagcaaaaataacaaagctagaagcctaatgctacctgacttcagactatactacccaaaacatcatggtactggtagaaaaacagacacatag

SEQ ID NO: 55864 - DNA, 120 bp, synthetic construct
  source 1..120: mol_type = other DNA
actcaaaatggattaaagacttacaggtaaaacctgaaactaaaactactagaagaaaacatggactatgagaggtggctcatgcctgtaatcccagtactttgggaggttgaggcgggc

SEQ ID NO: 55865 - DNA, 120 bp, synthetic construct; identical to SEQ ID NO: 33725
  source 1..120: mol_type = other DNA

SEQ ID NO: 55866 - DNA, 120 bp, synthetic construct
  source 1..120: mol_type = other DNA
agtagcccatgaaaggattgcagtgaaagaaatttgcggatacagtcaatagtaatgccacaacgaactgtttttttctaacctttgaacacaattatattaatatctttattcatcacc

SEQ ID NO: 55867 - DNA, 120 bp, synthetic construct
  source 1..120: mol_type = other DNA
catgtgtgtatatgtatgtgtatacacatatgtatgtatgtgtatacacatatgtgtgtatgtgtatacacatgtgtgtatatgtatatgtgtatatacacatatgtgtgtatgtgtgta

SEQ ID NO: 55868 - DNA, 120 bp, synthetic construct
  source 1..120: mol_type = other DNA
aatcccaaatccaaaatgctcccaaatcagaaaccttttgagggctgacatgacacacaaaggaaatgctcattggagcattctggatttcagatttttggacttgagatgctcagccag

SEQ ID NO: 55869 - DNA, 120 bp, synthetic construct; identical to SEQ ID NO: 33726
  source 1..120: mol_type = other DNA

SEQ ID NO: 55870 - DNA, 120 bp, synthetic construct
  source 1..120: mol_type = other DNA
acctgaagggcggaggttgcagtgagccgagatcgtgccactgcactccagcctgggcgaatagagggagactctgtctgaaaaaaaaaaaaaaaaaaaaaaaaaaaaaaaaaaccgaaa

SEQ ID NO: 55871 - DNA, 120 bp, synthetic construct
  source 1..120: mol_type = other DNA
ccagcctgaccaacatggagaaactccgtctctcctaaaaatacaaaattagcttggtgtggtggtgcatgcctgtaatcccagctactcgggaggctgaggcaggagaattgcttgaac

SEQ ID NO: 55872 - DNA, 120 bp, synthetic construct
  source 1..120: mol_type = other DNA
tctgtattctacttttggcagtgagtgtatattattttgtattataaaaaatcaggctgggtttggtggctcatgcctgtaatcccagcactttggaaggccaaggccagaggggtggtt

SEQ ID NO: 55873 - DNA, 120 bp, synthetic construct
  source 1..120: mol_type = other DNA
ctcacattccaaacccagcctaggacaggatttatgataactgccccccatctatgctggatatcacactatgatgacgtgtgtatttgtatttctgtgagctcaattcataactatgca

SEQ ID NO: 55874 - DNA, 120 bp, synthetic construct
  source 1..120: mol_type = other DNA
ttttcattcctaatgccctaaggctcttatctgggatataactgcaaccctcttacacctgcttttagaacagtggctctaaacacaatctgcacttggtgtgcctgtatgttctgattt

SEQ ID NO: 55875 - DNA, 120 bp, synthetic construct; identical to SEQ ID NO: 33673
  source 1..120: mol_type = other DNA

SEQ ID NO: 55876 - DNA, 120 bp, synthetic construct; identical to SEQ ID NO: 33674
  source 1..120: mol_type = other DNA

SEQ ID NO: 55877 - DNA, 120 bp, synthetic construct
  source 1..120: mol_type = other DNA
atggtaaaatatattttaaagtttctgctaccgtggggcaggggtttggaggggtgggcatcaatataagcatcagaaatccattctagttccccatttcttgttccctgggatatttac

SEQ ID NO: 55878 - DNA, 120 bp, synthetic construct; identical to SEQ ID NO: 33676
  source 1..120: mol_type = other DNA

SEQ ID NO: 55879 - DNA, 120 bp, synthetic construct; identical to SEQ ID NO: 33677
  source 1..120: mol_type = other DNA

SEQ ID NO: 55880 - DNA, 120 bp, synthetic construct
  source 1..120: mol_type = other DNA
caacctctgccccccaggttcaagtgattctcctgcctcagcctcccaagtaactgggactacaggtttgtggcaccacagccagctaattttttttttttttttttttttttttttttt

SEQ ID NO: 55881 - DNA, 120 bp, synthetic construct
  source 1..120: mol_type = other DNA
gtctcgatctcttgacctcggcctcctaaagtgctgggttatgggtgtgagccaccttgcccagcccaagagttttttttttttttttaaggaattatatatacagtatgatttgaattt

SEQ ID NO: 55882 - DNA, 120 bp, synthetic construct
  source 1..120: mol_type = other DNA
agcaccaccagggcttggagaggccacccaggcagaaggatgtggtgactggggtcttcagcaaccgcatttctggggctcccccctcccattcctgtccctgcgtcttcagcaccaatg

SEQ ID NO: 55883 - DNA, 120 bp, synthetic construct
  source 1..120: mol_type = other DNA
tcaccacctgtgaggtgggtactacctggggcaggttcaatagtggggaggtggggctcaggcccgtgggataccccgggggtggggagagcggtaccacttgtggggcagccacagcag

SEQ ID NO: 55884 - DNA, 120 bp, synthetic construct
  source 1..120: mol_type = other DNA
cctttccctggcccaagtttcggtggatcattccaggggttatgacgcctctctgagaccactccaaactccagggccttttgcaagccctgcgtggacaccactgcagagaagcgctgg

SEQ ID NO: 55885 - DNA, 120 bp, synthetic construct
  source 1..120: mol_type = other DNA
cggtagcaggccttgagcgctgcgcgggagcgctccttgaagcagtagactgtctcctcgccgtcccagatggtcttgggcagcgggaacttcttgcgcagtcgatacttgtccactgcg

SEQ ID NO: 55886 - DNA, 120 bp, synthetic construct
  source 1..120: mol_type = other DNA
tagaaagtttgcagcaacttttctcgagcttgcgtcccaggagcggatgcgcgtggcgtgcgcaggcgcagtggaaggaggatggccgcgcgcgctgccagcccagccccctcttctcga

SEQ ID NO: 55887 - DNA, 120 bp, synthetic construct
  source 1..120: mol_type = other DNA
gctgccttcccaggcctgcagtttgcccatccacgtcagggcctcagcctggccgaaagaaagaaatggtctgtgatccccccagcagcagcagcagcagcagcagcagcagcagcagca

SEQ ID NO: 55888 - DNA, 120 bp, synthetic construct
  source 1..120: mol_type = other DNA
gttatctagggagatcccggagggaatctggtgaggcctgaacggagggagatctggggctgaataaagggcttctgccctctaaagtcgcaaagacgtagggtgagccctatatctgga

SEQ ID NO: 55889 - DNA, 120 bp, synthetic construct
  source 1..120: mol_type = other DNA
tctacacagggaccagagggctggtgctcaaacactaacacaacctatgtccctctgctgctcaaaatccctccagctccctaatgccctcacgacaaaaggccttgctgggttttgttt

SEQ ID NO: 55890 - DNA, 120 bp, synthetic construct
  source 1..120: mol_type = other DNA
tgctctttctaaaccttctgcagggacttggggtccagacccccatgttctagggtcagctcatctcctcccttgacatgtgaccgctgcagacccctcttctcagggcctcaggacagg

SEQ ID NO: 55891 - DNA, 120 bp, synthetic construct
  source 1..120: mol_type = other DNA
gctgaagcaatccgtccacttcagcctcccaaagtgctgggattccaagcgtgagccaccatgcccagcctgtaaattagtacttttttttttttttttttgagatgaagtttcactctt

SEQ ID NO: 55892 - DNA, 120 bp, synthetic construct
  source 1..120: mol_type = other DNA
gggaagcccagtctgtgactctgaggttttaaaattcaatctaacattttgaagtacatagatctgaaaatttaaggtcctccaactctggcctcttaggagtctttgggcccaaaacag

SEQ ID NO: 55893 - DNA, 120 bp, synthetic construct
  source 1..120: mol_type = other DNA
gtcttgaactcctgacttccagtgatctgcctgcctcagcctcccaaagttctgggattacaggcgtgaaccaccttgcccaacccttttttttttttttttttttgagacagagtctca

SEQ ID NO: 55894 - DNA, 120 bp, synthetic construct
  source 1..120: mol_type = other DNA
tcattttttcttgtatcctgttgcttcccttcagggcacctgccacactctccataattctctaattctctagactgcaactggatgagggcagggaccagagctcatctggtccgtgct

SEQ ID NO: 55895 - DNA, 120 bp, synthetic construct
  source 1..120: mol_type = other DNA
tcaccttgtagtggacgatcttgccataggtctccgccgtggaatccgcgtagaagggcgtctgcccatagaacatttcataggcgaatacacccagcgcccaccagtcacactcgggcc

SEQ ID NO: 55896 - DNA, 120 bp, synthetic construct
  source 1..120: mol_type = other DNA
gagacctgcagccccagcccagagataaccatagagatctgccgggccaaatcagagaccacctgcggcccccgcccccgcccctcaaaaaaaaacacaaacaaaaaaactttcctggga

SEQ ID NO: 55897 - DNA, 120 bp, synthetic construct
  source 1..120: mol_type = other DNA
cgagtcaagtcaggctcccgcccggttcggcttacctcgctgaacgccccgcgtccgatcaccttcagaatctcgaagtcgtccctctgcagtcggacctccttaagcctcaccacgatg

SEQ ID NO: 55898 - DNA, 120 bp, synthetic construct
  source 1..120: mol_type = other DNA
cacaaaaggagtgctcctcccgggagcgccagacccctaccccacccggtctcagtttaccctgccaacccaacttcatcctctactaaagggaggccaggagagtcattaggggctgtg

SEQ ID NO: 55899 - DNA, 120 bp, synthetic construct
  source 1..120: mol_type = other DNA
gaggctgttggcagcctagcctgctgtgactcctaagccatggctctgagtcacagccaccctagcctctgctgaccttactctgcccctccagagtggtggcataggacagagaaatgt

SEQ ID NO: 55900 - DNA, 120 bp, synthetic construct
  source 1..120: mol_type = other DNA
ccaaagtgctgggattacaggcgtgagctgccatgccaggccaaaactttgcttttcataggaaggaaggagtgtatcagaaatacgatctttatgctttaagattttaagatgtgtcaa

SEQ ID NO: 55901 - DNA, 120 bp, synthetic construct
  source 1..120: mol_type = other DNA
agagggggatttggcagggtcataggacaatagtggagggaaggtcagcagataaacatgtgaacaaaggtctctggttttcctaggcagagggccctgccgccttccgtcttctgcagt

SEQ ID NO: 55902 - DNA, 120 bp, synthetic construct
  source 1..120: mol_type = other DNA
ggaggtggaggttgtagcgagccgagatcacgccactgcactccagcctgggcaacactgagcactgagtgagcgagactccgtctgcactcccggcacctcgggaggccgaggctggca

SEQ ID NO: 55903 - DNA, 120 bp, synthetic construct
  source 1..120: mol_type = other DNA
cctgtaatcccaacacttagggaggccgaggcaggaggatcacttgagcccaggattttgagacaaggctaggcaacatggtgaaaccccatctgtatataaaaaaaaaacaattagcta

SEQ ID NO: 55904 - DNA, 120 bp, synthetic construct; identical to SEQ ID NO: 26977
  source 1..120: mol_type = other DNA

SEQ ID NO: 55905 - DNA, 120 bp, synthetic construct
  source 1..120: mol_type = other DNA
ggagaggctcctcacttctcagatggggcggctgccgggcggaggggctcctcacttctctgacgggtcggttgccaggcagagggtctcctcacttctcagacggggcggccgggcaga

SEQ ID NO: 55906 - DNA, 120 bp, synthetic construct; identical to SEQ ID NO: 26978
  source 1..120: mol_type = other DNA

SEQ ID NO: 55907 - DNA, 120 bp, synthetic construct; identical to SEQ ID NO: 26979
  source 1..120: mol_type = other DNA

SEQ ID NO: 55908 - DNA, 120 bp, synthetic construct
  source 1..120: mol_type = other DNA
gacaaacccacagccaatatcatgctgaatgggcaaaagctggaagtattccctttgaaaagcagcacaagacaaggatgccctctctcaccactcctattcaacatggtactgaaagtt

SEQ ID NO: 55909 - DNA, 120 bp, synthetic construct
  source 1..120: mol_type = other DNA
tgggtggggggagagagagagggagagagagaatgggagtttgttaggaataaagtaaaagaagagaacaagagtctctgcctggtaatccagagaattcttccagatcttgtccaagac

SEQ ID NO: 55910 - DNA, 120 bp, synthetic construct
  source 1..120: mol_type = other DNA
tagctgttttgaggaaactcaaagaaattcaagataacacagacaacaaattcagaattctatcagataaatttaacaagaaatttaaataattaaaaacaatcaagcagaaattctgga

SEQ ID NO: 55911 - DNA, 120 bp, synthetic construct; identical to SEQ ID NO: 15307
  source 1..120: mol_type = other DNA

SEQ ID NO: 55912 - DNA, 120 bp, synthetic construct
  source 1..120: mol_type = other DNA
tgatgagcatttcttcatgtgttttttggctgcataaatgtcttcttttgagaagtgtctgttcatgtccttcgcccactttttgatggggttgtttgtttttttcttgtaaatttgttt

SEQ ID NO: 55913 - DNA, 120 bp, synthetic construct
  source 1..120: mol_type = other DNA
ttcctaggtattttattctctttgaagcaattgtgaatgggagttcacccatgatttggctctctgtttgtctgttgttggtgtataagaatgcttgtgatttttgtacattgattttgt

SEQ ID NO: 55914 - DNA, 120 bp, synthetic construct
  source 1..120: mol_type = other DNA
acagaccaataacaggctctgaaattgaggcaataattaatagcttaccaaccaaaaaaatccaggaccagatggattcacagccaaattctaccagaggtacaaggaggagctggtacc

SEQ ID NO: 55915 - DNA, 120 bp, synthetic construct
  source 1..120: mol_type = other DNA
gcttcaaagagaataaaatatctaggaattcatcttacaaaggacatgaaggacctcttcaaggagaactacaaaccactgctcaatgaaataaaagaggatacaaataaatggaagaac

SEQ ID NO: 55916 - DNA, 120 bp, synthetic construct
  source 1..120: mol_type = other DNA
gatcattaaaaagtcaggaaacaacaggtgctggagaggatgtggagaaataggaacacttttacactgctggtgggactgtaaactagttcgaccattgtggaagtcagtgtggcaatt

SEQ ID NO: 55917 - DNA, 120 bp, synthetic construct
  source 1..120: mol_type = other DNA
tactcaattaggaaaagaggaagtcaaattgtccctgtatgcagataacatgattgtatatttagaaaaccccatcatctcagcccaaaatctccttaagctgataagcaacttcagcaa

SEQ ID NO: 55918 - DNA, 120 bp, synthetic construct
  source 1..120: mol_type = other DNA
gtccagaacaccaaaagcaatggcaaccaaagccaaaattgacaaatgggatctaattaaactaaagagcttctgaacagcaaaagaaactaccatcagagtgaacaggcaacctacaac

SEQ ID NO: 55919 - DNA, 120 bp, synthetic construct; identical to SEQ ID NO: 31784
  source 1..120: mol_type = other DNA

SEQ ID NO: 55920 - DNA, 120 bp, synthetic construct
  source 1..120: mol_type = other DNA
atcaatggaacagaacagagccctcagaaacaatgccgcatatctacaactatctgatctttgacaaacctgagaaaaacaagaaatggggaaaggattccctatttaataaatggtgct

SEQ ID NO: 55921 - DNA, 120 bp, synthetic construct
  source 1..120: mol_type = other DNA
catgtcctttgtagggacacggatgaaactggaaatcatcattctcagtaaactatcgcaagaacaaaaaaccaaacaccacatgttctcactcataggtgggaattgaacaatgagaac

SEQ ID NO: 55922 - DNA, 120 bp, synthetic construct; identical to SEQ ID NO: 31785
  source 1..120: mol_type = other DNA

SEQ ID NO: 55923 - DNA, 120 bp, synthetic construct
  source 1..120: mol_type = other DNA
acctcggcctcccaaagtgctgggattacaggcgtgagccaccatgcccagcccatgtgattattattttatctttctgggttataatattttcatttttctttttttttactatacttt

SEQ ID NO: 55924 - DNA, 120 bp, synthetic construct
  source 1..120: mol_type = other DNA
ctcagcatggctcagggccgtgcaggccgtggggccgcacttgctctagccctggatggcacacattactgccacattttcttaatccagtctatcattgatggacatttgggttggttc

SEQ ID NO: 55925 - DNA, 120 bp, synthetic construct
  source 1..120: mol_type = other DNA
aatcctttccccatttcttgtttttgtcaggtttgtcaaagatcagatggttgtagatgtgtggtattatttctgagggctctgttctgttccattggtctatatctctgtttcagtatc

SEQ ID NO: 55926 - DNA, 120 bp, synthetic construct
  source 1..120: mol_type = other DNA
caggcagaggcactcctcacctcccagacggggtggccaggcagaggcgctcctcacctcccaaacgaagggcaccaggcagaggcactcctcacctcccagacggggcggccgggaaga

SEQ ID NO: 55927 - DNA, 120 bp, synthetic construct
  source 1..120: mol_type = other DNA
ctagacggggtggccaggcagaggtgctcctcacttcccagaccgggtggccgggcagaggcgctcctcacatcccagatgaagggcagccaggcagaggcgctcctcaccttccagaca

SEQ ID NO: 55928 - DNA, 120 bp, synthetic construct
  source 1..120: mol_type = other DNA
ctcgggaggccgaggcgggcagatcaggagctggaggtcaggagctggagaccagccgggccaacagagcaaaaccccatctccaccaaaaatacaaaaaccagtcaggcatggcggtgc

SEQ ID NO: 55929 - DNA, 120 bp, synthetic construct; identical to SEQ ID NO: 28678
  source 1..120: mol_type = other DNA

SEQ ID NO: 55930 - DNA, 120 bp, synthetic construct
  source 1..120: mol_type = other DNA
gaggatcacctgagcccaggagttggagaccaacctgggcaacacagcaagactcctactttacaaatattttaacaaaaacaaaacaaattagctgggcgtggtggtgcatgcctgtat

SEQ ID NO: 55931 - DNA, 120 bp, synthetic construct; identical to SEQ ID NO: 28679
  source 1..120: mol_type = other DNA

SEQ ID NO: 55932 - DNA, 120 bp, synthetic construct; identical to SEQ ID NO: 28680
  source 1..120: mol_type = other DNA

SEQ ID NO: 55933 - DNA, 120 bp, synthetic construct; identical to SEQ ID NO: 28681
  source 1..120: mol_type = other DNA

SEQ ID NO: 55934 - DNA, 120 bp, synthetic construct; identical to SEQ ID NO: 28682
  source 1..120: mol_type = other DNA

SEQ ID NO: 55935 - DNA, 120 bp, synthetic construct
  source 1..120: mol_type = other DNA
atcatggtggaaggcaaaggaggagcaaagtcacgtcttacgtggcggcaggcgagagagtgtgcaggggaactgccctttatactaacatcagatctcgtgagacttaatatcaagaga

SEQ ID NO: 55936 - DNA, 120 bp, synthetic construct; identical to SEQ ID NO: 28683
  source 1..120: mol_type = other DNA

SEQ ID NO: 55937 - DNA, 120 bp, synthetic construct; identical to SEQ ID NO: 28684
  source 1..120: mol_type = other DNA

SEQ ID NO: 55938 - DNA, 120 bp, synthetic construct; identical to SEQ ID NO: 28685
  source 1..120: mol_type = other DNA

SEQ ID NO: 55939 - DNA, 120 bp, synthetic construct; identical to SEQ ID NO: 22309
  source 1..120: mol_type = other DNA

SEQ ID NO: 55940 - DNA, 120 bp, synthetic construct; identical to SEQ ID NO: 22310
  source 1..120: mol_type = other DNA

SEQ ID NO: 55941 - DNA, 120 bp, synthetic construct
  source 1..120: mol_type = other DNA
ggaggcagaggttgcagtgagctgagattgcgtcactgcactccagcatgggtgacagagtgagactgtctcagaaaaatgtatgtaattaattaattaactaactttagcttactttaa

SEQ ID NO: 55942 - DNA, 120 bp, synthetic construct
  source 1..120: mol_type = other DNA
cacgcccagataattttgtatttttagtagagacggggtttctccatgttggtcaggcgggtctcaaattcctgacctcaagtaatctgcccacctcggcctctgaaagtgctgggatta

SEQ ID NO: 55943 - DNA, 120 bp, synthetic construct
  source 1..120: mol_type = other DNA
aaaaacgagagtgacatgaaaacgtccagggttacttgaaatgtttttataagataggactatgtcttcaccatgggggcggggggtggggctcgatttcactaacgttgtatatgaaaa

SEQ ID NO: 55944 - DNA, 120 bp, synthetic construct; identical to SEQ ID NO: 13324
  source 1..120: mol_type = other DNA

SEQ ID NO: 55945 - DNA, 120 bp, synthetic construct; identical to SEQ ID NO: 13325
  source 1..120: mol_type = other DNA

SEQ ID NO: 55946 - DNA, 120 bp, synthetic construct; identical to SEQ ID NO: 13326
  source 1..120: mol_type = other DNA

SEQ ID NO: 55947 - DNA, 120 bp, synthetic construct
  source 1..120: mol_type = other DNA
caagtgatcctccctcctcagcctcccaaagtgctgggattataggcatgagccactgtgctgggttttaaattctctttttttttttaatgctttaaattctagggtacatgtgcacaa

SEQ ID NO: 55948 - DNA, 120 bp, synthetic construct
  source 1..120: mol_type = other DNA
gagctgtgattgtaccactgcactccagcctaggtgacagagtgagaccctgtctcaaaaaaaaaaaaatgacgtaaagatgtttaaagttgtttctctagggtcaaagcagagtttctc

SEQ ID NO: 55949 - DNA, 120 bp, synthetic construct
  source 1..120: mol_type = other DNA
tcctggggggtctgtgctggggggtctgtcctgggggggggtctgtcctggggggtctgtcctgggggggggtctgtcctggggggtctgtcctgggggcatctgtcctgggcggtgtct

SEQ ID NO: 55950 - DNA, 120 bp, synthetic construct
  source 1..120: mol_type = other DNA
aaaccaggattttattcttttttttaaattttactattatactttaagttttagggtacacgcgcacaatgtgcaggttagttacatatgtatacatgtgccatgctggtgtgctgcacc

SEQ ID NO: 55951 - DNA, 120 bp, synthetic construct
  source 1..120: mol_type = other DNA
aaactattccaatcaatagaaaaagaggaaatcctccctaactcattttatgaggccagcatcatcctgataccaaagccgggcagagacacaaccaaaaaagagaattttagaccaata

SEQ ID NO: 55952 - DNA, 120 bp, synthetic construct
  source 1..120: mol_type = other DNA
atggcaccaaaaaagaccccgcattgccaagtcaatcctaagccaaaagaacaagcctggagtcatcacactacccgacttcaaactatactacaaggctacagtaaccaaaacagcatg

SEQ ID NO: 55953 - DNA, 120 bp, synthetic construct
  source 1..120: mol_type = other DNA
tggaagtcagtgtggcaattcctcagggatctagaactagaaataccgtttgacccaggcatcccattactgggtatatacccaaaggattataaatcatgctgctataaagacacatgc

SEQ ID NO: 55954 - DNA, 120 bp, synthetic construct; identical to SEQ ID NO: 28950
  source 1..120: mol_type = other DNA

SEQ ID NO: 55955 - DNA, 120 bp, synthetic construct
  source 1..120: mol_type = other DNA
atcataatgacaggttcatattcacacataacaatattaactttaaatgtaaatggactaaatgctccaattaaaagacacagactggcaaattggataaagagtcaagacccatcagtg

SEQ ID NO: 55956 - DNA, 120 bp, synthetic construct
  source 1..120: mol_type = other DNA
aaataactaaaaccagagcagaactgaaggaaatagagacacaaaaaacccttcaaaaaattaatgaatccaggagctggttttttgaaaggatcaacaaaattgatagaccgctagcaa

SEQ ID NO: 55957 - DNA, 120 bp, synthetic construct
  source 1..120: mol_type = other DNA
taataacagctatccatgacaaacccacagccaatatcatactgaatgggcaaaaactggaagcattccctttgaaaactggcacaagacagggatgccctctctcaccactcctattca

SEQ ID NO: 55958 - DNA, 120 bp, synthetic construct
  source 1..120: mol_type = other DNA
atggattaaagacttaaacgttagacctaaaaccataaaaaccctagaagaaaacctaggcattaccattcaggacataggcatggtcaaggacttcatgtctaaaacaccaaaaacaat

SEQ ID NO: 55959 - DNA, 120 bp, synthetic construct; identical to SEQ ID NO: 24352
  source 1..120: mol_type = other DNA

SEQ ID NO: 55960 - DNA, 120 bp, synthetic construct; identical to SEQ ID NO: 24353
  source 1..120: mol_type = other DNA

SEQ ID NO: 55961 - DNA, 120 bp, synthetic construct
  source 1..120: mol_type = other DNA
gaggattgcttgagcccaggaggcagaggtttcagtgagctgtgattgcaccagtgcactccagcctgggcgacagagatcctgtctcaaaaaaaaaaaaaaaaatatatatatatatat

SEQ ID NO: 55962 - DNA, 120 bp, synthetic construct
  source 1..120: mol_type = other DNA
tctccacgtccccatcagattagttagatacagagtatggacacaaaggttctccaaagccccaccagagtagctagatacagagtgttgattggtgcactcacaaaccttgagctaaac

SEQ ID NO: 55963 - DNA, 120 bp, synthetic construct
  source 1..120: mol_type = other DNA
ttccaaaattgaccacacggttggaagtaaagcactcctcagcaaatgtaaaagaacagaaattataacaaactatctctcagaccacagtgcaatcaaactagaactcaggattaagaa

SEQ ID NO: 55964 - DNA, 120 bp, synthetic construct
  source 1..120: mol_type = other DNA
aatagaaaaagagggaatcctccctaactcattttatgaggccagcatcatcctgataccaaagccgggaagagacacaacaaaagaagaattttagaccaatatccctgatgaacgtcg

SEQ ID NO: 55965 - DNA, 120 bp, synthetic construct
  source 1..120: mol_type = other DNA
ttcttcacagaattggaaaaaactactttgaagttcatatggaaccaaaaaagagcctgcattgccaagtcaattctaagccaaaagaacaaagctggaggcatcacgctacctgacttc

SEQ ID NO: 55966 - DNA, 120 bp, synthetic construct
  source 1..120: mol_type = other DNA
caatgagataccatctcacaccagttagaatggcgatcattaaaaagtcaggaaacaacaggtgctggagaggatgtggagaaataggagcacttttacactgttggtgggactgtaaac

SEQ ID NO: 55967 - DNA, 120 bp, synthetic construct; identical to SEQ ID NO: 24355
  source 1..120: mol_type = other DNA

SEQ ID NO: 55968 - DNA, 120 bp, synthetic construct
  source 1..120: mol_type = other DNA
tcatgcctacaatcccaacactttgagaggccaaggtgggaggactgcttgagcttagaagttcaaaaccacctggggaaacataaggagacaccatctctacaaaaaaaaaaaaaaaaa

SEQ ID NO: 55969 - DNA, 120 bp, synthetic construct
  source 1..120: mol_type = other DNA
tctttttttttcttttttctttttgtttgttttgtttgctttttgtttttgagacagcattgcccaggttggagtgcagtggcaagacctcgattcactgcaacctctgcctgctgggct

SEQ ID NO: 55970 - DNA, 120 bp, synthetic construct; identical to SEQ ID NO: 24356
  source 1..120: mol_type = other DNA

SEQ ID NO: 55971 - DNA, 120 bp, synthetic construct
  source 1..120: mol_type = other DNA
ggggaagggggaagggagcctaaatactattgtttgcctcttcattctcttctctcaattctaccaccacccttctaatctactcacaagaacattagcatagggacaatccttattgca

SEQ ID NO: 55972 - DNA, 120 bp, synthetic construct; identical to SEQ ID NO: 9409
  source 1..120: mol_type = other DNA

SEQ ID NO: 55973 - DNA, 120 bp, synthetic construct; identical to SEQ ID NO: 9410
  source 1..120: mol_type = other DNA

SEQ ID NO: 55974 - DNA, 120 bp, synthetic construct
  source 1..120: mol_type = other DNA
gatcctgttattatgatgttagctggttattttgctctttagttgatgcagtttcttcctagcctcgatggtctttacaatttggcatgtttttgcagtggctggtaccagttgttcctt

SEQ ID NO: 55975 - DNA, 120 bp, synthetic construct
  source 1..120: mol_type = other DNA
ttctagttagccatttgtctaattttttttcaagggttttaacttctttgccattggttcgaccttcctcctttagctcagagtagtttgatcgtctgaagcctttttctctcaactcgt

SEQ ID NO: 55976 - DNA, 120 bp, synthetic construct
  source 1..120: mol_type = other DNA
gtgcccctcccctagcctcactgctgccttgcagtttggtctcagactgctgtgctagcaatgagcgtggctccgtgggcgtaggaccctctgagccaggcgctggatacaatctcctgg

SEQ ID NO: 55977 - DNA, 120 bp, synthetic construct; identical to SEQ ID NO: 9403
  source 1..120: mol_type = other DNA

SEQ ID NO: 55978 - DNA, 120 bp, synthetic construct
  source 1..120: mol_type = other DNA
ttcaattttgttgatcctttcaaaaaaccagctcctggattcattaattttttgaagggtttcttgtgtctctatgtccttcagttctgctctgattttagttatttcttgccttctgct

SEQ ID NO: 55979 - DNA, 120 bp, synthetic construct
  source 1..120: mol_type = other DNA
gggctaatatccagaaagtacaatgaactcaaacaaatttacaagaaaaaaacaaacaaccccatcaaaaagtgggcgaaggacatgaacagacacttctcaaaagaagacatttatgca

SEQ ID NO: 55980 - DNA, 120 bp, synthetic construct; identical to SEQ ID NO: 9404
  source 1..120: mol_type = other DNA

SEQ ID NO: 55981 - DNA, 120 bp, synthetic construct
  source 1..120: mol_type = other DNA
aataacacttagaattatgtctagattatgtgatatggtttggctctgtgtccccaaccaaatctcatgtcaaattgtaatccccacatgttaaggggggtcactggtgagaggtgattg

SEQ ID NO: 55982 - DNA, 120 bp, synthetic construct; identical to SEQ ID NO: 9406
  source 1..120: mol_type = other DNA

SEQ ID NO: 55983 - DNA, 120 bp, synthetic construct; identical to SEQ ID NO: 9407
  source 1..120: mol_type = other DNA

SEQ ID NO: 55984 - DNA, 120 bp, synthetic construct
  source 1..120: mol_type = other DNA
atgagtagattgcaaaaattttctgccatcctgtaggttgcctgttcactctgatggtatttcttttgctgtgcagaagctctttagtttaattagatcccatttgtcaattttggcttt

SEQ ID NO: 55985 - DNA, 120 bp, synthetic construct
  source 1..120: mol_type = other DNA
aatttccctcgacacactgctttgaatgtgtcccatagattctggtatgttgtgtcttagttctcattggtttcaaagaacatctttatttctaccttcatttccttatgtatccagtag

SEQ ID NO: 55986 - DNA, 120 bp, synthetic construct
  source 1..120: mol_type = other DNA
aattcaattctgttattatgatgttagctggttattttgctctttagttgatgcagtttcttcctgcatggtctttacaatttggcatgtttttgcagtggctggtaccagttgttcctt

SEQ ID NO: 55987 - DNA, 120 bp, synthetic construct
  source 1..120: mol_type = other DNA
ggaaaaaatgacactgatagacttgctcaatgcagggttaccacaaatcttcaatttgaaaaaaatgcagttcctccttgtacctctggtagaattcggctgtgaatccatctggtcctg

SEQ ID NO: 55988 - DNA, 120 bp, synthetic construct
  source 1..120: mol_type = other DNA
ggagagctttacttccaactatgtggtcaattttggaataagtgcagtgtggtgctgagaagaatgtatattctgttgatttggggtggagagttctgtagatgtctattaggtccactt

SEQ ID NO: 55989 - DNA, 120 bp, synthetic construct
  source 1..120: mol_type = other DNA
agaactctgctgttagtctaatgggcttccctttgtgggtaacccgaccgttctctctggctgtccttaacattttttccttcatttcaactttggtgaatctgacaattgtgtcttgga

SEQ ID NO: 55990 - DNA, 120 bp, synthetic construct
  source 1..120: mol_type = other DNA
cctgtttgcagatgacatgattgtatatctagaaaaccccattgtctcagcccaaaatctccttaagctgataagcaacttcagcaaagtctcaggatacaaaatcaatgcacaaaaatc

SEQ ID NO: 55991 - DNA, 120 bp, synthetic construct
  source 1..120: mol_type = other DNA
atatgaacagacacttctcaaaagaagacatttatgcagccaaaagacacatgaaaaaatgctcaccatcactgaccatcaaagaaatgcaaatcaaaaccacaatgagataccatctca

SEQ ID NO: 55992 - DNA, 120 bp, synthetic construct
  source 1..120: mol_type = other DNA
ggggagaatagaaccaagctggaaaacactcttcaagatatccagaagaacttccccaacctagcaagccaggccaaaattcaaattcaagaaatacagagaacaataaaaagactcctc

SEQ ID NO: 55993 - DNA, 120 bp, synthetic construct
  source 1..120: mol_type = other DNA
aacacttggacacagaatggggaacctcacacaccggggcctgttgtggggtggggggaggggggagggatagcattaggagatatacctaatgtaaatgacgagttaatgggtgcagca

SEQ ID NO: 55994 - DNA, 120 bp, synthetic construct
  source 1..120: mol_type = other DNA
ttcctctagcaaactgttatttatgcctaccatggctcagagggccactcagaattattttatttgtctttgtctttggtctgcatgcccttttgatgcccaaattcatgaaggtgaagg

SEQ ID NO: 55995 - DNA, 120 bp, synthetic construct
  source 1..120: mol_type = other DNA
tggcgtgggtgggtgagcggatgggtgggtgagcagatgggtgggtggcgtgggtgggtgagcggatgggtgggtggcgtgggtgggtgagcggatgggtgggtgagcggatgggtgggt

SEQ ID NO: 55996 - DNA, 120 bp, synthetic construct
  source 1..120: mol_type = other DNA
gatgtcttcggcgaagcaactgaggccccagaatctatttttgtgttcaatgaattgcaaacctccagccttacggtgagtcctttgtgtcctccctggcataaggctgagattctgtgg

SEQ ID NO: 55997 - DNA, 120 bp, synthetic construct
  source 1..120: mol_type = other DNA
tcatggcgtgccacaccacccagctgaccccagcagagccgacactggggatgcctcctccttcagtggtgttaggatttccacccacatttctgaatgcaaactccacatcctgcttcc

SEQ ID NO: 55998 - DNA, 120 bp, synthetic construct; identical to SEQ ID NO: 18538
  source 1..120: mol_type = other DNA

SEQ ID NO: 55999 - DNA, 120 bp, synthetic construct
  source 1..120: mol_type = other DNA
ctttgtggaatggagaggcgggaggggtggggaagggattgagaaatcggatggttgccgtgtctgtgtagaaagaagtagacatgggagacttttcattttgttctgtactaagaaaac

SEQ ID NO: 56000 - DNA, 120 bp, synthetic construct; identical to SEQ ID NO: 18539
  source 1..120: mol_type = other DNA

SEQ ID NO: 56001 - DNA, 120 bp, synthetic construct
  source 1..120: mol_type = other DNA
tggtgatccgcctacctcggcctcccaaagtgctgggattacaggtgtgagccactgtgcctggccttctttgttattttatttgtatttgacttcaagtgaatatatatatatatattt

SEQ ID NO: 56002 - DNA, 120 bp, synthetic construct; identical to SEQ ID NO: 17406
  source 1..120: mol_type = other DNA

SEQ ID NO: 56003 - DNA, 120 bp, synthetic construct; identical to SEQ ID NO: 17407
  source 1..120: mol_type = other DNA

SEQ ID NO: 56004 - DNA, 120 bp, synthetic construct
  source 1..120: mol_type = other DNA
ccctttactagatcgcaacagtctagacagcaagatcttttttcttttttttaattattatactttaagttttagggtacacgtgcacattgtgcaggttacatatatatacatgtgcca

SEQ ID NO: 56005 - DNA, 120 bp, synthetic construct
  source 1..120: mol_type = other DNA
gttgcaaaaattttctcccattttgtaggttgcctgttcactctgatggtagtttcttttgctgtgcagaagctctttagtttaattagatcccatttgtcaattttgtcttttgttgcc

SEQ ID NO: 56006 - DNA, 120 bp, synthetic construct
  source 1..120: mol_type = other DNA
ggctgagacaatggggttttctagatatacaatcatgtcgtctgcaaacagggacaatttgacttcctcttttcctaattgaataccctttatttccttctcctgcctaattgccctggc

SEQ ID NO: 56007 - DNA, 120 bp, synthetic construct
  source 1..120: mol_type = other DNA
attttctagtttatttgcgtagaggtgtttgtagtattccctgatggtagtttgtatttctgtgggatcggtggtgatatcccctttatcattttttattgtgtctatttgattcttctc

SEQ ID NO: 56008 - DNA, 120 bp, synthetic construct
  source 1..120: mol_type = other DNA
aaatatatttaggatagttagctcttcttgttgaattgatccctttaccattatgtaatggccttctttgtctcttttgatctttgttggtttaaagtctgttttatcagagactaggat

SEQ ID NO: 56009 - DNA, 120 bp, synthetic construct
  source 1..120: mol_type = other DNA
ttccagttgatcgcaccggctcctgaggcttctgcattcttcacgtagttctctagccttggttttcagctccatcagctcctttaagcacttctctgtattggttattctagttataca

SEQ ID NO: 56010 - DNA, 120 bp, synthetic construct
  source 1..120: mol_type = other DNA
cccaggtgaggcaatgcctcgccctgcttcggctggcgcacggtgcacgcacccactgacctgcgcccactgtctggcactcccgagtgagatgaacccggtacctcagatggaaatgca

SEQ ID NO: 56011 - DNA, 120 bp, synthetic construct; identical to SEQ ID NO: 16312
  source 1..120: mol_type = other DNA

SEQ ID NO: 56012 - DNA, 120 bp, synthetic construct
  source 1..120: mol_type = other DNA
tataggcgtgagccacggcacctgactgggattttttaaatttaaattaattaattttttaaatagatgggtcacactatgttgcccaggttggcctcaagctcctggcctcaagtgatc

SEQ ID NO: 56013 - DNA, 120 bp, synthetic construct
  source 1..120: mol_type = other DNA
aatttttccagtacactagagcaagaacccaggaaacagaaagccctctgtccttgcgataaagagggtctaattgagctgattaacgcgagccatctgcagatggcaaaactgaaagag

SEQ ID NO: 56014 - DNA, 120 bp, synthetic construct
  source 1..120: mol_type = other DNA
atacaaagagactggcagcattttgcccctgtcccagacatctgtgaaactttgaacttgagagaaataatttagggtatctggtggaagaaatttctaagcggcaaagctttcaagagg

SEQ ID NO: 56015 - DNA, 120 bp, synthetic construct; identical to SEQ ID NO: 26316
  source 1..120: mol_type = other DNA

SEQ ID NO: 56016 - DNA, 120 bp, synthetic construct; identical to SEQ ID NO: 26317
  source 1..120: mol_type = other DNA

SEQ ID NO: 56017 - DNA, 120 bp, synthetic construct
  source 1..120: mol_type = other DNA
cacattttcttaatcccgtctatcattgttggacatttgggttggttccaagtcttcgctattgtgaatagtgccacaataaacatacgtgtgcatgtgtctttatagcagcatgattta

SEQ ID NO: 56018 - DNA, 120 bp, synthetic construct
  source 1..120: mol_type = other DNA
tatgaacagacatttctcaaaagaagacatttatgcagccaaaagacacatgaaaaaatgctgatcatcactggccatcagagaaatgcaaatcaaaaccacaatgagatacaaaaatag

SEQ ID NO: 56019 - DNA, 120 bp, synthetic construct; identical to SEQ ID NO: 20645
  source 1..120: mol_type = other DNA

SEQ ID NO: 56020 - DNA, 120 bp, synthetic construct
  source 1..120: mol_type = other DNA
cacatgaacaaatgctcaccatcactggccatcagagaaatgcaaatcaaaaccacaatgagataccatctcacaccagttagaatggcaatcattaaaaagtcaggaaacaacaggtgc

SEQ ID NO: 56021 - DNA, 120 bp, synthetic construct; identical to SEQ ID NO: 20646
  source 1..120: mol_type = other DNA

SEQ ID NO: 56022 - DNA, 120 bp, synthetic construct
  source 1..120: mol_type = other DNA
cgctgctgttacccaggcaaacagggtccggagtggacctctagcaaactccaacagacctgcagctgagggtcctgtctgttagaaggaaaactaacaaacagaaaggacatccacacc

SEQ ID NO: 56023 - DNA, 120 bp, synthetic construct
  source 1..120: mol_type = other DNA
gatctctgggcagaaactctacaagccagaagagagtgggggccaatattcaacattcttaaagaattttcaacccagaatttcatatccagccaaactaagcttcataagtgaaggaga

SEQ ID NO: 56024 - DNA, 120 bp, synthetic construct
  source 1..120: mol_type = other DNA
tataacaaactgtctttcagaccacagtgcaatcaaactagaactcaggattaagaaactcactcaaaaccactcaactacatggaaactcaacaacctgctcctgaatgactactgggt

SEQ ID NO: 56025 - DNA, 120 bp, synthetic construct
  source 1..120: mol_type = other DNA
caacccttcatgctaaaaactctcaataaattaggtatcgatgggacatatctcaaaataataagagctatctatgacaaacccacagccaatatcatactgaatgggcaaaaactggaa

SEQ ID NO: 56026 - DNA, 120 bp, synthetic construct
  source 1..120: mol_type = other DNA
ctatactacaaggctacagtaaccgaaacagcatggtactggtaccaaaacagagatagagaccaatggaacagaacagagccctcagaaataacgccgcttatctacaactatctgatc

SEQ ID NO: 56027 - DNA, 120 bp, synthetic construct
  source 1..120: mol_type = other DNA
tatatacccaaaggactataaatcatgctgctattaagacacatgcacacatatgtttattgcagcactattcacaatagcaaagacttggaaccaacccaaatgtccaacaatgataga

SEQ ID NO: 56028 - DNA, 120 bp, synthetic construct
  source 1..120: mol_type = other DNA
ggtgtgtatgtgccacattttcttaatcccgtctatcattgttggacatttggcttggttccaagtctttgctattgtgaatagtgccgcaataaacatacgtgtgcatgtgtctttata

SEQ ID NO: 56029 - DNA, 120 bp, synthetic construct
  source 1..120: mol_type = other DNA
ttgcttttggtgttttagacatgaagtccttgcccatacctatgctctgaatggtattgcctaggttttcttctagggtttttatggttttaggtctaacatttaagtctttaatccatc

SEQ ID NO: 56030 - DNA, 120 bp, synthetic construct
  source 1..120: mol_type = other DNA
cccctgcactccagctggggcgacagagtgagaccctgtctcaaaataaataaataagtaaataaaaataaataaagttggtagcttcgtgggaaagaacagaaaggggcctgttgcaat

SEQ ID NO: 56031 - DNA, 120 bp, synthetic construct; identical to SEQ ID NO: 27734
  source 1..120: mol_type = other DNA

SEQ ID NO: 56032 - DNA, 120 bp, synthetic construct
  source 1..120: mol_type = other DNA
caagtagctgggactacaggcacacaccactaatcctagccacattttgttttctgtttttttgtagagatgaggtctcattatgtttcccaggctggtcttgaactcctgagctcaagt

SEQ ID NO: 56033 - DNA, 120 bp, synthetic construct
  source 1..120: mol_type = other DNA
gactggggagaaaaggtttgagggtgtgagggataaaatactacttattgggtagagggtacactgcttgggtgatgggtacaccaaaatctcagaaatcaccactaaaaatcttattca

SEQ ID NO: 56034 - DNA, 120 bp, synthetic construct
  source 1..120: mol_type = other DNA
gcaccgcccttaatccatttaaccctgagtggacacagcacatgtttcagagagcacagggttgggggtaaggtcacagatcaacaggatcccaaggcagaggaatttttcttagtgcag

SEQ ID NO: 56035 - DNA, 120 bp, synthetic construct
  source 1..120: mol_type = other DNA
aggatcatttgaggtcaggagtttgagatcagtctggccaaacatagcaaaaccctgtctctattaaaaatacaaaaaattagtcgggcgtggtggcacatgcctgtaatcctagctact

SEQ ID NO: 56036 - DNA, 120 bp, synthetic construct; identical to SEQ ID NO: 27735
  source 1..120: mol_type = other DNA

SEQ ID NO: 56037 - DNA, 120 bp, synthetic construct; identical to SEQ ID NO: 27736
  source 1..120: mol_type = other DNA

SEQ ID NO: 56038 - DNA, 120 bp, synthetic construct; identical to SEQ ID NO: 27737
  source 1..120: mol_type = other DNA

SEQ ID NO: 56039 - DNA, 120 bp, synthetic construct; identical to SEQ ID NO: 17424
  source 1..120: mol_type = other DNA

SEQ ID NO: 56040 - DNA, 120 bp, synthetic construct; identical to SEQ ID NO: 17425
  source 1..120: mol_type = other DNA

SEQ ID NO: 56041 - DNA, 120 bp, synthetic construct
  source 1..120: mol_type = other DNA
gtattctgttccatcagtctatcagtccctctctgtgccacagtatttaaagatgtttgctttatcctgagttgtaatatttgtagggtaaagctctgcatcatctaccttcatttccac

SEQ ID NO: 56042 - DNA, 120 bp, synthetic construct
  source 1..120: mol_type = other DNA
acccagatactaagcctaggacccaatactggcgtgagattgtatttcattgcggttttgatttgcatttctctaatgattagctacgttgagctttttttcataggtttgttggccaca

SEQ ID NO: 56043 - DNA, 120 bp, synthetic construct
  source 1..120: mol_type = other DNA
aattttctcccatgttgtaggttgcctgttcactctgatggtagtttcttttgctgtgcagaagctctttagtttaattacatcccatttgtcagttttggcttttgttgccattgcttt

SEQ ID NO: 56044 - DNA, 120 bp, synthetic construct
  source 1..120: mol_type = other DNA
ttctcctgcctaattgccctggccagaacttccaacactatgttgaataggatttaatgaggtggtttttttcttgtaaatttaagttccttatagctgctggatattagacttttgtca

SEQ ID NO: 56045 - DNA, 120 bp, synthetic construct; identical to SEQ ID NO: 17427
  source 1..120: mol_type = other DNA

SEQ ID NO: 56046 - DNA, 120 bp, synthetic construct
  source 1..120: mol_type = other DNA
ttttgatggggttgtttttttcttgtaaatttgtttgagttcattgtagattctggatattagccctttgtcagatgagtaggttgcaaaaattttctcccattttgtggtttgcctgtt

SEQ ID NO: 56047 - DNA, 120 bp, synthetic construct
  source 1..120: mol_type = other DNA
ggctgagacaatggggttttctagatatacaatcatgtcgtctgcaaacagggacaatttgacttcctcttttcctaattgaataccctttatttccttctcctgcctaactgccctgga

SEQ ID NO: 56048 - DNA, 120 bp, synthetic construct
  source 1..120: mol_type = other DNA
tccttttttctttattagtcttgctagcggtctatcaattttgtggatcctttcaaaaaaccagctcctggattcattaattttttgaagggttttttgtgtctctatttccttcagttc

SEQ ID NO: 56049 - DNA, 120 bp, synthetic construct
  source 1..120: mol_type = other DNA
ttttgggtgcatatatatttaggatagttagctcttcttgttgaatttatccctttaccattatgtaatggccttctttgtctcttttgatctttgttggtttaaagtctgttttatcag

SEQ ID NO: 56050 - DNA, 120 bp, synthetic construct
  source 1..120: mol_type = other DNA
aaacttccgttctcacttcatttcattcatttcatcttccatcactgataccctttcttccagttgatcacattggctcctgaggcttctgcattcttcatgtagttctcgtgccttggc

SEQ ID NO: 56051 - DNA, 120 bp, synthetic construct
  source 1..120: mol_type = other DNA
tccttgagctgtggtgggctccacccagttggagctttccagctgctttgtttacctaagcaagcctgggcaatggcgggcgcccctcccccagcctcgctgccgccttgcagtttgatc

SEQ ID NO: 56052 - DNA, 120 bp, synthetic construct; identical to SEQ ID NO: 17428
  source 1..120: mol_type = other DNA

SEQ ID NO: 56053 - DNA, 120 bp, synthetic construct
  source 1..120: mol_type = other DNA
gagtttccacacacaggttctccaagtccccaccagagcagctagatacagagtgtcgattggtgcattcacaaaccttgagctaaacacagggtgctgattggtgtgtttacaaacctt

SEQ ID NO: 56054 - DNA, 120 bp, synthetic construct
  source 1..120: mol_type = other DNA
aaggcagctaaggcccggcgagaaatcgagcgcagtgctggtgggccagcactgctgggggactcagtacaccctccgcagccactggcccgggtgctaagtcccccattgcccggggcc

SEQ ID NO: 56055 - DNA, 120 bp, synthetic construct; identical to SEQ ID NO: 32188
  source 1..120: mol_type = other DNA

SEQ ID NO: 56056 - DNA, 120 bp, synthetic construct; identical to SEQ ID NO: 18509
  source 1..120: mol_type = other DNA

SEQ ID NO: 56057 - DNA, 120 bp, synthetic construct
  source 1..120: mol_type = other DNA
tatagcaacatgatttatagtcctttaggtatatacccagtaatgggatggctgggtcaaatggtatttctagttctagatccctgaggaatcgccacactgacttccacaatggttgaa

SEQ ID NO: 56058 - DNA, 120 bp, synthetic construct
  source 1..120: mol_type = other DNA
ttattaaatagggaatcctttccccattgcttgtttttctcaggtttgtcaaagatcagatagttgtagatatgcggcattatttctgagggctctgttctgttccattgatctatatct

SEQ ID NO: 56059 - DNA, 120 bp, synthetic construct
  source 1..120: mol_type = other DNA
aattgccagtatgagaaatggaagaagtgtcatcactactgattccatggacctaagagaattcatgtcctttgtagggacatggatgaagctggaaaccatcattcacagcaaactatc

SEQ ID NO: 56060 - DNA, 120 bp, synthetic construct
  source 1..120: mol_type = other DNA
cgctgctgactgtttcttttgccatgcaaaatttctttaattaggtcccagctatttatctttgtttttattgcatttgcatttgtatcatatatgatatatatatgatatatatatccc

SEQ ID NO: 56061 - DNA, 120 bp, synthetic construct; identical to SEQ ID NO: 32192
  source 1..120: mol_type = other DNA

SEQ ID NO: 56062 - DNA, 120 bp, synthetic construct; identical to SEQ ID NO: 32193
  source 1..120: mol_type = other DNA

SEQ ID NO: 56063 - DNA, 120 bp, synthetic construct
  source 1..120: mol_type = other DNA
aaaacaaaaaacaaaaaccaagagttgaagtttccacagatgtgtctttgtggctttgtgatactgttgtccttccttccttccttccttccttccttccttccttccttccttccttcc

SEQ ID NO: 56064 - DNA, 120 bp, synthetic construct; identical to SEQ ID NO: 30561
  source 1..120: mol_type = other DNA

SEQ ID NO: 56065 - DNA, 120 bp, synthetic construct; identical to SEQ ID NO: 30562
  source 1..120: mol_type = other DNA

SEQ ID NO: 56066 - DNA, 120 bp, synthetic construct
  source 1..120: mol_type = other DNA
gagatgtggggagcgcctctgccccactgccccgtctgggatgtgaggtgcgcctctgcctggccgcgaccccatatgggaggtgaggagcctctctgcccggccgccccatctgagaag

SEQ ID NO: 56067 - DNA, 120 bp, synthetic construct
  source 1..120: mol_type = other DNA
cctccactattgtcctatgaccctgccaaatccccctccatgagaaacacccaagaatgatcaataaatactaaaaaagaaaaaaaaataataatgggagactttagcaccccactgtca

SEQ ID NO: 56068 - DNA, 120 bp, synthetic construct
  source 1..120: mol_type = other DNA
tgggtatatacccaaaggattataaaccatgctgctataaagacacacgtatgtttatagcggcactgttcacaatagcaaagacttggaaccaacctaaatatccaacaatgatagact

SEQ ID NO: 56069 - DNA, 120 bp, synthetic construct; identical to SEQ ID NO: 3057
  source 1..120: mol_type = other DNA

SEQ ID NO: 56070 - DNA, 120 bp, synthetic construct
  source 1..120: mol_type = other DNA
cattttgatttgcatttctctgatggccagtgatggtgagcattttttcatttgttttttggctgcataaatgtcttcttttgagaagtgtctgttcatgtccttcgcccactttttgat

SEQ ID NO: 56071 - DNA, 120 bp, synthetic construct
  source 1..120: mol_type = other DNA
ttgtagcaattgtgaatgggagttcactcatgatttggctctgtttgtctgttgttggtgtataagaatgcttgtgatttttgcacattgattttgtatcctgagactttgctgaagttg

SEQ ID NO: 56072 - DNA, 120 bp, synthetic construct
  source 1..120: mol_type = other DNA
tggtttagtcttgggatagtgtatgagtcgaggaacttatccatttcttctagattttctagtttatttgcgtagaggtgtttgtagtattctctgatggtagtttgtatttctgtggga

SEQ ID NO: 56073 - DNA, 120 bp, synthetic construct
  source 1..120: mol_type = other DNA
actgatgggtcttgactctttatccaatttgccagtctgtgtcttttaattggagcatttagtccatttacatttaaagttaatattgttatgtgtgaatttgattttatggacaagttt

SEQ ID NO: 56074 - DNA, 120 bp, synthetic construct
  source 1..120: mol_type = other DNA
ttgcagtgagccgagatcatgccacggccctccagcctgggcaacaaagtgagactgtcacaaaaaaagaaagaaagaaagaaagagaaagaaagaaagaaagaaagaaagaaagaaaga

SEQ ID NO: 56075 - DNA, 120 bp, synthetic construct; identical to SEQ ID NO: 10805
  source 1..120: mol_type = other DNA

SEQ ID NO: 56076 - DNA, 120 bp, synthetic construct
  source 1..120: mol_type = other DNA
agtctccaattcagtcacttagtttatggagagctttttgtcctttttctgtatagcatttacatttttattactctggactgccagccttttgtcctggcggggaggagggattgaaga

SEQ ID NO: 56077 - DNA, 120 bp, synthetic construct
  source 1..120: mol_type = other DNA
cagaggaatttttcttagtgcagaacaaaatgaaaagtctcccatgtctacttctttctacacagacacggcaaccatccgatttctcaatcttttccccacctttcctgcctttctatt

SEQ ID NO: 56078 - DNA, 120 bp, synthetic construct
  source 1..120: mol_type = other DNA
cggcacctcgggaggctgaggttggcgggatcactcgcggttaggggctggagaccggcccggccaacacagcgaaaccccgtctccaccaaaaccagtcaggcgtggcggcgcgtgcct

SEQ ID NO: 56079 - DNA, 120 bp, synthetic construct
  source 1..120: mol_type = other DNA
gcctcggcctcccaaagtgctcggattacaggcatgagccaccgtaagtttatttttaatatatatttttagccgactcttgctcctctctggaaaaactgttattttctgcaccaactt

SEQ ID NO: 56080 - DNA, 120 bp, synthetic construct; identical to SEQ ID NO: 32921
  source 1..120: mol_type = other DNA

SEQ ID NO: 56081 - DNA, 120 bp, synthetic construct
  source 1..120: mol_type = other DNA
gctcgttaagagtcatcaccaatccctaatctcaagtaaccagggacacaaacactgcggaaggccgcagggtcctctgcctaggaaaaccagagacctttgttcacttgtttatctgct

SEQ ID NO: 56082 - DNA, 120 bp, synthetic construct; identical to SEQ ID NO: 13858
  source 1..120: mol_type = other DNA

SEQ ID NO: 56083 - DNA, 120 bp, synthetic construct
  source 1..120: mol_type = other DNA
ggggctgacccccccacctccctcccggacggggcggctggctgggcagagaggctcctcacttcccagtaggggcggccgggcagaggcgcccctcactttccggatggggtggctggc

SEQ ID NO: 56084 - DNA, 120 bp, synthetic construct
  source 1..120: mol_type = other DNA
tccagcctgggcaccattgagcactgagtgaacgagactccctctgcaatcccggcaccttgggaggcggaggctggcggatcactcgcggttaggagctggagaccagcccggccaaca

SEQ ID NO: 56085 - DNA, 120 bp, synthetic construct
  source 1..120: mol_type = other DNA
ttagtatttcacttaggagaatctccatagagacaaactgaattgcatacttaacaaaagttatgagttgaggctgggtgcagtggctcatgcctgtaatcctagcactttgggaagctg

SEQ ID NO: 56086 - DNA, 120 bp, synthetic construct; identical to SEQ ID NO: 13860
  source 1..120: mol_type = other DNA

SEQ ID NO: 56087 - DNA, 120 bp, synthetic construct
  source 1..120: mol_type = other DNA
gttgtttcctgactttttaatgattgccattctaactggtgtgagttggtatctcattgtggttttgatttgcatttctctgatggccagtgatgatgagcattttttcatgtgtttttt

SEQ ID NO: 56088 - DNA, 120 bp, synthetic construct
  source 1..120: mol_type = other DNA
cagtggtttgtagttctccttgaagaggtccttcacatcccttgtaagttggattcctaggtattttattctctttgaagcaattgtgaatgggagttcactcatgatttggctctgttt

SEQ ID NO: 56089 - DNA, 120 bp, synthetic construct
  source 1..120: mol_type = other DNA
ttatccatttcttctagattttctagtttatttgcgtagaggtgtttgtagtattctctgatggtagtttgtattgctgtgggatcggtggtgatatcccctttatcatttttttattgt

SEQ ID NO: 56090 - DNA, 120 bp, synthetic construct
  source 1..120: mol_type = other DNA
tgacagtggggtgttaaagtctcccattattaatgtgtgggagtctaagtctctttgtaggtcactcaggacttgctttatgaatctagttgctcctgtattgggtgcatatatatttag

SEQ ID NO: 56091 - DNA, 120 bp, synthetic construct
  source 1..120: mol_type = other DNA
tgaatctgaacgttggcctgccttgctagattggggaagttctcctggataatatcctgcagagtgttttccaacttggttccattctccccatcactttcaggtacaccagtcagacgt

SEQ ID NO: 56092 - DNA, 120 bp, synthetic construct
  source 1..120: mol_type = other DNA
tttaagtcttcagaggttactgctgtctttttgtttgtctgtgccctgctcccagaggtggagcctacagaggcaggcaggcctccttgagctgtggtgggctccacccagttggagctt

SEQ ID NO: 56093 - DNA, 120 bp, synthetic construct; identical to SEQ ID NO: 22731
  source 1..120: mol_type = other DNA

SEQ ID NO: 56094 - DNA, 120 bp, synthetic construct; identical to SEQ ID NO: 22732
  source 1..120: mol_type = other DNA

SEQ ID NO: 56095 - DNA, 120 bp, synthetic construct; identical to SEQ ID NO: 22733
  source 1..120: mol_type = other DNA

SEQ ID NO: 56096 - DNA, 120 bp, synthetic construct; identical to SEQ ID NO: 31564
  source 1..120: mol_type = other DNA

SEQ ID NO: 56097 - DNA, 120 bp, synthetic construct
  source 1..120: mol_type = other DNA
tagtgcctcaataaacatacgtgtgcatgtgtctttatagcagcatgatttatagtcctttgggtatatacccagtaatgggatggctgggtcaaatggtatttctagttctagatccct

SEQ ID NO: 56098 - DNA, 120 bp, synthetic construct
  source 1..120: mol_type = other DNA
ggtccttcacatcccttataagttggattcctaggtattttattctctttgaagcaattgtgaatgggagttcactcatgatttggctctctgtttgtctgttgttggtgtataagaatg

SEQ ID NO: 56099 - DNA, 120 bp, synthetic construct; identical to SEQ ID NO: 31565
  source 1..120: mol_type = other DNA

SEQ ID NO: 56100 - DNA, 120 bp, synthetic construct; identical to SEQ ID NO: 31566
  source 1..120: mol_type = other DNA

SEQ ID NO: 56101 - DNA, 120 bp, synthetic construct; identical to SEQ ID NO: 15925
  source 1..120: mol_type = other DNA

SEQ ID NO: 56102 - DNA, 120 bp, synthetic construct
  source 1..120: mol_type = other DNA
cagatcacttgaggtcaggaatttaaggccagcctgggcaacatagcaaaaccccgactccactaaaaatacaaaaattagctaggcatagtgggtgtgtgactgtaatcccagctactt

SEQ ID NO: 56103 - DNA, 120 bp, synthetic construct
  source 1..120: mol_type = other DNA
attcagggtgcctgtggagaaagaatggagtcactgtttaaccatggtacctgcctcagccccagcagaccacaggaggttggccccagactcactgagtgcctgcagcagccgtacaga

SEQ ID NO: 56104 - DNA, 120 bp, synthetic construct
  source 1..120: mol_type = other DNA
taaaaatctgagatcaaatagtaaaaggttgcaaattctggcatgtttgactctaagatcttgtaactttaacagctatgctcagtataaagtgccgggcagaacgcgtttggccccaac

SEQ ID NO: 56105 - DNA, 120 bp, synthetic construct
  source 1..120: mol_type = other DNA
gagtaggtacaccttgagattggccccctccctcgacggggcgggtggacgtggagccacagttcctcctttgctggggggtataaatccgggtagttcgcagtttctgacagtgaaggc

SEQ ID NO: 56106 - DNA, 120 bp, synthetic construct; identical to SEQ ID NO: 22042
  source 1..120: mol_type = other DNA

SEQ ID NO: 56107 - DNA, 120 bp, synthetic construct; identical to SEQ ID NO: 22043
  source 1..120: mol_type = other DNA

SEQ ID NO: 56108 - DNA, 120 bp, synthetic construct; identical to SEQ ID NO: 22044
  source 1..120: mol_type = other DNA

SEQ ID NO: 56109 - DNA, 120 bp, synthetic construct; identical to SEQ ID NO: 22045
  source 1..120: mol_type = other DNA

SEQ ID NO: 56110 - DNA, 120 bp, synthetic construct
  source 1..120: mol_type = other DNA
ctcaagtacagaagaaatacagaatagaaattatccgaggtaggcagatcacttgattccaggagttcaagaccagcctgggcaacgtggggaaactccatctttacgaaaaatacgaaa

SEQ ID NO: 56111 - DNA, 120 bp, synthetic construct
  source 1..120: mol_type = other DNA
tagtatatatattatatatatatagtatatatatatattttagacggagtcctgctctgcatagtgtacaattttacctatggcatttttcagttacaaatatatatacctaggtagata

SEQ ID NO: 56112 - DNA, 120 bp, synthetic construct; identical to SEQ ID NO: 56111
  source 1..120: mol_type = other DNA

SEQ ID NO: 56113 - DNA, 120 bp, synthetic construct; identical to SEQ ID NO: 19546
  source 1..120: mol_type = other DNA

SEQ ID NO: 56114 - DNA, 120 bp, synthetic construct; identical to SEQ ID NO: 19547
  source 1..120: mol_type = other DNA

SEQ ID NO: 56115 - DNA, 120 bp, synthetic construct; identical to SEQ ID NO: 19548
  source 1..120: mol_type = other DNA

SEQ ID NO: 56116 - DNA, 120 bp, synthetic construct; identical to SEQ ID NO: 19549
  source 1..120: mol_type = other DNA

SEQ ID NO: 56117 - DNA, 120 bp, synthetic construct; identical to SEQ ID NO: 9009
  source 1..120: mol_type = other DNA

SEQ ID NO: 56118 - DNA, 120 bp, synthetic construct; identical to SEQ ID NO: 9010
  source 1..120: mol_type = other DNA

SEQ ID NO: 56119 - DNA, 120 bp, synthetic construct
  source 1..120: mol_type = other DNA
aagctgaaactggatcccttccttacaccttatacaaaaattaattcaagatggattaaagacttaaacgttagacctaaaaccataaaaaccctagaagaaaacctagacattaccatt

SEQ ID NO: 56120 - DNA, 120 bp, synthetic construct
  source 1..120: mol_type = other DNA
tgtgcttttccgacaggcttaaaaaagggcacaccacgagattatatcccgcacctggctcagagggtcctacgcccacggaatctcgctgattgctagcacagcagtctgagatcaaac

SEQ ID NO: 56121 - DNA, 120 bp, synthetic construct
  source 1..120: mol_type = other DNA
agaaaaaagaataaaaagaaacgagcaaagcctccaagaaatatgggactatgtgaaaagaccaaatctacatctgactggtgtacctgaaagtgacggggagaatggaaccaagttgga

SEQ ID NO: 56122 - DNA, 120 bp, synthetic construct
  source 1..120: mol_type = other DNA
caaaaaaaggcaggggttgcaatcctagtctctgataaaacagactttaaaccaacaaagatcaaaagagacaaagaaggccattacataatggtaaagggatcaactcaacaagaagag

SEQ ID NO: 56123 - DNA, 120 bp, synthetic construct
  source 1..120: mol_type = other DNA
agatcacacagaaataaaaactaccatcagagaatactacaaacacctctacgcaaataaactagaaaatctagaagaaatggataaattccttgacacatacactctcccaagactaaa

SEQ ID NO: 56124 - DNA, 120 bp, synthetic construct
  source 1..120: mol_type = other DNA
agcaaagtctcaggatacaaaatcaatgtacagaaatcacaagcattcttatataccaacaatcgacaaacagagagctaaatcatgagtgaactcccattcacaattgcttcaaagaga

SEQ ID NO: 56125 - DNA, 120 bp, synthetic construct
  source 1..120: mol_type = other DNA
agaagacatttatgcagccaaaaaacacatgaaaaaatgctcatcatcactggccatcagagaaatgcaaatcaaaaccacaatgagataccatctcacaccagttagaagggcaatcat

SEQ ID NO: 56126 - DNA, 120 bp, synthetic construct; identical to SEQ ID NO: 9011
  source 1..120: mol_type = other DNA

SEQ ID NO: 56127 - DNA, 120 bp, synthetic construct
  source 1..120: mol_type = other DNA
gggttttcgtgtctctgtctccttcagttctgatctgatcttatttatttcttgtcttctgttaccttttgcgtttgcccttgcttctcttgttcttttaattgtgatgttagggtgtcg

SEQ ID NO: 56128 - DNA, 120 bp, synthetic construct
  source 1..120: mol_type = other DNA
caccacacccagctaattttttgtatttttagtagagatagggtttcatcatattagccaggatgttctctatctcctcaccttgtgatctgcccgccttggcctcccaaagtgctggga

SEQ ID NO: 56129 - DNA, 120 bp, synthetic construct
  source 1..120: mol_type = other DNA
aaggagatttggggctgagatgacgggtttttctaaatataccatcatgtcatctgcacttttcctaagtgaatactccttatttctttctcctgcctgattgctctggccagaacttcc

SEQ ID NO: 56130 - DNA, 120 bp, synthetic construct
  source 1..120: mol_type = other DNA
ggctgggtcaaatggtatttctagttctagatccctgaggaatcgccacactgacttccacaatggttgaactagtttacagtcccaccaacagtgtaaaagtgttccaatttctctaca

SEQ ID NO: 56131 - DNA, 120 bp, synthetic construct
  source 1..120: mol_type = other DNA
ttgaaaagatcaacaaaattgatagaccactagcaagactaataaagaagaaaacagagaagaatcaaatagatgcaataaaaaatgataaaggggatatcatcagcaatcccacagaaa

SEQ ID NO: 56132 - DNA, 120 bp, synthetic construct
  source 1..120: mol_type = other DNA
aggaagtcaaattgtccctgtttgcagatgacatgattgtatatctagaaaacctcattgtctcagcccaaaatctccttaagctgataagcaacttcagcaaagtctcaggatataaaa

SEQ ID NO: 56133 - DNA, 120 bp, synthetic construct
  source 1..120: mol_type = other DNA
acacttctcaaaagaagacatttatgcagccgaaagacacgtgaaaaaatgcttatcatcactggtcatcagagaaatgcaaatcaaaaccacaatgagataccatctcacaccagttag

SEQ ID NO: 56134 - DNA, 120 bp, synthetic construct; identical to SEQ ID NO: 9012
  source 1..120: mol_type = other DNA

SEQ ID NO: 56135 - DNA, 120 bp, synthetic construct
  source 1..120: mol_type = other DNA
caagaaaaaaacaaacaaccccatcaaaaagtgggcaaaggacatgaacagacacttctcaaaagaagacatttatgcagccaaaaaacacatgaaaaaatgttcatcatcactggccat

SEQ ID NO: 56136 - DNA, 120 bp, synthetic construct
  source 1..120: mol_type = other DNA
gggaagctccaactggctggagcccaccacagctcaaggaggcctgcctgcctctgtaggctccacctctgggggcagggcacagacaaacaaaaagacagcagtaacctctgcagactt

SEQ ID NO: 56137 - DNA, 120 bp, synthetic construct
  source 1..120: mol_type = other DNA
cagcaacggaacaaagctggacatagaattactttgacgagttgagagaagaaggctgcagacgatcaaactactccgagctacaggaggaaattcaaaccaaaggcaaagaagttgaaa

SEQ ID NO: 56138 - DNA, 120 bp, synthetic construct
  source 1..120: mol_type = other DNA
taacaatattaactttaaatgtaaaaggactaaatatcccaattaaaagacacagactggcaaatgggataaagaatcaagacccatcagtgtgctgtattcaggaaacccatctcacgt

SEQ ID NO: 56139 - DNA, 120 bp, synthetic construct
  source 1..120: mol_type = other DNA
gcagaaggcaagaaataactaaaatcagagcagaactgaaggaaatagagacaaaaaaaatccttcaaaaaattaatgaatccagaacctggtttttagaaaggatcaacaaaattgata

SEQ ID NO: 56140 - DNA, 120 bp, synthetic construct
  source 1..120: mol_type = other DNA
ccagggcaatcaggcaggagaaggaaataaagggtattcaattaggaaaagaggaagccaaattgtccctgtttgcagacgacgtgattgtatatctagaaaaccccattgtctcagccc

SEQ ID NO: 56141 - DNA, 120 bp, synthetic construct
  source 1..120: mol_type = other DNA
catgggcaaggacttcatgtctaaaacaccaaaagcaatggcaacaaaagccaaaattgacaaatgagatctaattaaactaaagagtttctgcacagcaaaagaaactaccatcagagt

SEQ ID NO: 56142 - DNA, 120 bp, synthetic construct
  source 1..120: mol_type = other DNA
ggatagcattaggagatatagctaatgctaaatgacgagttaatgggtgcagcacaccagcatggcacatgtatacatatgtaactaacctgaacattgtgcacaggtaccctaaatctt

SEQ ID NO: 56143 - DNA, 120 bp, synthetic construct; identical to SEQ ID NO: 9014
  source 1..120: mol_type = other DNA

SEQ ID NO: 56144 - DNA, 120 bp, synthetic construct; identical to SEQ ID NO: 11094
  source 1..120: mol_type = other DNA

SEQ ID NO: 56145 - DNA, 120 bp, synthetic construct
  source 1..120: mol_type = other DNA
agcgcctctgccccgccgccccatctgggatgtgaggagcgcctctgcccggccacgaccccgtctgggaggtgaggagcgtctctgccgccccgtccgggagggaggtgggggggtcag

SEQ ID NO: 56146 - DNA, 120 bp, synthetic construct; identical to SEQ ID NO: 11095
  source 1..120: mol_type = other DNA

SEQ ID NO: 56147 - DNA, 120 bp, synthetic construct
  source 1..120: mol_type = other DNA
aattacatgtttactcttgggtaactactaattctctctggaactcaatctacccatcaataaaatgaggcagttggccacaatgactcctcggattcccccagcatgtttctagatcac

SEQ ID NO: 56148 - DNA, 120 bp, synthetic construct
  source 1..120: mol_type = other DNA
acctttaatctcagcagtttaggaggcctaggtgggaggatcacttgagcccaggagtttgaggccagcttgggcaacaaatgagaccccatctccacaataacaaaaaaaaaattagct

SEQ ID NO: 56149 - DNA, 120 bp, synthetic construct
  source 1..120: mol_type = other DNA
gtcttggtcctgtatttctacattcctttaacttatgattccctatcccttggtcagaagttggggtcctaaaaaatcacaaggctgggcgcagtggctcacgcctgtaatcccagcact

SEQ ID NO: 56150 - DNA, 120 bp, synthetic construct
  source 1..120: mol_type = other DNA
aaatatttcttccctttttctttttttttttttttttttttttgtggagacagggtctcaccctatcaccaaggctgagtgcagtggtgcaatcatggcttactgcagccttgaccaccc

SEQ ID NO: 56151 - DNA, 120 bp, synthetic construct
  source 1..120: mol_type = other DNA
ccaacatggtgaaaccctgtgtctactaaaaatacaaaattagccaggtgggggggtgcacgcctataaccccagctactcgagaggctgaggcagaaaaatggcttgaacctgggaggc

SEQ ID NO: 56152 - DNA, 120 bp, synthetic construct; identical to SEQ ID NO: 11098
  source 1..120: mol_type = other DNA

SEQ ID NO: 56153 - DNA, 120 bp, synthetic construct; identical to SEQ ID NO: 11099
  source 1..120: mol_type = other DNA

SEQ ID NO: 56154 - DNA, 120 bp, synthetic construct
  source 1..120: mol_type = other DNA
tctcaggaaagaagttctgacatggctcgtatggaaacctgaataaaatactctacgtggtcaggctgcataaagcacatagttcccctggcatttagagacagcccaaaaggagtccgt

SEQ ID NO: 56155 - DNA, 120 bp, synthetic construct; identical to SEQ ID NO: 19541
  source 1..120: mol_type = other DNA

SEQ ID NO: 56156 - DNA, 120 bp, synthetic construct
  source 1..120: mol_type = other DNA
gtttaagtgattctcctgtctcagactccggagtagctgcgactacaggcatgcaccaccaagctcgactaatttttttttgtatttttagtagagacaaggtttcactgtgttggcccg

SEQ ID NO: 56157 - DNA, 120 bp, synthetic construct
  source 1..120: mol_type = other DNA
tacagaatgggagaaaatttttgcaatctactcatctgacaaagggctaatacccagaatctacaatgaactctaacaaatttacaagaaaaaaacaagcaaccccatcaacaagtggcc

SEQ ID NO: 56158 - DNA, 120 bp, synthetic construct; identical to SEQ ID NO: 22541
  source 1..120: mol_type = other DNA

SEQ ID NO: 56159 - DNA, 120 bp, synthetic construct
  source 1..120: mol_type = other DNA
ataaatatatttttcatcattttattttattttttgagacagggtctcactgttggcccaggatggagtgcagtagtgaccactgcagccttgaactcttgggactcaagtgatcctcct

SEQ ID NO: 56160 - DNA, 120 bp, synthetic construct; identical to SEQ ID NO: 7808
  source 1..120: mol_type = other DNA

SEQ ID NO: 56161 - DNA, 120 bp, synthetic construct; identical to SEQ ID NO: 17194
  source 1..120: mol_type = other DNA

SEQ ID NO: 56162 - DNA, 120 bp, synthetic construct; identical to SEQ ID NO: 17195
  source 1..120: mol_type = other DNA

SEQ ID NO: 56163 - DNA, 120 bp, synthetic construct; identical to SEQ ID NO: 17196
  source 1..120: mol_type = other DNA

SEQ ID NO: 56164 - DNA, 120 bp, synthetic construct; identical to SEQ ID NO: 17193
  source 1..120: mol_type = other DNA

SEQ ID NO: 56165 - DNA, 120 bp, synthetic construct; identical to SEQ ID NO: 17197
  source 1..120: mol_type = other DNA

SEQ ID NO: 56166 - DNA, 120 bp, synthetic construct; identical to SEQ ID NO: 17198
  source 1..120: mol_type = other DNA

SEQ ID NO: 56167 - DNA, 120 bp, synthetic construct; identical to SEQ ID NO: 11319
  source 1..120: mol_type = other DNA

SEQ ID NO: 56168 - DNA, 120 bp, synthetic construct; identical to SEQ ID NO: 11320
  source 1..120: mol_type = other DNA

SEQ ID NO: 56169 - DNA, 120 bp, synthetic construct; identical to SEQ ID NO: 11321
  source 1..120: mol_type = other DNA

SEQ ID NO: 56170 - DNA, 120 bp, synthetic construct; identical to SEQ ID NO: 11322
  source 1..120: mol_type = other DNA

SEQ ID NO: 56171 - DNA, 120 bp, synthetic construct; identical to SEQ ID NO: 11323
  source 1..120: mol_type = other DNA

SEQ ID NO: 56172 - DNA, 120 bp, synthetic construct
  source 1..120: mol_type = other DNA
gacaacatacatgagactggatagtttataaataacagcaatttattctcatagttctggaggctgggaagtccaagatcaaggcactagcaaattctgtgtctaatgacggctgctccc

SEQ ID NO: 56173 - DNA, 120 bp, synthetic construct; identical to SEQ ID NO: 11305
  source 1..120: mol_type = other DNA

SEQ ID NO: 56174 - DNA, 120 bp, synthetic construct; identical to SEQ ID NO: 11306
  source 1..120: mol_type = other DNA

SEQ ID NO: 56175 - DNA, 120 bp, synthetic construct; identical to SEQ ID NO: 11307
  source 1..120: mol_type = other DNA

SEQ ID NO: 56176 - DNA, 120 bp, synthetic construct; identical to SEQ ID NO: 3175
  source 1..120: mol_type = other DNA

SEQ ID NO: 56177 - DNA, 120 bp, synthetic construct
  source 1..120: mol_type = other DNA
tcggcctcccaaatggcctcccaaagtgctgggattacaggcatgagccaccacgcccggcttactctgacaactattaaataaaagattattttgtacagaattatttgatgttatttc

SEQ ID NO: 56178 - DNA, 120 bp, synthetic construct
  source 1..120: mol_type = other DNA
cattttttcatgtgttttttggctgcataaatgtcttcttttgagaagtgtctgttcatgtccttcgcccactttttgatggggttgtttgtttttttcttttaaatttgtttgagttca

SEQ ID NO: 56179 - DNA, 120 bp, synthetic construct; identical to SEQ ID NO: 11310
  source 1..120: mol_type = other DNA

SEQ ID NO: 56180 - DNA, 120 bp, synthetic construct; identical to SEQ ID NO: 11311
  source 1..120: mol_type = other DNA

SEQ ID NO: 56181 - DNA, 120 bp, synthetic construct; identical to SEQ ID NO: 11312
  source 1..120: mol_type = other DNA

SEQ ID NO: 56182 - DNA, 120 bp, synthetic construct; identical to SEQ ID NO: 11313
  source 1..120: mol_type = other DNA

SEQ ID NO: 56183 - DNA, 120 bp, synthetic construct
  source 1..120: mol_type = other DNA
caaaattacaggatttaatgactatcccaaagtacggtgttcacttggttatgtccaagatgggaactgataggcgatggcctgacattatagctgtgctctaggatatgagagtaccag

SEQ ID NO: 56184 - DNA, 120 bp, synthetic construct; identical to SEQ ID NO: 11316
  source 1..120: mol_type = other DNA

SEQ ID NO: 56185 - DNA, 120 bp, synthetic construct; identical to SEQ ID NO: 11317
  source 1..120: mol_type = other DNA

SEQ ID NO: 56186 - DNA, 120 bp, synthetic construct
  source 1..120: mol_type = other DNA
taacaaaatctccttctggatcccaagaaaataagtatactgtttatgtattcttgggttggcacccacacccacacatacacacacacacacacatgtacatccccacacacacacata

SEQ ID NO: 56187 - DNA, 120 bp, synthetic construct
  source 1..120: mol_type = other DNA
ttggtgtgctgcacccattaactcgtcatttagcattaggtttatctcctaatgctatccctcccccctccccccaccccacaacagtccccagagtgtgatgttccccttcctgtgtcc

SEQ ID NO: 56188 - DNA, 120 bp, synthetic construct
  source 1..120: mol_type = other DNA
tctagggtttttatggtttcaggtctaacatgtaagtctttaatccatcttgaattgatttttgtataaggtgtaaggaagggatccagtttcagctttctatatatggctagccagttt

SEQ ID NO: 56189 - DNA, 120 bp, synthetic construct
  source 1..120: mol_type = other DNA
cactccatcaatacctagttaattgagagtttttagcgtgaagggctgttgaatttcgtcaaaggccttttctgcatctcttgagataatcatgtggtttttgtctttggttctgtttat

SEQ ID NO: 56190 - DNA, 120 bp, synthetic construct; identical to SEQ ID NO: 22021
  source 1..120: mol_type = other DNA

SEQ ID NO: 56191 - DNA, 120 bp, synthetic construct; identical to SEQ ID NO: 22022
  source 1..120: mol_type = other DNA

SEQ ID NO: 56192 - DNA, 120 bp, synthetic construct; identical to SEQ ID NO: 35212
  source 1..120: mol_type = other DNA

SEQ ID NO: 56193 - DNA, 120 bp, synthetic construct
  source 1..120: mol_type = other DNA
ttcgaggctgcagtgagccttgattgtgccactgcactccagcttgggtgacagactgagaccctgtctcaaaaaaaaaaaaaacaacaaaaaaccaaaaccaaaaaacctttattgtta

SEQ ID NO: 56194 - DNA, 120 bp, synthetic construct; identical to SEQ ID NO: 35206
  source 1..120: mol_type = other DNA

SEQ ID NO: 56195 - DNA, 120 bp, synthetic construct
  source 1..120: mol_type = other DNA
ctccctaagtttctgggcttagttatgtcttcgctgctggccacatatgtggaagtccttacagaaacacaaacttacagtaagtttactcagaggggataatctgaatttggaaaggag

SEQ ID NO: 56196 - DNA, 120 bp, synthetic construct; identical to SEQ ID NO: 35208
  source 1..120: mol_type = other DNA

SEQ ID NO: 56197 - DNA, 120 bp, synthetic construct; identical to SEQ ID NO: 35209
  source 1..120: mol_type = other DNA

SEQ ID NO: 56198 - DNA, 120 bp, synthetic construct; identical to SEQ ID NO: 35210
  source 1..120: mol_type = other DNA

SEQ ID NO: 56199 - DNA, 120 bp, synthetic construct
  source 1..120: mol_type = other DNA
gaaaaggaataagagtcaggagttaccagttacgaagtctgaattgacaagaagactgttctgttggaaaagtaaaacattgttgcttccttaagagagaaggtggtggggggcggtggg

SEQ ID NO: 56200 - DNA, 120 bp, synthetic construct
  source 1..120: mol_type = other DNA
gcagtgagccgagatcgcgccattgcgctccagcttgggcaacagagcgagacttcgtcaaaaaaaaaaaaaaaaaaaaaaacacaacaacaacaacaaaaaaacagagagacctgaatt

SEQ ID NO: 56201 - DNA, 120 bp, synthetic construct
  source 1..120: mol_type = other DNA
atctcctatatcccatttgttaaaagatgaacttcacttgctgagtagattttagctataattttctcagcacgttgatgttcacaataaaggaactgttgaaatataaagcaaaagagt

SEQ ID NO: 56202 - DNA, 120 bp, synthetic construct; identical to SEQ ID NO: 35211
  source 1..120: mol_type = other DNA

SEQ ID NO: 56203 - DNA, 120 bp, synthetic construct
  source 1..120: mol_type = other DNA
accaggtccctcctctgacataaggggattaaaatttggtatgagatttgggtggggacacaaagccaaatcatatcaaccagtgataggtacaagcttccatctgatctcaatcttatt

SEQ ID NO: 56204 - DNA, 120 bp, synthetic construct; identical to SEQ ID NO: 27182
  source 1..120: mol_type = other DNA

SEQ ID NO: 56205 - DNA, 120 bp, synthetic construct; identical to SEQ ID NO: 27183
  source 1..120: mol_type = other DNA

SEQ ID NO: 56206 - DNA, 120 bp, synthetic construct; identical to SEQ ID NO: 27184
  source 1..120: mol_type = other DNA

SEQ ID NO: 56207 - DNA, 120 bp, synthetic construct; identical to SEQ ID NO: 27187
  source 1..120: mol_type = other DNA

SEQ ID NO: 56208 - DNA, 120 bp, synthetic construct
  source 1..120: mol_type = other DNA
gacattccttcctcttttactaatcctcctcagcacagaccctttatgggtgtcgggctgggggacggtcaggtctttcccttcccacgaggccatatttcagactatcacatggggaga

SEQ ID NO: 56209 - DNA, 120 bp, synthetic construct; identical to SEQ ID NO: 27188
  source 1..120: mol_type = other DNA

SEQ ID NO: 56210 - DNA, 120 bp, synthetic construct; identical to SEQ ID NO: 27189
  source 1..120: mol_type = other DNA

SEQ ID NO: 56211 - DNA, 120 bp, synthetic construct; identical to SEQ ID NO: 27190
  source 1..120: mol_type = other DNA

SEQ ID NO: 56212 - DNA, 120 bp, synthetic construct
  source 1..120: mol_type = other DNA
ccctagaggtgaggctgagagtgtgacccatgagaaggtgcactacactcgaaaagaactgcttgagttttctttattattattatactttaagttctagggtacatgtgcacaacgtgc

SEQ ID NO: 56213 - DNA, 120 bp, synthetic construct
  source 1..120: mol_type = other DNA
gtattctctgatggtagtttgtatttctgtaggatcggtgacgatatcccctttttcattttttattatgtctatttgtttcttctctcttttctttattagtcttgctagcggtttatc

SEQ ID NO: 56214 - DNA, 120 bp, synthetic construct; identical to SEQ ID NO: 24314
  source 1..120: mol_type = other DNA

SEQ ID NO: 56215 - DNA, 120 bp, synthetic construct; identical to SEQ ID NO: 24315
  source 1..120: mol_type = other DNA

SEQ ID NO: 56216 - DNA, 120 bp, synthetic construct
  source 1..120: mol_type = other DNA
tcctagtcaaagaaaggggtgacagacggcacctggaaaatcgggtcactcccacccaaatactgcgcttttccgatgggcttaaaaaacgacacatcaggagattatatcctgcacctg

SEQ ID NO: 56217 - DNA, 120 bp, synthetic construct
  source 1..120: mol_type = other DNA
agtgcttaaggagctgatggagctgaaagccaaggctcgagaacaacgtgaagaatgcagaagcctcaggagccgatgcgatcaactggaagaaagggtatcagtgatggaagatgaaat

SEQ ID NO: 56218 - DNA, 120 bp, synthetic construct
  source 1..120: mol_type = other DNA
agacccatcagtgtgctgtattcaggaaacccatctcacgtgcagagacacacataggctcaaaataaaaggatggaggaagatctaccaagcaaatggaaaacaaaaaaaggaaggggt

SEQ ID NO: 56219 - DNA, 120 bp, synthetic construct
  source 1..120: mol_type = other DNA
acctctacgcaaataaactagaaaatctagaagaaatggataaattcctcaacatatacaccctcccaagactaaaccaggaagaagttgaatctctgaatagaccaataacaggagctg

SEQ ID NO: 56220 - DNA, 120 bp, synthetic construct
  source 1..120: mol_type = other DNA
tctagaaaaccccattgtctcagcccaaaatctccttaagctgataagcaaattcagcaaggtctcaggatacaaaatcaatgtacagaaatcacaagcattcttatacaccaataacag

SEQ ID NO: 56221 - DNA, 120 bp, synthetic construct
  source 1..120: mol_type = other DNA
attttcacaacctactcatctgacaaagggctaatatccagaatctacaatgaactcaaacaaatttacaagaaaaaaacaaacaaccccatcaaaaagtgggcgaaggatatgaacaga

SEQ ID NO: 56222 - DNA, 120 bp, synthetic construct; identical to SEQ ID NO: 24316
  source 1..120: mol_type = other DNA

SEQ ID NO: 56223 - DNA, 120 bp, synthetic construct; identical to SEQ ID NO: 24317
  source 1..120: mol_type = other DNA

SEQ ID NO: 56224 - DNA, 120 bp, synthetic construct; identical to SEQ ID NO: 24318
  source 1..120: mol_type = other DNA

SEQ ID NO: 56225 - DNA, 120 bp, synthetic construct
  source 1..120: mol_type = other DNA
ggaggtgaggagcgtctctgcccggccgccccatctgagaagtgaggagaccctccgcccggcagccgcccctatgagaagtgaggagcctctccgcccggcagccgccccgtctgagaa

SEQ ID NO: 56226 - DNA, 120 bp, synthetic construct
  source 1..120: mol_type = other DNA
tcaagaccagcctggccaacatgatgaaaccccatctctactgaaaatacataaattaaccgggcatggtggcatgcacctgtaatcccaactactcacgaggctgtggctcaagaattg

SEQ ID NO: 56227 - DNA, 120 bp, synthetic construct
  source 1..120: mol_type = other DNA
ttggatattagccgtttgtcagatggatagatggcaaaaattttctcctattctatagcttgcctgttcactgtgatgatagcttcttttgctgtgcagaagctcttcagtttaattaga

SEQ ID NO: 56228 - DNA, 120 bp, synthetic construct
  source 1..120: mol_type = other DNA
tatgctgcctacagtagcctcacttcaccttaaaggacagtcatacactgaaagtgaagggatgaaaaaagaaactaccatcagagtgaacaggcaacctacagaatgggagaacatttt

SEQ ID NO: 56229 - DNA, 120 bp, synthetic construct
  source 1..120: mol_type = other DNA
taaatgacgagttaatgggtgcagcacaccaacatggcacatgtatatatatgtaacaaacctgcatgttgtgcacatgtaccctaaaacttaaagtatgataaaaaaaaaaagaatcta

SEQ ID NO: 56230 - DNA, 120 bp, synthetic construct; identical to SEQ ID NO: 24319
  source 1..120: mol_type = other DNA

SEQ ID NO: 56231 - DNA, 120 bp, synthetic construct
  source 1..120: mol_type = other DNA
gggcggctgccgggcggagggtctcctcacttctcagacggggcggccgggcagagacgctcctcacctcccagacggggtcgcggccgggcagaggtgctcctcacatcccagacgggg

SEQ ID NO: 56232 - DNA, 120 bp, synthetic construct; identical to SEQ ID NO: 24320
  source 1..120: mol_type = other DNA

SEQ ID NO: 56233 - DNA, 120 bp, synthetic construct
  source 1..120: mol_type = other DNA
gccagcctttgttatcaggatgatgttggcctcataaaatgaattagggaggattccctctttttcttttgattggaattgtttcagaaggaatggtaccagctcctctttgtacctctg

SEQ ID NO: 56234 - DNA, 120 bp, synthetic construct; identical to SEQ ID NO: 24307
  source 1..120: mol_type = other DNA

SEQ ID NO: 56235 - DNA, 120 bp, synthetic construct; identical to SEQ ID NO: 24308
  source 1..120: mol_type = other DNA

SEQ ID NO: 56236 - DNA, 120 bp, synthetic construct
  source 1..120: mol_type = other DNA
ctagattcctgaggaatcaccacattgacttccacaagggttgaactagtttacagtcccaccaacagtgtaaaagtgttcctatttctccacatcctctccagcacctgttgtttcctg

SEQ ID NO: 56237 - DNA, 120 bp, synthetic construct
  source 1..120: mol_type = other DNA
acctgaaagtgacggggagaatggaaccaagttggaaaacactctgcaggatattatctaggagaacttccccaatctagcaaggcaggccaacattcagattcaggaaatacagagaac

SEQ ID NO: 56238 - DNA, 120 bp, synthetic construct
  source 1..120: mol_type = other DNA
ttagtgacctacaaagagacttagactcctacacaataataatgggggactttaacagtctctgttttctggggttattttggtgtgtacttaggagtagaattcctagagcatatggta

SEQ ID NO: 56239 - DNA, 120 bp, synthetic construct; identical to SEQ ID NO: 24309
  source 1..120: mol_type = other DNA

SEQ ID NO: 56240 - DNA, 120 bp, synthetic construct; identical to SEQ ID NO: 24310
  source 1..120: mol_type = other DNA

SEQ ID NO: 56241 - DNA, 120 bp, synthetic construct
  source 1..120: mol_type = other DNA
aaagacacaacataccagaatctctgggatacattaaaagcaatgtgtagtgggaaatttgtgcactaaatgcccacaagagaaagcaggaaagatccaaaattgacaccctaacatcac

SEQ ID NO: 56242 - DNA, 120 bp, synthetic construct; identical to SEQ ID NO: 24311
  source 1..120: mol_type = other DNA

SEQ ID NO: 56243 - DNA, 120 bp, synthetic construct
  source 1..120: mol_type = other DNA
tacaaggctacagtaaccaaaacagcatggtactggtaccaaaacagagatatagatcaatggaacagaacagagccctcagaaataactccgcgtatctacaactatctgatctttgac

SEQ ID NO: 56244 - DNA, 120 bp, synthetic construct; identical to SEQ ID NO: 24312
  source 1..120: mol_type = other DNA

SEQ ID NO: 56245 - DNA, 120 bp, synthetic construct; identical to SEQ ID NO: 24311
  source 1..120: mol_type = other DNA

SEQ ID NO: 56246 - DNA, 120 bp, synthetic construct
  source 1..120: mol_type = other DNA
ataaatttccccctacacactgctttaaatgtgtcccagagattctggtatgttgtgtcttcgttctttttggtttcaaagaacatctttatttctgccttcattttgttacttacctag

SEQ ID NO: 56247 - DNA, 120 bp, synthetic construct; identical to SEQ ID NO: 24313
  source 1..120: mol_type = other DNA

SEQ ID NO: 56248 - DNA, 120 bp, synthetic construct
  source 1..120: mol_type = other DNA
aagtgtctgttcatgtcctttgcccactttttgatggggttgtttgtttttttcttgtaaatttgtttgagttcattgtagattgtggatattagccctttgtcagatgagtaggttgca

SEQ ID NO: 56249 - DNA, 120 bp, synthetic construct
  source 1..120: mol_type = other DNA
gtataagaatgcttgtgatttttgtacattgattttgtatcctgagactttgctgaagttgcttatcagcttaaggagattttgggctgagacagtgggattttctagatatacaatcat

SEQ ID NO: 56250 - DNA, 120 bp, synthetic construct
  source 1..120: mol_type = other DNA
ggtagtttgtatttctgtgggatcggtggtgatatcccctttatcattttttattgcgtctatttgattcttctctctttttttctttattagtcttgctagtggtctatcttttttgtt

SEQ ID NO: 56251 - DNA, 120 bp, synthetic construct
  source 1..120: mol_type = other DNA
tcttgttgaattgatccctttaccattatgtaatggccttctttgtctcttttgatctttattggtttaaagtctgttttatcagagactaggattgcaacccctgcctttttttgtttt

SEQ ID NO: 56252 - DNA, 120 bp, synthetic construct
  source 1..120: mol_type = other DNA
ataccttcttctaaatttttttcaaagttttcaacttctttgcctttggtttgagtgtcctcccgtagctcagagtaatttgatcgtctgaagccttcttctctcagctcgtcaaagtca

SEQ ID NO: 56253 - DNA, 120 bp, synthetic construct
  source 1..120: mol_type = other DNA
agtctccgtgggcgtaggaccctccgagccacgtgcgggatataatcttgtggtgtgccgttttttaagcccgtcggaaaagcgcagtattcgggtgggagtgacccgattttccaggtg

SEQ ID NO: 56254 - DNA, 120 bp, synthetic construct
  source 1..120: mol_type = other DNA
catcagttgatcatatggtttttctctttcattctgttgatgtgatttagcacattgattgatttgcatattttgaaccatccttgaattcctgcaataaatcccacttggtcatgacaa

SEQ ID NO: 56255 - DNA, 120 bp, synthetic construct; identical to SEQ ID NO: 29952
  source 1..120: mol_type = other DNA

SEQ ID NO: 56256 - DNA, 120 bp, synthetic construct
  source 1..120: mol_type = other DNA
acgcagctggagatctgagaaccggcagactgcctcctcaagtgggtccctgacccctgacccccgagcagcctaactgggaggcaccccccagcaggggcacactgacacctcacacgg

SEQ ID NO: 56257 - DNA, 120 bp, synthetic construct
  source 1..120: mol_type = other DNA
ctctcggcagaaaccctacaagccagaagagagtgggggccaatattcaacgttcttaaagaaaagaattttcaacccagaatttcatatccagccaaactaagcttcataagtgaagga

SEQ ID NO: 56258 - DNA, 120 bp, synthetic construct
  source 1..120: mol_type = other DNA
actcaaagccgctcaactacatggaaactgaacaacctgctcctgaatgactactgggtacataacgaaatgaaggcagaaataaagatgttctttgaaaccaacgagaacaaagacacc

SEQ ID NO: 56259 - DNA, 120 bp, synthetic construct
  source 1..120: mol_type = other DNA
gatgcaaggctggttcaatatacgcaaatcaataaatgtaatccagcatataaacagagccaaagacaaaaaccacatgattatctcaatagatgcagaaaaaacctttgacaaatttca

SEQ ID NO: 56260 - DNA, 120 bp, synthetic construct
  source 1..120: mol_type = other DNA
actactttaaagttcatatggaaccaaaaaagagcccgcattgccaagtcaatcctaagccaaaagaacaaagctggaggcatcacactacctgacttcaaactatactacaaggctaca

SEQ ID NO: 56261 - DNA, 120 bp, synthetic construct
  source 1..120: mol_type = other DNA
tagaaatgccatttgacccagccatcgcattactgggtatatacccaaaggactataaatcatgctgctataaagacacatgcacacgtatgtttattgcggcactattcacaatagcaa

SEQ ID NO: 56262 - DNA, 120 bp, synthetic construct; identical to SEQ ID NO: 29953
  source 1..120: mol_type = other DNA

SEQ ID NO: 56263 - DNA, 120 bp, synthetic construct; identical to SEQ ID NO: 29951
  source 1..120: mol_type = other DNA

SEQ ID NO: 56264 - DNA, 120 bp, synthetic construct; identical to SEQ ID NO: 29954
  source 1..120: mol_type = other DNA

SEQ ID NO: 56265 - DNA, 120 bp, synthetic construct
  source 1..120: mol_type = other DNA
actatcgcaaggacaaaaaaccaaacaccgcatgttctcactcataggtgggaactgaacaatgagaacacatggacacaggaaggggaacatcacactctggggactgttgtggggtgg

SEQ ID NO: 56266 - DNA, 120 bp, synthetic construct; identical to SEQ ID NO: 29955
  source 1..120: mol_type = other DNA

SEQ ID NO: 56267 - DNA, 120 bp, synthetic construct; identical to SEQ ID NO: 29956
  source 1..120: mol_type = other DNA

SEQ ID NO: 56268 - DNA, 120 bp, synthetic construct
  source 1..120: mol_type = other DNA
aagtaacacctctcagatttttttcttaatcttttcaaatcctggaaataaatacacacacacacacacacacacacacacacacacacacacgtatacgatatgaatatatatctgcat

SEQ ID NO: 56269 - DNA, 120 bp, synthetic construct; identical to SEQ ID NO: 31412
  source 1..120: mol_type = other DNA

SEQ ID NO: 56270 - DNA, 120 bp, synthetic construct
  source 1..120: mol_type = other DNA
tttgctattgtgaatgtgccacaataaacatacatgtgcatgtgtctttatagcagcatgacttataatcctttgggtatatacccagtaatgggatggctgggtcaaatggtatttcta

SEQ ID NO: 56271 - DNA, 120 bp, synthetic construct; identical to SEQ ID NO: 31414
  source 1..120: mol_type = other DNA

SEQ ID NO: 56272 - DNA, 120 bp, synthetic construct
  source 1..120: mol_type = other DNA
ttcctccaactctggcagctttttcttttcttttcttttctttcttttgttgctgttgttgttgttgtttgatggagtcttgcactgtcacccaggatgaagtgcagtggcacaatctct

SEQ ID NO: 56273 - DNA, 120 bp, synthetic construct; identical to SEQ ID NO: 19551
  source 1..120: mol_type = other DNA

SEQ ID NO: 56274 - DNA, 120 bp, synthetic construct; identical to SEQ ID NO: 19552
  source 1..120: mol_type = other DNA

SEQ ID NO: 56275 - DNA, 120 bp, synthetic construct; identical to SEQ ID NO: 2811
  source 1..120: mol_type = other DNA

SEQ ID NO: 56276 - DNA, 120 bp, synthetic construct; identical to SEQ ID NO: 7668
  source 1..120: mol_type = other DNA

SEQ ID NO: 56277 - DNA, 120 bp, synthetic construct
  source 1..120: mol_type = other DNA
aattgttttgaaatctgtttacctatctccttacaaggaatgaagcaattaaaagtcaaaacttcatcttattgagaggtgacagcgtgctggcagtcctcagagccctcgcttgctctc

SEQ ID NO: 56278 - DNA, 120 bp, synthetic construct
  source 1..120: mol_type = other DNA
aggtttgtgagtgcaccaatcgacactctgtatctagctgctctggtggggccttgtagaacctatgtgtggaaactctgtatctaactaatctgatggggacgtggagaacctttgtat

SEQ ID NO: 56279 - DNA, 120 bp, synthetic construct
  source 1..120: mol_type = other DNA
cagaaatatagaccaatggaacagaacagagccctcagaaataataccactcatctacaaccatctgatctttgacaaacctgacaaaaacaagaaatggggaaaggattccctatttaa

SEQ ID NO: 56280 - DNA, 120 bp, synthetic construct
  source 1..120: mol_type = other DNA
aaatcattctgctataaagacacatgcacacatatgtttactgcggcactattcacaatagcaaagacttggaaccaacccaaatgtccatcaatgatagactggatgaagaaaatgtgg

SEQ ID NO: 56281 - DNA, 120 bp, synthetic construct; identical to SEQ ID NO: 7670
  source 1..120: mol_type = other DNA

SEQ ID NO: 56282 - DNA, 120 bp, synthetic construct; identical to SEQ ID NO: 7671
  source 1..120: mol_type = other DNA

SEQ ID NO: 56283 - DNA, 120 bp, synthetic construct; identical to SEQ ID NO: 32025
  source 1..120: mol_type = other DNA

SEQ ID NO: 56284 - DNA, 120 bp, synthetic construct; identical to SEQ ID NO: 32026
  source 1..120: mol_type = other DNA

SEQ ID NO: 56285 - DNA, 120 bp, synthetic construct; identical to SEQ ID NO: 32027
  source 1..120: mol_type = other DNA

SEQ ID NO: 56286 - DNA, 120 bp, synthetic construct
  source 1..120: mol_type = other DNA
tgcatagtattccacggtgtatatgtgccacattttcttaatccagtctatcgttgggcatttgggttggttccaagtctttgctattgtgaatagtgctgctataaacatacgtgtgca

SEQ ID NO: 56287 - DNA, 120 bp, synthetic construct
  source 1..120: mol_type = other DNA
cttgcccatgcctatgtcctgaatggtattgcctaggttttcttctagggtttttatggttttaggtctaacatttaagtctttaatccatcttgaattactttttgtataaggtgtaag

SEQ ID NO: 56288 - DNA, 120 bp, synthetic construct
  source 1..120: mol_type = other DNA
attcttctctcttttcttctttgttagtcttgctagcggtctatcaattttgttgatcttttcaaaaaaccagctcctggattcattaattttttgaagggttttttgtgtttctgtttc

SEQ ID NO: 56289 - DNA, 120 bp, synthetic construct
  source 1..120: mol_type = other DNA
gaatacagcacactgatgggtcttgactctttatccaatttgccagtctgtgtcttttaattggagcatttagcccatttacatttaatttaatattgttatgtgtgaatttgatcctgt

SEQ ID NO: 56290 - DNA, 120 bp, synthetic construct; identical to SEQ ID NO: 32024
  source 1..120: mol_type = other DNA

SEQ ID NO: 56291 - DNA, 120 bp, synthetic construct; identical to SEQ ID NO: 32028
  source 1..120: mol_type = other DNA

SEQ ID NO: 56292 - DNA, 120 bp, synthetic construct; identical to SEQ ID NO: 32029
  source 1..120: mol_type = other DNA

SEQ ID NO: 56293 - DNA, 120 bp, synthetic construct; identical to SEQ ID NO: 32030
  source 1..120: mol_type = other DNA

SEQ ID NO: 56294 - DNA, 120 bp, synthetic construct; identical to SEQ ID NO: 32031
  source 1..120: mol_type = other DNA

SEQ ID NO: 56295 - DNA, 120 bp, synthetic construct; identical to SEQ ID NO: 13877
  source 1..120: mol_type = other DNA

SEQ ID NO: 56296 - DNA, 120 bp, synthetic construct; identical to SEQ ID NO: 13878
  source 1..120: mol_type = other DNA

SEQ ID NO: 56297 - DNA, 120 bp, synthetic construct; identical to SEQ ID NO: 13879
  source 1..120: mol_type = other DNA

SEQ ID NO: 56298 - DNA, 120 bp, synthetic construct
  source 1..120: mol_type = other DNA
ttactttcctaataaacttgctttcactttacagacttgccctgaattctttgctgtgagagatccaagaaccctctcttggggtctggatgagaacccctgtctggtaacaaaaccatt

SEQ ID NO: 56299 - DNA, 120 bp, synthetic construct; identical to SEQ ID NO: 22584
  source 1..120: mol_type = other DNA

SEQ ID NO: 56300 - DNA, 120 bp, synthetic construct
  source 1..120: mol_type = other DNA
agattcagcttagtagtattttttggagaatatcaaaaatctattttcttggccaggcatagtggctcatgtctataatcccagtgctttgagaggctgacacgggaggatcacttgagc

SEQ ID NO: 56301 - DNA, 120 bp, synthetic construct
  source 1..120: mol_type = other DNA
ttaactactaatttaatagcaaaactttattgggtcttaaataatatataaccatgtatgaaaatagctgtggaagctcaaggaggcctgcctgcctctgtaggctccacctctgggggc

SEQ ID NO: 56302 - DNA, 120 bp, synthetic construct
  source 1..120: mol_type = other DNA
aaaacactctgcaggatattatccaggagaacttccccaatctagcaaggcaggccaacgttcagattcaggaaatacagagaacgtcacaaagatactcctcgagaagagcaactccaa

SEQ ID NO: 56303 - DNA, 120 bp, synthetic construct
  source 1..120: mol_type = other DNA
ttggaagtaaagctctcctcagcaaatgtaaaagaacagaaattataacaaactatctctcagaccacagtgcaatcaaactagaactcaggattaagagtctcactcaaaaccgctcaa

SEQ ID NO: 56304 - DNA, 120 bp, synthetic construct
  source 1..120: mol_type = other DNA
aattttagaccaatatccttgatgaacattgatgcaaaaatcctcaataaaatactggcaaaccgaatccagcagcacatcaaaagcttatccaccatgatcaagtgggcttcatccctg

SEQ ID NO: 56305 - DNA, 120 bp, synthetic construct
  source 1..120: mol_type = other DNA
actttaaagttcatatggaaccaaaaaagagcccgcatcgccaagtcaatcctaagccaaaagaacaaagctggaggcatcacactacctgacttcaaactatactgcaaggctacagta

SEQ ID NO: 56306 - DNA, 120 bp, synthetic construct
  source 1..120: mol_type = other DNA
catcagagaaatgcaaatcaaaaccactatgagatatcatctcataccagttagaatggcaatcattaaaaagtcaggaaacaacaggtgctggagaggatgtggagaaataggaacact

SEQ ID NO: 56307 - DNA, 120 bp, synthetic construct; identical to SEQ ID NO: 19129
  source 1..120: mol_type = other DNA

SEQ ID NO: 56308 - DNA, 120 bp, synthetic construct
  source 1..120: mol_type = other DNA
ccagtaatgggatggctgggtcaaatggcatttctagctctagatccctgaggaatcacctcaccgacttccacaatggttgaactagtttacagtcccaccaacagtgtaaaagtgttc

SEQ ID NO: 56309 - DNA, 120 bp, synthetic construct; identical to SEQ ID NO: 19130
  source 1..120: mol_type = other DNA

SEQ ID NO: 56310 - DNA, 120 bp, synthetic construct; identical to SEQ ID NO: 19131
  source 1..120: mol_type = other DNA

SEQ ID NO: 56311 - DNA, 120 bp, synthetic construct; identical to SEQ ID NO: 19132
  source 1..120: mol_type = other DNA

SEQ ID NO: 56312 - DNA, 120 bp, synthetic construct; identical to SEQ ID NO: 19133
  source 1..120: mol_type = other DNA

SEQ ID NO: 56313 - DNA, 120 bp, synthetic construct
  source 1..120: mol_type = other DNA
aaacaattactggtctcaagcgagagaacttgacagcactgtttgtcacacatgcctcatccttgtaactggggtaaccatttgtgttggctaattggctttatgcagaggaaaaacaaa

SEQ ID NO: 56314 - DNA, 120 bp, synthetic construct
  source 1..120: mol_type = other DNA
gtgaatagtgctgcaataaacatacgtgtgcatgtgtctttatagcagcatgatttatagtcctttgggtatatacccagtaatgggatggcatgagtgaactcccattcacaattgctt

SEQ ID NO: 56315 - DNA, 120 bp, synthetic construct; identical to SEQ ID NO: 19134
  source 1..120: mol_type = other DNA

SEQ ID NO: 56316 - DNA, 120 bp, synthetic construct; identical to SEQ ID NO: 19135
  source 1..120: mol_type = other DNA

SEQ ID NO: 56317 - DNA, 120 bp, synthetic construct; identical to SEQ ID NO: 25204
  source 1..120: mol_type = other DNA

SEQ ID NO: 56318 - DNA, 120 bp, synthetic construct; identical to SEQ ID NO: 25205
  source 1..120: mol_type = other DNA

SEQ ID NO: 56319 - DNA, 120 bp, synthetic construct; identical to SEQ ID NO: 25206
  source 1..120: mol_type = other DNA

SEQ ID NO: 56320 - DNA, 120 bp, synthetic construct; identical to SEQ ID NO: 25207
  source 1..120: mol_type = other DNA

SEQ ID NO: 56321 - DNA, 120 bp, synthetic construct; identical to SEQ ID NO: 28111
  source 1..120: mol_type = other DNA

SEQ ID NO: 56322 - DNA, 120 bp, synthetic construct
  source 1..120: mol_type = other DNA
ctatgagcataggttgagaaaagtgaccttctctcactatttatttatttatgaatgaatgaatgaacgaatgaatgaatggcagagtctcgctctgttgcccaggctggagtgcagtgg

SEQ ID NO: 56323 - DNA, 120 bp, synthetic construct
  source 1..120: mol_type = other DNA
cgagattgcgccactgcactccagcctggcgacagagcaagactccatctcaaaaagaaaagaaatttgcggccaggtgtggtggctcacacctgtaatcccagcactttgggaagctga

SEQ ID NO: 56324 - DNA, 120 bp, synthetic construct; identical to SEQ ID NO: 19381
  source 1..120: mol_type = other DNA

SEQ ID NO: 56325 - DNA, 120 bp, synthetic construct; identical to SEQ ID NO: 19382
  source 1..120: mol_type = other DNA

SEQ ID NO: 56326 - DNA, 120 bp, synthetic construct
  source 1..120: mol_type = other DNA
gaattgctcagctaacatgagctctgaggcttgcgcacatgttacagagaatgaggtggaagcatccacgccaggaggtctccaggccatctggtcaacagaaagccaacaacatgcaaa

SEQ ID NO: 56327 - DNA, 120 bp, synthetic construct
  source 1..120: mol_type = other DNA
tatttatttatgcatttagttttgagacagggtctcactatgttgcccaggtgggagtgcagcctcaagctccgaggctcaacaaccttcccacctcagcttcccaagtaactgtgactg

SEQ ID NO: 56328 - DNA, 120 bp, synthetic construct
  source 1..120: mol_type = other DNA
ctgctcccctccctgtagctccctgcagccccctgctcccctccctgcaccccttttgccccctgctcccctccctgcagccccctgcactcccttcaccccctccctgcagcctgctgt

SEQ ID NO: 56329 - DNA, 120 bp, synthetic construct
  source 1..120: mol_type = other DNA
atgagatcgtagcctagagcctgccctgggccccttagagctgcatttctatttttcttttctcttctcttcttcttttttttttttttttggagggagtctcgctctgtcgcccaggct

SEQ ID NO: 56330 - DNA, 120 bp, synthetic construct
  source 1..120: mol_type = other DNA
tccttctcctttcccttccttctcctttcccttccttctcctttcccttccttctcctttcccttccttctcctttccccttccttccctttcccttccttctcctttccccttccttct

SEQ ID NO: 56331 - DNA, 120 bp, synthetic construct; identical to SEQ ID NO: 4044
  source 1..120: mol_type = other DNA

SEQ ID NO: 56332 - DNA, 120 bp, synthetic construct
  source 1..120: mol_type = other DNA
ctttttttgtttgttttgagacagagtctcactttgttgcccaggctagagggtagtggcacaatcttggctcactgcaatctccacctcctgggttcaagcgattcttgtgccttaact

SEQ ID NO: 56333 - DNA, 120 bp, synthetic construct
  source 1..120: mol_type = other DNA
taaaaaattaaatcatcaaaaagaaaggaaggtggaaggcagataagaaaaaggagagagagaggaaggagggaaggaagaaaggaaggaaggaaggaaagaagcaggaggaagggaggg

SEQ ID NO: 56334 - DNA, 120 bp, synthetic construct; identical to SEQ ID NO: 14464
  source 1..120: mol_type = other DNA

SEQ ID NO: 56335 - DNA, 120 bp, synthetic construct; identical to SEQ ID NO: 14465
  source 1..120: mol_type = other DNA

SEQ ID NO: 56336 - DNA, 120 bp, synthetic construct
  source 1..120: mol_type = other DNA
aaggaaagaaggaaagaaagaaagaaaagaaaaaaagaaagaaagaaagaaagaaagaagagaagagaagagaaagggagagggaaagagggggagagagggaaagagggggagaagggg

SEQ ID NO: 56337 - DNA, 120 bp, synthetic construct; identical to SEQ ID NO: 14467
  source 1..120: mol_type = other DNA

SEQ ID NO: 56338 - DNA, 120 bp, synthetic construct
  source 1..120: mol_type = other DNA
aaaggattccctatttaataaatggtgctgggaaaactggctagccatatggagaaaaatgaaactggagcccttccttacaccttatactaaaattaattcaagatggattaaagattt

SEQ ID NO: 56339 - DNA, 120 bp, synthetic construct
  source 1..120: mol_type = other DNA
ccaaagggttataaatcatgctgctataaagacacacgcacatgtatgtttattgcggcactattcacaatagcaaagacttggaaccaacccaaatgtccaacaatgatagactggatt

SEQ ID NO: 56340 - DNA, 120 bp, synthetic construct
  source 1..120: mol_type = other DNA
ggcacatttggggaagtagggcaaggatgggtttggagtgggaggtgcctgggagaaggtattcagttcctctacatcctacccctgtcactctaagtttctgcaatacaatgagccatc

SEQ ID NO: 56341 - DNA, 120 bp, synthetic construct
  source 1..120: mol_type = other DNA
acattcaggagcaggttgttcagtttccatgtagttgagcggttttgagtgagtttctcaatcctgagttctagtttgattgcactgtggtctgagagacagtttgttataatttctgtt

SEQ ID NO: 56342 - DNA, 120 bp, synthetic construct; identical to SEQ ID NO: 33226
  source 1..120: mol_type = other DNA

SEQ ID NO: 56343 - DNA, 120 bp, synthetic construct
  source 1..120: mol_type = other DNA
ggaagctcccctgggtgactctgtctgtgaggaagctcccctgggtgactctgtctgtgaggaagctcccctgggtgactgtctgtgaggaagctcccctgggtgactctgtccgtgagg

SEQ ID NO: 56344 - DNA, 120 bp, synthetic construct
  source 1..120: mol_type = other DNA
gtgactctgtctgtgaggaagctcccctgggtgactctgtctgtgaggaagctccccggggtgactctgtctgtgaggaagctcccctgggtgactctgtctgtgaggaagctcccctgg

SEQ ID NO: 56345 - DNA, 120 bp, synthetic construct
  source 1..120: mol_type = other DNA
aagctccccggggtgactctgtctgtgaggaagctccccggggtgactctgtctgtgaggaagctccccggggtgactctgtctgtgaggaagctcccctgggtgactctgtctgtgagg

SEQ ID NO: 56346 - DNA, 120 bp, synthetic construct; identical to SEQ ID NO: 33227
  source 1..120: mol_type = other DNA

SEQ ID NO: 56347 - DNA, 120 bp, synthetic construct; identical to SEQ ID NO: 21378
  source 1..120: mol_type = other DNA

SEQ ID NO: 56348 - DNA, 120 bp, synthetic construct; identical to SEQ ID NO: 21379
  source 1..120: mol_type = other DNA

SEQ ID NO: 56349 - DNA, 120 bp, synthetic construct; identical to SEQ ID NO: 21380
  source 1..120: mol_type = other DNA

SEQ ID NO: 56350 - DNA, 120 bp, synthetic construct; identical to SEQ ID NO: 21381
  source 1..120: mol_type = other DNA

SEQ ID NO: 56351 - DNA, 120 bp, synthetic construct
  source 1..120: mol_type = other DNA
ttccttacaccttatacaaaaatcaattcaagatggattaaagatttaaacattaaacctaaaaccataaaaaccctagaagaaaacctaggcattaccattcaggacataggcgtgggc

SEQ ID NO: 56352 - DNA, 120 bp, synthetic construct
  source 1..120: mol_type = other DNA
cacactcctgggactgtggtggggtcgggggaggggggagggatagcattgggagatatacctaatgctagatgacacattagtgggtgcagcgcaccagcatggcacatgtatacatat

SEQ ID NO: 56353 - DNA, 120 bp, synthetic construct; identical to SEQ ID NO: 21382
  source 1..120: mol_type = other DNA

SEQ ID NO: 56354 - DNA, 120 bp, synthetic construct
  source 1..120: mol_type = other DNA
cctgaggaatcgccacactgagttccacaatggttgaactagtttacagtcccaccaacagtgtaaaagtgttcctatttctccacatcctctccagcacctgttgtttcctgacttttt

SEQ ID NO: 56355 - DNA, 120 bp, synthetic construct
  source 1..120: mol_type = other DNA
ggcttaggattgacttggtgatgcgggctcttttttggttccatatgaactttaaagtagttttttccaattctgtgaagaaaggcattggtagcttgatggggatggcattgaatctgt

SEQ ID NO: 56356 - DNA, 120 bp, synthetic construct; identical to SEQ ID NO: 21383
  source 1..120: mol_type = other DNA

SEQ ID NO: 56357 - DNA, 120 bp, synthetic construct; identical to SEQ ID NO: 21384
  source 1..120: mol_type = other DNA

SEQ ID NO: 56358 - DNA, 120 bp, synthetic construct; identical to SEQ ID NO: 21385
  source 1..120: mol_type = other DNA

SEQ ID NO: 56359 - DNA, 120 bp, synthetic construct; identical to SEQ ID NO: 21386
  source 1..120: mol_type = other DNA

SEQ ID NO: 56360 - DNA, 120 bp, synthetic construct
  source 1..120: mol_type = other DNA
gtctatcgttgttggacatttaggttggttccaagtcattgctattgtgaatagtgccgctatgaacatacgtgtgcatgtgtctttatagcagcatgatttataatcctttgggtatat

SEQ ID NO: 56361 - DNA, 120 bp, synthetic construct
  source 1..120: mol_type = other DNA
tggtctatatctctgttttggtacgagtaccatgctgttttggttactgtagccttgtagtatagtttgaagtcaggtagcgtgatgcctccagctttgttcttttggcttaggattgac

SEQ ID NO: 56362 - DNA, 120 bp, synthetic construct
  source 1..120: mol_type = other DNA
gctataaagaaatacctgagactgggaaatttataaataaaatggtttaattggcttatggatctgcagagtgtacaagcatagcacgggcatctgctcagcttctgaggaggcctcagg

SEQ ID NO: 56363 - DNA, 120 bp, synthetic construct
  source 1..120: mol_type = other DNA
agtggggtcaaacatccaaactacatcattctgcccttggcccccacaaaattcttatgcttctcacattgttaaatacaatcatgccttcccaatagtcccccaaagtcttaactcact

SEQ ID NO: 56364 - DNA, 120 bp, synthetic construct; identical to SEQ ID NO: 21370
  source 1..120: mol_type = other DNA

SEQ ID NO: 56365 - DNA, 120 bp, synthetic construct
  source 1..120: mol_type = other DNA
cttacaccttatacaaaagttaattcaagatggttaaagacttaaatgttagacccaaaaccatcaaaaccctagaagaaaacctaggcaataccattcaggacataggcatgggcaagg

SEQ ID NO: 56366 - DNA, 120 bp, synthetic construct
  source 1..120: mol_type = other DNA
gcagccataaaaaaaggatgagttcatgtcctttgtaggaacatggatgaagctggaaaccatcattctcagcaaactatcgcaaggacaaaaaaccaaacaccacatgttctcactcat

SEQ ID NO: 56367 - DNA, 120 bp, synthetic construct; identical to SEQ ID NO: 21371
  source 1..120: mol_type = other DNA

SEQ ID NO: 56368 - DNA, 120 bp, synthetic construct
  source 1..120: mol_type = other DNA
gtgtctgttcatgtccttcgcccactttttgatggggttgtttgtttttttcttgtaaatttgtttgagttcattgtagattctggatattagcccttaggacaaagggaattttctaac

SEQ ID NO: 56369 - DNA, 120 bp, synthetic construct; identical to SEQ ID NO: 21372
  source 1..120: mol_type = other DNA

SEQ ID NO: 56370 - DNA, 120 bp, synthetic construct; identical to SEQ ID NO: 21373
  source 1..120: mol_type = other DNA

SEQ ID NO: 56371 - DNA, 120 bp, synthetic construct; identical to SEQ ID NO: 21374
  source 1..120: mol_type = other DNA

SEQ ID NO: 56372 - DNA, 120 bp, synthetic construct
  source 1..120: mol_type = other DNA
tgtcttgtgccagttttcaaagagaatgcttccagtttttgcccattcagtatgatattggctgtgggtttgtcatagatagctcttattattttgagatacgtcccatcaatacctaat

SEQ ID NO: 56373 - DNA, 120 bp, synthetic construct
  source 1..120: mol_type = other DNA
aattgccacactgacttccacaatggttgaactagtttacagtcccaccaacagtgtaaaagtgttcctatttctccacatcctctccagcacctgttgtttcctgactttttaatgatt

SEQ ID NO: 56374 - DNA, 120 bp, synthetic construct
  source 1..120: mol_type = other DNA
ttgaactgggtggagcccaccacagctcaaggaggcctgcctgcctgtgtaggctccacctctgggggcagggcacagacaaacaaaaagacagcagtaacctctgcagacttaaatgtc

SEQ ID NO: 56375 - DNA, 120 bp, synthetic construct
  source 1..120: mol_type = other DNA
cagattcaggaaatacagagaacgccacaaagataatcctcaagaagagcaactccaagacacataattgtcagattcaccaaagttgaaatgaaggaaaaaatgttaagggcagccaga

SEQ ID NO: 56376 - DNA, 120 bp, synthetic construct
  source 1..120: mol_type = other DNA
agaaagtcaacaaggatacccaggaattgaactcagctctgcaccaagcggacctaatagacatctacagaactctccaccccaaatcaacagaatatacatttttttcagcactacacc

SEQ ID NO: 56377 - DNA, 120 bp, synthetic construct
  source 1..120: mol_type = other DNA
agacaaacagagagccaaatcatgagtgaactcccattcacaattgcttcaaagagaataaaatacctaggaatccagcttacaagggaggtgaaggacctcttcaaggagaactagaaa

SEQ ID NO: 56378 - DNA, 120 bp, synthetic construct
  source 1..120: mol_type = other DNA
tctcaaaagaagacatttatgcagccaaaacacacaggaaaaaatgctcaccatcactggccatcagagaaatgcaaatcaaaaccacaatgagataccatctcacaccagttagaatgg

SEQ ID NO: 56379 - DNA, 120 bp, synthetic construct
  source 1..120: mol_type = other DNA
acagacatttctcaaaagaagacatttatgcagccaacagacacacgaaaaaatgcatgtatgtttattgcggcactattcacgatggcaaagacttggaaccaacccaaatgtccaaca

SEQ ID NO: 56380 - DNA, 120 bp, synthetic construct; identical to SEQ ID NO: 21375
  source 1..120: mol_type = other DNA

SEQ ID NO: 56381 - DNA, 120 bp, synthetic construct; identical to SEQ ID NO: 21376
  source 1..120: mol_type = other DNA

SEQ ID NO: 56382 - DNA, 120 bp, synthetic construct
  source 1..120: mol_type = other DNA
actttttgatggggttgtttgtttttttcttgtaaatttgtttaagttcattgtacattctggatattaaccctttgtcagatgagtagattgcaaaaatttcctcccattctgtaggtt

SEQ ID NO: 56383 - DNA, 120 bp, synthetic construct
  source 1..120: mol_type = other DNA
ctctttgaagcaattgtgaatgggagttcactcatgatttggctctctgtttgtctgttgttggtgtataagaatgcttgtgatttttgtacattgattttgtgtcctgagactttgcta

SEQ ID NO: 56384 - DNA, 120 bp, synthetic construct
  source 1..120: mol_type = other DNA
ttatctatttcttctagattttctagtttatttgtgtagagttgtttgtagtattctctgatggtagtttgtatttctgtgggatcggtggtgatatcccctttatcattttttattgcg

SEQ ID NO: 56385 - DNA, 120 bp, synthetic construct
  source 1..120: mol_type = other DNA
gtagagtttctgcctagagatccgctgttagtctgatgggcttccctttgagggtaacctgacctttctctctggctgcccttaacattttttccttcatttcaactttggtgaatctga

SEQ ID NO: 56386 - DNA, 120 bp, synthetic construct
  source 1..120: mol_type = other DNA
aaggtcagtagtcaggtgatatggtttagctgtgtgcccacccaaatctcatctgaattgtagctcccataattcccaagtgtcctgggagggacacagtgggaggtaatcgattcatga

SEQ ID NO: 56387 - DNA, 120 bp, synthetic construct
  source 1..120: mol_type = other DNA
ttcagtggccactcatgctgctgctgtgttcttgtggaggtaagaggcagtgggtagaggagcaacaggtgatatgtgaatgctcctgactttgtaggaaatgggaaaggggctgatggg

SEQ ID NO: 56388 - DNA, 120 bp, synthetic construct
  source 1..120: mol_type = other DNA
gttggtacaaggatataaaatttcattggacaggaggcataagtttttgagatcaattgcacaacatggtgactatatttaataatgtaaagtatgtttcagaaattgctgagagtagat

SEQ ID NO: 56389 - DNA, 120 bp, synthetic construct
  source 1..120: mol_type = other DNA
gttacttttcttttctttttttcttttttcttttttcttttttgagacagtcttgctctgttgcccaggctggactgctgtggcacaatctcagttcattgcaacctctgcctcccaggt

SEQ ID NO: 56390 - DNA, 120 bp, synthetic construct; identical to SEQ ID NO: 30487
  source 1..120: mol_type = other DNA

SEQ ID NO: 56391 - DNA, 120 bp, synthetic construct; identical to SEQ ID NO: 30488
  source 1..120: mol_type = other DNA

SEQ ID NO: 56392 - DNA, 120 bp, synthetic construct
  source 1..120: mol_type = other DNA
ttcaagatttttgcttttgtttcttgtgcttttggtgtcatatccaagaagtcattgcctgggccaatgtcatgaagcatttcccccatgccttcttttgggagttttacaatgtcaggt

SEQ ID NO: 56393 - DNA, 120 bp, synthetic construct; identical to SEQ ID NO: 30489
  source 1..120: mol_type = other DNA

SEQ ID NO: 56394 - DNA, 120 bp, synthetic construct; identical to SEQ ID NO: 30490
  source 1..120: mol_type = other DNA

SEQ ID NO: 56395 - DNA, 120 bp, synthetic construct; identical to SEQ ID NO: 30491
  source 1..120: mol_type = other DNA

SEQ ID NO: 56396 - DNA, 120 bp, synthetic construct; identical to SEQ ID NO: 30492
  source 1..120: mol_type = other DNA

SEQ ID NO: 56397 - DNA, 120 bp, synthetic construct; identical to SEQ ID NO: 30493
  source 1..120: mol_type = other DNA

SEQ ID NO: 56398 - DNA, 120 bp, synthetic construct; identical to SEQ ID NO: 30494
  source 1..120: mol_type = other DNA

SEQ ID NO: 56399 - DNA, 120 bp, synthetic construct; identical to SEQ ID NO: 30495
  source 1..120: mol_type = other DNA

SEQ ID NO: 56400 - DNA, 120 bp, synthetic construct; identical to SEQ ID NO: 30496
  source 1..120: mol_type = other DNA

SEQ ID NO: 56401 - DNA, 120 bp, synthetic construct; identical to SEQ ID NO: 30497
  source 1..120: mol_type = other DNA

SEQ ID NO: 56402 - DNA, 120 bp, synthetic construct; identical to SEQ ID NO: 30498
  source 1..120: mol_type = other DNA

SEQ ID NO: 56403 - DNA, 120 bp, synthetic construct; identical to SEQ ID NO: 30499
  source 1..120: mol_type = other DNA

SEQ ID NO: 56404 - DNA, 120 bp, synthetic construct
  source 1..120: mol_type = other DNA
cacacacacacagacacacacacacacacagacacacacacacacacacacacacaaaacagctctttctgaggttgggaaggaatcattctttccaatggcatcgttgcccagcgttgg

SEQ ID NO: 56405 - DNA, 120 bp, synthetic construct
  source 1..120: mol_type = other DNA
aagatacatttaaaagtaagttgtctcatctgacggcagccttgcctgggacactgctccaaaggcaatcttagcagggactcaaatctgattgttactgctgggtcttctccctgaccc

SEQ ID NO: 56406 - DNA, 120 bp, synthetic construct
  source 1..120: mol_type = other DNA
gaggtcaggagattgagaccatcctggctaacacagtgaaaccctgtctctgctaaaaagacaaaacaattagccaggcgtggtggtgggcacctgtagtcccagctactagggaggctg

SEQ ID NO: 56407 - DNA, 120 bp, synthetic construct; identical to SEQ ID NO: 30502
  source 1..120: mol_type = other DNA

SEQ ID NO: 56408 - DNA, 120 bp, synthetic construct; identical to SEQ ID NO: 30503
  source 1..120: mol_type = other DNA

SEQ ID NO: 56409 - DNA, 120 bp, synthetic construct; identical to SEQ ID NO: 30504
  source 1..120: mol_type = other DNA

SEQ ID NO: 56410 - DNA, 120 bp, synthetic construct; identical to SEQ ID NO: 30505
  source 1..120: mol_type = other DNA

SEQ ID NO: 56411 - DNA, 120 bp, synthetic construct; identical to SEQ ID NO: 30506
  source 1..120: mol_type = other DNA

SEQ ID NO: 56412 - DNA, 120 bp, synthetic construct; identical to SEQ ID NO: 30540
  source 1..120: mol_type = other DNA

SEQ ID NO: 56413 - DNA, 120 bp, synthetic construct; identical to SEQ ID NO: 30541
  source 1..120: mol_type = other DNA

SEQ ID NO: 56414 - DNA, 120 bp, synthetic construct; identical to SEQ ID NO: 30542
  source 1..120: mol_type = other DNA

SEQ ID NO: 56415 - DNA, 120 bp, synthetic construct; identical to SEQ ID NO: 30507
  source 1..120: mol_type = other DNA

SEQ ID NO: 56416 - DNA, 120 bp, synthetic construct; identical to SEQ ID NO: 30508
  source 1..120: mol_type = other DNA

SEQ ID NO: 56417 - DNA, 120 bp, synthetic construct; identical to SEQ ID NO: 30509
  source 1..120: mol_type = other DNA

SEQ ID NO: 56418 - DNA, 120 bp, synthetic construct; identical to SEQ ID NO: 30510
  source 1..120: mol_type = other DNA

SEQ ID NO: 56419 - DNA, 120 bp, synthetic construct
  source 1..120: mol_type = other DNA
gcattgtgcttggcatgtagtagctgctcagtacataccatttgaatgaacaaatcaatcaattaatcagttaatcagccagtcgatgcaggtgatgcctgttcctaaattcctttggtc

SEQ ID NO: 56420 - DNA, 120 bp, synthetic construct
  source 1..120: mol_type = other DNA
attggataatgtatttggtttgagatttgggtttccaaactgaatatataaatcaatgggcagatatacagtgaacacaaatataaataaacacagttccatgtttactgtttataatac

SEQ ID NO: 56421 - DNA, 120 bp, synthetic construct
  source 1..120: mol_type = other DNA
actgcttggtctttgaaggaggtgaattgcagtaaacaaatcatgaattatcatctgcagtagatttgaaagtctttgagtgaatataactgggggatgtaaccttaactttcagataag

SEQ ID NO: 56422 - DNA, 120 bp, synthetic construct
  source 1..120: mol_type = other DNA
acatctctttcttttctgtgtgttgtaatctcatcccccccatactctgagctttaatttgatttatggtattttgtggcatataaaaatctttccgttttatttagccaaatttaccaa

SEQ ID NO: 56423 - DNA, 120 bp, synthetic construct
  source 1..120: mol_type = other DNA
tgtgagtccgtttaagctgagcctggacttctgacccactggaactggaagataatgcatttgcattgtcttacactggtaggtttataggattttgtcacattgaaatggagagtgaat

SEQ ID NO: 56424 - DNA, 120 bp, synthetic construct
  source 1..120: mol_type = other DNA
tcctggaaccaaaatagatcccacagcacttcctgtgtaccctgatacctaacaaaatgttttaaagattgctttagctggagattcttacatatgtgtgtcctcctgggacagtgagtc

SEQ ID NO: 56425 - DNA, 120 bp, synthetic construct
  source 1..120: mol_type = other DNA
ttttactttcactttattcatttccttccttccttccttccttccttccttccttccttccttcctttctttttctgtcggagtcttactctcgctcagactggagtgcaatggtgcaat

SEQ ID NO: 56426 - DNA, 120 bp, synthetic construct
  source 1..120: mol_type = other DNA
gcagagcctgccctgagggaaccgggaggtgttccgcgcaggctctgctgctttctgacgtgtgaccgtgtgcacaggatttgtcccaagtcccacctgcctcttctggaaagtggagcg

SEQ ID NO: 56427 - DNA, 120 bp, synthetic construct
  source 1..120: mol_type = other DNA
tggggaattgcagtgagattccttccctccgaagctccatctggtgcaacatctggagctggtcccccagcataggaggatgtgagtgggatgatgaatggcacctcagaagtgtgctgt

SEQ ID NO: 56428 - DNA, 120 bp, synthetic construct; identical to SEQ ID NO: 30520
  source 1..120: mol_type = other DNA

SEQ ID NO: 56429 - DNA, 120 bp, synthetic construct; identical to SEQ ID NO: 30521
  source 1..120: mol_type = other DNA

SEQ ID NO: 56430 - DNA, 120 bp, synthetic construct; identical to SEQ ID NO: 30522
  source 1..120: mol_type = other DNA

SEQ ID NO: 56431 - DNA, 120 bp, synthetic construct; identical to SEQ ID NO: 30523
  source 1..120: mol_type = other DNA

SEQ ID NO: 56432 - DNA, 120 bp, synthetic construct; identical to SEQ ID NO: 30524
  source 1..120: mol_type = other DNA

SEQ ID NO: 56433 - DNA, 120 bp, synthetic construct; identical to SEQ ID NO: 30525
  source 1..120: mol_type = other DNA

SEQ ID NO: 56434 - DNA, 120 bp, synthetic construct; identical to SEQ ID NO: 30526
  source 1..120: mol_type = other DNA

SEQ ID NO: 56435 - DNA, 120 bp, synthetic construct; identical to SEQ ID NO: 30527
  source 1..120: mol_type = other DNA

SEQ ID NO: 56436 - DNA, 120 bp, synthetic construct; identical to SEQ ID NO: 30528
  source 1..120: mol_type = other DNA

SEQ ID NO: 56437 - DNA, 120 bp, synthetic construct; identical to SEQ ID NO: 30529
  source 1..120: mol_type = other DNA

SEQ ID NO: 56438 - DNA, 120 bp, synthetic construct; identical to SEQ ID NO: 30530
  source 1..120: mol_type = other DNA

SEQ ID NO: 56439 - DNA, 120 bp, synthetic construct; identical to SEQ ID NO: 30531
  source 1..120: mol_type = other DNA

SEQ ID NO: 56440 - DNA, 120 bp, synthetic construct
  source 1..120: mol_type = other DNA
tatttctagttctagatccctgaggaatcgccacactgacttccacaatggttgaactagtttacagtcccaccaacagtgtaaaagtgttcctatttctccacatcctctccatcacct

SEQ ID NO: 56441 - DNA, 120 bp, synthetic construct
  source 1..120: mol_type = other DNA
cacagtatgtacgtttagaaaagttttcatatggccgggctcagtggctcatgctgtaatcccggcaatttgggaggctgaggcaggtggatcacctgaggtcaggagttcaagaccagc

SEQ ID NO: 56442 - DNA, 120 bp, synthetic construct; identical to SEQ ID NO: 30532
  source 1..120: mol_type = other DNA

SEQ ID NO: 56443 - DNA, 120 bp, synthetic construct; identical to SEQ ID NO: 30533
  source 1..120: mol_type = other DNA

SEQ ID NO: 56444 - DNA, 120 bp, synthetic construct; identical to SEQ ID NO: 6107
  source 1..120: mol_type = other DNA

SEQ ID NO: 56445 - DNA, 120 bp, synthetic construct
  source 1..120: mol_type = other DNA
aagccaaaattgacaaatgggatctaattaaactaaagagcttctgcacagcaaaagaaactaccatcggagtgaacaggcagcctacaaaatgggagaaaattttcgcagcctactcat

SEQ ID NO: 56446 - DNA, 120 bp, synthetic construct; identical to SEQ ID NO: 30535
  source 1..120: mol_type = other DNA

SEQ ID NO: 56447 - DNA, 120 bp, synthetic construct; identical to SEQ ID NO: 30536
  source 1..120: mol_type = other DNA

SEQ ID NO: 56448 - DNA, 120 bp, synthetic construct
  source 1..120: mol_type = other DNA
caaaaccactatgagatatcatctcacaccagttagaatggcaatcattaaaaagtcaggaaacaacaggtgctggagaggatgcggagaaataggaacacttttacactgttggtggga

SEQ ID NO: 56449 - DNA, 120 bp, synthetic construct
  source 1..120: mol_type = other DNA
catatgtcatgggagggacccagtgggaggtaattgaatcatgggggtgggttttttgtgctattctcatgatagtgaataagtctcatgagacctgatggttttataaaaggcagttcc

SEQ ID NO: 56450 - DNA, 120 bp, synthetic construct
  source 1..120: mol_type = other DNA
tatgccagtaccatgctgtttggattactatagttctgtagtataatttgaagtcagataatatgattcatccagttttgttcattttacttagaataactttggttattgtggatcttt

SEQ ID NO: 56451 - DNA, 120 bp, synthetic construct
  source 1..120: mol_type = other DNA
gagctggtacctaagttgcaacacaaagtgctttttacctttacttctccttttcttttttttttttttttttttttttttttttgagacggagtctcgctctgtcgcccaggctggagt

SEQ ID NO: 56452 - DNA, 120 bp, synthetic construct; identical to SEQ ID NO: 30443
  source 1..120: mol_type = other DNA

SEQ ID NO: 56453 - DNA, 120 bp, synthetic construct; identical to SEQ ID NO: 30444
  source 1..120: mol_type = other DNA

SEQ ID NO: 56454 - DNA, 120 bp, synthetic construct; identical to SEQ ID NO: 30445
  source 1..120: mol_type = other DNA

SEQ ID NO: 56455 - DNA, 120 bp, synthetic construct; identical to SEQ ID NO: 30446
  source 1..120: mol_type = other DNA

SEQ ID NO: 56456 - DNA, 120 bp, synthetic construct
  source 1..120: mol_type = other DNA
ttgtgacccccatcacagggtggggagacaccccccgcgaggcggggactgagagccagcccctcttcccccactggcttaggacgcccatcggggatcctaagatccttaggacccacc

SEQ ID NO: 56457 - DNA, 120 bp, synthetic construct; identical to SEQ ID NO: 30447
  source 1..120: mol_type = other DNA

SEQ ID NO: 56458 - DNA, 120 bp, synthetic construct; identical to SEQ ID NO: 30448
  source 1..120: mol_type = other DNA

SEQ ID NO: 56459 - DNA, 120 bp, synthetic construct
  source 1..120: mol_type = other DNA
ttgctcttaggatccccatcgctgggggcggaggcaccccccgcgaggcagggactgagaggcaatccctcttccccccctggctcttaggacccccatcgcaggagggggaggcacccc

SEQ ID NO: 56460 - DNA, 120 bp, synthetic construct
  source 1..120: mol_type = other DNA
agactgtggatcccaaactgcagtatgagcaaagcctttgtatgaggtcacaaagggggcggggacccggaacttttgaaatggggatcccaacaacagcaagtttttcatgagttacaa

SEQ ID NO: 56461 - DNA, 120 bp, synthetic construct
  source 1..120: mol_type = other DNA
ctcttccccccccagcttaggacccacatcgttgatcctaagatccttaggacccacctggaggactgcgggtggtaggtgtccaagtagaaagttcaaatcttccgacggcaggtacct

SEQ ID NO: 56462 - DNA, 120 bp, synthetic construct; identical to SEQ ID NO: 30449
  source 1..120: mol_type = other DNA

SEQ ID NO: 56463 - DNA, 120 bp, synthetic construct; identical to SEQ ID NO: 30450
  source 1..120: mol_type = other DNA

SEQ ID NO: 56464 - DNA, 120 bp, synthetic construct; identical to SEQ ID NO: 30451
  source 1..120: mol_type = other DNA

SEQ ID NO: 56465 - DNA, 120 bp, synthetic construct; identical to SEQ ID NO: 30452
  source 1..120: mol_type = other DNA

SEQ ID NO: 56466 - DNA, 120 bp, synthetic construct; identical to SEQ ID NO: 30453
  source 1..120: mol_type = other DNA

SEQ ID NO: 56467 - DNA, 120 bp, synthetic construct
  source 1..120: mol_type = other DNA
cagcctgtcaagtgcatgccaccacacccactcaaggtttttttttgttttttttttgtttgtttgtttgtttgtttttttgataaagattgagtcttcctatgttgcccagcctggtct

SEQ ID NO: 56468 - DNA, 120 bp, synthetic construct; identical to SEQ ID NO: 30454
  source 1..120: mol_type = other DNA

SEQ ID NO: 56469 - DNA, 120 bp, synthetic construct; identical to SEQ ID NO: 30455
  source 1..120: mol_type = other DNA

SEQ ID NO: 56470 - DNA, 120 bp, synthetic construct; identical to SEQ ID NO: 30456
  source 1..120: mol_type = other DNA

SEQ ID NO: 56471 - DNA, 120 bp, synthetic construct; identical to SEQ ID NO: 30457
  source 1..120: mol_type = other DNA

SEQ ID NO: 56472 - DNA, 120 bp, synthetic construct; identical to SEQ ID NO: 30458
  source 1..120: mol_type = other DNA

SEQ ID NO: 56473 - DNA, 120 bp, synthetic construct; identical to SEQ ID NO: 30459
  source 1..120: mol_type = other DNA

SEQ ID NO: 56474 - DNA, 120 bp, synthetic construct; identical to SEQ ID NO: 30460
  source 1..120: mol_type = other DNA

SEQ ID NO: 56475 - DNA, 120 bp, synthetic construct; identical to SEQ ID NO: 30461
  source 1..120: mol_type = other DNA

SEQ ID NO: 56476 - DNA, 120 bp, synthetic construct; identical to SEQ ID NO: 30462
  source 1..120: mol_type = other DNA

SEQ ID NO: 56477 - DNA, 120 bp, synthetic construct
  source 1..120: mol_type = other DNA
taggaggtagaatggccctgttgagaaccttaaatagattatagattttatttattattattattatttttttttttttgagacagagtctcactctgtcaccaggctagagtgcagtgg

SEQ ID NO: 56478 - DNA, 120 bp, synthetic construct; identical to SEQ ID NO: 30463
  source 1..120: mol_type = other DNA

SEQ ID NO: 56479 - DNA, 120 bp, synthetic construct; identical to SEQ ID NO: 30464
  source 1..120: mol_type = other DNA

SEQ ID NO: 56480 - DNA, 120 bp, synthetic construct
  source 1..120: mol_type = other DNA
gtgtggtgtgctgtgtatgtgtgtgtggtttgtgtgtggtatgtgtatatgtgtgtgttgtgtatgtgtgtgtatgtggtgtgtgtatgtgtgtggtgtgtgtatgtgtggtgtgtatat

SEQ ID NO: 56481 - DNA, 120 bp, synthetic construct
  source 1..120: mol_type = other DNA
ggtgtgtgtatgtgtgtgtggtgtgtgtatgtgtgtgtggtgtgtgtgtgatgtgtgtgtatgtgtgtgatgtgtgtgtagtgtgtgtgtggtgtttgtgtatgtgtgtgtggtgtgtat

SEQ ID NO: 56482 - DNA, 120 bp, synthetic construct; identical to SEQ ID NO: 30538
  source 1..120: mol_type = other DNA

SEQ ID NO: 56483 - DNA, 120 bp, synthetic construct; identical to SEQ ID NO: 30539
  source 1..120: mol_type = other DNA

SEQ ID NO: 56484 - DNA, 120 bp, synthetic construct; identical to SEQ ID NO: 30543
  source 1..120: mol_type = other DNA

SEQ ID NO: 56485 - DNA, 120 bp, synthetic construct
  source 1..120: mol_type = other DNA
cgctagtattcatatagtcatggtgaatcaccatggcgtattggccgtagtattcatatagtcatggtgaatcaccatggcatattggcgctagtattcatatagtcatggtgaatcacc

SEQ ID NO: 56486 - DNA, 120 bp, synthetic construct
  source 1..120: mol_type = other DNA
atagtgttcatatagtcatggtgaatcaccatggcatattggccgtagtgttcacgcagtcatggtgaatcaccatggcgtattggcggtagtgttcatatagtcatggtgaatcagcat

SEQ ID NO: 56487 - DNA, 120 bp, synthetic construct
  source 1..120: mol_type = other DNA
atattggccgtagtgttcatatagtcatggtgaatcaccatggcgtattggccatagtgttcatgtagtcaagatgaatcaccatggtgtattggcgctagtattcatataatcatgatg

SEQ ID NO: 56488 - DNA, 120 bp, synthetic construct
  source 1..120: mol_type = other DNA
ggcgtgttggccctagtgttcacgcagtcatggtgaatcaccatggcgtgttggccctagtgttcacgcagtcatggtgaatcaccatggcatattggccatagtgttcatatagtcatg

SEQ ID NO: 56489 - DNA, 120 bp, synthetic construct; identical to SEQ ID NO: 30544
  source 1..120: mol_type = other DNA

SEQ ID NO: 56490 - DNA, 120 bp, synthetic construct; identical to SEQ ID NO: 30545
  source 1..120: mol_type = other DNA

SEQ ID NO: 56491 - DNA, 120 bp, synthetic construct; identical to SEQ ID NO: 30546
  source 1..120: mol_type = other DNA

SEQ ID NO: 56492 - DNA, 120 bp, synthetic construct; identical to SEQ ID NO: 30547
  source 1..120: mol_type = other DNA

SEQ ID NO: 56493 - DNA, 120 bp, synthetic construct; identical to SEQ ID NO: 30548
  source 1..120: mol_type = other DNA

SEQ ID NO: 56494 - DNA, 120 bp, synthetic construct
  source 1..120: mol_type = other DNA
gccatgtttctaggagtctcaggccgactcagtgtgtagtgagagaaggtaaacgtaggggaaagaaaattaaaatgctcaaagagtgagcaaaggaaaaatgaagtgtaagagaggttg

SEQ ID NO: 56495 - DNA, 120 bp, synthetic construct; identical to SEQ ID NO: 30549
  source 1..120: mol_type = other DNA

SEQ ID NO: 56496 - DNA, 120 bp, synthetic construct
  source 1..120: mol_type = other DNA
cacatttatatttatattattcaaacacccaatgcatttgccacatgctagacaataagaaaaacagaccaagaggctgagcgcagtggctcatgcctgtaatcccaacactctgggagg

SEQ ID NO: 56497 - DNA, 120 bp, synthetic construct; identical to SEQ ID NO: 30550
  source 1..120: mol_type = other DNA

SEQ ID NO: 56498 - DNA, 120 bp, synthetic construct; identical to SEQ ID NO: 30551
  source 1..120: mol_type = other DNA

SEQ ID NO: 56499 - DNA, 120 bp, synthetic construct; identical to SEQ ID NO: 30552
  source 1..120: mol_type = other DNA

SEQ ID NO: 56500 - DNA, 120 bp, synthetic construct; identical to SEQ ID NO: 30553
  source 1..120: mol_type = other DNA

SEQ ID NO: 56501 - DNA, 120 bp, synthetic construct; identical to SEQ ID NO: 30465
  source 1..120: mol_type = other DNA

SEQ ID NO: 56502 - DNA, 120 bp, synthetic construct; identical to SEQ ID NO: 30466
  source 1..120: mol_type = other DNA

SEQ ID NO: 56503 - DNA, 120 bp, synthetic construct
  source 1..120: mol_type = other DNA
cctcgacctcccaaagtgctgggattacaggcgtgagccaccgtgcctggcctgtgcctatcgtttaactgactagttggattagtgaggagtcggttagttgttgtgcttctttgcagt

SEQ ID NO: 56504 - DNA, 120 bp, synthetic construct; identical to SEQ ID NO: 30467
  source 1..120: mol_type = other DNA

SEQ ID NO: 56505 - DNA, 120 bp, synthetic construct; identical to SEQ ID NO: 30468
  source 1..120: mol_type = other DNA

SEQ ID NO: 56506 - DNA, 120 bp, synthetic construct
  source 1..120: mol_type = other DNA
aagtgctgagattacaggcgtgagccaccgcacccagccagcatttatttctaagccaaatcaaaatatagacctttgatgaaggtgttaagaaaacattgcattgtcctggttatttag

SEQ ID NO: 56507 - DNA, 120 bp, synthetic construct; identical to SEQ ID NO: 30469
  source 1..120: mol_type = other DNA

SEQ ID NO: 56508 - DNA, 120 bp, synthetic construct; identical to SEQ ID NO: 30470
  source 1..120: mol_type = other DNA

SEQ ID NO: 56509 - DNA, 120 bp, synthetic construct; identical to SEQ ID NO: 30471
  source 1..120: mol_type = other DNA

SEQ ID NO: 56510 - DNA, 120 bp, synthetic construct; identical to SEQ ID NO: 30472
  source 1..120: mol_type = other DNA

SEQ ID NO: 56511 - DNA, 120 bp, synthetic construct; identical to SEQ ID NO: 30473
  source 1..120: mol_type = other DNA

SEQ ID NO: 56512 - DNA, 120 bp, synthetic construct; identical to SEQ ID NO: 30474
  source 1..120: mol_type = other DNA

SEQ ID NO: 56513 - DNA, 120 bp, synthetic construct; identical to SEQ ID NO: 30475
  source 1..120: mol_type = other DNA

SEQ ID NO: 56514 - DNA, 120 bp, synthetic construct; identical to SEQ ID NO: 30476
  source 1..120: mol_type = other DNA

SEQ ID NO: 56515 - DNA, 120 bp, synthetic construct; identical to SEQ ID NO: 30477
  source 1..120: mol_type = other DNA

SEQ ID NO: 56516 - DNA, 120 bp, synthetic construct; identical to SEQ ID NO: 30478
  source 1..120: mol_type = other DNA

SEQ ID NO: 56517 - DNA, 120 bp, synthetic construct; identical to SEQ ID NO: 30479
  source 1..120: mol_type = other DNA

SEQ ID NO: 56518 - DNA, 120 bp, synthetic construct; identical to SEQ ID NO: 30480
  source 1..120: mol_type = other DNA

SEQ ID NO: 56519 - DNA, 120 bp, synthetic construct; identical to SEQ ID NO: 30481
  source 1..120: mol_type = other DNA

SEQ ID NO: 56520 - DNA, 120 bp, synthetic construct
  source 1..120: mol_type = other DNA
aaaccccatctctaccaaaaatacaaaaattagctgggcactgtggcgggcgcatgtaatcccagcttctcgggaggctgaggtgagagaatcacttgaacctgggaggcagaggtttca

SEQ ID NO: 56521 - DNA, 120 bp, synthetic construct; identical to SEQ ID NO: 30482
  source 1..120: mol_type = other DNA

SEQ ID NO: 56522 - DNA, 120 bp, synthetic construct; identical to SEQ ID NO: 30483
  source 1..120: mol_type = other DNA

SEQ ID NO: 56523 - DNA, 120 bp, synthetic construct
  source 1..120: mol_type = other DNA
tatatatatatatatatatatatatatatatttagcctgggtgtagtggctcacgcctgtaatcccaacacttttggaggccaaggcctcaaatcacctgaggtcagcagttggagacca

SEQ ID NO: 56524 - DNA, 120 bp, synthetic construct; identical to SEQ ID NO: 19442
  source 1..120: mol_type = other DNA

SEQ ID NO: 56525 - DNA, 120 bp, synthetic construct; identical to SEQ ID NO: 12650
  source 1..120: mol_type = other DNA

SEQ ID NO: 56526 - DNA, 120 bp, synthetic construct; identical to SEQ ID NO: 29044
  source 1..120: mol_type = other DNA

SEQ ID NO: 56527 - DNA, 120 bp, synthetic construct; identical to SEQ ID NO: 29045
  source 1..120: mol_type = other DNA

SEQ ID NO: 56528 - DNA, 120 bp, synthetic construct; identical to SEQ ID NO: 29046
  source 1..120: mol_type = other DNA

SEQ ID NO: 56529 - DNA, 120 bp, synthetic construct; identical to SEQ ID NO: 29047
  source 1..120: mol_type = other DNA

SEQ ID NO: 56530 - DNA, 120 bp, synthetic construct; identical to SEQ ID NO: 29048
  source 1..120: mol_type = other DNA

SEQ ID NO: 56531 - DNA, 120 bp, synthetic construct; identical to SEQ ID NO: 29049
  source 1..120: mol_type = other DNA

SEQ ID NO: 56532 - DNA, 120 bp, synthetic construct; identical to SEQ ID NO: 13009
  source 1..120: mol_type = other DNA

SEQ ID NO: 56533 - DNA, 120 bp, synthetic construct; identical to SEQ ID NO: 13010
  source 1..120: mol_type = other DNA

SEQ ID NO: 56534 - DNA, 120 bp, synthetic construct
  source 1..120: mol_type = other DNA
gccagtacctctgatgaatatagcaaaaaaaaaaaaaaaaaaaaaaaaaaaaaaaaaaccacacacacacacaaatatttcttttaaaaatgagcaaaggacttgaataaacatttcccc

SEQ ID NO: 56535 - DNA, 120 bp, synthetic construct; identical to SEQ ID NO: 13011
  source 1..120: mol_type = other DNA

SEQ ID NO: 56536 - DNA, 120 bp, synthetic construct; identical to SEQ ID NO: 13012
  source 1..120: mol_type = other DNA

SEQ ID NO: 56537 - DNA, 120 bp, synthetic construct; identical to SEQ ID NO: 13013
  source 1..120: mol_type = other DNA

SEQ ID NO: 56538 - DNA, 120 bp, synthetic construct; identical to SEQ ID NO: 13014
  source 1..120: mol_type = other DNA

SEQ ID NO: 56539 - DNA, 120 bp, synthetic construct; identical to SEQ ID NO: 13015
  source 1..120: mol_type = other DNA

SEQ ID NO: 56540 - DNA, 120 bp, synthetic construct
  source 1..120: mol_type = other DNA
taaaaatttatatggaaacaaccaagtacatcttgcgttcaacttaattaatatacgcaaaggaatataaatcattctattacaaagacacgtgcacccatgtcttcattgcagcactat

SEQ ID NO: 56541 - DNA, 120 bp, synthetic construct; identical to SEQ ID NO: 13016
  source 1..120: mol_type = other DNA

SEQ ID NO: 56542 - DNA, 120 bp, synthetic construct
  source 1..120: mol_type = other DNA
gatcacttgaggtcaggagttcgagactagcctggccaacatggtaaaaccctgcctctactaaaaatacaaaaattagctggggatggtggcgtgcacctgtaatcccagctacttggg

SEQ ID NO: 56543 - DNA, 120 bp, synthetic construct
  source 1..120: mol_type = other DNA
ttggtaattacaacttcatagattgaagtgtatatatgtaatatatatatttacatttttttagagggagtcttgctctcttgcccaggctggagtgcagtggcacaatctcggctcact

SEQ ID NO: 56544 - DNA, 120 bp, synthetic construct
  source 1..120: mol_type = other DNA
gggaattccctttcctaatcaaagaaaggggtgaaagaaggcacctggaaaatcgggtcactcctaccctaacagtgcgcttttccaacagtcttagcaaacggcacaccaggagattat

SEQ ID NO: 56545 - DNA, 120 bp, synthetic construct
  source 1..120: mol_type = other DNA
gaacaaagctggatggagaatgactttgacgagttgacagaagaaggcttcagatgatcgaactactctgagctaaaggaggaagttagaacccatggcaaagaagttaaaaaccttgaa

SEQ ID NO: 56546 - DNA, 120 bp, synthetic construct; identical to SEQ ID NO: 13018
  source 1..120: mol_type = other DNA

SEQ ID NO: 56547 - DNA, 120 bp, synthetic construct; identical to SEQ ID NO: 13019
  source 1..120: mol_type = other DNA

SEQ ID NO: 56548 - DNA, 120 bp, synthetic construct
  source 1..120: mol_type = other DNA
tctggttacatgatattggttaagcttctgaaaaatcaagtaaatccacaaactttcctgatatgaatctaatctcattaattttccttttcatttaatcaacaaatatcagccagtctg

SEQ ID NO: 56549 - DNA, 120 bp, synthetic construct; identical to SEQ ID NO: 13022
  source 1..120: mol_type = other DNA

SEQ ID NO: 56550 - DNA, 120 bp, synthetic construct; identical to SEQ ID NO: 13023
  source 1..120: mol_type = other DNA

SEQ ID NO: 56551 - DNA, 120 bp, synthetic construct; identical to SEQ ID NO: 12994
  source 1..120: mol_type = other DNA

SEQ ID NO: 56552 - DNA, 120 bp, synthetic construct; identical to SEQ ID NO: 12995
  source 1..120: mol_type = other DNA

SEQ ID NO: 56553 - DNA, 120 bp, synthetic construct; identical to SEQ ID NO: 12996
  source 1..120: mol_type = other DNA

SEQ ID NO: 56554 - DNA, 120 bp, synthetic construct; identical to SEQ ID NO: 12997
  source 1..120: mol_type = other DNA

SEQ ID NO: 56555 - DNA, 120 bp, synthetic construct; identical to SEQ ID NO: 12998
  source 1..120: mol_type = other DNA

SEQ ID NO: 56556 - DNA, 120 bp, synthetic construct; identical to SEQ ID NO: 12999
  source 1..120: mol_type = other DNA

SEQ ID NO: 56557 - DNA, 120 bp, synthetic construct; identical to SEQ ID NO: 13000
  source 1..120: mol_type = other DNA

SEQ ID NO: 56558 - DNA, 120 bp, synthetic construct
  source 1..120: mol_type = other DNA
ggaaactcttttttttctctttttctttttttgagacagagtctcactctgtcacctaggttagagtgctgtgatgcgatcttggctgactgtagcctctgcctcccaggttcaagcaat

SEQ ID NO: 56559 - DNA, 120 bp, synthetic construct; identical to SEQ ID NO: 13002
  source 1..120: mol_type = other DNA

SEQ ID NO: 56560 - DNA, 120 bp, synthetic construct; identical to SEQ ID NO: 13003
  source 1..120: mol_type = other DNA

SEQ ID NO: 56561 - DNA, 120 bp, synthetic construct
  source 1..120: mol_type = other DNA
tgagcagagatcatgccactgcactccagcctggctgacagagcaagactctgtgaaaagaaaagaaaagaaaagaaaagaaaagaaaagaggggaagggaagggaagggaggggaaggg

SEQ ID NO: 56562 - DNA, 120 bp, synthetic construct
  source 1..120: mol_type = other DNA
ctccacatcctctccggcacctgttgtttcctgactttttaatgatcgccattctaactggtgtgagatggtatctcattgtggttttgatttgcatttctctgatggccagtgatggtg

SEQ ID NO: 56563 - DNA, 120 bp, synthetic construct; identical to SEQ ID NO: 13004
  source 1..120: mol_type = other DNA

SEQ ID NO: 56564 - DNA, 120 bp, synthetic construct
  source 1..120: mol_type = other DNA
ttcctgatcttgtgttccatgattctacaaagaggccaatttttttttctttttttttgatacagagtctcactctgtcacccaggctggagtgcattggtgcgatctcagctcattgca

SEQ ID NO: 56565 - DNA, 120 bp, synthetic construct; identical to SEQ ID NO: 13005
  source 1..120: mol_type = other DNA

SEQ ID NO: 56566 - DNA, 120 bp, synthetic construct
  source 1..120: mol_type = other DNA
agaatcgcttgagcccaggagatggaggttgctgtgacccgaaattggccactgcattccagcctgggtgacagcatgagactgtgtttcaaaaaacaaaaaaaaaaaaaaaaaaagatt

SEQ ID NO: 56567 - DNA, 120 bp, synthetic construct; identical to SEQ ID NO: 13006
  source 1..120: mol_type = other DNA

SEQ ID NO: 56568 - DNA, 120 bp, synthetic construct
  source 1..120: mol_type = other DNA
gaaatatatgagcccatcatcaagaaataacagtttgaaatgtgaaaacttaagctttcctttaagaaagaggaatatgaactagaacggcaatgaggcttctgtgttgttgttgttgtt

SEQ ID NO: 56569 - DNA, 120 bp, synthetic construct; identical to SEQ ID NO: 20449
  source 1..120: mol_type = other DNA

SEQ ID NO: 56570 - DNA, 120 bp, synthetic construct; identical to SEQ ID NO: 20450
  source 1..120: mol_type = other DNA

SEQ ID NO: 56571 - DNA, 120 bp, synthetic construct
  source 1..120: mol_type = other DNA
gcccgtatgtgcacagcaaaagagtggtaaccaggatctatcctatcatctcattttgttaggaacatagtttaaagagaaatgccattaaaagaggatgagtttgtacacccatctcac

SEQ ID NO: 56572 - DNA, 120 bp, synthetic construct
  source 1..120: mol_type = other DNA
atcaaactgtatagcctgcaaacagaaatagagggtattgatgtcactgaccacaaaggtcaacaatgtccccattttagcgttaacatttttctctgctgcagaggagccacactatga

SEQ ID NO: 56573 - DNA, 120 bp, synthetic construct
  source 1..120: mol_type = other DNA
aacttgcctggcagtctcacttgcaaaaaaaatacaagagttttactcagactgtgtactactttgaagtgactaagtcggggctgaggaaattacaagggacaataagtgtctctccac

SEQ ID NO: 56574 - DNA, 120 bp, synthetic construct
  source 1..120: mol_type = other DNA
agagagctgatgctctgatagttataggacttcctgattgatctctgattggttaatttgaaagacgacatgaaagtaaatgtgatatggctagcactttataaaaataacggttaagac

SEQ ID NO: 56575 - DNA, 120 bp, synthetic construct
  source 1..120: mol_type = other DNA
aagagaactctcttttggcagaaggaatcatagcctttcagagtaatggccataaatggtagttctgttccctttcctctgtattaaagcataatgctttcctagtattcctaattttgt

SEQ ID NO: 56576 - DNA, 120 bp, synthetic construct
  source 1..120: mol_type = other DNA
catttctgtggacagaaagaataaatgacacccgtgtgagttgttatggctaactttttctcatttttggaccttgaaggaccaaaagtaatacaaagtgacaaagggtaatacactatg

SEQ ID NO: 56577 - DNA, 120 bp, synthetic construct
  source 1..120: mol_type = other DNA
actacactgcagtctgtttgtaggtgggcacttgacatccaaatcaatatttccattttgaaatgctcccataaactcaagatctacatttatcagctgcataatgagcactgtcattag

SEQ ID NO: 56578 - DNA, 120 bp, synthetic construct
  source 1..120: mol_type = other DNA
cttcctctttctcaccttttccccttttcctcccttccttgccctctctcctccatatcctctttcttaaaaattttttttgatggccaatatctattatatggaactaatgacaacaga

SEQ ID NO: 56579 - DNA, 120 bp, synthetic construct
  source 1..120: mol_type = other DNA
caaatgatgattatacaggaaactctctaggcagtcaacaagtgtataagccttcttcaaaagaaacgttgtatatgccttagaaattttacgtggagcaagtccacattctgtgtacat

SEQ ID NO: 56580 - DNA, 120 bp, synthetic construct
  source 1..120: mol_type = other DNA
ggcctcccaaagtgctgggattacaggcgtgagccacggcgcctggccaagtttttttttttttttttaatagaccagtcaatgtttctgtttgatataaagtttaaggccaaagagtga

SEQ ID NO: 56581 - DNA, 120 bp, synthetic construct
  source 1..120: mol_type = other DNA
ttaagtttaaatttggcagaactctaataactaaggactcggcttgaatatgctgagagcagagggcagagacaaagtatgatccagaaaatgaagtattagattggccggcgagggtga

SEQ ID NO: 56582 - DNA, 120 bp, synthetic construct
  source 1..120: mol_type = other DNA
caacaaggcaattcaataatttttccgatgttttgcctttagtggagtgggatttccatctgaagtttgcaaaggctttcatcactcctctgtcttgcctgtccctattaaccatctggt

SEQ ID NO: 56583 - DNA, 120 bp, synthetic construct
  source 1..120: mol_type = other DNA
ggcattgtctggtttcttttctctagcacaggtgaacctgtagaatatgtcaggagcttcttcagaaggtccttgttcatcttttagaaggaaatctttatactcattgcaggaggccag

SEQ ID NO: 56584 - DNA, 120 bp, synthetic construct
  source 1..120: mol_type = other DNA
tatgtttcatgagagacagcagaggacagtgcttaagggcccaaggtttagagctaccctttggaatcaaatcttggctttgatatcttcctagctgtgtgaccttaggaaagttattta

SEQ ID NO: 56585 - DNA, 120 bp, synthetic construct
  source 1..120: mol_type = other DNA
cctccaggaaaaagggaagtaggaaaaatggtatgtcaagaaagaagaaacactctagggaaaacactgaagtaatcatgtagcagcaattacatggcgtgcctgggtgtgtgctaaaaa

SEQ ID NO: 56586 - DNA, 120 bp, synthetic construct
  source 1..120: mol_type = other DNA
ttatttgtcattgtctgtttctccctactaaactgtgagctccatgagagctgggattttcactactggattgtgccaatgactgctatagtaccggaacatagtggttgcacattaaag

SEQ ID NO: 56587 - DNA, 120 bp, synthetic construct
  source 1..120: mol_type = other DNA
atattctcagttccccattcccttctaatctctacttagtctacagggctccttaaatgtcacttcctcaaggaggctttcattggccccttcaatctaaattaggtctcactatgaaac

SEQ ID NO: 56588 - DNA, 120 bp, synthetic construct
  source 1..120: mol_type = other DNA
cacctcctggattctacttctcatcattccattgaagctgcttcttgggtcaggaaaagctaaaatgtgatgggtctgaaggttatgctaaggagcttaccttaggattacggttacaat

SEQ ID NO: 56589 - DNA, 120 bp, synthetic construct
  source 1..120: mol_type = other DNA
gcacaaataattacttacggcataaaacttttttctagagattgaccatccttattagaaccttgtctaattcatttttgatttgtccttgaaaagttttggaaaactttgagaggttga

SEQ ID NO: 56590 - DNA, 120 bp, synthetic construct
  source 1..120: mol_type = other DNA
atctacaggctttcatgcaaccacagattttttgtttgctctgttttgttttttgtctaagttatcaatatttaatatacaatctctgaaagatttgagggctagaaaaggtaaaaatgc

SEQ ID NO: 56591 - DNA, 120 bp, synthetic construct
  source 1..120: mol_type = other DNA
atgctgttaaaagtcccaaatgttcattttatttagaatgatggcattgaagtgctggcacgctttgtggtcagccactccctttgccctttcggaactctgtattgctgaaattttgga

SEQ ID NO: 56592 - DNA, 120 bp, synthetic construct
  source 1..120: mol_type = other DNA
ctcctgagacccaaataaatgtccaggctttccagaggccaaaccagagaaagtttttccaaaactttcaagtgatcacattgatattgatgtgcttattgataattgagttgtactaca

SEQ ID NO: 56593 - DNA, 120 bp, synthetic construct
  source 1..120: mol_type = other DNA
gtgaaacctattgatgcttttttccccttcatcaggtttttagcatgatatagacacagttgtagtccctgacaaatgcttttgtcaatagcaaaggtacttcgccaaagttctcatctg

SEQ ID NO: 56594 - DNA, 120 bp, synthetic construct
  source 1..120: mol_type = other DNA
acaatgagactagaactgagtacttcatctctacaccttaatgctttcttaatttgtaatatttaattgttgcagtaatatgaaatgataggatggagggagatagtattttgtatccat

SEQ ID NO: 56595 - DNA, 120 bp, synthetic construct
  source 1..120: mol_type = other DNA
atccaacagcctgatattttctgtcattttttgcaatgattgaccacatttgccatacataaattatgttacacagccttcccctggctaacatgctaagtttctaatgtgctaattggt

SEQ ID NO: 56596 - DNA, 120 bp, synthetic construct
  source 1..120: mol_type = other DNA
tagcctgcggtaactcaaagtgagaggttttgagcgtcatgctatatttcttaaacaaaggaaaaagttctttaggactatcaaaagctgctttgtaactgatgaactgaacaaagctca

SEQ ID NO: 56597 - DNA, 120 bp, synthetic construct
  source 1..120: mol_type = other DNA
catagctctattatttatcagtcttttgacatttattcaacaaatacagtattgaatatccactctgggccaggaactgtcctgtgctacactaaaggctaaacaatttccagacagtgt

SEQ ID NO: 56598 - DNA, 120 bp, synthetic construct
  source 1..120: mol_type = other DNA
aaagtcaacattcacatagtgatgagggaaataatttagaagtcaaatttgcattaaaatcagttttgcactcattagctgtgtgactatgagccaattactttactattctgctactaa

SEQ ID NO: 56599 - DNA, 120 bp, synthetic construct
  source 1..120: mol_type = other DNA
agactatattaataacaattgcaataccctgtgggctgtggcagaagtgacacaaactgttatatgagcagtgacaatgtgtatctaacgcaggctgaggggtcagagattttctagaag

SEQ ID NO: 56600 - DNA, 120 bp, synthetic construct
  source 1..120: mol_type = other DNA
caatctaaatcctcctccatagtctttatctaagaacatctgctacacacttacatgtcttggtgagacatttggaggaaaatcagggaaacagggttgagtttcatggttgggttggca

SEQ ID NO: 56601 - DNA, 120 bp, synthetic construct
  source 1..120: mol_type = other DNA
atgatgcccagggagctggtaaaacattatttgtgggtgtgtttgtcagagtgtttccagaagcagttagcatttggatcagtagaccaagtaaagaaaatacgccctgagtaaagagaa

SEQ ID NO: 56602 - DNA, 120 bp, synthetic construct
  source 1..120: mol_type = other DNA
gacccctcctttatcaccatcccctgctcaatcagattcttgacttttaaaattacataggaactttgttaactggggcctgcatagtctatgagctgccaaagacttacttcttagtca

SEQ ID NO: 56603 - DNA, 120 bp, synthetic construct
  source 1..120: mol_type = other DNA
ttaatgaaataccatagagctgctgagaaaacgattagcagccaaatgtgaatttaatatacttcatcttcaagaagcaatgccccatgggaggcatcttgctgggggaggtaatgtggc

SEQ ID NO: 56604 - DNA, 120 bp, synthetic construct
  source 1..120: mol_type = other DNA
cagaatgatcattgatcttagaacgcagaaactagctgaatgacctggggcaagccacttgccctctgtaagcctcaattttcatctgtataaaacagaaataacaatgatcaccttgcc

SEQ ID NO: 56605 - DNA, 120 bp, synthetic construct
  source 1..120: mol_type = other DNA
atttggcagagtgctccacaaataatagcttctccatgcagctacagaatacagtaacaaacatccataaatcagaattcatctcaaatctaggtctcccaactccaagcctagtgccac

SEQ ID NO: 56606 - DNA, 120 bp, synthetic construct
  source 1..120: mol_type = other DNA
aactttatctctcagcatcattaaacttagttgacccttctttctttcttaaaacactatcctatggctgggcacagtgatttattcctgtaatcccagcacttcataggctgaggcggg

SEQ ID NO: 56607 - DNA, 120 bp, synthetic construct
  source 1..120: mol_type = other DNA
aaccttgagcaatgcctggctcattgcacactcttgaatgaatgaaggtactgggtaattgtacatttatacacagtacagtcttgaacttagcttggcttccaattctggctccatttt

SEQ ID NO: 56608 - DNA, 120 bp, synthetic construct
  source 1..120: mol_type = other DNA
gggattcctgtagtacagtatatgcttaagttaagtacctgctttcccgtgatttccatagattatcatattcatgacactgtggagtgaaagcattcttctcactctctaactagaaca

SEQ ID NO: 56609 - DNA, 120 bp, synthetic construct
  source 1..120: mol_type = other DNA
ttctttgtctaggggagttttggagatggtatatgttgatatatttgaatatcagttataagtactaccaaaacagtgaataattttaccttcatttattacaaattaaaagcacagctc

SEQ ID NO: 56610 - DNA, 120 bp, synthetic construct
  source 1..120: mol_type = other DNA
gatatttttctagggcagaatgagccacaaagagaaagatacacaggacagtgtcaatacagcatcactacgtcatttaatggctgatggtggttatggcagccaatagtctgaggaaag

SEQ ID NO: 56611 - DNA, 120 bp, synthetic construct
  source 1..120: mol_type = other DNA
tcacaattgttaccttatatgtttttaaaatatgaatctcaaatcgtaatttagaatggtagatatcaaagaaatgtatgctgtgggaggatgcatatgtaatgactacacagatggaaa

SEQ ID NO: 56612 - DNA, 120 bp, synthetic construct
  source 1..120: mol_type = other DNA
agcccaggaggtcaaggctgcagggagccaggattgtgtcactgcaccccagcctgggcagcagaggaagaccctgtctcaaaataaataaataaataaaagatacaaatatataaatat

SEQ ID NO: 56613 - DNA, 120 bp, synthetic construct
  source 1..120: mol_type = other DNA
gtgtcgctagaatgtcgaagatgcaatttatcatactttctttagaacttttgcatctttattcataagtgaaaatggtctataattttggtctacaattttctgggttgtactattgtc

SEQ ID NO: 56614 - DNA, 120 bp, synthetic construct
  source 1..120: mol_type = other DNA
gcaggaactgaggagggcatcaaaaaaacatggttcaacaatataagctgcattgctgtttaagtgcctggaaacagcagtgcccattgaagagtactgaacgtggaatcaatactcaat

SEQ ID NO: 56615 - DNA, 120 bp, synthetic construct
  source 1..120: mol_type = other DNA
acatgggccctatcatagaaaatatgctttttgttaggattctcaatatctagaaggaggggcaacctttctggcatgaatgtgcaactgctgtgaggatccagtaaaaggtcttctcag

SEQ ID NO: 56616 - DNA, 120 bp, synthetic construct
  source 1..120: mol_type = other DNA
atcctatgccacgactttaccttgtcaaaacagccaatttgtgtcaataggaaaatgtgaaaatgctctgagtctctcctctgcacccccaaccacgtttttagtagtatggctgtaaaa

SEQ ID NO: 56617 - DNA, 120 bp, synthetic construct
  source 1..120: mol_type = other DNA
tttcccaaagaattatcatgaggtcacttctggccagttgtttcttgggtgcaggaatggctgcattatataggttgatgcatgtaacaactctgttggaaagaaaaccacctcttgctt

SEQ ID NO: 56618 - DNA, 120 bp, synthetic construct
  source 1..120: mol_type = other DNA
gtgctgtaggaaggatgctctattttggttttgtggcagtgatggggctagggataaatatgcttagtcaagtaaataagtatttagaagtactaggctataaagcttaagaactatgga

SEQ ID NO: 56619 - DNA, 120 bp, synthetic construct
  source 1..120: mol_type = other DNA
attcatctgagtagggtttgaaatatagtaccttcaatagcccagaggactcacttacttttgaatctgataaacaaagtaaatatatgaagaaaaatatatatgctccttggcatcaca

SEQ ID NO: 56620 - DNA, 120 bp, synthetic construct
  source 1..120: mol_type = other DNA
ttaccaaagcaaatgccctccacccccgccctgctctaaatagcacagatttctggtattttaatgtgtcattagtttgaccagacagattttagtccctaataaaataattctcctaac

SEQ ID NO: 56621 - DNA, 120 bp, synthetic construct
  source 1..120: mol_type = other DNA
aaaggcttaaaggattctttttagataaactaacaagtggggaagaaataagccacttcttttgggaagttatcagtggtttcaggaccttgcagtggcaactggattttcagaaaagaa

SEQ ID NO: 56622 - DNA, 120 bp, synthetic construct
  source 1..120: mol_type = other DNA
ttgtcagaaattcccaatttttaaaaacaagtgagatttgctgtgcgtgtgaggctctttccagaactgctcttttggccctcattcttatggatgtggtattcagtggtgaatccaacc

SEQ ID NO: 56623 - DNA, 120 bp, synthetic construct
  source 1..120: mol_type = other DNA
ggatgttgctcacaaagggcttacagtctaattgaaaagggaagacaagtataaacgtagcaaatggcaagcttcatacaagggaagtgacacattcaattggaggataaggcaggcctt

SEQ ID NO: 56624 - DNA, 120 bp, synthetic construct
  source 1..120: mol_type = other DNA
gaaacaccaactcatggctaaactccactgagcatcttcttggattatgggaagagtatattaaacagaggccattatcttccacacacggttccatgtactgcaataacaaaccatgta

SEQ ID NO: 56625 - DNA, 120 bp, synthetic construct
  source 1..120: mol_type = other DNA
tttgaatactgtatgttgtaggatagtatcaactgagatggagggaaggagagaaaagtagagtgtggatggaggagtgacaaaaaataccatttttctgtcctctcccactgaagccca

SEQ ID NO: 56626 - DNA, 120 bp, synthetic construct
  source 1..120: mol_type = other DNA
ctccgttacccatttcacagtgtgttttaaatagactcaggattatctttacacagaatgttggttttgctcacgaggattctcctggtccataccctgacatttctaaatgtccagcct

SEQ ID NO: 56627 - DNA, 120 bp, synthetic construct
  source 1..120: mol_type = other DNA
ccttctttcctccctccctccctcactccctccctccctctttctctctctctatctatctatctatctatctaacttctgcatgcccagttattacttaattactgaaaatcattatga

SEQ ID NO: 56628 - DNA, 120 bp, synthetic construct
  source 1..120: mol_type = other DNA
gttgccagggtgcctacaatttaaaatatgtctgaaaaggtttctgtggcagtcccaattactgagctattaaaagtaaacacaactaaaaatttgaagaatatgcagaaagaagcctag

SEQ ID NO: 56629 - DNA, 120 bp, synthetic construct
  source 1..120: mol_type = other DNA
gtcatcaatatttatgacatcaacagtttcaaaccaatacttgatatttcttaatataacatgaatattattttttttgctccgttggtatgtgatgaaaaagtaaggccttagttttcc

SEQ ID NO: 56630 - DNA, 120 bp, synthetic construct
  source 1..120: mol_type = other DNA
ccgggaggtggaggttgcagtgagctgagatcacgccactgtactccagcctgggtcacagagccagactctgtttcaaaaaaaaaaaaaaaaatatatatatatatatatatatatata

SEQ ID NO: 56631 - DNA, 120 bp, synthetic construct
  source 1..120: mol_type = other DNA
gaatttttactacatacttttaaaggttcagcgcagctctgcagggccacgtgagatgttgcttcttattagtagccctcggcataatgatgaagtaagttaacgttgcctttgacactt

SEQ ID NO: 56632 - DNA, 120 bp, synthetic construct
  source 1..120: mol_type = other DNA
atgatggactaatagtggaaatactaggctgagagagtgtttctgttatttttcaaaattcctctacaatggactatggccattttctgcatgcaaggaagaacacagccaggatcaccg

SEQ ID NO: 56633 - DNA, 120 bp, synthetic construct
  source 1..120: mol_type = other DNA
atgccatccttgacactggtaaagagtagtcagctaggtatttgtcgactagaaagaatcgttaaaatggacaactaaaaccatcatatttacaagtgacacaaatcagaaattgttggc

SEQ ID NO: 56634 - DNA, 120 bp, synthetic construct
  source 1..120: mol_type = other DNA
cttcatcttgggaacatctctggctacacaattgtaaaaatgggctgataattaaagtaccagggaacactccttccatattcactgtttataagcagagtggtcttggtgggtgcacac

SEQ ID NO: 56635 - DNA, 120 bp, synthetic construct
  source 1..120: mol_type = other DNA
agttactgtgcagcaccagtgacgagctttcactgattccagtcacatgactgacttgggtagatgtattccaccctcataacaaaggcttgtgggtagtaaatattacctatcaaataa

SEQ ID NO: 56636 - DNA, 120 bp, synthetic construct
  source 1..120: mol_type = other DNA
tattgatagcccagaaaaagtgctgtaattttctctgctctctcctgtagaatgttctgtttccgctacctcaagccaagtgacagaagacactctaaatacaatcaagagtggggtact

SEQ ID NO: 56637 - DNA, 120 bp, synthetic construct
  source 1..120: mol_type = other DNA
ggtagggaaagttcacttctgagtacatatcacatctgcaaaccttgtcatagtgatccaaaatggaatgggaagtactgaagatgtatagtgatctcgcttcatgtaggattgtgcttg

SEQ ID NO: 56638 - DNA, 120 bp, synthetic construct
  source 1..120: mol_type = other DNA
gtacatatccacagcctcctaccaaaatcagcattctgggtattctagaaccacacacgaaaactgcttaggaactctcaaatcaagtagcaggtcaaagaactcctttgattgactctt

SEQ ID NO: 56639 - DNA, 120 bp, synthetic construct
  source 1..120: mol_type = other DNA
aagaaaactgaggaaatatagaaaagaaaaagaaagaaaaattaccaagaatttctgctttcagaaatgtctggtaatatatgggtattatcatagcttttttttcctgtccacaaatgc

SEQ ID NO: 56640 - DNA, 120 bp, synthetic construct
  source 1..120: mol_type = other DNA
catcaagaagagttgttcaccagccaatggtaactgactcttctgactctttatccccagttacagaccttccgaacaaggaaattattattcttgccatgattctctggtcatcaaacc

SEQ ID NO: 56641 - DNA, 120 bp, synthetic construct
  source 1..120: mol_type = other DNA
tcagttctctcactaaatcttgcaaataaaacagtatacctttcaacgtggtggctgagattgtgtgatgtggagaaaaggaagatatgcagagatgttagcatggccacagggtgatgg

SEQ ID NO: 56642 - DNA, 120 bp, synthetic construct
  source 1..120: mol_type = other DNA
gtgaatacacaggccctgctggtgccagggagttaacatgaatacattgcttttttaataggtgtgcttaccatctgagaatacaaaacctcaaactcaaggcttcaattgagtctactg

SEQ ID NO: 56643 - DNA, 120 bp, synthetic construct
  source 1..120: mol_type = other DNA
agcttcctggggtaggtgagaattagtagaatttcaatggcaaggaaaataaagagtcagaagaactgcatgccatgagccaatgtattgaggctgttataggaaggaggagagcatgtt

SEQ ID NO: 56644 - DNA, 120 bp, synthetic construct
  source 1..120: mol_type = other DNA
ctcttctgtgcatcatgtcaggctcagtgattgtggagcgagtaatagctctcttttactgtactttgagaatgggtagaatcaagagggtgagtgcaatattggtttatacaacttggt

SEQ ID NO: 56645 - DNA, 120 bp, synthetic construct
  source 1..120: mol_type = other DNA
ttgggagatacctactatggaatccctggcaatatctagttttaattaaaatgaaatgtcataataatgtcatcccacattctggtgtcacgacaaacatctttgaactcctgtgattaa

SEQ ID NO: 56646 - DNA, 120 bp, synthetic construct
  source 1..120: mol_type = other DNA
caagcctcccagtttaaaaattattatgaatttcaagatggagttgtcagagcattaatccaagagcaggaccttctgagagggaagctttgtgctatggcacagattgcatacccacaa

SEQ ID NO: 56647 - DNA, 120 bp, synthetic construct
  source 1..120: mol_type = other DNA
ttgtgggcactgggctctctctgggttctcctctgaagaagccctcttctcagatatactgtatatatgaatatttatttctcttatacaaaagaggacctcagagctaggtacatcact

SEQ ID NO: 56648 - DNA, 120 bp, synthetic construct
  source 1..120: mol_type = other DNA
taaaaatacaaaaattagccaggcatggtggtgggcgcctgtaatcccagctactcggcaggctgaggcaggacaatcgattgaacctgggaggcggaatttgcagtgagccgagattgt

SEQ ID NO: 56649 - DNA, 120 bp, synthetic construct
  source 1..120: mol_type = other DNA
gtatatattctgtagactaatatattgatatatataattatcatatttatacaatattatcatcatcaatgttttcatcaagttgtcactctctcaggtatagcatacctgagaactgaa

SEQ ID NO: 56650 - DNA, 120 bp, synthetic construct
  source 1..120: mol_type = other DNA
tgggagaaaatcttcatgatctatacatccaacgaaggactaatgtccagaagctacaaagaactgaaacaaatcatcaagaaaaaaataaacaatcccatccaaaagtgggctaaggac

SEQ ID NO: 56651 - DNA, 120 bp, synthetic construct
  source 1..120: mol_type = other DNA
gtgagactccatctcaaaaaaaaaaaaaaaagattgatataatgtgggcttaggggaaggggtgagaggggggtgagggataaatgactacacgttgggtacacattggtaagtgtacac

SEQ ID NO: 56652 - DNA, 120 bp, synthetic construct
  source 1..120: mol_type = other DNA
gccccaaattgcattagttgtttttattatcctaatacactgaaagcctgattttactataatttgttcttcactttcatcccagccctaggtctcctgataatactgctttctaaattg

SEQ ID NO: 56653 - DNA, 120 bp, synthetic construct
  source 1..120: mol_type = other DNA
atttacaagaaaaaaacaaacaaccccatcaaaaagtgggcaaaggacatgaacagacacttctcaaaagaagacatttatgcagccaaaaagcacatgaaaaaatgctcaccatcactg

SEQ ID NO: 56654 - DNA, 120 bp, synthetic construct; identical to SEQ ID NO: 76
  source 1..120: mol_type = other DNA

SEQ ID NO: 56655 - DNA, 120 bp, synthetic construct
  source 1..120: mol_type = other DNA
cagtaccaagtccaattccccagggctttttgtgcttctacaaatcatgtcaagttgctcacaaccagtgaattcattactctgatttagcgatggcagtacacaggatgggaatttaaa

SEQ ID NO: 56656 - DNA, 120 bp, synthetic construct
  source 1..120: mol_type = other DNA
aaagagcattttgactgctctcaaaatgaagggcaatcaacagggatcagtcctgagatgatccagatattagaattagaggtcaaggattttaagtcagttattataactgtgctcaga

SEQ ID NO: 56657 - DNA, 120 bp, synthetic construct
  source 1..120: mol_type = other DNA
catagtgttttactgtttgggtcaagagtcattgtaataaccaatagttttatatttacagtgttatatattcaactaattcaccaacaatttctatatagtgttgtggtgggccttcca

SEQ ID NO: 56658 - DNA, 120 bp, synthetic construct; identical to SEQ ID NO: 7816
  source 1..120: mol_type = other DNA

SEQ ID NO: 56659 - DNA, 120 bp, synthetic construct
  source 1..120: mol_type = other DNA
gctctattcacaatagcaaagacttggaaccaacccaaatgtccaacaatgatagactggattaaaaaaatgtggcacatatacaccatggaatactatgcagccataaaaaatgatgag

SEQ ID NO: 56660 - DNA, 120 bp, synthetic construct
  source 1..120: mol_type = other DNA
atttaataaatggtgctgggaaaactggctagccatatgtagaaagctgaaactggatctcttccttacaccttatacaaaaattaattcaagatggattaaagacttaaacgttagacc

SEQ ID NO: 56661 - DNA, 120 bp, synthetic construct; identical to SEQ ID NO: 7817
  source 1..120: mol_type = other DNA

SEQ ID NO: 56662 - DNA, 120 bp, synthetic construct
  source 1..120: mol_type = other DNA
cctcccaaagtgctgggattacaggtgtgagccactgcgcccagccacaatgtacagattcaatgctattcctattaaattatcaatgatattcttcacagaactagagaaaactatttc

SEQ ID NO: 56663 - DNA, 120 bp, synthetic construct
  source 1..120: mol_type = other DNA
atagcagacactggccaagttgcagagaaaagagaacacttatacactgttggtgtgagtgtcaattagtttaaccattgtggaaagcaatgtggaaattcttcaaagggcttaaaaaag

SEQ ID NO: 56664 - DNA, 120 bp, synthetic construct
  source 1..120: mol_type = other DNA
ttctcttaattcagaggtataaatgcttttatgtgccagaaattatattttatgttatgagttctccagacataagcaagaattgccaaacttgccagatggccctatacttatatttca

SEQ ID NO: 56665 - DNA, 120 bp, synthetic construct
  source 1..120: mol_type = other DNA
tagaaagagtaaagagcctgcattttaaagtagttatttctaaaattcacaagtttgtagctctttattaccaatcttgggaaaacttctagacctttctttcagaggtcaactactctc

SEQ ID NO: 56666 - DNA, 120 bp, synthetic construct
  source 1..120: mol_type = other DNA
actacacctgactatgcttgctcatatagagaaggggcttcaattcccacttagtaattttttttttttttttgagacagagtctcactctgtcacccaggctgcagtgcattggcatga

SEQ ID NO: 56667 - DNA, 120 bp, synthetic construct
  source 1..120: mol_type = other DNA
acatccttggagctctccatctccacctgcatcccttctactgcctcatctcacttcaccccaaccatggtatttataccttgtgacactcaataaataactaaggaatagataaatatt

SEQ ID NO: 56668 - DNA, 120 bp, synthetic construct
  source 1..120: mol_type = other DNA
gcctcctgggttcaagctattctcctgcctcagcctcctgagtagctgggattacaggctcaagccaccacacccagttaatttttgtatttttagtagagatggggtttcaccatgttg

SEQ ID NO: 56669 - DNA, 120 bp, synthetic construct
  source 1..120: mol_type = other DNA
gattctaacagttgtgtctgttttataggatgaacacatacatcattgcatggaaaaagcagaacttagcctggctgtgcatttcatgggtgcagtttataggcatcacctgcaactaga

SEQ ID NO: 56670 - DNA, 120 bp, synthetic construct
  source 1..120: mol_type = other DNA
tctcgtcacagatgaaggaaatgtaaaagcgaaactcacaaagatttgataggatttatgctaaatgacaacgacacccaaaagcacaaactaagaatgaagcctgtgccctatcgggag

SEQ ID NO: 56671 - DNA, 120 bp, synthetic construct
  source 1..120: mol_type = other DNA
ttaatcactcaatctcaattaactactgcagtgcctggcatggaatactcaatatatgttaaatgcatagatgtttatttaaatgattaaaatccaaacactaaagtttctgaggcaggg

SEQ ID NO: 56672 - DNA, 120 bp, synthetic construct
  source 1..120: mol_type = other DNA
cacccagctgctggcaagttggcagagtgaaatgcatttgtttatgcccctagccattcattttctttaagctggtttccagccaagatttttatctaggtaccagctattcttttccag

SEQ ID NO: 56673 - DNA, 120 bp, synthetic construct
  source 1..120: mol_type = other DNA
tcttctccattttggtgccaaagcgataaaggaagaataagggcaagggagtgggtctagagaatgtctgtttctcaactataccttatttcccttattcaactgccacgttctataagc

SEQ ID NO: 56674 - DNA, 120 bp, synthetic construct
  source 1..120: mol_type = other DNA
gagaccaaggtcagaaaagagctgtcgggagtgacacggttttttgcccactgctgctattacattaaggaagcagctggtgagataatgtatgccaaagtgctttctaaattataaagt

SEQ ID NO: 56675 - DNA, 120 bp, synthetic construct
  source 1..120: mol_type = other DNA
tttagtgattttggaggttgccagtgggtagaaatctaaccttgagtagctgaagacagaaaagcaagtaagaaacgaagggcagtgagtacggatgacattttctagaacctgaactgt

SEQ ID NO: 56676 - DNA, 120 bp, synthetic construct
  source 1..120: mol_type = other DNA
atccagtcacctctcaccaggttccacccttgacacatagggattttggggattacaattcaagatgagatttgggtgggggcacaaaatctaaccatataaatgaacttttccatttca

SEQ ID NO: 56677 - DNA, 120 bp, synthetic construct
  source 1..120: mol_type = other DNA
ttgataagtagggaagacaaacgaaatgctttaaagatgtatggcaacaaatcttcaaaaggcatggtcttgacagtgaaacaatccacagcagactggccagcatggtgtaaggggctg

SEQ ID NO: 56678 - DNA, 120 bp, synthetic construct
  source 1..120: mol_type = other DNA
tcaggaagagtatcaggggcatagctcaaaattgcagagaggtattttctttactccataaaatgaggattgggaacaaagctaactggtttgctataaatgtccactgattgtgtagag

SEQ ID NO: 56679 - DNA, 120 bp, synthetic construct
  source 1..120: mol_type = other DNA
cctcccctaatggttcacgttaaattcagatgttaacttttggcaacagcagtagacacctcccttctgcctattttaggaagaatgatggactactcatgacaatttactgcccaaact

SEQ ID NO: 56680 - DNA, 120 bp, synthetic construct
  source 1..120: mol_type = other DNA
atcattacccaagtgactgatagaaatgcaaatatcatctggaacttttctaacaacataatgtaactgtctggcagtcccagggagaataactgtggggacaaagctgtaatgggagaa

SEQ ID NO: 56681 - DNA, 120 bp, synthetic construct
  source 1..120: mol_type = other DNA
ttgtctaccctgacacccaaacacacttgcttgattactgcagatttatagaaaatcttgaaggcagatagtacaaattctcccacttcccactttgttctcctttttcaagattgtttt

SEQ ID NO: 56682 - DNA, 120 bp, synthetic construct
  source 1..120: mol_type = other DNA
aaccattctgattggtgagagatggtattttagtgtgcttttatttgcatttctctaatgatcagtgacactgagctttttttcatacgcttgttggctgcatgtatccacgtcgctgtg

SEQ ID NO: 56683 - DNA, 120 bp, synthetic construct
  source 1..120: mol_type = other DNA
actgagaatatcaaaaggtggctggaacatagaagaaccaaacacccacccacagctggtaggactgtgaaagagtaaagccactttggaactctgtttggaagtttcttgtaaaactta

SEQ ID NO: 56684 - DNA, 120 bp, synthetic construct
  source 1..120: mol_type = other DNA
agtggtgaagtttgagcttttagtgtaaccatcacacgagtaatgtacattgtacccgttaagcaattcctcatcccatatcctgcttctacccaattcctcatcctacaccctgcttct

SEQ ID NO: 56685 - DNA, 120 bp, synthetic construct
  source 1..120: mol_type = other DNA
gggtttgtcttcttttgaaaaatgtctgttcacgtcctttgcgtactttttaataggggttacttgtttgttgttgttgttgagttgtttgagttctttgtaaattctgggtgacagtcc

SEQ ID NO: 56686 - DNA, 120 bp, synthetic construct
  source 1..120: mol_type = other DNA
tatggatacaattttggtttctattatcaaaacaaatccttgttttcagagttgctgtacaaccaccatgacagaatttctgattttatcctaatgagagccttttaatgagcacagatt

SEQ ID NO: 56687 - DNA, 120 bp, synthetic construct
  source 1..120: mol_type = other DNA
attaattctatagcaaaggtcagggaatagctcaaaaagtgatgcttgagaactggaaggccattccagatgtcgggaacagcatgtggaaatgcatgcagatcccaagtgatcattagt

SEQ ID NO: 56688 - DNA, 120 bp, synthetic construct
  source 1..120: mol_type = other DNA
ttctcttttttgtcccttttggcaatgcagatttttggatccctccatgagaattatgatgttaaaatgcagattctcaacacacctcttacccactgactcaggatcaatgctagtggg

SEQ ID NO: 56689 - DNA, 120 bp, synthetic construct
  source 1..120: mol_type = other DNA
ttaggaaatcacctgtaccctagatccagagtactttgattcactactggggatataaatctaaagggataatcacctattgttttagtcatgtcagcctgcacaggagaatccagaagc

SEQ ID NO: 56690 - DNA, 120 bp, synthetic construct
  source 1..120: mol_type = other DNA
taggagagggacagtgatattttctactaaaactagccaaatataagtcaattatatgatgtttctcttattctttctgagtccctaacccagtcatccaaggcagagtacccagggctt

SEQ ID NO: 56691 - DNA, 120 bp, synthetic construct
  source 1..120: mol_type = other DNA
accaagagataattctccaaacaaattcacttttctttgagtcaacaaatatttattttatgtgccaggcactgtttgaggcatgatggatcagtagccgtctggagatgggggtggtgg

SEQ ID NO: 56692 - DNA, 120 bp, synthetic construct
  source 1..120: mol_type = other DNA
ggtaactgaatcatggggatggttatctccatgctgttctcgtgatgatgagtgagctctcacacaatctgatggttttataaggggcttttccccttttcctttgcacttctccttcct

SEQ ID NO: 56693 - DNA, 120 bp, synthetic construct
  source 1..120: mol_type = other DNA
aactgagcaaagaaaaactcatttctatcctgttttcccagatgttgaatacctagtatatcagggtgtctggcaatggcagccaacaaagaaaaatcatgtcatgcatgaatgaaaaag

SEQ ID NO: 56694 - DNA, 120 bp, synthetic construct
  source 1..120: mol_type = other DNA
atttatttatttttttatttattcttatagagatgaggttttgccatattgctcaaactcctgagctcaagcaatccgcccacctggcctcccacaaatgctgggattacaggcatggac

SEQ ID NO: 56695 - DNA, 120 bp, synthetic construct
  source 1..120: mol_type = other DNA
gtttctcaggaggaacaatttgaacattaattaggcctgttataaccttcttagagttggtggtgtttttttctcacaacaattataaggaacatcattatcatttcctccacaggggta

SEQ ID NO: 56696 - DNA, 120 bp, synthetic construct
  source 1..120: mol_type = other DNA
gatgctgctgctgctgctggaccacacttagaacagcaaagtcttaagcactggcaggggtgaatctcatctcaactgaaatgctgactgcaaaaaaaaatttcttctaaacaaataggt

SEQ ID NO: 56697 - DNA, 120 bp, synthetic construct
  source 1..120: mol_type = other DNA
ctttaggtgcagacgcatttaatagaggccgacctgtgcagaacaactgtacaaatacctggatggtaacagagggttgtggggagctattcttttctcattatttctcataaaatgaga

SEQ ID NO: 56698 - DNA, 120 bp, synthetic construct
  source 1..120: mol_type = other DNA
agatcttgatctattaaacacaactcagataaacccatgaccataattatcccttttcatttcttatcatacaggtggataaactacacttcaggacttagaagtatgtgcctccaggtt

SEQ ID NO: 56699 - DNA, 120 bp, synthetic construct
  source 1..120: mol_type = other DNA
ttctcctgttttcggatgttatgcagtttctaattctatctgtccacacctactgattaaaaaaatcagattttctgaaggcatggaatcaataattactcacggaattgagttctgacc

SEQ ID NO: 56700 - DNA, 120 bp, synthetic construct
  source 1..120: mol_type = other DNA
atcctctgaaacgataaattctctgataaattttaagtataaaaatttcccccttttcctccaattaggaaggaactttatgtagcctgaaagtctatttttcagtgtaactctgtggtc

SEQ ID NO: 56701 - DNA, 120 bp, synthetic construct
  source 1..120: mol_type = other DNA
aggatttttctactaacatcgtttctcaccatcaggctttggtgctgcatcagttaccacagcaattttcaattactctgcagtaacacaggtggtggtgtaagggtttgcatgtagcat

SEQ ID NO: 56702 - DNA, 120 bp, synthetic construct
  source 1..120: mol_type = other DNA
ctatgtaagagttaagcgttataggaaaaacaaaacaaccttaccaatgttgaagttaatatatggtaaacacggtgcatatttatgggagggctagagaagcaaagcaataaggtttgc

SEQ ID NO: 56703 - DNA, 120 bp, synthetic construct
  source 1..120: mol_type = other DNA
ataattgggcagatagtacatagagtttcatacgcccacaccacccccaaactcggcaccttccccattattaatatcttgcattagatggtacatctgttacagttaaagcaccaatat

SEQ ID NO: 56704 - DNA, 120 bp, synthetic construct
  source 1..120: mol_type = other DNA
tctccagacactcctccaagggtctttcagcctaaaaaaaaaactcaaaggggacaggggaggcaaggagctactcaaaatccatatcctttaagggtggaaaagtttggtgtattttaa

SEQ ID NO: 56705 - DNA, 120 bp, synthetic construct
  source 1..120: mol_type = other DNA
cagtgcctaaataactgcacaataggtatcatcatttggatctcattcaccagatttcagagacacagcaaaaagggcagagactatatttcttttggttaccattgtacacccagtact

SEQ ID NO: 56706 - DNA, 120 bp, synthetic construct
  source 1..120: mol_type = other DNA
atattattgccattgtaaatgatttgcttcctctaatacaggtcctgcaaaaccactgcacatgcccagtaaaggccttctctctgtttgctgggaatgtagccaggagtgtttaataga

SEQ ID NO: 56707 - DNA, 120 bp, synthetic construct
  source 1..120: mol_type = other DNA
tctgaatgtgcaactggtgtcttctgaggtgtgtgtgtgtgtgttccatattgactaatttctaagatgagttgctccattgagctccaggaccaaaatgatcatatctttgttgtaaac

SEQ ID NO: 56708 - DNA, 120 bp, synthetic construct
  source 1..120: mol_type = other DNA
atgcctacatctttaattccacaaactgttaaggtcctcctggttcatatctgccaaacgaagctaagagcaaacattgttctttcttctgattatgtggggcatgaccatagaataggg

SEQ ID NO: 56709 - DNA, 120 bp, synthetic construct
  source 1..120: mol_type = other DNA
tgttgccataaccacagcttcttgcaactggaatcaatcatggtctctcacttgcctcactgcaatactttctttattcactcttgaccctcctaaattaattatctacacgacagctaa

SEQ ID NO: 56710 - DNA, 120 bp, synthetic construct
  source 1..120: mol_type = other DNA
gtattatgtcattttcccgtaagactttgaagaaatagaactcctaagcatgagtgaaatcccccttacttgcctacagatttttctccactatgaatcgctcccaattcagatttcaaa

SEQ ID NO: 56711 - DNA, 120 bp, synthetic construct
  source 1..120: mol_type = other DNA
ccatagactgggtagcttcaataacaaacattcatttctcacagttttggaggctaggaagaccaagatcaaggtgtctggtgaagacttgcttccaggttaatagatggccatcttttt

SEQ ID NO: 56712 - DNA, 120 bp, synthetic construct
  source 1..120: mol_type = other DNA
gtgggtgattaatggatcactgctgctttgaccaaggaataaatggagaaacggcaaaaggatgatattccccctctcgagttactaaaatgcccattttagacacttttctagaaaggc

SEQ ID NO: 56713 - DNA, 120 bp, synthetic construct
  source 1..120: mol_type = other DNA
ggccagttggctgtcttgtctcactgaagcttgtgaagcagtggctaactcagtaatgcattaccttgtattcaagtctcatctttctctgtctcatttccatcttcttttactcttgct

SEQ ID NO: 56714 - DNA, 120 bp, synthetic construct
  source 1..120: mol_type = other DNA
tgcttaggcccatgacactccatcacgtgactggcgctaaaatataaacgttcccattttgtgtggtataagatacttgtgactgaaagtgacctaagcattctttttgcctttctgttg

SEQ ID NO: 56715 - DNA, 120 bp, synthetic construct
  source 1..120: mol_type = other DNA
ttgagatcacgccactgcaccccagcctgggtgacagagcgacactcgtctcaaacaacaacaacaaaaaagtgtttgagaagaggatgcagatttccaattgagtaaatatttatacac

SEQ ID NO: 56716 - DNA, 120 bp, synthetic construct
  source 1..120: mol_type = other DNA
tataactagagacagatacaattacagttgatattcattttacaagcagtcttagggctggaccagagtgctgatggctccctgatgtgccaatcattgttggataatgaaaagcggggc

SEQ ID NO: 56717 - DNA, 120 bp, synthetic construct
  source 1..120: mol_type = other DNA
ctggagtcattcccgtctagctactgtctaacattgtcttcctcccttttcctcttttctgttctgcctcagcctttagacatcctagatcaaacccaaaaagtcaataaataaatcctc

SEQ ID NO: 56718 - DNA, 120 bp, synthetic construct
  source 1..120: mol_type = other DNA
ccttgtatagaaagttaatgatgatgtcctaccattaacagaacatgtgctttggagacacgtttcctctagaagtgatgaatttgagttgataaaggcacatttttggggcctgtcacc

SEQ ID NO: 56719 - DNA, 120 bp, synthetic construct
  source 1..120: mol_type = other DNA
agaaatacattccctttctttaaaaattgcccagctttgagtattctaagtaacagaaaatggactaagacatcactcttgtgagggagcttctagcatgcaagcttcctgagggcaggt

SEQ ID NO: 56720 - DNA, 120 bp, synthetic construct
  source 1..120: mol_type = other DNA
agggagggtgggggatgcagagacaaattatagaatagaaatcaggtaacatggttcctagtcctactggaaagtcaactgataaaatgaacccaaggaaattacaaactgtgaatatgc

SEQ ID NO: 56721 - DNA, 120 bp, synthetic construct
  source 1..120: mol_type = other DNA
aggaacggacagtagaaaggatttgtcagggacaagaaaaaatttaggcaaggacatttatataaggtgaggaattttctgtagctatacgcctgcaaacatcttagctaactcatgatt

SEQ ID NO: 56722 - DNA, 120 bp, synthetic construct
  source 1..120: mol_type = other DNA
tcagcgagtggccgtcatgtgaccatgactttccacagcaaatgcccactatgcttcatctttccgttatatttcaggattttctattaactttagtgacaaacccacgcagaaaagata

SEQ ID NO: 56723 - DNA, 120 bp, synthetic construct
  source 1..120: mol_type = other DNA
aggaaggcaagcctgtaatcggttttgaatcttatttctaggccacggtgttacatctggttctgttgtaatagtcattttcactccaaagttgtactaggaaaatgatctggagtaccc

SEQ ID NO: 56724 - DNA, 120 bp, synthetic construct
  source 1..120: mol_type = other DNA
gggatttacccagaagaaggatcgctaggtcacatcgtagttctgtttttaattttttgaggaacctccatattgttttccataatggctgcaccaatttacattttccccaacaatgaa

SEQ ID NO: 56725 - DNA, 120 bp, synthetic construct
  source 1..120: mol_type = other DNA
gtacttcagtacagtaaaggccatatatcacaagcatgcagctaacatcacagtcaatagtgaaaagttgaaagcttttcttctaatattaagaacaagacaaggatgcccactctcctc

SEQ ID NO: 56726 - DNA, 120 bp, synthetic construct
  source 1..120: mol_type = other DNA
gggaggtggagattgcagtgagccgagatcgtgccacggccactgcgctccagcctggcaacagagtgagactctatctcaaaaaaaaaaaaaaaaaaaaaaaaaagaaagaaagaaaaa

SEQ ID NO: 56727 - DNA, 120 bp, synthetic construct
  source 1..120: mol_type = other DNA
ctctgtgatgcatataaagcaataaagaaggtatgcgctatcacacttatgcaacttatgaaaaaaattagctttccattcttgaaatgtcattactcttcttaatgtcagtcatatggc

SEQ ID NO: 56728 - DNA, 120 bp, synthetic construct
  source 1..120: mol_type = other DNA
gactagtacccaagccccagcagacattaaacactatgtatttggagtaagcccaattgcagagttacattaatttctctaataatattcaacagcttaaaactatactgaacgaaaggt

SEQ ID NO: 56729 - DNA, 120 bp, synthetic construct
  source 1..120: mol_type = other DNA
agggagctggaggccattatccttagcaaggtaatacaggaacggacaaccaaatactgcatgttctcacttagaagtggaaactaaattatgagaacacatgaacacatagaggggaat

SEQ ID NO: 56730 - DNA, 120 bp, synthetic construct
  source 1..120: mol_type = other DNA
tctcttcatagaaacttgactctaagaggtaagctatagcctgaacatgtaagctttgagtgggcatggaagacttgcgtattactaatattcccgtcttacaggtcctgtgatggaaga

SEQ ID NO: 56731 - DNA, 120 bp, synthetic construct
  source 1..120: mol_type = other DNA
tcagccgagaatgtcttgatttctggctcatttctgaaggatacaggattttgagctgacagttcttgttttagcatttgaaaaatgtcccactttcttccagactccatggcttgtgat

SEQ ID NO: 56732 - DNA, 120 bp, synthetic construct
  source 1..120: mol_type = other DNA
ataatattaagagactcttgattttatttaaactttgtttctgctagctttccttggtgtcagtctggcaggggaagtggagaatgccacctccttaatgccagatagaagcccaggtat

SEQ ID NO: 56733 - DNA, 120 bp, synthetic construct
  source 1..120: mol_type = other DNA
acactctacccttttgccagagaatatgtgatgccaaactttctgctttccaattaccatcaatgctaagtagtgagaagtcattattaatggagtattaccagagagttcacagttcac

SEQ ID NO: 56734 - DNA, 120 bp, synthetic construct
  source 1..120: mol_type = other DNA
ctgattgctgtccctacacaaaatcagaataatcaatggttagcacactgaccacttgagtatactgtcttatattacttctattactatgatgtgatgacagcgtcactggacaaattt

SEQ ID NO: 56735 - DNA, 120 bp, synthetic construct
  source 1..120: mol_type = other DNA
attgtatggatagaaagaatactttggggctattttaaaaatgagtatattgtactaaagctactttgaattctcaaatgttaaacatcccagagtacattaatgctttcataataaagg

SEQ ID NO: 56736 - DNA, 120 bp, synthetic construct
  source 1..120: mol_type = other DNA
tgagtatctctgtatcttcctctcaattttgctgtgaatctaaactgctctaaaaaataaagtctaaaacagaggctgggagtggtggctcacgcctataatcctagcactttgggaggc

SEQ ID NO: 56737 - DNA, 120 bp, synthetic construct
  source 1..120: mol_type = other DNA
ggcatagccaatacataccaacccaatggcttctttacatacacactactttgaagtaataaagaaatattggtttttttcctcccttatttagttgacccaagagagtaaatttgagct

SEQ ID NO: 56738 - DNA, 120 bp, synthetic construct
  source 1..120: mol_type = other DNA
aattgaactaacaggtaacatgcaatttaaattaagccctcatctacatggggtggccagatgaacctaatggggaattcagttacatcaagccattctgcttcaactgtgtggaatcct

SEQ ID NO: 56739 - DNA, 120 bp, synthetic construct
  source 1..120: mol_type = other DNA
gtgtttgctgttataatttgtactgccctcaaggacaattgatttcagagtgagcatttatgtagtttactttgacattgccttctatgttcttgtgtgtttagtgatgcaattaaaacc

SEQ ID NO: 56740 - DNA, 120 bp, synthetic construct
  source 1..120: mol_type = other DNA
tacatgggacacacctatttaaaaataacatctttacacatggattagggtcctctgagaatatttgcataattcaatcagaaactgaagtactaaaaggatctagggttatatgtagag

SEQ ID NO: 56741 - DNA, 120 bp, synthetic construct
  source 1..120: mol_type = other DNA
tattccagggagtttggatgtattagatgatacaactcatgggaaagacttggcacagtgcctagcttataatgtgtataagctaatattagtgtcaaagccagagaaaattgatcagaa

SEQ ID NO: 56742 - DNA, 120 bp, synthetic construct
  source 1..120: mol_type = other DNA
ctatcctctgtacattacaaagaacatgtttggttctgtgtccaatattttagataaaagatctacaaacacaacagagtgaataggatgatctctcttgatctgtctttctcacacaca

SEQ ID NO: 56743 - DNA, 120 bp, synthetic construct
  source 1..120: mol_type = other DNA
gaatagctagtaattgtataactagagtaaccatatagcccagtttgcccaagagagtcccagtttattatacctgtatttatttgtaattacataatgtaacaatagctatcttccttt

SEQ ID NO: 56744 - DNA, 120 bp, synthetic construct
  source 1..120: mol_type = other DNA
atagaccagagttctaactcagtttcttccttgctattcagttccttatactactaagatccattgatgtgggattatacagtgtgtcttggttgcgagtggtaaaactatttgaagcct

SEQ ID NO: 56745 - DNA, 120 bp, synthetic construct
  source 1..120: mol_type = other DNA
gggtggttctatggccagggtgtccatggcagcacttgctgtactgtaaaaccattcctttcactctcagcaacacattctctttcactttacaaagaattacatgtgttaatctctatg

SEQ ID NO: 56746 - DNA, 120 bp, synthetic construct
  source 1..120: mol_type = other DNA
gaaatggtatacagtgcattacatagtgtagggatgttgcctcgtaggcaggaaaacagcctacccccagctctcgcagctaccaatatcaatttctatatggcattttactttttaaaa

SEQ ID NO: 56747 - DNA, 120 bp, synthetic construct
  source 1..120: mol_type = other DNA
aaaactagtagtgatttgtatagccactgagtaggcatgaatttctaatgtatctaatacagaaccaaatagaataaaatagaataatctatgtaaagcaggcagcacagtgacaagcac

SEQ ID NO: 56748 - DNA, 120 bp, synthetic construct
  source 1..120: mol_type = other DNA
acatatgagtatctcaaaagggtacagaaagtgtacacaggaaaatctgaaatccatccgtgatgagaactgtaagcaaaacaagggtgagactatcctcaatctgacaaagaacatcta

SEQ ID NO: 56749 - DNA, 120 bp, synthetic construct
  source 1..120: mol_type = other DNA
acaaaatacttgaacaatactttttaaaaagacatacaaatgatcaataaatacataaaaaagtgttccacatcagggaactcgaaattaaaatcaccatgagacaccattttaggccca

SEQ ID NO: 56750 - DNA, 120 bp, synthetic construct
  source 1..120: mol_type = other DNA
gtctatggtggtataagtctcagctggagatggagaaattgactagcaagcaacccaagagaactttctggtgtgaaggaaatatcctctgtcttgtttcagattgtgttactacagatg

SEQ ID NO: 56751 - DNA, 120 bp, synthetic construct
  source 1..120: mol_type = other DNA
acggctagactatacctctaaatcgtaactcttgaattagccaggcatgctaaaaatcactctatttagaaaggcacagcttcaatgaaccaaagaagcagtttggccctttgctgactg

SEQ ID NO: 56752 - DNA, 120 bp, synthetic construct
  source 1..120: mol_type = other DNA
caatccagtgtaaatagggccaatggtcacaatgtatatatttttggaacactaatatttgttttactctaggcaagtgttttcacaggtagtaactggtatgaaaaagatctgctttca

SEQ ID NO: 56753 - DNA, 120 bp, synthetic construct
  source 1..120: mol_type = other DNA
attccggttttggcacaaaaactttccaacacaaggtattactttgacaaattcttaaaatactccttgtaattagagacagggtaaattggatgagaagtatatagggattctctccac

SEQ ID NO: 56754 - DNA, 120 bp, synthetic construct
  source 1..120: mol_type = other DNA
ctccagaaactatggcaaccaggctgtttggcagccaaagggtgtaaaatccagattagatagatggatgtatttacatattcacttttacattaaacagagtggatgacacatccctgt

SEQ ID NO: 56755 - DNA, 120 bp, synthetic construct
  source 1..120: mol_type = other DNA
ttcatcttgtattcccacatgttgtgggagggacccagtgggaggtaattaaatcatgtgggcaggtctttccctgctattctcatgatagtaagtctcatgagatctgatggttttata

SEQ ID NO: 56756 - DNA, 120 bp, synthetic construct
  source 1..120: mol_type = other DNA
taactgaatcatgggggtgtgtctttctcatgctcttctcatgataatgaataagtctcatgagatctgatggtttcataaggaggagtttccctgcataagctctctctttgcctgctg

SEQ ID NO: 56757 - DNA, 120 bp, synthetic construct
  source 1..120: mol_type = other DNA
tagagagagagaaagagagagagagcacgtgagttatgtaaatatacatataccatatctctatatagtgtgcatatgtatatgtgtgtgtatatatgtatacgtatatatatatttgtg

SEQ ID NO: 56758 - DNA, 120 bp, synthetic construct
  source 1..120: mol_type = other DNA
ctaaaagtgatacctgcttaagttgacttttgctccttctttgtctcatatttcctcctccctgatgtctatttcccaagatcaactcccaaataggccactttcatccaagtccttgtc

SEQ ID NO: 56759 - DNA, 120 bp, synthetic construct
  source 1..120: mol_type = other DNA
ggatcaaagtattcaatcaaggttgggcagtgacttaggattagcagatgagatcaggtggcataatgggaggcaaagtcagtgtataaggtcaagatggtataatggaggcaagaactt

SEQ ID NO: 56760 - DNA, 120 bp, synthetic construct
  source 1..120: mol_type = other DNA
aatagttgcatggataaactttattgaatgtgtggtttagtagaaacaaacaaaaaacactcaaatacaaaacaaaaggacacatggtgattttcattttccaaagcaaaacttcactct

SEQ ID NO: 56761 - DNA, 120 bp, synthetic construct
  source 1..120: mol_type = other DNA
aaagaaagggaaggggagctaatggatgcctctatgcgctgggcactgtgatggacacctttaactttagaatacattatttttatgacagctactttattgtaaatatatgtatctgca

SEQ ID NO: 56762 - DNA, 120 bp, synthetic construct
  source 1..120: mol_type = other DNA
tgagtgggaacaacatcttgaataatagcaatacccacctgcctcatcttttaatgtgtgagctccgtaagggcaggagaaatgtctagttactactttgactgtaggtatatccattgg

SEQ ID NO: 56763 - DNA, 120 bp, synthetic construct
  source 1..120: mol_type = other DNA
actatagcaggatttgtgatccttttcctaatactcagattaaactgctgattttctttcttttagctttttaaaccaagaacgtgttttccatactcctatggtaacaagaagagaaga

SEQ ID NO: 56764 - DNA, 120 bp, synthetic construct
  source 1..120: mol_type = other DNA
ataggcacacgccaccatgcctggctagtatttttttgttttatgttttttgtttctaatttttagtagagatgaggtcttgccatgttgcccaggctggtcttgaactcctgagctcaa

SEQ ID NO: 56765 - DNA, 120 bp, synthetic construct
  source 1..120: mol_type = other DNA
tcctgcctcactgatacttgttgtttcttaaattcccaagctcatggtagtaggtcctttgcatgaccttttccctcttcttggtgttctaaatccatattattgcatgattggcactgt

SEQ ID NO: 56766 - DNA, 120 bp, synthetic construct
  source 1..120: mol_type = other DNA
caataattagctcataatatttttagtagaatatgaatttcagggatatcctgtgttataaaatctgtgtcatttgttcctttgagttcagaagggtattaataaatgcccctaggcagc

SEQ ID NO: 56767 - DNA, 120 bp, synthetic construct
  source 1..120: mol_type = other DNA
tctatttctccacatcctctccagcatctgttgtttcctgactttttaatgactgccattgtaactggtgtgagatggtatctcattgtggtttttatttgcatttctctgatgaccagt

SEQ ID NO: 56768 - DNA, 120 bp, synthetic construct
  source 1..120: mol_type = other DNA
gtaacttgtttcatgtaagtccaaaccacaagaagggaacattaaattttaaagctagagaataatatgttttgactctatgtcccacctcctggacacactggggcaggggttgggccc

SEQ ID NO: 56769 - DNA, 120 bp, synthetic construct
  source 1..120: mol_type = other DNA
gctgccaccatatagcaccttgaatgctttgttgcttagatatttatcctgccagatgttgtttagatagttcttcttaagttctgtcttccacgaaatcctagaacatagacacaattc

SEQ ID NO: 56770 - DNA, 120 bp, synthetic construct
  source 1..120: mol_type = other DNA
tatgagattatgtcacatcatttggctcaaatgaagaactgtaaactcttccatatttcaggtgcttttcggagggacataggttataagcaccacgaaggcctggggccatgtatgttt

SEQ ID NO: 56771 - DNA, 120 bp, synthetic construct
  source 1..120: mol_type = other DNA
tcaaatgaagaaaggtgctgtgaacactgggaatttgtctgctaaaagaggaagtaaaagtgagagggacaaagataaactttgtctggttatgttcttcaagagccatccttgcctatt

SEQ ID NO: 56772 - DNA, 120 bp, synthetic construct
  source 1..120: mol_type = other DNA
ttcaatttagtccctactcactactgttttgtaccttaccacatcctcaaatagctgcattctcctttctcccacttggtgaactattgaatcacaatatccaaatggaaggacttccac

SEQ ID NO: 56773 - DNA, 120 bp, synthetic construct
  source 1..120: mol_type = other DNA
accctgaactttctattataaggtgtctctgagatcagataagtaggatgtggcctatcactggtctttattttcagttgtgctaaaatgaaacaagtgtgttttctcccgtcagtttca

SEQ ID NO: 56774 - DNA, 120 bp, synthetic construct
  source 1..120: mol_type = other DNA
atttatccagctctctcaatcctgttctctttcttgcatgagttcacacatattaaaatgcaagtgtcttgcttgtctgatatgtcttttgcattatttgaaaccctgaagccccaatat

SEQ ID NO: 56775 - DNA, 120 bp, synthetic construct
  source 1..120: mol_type = other DNA
aacataatatgttctattacacaggaagttgctccaggttgtcaaaaagtgatcagtgctggttggtaaccattgtatcctagtgtgtgggtctagggatcagttatatgccaggcaagt

SEQ ID NO: 56776 - DNA, 120 bp, synthetic construct
  source 1..120: mol_type = other DNA
atttatctcaatccttcctctttccaggaaatcttccttcagttcttttccatgataagtcagcttcctgttagcttcctctctccttgaggcatagacatgtgcatagctatctcactg

SEQ ID NO: 56777 - DNA, 120 bp, synthetic construct
  source 1..120: mol_type = other DNA
aagacacatgtgcttgtatgttcatcacagcactattcaccatagcaaagacacggaaacaacccaggtgcccatcaatggtgaactgaataaagaaaatctggtacatacacaccatgg

SEQ ID NO: 56778 - DNA, 120 bp, synthetic construct
  source 1..120: mol_type = other DNA
gctactacactggtctaaaccacaactgtctcttgcttagattcctgaattagctttaaaaataattgccctgtccccattcttatgctgtatagtctgtctgctacacaacagccatgg

SEQ ID NO: 56779 - DNA, 120 bp, synthetic construct
  source 1..120: mol_type = other DNA
ccccaaacagatttcctgttgttgctcccctctaaaagtttcaaaatatgcagagaaaaatgaggacagccaaatgaggataatctgatgtgtacagttgaaaataaagcatcatttagg

SEQ ID NO: 56780 - DNA, 120 bp, synthetic construct
  source 1..120: mol_type = other DNA
atggtatatagagccaattggaccccagtttccatcacaaccctgtgcaatcaggtttctagtggtccactggagacagagatttgtttgtttgtttgtttgtttgtttgtttacttgag

SEQ ID NO: 56781 - DNA, 120 bp, synthetic construct
  source 1..120: mol_type = other DNA
aatcctttcatttgtggcaacatggatgaacctgcagggtattacgttaagtgaaataagccaggcagagtaagacaaatactgcatgaactcactcacatgtggaatctgaaaaagttg

SEQ ID NO: 56782 - DNA, 120 bp, synthetic construct
  source 1..120: mol_type = other DNA
aagggtgagaaatgtatgggatccagaaatagagggtttaacacacataagctaaggaacatccctaaataacatcaattaggacacacagggaataattttaattttttcccccatgat

SEQ ID NO: 56783 - DNA, 120 bp, synthetic construct
  source 1..120: mol_type = other DNA
ataaattgcatgttgcatgggtttggtgtatagagaattttgtcacctagttaatcatcataggtagtttctatcctcaccctcctcctaacctcctctctcaaataggccccagtgtct

SEQ ID NO: 56784 - DNA, 120 bp, synthetic construct
  source 1..120: mol_type = other DNA
tacttcgtttttgctagtttgaatgctggtgtataggaaagcaattgtttgtgtgtctactgtacagtggaacactgggtccaagagtataagccttggaatcagtcagatctgacctca

SEQ ID NO: 56785 - DNA, 120 bp, synthetic construct
  source 1..120: mol_type = other DNA
gctcccccactcccatcctgctacttcatcatgaattcattttgggttgtctcattgtcaccttctctttcataattttgattactctgtcatatttttctacattttctggagaaattc

SEQ ID NO: 56786 - DNA, 120 bp, synthetic construct; identical to SEQ ID NO: 7818
  source 1..120: mol_type = other DNA

SEQ ID NO: 56787 - DNA, 120 bp, synthetic construct
  source 1..120: mol_type = other DNA
agctcctttaagcacttctctgtattggttattctagttatacattcgtctaaattattttcaaaattttcaacttgtttgcctttggtttgaatttcctcctgtagctcggagtagttt

SEQ ID NO: 56788 - DNA, 120 bp, synthetic construct
  source 1..120: mol_type = other DNA
tgccatctgtcacccctttctttgactaggaaagggaactccctagccccttgcaagacacagactggcaaattagataaagagtcaagtcccatcagtgtgctgtattcaggaaaccca

SEQ ID NO: 56789 - DNA, 120 bp, synthetic construct
  source 1..120: mol_type = other DNA
acaactgaaggaaatagagacacaaaaaacccttcaaaaaattaatgaatccaggatctggttttttgaaaggatcaacaaaattgatagactgctagcaagactaataaagaagaaaag

SEQ ID NO: 56790 - DNA, 120 bp, synthetic construct
  source 1..120: mol_type = other DNA
aaattaggtattgatgggacgtatctcaaaatcataagagctatctatgactaacccacagccaatatcatactgaatgggcaaaaactggaagcattccctttgaaaactggcacaaga

SEQ ID NO: 56791 - DNA, 120 bp, synthetic construct
  source 1..120: mol_type = other DNA
cttaaacgttagacctaaaaccataaaaaccctagaacaaaacctaggcattaccattcaggacataggcatgggcaaggacttcatgtctaaaacaccaaaagcaatggcaacaaaagc

SEQ ID NO: 56792 - DNA, 120 bp, synthetic construct
  source 1..120: mol_type = other DNA
aaatgatgagttcatgtcctttgtaaggaaatggatgaaattggaaatcatcattctcagtaaactatcgcaaggacaaaaaaccaaacaccgcattttctcactcataggtgggaattg

SEQ ID NO: 56793 - DNA, 120 bp, synthetic construct
  source 1..120: mol_type = other DNA
aaccatatcacaagcctatataaaaagggtgaaactaaagaaaggtctttgagagtgatttcaaataatgtacaaggaacaaacacccagacacaaacacacatgcgtgcacgcgcgcgc

SEQ ID NO: 56794 - DNA, 120 bp, synthetic construct
  source 1..120: mol_type = other DNA
ctatattctattagctagaatttcttactaagtttccaaagctcaacagcaaaatcaagatggctggcaaagattaaaagtcagtccaggccgggtgtggtggctcatgcctgtaatctc

SEQ ID NO: 56795 - DNA, 120 bp, synthetic construct
  source 1..120: mol_type = other DNA
gaacacaggtatttgtaacttactcaggattacaaagaagaaattaagaaggacatccaaagttgctcttggcatcacagttagactgagtgctcagacggttcatccaaggcagtaaga

SEQ ID NO: 56796 - DNA, 120 bp, synthetic construct
  source 1..120: mol_type = other DNA
ctgcccgccgcagcttcccgaagtgctgggattccatgtgtgagccatcgctctcagcctgataattttcttaaaattgccagtgctactgtaagagacatagttaagtttatattaaaa

SEQ ID NO: 56797 - DNA, 120 bp, synthetic construct
  source 1..120: mol_type = other DNA
tatgagtttaaggaggaaaaaagaggcaaaacttcccactatttgttagagcatgtttatgaatttttaaatgggtgatgataaatataaaaaagcacagtggtgttatttattcctagt

SEQ ID NO: 56798 - DNA, 120 bp, synthetic construct
  source 1..120: mol_type = other DNA
aagcactgtcctagaagagagctgttatttctcaatatgctagtgtctatacaaagttaagaagaaaaacataacatttcacaatcgagaacgtaattttatccttgcctaactcacacc

SEQ ID NO: 56799 - DNA, 120 bp, synthetic construct
  source 1..120: mol_type = other DNA
agtaatgctagagagtttggtctgatgcttagggatttaggacgacgaatggatagagatggtgaggaatctcattccagtcatgctctcctttcctaatttcccttttcactgtttggt

SEQ ID NO: 56800 - DNA, 120 bp, synthetic construct
  source 1..120: mol_type = other DNA
atcttaaaatacctaaggaaaggatgtagaccttgatctatgctttaaacctttgcccttgctccagtctgtccatgagctgtaagcatctatgaatatggcagctgagtcccagatgaa

SEQ ID NO: 56801 - DNA, 120 bp, synthetic construct
  source 1..120: mol_type = other DNA
gtatgattagagtgggttacactggatttgtgtttacgtaatgcccagtagcacagtgtatgctgccaagttattattgcattctaacaattcacgcctaagtaactatcttaaaaacac

SEQ ID NO: 56802 - DNA, 120 bp, synthetic construct
  source 1..120: mol_type = other DNA
tcccgaagcacctgtaaatgaataaaggttatcctcatgaagtcagctgcaagaaagacatctttagcttatgccatgcaggactgattcttaaccagctctgaaagaatcttacccaca

SEQ ID NO: 56803 - DNA, 120 bp, synthetic construct
  source 1..120: mol_type = other DNA
catctgtagatgaattagaaaaagtgcttctaaaatagcaaagctgaggataagaccttggagtgaggtcctaatttgctctcttgatgtaacttttaagctacagcaggtagaagttat

SEQ ID NO: 56804 - DNA, 120 bp, synthetic construct
  source 1..120: mol_type = other DNA
cctgacaaccatatttgatacaactctcgtaaaatttgaaaccattattatttaacacaattttgctaggctaagttttgctataactcatactgaaggtactctgttatagaacttgct

SEQ ID NO: 56805 - DNA, 120 bp, synthetic construct
  source 1..120: mol_type = other DNA
atactctcaaaactgaatacctcagcatggatagagctttatttgtgtctgtccagcctcttccaaaagcacattttggtctgattcagcaatgcttttcttgaacagtggggcactgtt

SEQ ID NO: 56806 - DNA, 120 bp, synthetic construct
  source 1..120: mol_type = other DNA
tggtggctgtaacgccattggcaccacctatgcaagacacatcaacattttcatgcagctcttataagacacgatagttaaaacccattcaaaccctcacatcccagaaaaatgcattct

SEQ ID NO: 56807 - DNA, 120 bp, synthetic construct
  source 1..120: mol_type = other DNA
tgtgtactggaacaacagcaaagctggagacgtgcaagacaaatccaacttgacaatgagctacatgatatatttctcaaattcctcctcagtattacacctagactcattagggaacta

SEQ ID NO: 56808 - DNA, 120 bp, synthetic construct
  source 1..120: mol_type = other DNA
atgagatttgtaatgttataacctttagaaagaaccttctcacttaggtttaatgtgtcttgatccatcatcctgtattactcaaaaagttatgcatttttgtgctaagatactgcaatg

SEQ ID NO: 56809 - DNA, 120 bp, synthetic construct
  source 1..120: mol_type = other DNA
accctccatgagtaaatttgaccctccatgagtaaagttgacggtgttcacatatatttttctcatcttcatacttaggcaagccagctgctgactaatcatcacagccaagggtaagta

SEQ ID NO: 56810 - DNA, 120 bp, synthetic construct
  source 1..120: mol_type = other DNA
cctgttaacccttttgctattcaatgtgatcaccaaagaaagctctgaagcaacaaaatgatttcctgtgacagaggtgcatggcattataagcagaaagacacttgaagcccctaagag

SEQ ID NO: 56811 - DNA, 120 bp, synthetic construct
  source 1..120: mol_type = other DNA
tatcgaaggcttctacttcacttattcctgtaagactagaagtagctgcaacataatgagcaaacgtgatgtattatccttctatgtcaataaaacaggacaggcagtcaactgttccag

SEQ ID NO: 56812 - DNA, 120 bp, synthetic construct
  source 1..120: mol_type = other DNA
aacattgtgaaaagacaaggcacaaagtgggacaagattctgaagcacaattcataaaggagtagtatccagaatatataaaggaccacctgaaaattaatgagaaaaatgggcaaaact

SEQ ID NO: 56813 - DNA, 120 bp, synthetic construct
  source 1..120: mol_type = other DNA
tcgaatctcgctagtaattagaaaaacaaaagaataaacatgatcacctatcatgatttgccgaaaatgtaaagactgataatatccctctttgctgaggttgcaaagaaacaggcattc

SEQ ID NO: 56814 - DNA, 120 bp, synthetic construct
  source 1..120: mol_type = other DNA
catcctgaaagtgttctatcatttcagcttatttcagagcatgtagcgcagaacctgacacatagtaggcattcaacagtattgttgaattgatagagcctacaccacacaaattgacac

SEQ ID NO: 56815 - DNA, 120 bp, synthetic construct
  source 1..120: mol_type = other DNA
caactctcagtctttagtccctgggaccttgaggggaagggagatgctgtccatatttttatcagctaaggggaactatattcctgttttgttcctttaaatatcatttctggtgaacat

SEQ ID NO: 56816 - DNA, 120 bp, synthetic construct
  source 1..120: mol_type = other DNA
cgagaactgatgagtagatatgctaaagtaactaagttctgaaaacgtctaagaaaaatacatgcagaagcaggcaactgcaacagacacagacatgaaccactcggatctaccttcagg

SEQ ID NO: 56817 - DNA, 120 bp, synthetic construct
  source 1..120: mol_type = other DNA
agatgctaatactcattccaattctttgtctcttacagatgcaatcaatgacaaaccctttaaaacatcactgagaggctgggcacattggctcatgcctgtaatcccagcactttggaa

SEQ ID NO: 56818 - DNA, 120 bp, synthetic construct; identical to SEQ ID NO: 7820
  source 1..120: mol_type = other DNA

SEQ ID NO: 56819 - DNA, 120 bp, synthetic construct
  source 1..120: mol_type = other DNA
aatcatgccaaaatgtaaagaccattgagactaggaagaaactgcatcaactaacgagcaaaatcaccagctaacatcataatgacaggatcaaattcacacataacaatattaacttta

SEQ ID NO: 56820 - DNA, 120 bp, synthetic construct
  source 1..120: mol_type = other DNA
taacatcacaattaaaagaactagaaaagcaagagcaaacacattcaaaagctagcagaaggcaagaaataactaaaatcagagcacaactgaaggaaatagagacacaaaaaacccttc

SEQ ID NO: 56821 - DNA, 120 bp, synthetic construct
  source 1..120: mol_type = other DNA
aaaactggcacaagacagggatgccctctctcaccgctcctattcaacatagtgttggaagttctggccagggcaatcaggcaggagaaagaaataaagggtattcaactaggaaaagag

SEQ ID NO: 56822 - DNA, 120 bp, synthetic construct
  source 1..120: mol_type = other DNA
tgtagaaagctgaaactggatcccttccttacaccttatacaaaaatcaattcaagatggattacagatttaaacgttagacctaaaaccataaaaaccctagaagaaaacctaggcatt

SEQ ID NO: 56823 - DNA, 120 bp, synthetic construct
  source 1..120: mol_type = other DNA
gaacaaaaaaacaaacaccgcatgttctcactcataggtgggaattgaacaatgagatcacatggacacaggaaggggaatatcacactctggggactgtggtggggtggggggaggggg

SEQ ID NO: 56824 - DNA, 120 bp, synthetic construct; identical to SEQ ID NO: 7821
  source 1..120: mol_type = other DNA

SEQ ID NO: 56825 - DNA, 120 bp, synthetic construct
  source 1..120: mol_type = other DNA
cgcaagtctttgaaaagagggtcttactctttctactgtcttgcaaccaaaaaaccagtacatgatctaggcctaggcaactgaagatccagcccaaagttttaacctcacaatcagaaa

SEQ ID NO: 56826 - DNA, 120 bp, synthetic construct
  source 1..120: mol_type = other DNA
aatgagtaagccctcatataattcaggagacccttgcagaaagaagtgataaatatcacccagatccaggaaagctttatttgaaatgtattaacagtggctatgatttctacaagatgg

SEQ ID NO: 56827 - DNA, 120 bp, synthetic construct
  source 1..120: mol_type = other DNA
cttctagagtgtgtgtgtatgagagagatgtgaggagacaacagtgaaggtgattgtagtttggaatcttgagggattcacaaaatcactggctggagtagagcctatggaaaaatgtat

SEQ ID NO: 56828 - DNA, 120 bp, synthetic construct
  source 1..120: mol_type = other DNA
aattaggtagaatgaagactgaaatgtaagtaatagaatataccactcacagttattggcaacttatgggaatgtagttatagacacctaataagatggaaggcagattgcaaggggtta

SEQ ID NO: 56829 - DNA, 120 bp, synthetic construct
  source 1..120: mol_type = other DNA
gtaagaaaattttactcctttattgagtaaatacactgtactcaaaatttaatgcttatcatttttagttatatatccttcatttttatataaggtgcattccctatgtcactaagcttc

SEQ ID NO: 56830 - DNA, 120 bp, synthetic construct
  source 1..120: mol_type = other DNA
ctcccaggccagagtttattaatgttgtttcctccatccacaatatccatcccattcatatcacacacacttgctcctgcccttgagtgaatttactcatttacttttccttcagatttt

SEQ ID NO: 56831 - DNA, 120 bp, synthetic construct
  source 1..120: mol_type = other DNA
catggcaaaacccggtatctactaaaaattaaaaaaacaaaattagctgggcatggtggtgtgtgcctttaattctaggcactcgggaagctgatgcaagagaatctcttgaacccagga

SEQ ID NO: 56832 - DNA, 120 bp, synthetic construct
  source 1..120: mol_type = other DNA
agtaatataatttcaagtaggtgatttaaaaatatacaacagggcaagggatgagggggtagagagtggctgtaagggtgtggtacactggggatgaattaccttggataaccttttggg

SEQ ID NO: 56833 - DNA, 120 bp, synthetic construct
  source 1..120: mol_type = other DNA
tatacgagtccattcaccaatagttgaaactgcaaatgtttgcactcatgttcatatgggttatgggtaggtaatgagattttcttcacaaaggagaaaagcaaagaaggaggaaagaaa

SEQ ID NO: 56834 - DNA, 120 bp, synthetic construct
  source 1..120: mol_type = other DNA
gatttcgttgagttttgtgtcctagaagcatcttcatctgctccaagccaagtactctgtcttcatgcttgggcatgaatacaattcaagatagttaccaacaaaacgatagtggtgcct

SEQ ID NO: 56835 - DNA, 120 bp, synthetic construct
  source 1..120: mol_type = other DNA
ttaggatttttttttttttttttttttgagatggagtctcacactgtcgtacaggctggagtgcaatggcaagatctcagctcactgcaatctccgcctcccaggttcaagccattctcc

SEQ ID NO: 56836 - DNA, 120 bp, synthetic construct
  source 1..120: mol_type = other DNA
tattgcgtggtctgtgaccataagtcgctttcaggctaggagcaaagacaaagtccgagtaatcaaagtattaatagaaggtggtatagagtagggactgcaacttgcaaagcaatgaaa

SEQ ID NO: 56837 - DNA, 120 bp, synthetic construct
  source 1..120: mol_type = other DNA
cataatcatcaggcattatttgtaaagatgtcaaaactcaaagagttccatttaccacagctctctctaacttagttgggtccccatagccctctgcattaccttttccactcagccaat

SEQ ID NO: 56838 - DNA, 120 bp, synthetic construct
  source 1..120: mol_type = other DNA
agaggttacagtgagctgagattgcaccactgtattccagcctgggtgacaagagcaaaactccatctcaaaacaaacaaacaaatcatatcaaggaaagagatgtgaatcaggagctag

SEQ ID NO: 56839 - DNA, 120 bp, synthetic construct
  source 1..120: mol_type = other DNA
tgtatttccagagacactttaagtctggcagaatggcatgggattgcttaacagttgagtaccatttaactatgttaacatttatgactgtgccaatactgggcaagggttattccccgg

SEQ ID NO: 56840 - DNA, 120 bp, synthetic construct
  source 1..120: mol_type = other DNA
gccattgcacccacaaacctccagtttaccagtgctcaagaaaacctcaaacctggcctgttcttgtgtggcaaaatctacattacaaggaagtcaaagaaaaattgctacctatttcat

SEQ ID NO: 56841 - DNA, 120 bp, synthetic construct
  source 1..120: mol_type = other DNA
agaaaagaaggaagaggaagtaaggtagaaaggagtttaaaagtctctaaaaaggtacagggagtagagattcaggagtaaaatgggcaagtaggctgtcttagtgtgatcattgtcatt

SEQ ID NO: 56842 - DNA, 120 bp, synthetic construct
  source 1..120: mol_type = other DNA
tggccacaagaataccttggcaatttcccccaaaatagctgttttatacattgggttctttgactagaatttaataaatctaaatctaaaccaacagatgacctacctcacccctttatc

SEQ ID NO: 56843 - DNA, 120 bp, synthetic construct
  source 1..120: mol_type = other DNA
cacagaaaccagcaacaaatgctacaaataggagatttgttttcaggagaactgcttcactagcatagtagttgttttgttccaggtagctgatctgacgaagtttagaatctcatactc

SEQ ID NO: 56844 - DNA, 120 bp, synthetic construct
  source 1..120: mol_type = other DNA
ccttgccagctcatgaaggagcttatcatcactccccctaccacttaccatcaccaccactttgagaagaacaattcaatttatttttatgatagagcacactttttgatctctggatga

SEQ ID NO: 56845 - DNA, 120 bp, synthetic construct
  source 1..120: mol_type = other DNA
catacaactcccttaatatatgagtgctaaagctacaaatggctttcttttgtggtcaggtatgaaagaacaaagtccctttactacaataaataggtagaaaatagctagtgagatatt

SEQ ID NO: 56846 - DNA, 120 bp, synthetic construct
  source 1..120: mol_type = other DNA
ctatctcactgttttttatagtgacagagtatcccattgtgtacatgccataagttactcaacgttctttaaggatggacatttgtctccagttgtgttattaaaaatggtgctaacttg

SEQ ID NO: 56847 - DNA, 120 bp, synthetic construct
  source 1..120: mol_type = other DNA
tgtgtaagaaggcttctagtcttgattacaactccatgagatgaatgctgttattaacccattttacagaagacaaaatgagtgcaaagtcacttgctttatatgataacatatagtatg

SEQ ID NO: 56848 - DNA, 120 bp, synthetic construct
  source 1..120: mol_type = other DNA
actggtttgtaatgatagctcagacaaaaatcaagcttccatatctgtctgggtatctttacgagttctgtgttctgcgagtttgctcaatttatccaactgtgtgtcaaaacccctatc

SEQ ID NO: 56849 - DNA, 120 bp, synthetic construct
  source 1..120: mol_type = other DNA
catgttaacattttgtttcatatcttgcattgatgcttatgagtgagactgacctataatttcttttcttacactaatctttcaatatcaaggttgtaccgggctcataaattgagggag

SEQ ID NO: 56850 - DNA, 120 bp, synthetic construct
  source 1..120: mol_type = other DNA
acaatgaagttcttgcaaaacagaccactttgtctgcacctggcttacatggaaggaagaactattcctttttcctgaattttgaggaaaaacagtggcacagcttgagtactgaacagc

SEQ ID NO: 56851 - DNA, 120 bp, synthetic construct
  source 1..120: mol_type = other DNA
gtgtgctgcacccattaactcgtcatttagcatttggtatatctcctaatgctatccctcgcccctgcccccaccccacaacaggccctggtgtgtgatgttccccttcctgtgtccatg

SEQ ID NO: 56852 - DNA, 120 bp, synthetic construct
  source 1..120: mol_type = other DNA
aatgtgggttgctcataacatttttatatttactcctccatatataagactgaacttttgtaggcagccatcccatttgacaaatccaaggtgacctaaaagtttaggttacaggggtca

SEQ ID NO: 56853 - DNA, 120 bp, synthetic construct
  source 1..120: mol_type = other DNA
aagcctgatacaggaaaaaggtaaagggcagaatcaaagtggcaagaaaagaaaaaaataaatcatggaatgaaagaaacactgaactggaaatttagagatatgaggtcaaggggaaag

SEQ ID NO: 56854 - DNA, 120 bp, synthetic construct
  source 1..120: mol_type = other DNA
ggaactatcttttcaggctgtactcatcagtgggaaacaatgaaagaatgagcagacagctggatttacaagaaatagtgtcaaaaatttgtcactttggaaaagacttgctcttggaga

SEQ ID NO: 56855 - DNA, 120 bp, synthetic construct
  source 1..120: mol_type = other DNA
tagtgcttcccaccgtttgaagaaggggtgtattaactctcaagacacctcggtggggttttttcccccttttaaagcctttcctaaataataaacttctgtccagagcagtttcttaat

SEQ ID NO: 56856 - DNA, 120 bp, synthetic construct
  source 1..120: mol_type = other DNA
aaaagtgcatcccttaattccacaaaagaccaggctagacagtgcactttctctttctgtcctctcatccttggatacaacccttgcttatataggacaacagatgtgtaaaaggaagtc

SEQ ID NO: 56857 - DNA, 120 bp, synthetic construct
  source 1..120: mol_type = other DNA
tcatgataactatacttttattgcaatcaccttaagacacacttatttactacctaaagggaaactatatttcactttatgtattctaaatctatcatctctataggaataataggtata

SEQ ID NO: 56858 - DNA, 120 bp, synthetic construct
  source 1..120: mol_type = other DNA
caccaacagcgtgccagggctcccttttctctgcatcttctccaacacttattatctgttgtctttttgataacagccattctgacaggtgtgagtgatatctcactgtggttttaattt

SEQ ID NO: 56859 - DNA, 120 bp, synthetic construct
  source 1..120: mol_type = other DNA
ctaacatcacttggtggtagagttcagaatcagttagtatgatgtccacagctttgttctttttgctcggactgacttggctattcagggtttttttgcagttccatacacattttagaa

SEQ ID NO: 56860 - DNA, 120 bp, synthetic construct
  source 1..120: mol_type = other DNA
gaagcacaagtggttgggggatttccctttcctagccaagggatgccgtgagagatggcacctggaaaaccaggacactcccacccaaatactgtgcttttccaatggtcttagcaaatg

SEQ ID NO: 56861 - DNA, 120 bp, synthetic construct
  source 1..120: mol_type = other DNA
ctgaaaattctaaaaatcagagtgcctcttctcctacaaaggatcacagctcctcggcagcaacagaaaaaagctggatggagaatgattttgacaagttgacagaagtaggcttcagaa

SEQ ID NO: 56862 - DNA, 120 bp, synthetic construct
  source 1..120: mol_type = other DNA
taaccttaaatgtaaatgggctaaatgttccaattaaaagacatggactggcaaactggatattcaagacccatcagtgtgctgtattcaggagaaccatctcacatgcaaagacacaca

SEQ ID NO: 56863 - DNA, 120 bp, synthetic construct
  source 1..120: mol_type = other DNA
tcctgaacgactactgggtaaataacgaaattaaggcagaaataaagatgttctttgaaaccaatgagaacaaagacacaacataccagaatctctgggacacatttaaagcagtgtgta

SEQ ID NO: 56864 - DNA, 120 bp, synthetic construct
  source 1..120: mol_type = other DNA
agcacatcaaaaagcttatccaccacgatcaagtcaacttcatccctggcatgccagcctggttcaacatacgcaaatcaataaatgtaatccatcacataaagagaatcaatgacaaaa

SEQ ID NO: 56865 - DNA, 120 bp, synthetic construct
  source 1..120: mol_type = other DNA
taagacaatcctaagcaaaaagaacaaagctggaggcatcacactacctgacttcaaactctattacaaggctacagtaaccaagacagcatgatactggtaccaaaagagctatataga

SEQ ID NO: 56866 - DNA, 120 bp, synthetic construct
  source 1..120: mol_type = other DNA
actataaagacacatgcacacatatgtttattgtagcactattcacaatagcaaaaacttggaagcagcccaaaggtccatcaatgataggctggattaagaaaatgtggcacatataca

SEQ ID NO: 56867 - DNA, 120 bp, synthetic construct
  source 1..120: mol_type = other DNA
tgatgaatcatgaacacatactaaggttaatggaatttgcaacctatctatgaggactttcaaaactgaatagacccagtagcaacaaatagggagaaaggggcaaaaactcaagcaatc

SEQ ID NO: 56868 - DNA, 120 bp, synthetic construct
  source 1..120: mol_type = other DNA
tccaatattgctttttagcctgaaatgcagtctcctttactctcgagtcatttgtggcttctaatacatgactcagtcttgtccaccagttcttccaatattctaggccagtcagatcac

SEQ ID NO: 56869 - DNA, 120 bp, synthetic construct
  source 1..120: mol_type = other DNA
aaaaactcatagagaaccagctgtaggcaaaatattggcagttacataaatgtctcttacagatttcctgtagtttatctacttatgtaagcacccatgtctatcaaatggctgagaatt

SEQ ID NO: 56870 - DNA, 120 bp, synthetic construct
  source 1..120: mol_type = other DNA
tggtcctcacacttggtttggattctcttcctgatgacggacgtctgctttctggcaagggtaagagtaataatctgtggttaatgtctaatgaaaaaatgctggcatgttgaaacagaa

SEQ ID NO: 56871 - DNA, 120 bp, synthetic construct
  source 1..120: mol_type = other DNA
taattgtatgcaaaaaggtatagtagggagtagccagggcaatgcgttgacttttcctgcttgaccagaaactttgatacgccaaaataacacagttgggaatactagacagaacactag

SEQ ID NO: 56872 - DNA, 120 bp, synthetic construct
  source 1..120: mol_type = other DNA
ccacaacaatacaaaggcctactcgaggtctattcagtactagcctgaactgggtaagaaggttctgcaggatggaagtaaaatatgtaatataattttagtaggctaaaagagggttag

SEQ ID NO: 56873 - DNA, 120 bp, synthetic construct
  source 1..120: mol_type = other DNA
gccttaatgcaggctaaagaaatgttagtgtttttaaaaacagcaacatattttctttatccactgtatcattgatgggcatttgggttggttccaagtcttcgctatgtaaatagtgct

SEQ ID NO: 56874 - DNA, 120 bp, synthetic construct
  source 1..120: mol_type = other DNA
ccatattttagagatggacacttatccttcaggagagcaagtggcttgataaaggtgacacagatggctgatggaatgaatacatgagactacttttaaacacttagcaatgctgaggtg

SEQ ID NO: 56875 - DNA, 120 bp, synthetic construct
  source 1..120: mol_type = other DNA
aacttggctgatatgaagaattggtttcagttgtagagattataactaataagtgaaatggaaatgttcctaaatttttttcagccaagatatcatggtttttggaacatgtgttttcca

SEQ ID NO: 56876 - DNA, 120 bp, synthetic construct
  source 1..120: mol_type = other DNA
atgtttgccctcccaaattaagggcctctgagtttaattcaaatcaatttgatgacttgagagaaaaaaaaaaaggtggggacctactaagtacaagatcctgtgccagacatggagata

SEQ ID NO: 56877 - DNA, 120 bp, synthetic construct
  source 1..120: mol_type = other DNA
ccaggcccattcctctttctcccatgccatgtggacatgataaatttaactccagggcatctgctccagaatcctttaaacaagaaaggaaaatgaaagaaaaggcaaagctttatttat

SEQ ID NO: 56878 - DNA, 120 bp, synthetic construct
  source 1..120: mol_type = other DNA
agaattcgtgggaagtcttctgtaaagaacatgaagaataaacaaaacacttttaaaagttattataggccgggcacagtggctcacgcctgtaatcccagcactttgggaggccaaggc

SEQ ID NO: 56879 - DNA, 120 bp, synthetic construct
  source 1..120: mol_type = other DNA
tccttatggttttgctttcctaatccgattttaaaggtcttcatgttatttgagagttgctgaaaaccatgctgctctttccttgatggtttggtagtgagcatggatgagcacagcctg

SEQ ID NO: 56880 - DNA, 120 bp, synthetic construct
  source 1..120: mol_type = other DNA
tgacaccatgagaacaggaacattcatgtggcctctgcttgaaaattcctgtctcaggatgcacaccaccttaaaaggcagttaattccatttccaagcaactctaaccattcaaaaagc

SEQ ID NO: 56881 - DNA, 120 bp, synthetic construct
  source 1..120: mol_type = other DNA
tctatccatccaaatagacctctgacttgtccttcctctgccttgatatgaaaatgatttaagataactcacctggtcctacattgtctatacctcaggagggaaaggaaaactatcctg

SEQ ID NO: 56882 - DNA, 120 bp, synthetic construct
  source 1..120: mol_type = other DNA
tccagattcaggtaaagaaactgataggaaactggcttgttagtgttttagtgttttattttggccccgccaggaatagtgtggtcacttggttttaatgcctatgcctttctgctggac

SEQ ID NO: 56883 - DNA, 120 bp, synthetic construct
  source 1..120: mol_type = other DNA
gagcaagaagattagtggagctattgtagttaaacttggtaatgatgcattttggaccacagccaattatacgcttcctcaaatttgatggccctacttgtcacccaggaattttgccac

SEQ ID NO: 56884 - DNA, 120 bp, synthetic construct
  source 1..120: mol_type = other DNA
ggctagccagggactttatacatagtaggtgtttcataaatcttcttttgcatagaattggagtagactaccaaggttccagaaaagcaagagagcctgtgatcaggtacctggatcaag

SEQ ID NO: 56885 - DNA, 120 bp, synthetic construct
  source 1..120: mol_type = other DNA
ttgacattatcataacctcttgttatgtagactgctctcctatggagagattttgcagactgttttgattgaacaaaaggcataccttttcctcccttctttcttttttttctttcttcc

SEQ ID NO: 56886 - DNA, 120 bp, synthetic construct
  source 1..120: mol_type = other DNA
acttgtttgcatttgtgcaggattcaatttatattatggaaaacctgctgactagtgttccattcaggagcattctgtcccgctcttttatgcatgtctgtattcaaactagaatagtat

SEQ ID NO: 56887 - DNA, 120 bp, synthetic construct
  source 1..120: mol_type = other DNA
ttatgtattgattatttaactacattattacagaaatcccataatggagactgtatagagtagtaattaccaatgcctcctctgaaactaggatgtccaggttagaaccctgactctgtc

SEQ ID NO: 56888 - DNA, 120 bp, synthetic construct
  source 1..120: mol_type = other DNA
ccaggtgttcaaggttacagggaggtatgattgcattactgcactccggcctgggcaacagagcgagattctatctccataaaataaaaaaataaagactaagagattgagacacaaaga

SEQ ID NO: 56889 - DNA, 120 bp, synthetic construct
  source 1..120: mol_type = other DNA
tggggagaaaaatgtaagaatgcttgttccatggccttttccctaggggctaaaaaagtgagaagtcatactccaagcttcatttgcaagtataaaaggggcaccatgtaattacacagc

SEQ ID NO: 56890 - DNA, 120 bp, synthetic construct
  source 1..120: mol_type = other DNA
tgttctcctttccctatccattgaaagcagactctatcttcttgcccagaaagatgagaaagtatccccacctgcactgatcataggaattaggtactctgcttctatcaaaatccctca

SEQ ID NO: 56891 - DNA, 120 bp, synthetic construct
  source 1..120: mol_type = other DNA
agtgaaacccagatgctacacagtatttgaactttgtcttcccccatcctacagtttatgttacacagtctggtgggagattcaatgtcacctaattgattaataagcaaattgagcatc

SEQ ID NO: 56892 - DNA, 120 bp, synthetic construct
  source 1..120: mol_type = other DNA
gaaagcaaggagtctgattatgttgaaataatgtggctttcataatatccacggagatacagagaagtggatagttctgaggttctagttggtgaatgcttagattcagagagacataga

SEQ ID NO: 56893 - DNA, 120 bp, synthetic construct
  source 1..120: mol_type = other DNA
aaagagaactagttatgggtttgtgactatgaggaagagataaaatgtgaaatagtctctaaaaatgggccaagcatggtggctcatatgcctgtaatcccagctactcaggaggctgag

SEQ ID NO: 56894 - DNA, 120 bp, synthetic construct
  source 1..120: mol_type = other DNA
atgcaggctgtcttgtcaaattcccattgacttcaggtctatgctttttaaaacacattgacaatgctattttggtattctgtaaccatactgtgaactacataggaaatccagtcaaca

SEQ ID NO: 56895 - DNA, 120 bp, synthetic construct
  source 1..120: mol_type = other DNA
atctccccaaggttaacagtgacctcaccaaatatattatatacttttcagcccagatctgtactaaactctcttcagcatttaagactactaaccacctccagtttcttgaacccctct

SEQ ID NO: 56896 - DNA, 120 bp, synthetic construct
  source 1..120: mol_type = other DNA
tcatttgtaactgtgtgaatcagggaaggcaccatacaacaggaacacttggccaattatgaaatcacccatggacatttagaggtatacctcgaagatattgcaggtttgattccagat

SEQ ID NO: 56897 - DNA, 120 bp, synthetic construct
  source 1..120: mol_type = other DNA
acttcctccactgaagtcttgaatccctcacaaggcttgcaatcaatttcttccaaactcctgttaatgcagacatctgacttcctctcatgattcacaaatgttcttaagggcatctag

SEQ ID NO: 56898 - DNA, 120 bp, synthetic construct
  source 1..120: mol_type = other DNA
atgtgtgtatgtgtctttatagcagcatgatttataatcctttgggtatatactcagtaatgggatcactgggtcaaatggtatttctagttctagatccttgaggaactgccacactgt

SEQ ID NO: 56899 - DNA, 120 bp, synthetic construct
  source 1..120: mol_type = other DNA
caaggaggtagagtactccaggtagagtgagcagcaagatcaaaagcaaaggatggtgtatttaaggaatatgctgtgtttaagaaatctcaggtagttcaatttggctgactttgaaac

SEQ ID NO: 56900 - DNA, 120 bp, synthetic construct
  source 1..120: mol_type = other DNA
cccacctggaacttgaccacagatggcataagaccaagtgaggccagaagaaccatgcagcatagcccagttaagcaaattgctaacatcctgaatcaagaactaaattaataattgttt

SEQ ID NO: 56901 - DNA, 120 bp, synthetic construct
  source 1..120: mol_type = other DNA
gtgtgctacaccaaccactactcagttcctgttggactgtgtcagatagatgtttatttatatacttctcttctcttgtcccacttctcttacctcactcaatgtgagaacatgctaatt

SEQ ID NO: 56902 - DNA, 120 bp, synthetic construct
  source 1..120: mol_type = other DNA
gtagagttgttggatcctatggtaagagtatttgtagttttacaagaaactgccacatgctgtctttttttttttaaattatactttaagttttaggatacatgtgcacaatgtgcaggt

SEQ ID NO: 56903 - DNA, 120 bp, synthetic construct
  source 1..120: mol_type = other DNA
gccagtgatgatgagcattttttcatttgtctgatggctgcataaatgtcttcttttgagaagtgtctattcatttgctgtgccctctttttgatggggttgtttgtatttttcttgtga

SEQ ID NO: 56904 - DNA, 120 bp, synthetic construct
  source 1..120: mol_type = other DNA
tcacgatatttattcttcctgtccatgagcatggaatgttcttccatttgtttgtatcctcttttattatgttgagcagtggtttgtagttctccttgaagaggtccttcacatcccttg

SEQ ID NO: 56905 - DNA, 120 bp, synthetic construct
  source 1..120: mol_type = other DNA
ttctgttgattggaatagtttcagaaggaatagtaccagctccttcttgcacctctggtagaattcagctgcgaatccgtctggtcctggactttttttggttggtaagctattaattat

SEQ ID NO: 56906 - DNA, 120 bp, synthetic construct
  source 1..120: mol_type = other DNA
ctcccagattcaagcgattctcctgtctcagcctcctgagtagctgggattccaggaggctaccatcatgtccagctaatttttgtatttttagtagagatggggttttgccatgttggc

SEQ ID NO: 56907 - DNA, 120 bp, synthetic construct
  source 1..120: mol_type = other DNA
aagaactcacatcttgacagtactgtcttcctatacatgaacatggaatatctctccatttatttagttcttgtttgattttgtccatcagagttttgtagctctcctcacacagatctt

SEQ ID NO: 56908 - DNA, 120 bp, synthetic construct
  source 1..120: mol_type = other DNA
ttctagcatgtctttgtctggtttgctgtcagtgcaattattaggtattagggcctcatataatcagttaaaaagtacagaggctccttgacttacgatggggttaagtcctgataaggc

SEQ ID NO: 56909 - DNA, 120 bp, synthetic construct
  source 1..120: mol_type = other DNA
tgttagcggtgtctaatttaattccattgtgttctcagatcagagactttatgatttctgtccttttaaaatttaaggtatgttttatggtccagaatgtggtctatcttggtgaatgct

SEQ ID NO: 56910 - DNA, 120 bp, synthetic construct
  source 1..120: mol_type = other DNA
aatccaagtccatcagataaccccgtaccacttcacagatgatatgagcatcttataataaaaaaatcatatcctccctcctgtccattgtgtcactgctgtcattcattggacttatat

SEQ ID NO: 56911 - DNA, 120 bp, synthetic construct
  source 1..120: mol_type = other DNA
ggaattttctctaatactcactttgagaagtttgtcaagcttctctagataaatctcacaatatccttggtgtcccctatgcctgggccctcctggagtttttaactctcagacttgtct

SEQ ID NO: 56912 - DNA, 120 bp, synthetic construct
  source 1..120: mol_type = other DNA
gttttccacataaaatctgtgcatgatattttctttgcttttatttaaaaggtcatgatatagtacctgcaaggttatggttcatttaggaatagagcttttcaatggcacataaagagc

SEQ ID NO: 56913 - DNA, 120 bp, synthetic construct
  source 1..120: mol_type = other DNA
tgattgacccagcctatcaagatgaaatcagtctactactccacaacggagataaggaagattatgcatggaatacaggagatcccttagggcatctcttactattaccatgccctatga

SEQ ID NO: 56914 - DNA, 120 bp, synthetic construct
  source 1..120: mol_type = other DNA
aggttttgggacttggactggttcccttgcttctcagcttgcagacggcctatcatgggacttcaccttatgatcatgtgagtcaataatcctttataaattccccttcatatttacatc

SEQ ID NO: 56915 - DNA, 120 bp, synthetic construct
  source 1..120: mol_type = other DNA
aaatggtgaaaccctatctctactaaaaatacaaaaattagctgggtatggtggtgctcacctgtaatcccagctaaggcagaagaattgcttgaaccggggaggtgaaggttgcagtga

SEQ ID NO: 56916 - DNA, 120 bp, synthetic construct
  source 1..120: mol_type = other DNA
cttgagcagaattgatattaaaaatttttgtcctacttacacagaaaaagttcctagaactgtgagccccagacatgtgtgcctctctgatttgaaggacccatagagggccactattgc

SEQ ID NO: 56917 - DNA, 120 bp, synthetic construct
  source 1..120: mol_type = other DNA
caagccatatttatatacttctatgataatacacatgcactaatatttacaatgcatgcaaagggtatacacctcattaagcataccgggaggaaaattccccaatttcttcaattcaac

SEQ ID NO: 56918 - DNA, 120 bp, synthetic construct
  source 1..120: mol_type = other DNA
tacaaccaactccacttggtctatcatttaatgaaagaacagaaaggtgtccttcccccacaccaccctaaacgagtcatcatagtagaatgccataaaagcctgtgatgaggattttag

SEQ ID NO: 56919 - DNA, 120 bp, synthetic construct
  source 1..120: mol_type = other DNA
tacatagaagttatatgtagattataatatatacaagtacatatgcacttttccttcaaccaactgccccagtgacttcactcagaaatagccacctatgagacaaaactactcaacaaa

SEQ ID NO: 56920 - DNA, 120 bp, synthetic construct
  source 1..120: mol_type = other DNA
ctagaaaatgtcttagttaagtctttctaggtgcgaaatagggtcacagcctatatcttactaggcgtcctagcagtaagcagtactgaagcaataatattgcctggcattgtgtttggc

SEQ ID NO: 56921 - DNA, 120 bp, synthetic construct
  source 1..120: mol_type = other DNA
gacatttctgctgcatcatccattctctgtgataaagattgtggtacactaacaggtatgtttactcctatagcatgtgcagcttgtacagggtatggcttttaggaagtaatatcattt

SEQ ID NO: 56922 - DNA, 120 bp, synthetic construct
  source 1..120: mol_type = other DNA
tgcaaacacaacacaattttaaacaaatgcaaaagtcttgctccactcatcactggaatggcaggattaattaatatcctcctgagatatccttaacccagaggtgctcatcgaaccccc

SEQ ID NO: 56923 - DNA, 120 bp, synthetic construct
  source 1..120: mol_type = other DNA
ctagaacattgagtcccatacaataagagtgttaaccattgtaaaccctgtcatgtctctgggaagcagaggaattatcttgttatcagtttaataatggaacattgaagtaaatgatgc

SEQ ID NO: 56924 - DNA, 120 bp, synthetic construct
  source 1..120: mol_type = other DNA
tgcattaatggacacaggtttcagccaaagcctagaagcaatgacacttaccctaaagactgaaaaaggaaaaataagtatactgaaaaaaggaaaagaaatccaaggtggcagcaggga

SEQ ID NO: 56925 - DNA, 120 bp, synthetic construct
  source 1..120: mol_type = other DNA
gttctgtagaaagaatgtacaaatttataatcctactaacagattctgacaatgcctattttcctttattctcgcatagtcttcagaatcctagcaggaaatagaaaggacagtcaattg

SEQ ID NO: 56926 - DNA, 120 bp, synthetic construct
  source 1..120: mol_type = other DNA
tgccttctctgcccacacgctgaacttctagtcattcttcaagatgccaatcaagagtcactttctctggaaggtcctaatcaacttgctcttgtggtagagttaggtaattaatactct

SEQ ID NO: 56927 - DNA, 120 bp, synthetic construct
  source 1..120: mol_type = other DNA
attctcagcttcaaagactccatggcaagagcattaggaagaatgtttccaaaaactgatatggggggattttctggcagaggtgagtttctgaaatggtacgagtgaaatagtcaggca

SEQ ID NO: 56928 - DNA, 120 bp, synthetic construct
  source 1..120: mol_type = other DNA
agtgacatgaaaatggaaatttcacagatgagctggaatctgttttgggtgaacaatgactcaattcaagtaaggggaatatcatacatcaaggtccacatgcaccgagaactaggcatg

SEQ ID NO: 56929 - DNA, 120 bp, synthetic construct
  source 1..120: mol_type = other DNA
atcatgcattcagacaattgaatcaccaaccccctgacatactgcagaatctctgcaatgtaacacagcactgtcacttcaggttccagcttaatgtaccctttactttctagtcctctt

SEQ ID NO: 56930 - DNA, 120 bp, synthetic construct
  source 1..120: mol_type = other DNA
tcttataggataccttttgtcaccttcgtaagatcgatgtttctccagaaaccgatactagcatctgagctagtatgaaccctttaaatattatattttggattcttctgcccacagtga

SEQ ID NO: 56931 - DNA, 120 bp, synthetic construct
  source 1..120: mol_type = other DNA
ggatcctacatctatagttgaacttcaatagccagaaaagtacatctgacattttgcaaacagactttgtccaatcatgctatggcttcacctaaatcccccaactctggtcaattcccc

SEQ ID NO: 56932 - DNA, 120 bp, synthetic construct
  source 1..120: mol_type = other DNA
ggatgcaactattggcttaaaaatagaggagtggctctatagtggggtgggatgaagggtaggcagagacaatggaaactagtgacttctatttgagagatttttaaggaatactcctct

SEQ ID NO: 56933 - DNA, 120 bp, synthetic construct
  source 1..120: mol_type = other DNA
ctctatactaggtaccaaaataatttcacaggtgatttaaaactcttaccctaatcttcatgccccaagtgcaatgtgacctgtctagccaggaaactaacagagcattctctcccttcc

SEQ ID NO: 56934 - DNA, 120 bp, synthetic construct
  source 1..120: mol_type = other DNA
ggttttgttcctggaagtttcagagtttgagctcattatttagaagtaaccgggagatcctatgctagtaggcagctaagactaagaaattcaatcagccagccaagaaacaacaaccac

SEQ ID NO: 56935 - DNA, 120 bp, synthetic construct
  source 1..120: mol_type = other DNA
caggaaatatgattaggtatatggtacatttaaccgttgtgtatataggagagattgaaaactctgaggttcaattcctgggtttgccactttctagtctttttatcttgagtaagatac

SEQ ID NO: 56936 - DNA, 120 bp, synthetic construct
  source 1..120: mol_type = other DNA
ggagaattctagtgtgtgacttgaaatatacttagtaatccagtcactgaaagactgacagatttgctcattggtttctcagattccgcctaacaaggcctacgggacatggattctaaa

SEQ ID NO: 56937 - DNA, 120 bp, synthetic construct
  source 1..120: mol_type = other DNA
ttgcgctccccttatgcaccagccattcttcaaggaggtacagattcaggggtaaatgagaaaacaaagaaaaaagattcttacacatagagaaaaaatgttttgtgagaaaacagactc

SEQ ID NO: 56938 - DNA, 120 bp, synthetic construct
  source 1..120: mol_type = other DNA
cacttcccagcctctggtaatcgccattctacactctatctccatgagatcagttttttatctctcatatgtaagtgagaacatgaaatgtttgtctttctgtgcctagcttatttcact

SEQ ID NO: 56939 - DNA, 120 bp, synthetic construct
  source 1..120: mol_type = other DNA
ttgccttcaaatgtgtcgagagcagaaccttctcttcagcaggacttgggacttgagtcccagaaagactctagaatctctttacttattgttaatccagtaaccaactttctgaaccaa

SEQ ID NO: 56940 - DNA, 120 bp, synthetic construct
  source 1..120: mol_type = other DNA
ttgctacacagtttccagtaattcatttaaaaacttattgtacacgtagccattccagcctttaattgtgttcatttcctatattaagacatctccccacccatactttgtaacccaaga

SEQ ID NO: 56941 - DNA, 120 bp, synthetic construct
  source 1..120: mol_type = other DNA
atccataggaaagtccttaccttcatccagatatcagtcttatcatgcaatcaggatgatattcatatcttttttgtgaggttattgtgaaatcgattcagagaaatacacatctgtatc

SEQ ID NO: 56942 - DNA, 120 bp, synthetic construct
  source 1..120: mol_type = other DNA
atgggccctttgcacattttaaaggcttgaggggataagtaggaggaaaacaattgttacagttttcacattatcctttctttctccttctttccccagccctttaagagaagattgcat

SEQ ID NO: 56943 - DNA, 120 bp, synthetic construct
  source 1..120: mol_type = other DNA
gttgggtagggactgaagagctaggtagccgggtgttagcgattcaactcaacctaaaagtaattcccaagatgcattccaggaaaagggctataataattttaagttaaaccaattttt

SEQ ID NO: 56944 - DNA, 120 bp, synthetic construct
  source 1..120: mol_type = other DNA
atcatgtgagatctgaatcaaggcttactttcttgttgcataagaacacccaatttttccagcatatttgctgaaagactatattttgtccactgaattgcctttttgcatctttgtcaa

SEQ ID NO: 56945 - DNA, 120 bp, synthetic construct
  source 1..120: mol_type = other DNA
gacagggcagaatctctagcataatgtggaatggaagttggtgaaagcagatatccttatttcacttaggaggaaagcatacagtctttcactatttagtatgatattagttgtaggctt

SEQ ID NO: 56946 - DNA, 120 bp, synthetic construct
  source 1..120: mol_type = other DNA
gcacaccacaaatattgacattctgtattttcatttccattcagttcaaggtactttctaatttctttatgattttttctttgatccaagggttatttagaagtctattttcggccgggc

SEQ ID NO: 56947 - DNA, 120 bp, synthetic construct
  source 1..120: mol_type = other DNA
tttacccatgtagttacaattctggtggtctttattccattgtgtagaaccacagtttgacctggcatcatattccatctgcctaaaacagtttaacattacgcagtgtagacctccttt

SEQ ID NO: 56948 - DNA, 120 bp, synthetic construct
  source 1..120: mol_type = other DNA
gatctgggttgcagttaagttatatggaaacacgttgatcctttcagatctcacctttaacatttgctgggcatgaccaaagcagtgctcagcctggggctaattatttcccaatactta

SEQ ID NO: 56949 - DNA, 120 bp, synthetic construct
  source 1..120: mol_type = other DNA
ctgaaatgaagtattttgtataaaaccactagttcaccaagttttgaaaatcaattgggcaatatactttaaaagctatacacatgctgttacctttgacttgccaaatctccctttcac

SEQ ID NO: 56950 - DNA, 120 bp, synthetic construct
  source 1..120: mol_type = other DNA
tataaaaacttcaaagaaatagaagcctacttttgcagaggtagtcttcgtggagatggcaagaagactgtacaagggctctggactaacgtacgcccatcaagtaagcaataagcatcc

SEQ ID NO: 56951 - DNA, 120 bp, synthetic construct
  source 1..120: mol_type = other DNA
acagaatagggcctaaccataagtatcttttttaaagcttcttataaggagattccaatatccaaacagaatagagagctactggacataggttcttaaccggcggtccagaaactcttt

SEQ ID NO: 56952 - DNA, 120 bp, synthetic construct
  source 1..120: mol_type = other DNA
tgtatacttagccaaccccttcaccataaattcctgtctcacctttcttcccttgaagtttctgtctctggttttggccagaaacctgcttcctagcccacaggtagtaatattttctaa

SEQ ID NO: 56953 - DNA, 120 bp, synthetic construct
  source 1..120: mol_type = other DNA
ttagaggctatttgtcagtaaagcaccttcaggagtgctgatgtagatcaacttctttggaatcactttgaacccaatgtgtacaatgctgatctctcagtaattaaccgaggaagtgtt

SEQ ID NO: 56954 - DNA, 120 bp, synthetic construct
  source 1..120: mol_type = other DNA
aaacagcgggggactgtctactctcagcatggcaatatcgaggtgcacacacattatttctatgggttcaaatgggaatgccattttaatggtatttaaaacgttatcttcgatatgagg

SEQ ID NO: 56955 - DNA, 120 bp, synthetic construct
  source 1..120: mol_type = other DNA
actgtgcctagcacagagtgagtgttatatcagtgctcataatatattataaccattattattatgttgcatgttcagtacctggcagagtatttaatactgtagatcaggtttacaaac

SEQ ID NO: 56956 - DNA, 120 bp, synthetic construct
  source 1..120: mol_type = other DNA
ggagagggaggtgggagggatagggacaataaatgaatgacattaaggatcaccctaatcagactattgaagagaaaatattatctattatattcaagcctgattttactgcaatattta

SEQ ID NO: 56957 - DNA, 120 bp, synthetic construct
  source 1..120: mol_type = other DNA
ctccaataagaattaatgttagtaaaaagtttatattttttttttctgaaaaaagtaactccgatgtaaatcagtgaaggaataatattagtattactggctcatcaaccattaacacac

SEQ ID NO: 56958 - DNA, 120 bp, synthetic construct
  source 1..120: mol_type = other DNA
cagtgggtactccggtgttttcatggtctgagaaggcaattcttgaaatatttcactcagatgaggctggttttcttctgtgttccaattttcaagagccataccctttaaaccttgaga

SEQ ID NO: 56959 - DNA, 120 bp, synthetic construct
  source 1..120: mol_type = other DNA
atgttgaaatgtaatcctctgtgttggaggtggggcctggtggaaatgattgattgcatcatgggggagaatttctcataaatggtttagtatcatcctcttggtactgtcctcatgata

SEQ ID NO: 56960 - DNA, 120 bp, synthetic construct
  source 1..120: mol_type = other DNA
agccaacatctcacattagccaaaaggatcaataagctgacaatatttaattggaagactgtcaagaaaatgcttctttcttaagcatttccctcatcagtaatacctcaaagcctacaa

SEQ ID NO: 56961 - DNA, 120 bp, synthetic construct
  source 1..120: mol_type = other DNA
gttagagtagagaagagttcattctctataataaaaaagacaaactgccatagctctcatcttcagtgcattaacgatattcagatattttaaaaacagatgtttatagaaaaggaagtg

SEQ ID NO: 56962 - DNA, 120 bp, synthetic construct
  source 1..120: mol_type = other DNA
tcttgaactgcagaaatgtggcagaatgagaaatctgttcaatgagttatgcagtagtatagtgtatatcgctatgagttgttgataaggttttatcagtttacttgaaaacctgtaact

SEQ ID NO: 56963 - DNA, 120 bp, synthetic construct
  source 1..120: mol_type = other DNA
cataacacacacaaatatgcaactatacctcagctaggaatcattctgtgtctcctctctgcttctgttggcttatctcttcatttttctttctgtctctccacagagggctttctctgt

SEQ ID NO: 56964 - DNA, 120 bp, synthetic construct
  source 1..120: mol_type = other DNA
cctcttgccctttttcaaagagcttatgattttgtaaactagacactaaaagtggtttgttttgttttttgaccttctcatctgccgatccggataaccatcactctgtcacagagaagt

SEQ ID NO: 56965 - DNA, 120 bp, synthetic construct
  source 1..120: mol_type = other DNA
ctactctacagtcgactgcaaatgaaatgactactatttaaaggagtatctaaaagagtcaagagaggagttttccatttctacaacatggttaacaagatattgaaaggaatcccttgc

SEQ ID NO: 56966 - DNA, 120 bp, synthetic construct
  source 1..120: mol_type = other DNA
aaatgtgatgcaaaacatgatctagaggttaagagacatggagaatagcttaacaaggtaaaggaaaaatcaaattgcagttcacaagaagcaaatggagagaactaggagaggcaccat

SEQ ID NO: 56967 - DNA, 120 bp, synthetic construct
  source 1..120: mol_type = other DNA
gatgttttagaaagaatattgattctagtcattccactaacaaaatgatgagcttgagcttgtattacatgatcctttgggattacagatcccttggtggatccctaatctaccactgat

SEQ ID NO: 56968 - DNA, 120 bp, synthetic construct
  source 1..120: mol_type = other DNA
cacctcccctcagaagccccaatcccctacttcattctgtagctcaaaatattatttatgcttccacaatttggcactccttagagtctcatattttgtgggacttccgtatatatgaag

SEQ ID NO: 56969 - DNA, 120 bp, synthetic construct
  source 1..120: mol_type = other DNA
aagtaaactgaaggacatttgaaaaacttcctgtctgtgtcctctcaattttttttttgtttgtttcataggagacaatcatgttatacctgaaaggtgatccatatggccctcacaggg

SEQ ID NO: 56970 - DNA, 120 bp, synthetic construct
  source 1..120: mol_type = other DNA
tccaagtcttcagataaactctttcaaccaacttccaattggaaaatctctgaatctatgacttggaaccctcccctgcttcaagttgtcctgcctttctggaccaaaccaatgtatatc

SEQ ID NO: 56971 - DNA, 120 bp, synthetic construct
  source 1..120: mol_type = other DNA
agttcaagaccagcctggtcaacatggtgacaccctgtctctactaaaaatacaaaaaatagctggatgtagtggtaggtgcctgtaatcacagctactcaggaggctgaggcaggagaa

SEQ ID NO: 56972 - DNA, 120 bp, synthetic construct
  source 1..120: mol_type = other DNA
ggaaatgcttggatgcccagggcagcaaaagtttgctgcagggacgggaccctcatggagaacctctactagggcagtgcagaagggaaatgtgacatcagtgccctagagtccctacta

SEQ ID NO: 56973 - DNA, 120 bp, synthetic construct
  source 1..120: mol_type = other DNA
acttgctcctccttgccttctgctatgattgtgaagcctccccagatatatggaattgtaagtccattaaacttctttcttttgtaaatggcctagtcccgggtatgtctttattagcag

SEQ ID NO: 56974 - DNA, 120 bp, synthetic construct
  source 1..120: mol_type = other DNA
gagaacctttttcaaaaatgttctttgaaatatttggggctaaatgggaagttatgtgaccacgctattttggggaaacaccaaagagacctccttctggtgattcacaaggcatctaag

SEQ ID NO: 56975 - DNA, 120 bp, synthetic construct
  source 1..120: mol_type = other DNA
tgcaataaatgcttcactctctctcgctgctatcaggttgtcagtgtttgtccttgctgagccaggtgagcaggcttctgatgtatttacgtaggtcaatggtctctaaaattatttgat

SEQ ID NO: 56976 - DNA, 120 bp, synthetic construct
  source 1..120: mol_type = other DNA
tgacattttgttatagcagcccaaatggactaaggcaatttacaaatgtaaaaatcattcttaactcataggcagtacagaaacaggtgggaggctggatttgacccacggggctatcat

SEQ ID NO: 56977 - DNA, 120 bp, synthetic construct
  source 1..120: mol_type = other DNA
aagtttctgcttctctgataaaattaaactatactaaaggttcacaacttagaatgtagatactaaccataacaccatattatgatcttataattgggttacgatgtcttggatcaattt

SEQ ID NO: 56978 - DNA, 120 bp, synthetic construct
  source 1..120: mol_type = other DNA
tatatagctgtaagcagtataactgcacgaggatactgggagaactttgatctttaggagggcttccaaatgctaacttgctgaagctgcccatgttagtgatacagttagacctacaaa

SEQ ID NO: 56979 - DNA, 120 bp, synthetic construct
  source 1..120: mol_type = other DNA
gaaatgagtattttcacagtaaattagtatgggatgtgatcgtcccactttccttttttttttttttgagacagttttgctctgtcgcccaggctggagagcagtggcacaatcttggct

SEQ ID NO: 56980 - DNA, 120 bp, synthetic construct
  source 1..120: mol_type = other DNA
atatacatattagccagggcactaattgacagcaaattggggaatacagtaagcagatgatggccagtaagcctgtaagttcacttccaactgatactttgtatttgtgtgactactcac

SEQ ID NO: 56981 - DNA, 120 bp, synthetic construct
  source 1..120: mol_type = other DNA
agtcacaatgagctatcaccccacaccaatttggatggctagtatcaaaaagtcaagggacaacaagtattggtgaaggtgtggagaaaagggaatcctcatacactattggcagtaata

SEQ ID NO: 56982 - DNA, 120 bp, synthetic construct
  source 1..120: mol_type = other DNA
actctgagtgtctaactaaacatatgaaaacataccaaagatatatttacaattagatacagatcaggtgttctgtcagacatatttcacatttaaaatttctggggaatgtctttaata

SEQ ID NO: 56983 - DNA, 120 bp, synthetic construct
  source 1..120: mol_type = other DNA
tagcctcagagatgtgaaagacttgacttttggcctaatcctccttggcctaatcctccttgcaacaataactcaaaaagttaatacctgatccaagataaatcagagtcctgctgaggt

SEQ ID NO: 56984 - DNA, 120 bp, synthetic construct
  source 1..120: mol_type = other DNA
gtgcacacagataccatgtttagcattatcgcaacaaaaatactaaaaaaaaaacagcttatatgtcaactacaggcacacctaggagatgctgcaggttcagttccagaccatcacaat

SEQ ID NO: 56985 - DNA, 120 bp, synthetic construct
  source 1..120: mol_type = other DNA
acctccttccatgactgttcttctttttttttttttttttttttttttttaagacggagtctcgctctgtcgcccaggccggactgcggactgcagtggcgcaatctcggctcactgcaa

SEQ ID NO: 56986 - DNA, 120 bp, synthetic construct
  source 1..120: mol_type = other DNA
aggaccttccaaatggtacatgagcattggcttcaacttagagtcatcagctgcaatttgcccattacacgagagttagcatgtcttttgaagtcattcattcactcctcttgtttagct

SEQ ID NO: 56987 - DNA, 120 bp, synthetic construct
  source 1..120: mol_type = other DNA
tagagcaaccagaagacacacaacacgtattggttaagtttgctgtcttatatgggcatggtttgtggtgctccaaagcaattacaataacatcaaagatcattggtgtaacagatgacc

SEQ ID NO: 56988 - DNA, 120 bp, synthetic construct
  source 1..120: mol_type = other DNA
agaaatatgccacatggagagtggcataaagtaatttgagtactcagaaatgaagtacacttctggaatacgaaagacttgtctccagatgaccgatggaaactgacagaatctttggaa

SEQ ID NO: 56989 - DNA, 120 bp, synthetic construct
  source 1..120: mol_type = other DNA
tgtgaacgaaccatgagatgccatttttttttgcacatattatttggccaatatgacaaaaattttaaaagactgataacatccagtgctagagatcggaggtagaggcagggagggatg

SEQ ID NO: 56990 - DNA, 120 bp, synthetic construct
  source 1..120: mol_type = other DNA
aatatgtggatgtatccagttcttcccattgcattaaactgtcttattcctcctttaaagtggtgttatccatctgaacacatattcaattacattttccactaaggatgaactgctaaa

SEQ ID NO: 56991 - DNA, 120 bp, synthetic construct
  source 1..120: mol_type = other DNA
tttctttttggtgcagtccagtgttcactttcttcatttatttactcgtttcagatgagcacgctctccagttgcttcctgagaaagggctcatggaaggtaaatgtatttatctgccct

SEQ ID NO: 56992 - DNA, 120 bp, synthetic construct
  source 1..120: mol_type = other DNA
ggctaagtaggagaatcgtttgaagccgggaggtggaggttgcagtgagcggagatagcaccactgcattccagtctgggtgacagagcaagactccatctcaaaaacaaaaacaaaaac

SEQ ID NO: 56993 - DNA, 120 bp, synthetic construct
  source 1..120: mol_type = other DNA
gtaatgaggagtttctgttcatttattctgtttgagattcattgagcttcctcaatgtatacattaggtctttcaacatttctggacagtctcagctaacttctttgtattggatcttcc

SEQ ID NO: 56994 - DNA, 120 bp, synthetic construct
  source 1..120: mol_type = other DNA
ggaatagagattgggagaataagtatgaagtatgataaaactactatgtttaacaggaagttaatacaatgtattagttaaaggattttactactaatgcacaaccccaaatacccagat

SEQ ID NO: 56995 - DNA, 120 bp, synthetic construct
  source 1..120: mol_type = other DNA
actcagtttttaaaacactaggctactgaaaaatcctagaattgagtaaagttttcttttttatataagctatttctaaacataaatacagaatttctctccataagttatcaacttgtt

SEQ ID NO: 56996 - DNA, 120 bp, synthetic construct
  source 1..120: mol_type = other DNA
aatagtgacaagtgaccatattaagtactggcaagaatgtggaaaaactagatcacttatacattgcttgtgggaatataaaatgttacagccattctgaaaaacagtttggcacttttt

SEQ ID NO: 56997 - DNA, 120 bp, synthetic construct
  source 1..120: mol_type = other DNA
caaaggttaccgcccctttccatggcaacaacccaacaatccaggagttaccacccttttcttggaaatttcggcataatctgccacttaatttggatgtaatcaaaagtgggtataaat

SEQ ID NO: 56998 - DNA, 120 bp, synthetic construct
  source 1..120: mol_type = other DNA
taacaatgatagcctttgttgagtacttactatgccctgagtacttgctaaagttttacttctgttacatgctacaagagtacttgacacatgcatgaactcagtaaattacaatattcc

SEQ ID NO: 56999 - DNA, 120 bp, synthetic construct
  source 1..120: mol_type = other DNA
aagaaaagaaaaaatagaaacacaaattggtacatctgggcccccaccagaaggtgaacttaggtgtacagtttcaagaagcataacatgagtggacaagtctactgccaacaactggtt

SEQ ID NO: 57000 - DNA, 120 bp, synthetic construct
  source 1..120: mol_type = other DNA
attacaaaatatagtgcaaatctccacatattaagctcgatatagtcataaatttgtactccaagccctcattgacttcaatagggcttggacttgtggaatgattgcagatcaaggcat

SEQ ID NO: 57001 - DNA, 120 bp, synthetic construct
  source 1..120: mol_type = other DNA
tgaatacagaatgtaataccaagtaggctgtcttatttcagtgcaacctataatgttgggacacctttaaaatattgcagagagcactggagagaggataatcccctcgtactaacggtt

SEQ ID NO: 57002 - DNA, 120 bp, synthetic construct
  source 1..120: mol_type = other DNA
atttaaaatgttttaatttttgtttgtttgttttaaagataaggtcttgctgttgcccaggttggagtgcagaggtgcgagcatagctcactgcatcctcaaactcctgggctcaagtga

SEQ ID NO: 57003 - DNA, 120 bp, synthetic construct
  source 1..120: mol_type = other DNA
aagatgagagagggcattgtaggcatgctaagatttatggcctttctcctgcagataagcaggagagagagagatgtcaaaacatactttggggagatacagttggatgaaaatatgtag

SEQ ID NO: 57004 - DNA, 120 bp, synthetic construct
  source 1..120: mol_type = other DNA
catcttatgttcacttcctttgcaaaacaacaataaacagctggcaagtcagagataccagagtttttcctaacttctctcttcccatatctagcctcatgcaatcagtcaccaggactg

SEQ ID NO: 57005 - DNA, 120 bp, synthetic construct
  source 1..120: mol_type = other DNA
aacactcacagtctgtgctattatatctagaatgataaaattaccaagcagggcagaagtgagcagggaacgacaattgattcagactcctagagtaatgatctttctccttgctatcta

SEQ ID NO: 57006 - DNA, 120 bp, synthetic construct
  source 1..120: mol_type = other DNA
actcaataggtaaatccatagagatagaaaatacattactggattccagaggctgcgggatgtggggaatggggagtaactgctaatgggtatggagtttctttcttagggtgatagaaa

SEQ ID NO: 57007 - DNA, 120 bp, synthetic construct
  source 1..120: mol_type = other DNA
tttcatgaggactaagatgaaaagttgagtggatcaaaatatagatgggttggagttacagcactgacctctatctgatttttctccctcaggagatatatctttaaataaacaatttct

SEQ ID NO: 57008 - DNA, 120 bp, synthetic construct
  source 1..120: mol_type = other DNA
aatagaggcaatcatttacattcaggtctcttatgaagaggcaatgtgtatgtacctaacatcatctgtaaaggacctatattctccaatggattcatttaatttatttgcagggtgaat

SEQ ID NO: 57009 - DNA, 120 bp, synthetic construct
  source 1..120: mol_type = other DNA
gcctttcagtctttgcacattccaacattccaatacacaacagcgaccatgtttctagcactctgaaaccctgtacgacatagttctggacggagaagtgggtaatattatataacaaag

SEQ ID NO: 57010 - DNA, 120 bp, synthetic construct
  source 1..120: mol_type = other DNA
cactgctctttgtaatgcaatttctgacctatataaaatattttccattatctcgagatttcatgacttgtaactaatgagatcccaacaactgtaacaaagaatgatcctttatcgctt

SEQ ID NO: 57011 - DNA, 120 bp, synthetic construct
  source 1..120: mol_type = other DNA
ttctcaaaacaaagggagacaactgtaacgtttcaataataactagtatgattcactatgaaaaccataatttaaaacttaagagtatattgtgcctctctagccttctgcatgcaagct

SEQ ID NO: 57012 - DNA, 120 bp, synthetic construct
  source 1..120: mol_type = other DNA
agacagcttttaaaagggacccttcagagcactttatatgtgttccccgcagttttattttcttttttggaggttggtgcaccgtatacagtgtcccactctgcttgatatatcgaaaag

SEQ ID NO: 57013 - DNA, 120 bp, synthetic construct
  source 1..120: mol_type = other DNA
aaggaatccattccctcttgtgtccattgagtaaaattctataagagctcagacaatggagagaagataaccattgattaatgtagctccaggggacttgggtggtcattggccttttaa

SEQ ID NO: 57014 - DNA, 120 bp, synthetic construct
  source 1..120: mol_type = other DNA
tgggcttagctgaagtgaaagaagcagatgaggcagtggggtaagaaaaggtaattggtgtgtgatagggcagtttgagtgaatatttaactaacacaccagtaacttccttgagttagt

SEQ ID NO: 57015 - DNA, 120 bp, synthetic construct
  source 1..120: mol_type = other DNA
cacgagtgtgcaagcacacatacaggttcttttgttgatgaagaaatgagggttacgtcatagaagagcttgctaaatagtcttgaagtgaacacttggatgaaatgtcccataggagta

SEQ ID NO: 57016 - DNA, 120 bp, synthetic construct
  source 1..120: mol_type = other DNA
aacaagtatgtattgcgtcctttctatctgccagacattgttcttggcactgggcatgctgtagtgagcaagaaagacaatatctctctacttacagagcttacttcaagtggctaaaac

SEQ ID NO: 57017 - DNA, 120 bp, synthetic construct
  source 1..120: mol_type = other DNA
ccatactgccaaactgtcgaaacaagagcagaaaacgtgttgctgcttttggtaaggttgtctgatatgcagcaataggtacgtgatgctgaaataggttatgtttgctagcataacaaa

SEQ ID NO: 57018 - DNA, 120 bp, synthetic construct
  source 1..120: mol_type = other DNA
aaaaaaaactcagaggagaaaaccagtagcccagagataatcagtagcccagaaggcagagccaacagtagataggaaaaatgtattaggacatccttaccaaggagcataaatggaccc

SEQ ID NO: 57019 - DNA, 120 bp, synthetic construct
  source 1..120: mol_type = other DNA
ctgacaccctgtgaagtaggagaactgatcatgcgtgctgagcccaaattgccaacccacatgactatagtcaaatagataactgttgtcttaagtcctggacaatttatttaactttct

SEQ ID NO: 57020 - DNA, 120 bp, synthetic construct
  source 1..120: mol_type = other DNA
tcaagcctctcctatacattaagctttgtgctatggggtataaggttgtgttttacagaaacagctacataaatactttgatgccaaaaaaagaggcttaaatattttcagtctttactt

SEQ ID NO: 57021 - DNA, 120 bp, synthetic construct
  source 1..120: mol_type = other DNA
aactcccaaaaaaataaaaaaagggaaacaaagttcacgcaaacatatttgctgcagaaatcagtgcaatattcagctgtcaatccagaaaaacaacgagggagccacactgtcagtagg

SEQ ID NO: 57022 - DNA, 120 bp, synthetic construct
  source 1..120: mol_type = other DNA
ggaagttagcttccacatttatttctgctggtgatcctaataaaggcaagtgctcctaggttactgaaagacacagcatcacaaatcaatgcatgtcaccaacagtgtaaagactgatgt

SEQ ID NO: 57023 - DNA, 120 bp, synthetic construct
  source 1..120: mol_type = other DNA
agaatctatcttatcaccaataccaataagttacactgagattcttttcaacataaattgaattccagaattttgtgcaaaccaaatcaattgtgtccctatctttgagctgaggcatcc

SEQ ID NO: 57024 - DNA, 120 bp, synthetic construct
  source 1..120: mol_type = other DNA
atagcagcaggaatgctgcttgcctaatttctacctcacaggaagactggaaaattcaggaaatcataagctgcagggagacatttaatttggaaagtgggtagtgttctcatgcattac

SEQ ID NO: 57025 - DNA, 120 bp, synthetic construct
  source 1..120: mol_type = other DNA
aggcaccttctcccagggatgttctgggcttcaaggcacatttctgaatattggttagtctgggtgtgaacataatttttctgtcctcacacaggattgctatactattaaaaggattat

SEQ ID NO: 57026 - DNA, 120 bp, synthetic construct
  source 1..120: mol_type = other DNA
gtcataggcagtcttttttcatactgtgcaacacagggctatttttagctttgtctttgtcgtgctatagcaactcagtctgttcagcttcatcatatatccaagccctaatgtacacct

SEQ ID NO: 57027 - DNA, 120 bp, synthetic construct
  source 1..120: mol_type = other DNA
catcttacatggatgacagcaggcaaagagggagagcttatgcagtggaactcctctttttaaaaccattagatcttgtgagacttattcactatcaggagaacagcacaggaaagacct

SEQ ID NO: 57028 - DNA, 120 bp, synthetic construct
  source 1..120: mol_type = other DNA
gactttactcatgcgttaaactcttcataatccttccaaactcaactgattcattcaagcatatacttcttgggacatttccttactaccacctatacacttttctgaagtagttacctc

SEQ ID NO: 57029 - DNA, 120 bp, synthetic construct
  source 1..120: mol_type = other DNA
tgatttgcatttctctaatgaccagtgatgatgacctttttttcacatgtttgttggctgcacaaatgtcttcaaacagagagccaagtcatgagtgaactcctattcacaattgctaca

SEQ ID NO: 57030 - DNA, 120 bp, synthetic construct
  source 1..120: mol_type = other DNA
aaacaagctccttgaggacagtgaccaaacatatcttaaccaaattattatctccattgcaattaaaaatatgcatgtatgtcgggcgtggtggctcacacctgtaatcccagcactttg

SEQ ID NO: 57031 - DNA, 120 bp, synthetic construct
  source 1..120: mol_type = other DNA
tacatacagaataaagcagaacctcagcattatataatcccaattgtgatctgggcccttctccctccccgccctttctaatctcatctcctatccctccttcaaaatattttttgcttc

SEQ ID NO: 57032 - DNA, 120 bp, synthetic construct
  source 1..120: mol_type = other DNA
ttcccacaaagttctgaggccaagataacttaccgatatataacccaagaatatttctggatgtttcagttactgagcatccaggaagcctcacctctggacattgtgtgctaatcatct

SEQ ID NO: 57033 - DNA, 120 bp, synthetic construct
  source 1..120: mol_type = other DNA
ctataaaagcccattattctatgattctaacatagagtggcattgaagctctggaagattgctgattttaggccagtctctccaagagccatctagtgggaagagtaagtaattgccctg

SEQ ID NO: 57034 - DNA, 120 bp, synthetic construct
  source 1..120: mol_type = other DNA
agtaagagattcaggcttggccaatattgtgttaggtgtctattttattcaactacgtggctactgggggtctgttcaagagaacagaccgtttaagttcggaagatagtctaaaaggtg

SEQ ID NO: 57035 - DNA, 120 bp, synthetic construct
  source 1..120: mol_type = other DNA
aaattattactctttaccactggtttcctctgttatacctcgtggggtcatggaattatagcagagacatttggatgtgtaatgattatgttgttgggaaaaagtaactcacatggtaag

SEQ ID NO: 57036 - DNA, 120 bp, synthetic construct
  source 1..120: mol_type = other DNA
catgtcccatctttctccatctaaactctacctctacccccaattatcagctctttagcaacttaatgtagtaacatgcaaaaactcctcctccttcaacaaaaaataactattcctccc

SEQ ID NO: 57037 - DNA, 120 bp, synthetic construct
  source 1..120: mol_type = other DNA
gctttggatatatgcatacactcatgttactatcactacaatccacgtcacaaacatatccatcacgttcaaaagtttacttgtgtccctttattgttgcttactttatcccttcctttt

SEQ ID NO: 57038 - DNA, 120 bp, synthetic construct
  source 1..120: mol_type = other DNA
caggcgtgagccaccgcgcctggccattatccatttatctatcagtagacatttaggttatatcttggctattgtgaataatgttgcagtgaacatgtgggtgcagatatctctttgaga

SEQ ID NO: 57039 - DNA, 120 bp, synthetic construct
  source 1..120: mol_type = other DNA
ctctattgttccaatgctctacatgtttgtttttatgccagtagcatactactctgattattgctttgtaattattttgaaatcaggaagtataatgtttctagctttattcttatttaa

SEQ ID NO: 57040 - DNA, 120 bp, synthetic construct
  source 1..120: mol_type = other DNA
ggatattggcctgtcattttctttgtttgtggtgtctttgtctggatttggtaacagtgtgatgctggcctcataaaatgagtatggaagtatttactcttctactttttacaagccttt

SEQ ID NO: 57041 - DNA, 120 bp, synthetic construct
  source 1..120: mol_type = other DNA
gacaaattttcaaaagtgtcaatcaaaaaggtaacaattgccatactgacaggccccggggcaaaggtggtgatactgctgacaagatgtcaatgactaaagtaataaaaacatggtgac

SEQ ID NO: 57042 - DNA, 120 bp, synthetic construct
  source 1..120: mol_type = other DNA
ttttgagtattggttataagaatcacaaaaagtccaatacttgtccccaccctggagcagagttctctgataactggtaggaacttacttatgtgttctgacttccacatgctcagctgg

SEQ ID NO: 57043 - DNA, 120 bp, synthetic construct
  source 1..120: mol_type = other DNA
cagcaaactaaagattttgggtgttttgttttattgtgctacattgccattagacccagcagaccccatgcattagagcgctgaaaatttggcatgggatgcataacacttctactctat

SEQ ID NO: 57044 - DNA, 120 bp, synthetic construct
  source 1..120: mol_type = other DNA
taaaggtgagatcacatacatttctggtactagttaagtctaaaggcccagtttcccaatgagactgacctgaagtcatctcaacagtatgatcctgacccagtggaaaaacttagcatg

SEQ ID NO: 57045 - DNA, 120 bp, synthetic construct
  source 1..120: mol_type = other DNA
tgggactgaaggtcttctaagtaacagggacttcaacacagagaagttcttgtaagtttgttttctaaaatccctgactgtcatattttcaacaactgttcatctttgtccagagcagaa

SEQ ID NO: 57046 - DNA, 120 bp, synthetic construct
  source 1..120: mol_type = other DNA
aagtcaatttagtgatgctgaattgtacctcattagcaatggatgtgcacctcttggccccaaatcacggcataaacctagttttctcatgccattccattaacgaatccaccaaaagga

SEQ ID NO: 57047 - DNA, 120 bp, synthetic construct
  source 1..120: mol_type = other DNA
caaaacattatcaaacaccttaacgtggacacttactataggaatacagcatattttaataaggataaagtttgctgaagaaaacagaagaatagtatttaggaacatatatttaggcaa

SEQ ID NO: 57048 - DNA, 120 bp, synthetic construct
  source 1..120: mol_type = other DNA
aagcaagcaatcaattctgtagtggacacaagctgaatgtcttctaattcagctcaattctgacactatctacctgatgatagcaccagttcctacaggttgagagctcattccccaaaa

SEQ ID NO: 57049 - DNA, 120 bp, synthetic construct
  source 1..120: mol_type = other DNA
ttacctatgggctgtcagccatcagtcaactcattagcatacacacacacacacatactcatcactttggagattccaaagattttaggagttgtatgccaggaaacagggtaaagatga

SEQ ID NO: 57050 - DNA, 120 bp, synthetic construct
  source 1..120: mol_type = other DNA
gtcattctttcagttacaaattctttctttaggtacactgtcaaaattatctttcgtattcagtaattcttattcatttggtagaagaaaataaatatgcctggactccactaatatcac

SEQ ID NO: 57051 - DNA, 120 bp, synthetic construct
  source 1..120: mol_type = other DNA
ctatttgccatctttttcctgatctcgttttaacaatacaaggtgaatgatttctaataacccacaacaatggtatacacaacaaatattcacaaagcttagtctttaccaagagctttc

SEQ ID NO: 57052 - DNA, 120 bp, synthetic construct
  source 1..120: mol_type = other DNA
tgaatactttattttgagggtacagcaatacataaacatggttcctagcttgtgcagagacagaccagtaagcaggcttcaaacaaggagcacaaaggaagttcatgtcacaaactccct

SEQ ID NO: 57053 - DNA, 120 bp, synthetic construct
  source 1..120: mol_type = other DNA
atcctccactgacctgtgttcaattttactttttcaaatctttttagcttctctgcccacataccattttcactatgaattcacacattcactgggcttcatctggtctaacacaagaac

SEQ ID NO: 57054 - DNA, 120 bp, synthetic construct
  source 1..120: mol_type = other DNA
gttatggctgtccttgggagttttccatatgtgaccatgaatataaaatcacaggtgttagatgatgaagacagcaacaacatcacagtaggatccttagttacagtgctggttaagttg

SEQ ID NO: 57055 - DNA, 120 bp, synthetic construct
  source 1..120: mol_type = other DNA
cagtgggatacagcaatagagggggatgaagaccaggaggacagtgagggctttgaagatagctttgaggaagaagaggaggaagaggaagatgatgactaagcagtactctgaatggac

SEQ ID NO: 57056 - DNA, 120 bp, synthetic construct
  source 1..120: mol_type = other DNA
aaggaggaggtggaagtaggcaggtgaatcaaacttttaaaagatgatactatcagtgtcaagtccaggccctacctagcaaataagtaggtcctgcattagttacacaaacatgagaag

SEQ ID NO: 57057 - DNA, 120 bp, synthetic construct
  source 1..120: mol_type = other DNA
ttacaactgaaattcatcaaatgtttgtttcctttccacttaggtgcatagaatttggaaaacagacaggaccttatctggtccaaatgaacagatcaaaccatcttttggagtatgtaa

SEQ ID NO: 57058 - DNA, 120 bp, synthetic construct
  source 1..120: mol_type = other DNA
tggagttaacaacacatttgaagggcactgacttaactttacacctcacatacaggaattaaagaccacagatttggtcaatgtttcagagcggacatttatgtctacgaagtatggatc

SEQ ID NO: 57059 - DNA, 120 bp, synthetic construct
  source 1..120: mol_type = other DNA
cactgcttgcctgtgttccacagagcacactacagtttttggagcagaggacactcaattggattgatggatgaatgaatgaatgagtagatgggtcaatgctatcatactcaggttttt

SEQ ID NO: 57060 - DNA, 120 bp, synthetic construct
  source 1..120: mol_type = other DNA
aaccaagcccccctagatgtgaagggataactttatcatgaagttactgaagcttaagtagggtccctcacttgcatgggactctttcaaagccctgcgcctaatttcaaatctatgaat

SEQ ID NO: 57061 - DNA, 120 bp, synthetic construct
  source 1..120: mol_type = other DNA
atgctacagtgggtcagaaatatttctttcagtagccctaagcaccaagaatgactatcacaactggaatatcaaatggttaggatcatttccttgtacatgtagtagactctaagcaca

SEQ ID NO: 57062 - DNA, 120 bp, synthetic construct
  source 1..120: mol_type = other DNA
ttgaaattggaacttttagtcaatttaatgctgtgcatgaaatgattttttatacagacttaatggtattgtgacacacaagttcttcaataagccacagcttaaaattgcagaaaccgt

SEQ ID NO: 57063 - DNA, 120 bp, synthetic construct
  source 1..120: mol_type = other DNA
ttacttgtctcaccaccaaattattccttgaatgaaagtatggtctccacggtcaccaaattctgtgaccttagtcttcagctcttttgcctttctgtagcatccaacagttgaatggca

SEQ ID NO: 57064 - DNA, 120 bp, synthetic construct; identical to SEQ ID NO: 7825
  source 1..120: mol_type = other DNA

SEQ ID NO: 57065 - DNA, 120 bp, synthetic construct
  source 1..120: mol_type = other DNA
actagtttacagtcccaccaacagtgtaaaagtgttcctatttctccacatcctctccagcacctgttgtttcctgactttttaatgattgccattctaactggtgtgaggtggtatctc

SEQ ID NO: 57066 - DNA, 120 bp, synthetic construct; identical to SEQ ID NO: 7826
  source 1..120: mol_type = other DNA

SEQ ID NO: 57067 - DNA, 120 bp, synthetic construct
  source 1..120: mol_type = other DNA
gtccaagcacttcaccttgatctgcttatgtctctgaaataattctatctatttaagacgctgaactccttgaacattggatttcattttacctggaagagatctcctccaggaggtcag

SEQ ID NO: 57068 - DNA, 120 bp, synthetic construct
  source 1..120: mol_type = other DNA
gcatgtagctggctctaggctaggcactgtatatactatctctttggatcctcacaaaataggtataactcaattttatagttgaggaatgtgagattgagataagttaccaaggtcaca

SEQ ID NO: 57069 - DNA, 120 bp, synthetic construct
  source 1..120: mol_type = other DNA
gctttagatcatagcaattatggagggtcagagagcgcctctttgatgagatgccatcagagctaaaacataaaggataagaatgaaccagtcacgtgatgacttagaggcagattattc

SEQ ID NO: 57070 - DNA, 120 bp, synthetic construct
  source 1..120: mol_type = other DNA
ctggaatgggctttcaatccctgtctctgttctcctaattcctacccaatcctcaactattataaatgtcactgcctccacaaaaccttttaattcttgctgctgcaagtcatctctcta

SEQ ID NO: 57071 - DNA, 120 bp, synthetic construct
  source 1..120: mol_type = other DNA
agatattgaataagatttaatgtaattttctaatttatacaatagcatatatgcagatcaatgtcttatttttttgagatggagtctcactctgttgcccaggccagagtgcagtggcat

SEQ ID NO: 57072 - DNA, 120 bp, synthetic construct
  source 1..120: mol_type = other DNA
ggcagatgtaagtgatgtggtgttgattcccaatcactttcaacactgttatcagtttgacctccatcctcatcacctccaccctttcaaaataattccaaagaaaacctgtgcaaggat

SEQ ID NO: 57073 - DNA, 120 bp, synthetic construct
  source 1..120: mol_type = other DNA
ctcagatctcttctatctgtgagttctgtcagcactataaacacctgtttacctcccagctagctaccccacatccaatctctttatcaagcagataaccaaatcctgactattctactt

SEQ ID NO: 57074 - DNA, 120 bp, synthetic construct
  source 1..120: mol_type = other DNA
aaacagaatgcctccccgttgtctgggcatatgaggtcattttgtcggcccatacttttgtatatgatgttctctgtaacaggaaaactcctactcaagctctaaaacccattccaaatg

SEQ ID NO: 57075 - DNA, 120 bp, synthetic construct
  source 1..120: mol_type = other DNA
attcaatttttcccccttcccctttatttttgatatgagaaattacgtaagctgaaggtcataaagagtggttagttgttcaaagaaaattttgccaccagtagcttctataagatatgt

SEQ ID NO: 57076 - DNA, 120 bp, synthetic construct
  source 1..120: mol_type = other DNA
tgtctccgctctactgagcagtgtggtgcaacatgatgctgagtccctcaccattcatcctaacatcttccttcccaaaacatgggtttttaatcttagttatgtaatcccataattttc

SEQ ID NO: 57077 - DNA, 120 bp, synthetic construct
  source 1..120: mol_type = other DNA
ggcagcctggctccagagaccccactctcagccaatataccagatagactctaattagtgtaatatttattgtattatgaagaatacaacaatttatgccacaacaaaggaaaaattcag

SEQ ID NO: 57078 - DNA, 120 bp, synthetic construct
  source 1..120: mol_type = other DNA
tgcagttacagaaagtttgtgcttaatctcctgatagcctttacagtctatctagaacaacaaaatcccaagttaatgtgacgtgatatggagtcgtacattcttagagggaatagagga

SEQ ID NO: 57079 - DNA, 120 bp, synthetic construct
  source 1..120: mol_type = other DNA
ccctgtgctggatgctggcaggaataattcaacagggaacagaagaaaatataggtggatacacagaatgtatataaggccatttgctgatgttctcaagtgttgagaagtggaagcttt

SEQ ID NO: 57080 - DNA, 120 bp, synthetic construct
  source 1..120: mol_type = other DNA
tcataaaatgcagaaaatatactaaggactgaaaggatgtcactgcatttggcatgcagttcactgaagtctgggcaaagtgaggttgaaaaggagaaaagtggaggggtggaaagagaa

SEQ ID NO: 57081 - DNA, 120 bp, synthetic construct
  source 1..120: mol_type = other DNA
atacatacatacacaaatacacatgcctgcgcgcacacacacacaagcacaagcttataaaatcgtatctgagattgcaaaagctgttttctgagccaaatctgttcaggtttgtttagg

SEQ ID NO: 57082 - DNA, 120 bp, synthetic construct
  source 1..120: mol_type = other DNA
tttttcttagcatgctcatttatgccatccaggtgaaaatgacagacatttaaactttctaatttgataattctgacatctgaagtgatgatctggcacaaggatggtaataaacacaaa

SEQ ID NO: 57083 - DNA, 120 bp, synthetic construct
  source 1..120: mol_type = other DNA
tgactcagggagtcttgaattggagttgtaatgtggacgtttatagatcacggcatcataaggtatttctcaagttttaagtactgcatgctctacatttggtagtttgtgaggtttctg

SEQ ID NO: 57084 - DNA, 120 bp, synthetic construct
  source 1..120: mol_type = other DNA
cccattttcagagtttctaactttggagggttaagtggggactgaggatttgcatgtctaacaaatgcctaaggtgatgctatgcttctagtgcacagatgatactttgttaaccactgt

SEQ ID NO: 57085 - DNA, 120 bp, synthetic construct
  source 1..120: mol_type = other DNA
tctgaatcattcttcagctattcaatatcacttagaaataagattgtgatttcaagagaaaggtggcccaataacaaaggttagtaaaaggcagcacaaagacaaaccttagactcctct

SEQ ID NO: 57086 - DNA, 120 bp, synthetic construct
  source 1..120: mol_type = other DNA
gtttgattacatgtattcaaatatctggcattcttaccaattatccgacagtgcactggggatggcatgagcactggaccccacagagattcatctgcatttttgcttttgaaactttgg

SEQ ID NO: 57087 - DNA, 120 bp, synthetic construct
  source 1..120: mol_type = other DNA
taacctccgtgtgtgtggcctctgtgcattatgtgtaccccttcaggaactgtaagtaataaaatctttatttccatcttgagcctgtcccaatcattgaaggaatgctctcatcttaaa

SEQ ID NO: 57088 - DNA, 120 bp, synthetic construct
  source 1..120: mol_type = other DNA
ataatgagactgtatgattctagttgctgaacctcaaacaaagcaaagtggaaaaggaaaagctaaagtgaaaggtgaagggcttggctagacatagttccctttgtgggaagaggagac

SEQ ID NO: 57089 - DNA, 120 bp, synthetic construct
  source 1..120: mol_type = other DNA
tcaagttatgctgctatcagaaaacatggaccaaattgacctgtggtctaaccacatgcagcgttactgtttaaattaaccagccttctgtgacaagtaattcacacatgtcagtgttag

SEQ ID NO: 57090 - DNA, 120 bp, synthetic construct
  source 1..120: mol_type = other DNA
tttagcaataaccctgctaagtcagtttagcaaaatccctcacccttgatatctaatcatcttcaatatctcatcaggtacctcatcctccactatgacccaggtgatgtcttaccctcg

SEQ ID NO: 57091 - DNA, 120 bp, synthetic construct
  source 1..120: mol_type = other DNA
gggaggatctgtagagcccagatgtttcagattgcaatgagctgtgatcacgccactgcattctggccttggtgacacagcaagatcctgtctcaaaaaaaaaaaaaaaaaaaaaagaaa

SEQ ID NO: 57092 - DNA, 120 bp, synthetic construct
  source 1..120: mol_type = other DNA
gatttcacaatccaatcttctagttatcttggttaccaaggacatgaaggagggtaaaggaagaggcatcaaactcggcccattcacacttgatctcatattctttaatttactaaacag

SEQ ID NO: 57093 - DNA, 120 bp, synthetic construct; identical to SEQ ID NO: 7827
  source 1..120: mol_type = other DNA

SEQ ID NO: 57094 - DNA, 120 bp, synthetic construct
  source 1..120: mol_type = other DNA
cctttgtcagatgagtaggttgcaaaaattttctcccattctgtaggttgcctgttcactctgatggtggtttcttttgctttgcagaagctctttagtttaattagatcctatttgtca

SEQ ID NO: 57095 - DNA, 120 bp, synthetic construct; identical to SEQ ID NO: 7828
  source 1..120: mol_type = other DNA

SEQ ID NO: 57096 - DNA, 120 bp, synthetic construct
  source 1..120: mol_type = other DNA
caaggtggttattaggttggaagtgaaaaaaacccacaaaagatccttgaatggaaagccaaatctcaccaagtgggaaaggaacaggacaaacataagatagaaacgatagagatggtg

SEQ ID NO: 57097 - DNA, 120 bp, synthetic construct
  source 1..120: mol_type = other DNA
ccaggggagcccctaactactgttaattagctttttgtgcctagagaagattttgtgtgagtgttcgttttcagctaccttcagagagcaaatcatgtcaacatgtctctgattaccttc

SEQ ID NO: 57098 - DNA, 120 bp, synthetic construct
  source 1..120: mol_type = other DNA
agttaccattttgacaaacaaacaaagggaagctaaggcgtaccaggggtagcatgcaggccccataaaaatgcagcagaattaaagatcaatcgtgttttgctcctattggaaaattga

SEQ ID NO: 57099 - DNA, 120 bp, synthetic construct
  source 1..120: mol_type = other DNA
gcccagcaatctgtgtttaacaagccctctaggtgacttaatgcaccctaaagtttgaaaacctctacattagagaaatgggatgtgtttgtcactacagagtctattggatgatgtctc

SEQ ID NO: 57100 - DNA, 120 bp, synthetic construct
  source 1..120: mol_type = other DNA
cacatatttgacgacatctctaaatgtccctgtccctcaatcttcactgactctaaagaaaccaaatgtggctgaagtttttactaggggagacagtgtaggagaaagaagacaattact

SEQ ID NO: 57101 - DNA, 120 bp, synthetic construct
  source 1..120: mol_type = other DNA
cactcttttacttagcccctgactagcctctctgcttctgatgccactccactatagtcaattctcagcagagtagccattttaaaatttaaatcagagcttggcacttctctgttcaaa

SEQ ID NO: 57102 - DNA, 120 bp, synthetic construct
  source 1..120: mol_type = other DNA
caagtacaaactatgtgccaggtcctgtgctatgcacaggaatacaaagatcaaaatgtttctttctatgtgtaaaaaaaaaccatgattacactaattattgcctaagactgtatccca

SEQ ID NO: 57103 - DNA, 120 bp, synthetic construct
  source 1..120: mol_type = other DNA
tagaatgcagtctgtaaattggcttacggaaaattccgtatgtgtcttattaccacattcttctaatatgcatacattttgtgaagagtacctactattcaggatatggaagacttagca

SEQ ID NO: 57104 - DNA, 120 bp, synthetic construct
  source 1..120: mol_type = other DNA
cttctaggattcctacaacacattttgagaagtttaggtcataacagactggaatcaatcaattaaaactctcttcatcaaaattgtgctatctatctttaactcagcataattttcctt

SEQ ID NO: 57105 - DNA, 120 bp, synthetic construct
  source 1..120: mol_type = other DNA
gagaagacagtcaatctttctgcctgtgtagatacaaatcatataagatatgtgacgattcatgccatttctttgaaaaacatcttccaatgtttgttaaggacttgcttaccttgaagc

SEQ ID NO: 57106 - DNA, 120 bp, synthetic construct
  source 1..120: mol_type = other DNA
agaaaatactgacacatgcaaataaaggtttaatgcacaaaaatgattaatacagaaagaggaaaataagatgagagagtaccagaatgtcaggtaaatgaagaaattagttttaccgta

SEQ ID NO: 57107 - DNA, 120 bp, synthetic construct
  source 1..120: mol_type = other DNA
aggtctacatttgactattcaaaccaacatatacatatgctacatataattagcttttctttccagtttatttagccacaccccaggtcacacatagggcctcaaggtccacggagccct

SEQ ID NO: 57108 - DNA, 120 bp, synthetic construct
  source 1..120: mol_type = other DNA
atgaggcaaccttaagtgaaatatgaaagaaaatgaaacttgcaaatagtcatctatcaaaggaagacttctctgagagtaggtggcatattaataaataaggtatgtgtctatactagg

SEQ ID NO: 57109 - DNA, 120 bp, synthetic construct
  source 1..120: mol_type = other DNA
gtcctatctaaagtaatcattcaacatgtatgtattaagtttctctacaaggctgcagatatgcgtacctcacaggatgtgtctgcagccaggttccaatctagtgacagagaaaggact

SEQ ID NO: 57110 - DNA, 120 bp, synthetic construct
  source 1..120: mol_type = other DNA
tccaggctgggtgacagagtgagactctgtctcaaaaaaacaaaaacaaaaacaaaaacaaatggacaatgctctagtatactgaactctacaggaacaccaattcttattatttcacac

SEQ ID NO: 57111 - DNA, 120 bp, synthetic construct
  source 1..120: mol_type = other DNA
gaaagtattaacagcaagataaagtccactcctgctcaaagtgtcattcaaattggagcattaagaacaaaatcatgtctcagacagcattgacctagggtctaaagaactgggttctaa

SEQ ID NO: 57112 - DNA, 120 bp, synthetic construct
  source 1..120: mol_type = other DNA
tccattacacaagattctttttgtacaccagcacataacaataagtccagaaccaagtggattactgagtattattatatcattttgaaaatctgatacatgctgaatttctctttgtat

SEQ ID NO: 57113 - DNA, 120 bp, synthetic construct
  source 1..120: mol_type = other DNA
cctcccttctattttctctgtttctttttctcatttggcttttgctataaaacaatttccttaaattttaatccccgcattgtgaagtaagggtaagcaaaaatctcaaacaatacgcct

SEQ ID NO: 57114 - DNA, 120 bp, synthetic construct
  source 1..120: mol_type = other DNA
gagctctgcaaagtgaaacaatgcaagactgaggaagcaagtggcaggctttaaaataaagaacatgtagcaaacgcgcttgtgactctcttagctgctggaatttgttttctacatcta

SEQ ID NO: 57115 - DNA, 120 bp, synthetic construct
  source 1..120: mol_type = other DNA
cagagtaccttttagaagtatgcattttattgtgtacagagggctcacacttttcatgacattctcctaggatcctgtgactcaaaaataattaaagaatcacatttccccactctagca

SEQ ID NO: 57116 - DNA, 120 bp, synthetic construct
  source 1..120: mol_type = other DNA
gtctcagtctcaactataaaatctgctctgctgggatattaaatgagataatatatctcaatagtatgataattgcttagcatactgactggcatatggaaaatgttaacagatgaactg

SEQ ID NO: 57117 - DNA, 120 bp, synthetic construct
  source 1..120: mol_type = other DNA
aaggtggatataaggggatactgcataaatccagataagaaaggaaaacttctcttcttcttcttaaccaggattactagtaacctccactaacatggcattgcagggggtatccatagc

SEQ ID NO: 57118 - DNA, 120 bp, synthetic construct
  source 1..120: mol_type = other DNA
attgaagaaggaccaatcagtcaggaggaggggtaggaaaaagcggcatgctggaagtcaaaaaaagagaggtatcagctcaaactttcttgttatcacagaagaaaactggatgcaaaa

SEQ ID NO: 57119 - DNA, 120 bp, synthetic construct
  source 1..120: mol_type = other DNA
gtatggcaaattagcttacttccctgtgccttagtttcctcacctgtgaaatgaaatgtttagtgcttcctcacctgacctaagtgctcttgaattatgaagcatgtagacagatatgag

SEQ ID NO: 57120 - DNA, 120 bp, synthetic construct
  source 1..120: mol_type = other DNA
ttgagccccacaaaaacactatggactaggtatccttatgctcatttacagatgacaaactgaggttcaaggcagtaaaaaaagctttctataatctcacagacaagtggcaaagacaga

SEQ ID NO: 57121 - DNA, 120 bp, synthetic construct
  source 1..120: mol_type = other DNA
cattcctcctcatttaccctcactgcttccaggtcctctattgacagaactaaatactgaaaactgtgtacgcgatgggttaaaaagcaaagctatcttcgtggacatatgatcaaataa

SEQ ID NO: 57122 - DNA, 120 bp, synthetic construct
  source 1..120: mol_type = other DNA
agataacatttccaattccacatcatcacagcagttttcaaacattcacaatgcatcacgtactgtgctagacaaatccgagccagaacctaagtttgagtcctgactctgctactttcc

SEQ ID NO: 57123 - DNA, 120 bp, synthetic construct
  source 1..120: mol_type = other DNA
tactttacatatggctatccactgtactcaaatgaaggggttaatggtaaaacaagcctttaaagatgtaaatgattcctcccatgtggctgcaaaatagcttaagtgtttgccatctaa

SEQ ID NO: 57124 - DNA, 120 bp, synthetic construct
  source 1..120: mol_type = other DNA
agtctatttgtacagtcaaaagataattttggtggttaatagtcaattgagtttaagtctgggaaccctctttcctaaggaaaatatttcctttatcacactctttgttcagtgtgctca

SEQ ID NO: 57125 - DNA, 120 bp, synthetic construct
  source 1..120: mol_type = other DNA
tttactctgtgttttcagtagatcaagtgttgccttaatagatattatgtgaatgatatttataagactgagttgatttcccccacaagtttgacaggataaaatcacacataaatactt

SEQ ID NO: 57126 - DNA, 120 bp, synthetic construct
  source 1..120: mol_type = other DNA
gagctagacactatgctgggtgtcgggaatctatgctgaccaacagtggggtgattctgaccttcatgtaaaacatgacaaaataattggtaagtacaaactacataccagctatgcaga

SEQ ID NO: 57127 - DNA, 120 bp, synthetic construct
  source 1..120: mol_type = other DNA
ccaagtcaagaataaaattcttattcaaaatattatctttttgagacagataggattacattaaaagaccagagagaccacacggagatgctggatacttacctattgttcacttaatta

SEQ ID NO: 57128 - DNA, 120 bp, synthetic construct
  source 1..120: mol_type = other DNA
tcaactatccatgcctaaataaaggtaattggctagggactactgatttcaggcaaatatatttttacaagagttacaaaacactaagcaacagtggctgtgtcagactagtcagcctgt

SEQ ID NO: 57129 - DNA, 120 bp, synthetic construct
  source 1..120: mol_type = other DNA
aattattctgtcaaggattttttttctttttttttttttttctagatggagtctggctctgtcacacatgctggagtgcagtggcatgatctcggttcactgcaacctccgcctcccggg

SEQ ID NO: 57130 - DNA, 120 bp, synthetic construct
  source 1..120: mol_type = other DNA
caactactagcttatgatcaaaatggaatgctggttgacaggacaaaataccatgttctgtttgattcgcttgtctttagcatgtagtaatatatagagataacaagttagcaactttcc

SEQ ID NO: 57131 - DNA, 120 bp, synthetic construct
  source 1..120: mol_type = other DNA
actccactatatatttatttatttgtagagataaaggtctccctatgtttctcaggctggtctcaaactcctggcctcaattgatcctccccgcttggcttcccaaagtgttaggattac

SEQ ID NO: 57132 - DNA, 120 bp, synthetic construct
  source 1..120: mol_type = other DNA
actgatagtagattatgggagtcaggtgttttcactgttgtattgggaggttaaatgtaaataagaagaaaaggatagagagaggctacaatggtctacgtggtgatgaattagagtgga

SEQ ID NO: 57133 - DNA, 120 bp, synthetic construct
  source 1..120: mol_type = other DNA
cataattccccactcattaggtgtggcctgctcatagtggctttcttccaaagaacatgatatgcaaagagtcataaaagagtaattttttagtggagaaacctgacatacactatgtta

SEQ ID NO: 57134 - DNA, 120 bp, synthetic construct
  source 1..120: mol_type = other DNA
ttctagtttccatcaagctgggcaatgttgaaagtgaatggagttagtccaaggatattggcaatgaccagtgactcaagaagcaaaggaatgctctcaagaatcatgaccaaagactgt

SEQ ID NO: 57135 - DNA, 120 bp, synthetic construct
  source 1..120: mol_type = other DNA
ctgaaacataaaaccagaaactctaaaattgccagaagaaaggataggagaaaagctacatgacattggtctgggaaatgatgttttggatttgatcccaaaagcacaggcaacaaaagc

SEQ ID NO: 57136 - DNA, 120 bp, synthetic construct
  source 1..120: mol_type = other DNA
gagaatggtggttacagagcttgtgtgttggggaatggggtgatgatggtcaaagggtaaaatctcagaccataagtgtgtgcttttttcttttttttgagttatactgcacagcacagt

SEQ ID NO: 57137 - DNA, 120 bp, synthetic construct
  source 1..120: mol_type = other DNA
aaatatcaagggtaggaaagcttgtcctcttggacctactagactatgggcaaagtgaggtcagagaccacttctttcttaattgttcactctatccgtgatgcctgaaatacagcatta

SEQ ID NO: 57138 - DNA, 120 bp, synthetic construct
  source 1..120: mol_type = other DNA
agcttaaatagactgaaatacctttccatggtgtcttagttccggcttctatgtcaaagtgccatagactgcgtgacttataaacagcagaaactcatgtctcatagttctaggagctgg

SEQ ID NO: 57139 - DNA, 120 bp, synthetic construct
  source 1..120: mol_type = other DNA
cttaaaaagaccagtttgaaagtgagttgtaactatctgctagcaaaaagacaattgcatggacaaagataatgatagtaggaatgaaagggcaggttcctatttcagagacattgaggc

SEQ ID NO: 57140 - DNA, 120 bp, synthetic construct
  source 1..120: mol_type = other DNA
agttcaaatcccagcctctacatgctaaataaaagaacccagactcataatgatggggctttagggataactcatatgatttaacatgtgcagcaggactaggtgagtccctggcaatta

SEQ ID NO: 57141 - DNA, 120 bp, synthetic construct
  source 1..120: mol_type = other DNA
caaattctacgagtggattttagaaattaggatttagacaatgctatgatctatgcaatcattttaattttattcacctatgtaatgggggtaatgaaatttatactgggggctgtgaga

SEQ ID NO: 57142 - DNA, 120 bp, synthetic construct
  source 1..120: mol_type = other DNA
ataggaagggataagccttccactttggtacaactcttattttgctactattttttgatagggagcaaagtaaagaattatagtggtaacacaacttcctgccctttacaaagcccatca

SEQ ID NO: 57143 - DNA, 120 bp, synthetic construct
  source 1..120: mol_type = other DNA
aggaatttgaacaaatgtctgttctttaaagttacgggagtgggtagagctttatgacactgtgtggggatatgggggatagaggagtcagagaaaccataacattaaacagatgcataa

SEQ ID NO: 57144 - DNA, 120 bp, synthetic construct
  source 1..120: mol_type = other DNA
taatgaccccaatcttacttctgacttccccaagttcaactgattgaaatgttgtgcaaataagcaaccatttccttattgaaatggtcaacaaggacctcagttaaaacaatggtctca

SEQ ID NO: 57145 - DNA, 120 bp, synthetic construct
  source 1..120: mol_type = other DNA
aacctagagagagtgggagggcatagacacagcctcttcactattaatcaaaccaaatcatcaacgattttagacatcactgtgggaagaagccccacaacacattattaagatgttggg

SEQ ID NO: 57146 - DNA, 120 bp, synthetic construct
  source 1..120: mol_type = other DNA
ttactctgaagatgtcaaagcagtaattagtgatgataccaagaaattcatccacaaggtagaggaaaaagccatgaataagtaggtggaagatacaaaatataacaacagatgtcttat

SEQ ID NO: 57147 - DNA, 120 bp, synthetic construct
  source 1..120: mol_type = other DNA
ttctccctcagtggctccgccatgggattatgtgttaacgatgtaattggcacccacagtttaagaccaccagtgtggttcttgcctaaataatgaatttacttacaaattgcactgaaa

SEQ ID NO: 57148 - DNA, 120 bp, synthetic construct
  source 1..120: mol_type = other DNA
ttctctaggtctctatttcttactcctagattacaatcatcacatctgagtcctaccgcttacagctgtgttaccctgggcaagtcacccgacctttccaatttcatgatctttataaat

SEQ ID NO: 57149 - DNA, 120 bp, synthetic construct
  source 1..120: mol_type = other DNA
tctcccatttgttctcctcaaaaccaatttgtctttcctaaagaaacctacttgttattcccatagaagccttcccccactcccctactaagttgggtatattaggctttaactttaacc

SEQ ID NO: 57150 - DNA, 120 bp, synthetic construct
  source 1..120: mol_type = other DNA
aacattttcaaaatgtacatacagtgagggtaaaaaccctcactgtcagctcagcataccaggatttggtcaagagaggcacacagacatatgtacattggcacatcccctgaagttatg

SEQ ID NO: 57151 - DNA, 120 bp, synthetic construct
  source 1..120: mol_type = other DNA
aaacatatttttagccacagaacagtcctgcattgttacccatcagcagtgtagtaaggcaaatcttctttgtaggcagttgatgaggcagaagatatacagacactgggttgcattcaa

SEQ ID NO: 57152 - DNA, 120 bp, synthetic construct
  source 1..120: mol_type = other DNA
acaatggggcagaaatggtgtttttgccatatcacaaatatgaagttaattttcaaaacaaaagcaacccaaagttaatcagacatcagaaaatctatctgtctagtcttcatatataac

SEQ ID NO: 57153 - DNA, 120 bp, synthetic construct
  source 1..120: mol_type = other DNA
gtcctcaggcttgcatgggggaacataccaaatgatcatttctttatacacagttgattagatgggggatgaacgcctaatctagttcctgatttctgacaaatccacccagatattgta

SEQ ID NO: 57154 - DNA, 120 bp, synthetic construct
  source 1..120: mol_type = other DNA
ctgctcaaggaaatgagaggacacaatcaaatggaaaaacattccatgctcatggagaggaagaatcaatatggtgaaaatggccatagagcccaaagtttacagattcagtgcgatcct

SEQ ID NO: 57155 - DNA, 120 bp, synthetic construct
  source 1..120: mol_type = other DNA
tgcacagcaaaagaaactatcaccaatgaacaggtgacctacagaataggagaatttttttgtaatctatccatctgacaaagggctaatatccagaaactacaaggaacttaaacaaat

SEQ ID NO: 57156 - DNA, 120 bp, synthetic construct
  source 1..120: mol_type = other DNA
ccatggcacgtgtgtacctatgtaacaaacctgcacgttctgcacatgcaacctagaacttaaagtataataaaaaaaagaaaattgtatttttaaaatctgaaaaaaaaagaatcatcc

SEQ ID NO: 57157 - DNA, 120 bp, synthetic construct
  source 1..120: mol_type = other DNA
ctacctagtttttcttgatggacatttaggttgtttccattactttgctattataaacagtagtgcagttaataagcttttagacacattgtttcatgtatgtaatttccaagaggtgga

SEQ ID NO: 57158 - DNA, 120 bp, synthetic construct
  source 1..120: mol_type = other DNA
ctgttccagtgcagtgcagaatcctcctgaagtactccaattatgcatatgttgaatctgctttgattgtttcctttggttattattttctctccctattctttacttttatctgtatct

SEQ ID NO: 57159 - DNA, 120 bp, synthetic construct
  source 1..120: mol_type = other DNA
attttcttataagtaatcttatatttggtggcccaaagtgatggggagatgagtacagagccaaatgtctatctgattagaaatgaaagataaattctcttgggttgaaataacatgtag

SEQ ID NO: 57160 - DNA, 120 bp, synthetic construct
  source 1..120: mol_type = other DNA
cccagtcaggtagaccgtgttacttacaggcaatttggtgtttgtggatcatctcaatagatactatgtcatgtgtttgataggaagctaaatacttggggaataaacctggatttcctg

SEQ ID NO: 57161 - DNA, 120 bp, synthetic construct
  source 1..120: mol_type = other DNA
taaagattttcagctacataaggagctctcaaggtgatcatgactatttccatttaaaaactggatttatctgatagcacaaaagatgagtgaaatattcctgacagtgagggttagcaa

SEQ ID NO: 57162 - DNA, 120 bp, synthetic construct
  source 1..120: mol_type = other DNA
ctcctctagaacaaggactctatcctctttactgtcatatttcaagtgcagctctttccctggcatagaacaggttctccattactccagtagaaaaaggagcaaaactgctaagaacaa

SEQ ID NO: 57163 - DNA, 120 bp, synthetic construct
  source 1..120: mol_type = other DNA
catctcatttattttattcaggcacacatacctaaatcggcaagatactgcaagcttccaatacctttgaaataataaatcacttcttgcagatgttttcacccgctgcaaggctgccgt

SEQ ID NO: 57164 - DNA, 120 bp, synthetic construct
  source 1..120: mol_type = other DNA
caatctgtctcccattaaggtatagtgctaataactttacacatggatatggcccccttcccagtaaatttataataaacattatgtgaatttgtgcaggagaattttccagaaaaagat

SEQ ID NO: 57165 - DNA, 120 bp, synthetic construct
  source 1..120: mol_type = other DNA
tcaagcgattctcctgcctcagcctcccgagtagctgggattacaggcacgtgccaacacgtccagctcatttttgtatttttagtagagacagggtttcaccatgttggccaggatggt

SEQ ID NO: 57166 - DNA, 120 bp, synthetic construct
  source 1..120: mol_type = other DNA
gattatgtgaggtattctattgtatataatctttctgtatagaatctccaatacatattatttgacataagcagcaaaagcataccaatagaaagaataatttgatcactacattgttct

SEQ ID NO: 57167 - DNA, 120 bp, synthetic construct
  source 1..120: mol_type = other DNA
tttgtgactgctgtttcagctctcagaagatgctttttgcaagttccttccactgctgcctgctgaaatacatccagcttcccagatccaaagtaatagaagtaatttcctatggagtta

SEQ ID NO: 57168 - DNA, 120 bp, synthetic construct
  source 1..120: mol_type = other DNA
cggaagatctttctgtcttgtgtcctctggtctagacattgggtttatcctctttactgaacaacagaattctcaagctactcaagatgaatgagggaatcaaggggtctagctactttt

SEQ ID NO: 57169 - DNA, 120 bp, synthetic construct
  source 1..120: mol_type = other DNA
tacaggcatgagccactgtgcccagcctgtattctttaggaccttcactgttcaattagcctgccagtaagcaaggattagggaaaacaaaatgagttatgactttctgtagatatttat

SEQ ID NO: 57170 - DNA, 120 bp, synthetic construct
  source 1..120: mol_type = other DNA
ttctacagatagtacctacagtttgcagcaaataagccaaaacaacaagaaaatatcttgtttggttatactagaattcaatggctgttaatgctctattacacacttaaattagtttta

SEQ ID NO: 57171 - DNA, 120 bp, synthetic construct
  source 1..120: mol_type = other DNA
ccctgacccaatacacatcctcacacttaaaagtcatcccaggaatgttggacctacccattgtgcgcccacaactctctgggaatctctctatcactacttatgttattaccatatttt

SEQ ID NO: 57172 - DNA, 120 bp, synthetic construct
  source 1..120: mol_type = other DNA
ataaacccagtgcacatagcataatatgcttacaggtgaattcatcttcaactttcaactcagaaaatgccctatattctttccaatagtaatactctgtaatggcatggtggttggttc

SEQ ID NO: 57173 - DNA, 120 bp, synthetic construct
  source 1..120: mol_type = other DNA
tgacaaactctcacctcttcttctcccttaagccactgtatcatgatttacctctccataattattgtatgaggtaccatggaagtttgagaaaaccacaggtttgggtttctggttctg

SEQ ID NO: 57174 - DNA, 120 bp, synthetic construct
  source 1..120: mol_type = other DNA
taggaaatatttagtatttccaagtcaactttttttttttttttttttttttttacggagtctcgctccgtcgcccaggctggagtgcagtggcatgatcccggctccagctcactgcaa

SEQ ID NO: 57175 - DNA, 120 bp, synthetic construct
  source 1..120: mol_type = other DNA
cactctgtggaattggtagtcacacagtttcactgggctataattttttctcgttctgcatagggtggttatgaaaactaaatatgtaatctcgtcaatgccatggcatcttactgtgtg

SEQ ID NO: 57176 - DNA, 120 bp, synthetic construct
  source 1..120: mol_type = other DNA
tccctgtatctgggtgcactcctaatccctgccccagcatgtctcctgaattatccttttcctacagaggcttatagtctaggatgaatgaatagaaatatatacatgtaagtgagcaaa

SEQ ID NO: 57177 - DNA, 120 bp, synthetic construct
  source 1..120: mol_type = other DNA
ttttccttactctgccacctcaagcttccagttttcagaaaaaatgactataagttgtaaaaggctggaagctagaacacatgcacgcacacacacatacacaggggaaaagagagcata

SEQ ID NO: 57178 - DNA, 120 bp, synthetic construct
  source 1..120: mol_type = other DNA
tattcatagcaagatgatgaatatgcttgcataaaaagttaaggacatcttctaaaataattccactgtactgccctgagcaccttgaataaaaggaactatgctctggatggctttttg

SEQ ID NO: 57179 - DNA, 120 bp, synthetic construct
  source 1..120: mol_type = other DNA
aggagtgagaagcaaggttggtttctcaccatggggggtttcacaaaaattcagctattttaaagttctagtacaaaataatcagggatagctatctcttctgctacctatgttgttgtt

SEQ ID NO: 57180 - DNA, 120 bp, synthetic construct
  source 1..120: mol_type = other DNA
ccacatatggatgtgtggccaaaagagatgaaatcaaggactcaaagaaatatctgtataacctatgtttgtgggagcattattcccaatatccaaaagtcagaaaccatccaatgtcca

SEQ ID NO: 57181 - DNA, 120 bp, synthetic construct
  source 1..120: mol_type = other DNA
atcaaccaacagtggcattaaaagagtaagagaagtggaaaaatacctgactgtgatacaatctccaaagacaaaagaagggctattttttcctgtaaaatggaaacttaaccagggaga

SEQ ID NO: 57182 - DNA, 120 bp, synthetic construct
  source 1..120: mol_type = other DNA
ccaaactagattgtatttgggaaggtgggaacaatatgactgttttggacacctcttaagccattcaaaggcaagatctgaagaaaaactgatttgatataaatttcaattgcattgctt

SEQ ID NO: 57183 - DNA, 120 bp, synthetic construct
  source 1..120: mol_type = other DNA
gccatgctggcattctgatctcagacttctagcctccagaattgtgagaaaataaatgtttgttattgaagccacccagtctatgctattttggcatagcagcccagcaagactaagata

SEQ ID NO: 57184 - DNA, 120 bp, synthetic construct
  source 1..120: mol_type = other DNA
agaaatgtgctgaaattatgcaattcaaggataaaaaccaacaccaactctcataaatgtttaatatactgtgtttgtgtgggtgacaggggagggatatatgcacacaaccaaaaatga

SEQ ID NO: 57185 - DNA, 120 bp, synthetic construct
  source 1..120: mol_type = other DNA
ttcctgattaagaagccaattaagaataacttttatagagaataattctggctttgtgaaggcatgagagatttaactaaaggccactctgtagcaaatttaataccacaatctctcgat

SEQ ID NO: 57186 - DNA, 120 bp, synthetic construct
  source 1..120: mol_type = other DNA
cctactatgtacccgccactttgctaggcaccaaacatctgtcaatgaagaaagcagacagaatctacagtctttaagaagcttaacttctagtggtggaaacaaacatgtaactagtga

SEQ ID NO: 57187 - DNA, 120 bp, synthetic construct
  source 1..120: mol_type = other DNA
agtgactcttaaacctggctctagaataaaattacccacagaactttaaaaaaaaaaaaaggaactatacccatgtccagcccgtctaccacactacgtcccactcctgaaattgtgcaa

SEQ ID NO: 57188 - DNA, 120 bp, synthetic construct
  source 1..120: mol_type = other DNA
ccttggactgtggtagtattagagaaaactctaaaaatgagagacttttcatgagcaatatcatgcactatagttaaaatcaggaaacatgtgaacagacttgacttaatacaatgggct

SEQ ID NO: 57189 - DNA, 120 bp, synthetic construct
  source 1..120: mol_type = other DNA
ggtaactacccacagaccaaagacggaattcaggtttgaaaatggcttacattgttacatgagaaagaactaaacgtttatattgttttaccctctattgttttctgaaactgcccaaat

SEQ ID NO: 57190 - DNA, 120 bp, synthetic construct
  source 1..120: mol_type = other DNA
tttgataacattattagtattgcagacctaaagcctgatgaaatttttcacttattactgaccaagcatttttgatcatgtgtttattgagagtaattggaacttacagacacctgccca

SEQ ID NO: 57191 - DNA, 120 bp, synthetic construct
  source 1..120: mol_type = other DNA
tcgtggccccgagtttggggaccccgatttaacatactccatttatatgccgtaattgcccatagtacaaatcatatcagagaatgaatatgacattcatgaggcaaagactaagtcaag

SEQ ID NO: 57192 - DNA, 120 bp, synthetic construct
  source 1..120: mol_type = other DNA
tataaatagaacaggaacatgttctattaagggctaaatgcagaagaaaagccagtgtcattaaaaccatcagtaaacttccatagcttgcataatatgttcaaagcacgatgtggggca

SEQ ID NO: 57193 - DNA, 120 bp, synthetic construct
  source 1..120: mol_type = other DNA
ttaatccaccagcctgtcccctgccaacaccagagaatttctggaggatgactataaatgtctgcaggcttaactaaagagtagtcctgattgcagtttctgttacagatgtggtattat

SEQ ID NO: 57194 - DNA, 120 bp, synthetic construct
  source 1..120: mol_type = other DNA
taattgctgtgctcttgtgcctcttgaggttagagggcagagctggcaccatcctcaaggacaaagaacagcatattatacgtgaagacctactaaaaaggttgtgtttcaagaatataa

SEQ ID NO: 57195 - DNA, 120 bp, synthetic construct
  source 1..120: mol_type = other DNA
agaacattccaagcagtgacaggcacaaggcttccttcctttttgtgaatgggaacctattcaaatttccctttcctaaaagcctgaggccccaaatatttgccatgcaagaaataatct

SEQ ID NO: 57196 - DNA, 120 bp, synthetic construct
  source 1..120: mol_type = other DNA
ctcataatcacagatattattggttcaaataaccatagtgaaaacaagatgttataagaggttattaagaaaaaggtaatacctctattagatatttcatctaaaactacgaagcagaag

SEQ ID NO: 57197 - DNA, 120 bp, synthetic construct
  source 1..120: mol_type = other DNA
tcattgtttacccaggagtcatacaggagcaagttgttcaatttccaattgcgtggttctgagtgagtttcttaatcttgagttctaatttgattgtgctgtggcctaagagactgttag

SEQ ID NO: 57198 - DNA, 120 bp, synthetic construct
  source 1..120: mol_type = other DNA
taggtattgatgaacatacctcaaaataataaaagccatttacaataaacccacagccaatatcataccaaatgggcaaaagctggaagcattccccttgaaaactggcataagacaagg

SEQ ID NO: 57199 - DNA, 120 bp, synthetic construct
  source 1..120: mol_type = other DNA
attaactcaagatggattaaagacttacatataggccgggcgcggtggctcacgcctgtaatcccagcactttgggaggccgaggcgggcggatcacgaggtcaggagatcgagaccatc

SEQ ID NO: 57200 - DNA, 120 bp, synthetic construct
  source 1..120: mol_type = other DNA
gaaacaacagatgctggcgaggctgtggagaaatataaatgcttttacactgttagtggaatataaattagttcaaccatgtggaaaacagtgtggcaattcctcaaagacatagaacca

SEQ ID NO: 57201 - DNA, 120 bp, synthetic construct
  source 1..120: mol_type = other DNA
cgagaataaaatcagtggaaaaaacttatagacgatatgaagaaaaatggtcatagttctatttcataagagggtttggagaagatgacaacttccaaatttagtaaaaaagatgtctca

SEQ ID NO: 57202 - DNA, 120 bp, synthetic construct
  source 1..120: mol_type = other DNA
actttgtcaaaatgtacccacttatggctaaagttcgtaaatcataaaagctgcaagagtatctcatcaaaggatacaaatcctcaaagtgaaaaggaatctcactgctatctttcctca

SEQ ID NO: 57203 - DNA, 120 bp, synthetic construct
  source 1..120: mol_type = other DNA
gaacattaagttttataaagttgcccaaatctatactatgtgtttttattcccagacatcttgtttagtcattatgtgtgaatgtttcatcacccggccactgtcaattaaaacgtaatt

SEQ ID NO: 57204 - DNA, 120 bp, synthetic construct
  source 1..120: mol_type = other DNA
tgagcagtacacagataggtgtttttttcatttacctttacaccaaggtccttcattagctcaatctcaaaattcactacatcatacggcagccggaactgaggaatttcagaagtactg

SEQ ID NO: 57205 - DNA, 120 bp, synthetic construct
  source 1..120: mol_type = other DNA
ctaagtgtaagctgcaatgatttgatggtgaatttcaccaaattctcactgttaataagttctttttctgatcagggaaggatacacaaaagataattacatttagaatgtggtacgcac

SEQ ID NO: 57206 - DNA, 120 bp, synthetic construct
  source 1..120: mol_type = other DNA
tgatagacatggggctgcatgagagggagattaaatatggactaaaactgggcactgatgcagatcctcaaaaggttgaacaggaaagcaaaagcaatggactatgaacaaagaattcca

SEQ ID NO: 57207 - DNA, 120 bp, synthetic construct
  source 1..120: mol_type = other DNA
gacttttatgttcacttgggtgtctaatgggtaactcatatttatcatgcctaacagtaagctttggttcttgcatcccaacactggtcctcagacaaccccattttatgagttgctcag

SEQ ID NO: 57208 - DNA, 120 bp, synthetic construct
  source 1..120: mol_type = other DNA
atagagccagaaataatgaccagcacatagttaagtgatcgatatatatatatactgaaggaaggaagggagggaaggagaaaggggaaaatacaggtaggtatcaggtcgtggaagggt

SEQ ID NO: 57209 - DNA, 120 bp, synthetic construct
  source 1..120: mol_type = other DNA
ctgaagactgcatggtgagaaaggagataaaaggacagaagacagaatttaataggaatgattattttccaagtttgttgtgcttaggaaaacaaacttttcttctatctgtgctcctgt

SEQ ID NO: 57210 - DNA, 120 bp, synthetic construct
  source 1..120: mol_type = other DNA
aatgagaggcagccgtaagtagaaaataaagtaacaggaaagttttgtggctataattccggctaaattccagcatcagtttttataatcctgtaacagtgacacagaatgcctgtacca

SEQ ID NO: 57211 - DNA, 120 bp, synthetic construct
  source 1..120: mol_type = other DNA
taacatatattcactggtgccaaaaaacataagaaacttcacaaattttagtaacaaatttgattaaatttatcctctgtgattattgggtatgattaatttatttgttacacatagggc

SEQ ID NO: 57212 - DNA, 120 bp, synthetic construct
  source 1..120: mol_type = other DNA
aaaaagagcaatctttgcagaataggcttcagacattttttctgggggaggcagcgaaggatttctgatctgtgggatactcattgctttgaatacctacggggaaatcaattgtcatgg

SEQ ID NO: 57213 - DNA, 120 bp, synthetic construct
  source 1..120: mol_type = other DNA
ggctaagcatcttgaagagaaccacagctcagaaaagagatgttggcagtcttttgaaaccagagagacacagagttttggaaatgtaggaggccattaacctagagcaaaataaagtac

SEQ ID NO: 57214 - DNA, 120 bp, synthetic construct
  source 1..120: mol_type = other DNA
agacaaaagttatggaagataaatgccttaaatataagagcacagatagataagtgtaaagttaaagactagaaaaagttatacaaagcaaacactaaccaaaagaaagctggtacatat

SEQ ID NO: 57215 - DNA, 120 bp, synthetic construct
  source 1..120: mol_type = other DNA
ctgctcttccctgtgctatccaaacagtacagattttcttaaatattgtttttgaatcaacatatactgttatcttttattcctttctaagcaatgtgaacaaggaactaaattctggta

SEQ ID NO: 57216 - DNA, 120 bp, synthetic construct
  source 1..120: mol_type = other DNA
ttagcccgatttgctcaaccccgtgcactgcagcttaagagttgttcaatacatactcattacattgcttggctcaatacactaatctatcaattggtatccctttgcctgctctgttct

SEQ ID NO: 57217 - DNA, 120 bp, synthetic construct
  source 1..120: mol_type = other DNA
aattactgtgtttcacaacctgtttacaaaattcctaaaaatttaatcagcactagagctggtcctggctggcttcagcacactattgcacctcggcaatacatgagggctcattcaatg

SEQ ID NO: 57218 - DNA, 120 bp, synthetic construct
  source 1..120: mol_type = other DNA
ctgaaaatgatggttttcagcttcatccatgtccctacaaaggacatgaactcatcattttttatggctgcatagtattccatggtgtatatgtgccacattttcttaatccagtctatc

SEQ ID NO: 57219 - DNA, 120 bp, synthetic construct; identical to SEQ ID NO: 7829
  source 1..120: mol_type = other DNA

SEQ ID NO: 57220 - DNA, 120 bp, synthetic construct
  source 1..120: mol_type = other DNA
tttgttcttgcgatagtttactgagaatgatgatttccaatttcatccatgggaattcccagcatccagaaccaagagaaataatttttgttgtttataagccatccagtttatggtatt

SEQ ID NO: 57221 - DNA, 120 bp, synthetic construct; identical to SEQ ID NO: 7830
  source 1..120: mol_type = other DNA

SEQ ID NO: 57222 - DNA, 120 bp, synthetic construct
  source 1..120: mol_type = other DNA
ccactccaaattgactttaccagcattttctccataattttcacattactttgaagaaagggagagattatattgatatttaaaatggaaagattgcaatgcagagaggagccacaggat

SEQ ID NO: 57223 - DNA, 120 bp, synthetic construct
  source 1..120: mol_type = other DNA
aaatactgagtacatactaatcactgcattcattctttgaaaagaaatatacttgggcttcttgacaaatagttttcttcataacaattagaccaggaacaccaaaagtgagtactgtgt

SEQ ID NO: 57224 - DNA, 120 bp, synthetic construct
  source 1..120: mol_type = other DNA
atccaaaatcatatgctcaggacacttacattagcccacagataggcaaaataatctaccacaaagcctgttataagataaagtactgaatatttcatgtaatttatcgcatacagtact

SEQ ID NO: 57225 - DNA, 120 bp, synthetic construct
  source 1..120: mol_type = other DNA
ggttgaatactcagatcatatttttactttttatttctttagttctgcaatttatgcctctatccagcccaaaactgaccttttctattgagattgtcattatagtgtaaatttacagtc

SEQ ID NO: 57226 - DNA, 120 bp, synthetic construct
  source 1..120: mol_type = other DNA
ttattgcccccaaatcacggtagcttatttttaagtcctagatattaagatacagttttaaaacaaactaaaatattgtaataaaaatcatctagcaattcatctggccccacagttcta

SEQ ID NO: 57227 - DNA, 120 bp, synthetic construct
  source 1..120: mol_type = other DNA
cctcttgagtagctgggactaaaggtgcacaccaccacagctggctaattttttttatttttagtagagatggggttttaccatgttggccaagatggtcttgatttgaccttgtgatcc

SEQ ID NO: 57228 - DNA, 120 bp, synthetic construct
  source 1..120: mol_type = other DNA
gcactgaagcactatgcaaagtacaatataactgcattttctccttgcctgatacttttctttgcactaaggtctaatcacctccaaaaccatgtgacaaaaattaatgaagattggaca

SEQ ID NO: 57229 - DNA, 120 bp, synthetic construct
  source 1..120: mol_type = other DNA
ttaccagactaatttaactcaaactgtgtctacccttgataaaatatagaaataaatgtttacagtcccttggaatatatagtatattctttctttaacccttaagaaatatcccatcat

SEQ ID NO: 57230 - DNA, 120 bp, synthetic construct
  source 1..120: mol_type = other DNA
tgtatggtgtacatgtgatgttttgatagatgcatacaatgtgtaatgatcaagtcagggtaacttgagatatccaacacttcaagcatttgtcatttatttgtgttaatgaaaaatcca

SEQ ID NO: 57231 - DNA, 120 bp, synthetic construct
  source 1..120: mol_type = other DNA
tgggtagatacgcagtagtaggattgctggatccaacgttagatcaacttttagtgctttaagaaatttccacactgttttccatagtggttgtactagtttacttcccaccagcaatgt

SEQ ID NO: 57232 - DNA, 120 bp, synthetic construct
  source 1..120: mol_type = other DNA
aacacaccagtgtgtgaaggaaggtggctttttcacactgcaaatgtggaaacagcaaaaggctgaataggaatgacaacacaagatccacccccaaccctgccaaaaaaaaaaaaaaaa

SEQ ID NO: 57233 - DNA, 120 bp, synthetic construct
  source 1..120: mol_type = other DNA
aaattctgttctgaaggcacatgtctctgtcttaaatagactctgctctgggaatgagtggtagaaccaagtaagagttcccagagggacagtgttcccagagaaaagaattaaaaccat

SEQ ID NO: 57234 - DNA, 120 bp, synthetic construct
  source 1..120: mol_type = other DNA
aagaatacaatgaaatatgctgtatttcaagctttaaagattaaggagagcttcagggaaaataatctgttacagaagatagtcttttcataagagggtctccttgccatacttccacat

SEQ ID NO: 57235 - DNA, 120 bp, synthetic construct
  source 1..120: mol_type = other DNA
tggcattgtttgaacaaactcaaaacctaaactttaaaacaacaaaaaatggttatactcaggttatcctccatttaactaaattaaaagcagccagagctttcattatttttggaacat

SEQ ID NO: 57236 - DNA, 120 bp, synthetic construct
  source 1..120: mol_type = other DNA
taaaagctaatgcacggctttcacagcattcgtggtggtttaacagtatttgtcttgttcagtgtcccttcagcaatgaaagttatgtctgccatgtaagaatggttcttctacatatat

SEQ ID NO: 57237 - DNA, 120 bp, synthetic construct; identical to SEQ ID NO: 7831
  source 1..120: mol_type = other DNA

SEQ ID NO: 57238 - DNA, 120 bp, synthetic construct; identical to SEQ ID NO: 7832
  source 1..120: mol_type = other DNA

SEQ ID NO: 57239 - DNA, 120 bp, synthetic construct
  source 1..120: mol_type = other DNA
ctgggggtctgagagggaatggacaataactgctaataagtatggaggttttttttagcggtgataaaattgttctcaaattgactgtggtgatggttgaaactgcaaatgtactagaca

SEQ ID NO: 57240 - DNA, 120 bp, synthetic construct
  source 1..120: mol_type = other DNA
ttatacttatggctcatgatttttctatagctgtcaaactatgagtgtctgatctactactgccatgaaattgtctaataattcttaacactctcatgactctaagtaaaaccctttcac

SEQ ID NO: 57241 - DNA, 120 bp, synthetic construct
  source 1..120: mol_type = other DNA
ccagcagtctccttctagaaaatacacactacttcaactggttcatgttattcaatcagtcacaaacatttcagtgttccatcatgtgaggaaaaaatgtacagagctatgtcaggaggg

SEQ ID NO: 57242 - DNA, 120 bp, synthetic construct
  source 1..120: mol_type = other DNA
ttaataatcattcttgtagaagataacgtttttattgatcctgagatatttaactggaacaaaaacacaggcacatacaagcacgtgcacacatacacacacgtacacgagctttgaagt

SEQ ID NO: 57243 - DNA, 120 bp, synthetic construct
  source 1..120: mol_type = other DNA
caactacatatataatactagaaactgaactactgattactacttatcgtcttctttttagacagagtctggctctgtcacccaggctggagtgcagtggcgatatcttggctcactgca

SEQ ID NO: 57244 - DNA, 120 bp, synthetic construct
  source 1..120: mol_type = other DNA
cgagtttgctctttattgacgagaatatgagcaattccttaattgacagactgttgtgatgcatagtacagtgtgttattatattctacagtggaaataaaagggtttttcaaaaaagcc

SEQ ID NO: 57245 - DNA, 120 bp, synthetic construct
  source 1..120: mol_type = other DNA
aaagcaaaagtgaataaaatcagtgactattacacattgtatcagctgtgattaaaagtaaaaatgagccgggagctgtaatcccagcactttgggaggccgaggcaggtggatcatgag

SEQ ID NO: 57246 - DNA, 120 bp, synthetic construct
  source 1..120: mol_type = other DNA
acatatttggaactattttagcaatctgggaggaaaatcttggtatttttctcactccttataccacaatgaaaacttagaatagggtctgtcatgtgctattgtgaaacctctcagctt

SEQ ID NO: 57247 - DNA, 120 bp, synthetic construct
  source 1..120: mol_type = other DNA
ccactgaattgaaatgtcctccttattatatattacacactcatatttacttggttctatttatagactctcatctgtttgagaaatgtatattccagcaccaatactacattgttttga

SEQ ID NO: 57248 - DNA, 120 bp, synthetic construct
  source 1..120: mol_type = other DNA
aggactggcggtaaagccactgcctgagggaagcaaatataaatcccttgtaaagaaacatgcatgcttcacagttctcagagaatttcctccaataaggcatcaacacaaatgacagag

SEQ ID NO: 57249 - DNA, 120 bp, synthetic construct
  source 1..120: mol_type = other DNA
gaaacctaagagtcattgagaacaaagtaaaaagatttaacatgtatctaataagagcttcataaagaaagagagacagtgagatatttcccaacatgatgaaagaaatcaatccagttt

SEQ ID NO: 57250 - DNA, 120 bp, synthetic construct
  source 1..120: mol_type = other DNA
ctccatcaccactagtagtcattacccacttttataaaatactcctcacctatttttgcccaactctccaaaccgagtcccaggaaatcacttatctactttccgtttctatatagttgt

SEQ ID NO: 57251 - DNA, 120 bp, synthetic construct
  source 1..120: mol_type = other DNA
catgcaaaatcatggaaaaatcgatggcttacactttaaaagttttaaggagaatatatctctattgttttaaatacaggatcacgaaatcaaggaacactgtttaaaacagccatttat

SEQ ID NO: 57252 - DNA, 120 bp, synthetic construct
  source 1..120: mol_type = other DNA
gtgtactcataaaataactactgattctgaaatatctatgaaaaaattggggtagcatggatcttgtaagatagtccgtcataattctcatatttcctcatgcttgatatgaagagtgtt

SEQ ID NO: 57253 - DNA, 120 bp, synthetic construct
  source 1..120: mol_type = other DNA
caatcaatcaaccattcacttagtgaatgaaaactgggcttagacttacattgatttttaaaaaaaaataaagatcaaaattccttttgttctactcatgcccatataagccttttcttc

SEQ ID NO: 57254 - DNA, 120 bp, synthetic construct
  source 1..120: mol_type = other DNA
agattaaaggtaaagtcttattttaccacttgaaatatcctttcttccactcttccttcctcccagcttccctctctacctctctctctctttccaattgtctgaagtctttcagcctcc

SEQ ID NO: 57255 - DNA, 120 bp, synthetic construct
  source 1..120: mol_type = other DNA
tgttggaaaaagatcaccatggtcctgccatcatagaacatgcagtttgaatgaagtacagacacagaaaaagccacacactggtcaatgtggtcaatgagaatctgggtgaaatatagc

SEQ ID NO: 57256 - DNA, 120 bp, synthetic construct
  source 1..120: mol_type = other DNA
ctgcagcatacattgcaaacaatacaaaaagctccataatgtatggcctatttggtccttgatgttaaaatgaggtgatatttatatgtgtaactgtcatgtggataaatatactgagca

SEQ ID NO: 57257 - DNA, 120 bp, synthetic construct
  source 1..120: mol_type = other DNA
atcctttgaccatgccataatagatattacagagtgcatttactgcaccaaatcagaaaggtactgcattacaatgatataggcaaatggtgtaaataaaatagcagaaatgcatgtcag

SEQ ID NO: 57258 - DNA, 120 bp, synthetic construct
  source 1..120: mol_type = other DNA
ggattcaaaaccttgtttccctaccctataagcaccagtgtaggaaaatacataatttaatatcttcctcagtggtgcaacatgtctactgaaaactgagcagaatcaactatcaggttg

SEQ ID NO: 57259 - DNA, 120 bp, synthetic construct
  source 1..120: mol_type = other DNA
atttatcttcatccataacagattcctaaaaatttataagactacctctatctccacctcatagatgaggctccagtcatctcccgtaagcataaaagaccagtggccaaggcagtggag

SEQ ID NO: 57260 - DNA, 120 bp, synthetic construct
  source 1..120: mol_type = other DNA
gaaaatacacacatcatgaatacaggtacagacagttataaccaggaatgaaaagagaacagagcccatatgaagaaagtagcgtcagtacttaataatttctgaatctactggggctct

SEQ ID NO: 57261 - DNA, 120 bp, synthetic construct
  source 1..120: mol_type = other DNA
atggacccagactttcgtgtatactaatattaagtgctcaaatgtgcttgctcatccaaggcctttaagtgtattaactcagaaagcgtagcattgaggttaagagtacaagtgctggtg

SEQ ID NO: 57262 - DNA, 120 bp, synthetic construct
  source 1..120: mol_type = other DNA
gaggttgcaatgagctgagattatgccactgcactccagcctgggcgacagagcaatactccatctcaaattaataaataaaacaaaagactataattcatctttggttctcagtgcgta

SEQ ID NO: 57263 - DNA, 120 bp, synthetic construct
  source 1..120: mol_type = other DNA
aaatgcaaccacatatatccataatagagaatagttatgcatttagttaacacgtagccatattctgaagcccaaggttcagagtattttttacagtccaatcattttatagttaccatt

SEQ ID NO: 57264 - DNA, 120 bp, synthetic construct
  source 1..120: mol_type = other DNA
tcctatacaattcctagatgtacggaatatgtttgttatgaaaaaaacagtatgtagacaaatatgtaaacccatcttagggcatgtggactaagatttgggatagattttacttttcac

SEQ ID NO: 57265 - DNA, 120 bp, synthetic construct
  source 1..120: mol_type = other DNA
ggatgacttaatatactggacacatacttcatggagagggctttcaaaatatatatatatacacacacatatatatacacatatatacatatatacacacacatatatctatacatatat

SEQ ID NO: 57266 - DNA, 120 bp, synthetic construct
  source 1..120: mol_type = other DNA
tctttaaaagtgcaacagtgattgccattattatagaggatgaaatagcacatttggaaagcaatgtccatatatgaattgtcttcctcttagaactgttgagtttcatgtgtgacatcc

SEQ ID NO: 57267 - DNA, 120 bp, synthetic construct
  source 1..120: mol_type = other DNA
gcaaggggttactatatgctagcactgttctgtgtgttttataaatgttaactcatttaattttcataatcactcaatgaggtagatataaatattaactcctatgtttataaaaaccca

SEQ ID NO: 57268 - DNA, 120 bp, synthetic construct
  source 1..120: mol_type = other DNA
gtccccattaaaactattgtgtgggaccactataacctcatgcaagcttttgtatgaaatggcttaagacatgacttttgttcttaggcatttaatgcctaagaatcaatgctgatgttg

SEQ ID NO: 57269 - DNA, 120 bp, synthetic construct
  source 1..120: mol_type = other DNA
taacacatggctttaagaagacacagaatgtgaggaattgaaagcacttgttactatcctactgaaagtagcatagaggttgcaggacaattctatggatggccttgcaccaacccggtt

SEQ ID NO: 57270 - DNA, 120 bp, synthetic construct
  source 1..120: mol_type = other DNA
gagcactgttttttaatagccacttggaagtatagagctatggtgaaaactgtaaaacagggactaccacatcagttactgtgaaaataaatgaggtaattatgacaagcaccaacatca

SEQ ID NO: 57271 - DNA, 120 bp, synthetic construct
  source 1..120: mol_type = other DNA
ggttcctgggcatccttcaagacacagcattaggtgtcatctccgttgagaagctttcctcaactaccccccactcctcctaaatgttatttttttcttattcatatccccatatttttc

SEQ ID NO: 57272 - DNA, 120 bp, synthetic construct
  source 1..120: mol_type = other DNA
atgcaagtaactagaaaaacacacatcttacatacatcagcttccaagacaagtattcacaatatgtaggaagttccactgtggatccaaggggatgtagatggtacaatctctttagga

SEQ ID NO: 57273 - DNA, 120 bp, synthetic construct
  source 1..120: mol_type = other DNA
tagcctcctgcacaggaaacatcaagcttctttctagaaagtataagacagaataaccaaaagatctggtctggagccagaaaataagagtttatatcctgtccctgctacttggaggct

SEQ ID NO: 57274 - DNA, 120 bp, synthetic construct
  source 1..120: mol_type = other DNA
tgcgcaaaagactctaaaaacacgcagaaaggaatgggaagaaacaagataaatgtcccatagaaagtggcttttgggatgaatcttaaagaacgatgtcttcaacagagaacggaagga

SEQ ID NO: 57275 - DNA, 120 bp, synthetic construct
  source 1..120: mol_type = other DNA
ttaggataatataaaaccgtatgccaaagagaaaggaggaatccaacacagatgtagcttgaatctaaggtgtaggtccagccacccctcgtgtggtttccatagataaaacatcaacac

SEQ ID NO: 57276 - DNA, 120 bp, synthetic construct
  source 1..120: mol_type = other DNA
cttgagggtggacagtgggaggagggtgaggatcaaaaaactacctatcatgtactatccttactacttgggtgacaaaataatctgtacaccaaaccccagtttcacacaatttaccta

SEQ ID NO: 57277 - DNA, 120 bp, synthetic construct
  source 1..120: mol_type = other DNA
atgcgtcgtcacaactgctgtgagcctcactttcttaatctgtattaagtggcataaaaagctccttcttcctagagttattatgaggaacaaaggagattaagtctctacagagtctag

SEQ ID NO: 57278 - DNA, 120 bp, synthetic construct
  source 1..120: mol_type = other DNA
ggatgtcatcactgtattcaaaaaataataacactgctgacagaaccttttgtggtgagaaggatggcatgagacgggaggaaagacaaagttgataaagaggaaacaagggtcaaagca

SEQ ID NO: 57279 - DNA, 120 bp, synthetic construct
  source 1..120: mol_type = other DNA
tatgtatttcttccatttgaatctacctattactaccaggccaatcttctttaaatatttatttcataatggtattgcccatttcctaaacattaagaggaccaactctttctaaagctt

SEQ ID NO: 57280 - DNA, 120 bp, synthetic construct
  source 1..120: mol_type = other DNA
aagaccagcctgaccaacatggagaaactctactaaaaaaacacaaaaaattagccatgcgtggtgacacatgcctgtaatcccagctactcaggagactgaggcaggagaattgcttga

SEQ ID NO: 57281 - DNA, 120 bp, synthetic construct
  source 1..120: mol_type = other DNA
tactgatcggtgattgctaggtagctcctgtttttcccctttttggagttacatctgagaagccacatcagaacttcatgtagtataggagaccctggaattaacatgatgttagaactg

SEQ ID NO: 57282 - DNA, 120 bp, synthetic construct
  source 1..120: mol_type = other DNA
aaggacataacccagagagacagcaatcaggtcctcgaaagttttgggaatctgagtagtattctcataaatatgtacatgtatctcttcctaattatgaaatatcttgagcaagcagcc

SEQ ID NO: 57283 - DNA, 120 bp, synthetic construct
  source 1..120: mol_type = other DNA
ataagaggactttctatagctattcatctttctattgacagaatatcccagattctttacaaactatttagaaattgctgggtttgcctagatttccattaagtagcagtattccacagg

SEQ ID NO: 57284 - DNA, 120 bp, synthetic construct
  source 1..120: mol_type = other DNA
ctgcaaatgcaaagggccagtgctcattaatatgttcatgctgtgcatccacaactaaactgcaacctgcctaagtttgaagctcgcatgtcctagttgtttggtgtaaagattattatc

SEQ ID NO: 57285 - DNA, 120 bp, synthetic construct
  source 1..120: mol_type = other DNA
aatcaaaatgtacgttttctagcatgaaatttgctaacattaaaaagaaaaataggctggatgcagtggcttatgcctgtaatcccagtactttgtggagctgaggcgggtggatcacct

SEQ ID NO: 57286 - DNA, 120 bp, synthetic construct
  source 1..120: mol_type = other DNA
agccattgctgtttcaaaatgaataacttgtgtgcttgattacatagtctaataatttaaagcaccttttgttttatcttacaaaatatattataaaatattatctgctacatggtcttt

SEQ ID NO: 57287 - DNA, 120 bp, synthetic construct
  source 1..120: mol_type = other DNA
tggaggaaactggtaagtagaggagaatggagaatctagcataacaacaacaacatacaaacatatacatgagggaacaaggtgctgaaggaggtaaactagtttgattgaaggcatacc

SEQ ID NO: 57288 - DNA, 120 bp, synthetic construct
  source 1..120: mol_type = other DNA
cagctggacattgagtggaacacaccagcagaaaaacacactgacagacactgtgtttgccatcgatggcagaacgacacggccatagatggcagaacgaagcggattacatggaatttg

SEQ ID NO: 57289 - DNA, 120 bp, synthetic construct
  source 1..120: mol_type = other DNA
ctgggcatgtccacagcatgcaaaggccatgcccaacagccacctttaaattgctttgccattttaaggaacacatgaaatcacattctactgagagtttcaagtgtgaaatacgcaata

SEQ ID NO: 57290 - DNA, 120 bp, synthetic construct
  source 1..120: mol_type = other DNA
cttgtgtcctaatgtttataatctgtcttcctcctcaggatgtcatctttgtgagagcaggtgcaatgtttgctttgtttattgctgtatttccagaaaattgaatgataccatagctag

SEQ ID NO: 57291 - DNA, 120 bp, synthetic construct
  source 1..120: mol_type = other DNA
tcagtatgctccaggatgttagaatatagtgcgtagtagttgcaggcactgctaccagggttcatctgtatcatacaacctgcaagtctttattttttgaggtgatcctcttaaaaaggt

SEQ ID NO: 57292 - DNA, 120 bp, synthetic construct
  source 1..120: mol_type = other DNA
cagaagggaccttacagatgatcaagttcaatgtacaaatgagagactggaaccacagaacttttgacacctattcaagatttcaaagccagctaaccctagaacacaggtcttcccatt

SEQ ID NO: 57293 - DNA, 120 bp, synthetic construct
  source 1..120: mol_type = other DNA
gtaaactcacttactacttaaatgtatcaatgaccataacaaaaggcatttattttcattgctgtatcaatatatataggcatagctagggtgaaggaaaaggttttattttatgcagca

SEQ ID NO: 57294 - DNA, 120 bp, synthetic construct
  source 1..120: mol_type = other DNA
aataaagtacctgtctacatataaccctctttttgagtatccacagtagaaatttccattgcaccatgaaacatgaagtttttatacaggaactgatttattcttctctatggatccagt

SEQ ID NO: 57295 - DNA, 120 bp, synthetic construct
  source 1..120: mol_type = other DNA
gatgtcttggaattgaggaaaaagagtattaacttattgtactgtacttttgtaatcacctttgtgttcttttcgaattaagcagaattactaacaaaaacatttcagtaaaatgctcag

SEQ ID NO: 57296 - DNA, 120 bp, synthetic construct
  source 1..120: mol_type = other DNA
caaataactaacaggcattattctagaagcttcataatgtccagaatgactacaactgcaactctcacgacagttaatggggcaatctgcttggagcacacagccacagaaaaccaagaa

SEQ ID NO: 57297 - DNA, 120 bp, synthetic construct
  source 1..120: mol_type = other DNA
gagtcttagcaaaggttgagaaagctgcttaagatcacacagaaacaggatatggtggttctgactgattcactttagcgtcaggcctgtgtctcattccaatcctttattctttggtaa

SEQ ID NO: 57298 - DNA, 120 bp, synthetic construct
  source 1..120: mol_type = other DNA
ggtaggagtgtgttggagagaagcaccaaatgctagctgttataatccctgtgttactcatctctcaaatgtcccctttctatttcttacagagccaacgctgttgaacagaaaaggata

SEQ ID NO: 57299 - DNA, 120 bp, synthetic construct
  source 1..120: mol_type = other DNA
tccaataaaataatggttcccatgacaatagatgctacctcagcagaggcaagttcagagtacaggcagtacacatatcttggcttaataagcagggaggaaactacactggcagtatta

SEQ ID NO: 57300 - DNA, 120 bp, synthetic construct
  source 1..120: mol_type = other DNA
taactactgtgaaaaacatgtgagggatgcatattaccagattaacctgagttatccaatgtgacattgtcatgagactgtgatttggactgtcatctatatcaacttcttaaggcctcc

SEQ ID NO: 57301 - DNA, 120 bp, synthetic construct
  source 1..120: mol_type = other DNA
cctgcctcagcctccctagtagctgggactacaggtgctggccaccacgcccagctaattttttgtattttgtagtagagatggggtttcactgtgttagccaggacggtctcgatctcc

SEQ ID NO: 57302 - DNA, 120 bp, synthetic construct
  source 1..120: mol_type = other DNA
aagaatttgggtggaaataaaaagctaattattacataactagtgagggagaaaactgtgtaaattgttctccttttgcatggaagttcctaacttctagactagttagccattgcttca

SEQ ID NO: 57303 - DNA, 120 bp, synthetic construct
  source 1..120: mol_type = other DNA
aggtagacaggttaaattgccattgcaacacaatgtgaaaactactttatttgtaataagtggcagctttacttcaaagatggtgccaataaaccctcccatccctgtatgtccgtgata

SEQ ID NO: 57304 - DNA, 120 bp, synthetic construct
  source 1..120: mol_type = other DNA
caaaggcaaaaatacaagctgtattatttttcttattgttgttgttgttgttgttgtttgtttccaagcaaactctggctctatggcccaggcaccatctcggctcactgcaacctccgc

SEQ ID NO: 57305 - DNA, 120 bp, synthetic construct
  source 1..120: mol_type = other DNA
tatacctcctgaaagactccgtgtccacaaatcactcagctcccttcctcaaatcaaaatgctcaacctctgagtacagctgatctcagctagttattagcatgcagctttaacacaata

SEQ ID NO: 57306 - DNA, 120 bp, synthetic construct
  source 1..120: mol_type = other DNA
gtgtggttattttctgtgttctcaccatttggatattatttcttactctcttcacatctctttttcactcatctttagaattcttcaaaagactaggctcatgttaggtcacatattgga

SEQ ID NO: 57307 - DNA, 120 bp, synthetic construct
  source 1..120: mol_type = other DNA
atgctagtgtattgactaacctaatttatcctattcagtttcccacactgaggacagagaaaaaacaagcattttatacacctgtctaaagctattctgatcactaaaatttgtgcactc

SEQ ID NO: 57308 - DNA, 120 bp, synthetic construct
  source 1..120: mol_type = other DNA
gagccaccgcgcctggccgctactgagctctttagtctgcatcagatcttcttaatgctaaatactttacacacatagttttctcacttagtgtttactgcatgccattatcattatctc

SEQ ID NO: 57309 - DNA, 120 bp, synthetic construct
  source 1..120: mol_type = other DNA
atacaaagtccagaaagagacccacaaatatactgacaactggttttcataaaagtgcaaagtcaattccgtggagaaatgagtcttttccacaatggtgttaaaacaattggatgccca

SEQ ID NO: 57310 - DNA, 120 bp, synthetic construct
  source 1..120: mol_type = other DNA
gcttctcttctgtaaagttactcttttccaactctttacatattatacttttcggaaaaaagtcaccacgcttatttcacacttaaaaagtgggaagccatgcttcacttatttcagggc

SEQ ID NO: 57311 - DNA, 120 bp, synthetic construct
  source 1..120: mol_type = other DNA
gcacattgacgcaattaaaaacaaacattcctacataaactcatttctataattttacctttgtcttagcaacttcactttttgacatagtgaacaactcatatttcacatgtactcacc

SEQ ID NO: 57312 - DNA, 120 bp, synthetic construct
  source 1..120: mol_type = other DNA
gccaatataaaaaatactctacattaattggtaattgtgaaaagagactcagggagagagtctgaatcaacaaaagaggaaaatataggaaggaaagggaaagacaaagaaggagggtga

SEQ ID NO: 57313 - DNA, 120 bp, synthetic construct
  source 1..120: mol_type = other DNA
actaaaagggaagaacataactacatgacatcataagaagtcctgaattagaagcgtatatttgaaaggtcatgcatcctgagctgccaacagcttaacaaccagaggcagaggccagct

SEQ ID NO: 57314 - DNA, 120 bp, synthetic construct
  source 1..120: mol_type = other DNA
agaattccctgtgacaatcaagcaaatagtgaaatagtttctgctattatgaatttatcacttactcagtgtatgaccatgggcaaatatcttcacctcaatcctgtgaggcaggtacta

SEQ ID NO: 57315 - DNA, 120 bp, synthetic construct
  source 1..120: mol_type = other DNA
gtggcttcagtatttcttgagaaacacaaatgatgaccctgatttgtatgatcaatcagcaagttttcaaaaaggttactgagtatatgacagtaatttctagagccaaagatatacccg

SEQ ID NO: 57316 - DNA, 120 bp, synthetic construct
  source 1..120: mol_type = other DNA
agttcttccatcatgcctttcttagaatatcctaagtctagatgaaaatatccatgtccacggtgaaaacctatgcagaaaactagcctcatggtctaacctctgtcacagatcgagctc

SEQ ID NO: 57317 - DNA, 120 bp, synthetic construct
  source 1..120: mol_type = other DNA
cttcaccaagaacctctactggctccttgatctgaaactcctaacctttagaactgtgagaagcaaatgttcgttgtttaagcgatccattgatggcattttgctatagcagccaaaact

SEQ ID NO: 57318 - DNA, 120 bp, synthetic construct
  source 1..120: mol_type = other DNA
gtatgactgggaggtaaagacgtagagtcacgctgttcagactacatattcaaaaagcttggcagtgaaatgccttccagataaatttgtagttggatacagcacaattctgacagttgg

SEQ ID NO: 57319 - DNA, 120 bp, synthetic construct
  source 1..120: mol_type = other DNA
tatatggctaaggttattagcttatatatggtgtctttaaaataattcccatttgcagttacatttcaaactgccgatttgacgcaccagtcaggaggaatgccacgactcctgctgtgc

SEQ ID NO: 57320 - DNA, 120 bp, synthetic construct
  source 1..120: mol_type = other DNA
tctcatcacagtctattaaaaaaacaaaatttgttgttatattaaacgttatttttcttgacccttattctcatttgttatgaatatctctgagggaaaaacaagagcctatgtagtggg

SEQ ID NO: 57321 - DNA, 120 bp, synthetic construct
  source 1..120: mol_type = other DNA
aaaattacagtcagtcccactgacagagccagatgcagaaccctgggaatgtaggagaccaactaaaaggcaaagcaaatgaatttggggattgaaatgttgagtctgaagtttttgaag

SEQ ID NO: 57322 - DNA, 120 bp, synthetic construct
  source 1..120: mol_type = other DNA
tctacctattgcctcaatctaactgatatttatagaacactaaatccaacaattgcagaataaacatttttgtcaagttcacacaaaacattcaccaagaatagaccacatgcagggaca

SEQ ID NO: 57323 - DNA, 120 bp, synthetic construct
  source 1..120: mol_type = other DNA
tccgtgtgcaggtttttgtgtggacataagttttcaattactttgggtaaatgccaaaaatgcaattgctggactggatagtaagagtatgtttaattgtgtaagaaagtgccaaactgc

SEQ ID NO: 57324 - DNA, 120 bp, synthetic construct
  source 1..120: mol_type = other DNA
tcctttcaataacaccacattgccttgactactgcagctttacagtaagtcttaaatttgggtactgtcaattctcagactttgttctccttcaatatatgttagttattctgagtcttc

SEQ ID NO: 57325 - DNA, 120 bp, synthetic construct
  source 1..120: mol_type = other DNA
tcactcaagctcctgtgtgaagaacagtctttatggataccagttacaagagtaatcttcaaccatgactgcattctgaaattatctgcaatgggatgcttcaaaaacactgatgctaac

SEQ ID NO: 57326 - DNA, 120 bp, synthetic construct
  source 1..120: mol_type = other DNA
taaaaatacaaaaaaattagccgggtgtggtggcgggcgcctgtagtcccagctacttgggaggctgaggcaggagaatggtgtgaacccaggaggcagagcttgcagtgagccgagatc

SEQ ID NO: 57327 - DNA, 120 bp, synthetic construct
  source 1..120: mol_type = other DNA
ctacctatagcttcaacctcatctcccacaatgtaactccgtaccctctgcgtttttcatattggtcttcagttactttcatctaccccatgcccacaaatactttacatcagaaaactc

SEQ ID NO: 57328 - DNA, 120 bp, synthetic construct
  source 1..120: mol_type = other DNA
aaattgtaggctgaaattcaaagtgtatatgatagtgcactgtaactcttagctataaatagttcttataaagcctaataccctttaattatcaatcacagataaagagtctgaggtcat

SEQ ID NO: 57329 - DNA, 120 bp, synthetic construct
  source 1..120: mol_type = other DNA
cacaggcatacaatgattcaggtatgtctagaaattattagtttgctcatattaattataggtttcaaagagtatacgttagtattgatatagtcaagaaacccttctgcaataactatg

SEQ ID NO: 57330 - DNA, 120 bp, synthetic construct
  source 1..120: mol_type = other DNA
agctttctctaatatgtgcataaagtgtactgacaaagtacttttatcccatggcctagataggaaacacacagacacacacacacacacacacacacacacacacacacacacccctaa

SEQ ID NO: 57331 - DNA, 120 bp, synthetic construct
  source 1..120: mol_type = other DNA
tgcagtgagctgagatcgtgccactgcactacagcctacgcgacagagtgagaccctgtctcaaaaaaaaaaaaaaaaaagaaagagagaggaaagaaagaaagaaagaaagaaaggaga

SEQ ID NO: 57332 - DNA, 120 bp, synthetic construct
  source 1..120: mol_type = other DNA
ggagcaaggcctttccagccaccatatgaagccattgaaattagggtttattcccagttcactgcatatctgcacatatcacaacagctgtcaccaaataacatcttgcacatcaataaa

SEQ ID NO: 57333 - DNA, 120 bp, synthetic construct
  source 1..120: mol_type = other DNA
ttcagtggcactagtacctatgtctcatgtttgttgcatattggtgatttcacaagctagattgtctgtttaattcctaatcacactaattacttgaaagagtaatccaggaaatgtgac

SEQ ID NO: 57334 - DNA, 120 bp, synthetic construct
  source 1..120: mol_type = other DNA
aaaccactaattttccacttgtaaaagcctgattcaaaaagcaatttactttaaggtttacttaagctttgcaactacattaaaatatgatagtatatacacaacagcttgttaacaaga

SEQ ID NO: 57335 - DNA, 120 bp, synthetic construct
  source 1..120: mol_type = other DNA
agattggaaactgagtgtcaaatcttgctttcactcactcctaaagtgaatgaatggaagtaatattcctaatttacatggcaaacagataataccaaatgtgtgtatccgtgtgtgtgc

SEQ ID NO: 57336 - DNA, 120 bp, synthetic construct
  source 1..120: mol_type = other DNA
gtaatcctaatgaatacacctgaaaggcaagggaagtccaaactccaaatgctgtcacagtgcaagttttccttgactgcaaagaggagattttatagagaaatatatccatacatatac

SEQ ID NO: 57337 - DNA, 120 bp, synthetic construct
  source 1..120: mol_type = other DNA
cacacaccagtaaaaaagccagcacagataaactgtgcaactcaacatcaccatctagtgacaaaattcttaacacgtgataaagccaagcgaaaaagaatacatttcagagacattctg

SEQ ID NO: 57338 - DNA, 120 bp, synthetic construct
  source 1..120: mol_type = other DNA
accagagatttgacctagagatgatgcacttttttcctgtccttaaaatgctttttctttgattatcattttcagaaatgctgtataagatttccacacccatggcactacaatagacta

SEQ ID NO: 57339 - DNA, 120 bp, synthetic construct
  source 1..120: mol_type = other DNA
ttaaatgcagcagtaattttcaatcctctgagaatgtgagaatggctgtctcaccattccatctctagccatctgtgagaatggctgtctcgctattccatctctagcactcaaaaactt

SEQ ID NO: 57340 - DNA, 120 bp, synthetic construct
  source 1..120: mol_type = other DNA
tcaaagcttagtgatttcttcacctacttgttagcgtatcatctcttcccccatctcaatctcaaaagtcacttctatattccactggactttgactgtttcatttatttcccttagctc

SEQ ID NO: 57341 - DNA, 120 bp, synthetic construct; identical to SEQ ID NO: 7833
  source 1..120: mol_type = other DNA

SEQ ID NO: 57342 - DNA, 120 bp, synthetic construct; identical to SEQ ID NO: 7834
  source 1..120: mol_type = other DNA

SEQ ID NO: 57343 - DNA, 120 bp, synthetic construct
  source 1..120: mol_type = other DNA
tcataatcatctatacagaagtaccatgtatctttgtgtagaagctactgtttccattaaatttaattacctccccctgtggttttaaatagaagtggcttcaaaatgagggcagcttct

SEQ ID NO: 57344 - DNA, 120 bp, synthetic construct
  source 1..120: mol_type = other DNA
gtgcactgaggcttaacatttatgcagcttcaaaaccaaagtacagcctcaagggaagtctctccactgacaaattaataccttagagaacagagctgaatggtggcaatgaactcattt

SEQ ID NO: 57345 - DNA, 120 bp, synthetic construct
  source 1..120: mol_type = other DNA
aggtgaaaattagattagatcaggttcttagaagaattttaagattgagtaaatatgacataagcagtttaaatttcataagtgtttctactttttggtaaaatagcaatactagactga

SEQ ID NO: 57346 - DNA, 120 bp, synthetic construct
  source 1..120: mol_type = other DNA
ccccacccccagacaggctccagtgtgggatgttccccaccctgtgtccatgtgttctcattggtcaattctcacctatgagtgagaacatgctgtgttcggttttctctccttgtgata

SEQ ID NO: 57347 - DNA, 120 bp, synthetic construct
  source 1..120: mol_type = other DNA
ccacactgagcgctcagtgatgccaggaattgaagacagccaaatttctgatttagctgaaataccgtgtttcagagtaccttcactataatgagtagaagcggcaaccttaataataat

SEQ ID NO: 57348 - DNA, 120 bp, synthetic construct
  source 1..120: mol_type = other DNA
aataaaatactggaacaaaacgcaggcctgctagcctagacaatgtggagcaagaaagtgggaatacacaggaaaaatggaaggtcacaaaggtactaaatttaatgccgaccagacatg

SEQ ID NO: 57349 - DNA, 120 bp, synthetic construct
  source 1..120: mol_type = other DNA
tggtggcctcctgccaaatgaatccccatgggttgagggaaggtctagagtttcaactgtgatagatttcatagtgttttatatctcatctgtgttaaggattctataaaagtataatga

SEQ ID NO: 57350 - DNA, 120 bp, synthetic construct
  source 1..120: mol_type = other DNA
gagtataatgaaaaccatgatccttttccttaaaaaattacattttcacaaaagtacatatgcacaagtacacaatatgctatgctatatacaatttcagtgggccaatacagctcctga

SEQ ID NO: 57351 - DNA, 120 bp, synthetic construct
  source 1..120: mol_type = other DNA
aggcagttcaatgttggttactacaaagcttttctttaggacataaagtaaattgggaaaaggtaatacaagtacatgcatttctcatgtagttagaatttcctaaggtctaggttcctc

SEQ ID NO: 57352 - DNA, 120 bp, synthetic construct
  source 1..120: mol_type = other DNA
cataatgtatggttatattttgattgagtctcatatggtttacatgataatcaaatgaaacacagtatcattatttcaatatatattgtggagttctatgtcccatgtactgccaaccac

SEQ ID NO: 57353 - DNA, 120 bp, synthetic construct
  source 1..120: mol_type = other DNA
gtgcatgatgtactgtaataacaccacccagtgtgtgtaagattaaagttagacaccaggtaaactcacagatgtaaacagtcttttctctagaacatacttagaaggatcacttatttt

SEQ ID NO: 57354 - DNA, 120 bp, synthetic construct
  source 1..120: mol_type = other DNA
gatttacaaaaattgttagcatgaagataattatgtcacagtccttggactccatctctgattgtgtgcataaatcagaaaatgtcagctgtgttttcccttaataattatccttgcagc

SEQ ID NO: 57355 - DNA, 120 bp, synthetic construct
  source 1..120: mol_type = other DNA
agcaacggtatgtggctcagagttgtgggtattcaaagacaagtgaaaaacagaatatattttcctagaacattaggttcacggaaactattttggaaaaaggttttaaaattttgctca

SEQ ID NO: 57356 - DNA, 120 bp, synthetic construct
  source 1..120: mol_type = other DNA
ctccagtgagctagattactacctttctatagttttccatgctcacacaacacgttttatgttgcagctttttgtgtggggtatgtgtgtgtacttcttgtttctcagtggggtctactt

SEQ ID NO: 57357 - DNA, 120 bp, synthetic construct
  source 1..120: mol_type = other DNA
aaacccagaacaccctctcccttaatcaacgaaataggagtaattttttaagcccagtgctgtaatattttggttgaatctgctttgggccaaagtgaagcatccaagcggaaaatgggg

SEQ ID NO: 57358 - DNA, 120 bp, synthetic construct
  source 1..120: mol_type = other DNA
tcactcatcattattccctgaactgatccttttatgagattatcacagagacaagagaagattgaccaaaagattagtgaccctttcatctcatcataatccacaagtggcttaacttgt

SEQ ID NO: 57359 - DNA, 120 bp, synthetic construct
  source 1..120: mol_type = other DNA
attgtcagtgcatatgttaattgcagagaggaaaatattctagagcttaattttcaaatggtctttcaaaggaagatcatactaggtggcattcaagttgattttctctctcactaatat

SEQ ID NO: 57360 - DNA, 120 bp, synthetic construct
  source 1..120: mol_type = other DNA
ttcagtataggcaacaggattttatcttaacttcccttagcataatctgattgtctggcccaaagccatcatctatggagccttctgaacaatccccagtggacattacaatattgactg

SEQ ID NO: 57361 - DNA, 120 bp, synthetic construct
  source 1..120: mol_type = other DNA
ccgtgtgattacagagttggaacttttagccccatcccctatcctaggagaagggagaggggctgaagtttgagttaaaaatgaccaataatttgatcaatcatgcctacataatgtaac

SEQ ID NO: 57362 - DNA, 120 bp, synthetic construct
  source 1..120: mol_type = other DNA
ctgctaaccactatgggtctctcgagtactgttctgtcacacagtgaagctcctttctaccttgctctccctccagtagcctgcgtacctcattcttcctggacatgggacaagaactca

SEQ ID NO: 57363 - DNA, 120 bp, synthetic construct
  source 1..120: mol_type = other DNA
taaactgttttcctgagttctctgagccattccagcaaatgattgaacctaaggagggtgctcttgcaacatctgatttatagatagttgttcagagacacaagagacagcctggacttg

SEQ ID NO: 57364 - DNA, 120 bp, synthetic construct
  source 1..120: mol_type = other DNA
acggattgccatgaatttagaactggactatgtgaatttagaactggactatgtgaatttagaactggacatggagttttatatttttcctcaaaataactgtctttcttcccaggaacc

SEQ ID NO: 57365 - DNA, 120 bp, synthetic construct
  source 1..120: mol_type = other DNA
ttaaaatattcaatgttaatgaaaattgttatacccctctaacgaacaagagaaaatatcacttctttttttttgagacggagtctcgctctatcacccaggctggagtgcagtggcgtg

SEQ ID NO: 57366 - DNA, 120 bp, synthetic construct
  source 1..120: mol_type = other DNA
agccctgtataaaaatttaatgattagctctagagcattagataaccaaattaccatattattgtgatactgaagtcacttaaataatgtgtagtataatacaagattatgcaaaacatt

SEQ ID NO: 57367 - DNA, 120 bp, synthetic construct
  source 1..120: mol_type = other DNA
aagcaatggaaaggaagaaagagcaaatgcattcagcagagaatggtgataaaaaataatggacagctcattctccacagctaaaattgcacaagctgagctgtctaagggaaatgagtc

SEQ ID NO: 57368 - DNA, 120 bp, synthetic construct
  source 1..120: mol_type = other DNA
gaaaagctgagggtaaaacagaactttaggatctttcataagttaaatatgtcataatattttgtcatttcacaaagcaatgatgctcaaggagatattatttgaagaacagatagccat

SEQ ID NO: 57369 - DNA, 120 bp, synthetic construct
  source 1..120: mol_type = other DNA
agaaagaaaaagaaagtgcagctacctgatgcctgaaggaaaccaaatgaaagaatgtggaaattaagccattcaagcattcaaggaccagcactaggaaatttcaagtagctattacct

SEQ ID NO: 57370 - DNA, 120 bp, synthetic construct
  source 1..120: mol_type = other DNA
atttattattgaaaatcaattggctgtcaatatccaaacccctttgtatcatgacatcacttctaggcagaagtctcccctgatacccagggagcccattctgagtaatggttgcacaga

SEQ ID NO: 57371 - DNA, 120 bp, synthetic construct
  source 1..120: mol_type = other DNA
tagtgttctcccactttccagtattgttttgctttacaaaactatactcagacaattaaaagaaaatgttataataaaccagtccatgtggaggcaaatctgtctcatccttgcaaaaaa

SEQ ID NO: 57372 - DNA, 120 bp, synthetic construct
  source 1..120: mol_type = other DNA
cgaaaagtttattaagagaaggaggagcactggccaagcctaggagatgcaaatccaacgcagtttatgcttcccaacagagaacccatgaatgctttatgggtatgacaagaccttgat

SEQ ID NO: 57373 - DNA, 120 bp, synthetic construct
  source 1..120: mol_type = other DNA
tcaagcttctgtgtgaacacaagttaaaggtgagagactgggctactgttcttggagacgacgacatggatgctaagaacttggatataaaaatgcaacagaaacggagacatcttagaa

SEQ ID NO: 57374 - DNA, 120 bp, synthetic construct
  source 1..120: mol_type = other DNA
tacatgtttcaaaaaatatcctaatatccttgatattccaagtgaaacatttagcagagacttctgaggaccaccagggcacactctggctaaccagatctctgatgaaggaggagtatc

SEQ ID NO: 57375 - DNA, 120 bp, synthetic construct
  source 1..120: mol_type = other DNA
caagaaacaggcaagtgtaaacaagtgtttctctgagtcctgtgagctgcttcaacaaattagtcaaacccaaagaggtggtcatgggaatctcaatttgaagctagctggtctgaagtt

SEQ ID NO: 57376 - DNA, 120 bp, synthetic construct
  source 1..120: mol_type = other DNA
agtacatctgtttttcctgtttgactagtcccattaacattggctgtaatcagaattttgtcagggaaatcttcagttaagatgcttgaaactcaaactttatttctgtataccaaagac

SEQ ID NO: 57377 - DNA, 120 bp, synthetic construct
  source 1..120: mol_type = other DNA
gtctcttctttggtctcttgaacatggtgctatcactactgaagtcaacaggctccagcaagacaagcaacgacaaggattcctttctctaagtctctttagtatactagtatgcaaaac

SEQ ID NO: 57378 - DNA, 120 bp, synthetic construct
  source 1..120: mol_type = other DNA
atgaggcacctgagtactggacaaatctttaagttaaaaataaaatataaccagtgacattctcagtgcacaacgacattccatacaaatgacaaaccagaaactgaaatttgcaactga

SEQ ID NO: 57379 - DNA, 120 bp, synthetic construct
  source 1..120: mol_type = other DNA
gtgctcttcaatatcaataataaaaagacaatataacaacaaaaaaatggacataagacatggagttatggcacacaagagaaacatgcaaagccctaagcataaaacgatgttcaaact

SEQ ID NO: 57380 - DNA, 120 bp, synthetic construct
  source 1..120: mol_type = other DNA
ctgtgcacactgtgtgatatgacttgttcaaacagagacctgacagtattgtttaaacaatgtaactcaaaaactcaaattaattggtatatgtcaaacataatatcccacagttagggg

SEQ ID NO: 57381 - DNA, 120 bp, synthetic construct
  source 1..120: mol_type = other DNA
gaatagatcaatatgtactgcccacaaatcagttaaattctgccttgtatgtaacaactagcagaagacttttctagaagtctttatacgatgaacaattcattataacgctaagttaca

SEQ ID NO: 57382 - DNA, 120 bp, synthetic construct
  source 1..120: mol_type = other DNA
atgggcagaaggaatactgaatagtgaggatggcgactcgagaagctgttctaagaagaaaaatacttcgagaaggaaggtatccacagtgccaaattatacgaagttctggtaaggaaa

SEQ ID NO: 57383 - DNA, 120 bp, synthetic construct
  source 1..120: mol_type = other DNA
caaatgagcgtaaagatcaataacaattatgtgccaattatactatgaatatgtaattggcagaactgtatgggcagaccatgaagactgagcaacagcaattctgatcgaaccatgccc

SEQ ID NO: 57384 - DNA, 120 bp, synthetic construct
  source 1..120: mol_type = other DNA
ctggaatctttgtttcattcatttaagtagccacgaggtgccaggtattgttgtagaccctgaagttacagttgtgaacaaaactgactaagctactgctctcaggaaacttgaacccta

SEQ ID NO: 57385 - DNA, 120 bp, synthetic construct
  source 1..120: mol_type = other DNA
agtgaacactcctctacatcttctgtcttatgtactcaaaaaaggaagaaccatatgaataattgtgggttatgccactgttgatacgagaagaaaactgctttgaaatgaaggaaagat

SEQ ID NO: 57386 - DNA, 120 bp, synthetic construct
  source 1..120: mol_type = other DNA
aagtgtaaaagttgtcagaatctaaatggagtcaacggcattaaataccttgacaaatggggccacagtaggccataaaggaagggttctcacatacactcttgataacatactatcttg

SEQ ID NO: 57387 - DNA, 120 bp, synthetic construct
  source 1..120: mol_type = other DNA
atgttgcaagtggaaaatggccaccctgcagcaccaagctttcattttattcctgctcaaacagcccagaatgaaaaagaatctcttgtcatagatatctaggagagaatctgatttccc

SEQ ID NO: 57388 - DNA, 120 bp, synthetic construct
  source 1..120: mol_type = other DNA
aatatgaacatcaaatacaatgtgtatgcatgttttcctgtcaatctgtcttctgtcagattaattcacatgccccagccactgaacataagaggttaaaggaaaaggtttttcttcccc

SEQ ID NO: 57389 - DNA, 120 bp, synthetic construct
  source 1..120: mol_type = other DNA
gcattttacgtgggttccaccgattagtgtttgaataggggaacgattagaaagacagctgccattgtatgcccattcgggaaaacagcaaaactcacatatttatttgctatgagcacc

SEQ ID NO: 57390 - DNA, 120 bp, synthetic construct
  source 1..120: mol_type = other DNA
taccatcctcagtatcttgctgctcagtacttctccatggtttttccatatacattgttctctatccactatcatgatgtgcttccatatgtagtaacagaaacctcggagcatccccct

SEQ ID NO: 57391 - DNA, 120 bp, synthetic construct
  source 1..120: mol_type = other DNA
aacttttcgagaaaaaaatatttatcatcatcatcattgtcactactctgtggagaggtcctcagcatcatctcttggtacttttcttcatgctccagtctacgacttcagccatgcagt

SEQ ID NO: 57392 - DNA, 120 bp, synthetic construct
  source 1..120: mol_type = other DNA
cacagttgtattctcagcaccaaaagcagtgtttaacacacactaagatttcagtaaatattcaattgttatttattgcatacttactacatgtgtggcactatttcaggagctgaagat

SEQ ID NO: 57393 - DNA, 120 bp, synthetic construct
  source 1..120: mol_type = other DNA
gagtttccttttcatgaatttccagtgctatggaaagctatcacatctaccaacaacattaataaaaattggagaacatttgcttcggtcaaaatattttctgccttctctctgtacatg

SEQ ID NO: 57394 - DNA, 120 bp, synthetic construct
  source 1..120: mol_type = other DNA
caaggtctacaatatgtgtaaatgagctttatactctgaagggatttctaggtagtcacatttcacagtatatttttccctctctaatttttttccctctgctgaaattttaagctcgca

SEQ ID NO: 57395 - DNA, 120 bp, synthetic construct
  source 1..120: mol_type = other DNA
ttactctgccatctctccccactccaacagccttcatttgagaacttgctggatagagggcaggagatgatcatcattcatgataaattcaaattcaaaatcagtctttatgaggtggtt

SEQ ID NO: 57396 - DNA, 120 bp, synthetic construct
  source 1..120: mol_type = other DNA
ttacaagaaaataaaagaggtcacgtgacttgcatgcctgagtttctagttggatatctgcatgctctatacaaacactgcatttttcacatactgaaagaggtatttagttgcaaagaa

SEQ ID NO: 57397 - DNA, 120 bp, synthetic construct
  source 1..120: mol_type = other DNA
acacataaagtcaactcccaaatcatatgtgttttatctcctaaatcaattcaagctcatcctccctcctagtcttcatcacctgtcttccaactttctaaacccagtcccagagacctt

SEQ ID NO: 57398 - DNA, 120 bp, synthetic construct
  source 1..120: mol_type = other DNA
tactgaagtcagaatttccaattagtactagaagaatattaaactaccaagtgaagatattcctgggcaataatttcagaactgccattcttaaggcacttttaccggtcaaacacatgc

SEQ ID NO: 57399 - DNA, 120 bp, synthetic construct
  source 1..120: mol_type = other DNA
tgtaagtgtacacaatcactattgaatacagtgatgttaaatcctttttccatgtaatgcagatagaatttatccagattattatttcaaaaacatcttaatgactgcacaatataccac

SEQ ID NO: 57400 - DNA, 120 bp, synthetic construct
  source 1..120: mol_type = other DNA
agatttaggcttgatagtctttaagggctttctaagtttaaaaattatatcacactctggggactgttgtggggtggggggtggagggatagcattaggagatatacctaatgctaaatg

SEQ ID NO: 57401 - DNA, 120 bp, synthetic construct
  source 1..120: mol_type = other DNA
taatctcagagaaatgctgttttgctcctacacctcacctggaaatattaggtgttcatagaacatctaatgttcatatattttgtgagggtgtatttttaaagtccacagataccagtg

SEQ ID NO: 57402 - DNA, 120 bp, synthetic construct
  source 1..120: mol_type = other DNA
gctggggttacaggtgtgagccaccatgtctggtagcatttttaggaatcaaactttatctaagatttcctcttacaggcccctaaagaaagggttagccaggaaagaaaacttaggaat

SEQ ID NO: 57403 - DNA, 120 bp, synthetic construct
  source 1..120: mol_type = other DNA
aaacagtaactgctgctttaagaattttcttcccttctaaactgtgaatgtgttgagttgcgggattcctgacttttcaaaaatctttcagtttatgatatacagtaccaggtaggtagc

SEQ ID NO: 57404 - DNA, 120 bp, synthetic construct
  source 1..120: mol_type = other DNA
attgagggtgattaagtaacctgcttaagatctcacagttaatatgcaaaaagaattgaattggaactctgtttttctgagtatgggacttatattgaacctgatccaaagatgagggct

SEQ ID NO: 57405 - DNA, 120 bp, synthetic construct
  source 1..120: mol_type = other DNA
ctatacctagtactttgctcataaagcagaaatttaactctgagagaagtgggccattgtcactatcctcagctctggagcagtggcccagagatttttcccagaagacacaagccataa

SEQ ID NO: 57406 - DNA, 120 bp, synthetic construct
  source 1..120: mol_type = other DNA
ccagtcgctagtaacaagtcgccctcctctagagggggtttagtgtccggcaagaatagctacattatgtaagatgttcagtcttcaatttaaaaaagtatgagccatgcaaagaaacag

SEQ ID NO: 57407 - DNA, 120 bp, synthetic construct
  source 1..120: mol_type = other DNA
gtagaacaaggtatattacactataccttcaggaagctcaatgaatgtgaagtatgctaaatgtaaagagatccacacaaagaacatcagtaaaagggctgaaagtcaatagcaaaaaga

SEQ ID NO: 57408 - DNA, 120 bp, synthetic construct
  source 1..120: mol_type = other DNA
gacttcaatactccacattaaacagtggatagaacaactaggcagaagaccaaaaaggaaacagaagacttgaataacaactataaatcaacaagacctaacagacatccatataacact

SEQ ID NO: 57409 - DNA, 120 bp, synthetic construct
  source 1..120: mol_type = other DNA
aaccattactaatctcatccattaattcaaattgagaaataaaaagacacatttttttaaagtagttattctaacatttaaagcaaaccagccaggtaacatgcaagaaagatggctgca

SEQ ID NO: 57410 - DNA, 120 bp, synthetic construct
  source 1..120: mol_type = other DNA
ttatatattgtcaccgtttggtctgttaacactattctgtgaagcagtggaatgcggaaacatacaaactagaattatacatctaaagagagtttttctgtattaccattgagggcaaaa

SEQ ID NO: 57411 - DNA, 120 bp, synthetic construct
  source 1..120: mol_type = other DNA
cctgctaggtagggaacagaagaggagagaatgcagctttattttgcatcctaggttcacacttgagatacaatcaaccttagagtctgaaaatttcagaaacccatggtaatcagtcct

SEQ ID NO: 57412 - DNA, 120 bp, synthetic construct
  source 1..120: mol_type = other DNA
gggtctctgaacttatcattgccctaagccctgcaatttcaaaggcagactgcctgaaaatacaatatgctttttgcaaattaatatggcagtgtggaagggtcatgaaattcaaaaaca

SEQ ID NO: 57413 - DNA, 120 bp, synthetic construct
  source 1..120: mol_type = other DNA
aatccttttccctcttctgactcactcacagccacctttttgcagtgtgatcatgttgcagagagagaggatgagaatgagagaaagctctctgtagtcttttcttataagaagcactaa

SEQ ID NO: 57414 - DNA, 120 bp, synthetic construct
  source 1..120: mol_type = other DNA
ctggattttattaattgaaggattatcatatctattttttgagaaggatcagagtagagcaaggagctgaggagttggggaattgggtgagttgaggagttggactatttaaaatcatga

SEQ ID NO: 57415 - DNA, 120 bp, synthetic construct
  source 1..120: mol_type = other DNA
tgctcttgtcaagtctcaccgatgatgtgcatgttacccaacattctttgtgcattgttaggttttacttctccccgtctcatatttaagtgactttatttttttcttcataggtaaagt

SEQ ID NO: 57416 - DNA, 120 bp, synthetic construct
  source 1..120: mol_type = other DNA
ttcttctctcctcccactgcttcactctcatctctggggaaattccatttacatgtatatgaggccactcgaagttgttccacagctcactgatagtcttttcatttttttctctctctg

SEQ ID NO: 57417 - DNA, 120 bp, synthetic construct
  source 1..120: mol_type = other DNA
ttcttttttattgtttcaggtggaaatgtgtacaggaaagaacctgataggcctgagttgctcaaatcctgagcaatatggtttgactgtgtccccaaccaaacccaccttgaactgtaa

SEQ ID NO: 57418 - DNA, 120 bp, synthetic construct
  source 1..120: mol_type = other DNA
tacatctattccctagtgtcccaccttgagtgtatgcagaattccagtaagagtatcatactctagtggccactccttcacatggcttaattttatagagcacctggacaaacaatacag

SEQ ID NO: 57419 - DNA, 120 bp, synthetic construct
  source 1..120: mol_type = other DNA
gtgcccaaggtgattctggtggtcaactaggtatgggaaggactgatagtccaatcaacaaggcaaaatattcaaaaccagggtgcatggaaacttcaaaataaaagcatttggcttatg

SEQ ID NO: 57420 - DNA, 120 bp, synthetic construct
  source 1..120: mol_type = other DNA
ttctatgggcagctaatattagtttcattttaatgtagtaactcaacgattgctgcatattcactgtaaatactgaaatcaattttgcgctggtgcagctacagaaacaagacctgaaat

SEQ ID NO: 57421 - DNA, 120 bp, synthetic construct
  source 1..120: mol_type = other DNA
gtaagagccacaagggacctctatttacagatgcgcctagtgaagtaaaagaacaatccatattaaagactgagtcaagattagaaccaagtctcctaactctatgacatcaccacactc

SEQ ID NO: 57422 - DNA, 120 bp, synthetic construct
  source 1..120: mol_type = other DNA
cgtaattaaggttactgggctggcacagaagagaatttgacttaatgggagacttctgtgatggaaattaataagtttgccacttaattacaaacagtgtgggttgtgagcaacattcat

SEQ ID NO: 57423 - DNA, 120 bp, synthetic construct
  source 1..120: mol_type = other DNA
attttactagcaaatgaattaagagaaacagctaaagtgttgcttctagaaagggaaataggagaagatggagaggggtgaggtgaaagctagacccagtgggcactggagagaggatag

SEQ ID NO: 57424 - DNA, 120 bp, synthetic construct
  source 1..120: mol_type = other DNA
cagtttgtactcaaaattccatatcaatccaaatcagttgccatgggtattaaaaggcactactgatcttgagtaatagcaagggcacctgcatagtcaatgtaatctaatttctccagg

SEQ ID NO: 57425 - DNA, 120 bp, synthetic construct
  source 1..120: mol_type = other DNA
ctggaaacatgttcttaagtagggaacaagaaaaaaaaatgctctgagtgcatagatccatgatgatccctattaattctaactctgccagctcctatacttacacctgcctcacacctg

SEQ ID NO: 57426 - DNA, 120 bp, synthetic construct
  source 1..120: mol_type = other DNA
tgtggagaccctggctggacaaagcgatgagtcatgggctgggcaggaaggagcggaacaatgaaagatttcatcacattacccaaaatcgtgcaatttaaaacttatgaattatttatt

SEQ ID NO: 57427 - DNA, 120 bp, synthetic construct
  source 1..120: mol_type = other DNA
aggggagaattctttgttgtctcttctaggttctggcaatccttgttatcctctggctggttgatgcatcactccaatcactgtctgcatagtcataaggctatcttttcatttttttcc

SEQ ID NO: 57428 - DNA, 120 bp, synthetic construct
  source 1..120: mol_type = other DNA
cctactcttctctcactccaactttattgcccaagcaaaactaatccacttaaacttatctctttacatcttatttgcctgaacccaagcagttaaaagtggatggagaacaatccacta

SEQ ID NO: 57429 - DNA, 120 bp, synthetic construct
  source 1..120: mol_type = other DNA
cctcaatttctatctccagctacggcttctttacagacatccaaaagtttactttcagctgcctacgtggtatctttactgtgctatctaatagtgatttcaaactgaatgccattacat

SEQ ID NO: 57430 - DNA, 120 bp, synthetic construct
  source 1..120: mol_type = other DNA
taagttatttgccaaggtcaaaactagtaagtggcagagctaggctgtgaacattagcactctaattccagagtctatactcttaaccacaaatctatgctgtccttccactacaatcag

SEQ ID NO: 57431 - DNA, 120 bp, synthetic construct
  source 1..120: mol_type = other DNA
gagaatctggtctgccagagtggtttgttcttggggtgagggtgagaaggctgggataatataaaagtttccatcacataatgagacagctgcagttagtattacatttactcattctag

SEQ ID NO: 57432 - DNA, 120 bp, synthetic construct
  source 1..120: mol_type = other DNA
tgactaaaagtatttagggaaagattacctcgtgcacaggaaagaaatgtactacatcaatattacgtggatgacttgagtgggatgactatgtatctttggggtcatcttttgatttta

SEQ ID NO: 57433 - DNA, 120 bp, synthetic construct
  source 1..120: mol_type = other DNA
gatcagaaaactcttcacagtggctgaatgattcccacaaggtcagagagcaagggatctatggcatagagcaaaattatccccaggcttatcctgtatcttgggaaatgtacttatttt

SEQ ID NO: 57434 - DNA, 120 bp, synthetic construct
  source 1..120: mol_type = other DNA
attttcacctatgcattagccctgatctagtctcaaaaacactcagaaaaacacagaagaatcaatccatatgtatgttgcagtaaaaaaaggatggggctagcctggatttgaatctta

SEQ ID NO: 57435 - DNA, 120 bp, synthetic construct; identical to SEQ ID NO: 7835
  source 1..120: mol_type = other DNA

SEQ ID NO: 57436 - DNA, 120 bp, synthetic construct; identical to SEQ ID NO: 7836
  source 1..120: mol_type = other DNA

SEQ ID NO: 57437 - DNA, 120 bp, synthetic construct
  source 1..120: mol_type = other DNA
atctctgccaatttataacccatgactttccttgtttcaaaatttgtaaagtccactttctccaagtctttcccattatgcttctattttccaaattcgctatttttaatctcattttcc

SEQ ID NO: 57438 - DNA, 120 bp, synthetic construct
  source 1..120: mol_type = other DNA
tccttgcctatctcccagcccagggatattccagctatggagtttggtgatctgattgttttccatgttcctaaccgtcaaatcctgatgtgatattggattcagactagaaattatgaa

SEQ ID NO: 57439 - DNA, 120 bp, synthetic construct
  source 1..120: mol_type = other DNA
actggcatctttctcctcagtagaatgtaagaactgatttcgaagacaactgcagagaaagaaatcagttaagcagataacacaccattctgaaattaaagagccaaaagccacccatcc

SEQ ID NO: 57440 - DNA, 120 bp, synthetic construct
  source 1..120: mol_type = other DNA
attatttcataaacaatactatgactagaggcgactgctacagctgacacacagatgttttatttctatgcttcacctttgcaaatagcaggattcagctattggaaatgggggcagtgg

SEQ ID NO: 57441 - DNA, 120 bp, synthetic construct
  source 1..120: mol_type = other DNA
agggaggatgagttggaaagattgcttgagcctgggagacagaggttgcagtgagccatgattgtcagcctgggtgacagtgaaaaaaaaattatatatatacttgtatatgtagtactt

SEQ ID NO: 57442 - DNA, 120 bp, synthetic construct; identical to SEQ ID NO: 31419
  source 1..120: mol_type = other DNA

SEQ ID NO: 57443 - DNA, 120 bp, synthetic construct; identical to SEQ ID NO: 31420
  source 1..120: mol_type = other DNA

SEQ ID NO: 57444 - DNA, 120 bp, synthetic construct
  source 1..120: mol_type = other DNA
cttcccagctccttctctgagaccagcattactgtcacattaaaatctaacacagacaccaaaagaaaagcagagctatctatgacaaacccacagccaatatcatactgaatgggcaaa

SEQ ID NO: 57445 - DNA, 120 bp, synthetic construct
  source 1..120: mol_type = other DNA
attaaagacttacatgttagacctaaaaccataaaagccctagaagaaaacctacacaataccattcaggacatacgcatgggcaaggacttcatgtctaaaacaccaaaagcaatggca

SEQ ID NO: 57446 - DNA, 120 bp, synthetic construct
  source 1..120: mol_type = other DNA
ccagggactgttgtggggtggggggagggggaaggggtagcattaggagatatacctaatgctaaatgacgagttaatgggtgcagcataccagcatggcacatgtatacatatgtaata

SEQ ID NO: 57447 - DNA, 120 bp, synthetic construct; identical to SEQ ID NO: 11369
  source 1..120: mol_type = other DNA

SEQ ID NO: 57448 - DNA, 120 bp, synthetic construct; identical to SEQ ID NO: 11370
  source 1..120: mol_type = other DNA

SEQ ID NO: 57449 - DNA, 120 bp, synthetic construct; identical to SEQ ID NO: 11371
  source 1..120: mol_type = other DNA

SEQ ID NO: 57450 - DNA, 120 bp, synthetic construct; identical to SEQ ID NO: 11372
  source 1..120: mol_type = other DNA

SEQ ID NO: 57451 - DNA, 120 bp, synthetic construct; identical to SEQ ID NO: 11373
  source 1..120: mol_type = other DNA

SEQ ID NO: 57452 - DNA, 120 bp, synthetic construct; identical to SEQ ID NO: 20404
  source 1..120: mol_type = other DNA

SEQ ID NO: 57453 - DNA, 120 bp, synthetic construct; identical to SEQ ID NO: 7941
  source 1..120: mol_type = other DNA

SEQ ID NO: 57454 - DNA, 120 bp, synthetic construct; identical to SEQ ID NO: 7942
  source 1..120: mol_type = other DNA

SEQ ID NO: 57455 - DNA, 120 bp, synthetic construct; identical to SEQ ID NO: 17645
  source 1..120: mol_type = other DNA

SEQ ID NO: 57456 - DNA, 120 bp, synthetic construct; identical to SEQ ID NO: 16512
  source 1..120: mol_type = other DNA

SEQ ID NO: 57457 - DNA, 120 bp, synthetic construct; identical to SEQ ID NO: 16513
  source 1..120: mol_type = other DNA

SEQ ID NO: 57458 - DNA, 120 bp, synthetic construct; identical to SEQ ID NO: 16514
  source 1..120: mol_type = other DNA

SEQ ID NO: 57459 - DNA, 120 bp, synthetic construct; identical to SEQ ID NO: 16515
  source 1..120: mol_type = other DNA

SEQ ID NO: 57460 - DNA, 120 bp, synthetic construct; identical to SEQ ID NO: 16516
  source 1..120: mol_type = other DNA

SEQ ID NO: 57461 - DNA, 120 bp, synthetic construct
  source 1..120: mol_type = other DNA
ggtggatgggtggatggatggatgagtgagtaggtgggtggatggacgagtgggtgggtggatggacgaatggatggatgggtggatggatggatggatgaatggatgggtggatgagtg

SEQ ID NO: 57462 - DNA, 120 bp, synthetic construct
  source 1..120: mol_type = other DNA
agatggttttcagcagcctcttagccgtgggctcctctaaggcagaggcagtggaagggaagggaaacaggagagaggaaaggccagaaggaatagaaaaggaaagtggttttgcgtcag

SEQ ID NO: 57463 - DNA, 120 bp, synthetic construct
  source 1..120: mol_type = other DNA
gagtcagcagtggaggatcttcaggaaggccttgcggaactcaatgttgaaggtggtgtagatgatggggttcacggcgctgttgacatagcccagccacgtgaaggcgctgtacaggac

SEQ ID NO: 57464 - DNA, 120 bp, synthetic construct
  source 1..120: mol_type = other DNA
atggactgcagcagagggcctggctccaatcctagcctaccatatcccagtcccatgatcgtgagtagtcccatgggatcaagtgctctcattcataaaagaagggaggtaacagctgcc

SEQ ID NO: 57465 - DNA, 120 bp, synthetic construct
  source 1..120: mol_type = other DNA
agagcttcctacggctcatggtcttgagggaggtccgggttttgccattgggcatggtctggatctcaaagatcttggcaatcttggggtggtctttggcatgcccattcttctctggtt

SEQ ID NO: 57466 - DNA, 120 bp, synthetic construct
  source 1..120: mol_type = other DNA
tgttagtctgaacttctaaagtgcagcctcactatgtgcctaggtggcatgactgggctgctgccttggccctgactctgaggctctgttttggcacctgcctcataaacagcttcttag

SEQ ID NO: 57467 - DNA, 120 bp, synthetic construct
  source 1..120: mol_type = other DNA
cattagacttcatgataacggtgcagagtttcatgtcctcggggtgagtacagttgccctgtggagtgagccagcacatgggtcacacaaagtggtggggatggaggggggacagaaacc

SEQ ID NO: 57468 - DNA, 120 bp, synthetic construct
  source 1..120: mol_type = other DNA
cggaggacaatgtagatcttgatgtagaccagcagggtgacaatgaagggcacgtagaaggagacgatggaggagtagaccacgaaggccgggttggcaatgatgcactcgttctggtct

SEQ ID NO: 57469 - DNA, 120 bp, synthetic construct
  source 1..120: mol_type = other DNA
atcccatgttcatgtgcacatatacacacatgcagtttgtgaagcacgtcttgcctcttcaacttaataaccaaagttgaaaattcccagacatacccctgaaccattatccccactcct

SEQ ID NO: 57470 - DNA, 120 bp, synthetic construct
  source 1..120: mol_type = other DNA
ttttttttacccagcccttctcattcattaacttatttcatcttccaagaatggtgtgagggaggtagggtcatatctgtgcaaattagtggaaggctccaaggatgcagcttagcaagg

SEQ ID NO: 57471 - DNA, 120 bp, synthetic construct
  source 1..120: mol_type = other DNA
ctgtatttgtgtatttggcacccattcatcacagagacacctatattgactatatttttctatcttctctgatcctgatattctggcacttgggagcctcacagacccagagagagactt

SEQ ID NO: 57472 - DNA, 120 bp, synthetic construct
  source 1..120: mol_type = other DNA
ggttgctgtgatgagctgtgtccttggtaggatgggaaatgaagagtctagctcctggcaggagcacgtttctcatacacacatgcacacaggcacacacacacacacacacacacacat

SEQ ID NO: 57473 - DNA, 120 bp, synthetic construct
  source 1..120: mol_type = other DNA
tacaaacacttattgagcaaattactgtgttccagcctctatcctaggctcctggacacagttgtgagcaattcagacacagtcctgccttcatggacatcttaaatctctccttgcact

SEQ ID NO: 57474 - DNA, 120 bp, synthetic construct
  source 1..120: mol_type = other DNA
tatatcttagaatgcagacagtaagcctcagaggcaaatgacataaccacctctcctccatacctccagccagctactccctctccctgctgggtggctttcttgagaatgcaagtgtct

SEQ ID NO: 57475 - DNA, 120 bp, synthetic construct
  source 1..120: mol_type = other DNA
gaacatagggagtactctctccttcctctttatcccaagggggcggtgaataggaaagacagagtcctccctatgtggagcagtgctggatgtctattgtcatcttcatctttatcatca

SEQ ID NO: 57476 - DNA, 120 bp, synthetic construct
  source 1..120: mol_type = other DNA
ggctctgaaggtgtcttcctggagaataatatctgctttgggatttctccatcagcatttctccctgtgacctgggtgaagaaaggcaacttctccaaagcttctatttcctattttgtt

SEQ ID NO: 57477 - DNA, 120 bp, synthetic construct
  source 1..120: mol_type = other DNA
gcagttacttaacatctctgaccacctggtttatcaactgcaaaatggtggcaataatgccagcctctaagctgctgtgagggttatataggaaaatgctatatttaaagtccctacgtg

SEQ ID NO: 57478 - DNA, 120 bp, synthetic construct
  source 1..120: mol_type = other DNA
aacagagctgatccatcatttatttattcattcaacaaacacttcttaagcacgacccatgcaccacacacttcagttaaccaggcttgctaccttctagtcatcgaaacagaaatgggt

SEQ ID NO: 57479 - DNA, 120 bp, synthetic construct
  source 1..120: mol_type = other DNA
tggctgtaatttaggttagaaattgtggtcatctgaacgaagatagtggaaacgaggatggagagacctgttcagaattaggagctaaactgcaagtcaatttcatggtccttggtcctt

SEQ ID NO: 57480 - DNA, 120 bp, synthetic construct
  source 1..120: mol_type = other DNA
ctctcttcttctccccccactccctgctgctgatgatagcatcatatacttgtaaagggtttgatagtttgctaagttttttggatatactgtctcatttatcctcaaaacaaccctcgg

SEQ ID NO: 57481 - DNA, 120 bp, synthetic construct
  source 1..120: mol_type = other DNA
cctccagaactatgaggaaacagatttctgttgttcaatccacccaatctgtggaattttgtcatagcagccagagcagactaatacaggtccctagaagtagactctgaagaggaaatc

SEQ ID NO: 57482 - DNA, 120 bp, synthetic construct
  source 1..120: mol_type = other DNA
tctctggagtgctggttacttctgcagggtaagggagagtccctgtacccaagttctgagaaaggcctcacacatttgattttctaatctattatttattattggttgttctcgttgctt

SEQ ID NO: 57483 - DNA, 120 bp, synthetic construct
  source 1..120: mol_type = other DNA
aaaatcaaaccaagcaaaagaatgaaatgaaacaagcaatcagaccacaagccaacggctcagcaagatgaagtgactgttgctgttcaaatgcagctcactagggtctgaggtcctcct

SEQ ID NO: 57484 - DNA, 120 bp, synthetic construct
  source 1..120: mol_type = other DNA
aaagaagcctggtgagttctttgtccactctggagcttgttgagggaaaatgcaaagccacataacacatggcaccttgtatttgccatgatggtcccaatttcttgttctttttttaaa

SEQ ID NO: 57485 - DNA, 120 bp, synthetic construct
  source 1..120: mol_type = other DNA
ggtctagaatgcatcaaggtgcatagaaatattaggtcagttgggatgtagaggcaggcacttccaacctcagcagcttctgctattcaccctatatgccttacaaatgctactattttc

SEQ ID NO: 57486 - DNA, 120 bp, synthetic construct
  source 1..120: mol_type = other DNA
agtcttggtgctgccttccctgaaagttcggcacttgaaggaatcaaattgtctaattaaaatttaacaattccttatcaggcttgatggcgggtgagacactcctgtcttaaacacatc

SEQ ID NO: 57487 - DNA, 120 bp, synthetic construct
  source 1..120: mol_type = other DNA
ggtgtcagcagtcactcctgagggaagaaatgcagattgctctttccctgttaaggggaagggctcctccttcttgagcccctggactcccccacaaaccacagcctcagcactactgtg

SEQ ID NO: 57488 - DNA, 120 bp, synthetic construct
  source 1..120: mol_type = other DNA
acacgtttgagagacgtccatggagatagcatctcattcaagggtgaaggggccagtccctaggtcttttcctaccctgcagtcatttctcctcccagatccttcgtgaagggtacaata

SEQ ID NO: 57489 - DNA, 120 bp, synthetic construct
  source 1..120: mol_type = other DNA
aatgcaggaaggggtgtctgcctgacagccccatccctgcagattttgatggctccgtaaaaatgtctcctcataaactgtcaaagtgtcacaaattaattaactgttagctagagtgac

SEQ ID NO: 57490 - DNA, 120 bp, synthetic construct
  source 1..120: mol_type = other DNA
tgcaaagaaaaaaaagagagatggagtggggagagcctctagaataaaataaactttaaagccatcttcaccaattgcaatgtgtgggccttagttggatgctgattcaaagaaaccaat

SEQ ID NO: 57491 - DNA, 120 bp, synthetic construct
  source 1..120: mol_type = other DNA
acctactatttcatttactccgcatagcagccctgtgagattagatatgatccccatgctacagacaaagaaacaggcagtgggttgtgaacatcagtggatctgcctgcagaacccaga

SEQ ID NO: 57492 - DNA, 120 bp, synthetic construct
  source 1..120: mol_type = other DNA
agtgatgcccaggatacagaggagtcacttcctctgtccctggaattgaagaaggtgtgtcaatgcgtcctatttttattgttttttttttaatcagacagacaacagctagatctgggt

SEQ ID NO: 57493 - DNA, 120 bp, synthetic construct
  source 1..120: mol_type = other DNA
ctttctgtctgatgcatctgtgagccttaatgggcagagtttgtcttaaacctatgtgtatctttagcatctcctaggaaggctaccagttttgtaagtgcttcctggatgtttgttatg

SEQ ID NO: 57494 - DNA, 120 bp, synthetic construct
  source 1..120: mol_type = other DNA
cagttcttttccaggccataaacttttcttttaacctttctttgcaagggctgttttccaagcactccctctctttctgtcctctggatattgataaaggcatgcacttacaggaatgtg

SEQ ID NO: 57495 - DNA, 120 bp, synthetic construct
  source 1..120: mol_type = other DNA
gcccagggactgcaaactggtagcctatggaccacatttagcttgcatacaggatttgttgggctcacatagcattgttgaaaaactggcattttattgccaatatttacaattggacat

SEQ ID NO: 57496 - DNA, 120 bp, synthetic construct
  source 1..120: mol_type = other DNA
ccagaatgtatctaagtttgtgccccgtgttttataatagttagcaggggtaactgagttgctattatgttgctgagctacaaaggctgtgtctgaatgatgctctcagatcctctcacc

SEQ ID NO: 57497 - DNA, 120 bp, synthetic construct
  source 1..120: mol_type = other DNA
ctgaggccacctcctccgagaagccttctgtgatctatttttgggcaaattatttattcctcttcaatttcatagtacactattggctcttcttggcacttgtggtaccaaaatctgcaa

SEQ ID NO: 57498 - DNA, 120 bp, synthetic construct
  source 1..120: mol_type = other DNA
ctcccgggttcaagcgattctactgcctcagcctccagaatagctgagatcacaggcatgcaccaccacacccaactaatttttatgttttttagtagagacagggtttcaccatgttga

SEQ ID NO: 57499 - DNA, 120 bp, synthetic construct
  source 1..120: mol_type = other DNA
tgccacttttgtagctgcatgggatctttcactgcacgggacagatttttggcagaagcaaaggctctgggagtctagcaaaaataagacagcagaaaaatattaaagcaagactgcaaa

SEQ ID NO: 57500 - DNA, 120 bp, synthetic construct
  source 1..120: mol_type = other DNA
attttaagcacctactgtgttccaggcatagcaaccctccttatacatgtgctctccatgaatcctcatcacgtctccatttcccaggagacggaagcccagagaacttcaaaaatttat

SEQ ID NO: 57501 - DNA, 120 bp, synthetic construct
  source 1..120: mol_type = other DNA
atcccatgtccccactgtacagtacacattgatgcaagtagttgtgaaaatgagaaacagagagaagtcctgtggaggcacgtggctgtaagagcaccatttaggaactcagtgttggtg

SEQ ID NO: 57502 - DNA, 120 bp, synthetic construct
  source 1..120: mol_type = other DNA
caagcaagtggcttccctcttctggccctggatgtccttttgtaacaaacatgtgtggccacatcagaggacacacaaggcttcctcccaccagtcctaagattctaatctgccatgatg

SEQ ID NO: 57503 - DNA, 120 bp, synthetic construct
  source 1..120: mol_type = other DNA
atgagagaggaacaggaggaagacagagccagagggcctggtgttgttcactgtcctcatccaagggcacgggtacagcagtctattctgtctcttcctcaagctcattgtcacttccga

SEQ ID NO: 57504 - DNA, 120 bp, synthetic construct
  source 1..120: mol_type = other DNA
gtccttccaacatgagcagatcatgtgagccaagggcaggcttggaaaagcataatgctgcttccccctgagcacatgccatcataggtgcacagtaaaacttctagatgaataaatgct

SEQ ID NO: 57505 - DNA, 120 bp, synthetic construct
  source 1..120: mol_type = other DNA
taatggacagcagagccaaagcagttaataaaatagtctgagaccaacagtgttggctaggtgatcatggtatccttagcagagaaatagataggcagtctactacattctcactcaatc

SEQ ID NO: 57506 - DNA, 120 bp, synthetic construct
  source 1..120: mol_type = other DNA
atttttagtagagatggggttttaccatgtcggccaggctggtctcaaactcctgaccttaagtgatccactggcctcagcctcccaaagtgctgggattataggcctgtatcctctctt

SEQ ID NO: 57507 - DNA, 120 bp, synthetic construct
  source 1..120: mol_type = other DNA
atcttctggaattcttccctgaccactgaccactgaccactggatatcccagtagtatggcccttctctgaaccagtccccatcttttttttttttttttctgagataaggtcttgcttt

SEQ ID NO: 57508 - DNA, 120 bp, synthetic construct
  source 1..120: mol_type = other DNA
agaaatgctaagcaatgtagataacaaaataagcaagatagagtcattatcttccaggagaccacagtgcagggagagaaacaagtccacagatgattaacacgttccatgacggagatg

SEQ ID NO: 57509 - DNA, 120 bp, synthetic construct
  source 1..120: mol_type = other DNA
cttgtaaaagtcagagctccctggaccaggcacacccatgttcactgcagcattattcataatagcagaagtggaagcaacctaagtgtctactaatggatgagtagatagagaaaacgt

SEQ ID NO: 57510 - DNA, 120 bp, synthetic construct
  source 1..120: mol_type = other DNA
aatgctcaacatcactattcgtcagggagatgcaaaataaaaccacaatgagatgtcacctcatgctggatagaatggctattatcaaaaatatggtagaccacaaatggtaacaaggat

SEQ ID NO: 57511 - DNA, 120 bp, synthetic construct
  source 1..120: mol_type = other DNA
aaccttgaagacagcatgctaagggaaataggccaggcagaaaaagacaaatactgcattatgtgaggtatctaaaggagtcaaattcatagagacagaaggtaaaatggtggtggccag

SEQ ID NO: 57512 - DNA, 120 bp, synthetic construct
  source 1..120: mol_type = other DNA
accctgttgactatgaatgaaaatttgtctaagttctccaccttctgcgagagctgcccctgagctctgtccgcacagcaaaatccagacctctgaagtatctaatttggaaattatggg

SEQ ID NO: 57513 - DNA, 120 bp, synthetic construct
  source 1..120: mol_type = other DNA
tggcactggcatgtggatatactccttccttcaaatgcatcagctaagattaaagcactaatttatttgaaaggctatgtaccagttttgatctgggggaaaaaatgctggtccaccaca

SEQ ID NO: 57514 - DNA, 120 bp, synthetic construct
  source 1..120: mol_type = other DNA
aaatgaacaccttaatagaatatgtgttttaaagcaaggtttgtcacccccaatgcagctctggatggacaaaggcagaaaagtgcgggtgttgttggttatagtctgtaagggacttca

SEQ ID NO: 57515 - DNA, 120 bp, synthetic construct
  source 1..120: mol_type = other DNA
tggctgtgatcttgacctagggagacactcgagctgccagcctccaaaagcttcctggggtcagaggctccacctgttgcttaagagctccctggctccttttctagacagaagaatgtt

SEQ ID NO: 57516 - DNA, 120 bp, synthetic construct
  source 1..120: mol_type = other DNA
gttactattattactattacctggtggagatgagggatcccccaaggcagactggagtatataagagaagaacattgctttgtgtgaggcatggtgagagttaaagactaggattttagt

SEQ ID NO: 57517 - DNA, 120 bp, synthetic construct
  source 1..120: mol_type = other DNA
tggaagagacaagacagtatcctcccctgcaggctttagaggaagcatggccatgcaggaacaggtatcatgctccatgcaggagcagtgtttaaggcatgtggctgtgagctctacaga

SEQ ID NO: 57518 - DNA, 120 bp, synthetic construct
  source 1..120: mol_type = other DNA
gttacttccctctccaagtacaattttctcattcatgtgtagagttagtgtaggtccctttctttacagccttgacaatctggaatgtctcgtctgaatcacttgctggaggagcattcc

SEQ ID NO: 57519 - DNA, 120 bp, synthetic construct
  source 1..120: mol_type = other DNA
cacacccttcacattagtcacctgctcctatgagtgcattctgagcactgacatcgccaggggtgttcctctctgaggttacaaatttagttactccactgtgtgaccacaattgcctct

SEQ ID NO: 57520 - DNA, 120 bp, synthetic construct
  source 1..120: mol_type = other DNA
tttactgcaaattgaatcactggagttgtccctgtgcttaaaacccaatccttcaagttggcttcttttttccctcaggatggaatccagtctcctacataagacttcaaggttcatagt

SEQ ID NO: 57521 - DNA, 120 bp, synthetic construct
  source 1..120: mol_type = other DNA
catgcttatctgtaccttttaaagtaaggactagtccaattccccaaagtctaaacacagaaatcaccaaagcactaatggcatccctcaataacagctcttttgtcttcaggtccccag

SEQ ID NO: 57522 - DNA, 120 bp, synthetic construct
  source 1..120: mol_type = other DNA
atacctacagtgccttctgaaatattctaccatagctaaatggtgagcatttgtagctggccagaaatagatgcacatcaattacaagagagtcctccccaagaagggattcatagacca

SEQ ID NO: 57523 - DNA, 120 bp, synthetic construct
  source 1..120: mol_type = other DNA
ccccaggtgatagaggttaattaacttgctcatggtcacatagctagtaagtgttagagtcaggattcaaatcctggaagtctaattccagagcccacaggtttaactaccatatggtgt

SEQ ID NO: 57524 - DNA, 120 bp, synthetic construct
  source 1..120: mol_type = other DNA
cacttcctcgctggttctcaaatttaagaatcccaaggagttattttattcatccttctccatctgctgtctccctcttcactttcctggtatcatacacaaagattactgccctttcat

SEQ ID NO: 57525 - DNA, 120 bp, synthetic construct
  source 1..120: mol_type = other DNA
taacaaaaataatttcatttctaatgtctttctcctgctgggccacttagaacccaaacaataacaacaaggagggggtggaaatgagaagggcaggcacgttctgaaggagaccaataa

SEQ ID NO: 57526 - DNA, 120 bp, synthetic construct
  source 1..120: mol_type = other DNA
tctgcaattctgagggcaaatttctctcctttctctggacccaaatcaaagaaaaccaagtggctgagtcttatagttttattactcctccatccccatgtgctgacactataatcaagc

SEQ ID NO: 57527 - DNA, 120 bp, synthetic construct
  source 1..120: mol_type = other DNA
cagtgctatcttcacagccacacttttttgttaacactaaaatgtaacttttacttgcaggggagatggaaaccattctctccaggcagagtccccacgtctttccccttatacttgttt

SEQ ID NO: 57528 - DNA, 120 bp, synthetic construct
  source 1..120: mol_type = other DNA
cctgggcctccgcttgagattctcattcagcagtttttcaaggaagaagcaaaaatacgcatttttaaccagcttctcagggaattcattaaaaagaaaaaaacccttagagaaatgctg

SEQ ID NO: 57529 - DNA, 120 bp, synthetic construct
  source 1..120: mol_type = other DNA
ctgtgacttgtgtccatggtgaagcctgttatgtagacgcacacgcaccctcttacctctgctcttcaagaggaagcactcaagggctgcccgcctcagacagggatagggaagcgctct

SEQ ID NO: 57530 - DNA, 120 bp, synthetic construct
  source 1..120: mol_type = other DNA
tggccgcacaaacttctggtcctggcctcgctccccttggaggtccctcctcctctccccgtgacactgagtcgcccgccgctccatccggccggtgcttaccttcaagccatagggcgc

SEQ ID NO: 57531 - DNA, 120 bp, synthetic construct; identical to SEQ ID NO: 24543
  source 1..120: mol_type = other DNA

SEQ ID NO: 57532 - DNA, 120 bp, synthetic construct
  source 1..120: mol_type = other DNA
agagatggggtttcaccatgttggtcaggctggtctcgaactcctgacctggtgatctgcccatcctggcctctcaaattgctgggattacaggcgtgagccaccacacgcggccccaag

SEQ ID NO: 57533 - DNA, 120 bp, synthetic construct
  source 1..120: mol_type = other DNA
ttccacccgctgcgctgtctgtcccccgaccctcgttcctcttctccttccccgtctgtcttggcgtctgttatccaggagatgcccgtccttctatccagggaccccggaaacaggcga

SEQ ID NO: 57534 - DNA, 120 bp, synthetic construct
  source 1..120: mol_type = other DNA
agaagccgtgattcacgcctgtaatcccaggactttgggaggcaaaggcaggaggatagtttgagaccagcctgggaaacataccaggcctggtctctacaaaaaattttaaaatatcag

SEQ ID NO: 57535 - DNA, 120 bp, synthetic construct
  source 1..120: mol_type = other DNA
ctggaggaccgcgactacgtggtctactcgtccgtgtgctccttcttcctaccctgcccgctcatgctgctgctctactgggccacgttccgcggcctgcagcgctgggaggtggcacgt

SEQ ID NO: 57536 - DNA, 120 bp, synthetic construct; identical to SEQ ID NO: 34947
  source 1..120: mol_type = other DNA

SEQ ID NO: 57537 - DNA, 120 bp, synthetic construct; identical to SEQ ID NO: 34948
  source 1..120: mol_type = other DNA

SEQ ID NO: 57538 - DNA, 120 bp, synthetic construct; identical to SEQ ID NO: 34949
  source 1..120: mol_type = other DNA

SEQ ID NO: 57539 - DNA, 120 bp, synthetic construct; identical to SEQ ID NO: 18935
  source 1..120: mol_type = other DNA

SEQ ID NO: 57540 - DNA, 120 bp, synthetic construct; identical to SEQ ID NO: 18936
  source 1..120: mol_type = other DNA

SEQ ID NO: 57541 - DNA, 120 bp, synthetic construct; identical to SEQ ID NO: 18937
  source 1..120: mol_type = other DNA

SEQ ID NO: 57542 - DNA, 120 bp, synthetic construct
  source 1..120: mol_type = other DNA
caccgaacatttacatagaactatgttctagcaattttttaaagcagatgaggaaactgaagactagggaggttcaggttacacagatggtttgtggtagagcccagatctgaaccttgc

SEQ ID NO: 57543 - DNA, 120 bp, synthetic construct
  source 1..120: mol_type = other DNA
gatttcccaaggtaacacagcaagaacaaagctgagatttggatccacgtctttctgactgcgaagtctgtgtgtgatcattgtttccattgtcctcaattatggtacattgtatcacag

SEQ ID NO: 57544 - DNA, 120 bp, synthetic construct
  source 1..120: mol_type = other DNA
attgaaaagtgaaggcttctatacttttcccctactagcctgttactcctgtgactgattcatgagggatctctattttcagcaacaccagggtgattctgatgctgatggtcagtgaaa

SEQ ID NO: 57545 - DNA, 120 bp, synthetic construct
  source 1..120: mol_type = other DNA
ctgggaactacctcttacgtgttatcttccaagtgacattatcagttcacagcacaatataggcattgcctctgaggctcattgctatgcatttctttccctattctctacttcttgtgt

SEQ ID NO: 57546 - DNA, 120 bp, synthetic construct
  source 1..120: mol_type = other DNA
ttattatttctcttttttcctttatgacctgggcaatataatttgatgaatcaaaatttggccaggcacagtggcttatgcctgtaatcccagcactttgggaggccaagtgctgacaga

SEQ ID NO: 57547 - DNA, 120 bp, synthetic construct
  source 1..120: mol_type = other DNA
aaccctatagaaagctcttaggcagaatggcatgatcatatctgctctttgatggcccttgaaaaaagagaagagggaagaaattggaagcataaacaccattggagctgagtgatgctg

SEQ ID NO: 57548 - DNA, 120 bp, synthetic construct
  source 1..120: mol_type = other DNA
acaagatgattctaggcacaaagaagggaaagcattttattttggagatgatactaaaggggctgatcagagcaaagtcagttgtcaagacttcaatctggagtccaggaatggagatgg

SEQ ID NO: 57549 - DNA, 120 bp, synthetic construct
  source 1..120: mol_type = other DNA
cagtttcacagtgtttcaaaccaggcaatcccatacgaatgcctcagcaatctttgcactacgtattctgaaaaactgaacatacaagacccagtcatcaggtgatcattatgaagagac

SEQ ID NO: 57550 - DNA, 120 bp, synthetic construct
  source 1..120: mol_type = other DNA
ttaccccagggagccttcaagatccctatattttaaagcttatttcaaaaaccatcactacttcacatttttaaactgcatccttgcattacagaactgtaaatgtgttgtcatacagta

SEQ ID NO: 57551 - DNA, 120 bp, synthetic construct
  source 1..120: mol_type = other DNA
aaagccactggctttcagagacttattagaacacactcatctcttcatgcatgcttctgctagtgtcctaaatttgggctccaaattatccaaaaattcaagcccatcttcttcttgtcg

SEQ ID NO: 57552 - DNA, 120 bp, synthetic construct
  source 1..120: mol_type = other DNA
ggtgccacaaactccctgagcagaagcgcccacagtttgggttgtgaagccattcgcagaatactgaaatgaaaacaatttgcattagggataatacagagaggaacacaaaattatgaa

SEQ ID NO: 57553 - DNA, 120 bp, synthetic construct
  source 1..120: mol_type = other DNA
gctagaaagcaaagttggagaaatgaccacttgctagcattgctatttcatatatttggcctcaggctgtttcctaacccatattagagccagaaagaatctattaaagttcttcccacg

SEQ ID NO: 57554 - DNA, 120 bp, synthetic construct
  source 1..120: mol_type = other DNA
atacagctacatgcaaatgatcagctataggaaatagcactgattcttagaatgtgtcttgaaagttgccaggtgtgttgactcacgcctgtaatcccagcactttgagaggccgaggtg

SEQ ID NO: 57555 - DNA, 120 bp, synthetic construct
  source 1..120: mol_type = other DNA
caaataaacataaatacttgtgacttactgtcagagactaattctgacaacttaaaacacccctgacagtgactacattagcaggtcatgagtcacacagctgcagctgcatctcctggt

SEQ ID NO: 57556 - DNA, 120 bp, synthetic construct
  source 1..120: mol_type = other DNA
ttaatatcatgacaccaaataagtagaaaagaaaaaaatctaagaataaagttaattcttcctccccaccccaaaataaactgataaccccgatacacacacacgcacacacacacacac

SEQ ID NO: 57557 - DNA, 120 bp, synthetic construct
  source 1..120: mol_type = other DNA
tgaggttgtcatttggcttgtgctgcagcttgacttctctttttgcccaatcctacttctcctcctttcaaagctactgatcccaagcaaattccttagtcatcattctgcttgagatgc

SEQ ID NO: 57558 - DNA, 120 bp, synthetic construct
  source 1..120: mol_type = other DNA
ctgatttgtgagaagaggaaggaagagagtatgaatgaggacacttctggtatatttaaaagcacaaggaaattcaaggagatggaaacgcacgttatacacacccgtgatctggagaca

SEQ ID NO: 57559 - DNA, 120 bp, synthetic construct
  source 1..120: mol_type = other DNA
ggccacagagaaagagcaggtgaaggcaactacaagactagtagttaatatgggcaaagtgggagagagggaaaaaacaaaaacagaaagcaaagcaaacacctctcatttaatataagc

SEQ ID NO: 57560 - DNA, 120 bp, synthetic construct
  source 1..120: mol_type = other DNA
ctatgtggtgttaccttgctctctctgaaaattgggactgctggttgtcttgaacatttgtttccctttgagtccacacacacaattgagagcacatgccttacctattgaatctggtta

SEQ ID NO: 57561 - DNA, 120 bp, synthetic construct
  source 1..120: mol_type = other DNA
ctgattcacagttctctcacacagagtaacacaatgactcccaccctcttcaaaagaaatgaatgcgaacagcctcattacacatttattctatatcacaatgatgataagcagtgcccc

SEQ ID NO: 57562 - DNA, 120 bp, synthetic construct
  source 1..120: mol_type = other DNA
gattacaggtgcatgccactacacccagctaatttttaatatttttggtagagacgggatttcaccatgttggccaggctggtctcgaactcatgacctcaagtgatcctccagccttag

SEQ ID NO: 57563 - DNA, 120 bp, synthetic construct
  source 1..120: mol_type = other DNA
agtaactgttgctgtgctcatggctgatcttggactagcctctctggaaaatggagcttcattaactacaccaatttgcaagatcatctgttgcttttcttcataattcaaaggctacga

SEQ ID NO: 57564 - DNA, 120 bp, synthetic construct
  source 1..120: mol_type = other DNA
atatgtagttgtaatgagaattagtgaaaccatgccctagaagacagaaattttttcaggtcttggacttcacacaaatttccttctgagaataccaaggattaggggaggggttaggtg

SEQ ID NO: 57565 - DNA, 120 bp, synthetic construct
  source 1..120: mol_type = other DNA
cacgatgtgaagtaaatcctactcttctaatttccaaagtactatgtttacatgatttgaaaccctagcactatacaacttttaatgtcactggggcacttcatttgaaatcatgagggg

SEQ ID NO: 57566 - DNA, 120 bp, synthetic construct
  source 1..120: mol_type = other DNA
agtggtgtgatcttggctcactgcaacctctgcctcccgggttcaagcgaggcaggagaatcacactaggaatttttaatcaatttatgaaaattgaatagtttctcaaatttatagtgc

SEQ ID NO: 57567 - DNA, 120 bp, synthetic construct
  source 1..120: mol_type = other DNA
gatggaagagaaattctgatgtttaaagggactaaaaggttgtaggcaactgaagaaaaccggaatcctgaggtcaaaaagttactagagagcaccactggataaacaccttcactggac

SEQ ID NO: 57568 - DNA, 120 bp, synthetic construct
  source 1..120: mol_type = other DNA
gacagaatatagatttaaaacaatcttggaggtaaaaacatgctttaggaagtgatgtgattcaggggggccaagagacatcaaatacaatttggagaccatgactccaaggtgacaata

SEQ ID NO: 57569 - DNA, 120 bp, synthetic construct
  source 1..120: mol_type = other DNA
cttagattgatcataggagtcagttttctctaaaactgcatggttcacttagacatttctagacaaggtctccaaaactgcattctgacttttagttaaaacagaccattttcacagggc

SEQ ID NO: 57570 - DNA, 120 bp, synthetic construct
  source 1..120: mol_type = other DNA
ctgttattttcccaaacagccttgaagacttctttattttgctttgtttgaaaggttcaggtgcatggattttaaatacaactttctggatctttctgaacttgggatcctgtaggatta

SEQ ID NO: 57571 - DNA, 120 bp, synthetic construct
  source 1..120: mol_type = other DNA
agattgcagtgagccgagattacgccactgcacttcagcctgggtggcaaagtgagatgctgtctcaaaaaaaaaaaaaaaaaaactgttcttcaaagtggtactgttgtgggggaaaaa

SEQ ID NO: 57572 - DNA, 120 bp, synthetic construct
  source 1..120: mol_type = other DNA
tgtaacataacatttaagaaccgagtttaaagtgtactgtctgcagggcaaaaatgtggacaataatttccttaatgagttttttgttctttgccaacatcttccttataggaactgagt

SEQ ID NO: 57573 - DNA, 120 bp, synthetic construct
  source 1..120: mol_type = other DNA
aggacccaaggagttttctagcatcgaacaaggaattggagcccatcttctcttggcgcgccttagaactttttctttagtatgtcttttctttaggacctcaattcataagacaggaaa

SEQ ID NO: 57574 - DNA, 120 bp, synthetic construct
  source 1..120: mol_type = other DNA
tggtaaaacttctcttctccgaggacaatagaatagtatttgttgtatagactgaaccatcctccaaaatttggaagtcaggatcacttgaatgaattagatttgcagctgtaaagcact

SEQ ID NO: 57575 - DNA, 120 bp, synthetic construct
  source 1..120: mol_type = other DNA
tactggtcccaacagagttatcattctaaaaattacactaattttaaaataccacagcaaatcaggatttattttgtatgtgtgtttttattttaagtttcagggtacatgtgcaggatg

SEQ ID NO: 57576 - DNA, 120 bp, synthetic construct
  source 1..120: mol_type = other DNA
ttgtttactatattgtaaaacgtatgtaataacttcactgattaactcagtgggtacagtgacgatccaacaacagcctaggtgggagagtgctgaaaactatcaggaaggcagcacagg

SEQ ID NO: 57577 - DNA, 120 bp, synthetic construct
  source 1..120: mol_type = other DNA
ggtgattggaagaatacattcacttattcattcaaccaacatttactggttgcttagtaggtgctaaacggattcaatggctagagcagtgaacaaagccaagtccttgcctcacgaaga

SEQ ID NO: 57578 - DNA, 120 bp, synthetic construct
  source 1..120: mol_type = other DNA
tatttgtaatttcaacaaagtaagacaaatgtaatgatagggaagtacagggagctatgggagagcagaggtaatagtgatatctaaaagccaggtgaggtcacctgaagagcggctaca

SEQ ID NO: 57579 - DNA, 120 bp, synthetic construct
  source 1..120: mol_type = other DNA
gggaaaacactagaagcaatccaattaaactcagaaacaagacaggctctccaaggtcactatatgtagtttacattatattgaaggtatatttgcaagagaaggatattagataggaag

SEQ ID NO: 57580 - DNA, 120 bp, synthetic construct
  source 1..120: mol_type = other DNA
gtaaagtccctaaaagttgtaactttttattatacccaccaataatttatgagtcaaccacatacttgcctacatcgcacgttgttgaacttttgggtgtctgccaagtgtgaaatggca

SEQ ID NO: 57581 - DNA, 120 bp, synthetic construct
  source 1..120: mol_type = other DNA
tgctgggatttacaggcatgagccactgcacctggcctaatttacacttttatttgtcaatcccattattggtaatctgtcctactgatacacctgcccacatatgaaatgacatacatt

SEQ ID NO: 57582 - DNA, 120 bp, synthetic construct
  source 1..120: mol_type = other DNA
catttggatttagcacaggagagccagtgatcttagaaggtttattagtggttagcagaagacagagttcaagtggctaagccaggtgtggtctgaagaaacattaagaagtgaggaaaa

SEQ ID NO: 57583 - DNA, 120 bp, synthetic construct
  source 1..120: mol_type = other DNA
cagtaacaattaccaattcatgattgtaaaatgtggaactctactgcgaagtgagagcggaagagaaggggaaattatacgaatatttcagcccccagttcacttctcccagaaggaatt

SEQ ID NO: 57584 - DNA, 120 bp, synthetic construct
  source 1..120: mol_type = other DNA
ccttgagtgcgctgattacatctaccggagacaccttcccttcccttggggatcccaactctcaggtcgcgatcctcttcctatctgccctcccccacccccgccaactccattttctag

SEQ ID NO: 57585 - DNA, 120 bp, synthetic construct
  source 1..120: mol_type = other DNA
tgatccaattcgtatgatcaactttcacacatgttcaaaatgattacattaaaagaagacgactttaaacggaaaacaaggccgggagcggtgggtcatgcctgtaatcccagcactttg

SEQ ID NO: 57586 - DNA, 120 bp, synthetic construct; identical to SEQ ID NO: 23099
  source 1..120: mol_type = other DNA

SEQ ID NO: 57587 - DNA, 120 bp, synthetic construct; identical to SEQ ID NO: 23100
  source 1..120: mol_type = other DNA

SEQ ID NO: 57588 - DNA, 120 bp, synthetic construct; identical to SEQ ID NO: 23101
  source 1..120: mol_type = other DNA

SEQ ID NO: 57589 - DNA, 120 bp, synthetic construct; identical to SEQ ID NO: 23102
  source 1..120: mol_type = other DNA

SEQ ID NO: 57590 - DNA, 120 bp, synthetic construct; identical to SEQ ID NO: 23103
  source 1..120: mol_type = other DNA

SEQ ID NO: 57591 - DNA, 120 bp, synthetic construct; identical to SEQ ID NO: 23104
  source 1..120: mol_type = other DNA

SEQ ID NO: 57592 - DNA, 120 bp, synthetic construct; identical to SEQ ID NO: 23105
  source 1..120: mol_type = other DNA

SEQ ID NO: 57593 - DNA, 120 bp, synthetic construct
  source 1..120: mol_type = other DNA
aaggagggcacatagaacctccatgatgggtattagtgaacctcgatactgagtattcctaaacacagagtgaatagccgatattccaattcaataggaatctgtgtgtgcattccaatg

SEQ ID NO: 57594 - DNA, 120 bp, synthetic construct
  source 1..120: mol_type = other DNA
acgctagtctgaggattttggccgggggtctcatgactttttttttttttttttcacaacatctcattcaacaaccactccatagcttgaggatatgctccctcaaaataaacgcacctg

SEQ ID NO: 57595 - DNA, 120 bp, synthetic construct; identical to SEQ ID NO: 23106
  source 1..120: mol_type = other DNA

SEQ ID NO: 57596 - DNA, 120 bp, synthetic construct; identical to SEQ ID NO: 23107
  source 1..120: mol_type = other DNA

SEQ ID NO: 57597 - DNA, 120 bp, synthetic construct
  source 1..120: mol_type = other DNA
cttttctgacgagcttaaaacacggcgcaccacgagactatatcccgcacctggcttggagggtcccacacccactgagtcttgctgattgctagcacagcagtctgagatcaaactgca

SEQ ID NO: 57598 - DNA, 120 bp, synthetic construct
  source 1..120: mol_type = other DNA
caatctagcaaggcaggccaaagttcagattcaggaaatacagagaatgccacaaagatattccttgacaagagcaactccaagacacataattgtcagattcaccaaagttgaaatgaa

SEQ ID NO: 57599 - DNA, 120 bp, synthetic construct
  source 1..120: mol_type = other DNA
acagatcaacgagacagaaagtcaacaaggatacccaggaattgaactcagctctgcaccaagtggacctaatagacatctacagaactctccaccccaaatcaacagaatacacatttt

SEQ ID NO: 57600 - DNA, 120 bp, synthetic construct
  source 1..120: mol_type = other DNA
gaggccagcatcattctgataccaaagccaggcagagacacaaccaaaaaagagaattttagaccaatatccttgatgaacattgatgcaaaaaccctcaataaaatactggcagaccga

SEQ ID NO: 57601 - DNA, 120 bp, synthetic construct
  source 1..120: mol_type = other DNA
taagccaaaagaaaaaagctggaggcatcacactacctgacttcaaactatactacaaggctacagtaaccaaaacagcatggtactggtaccaaaacacagatatagaacaatggaaca

SEQ ID NO: 57602 - DNA, 120 bp, synthetic construct
  source 1..120: mol_type = other DNA
cacatatacaccatggaacactatgcagccattaaaaatgatgagttcatgtcctttgtagggacatggatgaaattggaaatcatcattctcagtaaactatcgcaagaacaaaaaacc

SEQ ID NO: 57603 - DNA, 120 bp, synthetic construct
  source 1..120: mol_type = other DNA
gtttgaaaaatctcaaaaagcattgaatctgaagggagatgttcctcattgacccctccacttgcgtgcacttggaatgtcacatccctttccaggttgtaatattcaaagtggcaatct

SEQ ID NO: 57604 - DNA, 120 bp, synthetic construct
  source 1..120: mol_type = other DNA
agcaacaagtaatatttaccaaaagtattgagttggatgtattttagcagtattttcttttctttttttcttttattattttaagttttagggtacatgtgcatattgtgcaggttagtt

SEQ ID NO: 57605 - DNA, 120 bp, synthetic construct
  source 1..120: mol_type = other DNA
ttcgatggggttgtttgtttttatcttgtaaatttgtttgagttcattgtagattctggatattagccctttgtcagatgagtaggttgcgaaaattttctcccattttgtaggttgcct

SEQ ID NO: 57606 - DNA, 120 bp, synthetic construct
  source 1..120: mol_type = other DNA
atgatttggctctctgtttgtctgttattggtgtataagaatgcttgtgacttttgtacattgattttgtatcctgagactttgctgaagttgcttatcagcttaaggagattttgggct

SEQ ID NO: 57607 - DNA, 120 bp, synthetic construct
  source 1..120: mol_type = other DNA
tactctctgatggtagtttgtatttctgtgggattggtggtgatgtcccctttatcattttttattgcatctatttgattcttctctctttttctctttattagtcttgctagcagtcta

SEQ ID NO: 57608 - DNA, 120 bp, synthetic construct
  source 1..120: mol_type = other DNA
ttcttgttgaattgatccctttaccattatgtaatggccttctttgtctcttttgatctttgttggcttaaagtctgttttatccgagactaggattgcaacccctgcctttttttgttt

SEQ ID NO: 57609 - DNA, 120 bp, synthetic construct
  source 1..120: mol_type = other DNA
tgccttgctagattggggaagttctcctggataatatcctgcagagtgtttttcaacttggttccattctccccatcactttcaggtacaccaatcagacgtagatttggtcttttcaca

SEQ ID NO: 57610 - DNA, 120 bp, synthetic construct
  source 1..120: mol_type = other DNA
caatggcgggcccccctcccccagcctggctgccaccttgcagtttgatctcagactgctctgctagcaatcagcgagactccatgggcgtaggaccctccaagccaggtgcgggatata

SEQ ID NO: 57611 - DNA, 120 bp, synthetic construct; identical to SEQ ID NO: 23093
  source 1..120: mol_type = other DNA

SEQ ID NO: 57612 - DNA, 120 bp, synthetic construct; identical to SEQ ID NO: 23094
  source 1..120: mol_type = other DNA

SEQ ID NO: 57613 - DNA, 120 bp, synthetic construct
  source 1..120: mol_type = other DNA
cctgagggtcctgactgtcagaaggaaaactaacaaacagaaaggacatccacaccaaaaccccatctgtacgtcaccatcatcaaagaccaaaggtagataaaaccacaaagatgggga

SEQ ID NO: 57614 - DNA, 120 bp, synthetic construct
  source 1..120: mol_type = other DNA
tacagacaagcaaatgctgagagattttgtcaccaccaggccggccctaaaagagctcctaaaggaagcactaaacatggaaaggaacaaccagtaccagtcactgcaaaaacatgccaa

SEQ ID NO: 57615 - DNA, 120 bp, synthetic construct
  source 1..120: mol_type = other DNA
taacgaaatgaaggcagaaataaagatgttccttgaaaccaatgagaacaaagacacaacataccagaatctctgggacacatttaagacagtatgtagaaggaaatttatagcactaaa

SEQ ID NO: 57616 - DNA, 120 bp, synthetic construct
  source 1..120: mol_type = other DNA
ggacgtatttcaaaataataagagctatctatgacaaacccacagccaatatcatactgaatgggcaaaaactggaagcattcccttgaaaactggcacaagacagggatgccctctctc

SEQ ID NO: 57617 - DNA, 120 bp, synthetic construct
  source 1..120: mol_type = other DNA
tccctatttaatatatggtgctgggaaaactggctagccatatgtagaaagctgaaactggatcccttccttacaccttatacaaaaattaattcaagatggattaaagacttaaatgtt

SEQ ID NO: 57618 - DNA, 120 bp, synthetic construct; identical to SEQ ID NO: 23095
  source 1..120: mol_type = other DNA

SEQ ID NO: 57619 - DNA, 120 bp, synthetic construct; identical to SEQ ID NO: 23096
  source 1..120: mol_type = other DNA

SEQ ID NO: 57620 - DNA, 120 bp, synthetic construct
  source 1..120: mol_type = other DNA
gttcttgaagcaatcagtatatcaaaaagacacctgtacacatgtttatcacagcacaattcacaactgtaaagatatggaatcctcacgcctgtaatcccagcactttgggaggccgag

SEQ ID NO: 57621 - DNA, 120 bp, synthetic construct; identical to SEQ ID NO: 23098
  source 1..120: mol_type = other DNA

SEQ ID NO: 57622 - DNA, 120 bp, synthetic construct
  source 1..120: mol_type = other DNA
aagtcaggtagcatgatgcctccagctttgttcttttggcttaggattgacttggcgacgcgggctctttttttgtgccacatgaactttaaagtagttttttccaattctgtgaagaaa

SEQ ID NO: 57623 - DNA, 120 bp, synthetic construct
  source 1..120: mol_type = other DNA
aaggccttttctgcatctattgagataatcatgtgttttttgtctttggttctgttatatgctagattatatttattaatttgcgtatattgaacaagccttgcatcccagggatgaagc

SEQ ID NO: 57624 - DNA, 120 bp, synthetic construct
  source 1..120: mol_type = other DNA
taaatcatgctgctataaagacacatgcacacgtatgtttattgaggcactattcacaatagcaaagacttgggaccaacccaaatgtccaacagtgatagactggattaagaaaatgtg

SEQ ID NO: 57625 - DNA, 120 bp, synthetic construct; identical to SEQ ID NO: 12381
  source 1..120: mol_type = other DNA

SEQ ID NO: 57626 - DNA, 120 bp, synthetic construct; identical to SEQ ID NO: 12382
  source 1..120: mol_type = other DNA

SEQ ID NO: 57627 - DNA, 120 bp, synthetic construct; identical to SEQ ID NO: 12383
  source 1..120: mol_type = other DNA

SEQ ID NO: 57628 - DNA, 120 bp, synthetic construct
  source 1..120: mol_type = other DNA
tcctcccacctcagctttgtgattagctgagaccacaggtgacacccaccatgcccagctaacttttgtatttttttgtagtgatgtgatttttgccttggttttttttttgtttgtttt

SEQ ID NO: 57629 - DNA, 120 bp, synthetic construct
  source 1..120: mol_type = other DNA
gagttcattgtagattctggacactagccctttgtcagatgagtaggttgtgaaaattttctcccattttgtaggttgcctgttcactctgatggtagtttcttttgctgtgcagaagct

SEQ ID NO: 57630 - DNA, 120 bp, synthetic construct
  source 1..120: mol_type = other DNA
gaagtcaaattgtccctgtttgcagatgacatgattgtatatctagaaaacctcactgtctcagcccaaaatctccttaagctgataagcaacttcagcaaagtctcaggatacaaaatc

SEQ ID NO: 57631 - DNA, 120 bp, synthetic construct; identical to SEQ ID NO: 12384
  source 1..120: mol_type = other DNA

SEQ ID NO: 57632 - DNA, 120 bp, synthetic construct; identical to SEQ ID NO: 12385
  source 1..120: mol_type = other DNA

SEQ ID NO: 57633 - DNA, 120 bp, synthetic construct; identical to SEQ ID NO: 12386
  source 1..120: mol_type = other DNA

SEQ ID NO: 57634 - DNA, 120 bp, synthetic construct
  source 1..120: mol_type = other DNA
actagcagactccacagcctgtcttctttccaacacatcccactatatctcctgtgaattgtttgctcataactgttacccaactttctgtggattgtctttttcttgttgatttgcagg

SEQ ID NO: 57635 - DNA, 120 bp, synthetic construct; identical to SEQ ID NO: 28230
  source 1..120: mol_type = other DNA

SEQ ID NO: 57636 - DNA, 120 bp, synthetic construct; identical to SEQ ID NO: 18938
  source 1..120: mol_type = other DNA

SEQ ID NO: 57637 - DNA, 120 bp, synthetic construct
  source 1..120: mol_type = other DNA
gtgtctgttcatgtccttcgcccactttttgatggggttgtttttttcttgtaaatttgtttgagttcattgtagattctggatattagccctttgtcagatgagtaggttgcaaaaatt

SEQ ID NO: 57638 - DNA, 120 bp, synthetic construct
  source 1..120: mol_type = other DNA
ctcatgatttgtctctctgtttgtctgttgttggtgtataagaatgcttgtgatttttatacattgattttgtatcctgagactttgctgaagttgcttatcagcttaaggagattttgg

SEQ ID NO: 57639 - DNA, 120 bp, synthetic construct
  source 1..120: mol_type = other DNA
aatttcagctcctgttattggtctattcagagattcaacttctacctggtttagtcttgggagagtgtatgtgtccaagaatttatccatttcttctagattttctagtttatttgcgta

SEQ ID NO: 57640 - DNA, 120 bp, synthetic construct
  source 1..120: mol_type = other DNA
tctcccattattaatgtgtgggagtctaagtctctttgtaggtcactcaggatttgctttatgaatcttggtgctcctgtattgggtgcatatatatttaggatagttagctcttcttgt

SEQ ID NO: 57641 - DNA, 120 bp, synthetic construct
  source 1..120: mol_type = other DNA
ttcttggaggctttgctcatttctttttattcttttttctctaaacttcccttctcgcttcatttcattcatttcatcttccattgctgataccctttcttccggttgatcacatcagct

SEQ ID NO: 57642 - DNA, 120 bp, synthetic construct
  source 1..120: mol_type = other DNA
gcgagactccgtgggcgtaggaccctccgagccaggtgcaggatataatctcgtggtgcgccgttttttaagcccgtcggaaaagcgcagtattcgggtgggagtgacccgattttccag

SEQ ID NO: 57643 - DNA, 120 bp, synthetic construct
  source 1..120: mol_type = other DNA
acaacctcgcgcttcttccacgttccttaaatttccctaggattccccagctcctctagccgccgacacaagccagtgaactggggaaaccaggaacatacttgtattcttagagtgcaa

SEQ ID NO: 57644 - DNA, 120 bp, synthetic construct
  source 1..120: mol_type = other DNA
cattttgttgacaaaacttttctaagacgtgatctgggacgtcgtttttagcctctgggctggcaaaacaactaatcctgtcaccttgatgtttccttgtttaaggagaatcccaagcta

SEQ ID NO: 57645 - DNA, 120 bp, synthetic construct
  source 1..120: mol_type = other DNA
ttcgctttcctcagcagtgcagggagacacaccagaaggtagctgtgtcacccacatagctatcaaacatttaggccagctgtatcaaaatgggaaaaagaaataattttctgaataaaa

SEQ ID NO: 57646 - DNA, 120 bp, synthetic construct
  source 1..120: mol_type = other DNA
atctgcgcatggcattctctcttttgtctctttatatcatcttccctctgtgcatgtctgtgtccttgtccaaatttccccattttataagaacatcggttgtactggattatgccccaa

SEQ ID NO: 57647 - DNA, 120 bp, synthetic construct
  source 1..120: mol_type = other DNA
gggagactctgtcaaaaaaaagaaggaaggaaggagggaagaaaggaagggagggagggaggaaggaagaaaggaaggaaggaactttaactgaaagcataaaggacttttagatctatt

SEQ ID NO: 57648 - DNA, 120 bp, synthetic construct
  source 1..120: mol_type = other DNA
caggaaagagtcaagaaagaagagataggatttgagtgattaagtataattgcgcccagttaaaaagagaggcaacaggcattgaggacttggtaagctgagatcaaagccaggcagaaa

SEQ ID NO: 57649 - DNA, 120 bp, synthetic construct
  source 1..120: mol_type = other DNA
aaaaccattaatcatatcatttcttgtttcagttatcgccttcctttgctttctcagtattctggggttcctttcacttacaggaacctgcagtgcttctcacccctttttatctggcct

SEQ ID NO: 57650 - DNA, 120 bp, synthetic construct
  source 1..120: mol_type = other DNA
aattaaggtttcctacctcatagtagtttgatcctcctattaaactgtaagcttcttcagagcaagatctttgtatcttttatctataaactagctaaatgccttgggcacggacgtatt

SEQ ID NO: 57651 - DNA, 120 bp, synthetic construct
  source 1..120: mol_type = other DNA
ctcttttcaattttgctgatccacttatttgagaccaatgaaacgcctgcttcccactttagaccttggaattgcctgtcggttaatttctggtagttcctgcagtttgccttactgaca

SEQ ID NO: 57652 - DNA, 120 bp, synthetic construct
  source 1..120: mol_type = other DNA
tgaatagtgcctcaataaacatatgtgtgcatgtgtctttatagtagaatgatttataatcttatgggtatatacccagtaatgggattgctgagtcaaatggtatttctggttctagat

SEQ ID NO: 57653 - DNA, 120 bp, synthetic construct
  source 1..120: mol_type = other DNA
tattttattttattttattttattttattttattttatttattcttgagatagagtctcattccgtcacccaggctggagtgcagtggcgccatctcggctcactgcaacctccgcctcc

SEQ ID NO: 57654 - DNA, 120 bp, synthetic construct
  source 1..120: mol_type = other DNA
attacatatttaaatcagctgttgagtgagactgctataggagtatataaatgtctagatcatctgtaagttggacttttaagttggaattttctaaataagttatgctggttagccgta

SEQ ID NO: 57655 - DNA, 120 bp, synthetic construct
  source 1..120: mol_type = other DNA
tctggattcttgtttaaactcatcaaggtgacttcagaacagaaagtcttttctaaaagtgctgaccttgaaaacaaagagtacattgattgatggtgtttggtattccctcatgcctct

SEQ ID NO: 57656 - DNA, 120 bp, synthetic construct
  source 1..120: mol_type = other DNA
actgcccctagtggagaacgattggtctaaattaagaatgtgttctgtgagatagaggatcttaaggaaccagatccaaattatttagaaagcagtggctgagatcttaactgctcagtc

SEQ ID NO: 57657 - DNA, 120 bp, synthetic construct
  source 1..120: mol_type = other DNA
gcttctgcaatgatgcaatgactacagtctggtctctatacatttgttcttgccactttatggcctgttctccatacagtagcaccagcgagctttttcaaacataaactggttgtatca

SEQ ID NO: 57658 - DNA, 120 bp, synthetic construct
  source 1..120: mol_type = other DNA
tgtagctattccaaatgtcacctcctcactcaacagtctccagaggcacttaaataggaaggttatgcatgtgcttctcttctaatcagtgaggagaatcttttgtagggtctcctgata

SEQ ID NO: 57659 - DNA, 120 bp, synthetic construct
  source 1..120: mol_type = other DNA
gcaccaatgttaatctcttaattttgacaaatgtacagcagctatttaagatgttaacatatgaggaaattggagaaaggaactgctggtactatctttgcaacatttctgtaaatctaa

SEQ ID NO: 57660 - DNA, 120 bp, synthetic construct
  source 1..120: mol_type = other DNA
cctgtatcaaagagaagagtctgatggttagaaggatgggcaagaaatatattaaatttttttgtttgtttgtttgagacagagtctcactctgtcgcccagactagagtgcagtggcgc

SEQ ID NO: 57661 - DNA, 120 bp, synthetic construct
  source 1..120: mol_type = other DNA
ccatgtgaccatgcagatgggaaaaggcaaacaactgagaaaagctacaccaaagacagagtccagtgaattaatgcataaatggaaggtggagtagtgggagcaatacatatagacaat

SEQ ID NO: 57662 - DNA, 120 bp, synthetic construct
  source 1..120: mol_type = other DNA
gttttctgtctgccctgtccaaatgggtagcccttagcacatgtggctgtggagcaactggattattcatttcaaataattgcggttaaaatccaaatagccacaagtagctaccatatt

SEQ ID NO: 57663 - DNA, 120 bp, synthetic construct
  source 1..120: mol_type = other DNA
catactggtggcctcgaggaaaagtaagcaggtcctggagaacacaagataaaaaccataggatgcggagtaaaggatgagagaatgtctaagatttcacaaggcagattattttgtttg

SEQ ID NO: 57664 - DNA, 120 bp, synthetic construct
  source 1..120: mol_type = other DNA
gattatttctgatcttaagatcccaggtcagctgtattgaaatttcccttggataaaatatatattcacctgtaaaacccaactggaaatttatagaatggttttctgcctaaggttctg

SEQ ID NO: 57665 - DNA, 120 bp, synthetic construct
  source 1..120: mol_type = other DNA
aattttggcaatattctattgttataggtcttaagcacaagaaatgaaaataagctgcttcctaaacatcctcatttagtgcggcaaaagcgcgcctggatcaccgcccccgtggctctt

SEQ ID NO: 57666 - DNA, 120 bp, synthetic construct
  source 1..120: mol_type = other DNA
ctgccattcccctagtccaagtcatgtcatctctggcctgtattaccaaagaacttcagaaggaaattgtccataaaaatatttacctgtaaattatagagaatcacttcttaggctttt

SEQ ID NO: 57667 - DNA, 120 bp, synthetic construct
  source 1..120: mol_type = other DNA
aactctgctatctgcaggaaagcaccatagacaatatgtaaacaaatgagcctagctgtggtccaataaaacttcatttacaaaaacaggtggctggttagctttggccctacagctttg

SEQ ID NO: 57668 - DNA, 120 bp, synthetic construct
  source 1..120: mol_type = other DNA
aattacataaaaacagcaccattctagggcctctcctatcagggttctgtttactagaggttcctaaaacatttctcagtttgcagttctctaatgaaacattaggaggctcctccacgg

SEQ ID NO: 57669 - DNA, 120 bp, synthetic construct
  source 1..120: mol_type = other DNA
ccaggtactgttctaagcctttttatggattaacctatttaatccacatagaaaccctgtgaggcagattcacttattatcctcatcttacacataaagaacccgaaggtcaaagcgaat

SEQ ID NO: 57670 - DNA, 120 bp, synthetic construct
  source 1..120: mol_type = other DNA
taaaaatcatgtgttcatgttttgcagcttgaagggatggttgaagaaaatcaagtcaacgtagaagttacgcgcataaaagtgttcgatgcagatgaaataggttctgataattggctg

SEQ ID NO: 57671 - DNA, 120 bp, synthetic construct
  source 1..120: mol_type = other DNA
gctgtgataacttgatagttaagtgtgcctaagaatcacctcataaaactgcatgccaaaaatgtaggttcctggtctcatcaacaaaaagtttcattgggcaggtttcaggaacttgtc

SEQ ID NO: 57672 - DNA, 120 bp, synthetic construct
  source 1..120: mol_type = other DNA
aatgacagaggtgctagcatagaattgtcatgtgccacatacgaacgtttcagtcagtgacagactacatatatgacgatggccccgttaaattatcatggagctgagaaatacagagta

SEQ ID NO: 57673 - DNA, 120 bp, synthetic construct
  source 1..120: mol_type = other DNA
tgaatatcttagtccgtttgggctgctacaacaaaatgccatcatctgggttgcttattaacaacagaaatttatttctcacagttctggaggctggaaagcccaagatcaaagcagatg

SEQ ID NO: 57674 - DNA, 120 bp, synthetic construct
  source 1..120: mol_type = other DNA
tccatttacttgaaatttctagaaaaggtgaaacaatggggatagaaagcagactgggattgcttggagtggtgagtctgagtggggactgactacaaacacatgtaaaggaacttttgg

SEQ ID NO: 57675 - DNA, 120 bp, synthetic construct
  source 1..120: mol_type = other DNA
tgactgacttattttggtgaaaataagtagtggtagctccaaaggaaggaaattcacaatgaattctccaaaacacaagtgaaaagctttgctgtaattcatgtaaacatgcctaatata

SEQ ID NO: 57676 - DNA, 120 bp, synthetic construct
  source 1..120: mol_type = other DNA
ctcaaacttctgggctcaagtgatctacctgccttggcttcccaaagtgctgggattacaggcatgagccaccatgcctgaacaaaatatatatatatatttacagtaatttcaacattt

SEQ ID NO: 57677 - DNA, 120 bp, synthetic construct
  source 1..120: mol_type = other DNA
agcctcctacactgtttatgtttgtcttgatcatggtgacctttactcagagtacatttattgagaacctacaagatgctcactgtgttggaagaaactagtttgtgtccactctgtagt

SEQ ID NO: 57678 - DNA, 120 bp, synthetic construct
  source 1..120: mol_type = other DNA
ttcccaccaaattattgacttttggctgctgttttgtttgtttgtttgtttgtttgtttgtttaggggccatgaatacatcaaaagattgtgtgttctgcctggaagaataatgaaccct

SEQ ID NO: 57679 - DNA, 120 bp, synthetic construct
  source 1..120: mol_type = other DNA
gccactcattcctgtgtgcctcgaagccacttaatagaaaataaattaacaatttgattgagcaaaccaagatactcatatgtttggttggtactggtatttttatgttaaactcattgg

SEQ ID NO: 57680 - DNA, 120 bp, synthetic construct
  source 1..120: mol_type = other DNA
caccgcacctggcccctgcgatcattgatttttaaagttgatgtttgtaaatgttgctaacgcccccaataaacaacagaacataagactgctcttctccaccagtgcttattgtataac

SEQ ID NO: 57681 - DNA, 120 bp, synthetic construct
  source 1..120: mol_type = other DNA
tcaaaaaaaaaaaaacaaaaacaaaaacctaatctcaccccagcacagttgcttgtgtctgtagtcccagctactcaggcaactgagatggttggaacacttgagcccaggagtttgaga

SEQ ID NO: 57682 - DNA, 120 bp, synthetic construct
  source 1..120: mol_type = other DNA
attgagcacttgctatgtgctaggcattctgctagcccaccctatgtattaccatatttaatccttccttcaacattattccctgattaaagctgaggataccttggtttaactgggggt

SEQ ID NO: 57683 - DNA, 120 bp, synthetic construct
  source 1..120: mol_type = other DNA
gccactgcactccagcctgggtgacagagcaagactctgtctcaaaaaaaaaactccctatgatccttatactctaaaattctaataaatttaacttacaaatacactgagttgtatatt

SEQ ID NO: 57684 - DNA, 120 bp, synthetic construct
  source 1..120: mol_type = other DNA
ttgtcactgtattcccagtgtatagaacagttcctagctttcctagacccacacacattggttacagctaatcatcatgaaagtaggtgtccaggtctgaacctttgctatttaaactgc

SEQ ID NO: 57685 - DNA, 120 bp, synthetic construct
  source 1..120: mol_type = other DNA
actttgggttatgggcacaaggttttttacaaacccagtttattccaatcaatcctgctttgtacattcaacttatcagagctccgcctccctgatattccccgcttgccttgtttcttc

SEQ ID NO: 57686 - DNA, 120 bp, synthetic construct
  source 1..120: mol_type = other DNA
atatacagatacataacggtaaatgacttgtctcagcttaccaagtttgtaggtaggtactggagctgggactgtatcttttgctcagggattccttgcactgctttctcatctcagatt

SEQ ID NO: 57687 - DNA, 120 bp, synthetic construct
  source 1..120: mol_type = other DNA
gtttgttgctggggcagaattgagatagttttactctgttttgacacttcccatgttgtagagaatgtagagcaaggttcaggaagagcaagagtgtgtaggaatctaagtcttttgtcc

SEQ ID NO: 57688 - DNA, 120 bp, synthetic construct
  source 1..120: mol_type = other DNA
tctgtaactatagaagaaggtatcaaactgtagagggaggttgaaatgccattggtcgcatagagtaaaggagctgagactgtttgggctttgttttctctttgggttctatccacctat

SEQ ID NO: 57689 - DNA, 120 bp, synthetic construct
  source 1..120: mol_type = other DNA
aagttgcatccctctgcaggagcaggcttggtagggatgagctccgtaggagaggcagaggatatataacctaaaaaacacaatctattaagtccatttaaattttaccttctgtatgag

SEQ ID NO: 57690 - DNA, 120 bp, synthetic construct
  source 1..120: mol_type = other DNA
atggatctagttgatactgacagaacactctatgcaacagaagcagaatacacatgctttttcatatagactgtattctagaacattaaataaatgtaaataacttttaaagaactgcag

SEQ ID NO: 57691 - DNA, 120 bp, synthetic construct
  source 1..120: mol_type = other DNA
acccaataaacattttgccacatttgctatttgcttttccattttctctgtctctctctcactgacacacattcacacacattctcttacattactatagtacagttaacaaatgtagaa

SEQ ID NO: 57692 - DNA, 120 bp, synthetic construct
  source 1..120: mol_type = other DNA
ttggtagatcagccttatgctaatgaaggtacagttgtggtcactgaaagagtaatacagcctcatgggggtggatcgaatcctctggaaggcactcagcatcttcaagatgtaccttac

SEQ ID NO: 57693 - DNA, 120 bp, synthetic construct
  source 1..120: mol_type = other DNA
tttactgcacccagcagactttcaacaactcattgatccaaagatacatgcacagtctgagcaccagctatggtgctcataacttctttaagacttgaaccctttcaatctgtgtgattc

SEQ ID NO: 57694 - DNA, 120 bp, synthetic construct
  source 1..120: mol_type = other DNA
tattttgatttctcagttattgactggctgggtgtgacttagtacataagtactcaatattataaaaacctcaaataattgacttgattttacacaacatccttcccttttctacaagtt

SEQ ID NO: 57695 - DNA, 120 bp, synthetic construct
  source 1..120: mol_type = other DNA
tggacgactgggagactcgggtcccgaaggtggaaaggtttttttgccccaggtcccgaaagaacttcccggccgcgctgggagcaggaccgggtgtcctgacgcgtgcggggacaggtt

SEQ ID NO: 57696 - DNA, 120 bp, synthetic construct
  source 1..120: mol_type = other DNA
gagggtcagcttctccggatcccagcggaaacagaccgagggcgtcatttgggtgggtggggaagagatcctgtccctgctttgaccgggtctcgggagctggactctagatgcccacgt

SEQ ID NO: 57697 - DNA, 120 bp, synthetic construct
  source 1..120: mol_type = other DNA
ctacttacaaacttgtcaagtctcacatctctctgggaaggggaaagagacccaagtgaaaaattacctgactttgaggaaggatgttttttcttctcattaatgttgctctgcccggca

SEQ ID NO: 57698 - DNA, 120 bp, synthetic construct
  source 1..120: mol_type = other DNA
gaaatttgttaccaaagtaacaaagtctcacagttagatctttctttcacccatcaaagggtgaatttgtgggaggattaaaagcagaaaatagtcattaagtttcagaaatatgtggtt

SEQ ID NO: 57699 - DNA, 120 bp, synthetic construct
  source 1..120: mol_type = other DNA
taagatgaaaggaagaagcatccttttttgaccaaggcattggagaccttgaatgccccggagagggatttggataggcagagggaagctggtgcaggttttcactgaagccattgaaag

SEQ ID NO: 57700 - DNA, 120 bp, synthetic construct
  source 1..120: mol_type = other DNA
agtcatttttttctctaaatatgggcataatttcattgttcaggtaatggaagtgtcttggaaagggaaaaactgctgatgcccctgatgcctcagtgctgacttcttagggtggagcaa

SEQ ID NO: 57701 - DNA, 120 bp, synthetic construct
  source 1..120: mol_type = other DNA
tgcctcacacttaatacccaatccatttcttccttttcctctttctcttttttttcttatcaccccgcctccattttgctgcaggacatccttaaagttatggactggggcaaagacaaa

SEQ ID NO: 57702 - DNA, 120 bp, synthetic construct
  source 1..120: mol_type = other DNA
tttattagagtactgtttctgtagctgctgggcgaagacaaaatgcaggatcaaaggaggctgtctttctaaaatctatagagacaaaaaatccaccatgtttgctcactgctggagtgg

SEQ ID NO: 57703 - DNA, 120 bp, synthetic construct
  source 1..120: mol_type = other DNA
ctaggtaattattctgtgaacctgaaaacagagagacatatgagtctttctggcatatgtacaagagcctgtgttgactgaatgaacaaaagaagaggagagagaggaagggagagatgg

SEQ ID NO: 57704 - DNA, 120 bp, synthetic construct
  source 1..120: mol_type = other DNA
cgatgaagggctctctatgcaaatatttggaatccttacttgtttaaacaagttttaggatgaacttaaaaaaaaagtatgtgcaggtaggttctttgtaatatgactcatttatctctc

SEQ ID NO: 57705 - DNA, 120 bp, synthetic construct
  source 1..120: mol_type = other DNA
acagagtgagactccttctcaaaaaaaaaaaacaggcatgtttcctgaagcaagctctcctggctctcgtgctgaagaatccagtgctacacatacagctggtgtatgtctgacatcaga

SEQ ID NO: 57706 - DNA, 120 bp, synthetic construct
  source 1..120: mol_type = other DNA
gggaaggcaggcaaggtgtcttctctttataggatgtcaactgatctctagagaaataggaatgtcttctaaaactagggggagggaattaaaaaacagagcaaacccaccaatgtttta

SEQ ID NO: 57707 - DNA, 120 bp, synthetic construct
  source 1..120: mol_type = other DNA
aagtcagttggaattctgcacaagttaggacaacaaatgtgatcttgcttgtatctcagcagtatgagaaacggacctcatttcctgtataattcggagtggaagacagagactggttgc

SEQ ID NO: 57708 - DNA, 120 bp, synthetic construct
  source 1..120: mol_type = other DNA
tgtcttttacaggaattacagaaaatatatatatatatttttacagacagggtctcactctgtcaccgaggcaagagtgcagtgctgtgatcatagctcactgtagcctccaactcgtgg

SEQ ID NO: 57709 - DNA, 120 bp, synthetic construct
  source 1..120: mol_type = other DNA
atggagaggggagaagggggataaaagaaacacaacaaaatgttaacaattgggattccgggtaaagggtctcacaggagtggttttgtcccgtttttgcaacttttgcaagtttgaaat

SEQ ID NO: 57710 - DNA, 120 bp, synthetic construct
  source 1..120: mol_type = other DNA
tcttttcagcgaagtctccctaatgccgacactggtatcaaggttacatctggcatctgcctcttcacaaagtaccccttctaaatagcctacatttgaaacagattttaaccagatgaa

SEQ ID NO: 57711 - DNA, 120 bp, synthetic construct
  source 1..120: mol_type = other DNA
tgattatagcgcatcatcaaaaccaggacattgattggcccaatacagttaaccaggcagaagccttctttttaagaactaaaacgttggccaggcgtggtggctcacgcttgtaatccc

SEQ ID NO: 57712 - DNA, 120 bp, synthetic construct
  source 1..120: mol_type = other DNA
caccacataaccagttacactcaattccatgacccagggcttcctttgaaggcagcacaaatgttcccaaggaaaggtttgcttacttggtattttgcaactttattatgtatctctaat

SEQ ID NO: 57713 - DNA, 120 bp, synthetic construct
  source 1..120: mol_type = other DNA
cacgatggggtcagcccatgtgtttgtgtgacaaagagtcttctagacctcaggtggcggcagcagcttgctgtttgcaggattttcctcctatacaatttgaaaagtggtcttctattt

SEQ ID NO: 57714 - DNA, 120 bp, synthetic construct
  source 1..120: mol_type = other DNA
ctaaatacaaatctatttgtatgtttttcaaatttccttctaatcttcgagcacatttcttgaggattttatatgtagtgccacccaagggtacaaagattatggtccctagtcctgaaa

SEQ ID NO: 57715 - DNA, 120 bp, synthetic construct
  source 1..120: mol_type = other DNA
atggttgcaaacaaactaaaagctgtttgattgcttactgcaggttcgctctgggatttgctgtggctcctttcctcttatcgcttgttcccctgcatgctttacctcattcccaggaga

SEQ ID NO: 57716 - DNA, 120 bp, synthetic construct
  source 1..120: mol_type = other DNA
acatgcttgcttgcctgtgcacaggtagatttggttttttttttttttcagaagacatgatcttggttttcaggttcccatttctaaatttccttctctgcccatcttgagctggggtca

SEQ ID NO: 57717 - DNA, 120 bp, synthetic construct
  source 1..120: mol_type = other DNA
cgacacccgctcccatgctgaaaaaagtcagacttgaaactgggttgagaattacagcataaaatcataactgatcttaagtgcttagtttcccgcaggtctctacacttgtaaatcact

SEQ ID NO: 57718 - DNA, 120 bp, synthetic construct
  source 1..120: mol_type = other DNA
gcccggcctaaaagttgttttcagaagtcagtccctactgctgttctgttttcaagttgtgtcacataaatggcacttgttaagtacttgcagttgaagcaagaaaacgttgccacttgt

SEQ ID NO: 57719 - DNA, 120 bp, synthetic construct
  source 1..120: mol_type = other DNA
gagagcgacagtccgtctcaaaaaaaaaaaagttgctgccttcttgttcattgcagatttggatgggtcttttcccataccaggtggtcagtgaatgcacaaggttaacatttttcctat

SEQ ID NO: 57720 - DNA, 120 bp, synthetic construct
  source 1..120: mol_type = other DNA
tgtgtcatcttgagtaagcctctgccacatcctctcctgtagcaaacatccttttcagccttaaaaatgctgtgattcttgaggaaaacagcgtgattctttggcattgttcatttccaa

SEQ ID NO: 57721 - DNA, 120 bp, synthetic construct
  source 1..120: mol_type = other DNA
aaagggatgccactccagtgctagccccagtgacagttctgattggtcagtatctctgctatttgggtgatacatattttgactaagactcctcatggtgtctatttgtgaaagctgatt

SEQ ID NO: 57722 - DNA, 120 bp, synthetic construct
  source 1..120: mol_type = other DNA
ggatgcagttggctctgattagtattattgtacaatgcacgcccagagccaagcaagcattttcttcagcttccagtggcttttctcaaaattaacttctttacatgcccaactactctt

SEQ ID NO: 57723 - DNA, 120 bp, synthetic construct
  source 1..120: mol_type = other DNA
taggctcacatgtattatttaaagcatcggtattgttgggttgtatgatgatcagcttcatttgaggggaaaaacgtaaaagctttaataattcgcatgtgttcatctctgtttccatca

SEQ ID NO: 57724 - DNA, 120 bp, synthetic construct
  source 1..120: mol_type = other DNA
ctccagcctgggcaacgagagcaaaactccatctcaaaaaaaaaaaaggaatgtctgactgtagtggggccagagtgaataatacttgtcatgcacttcaaaggcatcattttaaggttc

SEQ ID NO: 57725 - DNA, 120 bp, synthetic construct
  source 1..120: mol_type = other DNA
gacaagcaagccagaagtgcctgtggaaaagtcatgcactcctgtaagattctggaccctatgctcctttgatgtaatggaaagttaggtcataaaggattaactgggtatcacaaaagt

SEQ ID NO: 57726 - DNA, 120 bp, synthetic construct
  source 1..120: mol_type = other DNA
ggtagtatggatgttttttgaggcctagcaccttgatacctaggtattctctgatttttgtggccctaacttctttttacagtgaccacaactgaaatcactcatcatggaacctgccaa

SEQ ID NO: 57727 - DNA, 120 bp, synthetic construct
  source 1..120: mol_type = other DNA
ttcacacagctacaatgcagagtactaacctctgtgtgatcagtatgccaaaattggaatgtagttgtgttgcttaatgaccggggcacattctaagaaatgcatggttaggcgattttg

SEQ ID NO: 57728 - DNA, 120 bp, synthetic construct
  source 1..120: mol_type = other DNA
aagtgaaatacaccagacacaaatactgcttgatttcacttatgtgtaaattctaagaaaaaagttgaatgcagggaaacagagagtaggatggtgattaccggggtggggagggaggag

SEQ ID NO: 57729 - DNA, 120 bp, synthetic construct
  source 1..120: mol_type = other DNA
ttgacgttgttccctttcattactagctgtgagaggcaaatcttcacagactaattatgtcactggcaattttatgtgcttcttttgctctttccagcttatgcacagtaagggcactgc

SEQ ID NO: 57730 - DNA, 120 bp, synthetic construct
  source 1..120: mol_type = other DNA
agggtcttagagaaacggcagaagccctttagccagctcttttgtgtcctataaactcttgttatgactcttggaaggagtagctgccttgagttagcattctccaaaagtttatgaaaa

SEQ ID NO: 57731 - DNA, 120 bp, synthetic construct
  source 1..120: mol_type = other DNA
gttctcttcatgttatcataaattatctttataaattgaggggataggcccagaaaacaggctgactagaaagtaacctcttacagatagtaagttaaagggcttgcttctcttctctga

SEQ ID NO: 57732 - DNA, 120 bp, synthetic construct
  source 1..120: mol_type = other DNA
gttagtgatgctttttaagtctatgaaggacacttttcttaaacttcattatgctgcaggattatgagctccagctggcctcatacacctcaggactggaaactctgctgaacataccta

SEQ ID NO: 57733 - DNA, 120 bp, synthetic construct
  source 1..120: mol_type = other DNA
tattacttccacattataacatggatttggacacatcctggtgaaactgtatttcctctaaaggtttagtgtaatactgcttgtttgtaagtctggggttacttccatgctccaatacgc

SEQ ID NO: 57734 - DNA, 120 bp, synthetic construct
  source 1..120: mol_type = other DNA
aggagtacgagattgaaaggttgagggttctactgcaggaagaaggcacccggaagagagaatatgaaaatgagctggcaaaggtaagaaaccactataatgaggagatgagtaatttaa

SEQ ID NO: 57735 - DNA, 120 bp, synthetic construct
  source 1..120: mol_type = other DNA
caaggagatagaaaggttaaaacaactgatcgacaaagaaacaaatgaccggaaatgcctggaagatgaaaacgcgagattacaaagggtccagtatgacctgcagaaagcaaacagtag

SEQ ID NO: 57736 - DNA, 120 bp, synthetic construct
  source 1..120: mol_type = other DNA
tgtgtgccctgctgttctttaattgcatcaaatgctgatctctgggtagcctgtgtttggccctgcttttaagaacactaatacatgtataacttcctccgaatgttccattctacttct

SEQ ID NO: 57737 - DNA, 120 bp, synthetic construct
  source 1..120: mol_type = other DNA
gaaacagcaaattcagaatgacctgaatcagtggaagactcaatattcccgcaaggaggaggctattaggaagatagaatcggaaagagaaaagagtgagagagagaagaacagtcttag

SEQ ID NO: 57738 - DNA, 120 bp, synthetic construct
  source 1..120: mol_type = other DNA
tgattgatagagatttgtatcgatccctgaatgatccccgagatagtcagaaaaactttgtggatccagtcaccaaaaagaaggtcagttacgtgcagctgaaggaacggtgcagaatcg

SEQ ID NO: 57739 - DNA, 120 bp, synthetic construct
  source 1..120: mol_type = other DNA
agcgtagagtggtcatagttgacccagaaaccaataaagaaatgtctgttcaggaggcctacaagaagggcctaattgattatgaaaccttcaaagaactgtgtgagcaggaatgtgaat

SEQ ID NO: 57740 - DNA, 120 bp, synthetic construct
  source 1..120: mol_type = other DNA
gccgcacagaggctgcaagacaccagcagctatgccaaaatcctgacctgccccaaaaccaaattaaaaatatcctataaggatgccataaatcgctccatggtagaagatatcactggg

SEQ ID NO: 57741 - DNA, 120 bp, synthetic construct
  source 1..120: mol_type = other DNA
aatttgactgtgcatgacagcggcaatcttttctttggtcaaagttttctgtttattttgcttgtcatattcgatgtactttaaggtgtctttatgaagtttgctattctggcaataaac

SEQ ID NO: 57742 - DNA, 120 bp, synthetic construct; identical to SEQ ID NO: 25596
  source 1..120: mol_type = other DNA

SEQ ID NO: 57743 - DNA, 120 bp, synthetic construct; identical to SEQ ID NO: 25597
  source 1..120: mol_type = other DNA

SEQ ID NO: 57744 - DNA, 120 bp, synthetic construct
  source 1..120: mol_type = other DNA
cccagcaccatttattaaatagggaatcctttccccattgcttttgtcaggtttatcaaagatcggatagttgtagatacgcggtgttatttctgagggctctgttctgttccattgatc

SEQ ID NO: 57745 - DNA, 120 bp, synthetic construct
  source 1..120: mol_type = other DNA
agtttttagcatgaagggttgttgaattttgtcaaaggccttttctgcatctattgagataatcatgtggtttttgtctttggttctgtttatatgctgcattacatttattgatttgtg

SEQ ID NO: 57746 - DNA, 120 bp, synthetic construct
  source 1..120: mol_type = other DNA
catttcgttaggtacccagtagtcattcaggagcaggttgttcagtttccatgcagttgagaggttttgagtgagtttcttaatcctgagctctagtttgattgcactgtggtctgagag

SEQ ID NO: 57747 - DNA, 120 bp, synthetic construct
  source 1..120: mol_type = other DNA
gccaggtactcctctgagacaaaacttccagaggaatgatcagacagcagcattcgcggttcacgaaaatccgctcttctgcagacaccgctgctgatacccaggcaaacagggtctgga

SEQ ID NO: 57748 - DNA, 120 bp, synthetic construct
  source 1..120: mol_type = other DNA
tactttacagacaagccaatgctgagagattttgtcaccaccacgcctgccctaaaagagcgcctgaaggaagcactaaacatggaaaggaacaaccggtaccagccactgcaaaatcac

SEQ ID NO: 57749 - DNA, 120 bp, synthetic construct; identical to SEQ ID NO: 27846
  source 1..120: mol_type = other DNA

SEQ ID NO: 57750 - DNA, 120 bp, synthetic construct; identical to SEQ ID NO: 27847
  source 1..120: mol_type = other DNA

SEQ ID NO: 57751 - DNA, 120 bp, synthetic construct
  source 1..120: mol_type = other DNA
tcctgacttttgaatgatcaccattctaactggtgtgagatggtatctcattgtggttttgatttgcatttctctgatggccagtgatgatgagcattttttcatgtgtcttttggctgc

SEQ ID NO: 57752 - DNA, 120 bp, synthetic construct
  source 1..120: mol_type = other DNA
aagtgtctgttcatatcctttgcccactttttgatggggttgtctgtttttttcctgtaaatttgttggagttcattgtagattctggatattagccctttgtcagatgagtaggttgca

SEQ ID NO: 57753 - DNA, 120 bp, synthetic construct
  source 1..120: mol_type = other DNA
attttcaagatattgattcttcctacccatgagcatggaatgttcttccattcgtttgtatcctcttttatttcattgagcagtggtttgtagttctccttgaagaggtccttcacgtcc

SEQ ID NO: 57754 - DNA, 120 bp, synthetic construct
  source 1..120: mol_type = other DNA
cctcacaaaatgagtgagggaggattccctctttttctattgattggactagtttcagaaggaatggtaccagctcctccttgtacctctggtagaattcggctgtgaatccatctggtc

SEQ ID NO: 57755 - DNA, 120 bp, synthetic construct
  source 1..120: mol_type = other DNA
gcttggtgcagagctgagtccaattcctgggtatccttgttaactttctgtctcattgatctgtctaatgttgacagtggggtgttaaagtctcccattattattgtgtgggagtctaag

SEQ ID NO: 57756 - DNA, 120 bp, synthetic construct
  source 1..120: mol_type = other DNA
cagagtgttttccaacttggttccattctccccgtcactttcaggtacactgatcagacgcagatttggtcttttcacatagtcccatatttcttggaggctttgttcatttctttttat

SEQ ID NO: 57757 - DNA, 120 bp, synthetic construct
  source 1..120: mol_type = other DNA
tgtgaggagcgcctctgaccggccgcgaccccgtctgggaggtgaggagcgtctgtgcccagccgccccatctgagaagtgaggagaccctctgcctggcaaccaccccgtctgagaagt

SEQ ID NO: 57758 - DNA, 120 bp, synthetic construct; identical to SEQ ID NO: 27848
  source 1..120: mol_type = other DNA

SEQ ID NO: 57759 - DNA, 120 bp, synthetic construct; identical to SEQ ID NO: 27849
  source 1..120: mol_type = other DNA

SEQ ID NO: 57760 - DNA, 120 bp, synthetic construct; identical to SEQ ID NO: 50970
  source 1..120: mol_type = other DNA

SEQ ID NO: 57761 - DNA, 120 bp, synthetic construct
  source 1..120: mol_type = other DNA
gtgaacgagactccatctgcaatcccggcacctcgggaggccgaggctggcggatcactcgcggttaggagctggagaccagcccggccaacacagcgaaaccccatctccaccaaaaaa

SEQ ID NO: 57762 - DNA, 120 bp, synthetic construct
  source 1..120: mol_type = other DNA
actaaacatattgcaaattataataagcttaaaggcaataatattttctcttttaaaagcaggcaggatgggcatgggagctcacgcctgtaatcccagcaccttgggaggccaaggtgg

SEQ ID NO: 57763 - DNA, 120 bp, synthetic construct; identical to SEQ ID NO: 9192
  source 1..120: mol_type = other DNA

SEQ ID NO: 57764 - DNA, 120 bp, synthetic construct; identical to SEQ ID NO: 22393
  source 1..120: mol_type = other DNA

SEQ ID NO: 57765 - DNA, 120 bp, synthetic construct
  source 1..120: mol_type = other DNA
aggagctgatggagctgaaaaccaaggcttgagaactacgtgaagaatgcagaagcctcaggagccgatgcgatcaactagaagaaagggtatcagcaatggaagatgaaatgaatgaaa

SEQ ID NO: 57766 - DNA, 120 bp, synthetic construct
  source 1..120: mol_type = other DNA
ctaaatatatatgcacccaatacaggagcaccaagattcatgaagcaagtcctgagtgacctacaaagagacttagactcccacacattaataatgggagactttaacaccccactgtca

SEQ ID NO: 57767 - DNA, 120 bp, synthetic construct
  source 1..120: mol_type = other DNA
atctagaagaaatggatacattcctcgacacatacactctcccaagactaaaccaggaagaagttgaatctctgaatagaccaataacaggagctgaaattgtggcaataatcaatagtt

SEQ ID NO: 57768 - DNA, 120 bp, synthetic construct
  source 1..120: mol_type = other DNA
ttgtatatctagaaaaccccattgtctcagcccaaaatctccttaagctgataagcaacttcagcaaagtctcaggatacaaaatcaatgtgcaaaaatcacaaccattcttatacacca

SEQ ID NO: 57769 - DNA, 120 bp, synthetic construct
  source 1..120: mol_type = other DNA
gctaatatccagaatctacaatgaactcaaacaaatttacaagaaaaaaacaaacaaccccatcaaaaagtgggcgaaggacatgaacagacaattctcaaaagaagacatttatgcagc

SEQ ID NO: 57770 - DNA, 120 bp, synthetic construct; identical to SEQ ID NO: 22394
  source 1..120: mol_type = other DNA

SEQ ID NO: 57771 - DNA, 120 bp, synthetic construct; identical to SEQ ID NO: 22395
  source 1..120: mol_type = other DNA

SEQ ID NO: 57772 - DNA, 120 bp, synthetic construct; identical to SEQ ID NO: 22396
  source 1..120: mol_type = other DNA

SEQ ID NO: 57773 - DNA, 120 bp, synthetic construct
  source 1..120: mol_type = other DNA
gacagggccatttctctgcctcttgaaatgtgcctggtcccaattgagatgtgccgtgggtatacagtacacactggatcaaagatgtagtatataaagaaggtaaaatagctaattatt

SEQ ID NO: 57774 - DNA, 120 bp, synthetic construct
  source 1..120: mol_type = other DNA
ctttactattgtgaatagtgccgcaataaacatacgtgtgcatatgtctttatagcagcatgttttataatcctttgggtatatacccagtaatgggatggctgggtcaaatggtatttc

SEQ ID NO: 57775 - DNA, 120 bp, synthetic construct
  source 1..120: mol_type = other DNA
tcccttggtctatatctctgttttggtaccagtaccatgctgttttggttactgtagccttgtagtatagtttgaagtcaggtagtgtgatgcctccagctttgttcttttggcttagga

SEQ ID NO: 57776 - DNA, 120 bp, synthetic construct
  source 1..120: mol_type = other DNA
ggcctgttctgcatctattgagataatcatgtggtttttgtcgttggttctgtttatatgctggattatgtttactgatttgcatttgttgaaccagccttgcgtcccagggatgaagcc

SEQ ID NO: 57777 - DNA, 120 bp, synthetic construct
  source 1..120: mol_type = other DNA
tatgttgtgtctttgttctcgttggtttcaaagaacatctttacttctgccttcatttccttgtgtacccagcagtcattcaggagcaggttgttcagtttccatgtagttgagcggttt

SEQ ID NO: 57778 - DNA, 120 bp, synthetic construct; identical to SEQ ID NO: 25368
  source 1..120: mol_type = other DNA

SEQ ID NO: 57779 - DNA, 120 bp, synthetic construct; identical to SEQ ID NO: 9333
  source 1..120: mol_type = other DNA

SEQ ID NO: 57780 - DNA, 120 bp, synthetic construct; identical to SEQ ID NO: 9334
  source 1..120: mol_type = other DNA

SEQ ID NO: 57781 - DNA, 120 bp, synthetic construct; identical to SEQ ID NO: 9335
  source 1..120: mol_type = other DNA

SEQ ID NO: 57782 - DNA, 120 bp, synthetic construct; identical to SEQ ID NO: 9336
  source 1..120: mol_type = other DNA

SEQ ID NO: 57783 - DNA, 120 bp, synthetic construct; identical to SEQ ID NO: 18953
  source 1..120: mol_type = other DNA

SEQ ID NO: 57784 - DNA, 120 bp, synthetic construct
  source 1..120: mol_type = other DNA
aatggcaacaaaagacaaaattgacaaatgggatctaattaaactaaagagcttctccacagcaaaagaaactaccatcagagtgaacaggcaacctacaaaatgggagaaaattttcgc

SEQ ID NO: 57785 - DNA, 120 bp, synthetic construct; identical to SEQ ID NO: 18954
  source 1..120: mol_type = other DNA

SEQ ID NO: 57786 - DNA, 120 bp, synthetic construct; identical to SEQ ID NO: 20390
  source 1..120: mol_type = other DNA

SEQ ID NO: 57787 - DNA, 120 bp, synthetic construct; identical to SEQ ID NO: 20391
  source 1..120: mol_type = other DNA

SEQ ID NO: 57788 - DNA, 120 bp, synthetic construct; identical to SEQ ID NO: 20392
  source 1..120: mol_type = other DNA

SEQ ID NO: 57789 - DNA, 120 bp, synthetic construct
  source 1..120: mol_type = other DNA
tgaatattgccacaacacacatacgtgtgcatgtgtctttatagcagcatgatttataatcctttgggtatatacccagtaatgggatggctgggtcaaatggtatttctagttatagat

SEQ ID NO: 57790 - DNA, 120 bp, synthetic construct
  source 1..120: mol_type = other DNA
ctcccagatgaagagcgggtgggcagaggcgctccttaccgcccagacaatgaggtgctcctcacctcccagacgaagagcggccgggcagaggcgctcctcacctcccagacgaagagc

SEQ ID NO: 57791 - DNA, 120 bp, synthetic construct
  source 1..120: mol_type = other DNA
gctcctcacctcccagagggggcggccaggcagaggtgctcctcacctcccattcgggacagccaggcagaggcgcttctcacttcctcccagatggggcagccgggcagaggcgctcct

SEQ ID NO: 57792 - DNA, 120 bp, synthetic construct; identical to SEQ ID NO: 20393
  source 1..120: mol_type = other DNA

SEQ ID NO: 57793 - DNA, 120 bp, synthetic construct
  source 1..120: mol_type = other DNA
aaataagatcaagatcaagatcactgtatttctgtacatcagcaacataacaatgaaattttaaaatagctctccctctccctctccctctccctctctttccacggtctccctctgatg

SEQ ID NO: 57794 - DNA, 120 bp, synthetic construct
  source 1..120: mol_type = other DNA
gaaaggtggggaaaagattgagaggttggatggttgccgtgtctgtgtagaaagaggtagacatgggagacttctcattttgttctgtactatgaaaaattattctgccttgggatcctg

SEQ ID NO: 57795 - DNA, 120 bp, synthetic construct; identical to SEQ ID NO: 27504
  source 1..120: mol_type = other DNA

SEQ ID NO: 57796 - DNA, 120 bp, synthetic construct; identical to SEQ ID NO: 27505
  source 1..120: mol_type = other DNA

SEQ ID NO: 57797 - DNA, 120 bp, synthetic construct
  source 1..120: mol_type = other DNA
atgcttcaaagggcaaaaagaacaaagatcacatgcttctgaggaaacagggcaaggacaaaatcgggaactcctgataagtgtctatgttcagctgtgcacgtattgtcttgataaaca

SEQ ID NO: 57798 - DNA, 120 bp, synthetic construct; identical to SEQ ID NO: 26975
  source 1..120: mol_type = other DNA

SEQ ID NO: 57799 - DNA, 120 bp, synthetic construct
  source 1..120: mol_type = other DNA
attgcaaggacaaaaaaccaaacactgcatgttctcactcacagatgagaactgaacaatgagaacacatggacacaggaaggggaacatcacactctggggactgttgtggggtggggg

SEQ ID NO: 57800 - DNA, 120 bp, synthetic construct
  source 1..120: mol_type = other DNA
caccaagttgtggtcatttggtggctgaaagagatgccaggggaaaattcctctactttgccctctccctctccctctccttctccccacggtctccctctccctctccctctccccaca

SEQ ID NO: 57801 - DNA, 120 bp, synthetic construct
  source 1..120: mol_type = other DNA
caccccgtctgggaggtgtatccaacagctcactgagaacgggccatgatgatgatgcggttttgtcgaatacaaaagggggaaatgtggggaaaagatagagaaatcagattgttgctg

SEQ ID NO: 57802 - DNA, 120 bp, synthetic construct; identical to SEQ ID NO: 26976
  source 1..120: mol_type = other DNA

SEQ ID NO: 57803 - DNA, 120 bp, synthetic construct
  source 1..120: mol_type = other DNA
gtgaaacaatgttgtccaacaataaacaggaattttattttgctgagttgttctaacaaaaaaaaaaattcttttatttaagaatgttgaatattggcccccactctcttctggcttgta

SEQ ID NO: 57804 - DNA, 120 bp, synthetic construct; identical to SEQ ID NO: 2222
  source 1..120: mol_type = other DNA

SEQ ID NO: 57805 - DNA, 120 bp, synthetic construct
  source 1..120: mol_type = other DNA
catattctcatattctctaccctctattttgaacgttccttttttttctttttttcagaccgagtctcagtctgtcacccaggctagtgcaatggtgcaattttggctcactacaccctc

SEQ ID NO: 57806 - DNA, 120 bp, synthetic construct
  source 1..120: mol_type = other DNA
gtgaaaccctgtctctactaaaatacaaaaattagctgggcatggtggcatccgcctgtaatcacagttactcggcaggctgaggaagaattgcttgaacctgggaggcggagtttgcag

SEQ ID NO: 57807 - DNA, 120 bp, synthetic construct; identical to SEQ ID NO: 1620
  source 1..120: mol_type = other DNA

SEQ ID NO: 57808 - DNA, 120 bp, synthetic construct
  source 1..120: mol_type = other DNA
gtgcagggattacaggcatgagccactgcgcccagccaagaaaccatttctgattcacctattcactcccgcactcccactacacagtagctaaataaataaataaatattaaaaataaa

SEQ ID NO: 57809 - DNA, 120 bp, synthetic construct
  source 1..120: mol_type = other DNA
cggtctccgggatcaaggtcctgagggcgagagttgggggacttgggaggcgccggcagctttggacgggacagggtgccgggtgcgaaaggggacgttcggatgaaggctgaggggctc

SEQ ID NO: 57810 - DNA, 120 bp, synthetic construct
  source 1..120: mol_type = other DNA
gcccaggagttggaggctgcagtgagctgtgatcacaccactgcactgcagcatgggcgacagagggagaccccgtctcaaaaaacaaaaaacaaacaaactaaaaaaacgaactttttt

SEQ ID NO: 57811 - DNA, 120 bp, synthetic construct; identical to SEQ ID NO: 1621
  source 1..120: mol_type = other DNA

SEQ ID NO: 57812 - DNA, 120 bp, synthetic construct
  source 1..120: mol_type = other DNA
agggtgttttctttcattctttttgttgttgttgttttgttttgtttgtttactttttgagacagggtcttactctgtcacccaggctggagagcggtggtgcaatctcagctcactgct

SEQ ID NO: 57813 - DNA, 120 bp, synthetic construct
  source 1..120: mol_type = other DNA
aaaggagaatgaggaaggaagatgcgtttggcctcagacgtgttgaaggtattaagaggccaacaggaaatgaggccatgggctagagagaagagccctgattcattccccaaatgcctc

SEQ ID NO: 57814 - DNA, 120 bp, synthetic construct
  source 1..120: mol_type = other DNA
attcctgggttcaatggatccatccccttcagcctcctgaatagctgggactacaggcacaggctaccatgcttagctaatttttaaagtttgtgcagaggcagcttcactgtgttgccc

SEQ ID NO: 57815 - DNA, 120 bp, synthetic construct; identical to SEQ ID NO: 1622
  source 1..120: mol_type = other DNA

SEQ ID NO: 57816 - DNA, 120 bp, synthetic construct
  source 1..120: mol_type = other DNA
gaactcctgacctcaggtgatccacccccgcttggcctcccaaagtgctgggattataggcgtgagccaccacgcccagcattttttttttttttttttttttgaggcagggtctaactc

SEQ ID NO: 57817 - DNA, 120 bp, synthetic construct
  source 1..120: mol_type = other DNA
ttccaatttttaaacatcagctcagtttttaaaagccaaaccttagtaacccaagcaaaacacatctacaggccagtttgtccgtcgtcagtctgtcttggtgggaaagacaggaactct

SEQ ID NO: 57818 - DNA, 120 bp, synthetic construct; identical to SEQ ID NO: 1623
  source 1..120: mol_type = other DNA

SEQ ID NO: 57819 - DNA, 120 bp, synthetic construct
  source 1..120: mol_type = other DNA
aaagcagtccttctgcctcagccagtcaaagtgctgggatcacaaggtgtgagccactgcaccaggcctgctattactgttaccattacacatccactgctgcccctattactcccctac

SEQ ID NO: 57820 - DNA, 120 bp, synthetic construct
  source 1..120: mol_type = other DNA
aaggtcttctatcgtttctccactcaaagacagctgttaacattttattgacttctatggagtttgccctatgcttctgttttatgtaatagagacagtgctgtagtgaatagcttcacg

SEQ ID NO: 57821 - DNA, 120 bp, synthetic construct
  source 1..120: mol_type = other DNA
caacatagcgaaaccccgtttctactaaaaatacaaaaattagccaggtgtggtgtggtgcacacctgtagttccagctactcaggaggctgaggcatgagaatcacttgagcctgggag

SEQ ID NO: 57822 - DNA, 120 bp, synthetic construct; identical to SEQ ID NO: 1624
  source 1..120: mol_type = other DNA

SEQ ID NO: 57823 - DNA, 120 bp, synthetic construct
  source 1..120: mol_type = other DNA
aatcccataattctttgattccagtgacattttagtgttgttctttccagacttttaatttttaattaatttatttttatgagacagggtctctgtctgtcacccaggctggagtgcagt

SEQ ID NO: 57824 - DNA, 120 bp, synthetic construct
  source 1..120: mol_type = other DNA
gaaggggataccatggttgggtctggaaggatgggcgtgtttgcttgggggctggtatagagggaggatcaattgctagaaggtggtaagtggcttggaatgttctggaactttctagaa

SEQ ID NO: 57825 - DNA, 120 bp, synthetic construct
  source 1..120: mol_type = other DNA
gagcttagatacttccatcaagatgatacaatagccaggcatggtggcgcgtgcctgtagtctcagctgggtgacagagggagacccctgtctctacaaaaaattaagagatcagttgag

SEQ ID NO: 57826 - DNA, 120 bp, synthetic construct
  source 1..120: mol_type = other DNA
ttatagctcactgcagcctctaactcctgggctcaagccatcctcctgcctcagcctcttgagtagctgggactattggcatgcacctccgcacctggctaacttttaaattttctgcag

SEQ ID NO: 57827 - DNA, 120 bp, synthetic construct
  source 1..120: mol_type = other DNA
cctttccaagaaatgttgggatctcatcttcaggatggtgggtgctaatagggaggctgaggtgggtggatcacctgaggtcaggagtttgagaccagcctggccaacatggtgaaaccc

SEQ ID NO: 57828 - DNA, 120 bp, synthetic construct
  source 1..120: mol_type = other DNA
actgatgtgcattggtaactgctcatgtctgtcctgttcacagatctgccggaggcgctgggcaatgaccccgggactccaggccagaggggtctgaagctgtttgggaaagcagcggga

SEQ ID NO: 57829 - DNA, 120 bp, synthetic construct
  source 1..120: mol_type = other DNA
cggcctcccaaagtgctgggattacaagcatgagccaccgcgcctggacctgcagtgtgttttgatcagtattattgagaatgaggcaccagtttcctctcggagccatcccttactcta

SEQ ID NO: 57830 - DNA, 120 bp, synthetic construct; identical to SEQ ID NO: 1625
  source 1..120: mol_type = other DNA

SEQ ID NO: 57831 - DNA, 120 bp, synthetic construct; identical to SEQ ID NO: 1626
  source 1..120: mol_type = other DNA

SEQ ID NO: 57832 - DNA, 120 bp, synthetic construct; identical to SEQ ID NO: 1627
  source 1..120: mol_type = other DNA

SEQ ID NO: 57833 - DNA, 120 bp, synthetic construct
  source 1..120: mol_type = other DNA
tcctgcctcagcctcctgagtagctgggaccacaggtatacaccaccacacccggctaatttttcagttttacgtagaggcaaggtcttgccatgttgtccaggctggtcttgaattctt

SEQ ID NO: 57834 - DNA, 120 bp, synthetic construct
  source 1..120: mol_type = other DNA
ctgacggatgtagagccagatggggcttagtaaatacctgacctcttaacctagcaggcggcaaggttctcacagccaagtgcatgtcaacagcatcaggtgaaagttaccttggatgtg

SEQ ID NO: 57835 - DNA, 120 bp, synthetic construct
  source 1..120: mol_type = other DNA
ttcttctttcttttctttttctttgttttttgttttgttttgttttaagagacagggtctcactctgtcacccaggctagagtgaagtggtgtgatcgtggctcactgcagcctcaaact

SEQ ID NO: 57836 - DNA, 120 bp, synthetic construct; identical to SEQ ID NO: 1628
  source 1..120: mol_type = other DNA

SEQ ID NO: 57837 - DNA, 120 bp, synthetic construct; identical to SEQ ID NO: 1629
  source 1..120: mol_type = other DNA

SEQ ID NO: 57838 - DNA, 120 bp, synthetic construct
  source 1..120: mol_type = other DNA
agttccggaaaagttaacaaaagtagttgggtttccatatctccctcatctggcttctgacattaacagctttcataaccatggttcagttgtcagatccagaaaattaccactggttgg

SEQ ID NO: 57839 - DNA, 120 bp, synthetic construct
  source 1..120: mol_type = other DNA
tgctaaagtggtgtctgccaggatttttctcctctaaacaggtgctatgagaacctgctttttttttttttttttttgagactgagtttctctctgttgcccaggctggagtgcagtggt

SEQ ID NO: 57840 - DNA, 120 bp, synthetic construct
  source 1..120: mol_type = other DNA
agacttttaaaaatttttttggagatggagtctcactatgttgcccaggctggtctcaaactcctggcctcaagtgatcctcccacctcatcctcccaaagtgctgggattaccggtgtg

SEQ ID NO: 57841 - DNA, 120 bp, synthetic construct; identical to SEQ ID NO: 1630
  source 1..120: mol_type = other DNA

SEQ ID NO: 57842 - DNA, 120 bp, synthetic construct; identical to SEQ ID NO: 1631
  source 1..120: mol_type = other DNA

SEQ ID NO: 57843 - DNA, 120 bp, synthetic construct
  source 1..120: mol_type = other DNA
ggggagcattgtctaggggagcagggaatgagaggagcctggccagcaccccggagccagagctggagagcagtgtcctgtcaccctggtgtgcttgtgggttgaggaattataccatgc

SEQ ID NO: 57844 - DNA, 120 bp, synthetic construct
  source 1..120: mol_type = other DNA
ccgctgaggcagtgttgccggagaaccctgggtagggagacgtgtcctggcctttggtcctcccagacgacgtgggcagcgcagaggcaccagattctcttgaggaaaactgcacctgtc

SEQ ID NO: 57845 - DNA, 120 bp, synthetic construct
  source 1..120: mol_type = other DNA
aagtgtggggttccctgcaggcatccggcagtggtgagctctggaaagagtggccggtctgtcccagcatagctgctggccacaggcccacccttgcccgagggcgccagagccacagcc

SEQ ID NO: 57846 - DNA, 120 bp, synthetic construct
  source 1..120: mol_type = other DNA
ggcagcagaggcggcccctggaagctgactttccaccgcagccccagagttcagctcctctcctccagtcacagctggcatgagggggcttgttcttgaggactttgtgatttttgtaag

SEQ ID NO: 57847 - DNA, 120 bp, synthetic construct
  source 1..120: mol_type = other DNA
gttctggtctggcgttctcgccaccgtgacaggatttgggttcgggcagtctgtatgggtgtgtggaggtgtggggtgtgtggggtgtgtagaggtgagggtgtgtggggtgtgtggagg

SEQ ID NO: 57848 - DNA, 120 bp, synthetic construct
  source 1..120: mol_type = other DNA
ttctgtggttctgctactcccactacctagagaacgccccgggccgcgccgatcctcaccagctcaggagcttcttgtccgtaggagaggctttactggatgtggggttcggtgtttatg

SEQ ID NO: 57849 - DNA, 120 bp, synthetic construct; identical to SEQ ID NO: 2625
  source 1..120: mol_type = other DNA

SEQ ID NO: 57850 - DNA, 120 bp, synthetic construct; identical to SEQ ID NO: 2626
  source 1..120: mol_type = other DNA

SEQ ID NO: 57851 - DNA, 120 bp, synthetic construct; identical to SEQ ID NO: 2627
  source 1..120: mol_type = other DNA

SEQ ID NO: 57852 - DNA, 120 bp, synthetic construct
  source 1..120: mol_type = other DNA
agacggggacccagccccagggaaagatggaggtattacggttccagatgtcgctccccggccacgaggactgcgggaccatcctcatagtttacagcattccccatggtatccaggtga

SEQ ID NO: 57853 - DNA, 120 bp, synthetic construct
  source 1..120: mol_type = other DNA
tgtctgctgctcttttctggggacctgctgtaggtacagggagggcagcctggacctcacatagcctcgagggaggaggagaggccatcaccttccagcaccctgccgggtggggtcagg

SEQ ID NO: 57854 - DNA, 120 bp, synthetic construct; identical to SEQ ID NO: 15276
  source 1..120: mol_type = other DNA

SEQ ID NO: 57855 - DNA, 120 bp, synthetic construct; identical to SEQ ID NO: 15277
  source 1..120: mol_type = other DNA

SEQ ID NO: 57856 - DNA, 120 bp, synthetic construct; identical to SEQ ID NO: 15275
  source 1..120: mol_type = other DNA

SEQ ID NO: 57857 - DNA, 120 bp, synthetic construct
  source 1..120: mol_type = other DNA
atcgacccgggctcacccgccgcgtgccccgcaggccaaccaggtgacgggctggctggacggcagcgccatctatggttcctcgcattcctggagcgacgcgctgcggagcttctccag

SEQ ID NO: 57858 - DNA, 120 bp, synthetic construct; identical to SEQ ID NO: 16541
  source 1..120: mol_type = other DNA

SEQ ID NO: 57859 - DNA, 120 bp, synthetic construct; identical to SEQ ID NO: 19462
  source 1..120: mol_type = other DNA

SEQ ID NO: 57860 - DNA, 120 bp, synthetic construct; identical to SEQ ID NO: 17957
  source 1..120: mol_type = other DNA

SEQ ID NO: 57861 - DNA, 120 bp, synthetic construct
  source 1..120: mol_type = other DNA
ttcaaaaaaaatgtcgaaagagatgaagaacttagggaggtaaaggtggggggccgcgttgtgaaagtgggggttgggggggagagagaggtggtaataatcgtttaaaaactgattaaa

SEQ ID NO: 57862 - DNA, 120 bp, synthetic construct; identical to SEQ ID NO: 27410
  source 1..120: mol_type = other DNA

SEQ ID NO: 57863 - DNA, 120 bp, synthetic construct; identical to SEQ ID NO: 27411
  source 1..120: mol_type = other DNA

SEQ ID NO: 57864 - DNA, 120 bp, synthetic construct; identical to SEQ ID NO: 27412
  source 1..120: mol_type = other DNA

SEQ ID NO: 57865 - DNA, 120 bp, synthetic construct; identical to SEQ ID NO: 31440
  source 1..120: mol_type = other DNA

SEQ ID NO: 57866 - DNA, 120 bp, synthetic construct
  source 1..120: mol_type = other DNA
cgggatccctggagaggtccggagagccggcccccgaaacgcgcccccctcccccctcccccctctcccccttcctcttcgtctctccggccccaccaccaccaccgccaccacgccctc

SEQ ID NO: 57867 - DNA, 120 bp, synthetic construct
  source 1..120: mol_type = other DNA
aggggatctcccaacctgccccggcgcgcggggatttcgcctacgccgccccggctcctccggacggggcgctctcccaccctcaggctcctcggtggcctccgcacccgggcaaaagcc

SEQ ID NO: 57868 - DNA, 120 bp, synthetic construct
  source 1..120: mol_type = other DNA
agctctcctgcctctccaccagcccaccccgccgcctgaccgccccctccccacccccaccccccacccccggaaaacgcgtcgtcccctgggctgggtggagacccccgtcccgcgaaa

SEQ ID NO: 57869 - DNA, 120 bp, synthetic construct
  source 1..120: mol_type = other DNA
agtgagcattggagagatctgtcacaatgcccctgtaggcagagcttagacaagtgttacatcacctgggtgatcagtgcagagatgtgtcaaaacgctcctgtagtctgaacctagaca

SEQ ID NO: 57870 - DNA, 120 bp, synthetic construct
  source 1..120: mol_type = other DNA
aagtatgtcacaaagcccctgtaggcagagcctagacaagagttacatcacctgggttatcagtgcagaaatatgtcacaaagcccctgtaggtcgagtctagacaagagttacatctcc

SEQ ID NO: 57871 - DNA, 120 bp, synthetic construct
  source 1..120: mol_type = other DNA
gttgcatcacctgggtgatcagtgtagagatatgtcacaatgtcccctgtaggcagagcacagagaagagttgcaccacctgggtgatcagtgcagagatatgtcacaatgtcccctgta

SEQ ID NO: 57872 - DNA, 120 bp, synthetic construct
  source 1..120: mol_type = other DNA
gatcattgcagggatatgtcacaaagcaccctgtaggcagatcctagacaagagttacatgacctgggtgatcagtgcagagatatgtcacaatgccactgtaggcagagcctagacaag

SEQ ID NO: 57873 - DNA, 120 bp, synthetic construct
  source 1..120: mol_type = other DNA
tgcagaaatatgtgacaatgccgccagtaggcagagcctagagaagagtcccatcacctgggtgatcagtgcagagttatgccacaatgccctctgtaggcagagcctagacaagagtta

SEQ ID NO: 57874 - DNA, 120 bp, synthetic construct
  source 1..120: mol_type = other DNA
cacctgagtgatcagtgcagagatctgtcacaatgcccctttaggcagagcttaaactagagttacatcacctgtgtgatcagtgcagagatatgtcacattgcccccataggcgaatcc

SEQ ID NO: 57875 - DNA, 120 bp, synthetic construct; identical to SEQ ID NO: 19013
  source 1..120: mol_type = other DNA

SEQ ID NO: 57876 - DNA, 120 bp, synthetic construct; identical to SEQ ID NO: 19014
  source 1..120: mol_type = other DNA

SEQ ID NO: 57877 - DNA, 120 bp, synthetic construct
  source 1..120: mol_type = other DNA
acccacttcagactcctaagtagcggggtctgcaggcgcgcaccaccacgtccagctaatttttgtgttttttatagaggtggtgtctcactatgctgcccaggctgttctcaaactcct

SEQ ID NO: 57878 - DNA, 120 bp, synthetic construct
  source 1..120: mol_type = other DNA
cactaaatgcccacaagagaaagcaggaaagatctaaaattgacaacctaatgtcacaattaaaagaactagagaagcaagagcaaacactttcaaaagctggcagaaggcaagaaataa

SEQ ID NO: 57879 - DNA, 120 bp, synthetic construct
  source 1..120: mol_type = other DNA
tatacagcagggaatactatgtagccataaaagaggatgagttcacgtcctctgtaggaacatggatgaagctggaaaccaacattttgagcaaaccatcgcaaggacagaaaaccaaac

SEQ ID NO: 57880 - DNA, 120 bp, synthetic construct
  source 1..120: mol_type = other DNA
accaaattctgttctaacaccctcaaaatgtgtaaatgatgccctaatgccctttgtcccttctcaggctgataatccacaaattctacactctattccagaatcgctttcctcctaaat

SEQ ID NO: 57881 - DNA, 120 bp, synthetic construct; identical to SEQ ID NO: 19005
  source 1..120: mol_type = other DNA

SEQ ID NO: 57882 - DNA, 120 bp, synthetic construct; identical to SEQ ID NO: 19006
  source 1..120: mol_type = other DNA

SEQ ID NO: 57883 - DNA, 120 bp, synthetic construct; identical to SEQ ID NO: 19007
  source 1..120: mol_type = other DNA

SEQ ID NO: 57884 - DNA, 120 bp, synthetic construct; identical to SEQ ID NO: 19008
  source 1..120: mol_type = other DNA

SEQ ID NO: 57885 - DNA, 120 bp, synthetic construct
  source 1..120: mol_type = other DNA
gcagaggcgctccccacatctcagacgatgggcggccgagcagagacgctcctcacttcccagatgggatggctgcggggaagaggtgctcctcacttcctagatgggatggcggccggg

SEQ ID NO: 57886 - DNA, 120 bp, synthetic construct; identical to SEQ ID NO: 19009
  source 1..120: mol_type = other DNA

SEQ ID NO: 57887 - DNA, 120 bp, synthetic construct
  source 1..120: mol_type = other DNA
actaccatcagagtgaacaggcaacctacagaatgggagaaaatttttgccatctacccatctgacaaggggctaatatccaaaatctacaaagaactcaaacaaatttacaagaaaaaa

SEQ ID NO: 57888 - DNA, 120 bp, synthetic construct
  source 1..120: mol_type = other DNA
tctccttaaactgataggcaacttcagcaaagtctcaggttacaaaatcaatgtgcaaaaatcacaagcattcttatacaccaataacagacaaacagagagccaaatcatgagtgaact

SEQ ID NO: 57889 - DNA, 120 bp, synthetic construct
  source 1..120: mol_type = other DNA
tacaagaaaaaaacatccccatgaaaaagtgggcgaaggatatgaacagacacttctcaaaagaagacatttatgcagccaaaagacacatgaaaaaatgctcatcatcactggccatca

SEQ ID NO: 57890 - DNA, 120 bp, synthetic construct
  source 1..120: mol_type = other DNA
tatggaaccaaaaaagagcccgcatcgccaagtcaatcctaagccaagagaacaaagctggaggcatcacgctacttgacttcaaactgtactacaaggctacagtaaccaaaacagcat

SEQ ID NO: 57891 - DNA, 120 bp, synthetic construct
  source 1..120: mol_type = other DNA
atttgacccagccatcccattactgggtatatacccaaaggattataaatgatgctgctataaagacacatgcacacgtatgtttattgcagcactattcacaatagcaaagacttggaa

SEQ ID NO: 57892 - DNA, 120 bp, synthetic construct; identical to SEQ ID NO: 19010
  source 1..120: mol_type = other DNA

SEQ ID NO: 57893 - DNA, 120 bp, synthetic construct
  source 1..120: mol_type = other DNA
tgccccgtctgagaagtgaggagcctctccgcccggcagccaccccatctgggaagtgaggagcgtctccgcccggcagccaccccgtccgggagggaggttggggggggtcagcccccc

SEQ ID NO: 57894 - DNA, 120 bp, synthetic construct; identical to SEQ ID NO: 19011
  source 1..120: mol_type = other DNA

SEQ ID NO: 57895 - DNA, 120 bp, synthetic construct
  source 1..120: mol_type = other DNA
aaaggtcaaaagagagaaagaaggccattacataatggtaaagggatcaattcaacaagaagagctaactatcctaaatatatatgcacccaatacaggagcacccagattcataaagca

SEQ ID NO: 57896 - DNA, 120 bp, synthetic construct
  source 1..120: mol_type = other DNA
agggaacatcaccaccgatcccacagaaatacaaactaccatcagagaatactacaaacacctctacgcaaataaactagaaaatctagaagaaatggataaattcctcgacacatacac

SEQ ID NO: 57897 - DNA, 120 bp, synthetic construct
  source 1..120: mol_type = other DNA
cccaggatacaaaatcaatgtacaaaaatcacaagctttcttatacaccaataacagacaaacagagagccaaatcatgagtgaactcccattcacaattgcttcaaagagaataaaata

SEQ ID NO: 57898 - DNA, 120 bp, synthetic construct
  source 1..120: mol_type = other DNA
aagaactcaaacaaatttacaagaaaaaaacaaacaaccccatcaaaaagtgggtgaagaacatgaacagacacttctcaaaagaagacatttatgcagccaaaaaacacatgaaaaaat

SEQ ID NO: 57899 - DNA, 120 bp, synthetic construct; identical to SEQ ID NO: 19012
  source 1..120: mol_type = other DNA

SEQ ID NO: 57900 - DNA, 120 bp, synthetic construct; identical to SEQ ID NO: 14655
  source 1..120: mol_type = other DNA

SEQ ID NO: 57901 - DNA, 120 bp, synthetic construct; identical to SEQ ID NO: 29740
  source 1..120: mol_type = other DNA

SEQ ID NO: 57902 - DNA, 120 bp, synthetic construct
  source 1..120: mol_type = other DNA
gtttacagtcccaccaacagtgtaaaagtattcctatttctccacatcctctccagcacctgttatttcctgactttttaatgattgccattctaactggtgtgagatggtatctcattg

SEQ ID NO: 57903 - DNA, 120 bp, synthetic construct
  source 1..120: mol_type = other DNA
agtatagtttgaagtcaggtagtgtgatgcctccagctttgttcttttggcttaggattgacttggtgatgggggctcttttttggttccatatgaactttaaagtagttttttccaatt

SEQ ID NO: 57904 - DNA, 120 bp, synthetic construct
  source 1..120: mol_type = other DNA
ccagcatcatcctgataccaaagcttggcagagacacaaacaaaaaagagaattttagaccaatatccttgatgaacattgatgcaaaaatcctcaataaaatactggcaaaacgaatcc

SEQ ID NO: 57905 - DNA, 120 bp, synthetic construct
  source 1..120: mol_type = other DNA
gtttgttataatttctgttcttttacatttgctgaggagagctttacttccaagtatgtggtcaattttggaataggtgtggtgtggtgctgaaagaaatgtatatgctgttgatttgag

SEQ ID NO: 57906 - DNA, 120 bp, synthetic construct
  source 1..120: mol_type = other DNA
tggcctgccttgctagattggggaagttctcctggataatatcctgcacagtgttttccaacttggttccattctccccgtcaccttcaggtacaccagtcagacgtagatttggtcttt

SEQ ID NO: 57907 - DNA, 120 bp, synthetic construct
  source 1..120: mol_type = other DNA
tacgcccacggaatctggctgattgctagcacagcagtctgagatcaaactgcaaggtggcagcgaggctgggggaggggcgcccgccattgcccaggcttgcttaggtaaacaaagcgg

SEQ ID NO: 57908 - DNA, 120 bp, synthetic construct
  source 1..120: mol_type = other DNA
tgtaccttgttaaatgtgatcttggcctgtaaagaaacaaaagactacttttaagacaaaacataaactgcattacaagccagggagtagggttgatgggaggactatgggacggcagtg

SEQ ID NO: 57909 - DNA, 120 bp, synthetic construct
  source 1..120: mol_type = other DNA
acattttggcatgattttgcagtggctggtaccaattgttcctttccatgtttagcgcttccttcaggagctcttttagggcaggcctggtggtgacaaaatctctcagcatttgcttgt

SEQ ID NO: 57910 - DNA, 120 bp, synthetic construct
  source 1..120: mol_type = other DNA
cctttggaggaggagaggcactcgctttttagagtttccagtttttctgctctgttttttccccatcttcatggttttatctacttttggtctttgatgatggtgatgtacagatgggtt

SEQ ID NO: 57911 - DNA, 120 bp, synthetic construct
  source 1..120: mol_type = other DNA
ccgatcccacagaaatacaaactaccatccgagaatactacaaacacctctacgcaaataaactagaaaatctagaagaaatcgataagttcctcgacacatacagcctcccaagactaa

SEQ ID NO: 57912 - DNA, 120 bp, synthetic construct
  source 1..120: mol_type = other DNA
aataaaatacctaggaatccaacttacaagggacatgaaggacctcttcaaggagaactacaaaccactgctcaatgaaataaaagaggatagaaagaaatggaagaacattccatgctc

SEQ ID NO: 57913 - DNA, 120 bp, synthetic construct
  source 1..120: mol_type = other DNA
aaaagacacatgaaaaaatgctcaccatcactggccatcagagaaatgcaaatcaaaaccacaatgagataccatctcacaccagttagaatggcaatcattaaaagtcaggaaacaaca

SEQ ID NO: 57914 - DNA, 120 bp, synthetic construct; identical to SEQ ID NO: 21797
  source 1..120: mol_type = other DNA

SEQ ID NO: 57915 - DNA, 120 bp, synthetic construct; identical to SEQ ID NO: 21798
  source 1..120: mol_type = other DNA

SEQ ID NO: 57916 - DNA, 120 bp, synthetic construct
  source 1..120: mol_type = other DNA
cccctcccgccacccgacaacagtccccagagtgtgatgttccttttcctgtgtccatgtgctctcattgttcaattcccacctatgagtgagaacatgcggtgtttggttttttgttct

SEQ ID NO: 57917 - DNA, 120 bp, synthetic construct
  source 1..120: mol_type = other DNA
ttgtcaattttggcttttgttgccattgcttttggtgttttagacatgaagtcgttgcccatgcctatgtcctgaatggtaatgcctaggttttcttctagggtttttatggttttagct

SEQ ID NO: 57918 - DNA, 120 bp, synthetic construct
  source 1..120: mol_type = other DNA
tgccagttttcaaagggaatgcttccagtttttgcccattcagtatgatattggctgtgggtttgtcatagatagctcttattattttgagatacatctcatcaagagtttttagcatga

SEQ ID NO: 57919 - DNA, 120 bp, synthetic construct
  source 1..120: mol_type = other DNA
tttttgaatggttttttgtgtctctatttccttcagttctgctcagattttagttatttcttgccttctgctagcttttgaatgtgtttgctcttgcttttctagttcttttaattgtga

SEQ ID NO: 57920 - DNA, 120 bp, synthetic construct
  source 1..120: mol_type = other DNA
ttgtgtctttaatattcacatttaaagttaatattgttatgtgtgaatttgatcctgtcattgtgatgttagctggttattttgctcgttagttgatgcagtttcttcctaggctcgatg

SEQ ID NO: 57921 - DNA, 120 bp, synthetic construct
  source 1..120: mol_type = other DNA
gcagaggttgcacaacgagctgaaatcatgccactgctctccagcctgagtgacagagcaagactctcaaaaaaaaaaaattcaattttatctgttaaacatgtcttcttggaagtctct

SEQ ID NO: 57922 - DNA, 120 bp, synthetic construct; identical to SEQ ID NO: 12314
  source 1..120: mol_type = other DNA

SEQ ID NO: 57923 - DNA, 120 bp, synthetic construct; identical to SEQ ID NO: 3368
  source 1..120: mol_type = other DNA

SEQ ID NO: 57924 - DNA, 120 bp, synthetic construct; identical to SEQ ID NO: 12316
  source 1..120: mol_type = other DNA

SEQ ID NO: 57925 - DNA, 120 bp, synthetic construct; identical to SEQ ID NO: 12317
  source 1..120: mol_type = other DNA

SEQ ID NO: 57926 - DNA, 120 bp, synthetic construct; identical to SEQ ID NO: 30779
  source 1..120: mol_type = other DNA

SEQ ID NO: 57927 - DNA, 120 bp, synthetic construct
  source 1..120: mol_type = other DNA
ggccagcttttattcccttatttggccctgcccacatcgtggtgcgtttacaaacctttagctagacacagagtgctgattagtgcatttttacagagtgccgattggtgcgtttacaaa

SEQ ID NO: 57928 - DNA, 120 bp, synthetic construct; identical to SEQ ID NO: 30780
  source 1..120: mol_type = other DNA

SEQ ID NO: 57929 - DNA, 120 bp, synthetic construct
  source 1..120: mol_type = other DNA
tctcttttttttattttttagagacagggtcttgctctgtcacccaggtttgagtgttttagtcacagagatggttaaactctggtcccattttcaagactctccatctgcgtgggacta

SEQ ID NO: 57930 - DNA, 120 bp, synthetic construct
  source 1..120: mol_type = other DNA
gccatgtggggaggccaggagggccgactctgagtgccaggtgccatgtggggtggccaggagggttgactgtgagtgctgggcaccatgtggggaggcgaggagggcagactgtgagtg

SEQ ID NO: 57931 - DNA, 120 bp, synthetic construct; identical to SEQ ID NO: 30783
  source 1..120: mol_type = other DNA

SEQ ID NO: 57932 - DNA, 120 bp, synthetic construct; identical to SEQ ID NO: 30784
  source 1..120: mol_type = other DNA

SEQ ID NO: 57933 - DNA, 120 bp, synthetic construct; identical to SEQ ID NO: 30785
  source 1..120: mol_type = other DNA

SEQ ID NO: 57934 - DNA, 120 bp, synthetic construct; identical to SEQ ID NO: 30786
  source 1..120: mol_type = other DNA

SEQ ID NO: 57935 - DNA, 120 bp, synthetic construct; identical to SEQ ID NO: 22458
  source 1..120: mol_type = other DNA

SEQ ID NO: 57936 - DNA, 120 bp, synthetic construct; identical to SEQ ID NO: 16981
  source 1..120: mol_type = other DNA

SEQ ID NO: 57937 - DNA, 120 bp, synthetic construct; identical to SEQ ID NO: 25031
  source 1..120: mol_type = other DNA

SEQ ID NO: 57938 - DNA, 120 bp, synthetic construct
  source 1..120: mol_type = other DNA
tccccgaatgctgggagagactgatttgagtaataataaaactccggtctcccgcacagccggctgtgcgtgaattactttttctctatggcaattcccctgtcatgatgaatcggctct

SEQ ID NO: 57939 - DNA, 120 bp, synthetic construct; identical to SEQ ID NO: 25032
  source 1..120: mol_type = other DNA

SEQ ID NO: 57940 - DNA, 120 bp, synthetic construct; identical to SEQ ID NO: 25033
  source 1..120: mol_type = other DNA

SEQ ID NO: 57941 - DNA, 120 bp, synthetic construct; identical to SEQ ID NO: 23074
  source 1..120: mol_type = other DNA

SEQ ID NO: 57942 - DNA, 120 bp, synthetic construct; identical to SEQ ID NO: 23075
  source 1..120: mol_type = other DNA

SEQ ID NO: 57943 - DNA, 120 bp, synthetic construct; identical to SEQ ID NO: 20592
  source 1..120: mol_type = other DNA

SEQ ID NO: 57944 - DNA, 120 bp, synthetic construct
  source 1..120: mol_type = other DNA
gccttttactgcttcgtacatggtttaaaatgggctattgcatttgtagtttcttgtcaagccttctttttttttttttttattgatcattcttgggtgtttctcgcagagggggatttg

SEQ ID NO: 57945 - DNA, 120 bp, synthetic construct
  source 1..120: mol_type = other DNA
tcacttcccagacggggtggctgccgggcggaggggctcctcacttctcagatggagtggcccgttagagacgctcctcacctcccagacggggtcgcggccgggcagaggcgctcctca

SEQ ID NO: 57946 - DNA, 120 bp, synthetic construct; identical to SEQ ID NO: 20593
  source 1..120: mol_type = other DNA

SEQ ID NO: 57947 - DNA, 120 bp, synthetic construct; identical to SEQ ID NO: 20594
  source 1..120: mol_type = other DNA

SEQ ID NO: 57948 - DNA, 120 bp, synthetic construct; identical to SEQ ID NO: 20595
  source 1..120: mol_type = other DNA

SEQ ID NO: 57949 - DNA, 120 bp, synthetic construct; identical to SEQ ID NO: 20596
  source 1..120: mol_type = other DNA

SEQ ID NO: 57950 - DNA, 120 bp, synthetic construct
  source 1..120: mol_type = other DNA
agaatgatgagttcatgtcctttgtaggcacatggatgaagctggaaaccatcattctcagcaaactatcgcaaggacaaaaaaccaaacaccgcatgttctcactcataggtgggaatt

SEQ ID NO: 57951 - DNA, 120 bp, synthetic construct
  source 1..120: mol_type = other DNA
agtgatccgctcgcctcagcttcctaaagtcctgggattataggcatgagctaacatgcctgagcttgaatttctagtatagttacggatctgatcatttattctgcctttccttaattg

SEQ ID NO: 57952 - DNA, 120 bp, synthetic construct; identical to SEQ ID NO: 24521
  source 1..120: mol_type = other DNA

SEQ ID NO: 57953 - DNA, 120 bp, synthetic construct
  source 1..120: mol_type = other DNA
aacccatggcaaagaaattaaaaaccttgaaaaaaattagacgaatggctaactagaataaccaatacagagaagtccttaaaggacctgatggagctgaaaaccacagcacaagaacta

SEQ ID NO: 57954 - DNA, 120 bp, synthetic construct
  source 1..120: mol_type = other DNA
aggaagaaactgcatcaactaacgagcaaaataaccagctaacatcataatgacaggatcaaattcacacataacaatattaaccttaaatgtaaatgggttaaatgctccaattaaaag

SEQ ID NO: 57955 - DNA, 120 bp, synthetic construct
  source 1..120: mol_type = other DNA
gtgtagagggaaatttgtagcactaaatgcccacaagagaaagcaggaaagatctaaaattgacaccctaacatcacaattaaaagaactagagaagcaagagcaaacacattcaaaagc

SEQ ID NO: 57956 - DNA, 120 bp, synthetic construct
  source 1..120: mol_type = other DNA
agaggaagtcaaattgtccctgtttgcagatgacatgattgtatgtctagaaaactccatcatctcagcccaaaatctccttaagctgataagcaacttcagcaaagtctcaggatataa

SEQ ID NO: 57957 - DNA, 120 bp, synthetic construct
  source 1..120: mol_type = other DNA
agatgttagacctaaaaccataaaaaccctagaagaaaacctaggcaataccattcaggacataggcatgggcaaggacttcatgtctaaaacaccaaaagcaatggcaacaaaagccaa

SEQ ID NO: 57958 - DNA, 120 bp, synthetic construct; identical to SEQ ID NO: 31638
  source 1..120: mol_type = other DNA

SEQ ID NO: 57959 - DNA, 120 bp, synthetic construct; identical to SEQ ID NO: 20362
  source 1..120: mol_type = other DNA

SEQ ID NO: 57960 - DNA, 120 bp, synthetic construct; identical to SEQ ID NO: 20363
  source 1..120: mol_type = other DNA

SEQ ID NO: 57961 - DNA, 120 bp, synthetic construct; identical to SEQ ID NO: 20364
  source 1..120: mol_type = other DNA

SEQ ID NO: 57962 - DNA, 120 bp, synthetic construct; identical to SEQ ID NO: 24600
  source 1..120: mol_type = other DNA

SEQ ID NO: 57963 - DNA, 120 bp, synthetic construct; identical to SEQ ID NO: 27140
  source 1..120: mol_type = other DNA

SEQ ID NO: 57964 - DNA, 120 bp, synthetic construct
  source 1..120: mol_type = other DNA
ggtggagaggggaggggagggaaagggtggggaggggaggagaggggaggagaggggaggagaggggagggaggggagggaaggggttcttgtttgcgttagaaagctgatatttggaaa

SEQ ID NO: 57965 - DNA, 120 bp, synthetic construct; identical to SEQ ID NO: 27141
  source 1..120: mol_type = other DNA

SEQ ID NO: 57966 - DNA, 120 bp, synthetic construct; identical to SEQ ID NO: 27142
  source 1..120: mol_type = other DNA

SEQ ID NO: 57967 - DNA, 120 bp, synthetic construct; identical to SEQ ID NO: 27143
  source 1..120: mol_type = other DNA

SEQ ID NO: 57968 - DNA, 120 bp, synthetic construct
  source 1..120: mol_type = other DNA
cgttagacctaaaaccataaaaaccctagaagaaaacctaggcattaccattcaggacataggcatgggcaaggacttcatgtccaaaacaccaaaagcaatggcaacaaaagccaaaat

SEQ ID NO: 57969 - DNA, 120 bp, synthetic construct; identical to SEQ ID NO: 27144
  source 1..120: mol_type = other DNA

SEQ ID NO: 57970 - DNA, 120 bp, synthetic construct; identical to SEQ ID NO: 27145
  source 1..120: mol_type = other DNA

SEQ ID NO: 57971 - DNA, 120 bp, synthetic construct
  source 1..120: mol_type = other DNA
tctagaacagtgggatccatatacaacagtcgcatagtggctagtcttcttttgaggtagacaagaaatagaaagaagatcattgaggtacaaagggaagaaccacttgcccagaaacac

SEQ ID NO: 57972 - DNA, 120 bp, synthetic construct; identical to SEQ ID NO: 31415
  source 1..120: mol_type = other DNA

SEQ ID NO: 57973 - DNA, 120 bp, synthetic construct; identical to SEQ ID NO: 31416
  source 1..120: mol_type = other DNA

SEQ ID NO: 57974 - DNA, 120 bp, synthetic construct; identical to SEQ ID NO: 11331
  source 1..120: mol_type = other DNA

SEQ ID NO: 57975 - DNA, 120 bp, synthetic construct; identical to SEQ ID NO: 3181
  source 1..120: mol_type = other DNA

SEQ ID NO: 57976 - DNA, 120 bp, synthetic construct; identical to SEQ ID NO: 11333
  source 1..120: mol_type = other DNA

SEQ ID NO: 57977 - DNA, 120 bp, synthetic construct; identical to SEQ ID NO: 11334
  source 1..120: mol_type = other DNA

SEQ ID NO: 57978 - DNA, 120 bp, synthetic construct; identical to SEQ ID NO: 11335
  source 1..120: mol_type = other DNA

SEQ ID NO: 57979 - DNA, 120 bp, synthetic construct; identical to SEQ ID NO: 11336
  source 1..120: mol_type = other DNA

SEQ ID NO: 57980 - DNA, 120 bp, synthetic construct
  source 1..120: mol_type = other DNA
gacatttatgtaccatgatgcatttcttggtaaactgattttgcaaggaaattctttgaattcgactctgtgaccagattgtaaaaggaaaagggaagatgggcggggaggggaggggag

SEQ ID NO: 57981 - DNA, 120 bp, synthetic construct
  source 1..120: mol_type = other DNA
agcaaactattgcaaggacaaaaaaccaaacaccgcatgttctcactcataggtggggaattgaacaatgagaacacacggacacaggaaggcgaacatcacacaccggggcctgttgtg

SEQ ID NO: 57982 - DNA, 120 bp, synthetic construct; identical to SEQ ID NO: 11483
  source 1..120: mol_type = other DNA

SEQ ID NO: 57983 - DNA, 120 bp, synthetic construct
  source 1..120: mol_type = other DNA
gtatgcaataaatatcagtgcgcccagccattcggggccactaccggtctccgcctcttgatggtattggtcccccaggcccagctgttttctctttatctctttgtcttgtgtctttat

SEQ ID NO: 57984 - DNA, 120 bp, synthetic construct
  source 1..120: mol_type = other DNA
caaaatgcacctgcatctcctgttctcgggctggccggctgcacaggagctacgcctgctcttagagccgagggaacaccccggatttttacaacccccaccctgcgcccagttggccag

SEQ ID NO: 57985 - DNA, 120 bp, synthetic construct; identical to SEQ ID NO: 21042
  source 1..120: mol_type = other DNA

SEQ ID NO: 57986 - DNA, 120 bp, synthetic construct; identical to SEQ ID NO: 27056
  source 1..120: mol_type = other DNA

SEQ ID NO: 57987 - DNA, 120 bp, synthetic construct; identical to SEQ ID NO: 27057
  source 1..120: mol_type = other DNA

SEQ ID NO: 57988 - DNA, 120 bp, synthetic construct
  source 1..120: mol_type = other DNA
aggagggaagggaagaggagaaaagaaaacagtgaagtgagggaattgatcacagacagggagaaaagaatcagagagaattagaaagaaaaaggctcatgcctgtaatcccagcacatt

SEQ ID NO: 57989 - DNA, 120 bp, synthetic construct
  source 1..120: mol_type = other DNA
ttgagcctgggaggtggaggttgcagtgaaccgagattataccattacagtccagcctgggcaacagagccagagaccctgtcataaataaataaataaacaaacaaacaaataaaaatg

SEQ ID NO: 57990 - DNA, 120 bp, synthetic construct
  source 1..120: mol_type = other DNA
taaaagttctgctcacagtcgttatagttttcattgtcactcaactgccttataacattgtcaagttctgccgagccatagacatcatctactccctgatcaccagctgcaacatgagca

SEQ ID NO: 57991 - DNA, 120 bp, synthetic construct
  source 1..120: mol_type = other DNA
tacaagaacgatttccctgcataattttagtacttgaataagtatgcagcagaactccaactatcttttttcctgttttttttaaatttgtaagtaattttataaaatccacctcctcca

SEQ ID NO: 57992 - DNA, 120 bp, synthetic construct; identical to SEQ ID NO: 34083
  source 1..120: mol_type = other DNA

SEQ ID NO: 57993 - DNA, 120 bp, synthetic construct
  source 1..120: mol_type = other DNA
tatgttttttggctgcataaatgtcttcttttgagaagtgtctgttcatatcctttgcccactttttgatggggttgtttgtttttttcttgtaaatttgtttgagttcattgtagattc

SEQ ID NO: 57994 - DNA, 120 bp, synthetic construct
  source 1..120: mol_type = other DNA
ttgtctgctgttggtgtataagaatgcttgtgctttttgtacattgattttgtatcctgagactttgctgaagttgcttatcagcttaaggagattttgggctgagacaatggggttttc

SEQ ID NO: 57995 - DNA, 120 bp, synthetic construct
  source 1..120: mol_type = other DNA
ggtgatatcccctttatcattttttattgcgtctatttgattcttctctctttttctctttattagtcttgctagtggtctatcaattttgttgatcctctcaaaaacccagctcctgga

SEQ ID NO: 57996 - DNA, 120 bp, synthetic construct
  source 1..120: mol_type = other DNA
caacccctgcctttttttgttttccatttgcttggtagatcttcctccatccttttattttgagcctatgtgtgtctctgcacgtgagatgggtttcctgaatatagcacactgatgggt

SEQ ID NO: 57997 - DNA, 120 bp, synthetic construct
  source 1..120: mol_type = other DNA
atatttcttggaggctttgttcatttctttttattcttttttctctatacttcccttctcgcttcatttcattcatttcatcttccatcactgataccctttcttccagttgatcacatc

SEQ ID NO: 57998 - DNA, 120 bp, synthetic construct; identical to SEQ ID NO: 34084
  source 1..120: mol_type = other DNA

SEQ ID NO: 57999 - DNA, 120 bp, synthetic construct; identical to SEQ ID NO: 34085
  source 1..120: mol_type = other DNA

SEQ ID NO: 58000 - DNA, 120 bp, synthetic construct
  source 1..120: mol_type = other DNA
catgaacagacacttctcaaaagaagacatttatgcagccaaaaaacacatgaaaaaatgctcaccatcactggccatcagagaaatgcaaatcaaaaccacaatgacataccatctcac

SEQ ID NO: 58001 - DNA, 120 bp, synthetic construct
  source 1..120: mol_type = other DNA
gcaacaagatgccatcttggaagcagagagtagcccccacttcataatcaaacctgttggcaccttgatcttggaatttctagctcccagaactgtgagaaaataaatttctcttcttta

SEQ ID NO: 58002 - DNA, 120 bp, synthetic construct; identical to SEQ ID NO: 34086
  source 1..120: mol_type = other DNA

SEQ ID NO: 58003 - DNA, 120 bp, synthetic construct
  source 1..120: mol_type = other DNA
gattttgctcgttagttgatgcagtttcttcctagtctcgatggtctttacattttggcatgattttgcagcggctggtaccggttgttcctttccatgtttagcgcttccttcaggagc

SEQ ID NO: 58004 - DNA, 120 bp, synthetic construct
  source 1..120: mol_type = other DNA
atgataaaggggatatcaccaccgatcccacagaaatacaaactaccatcagagaatactacaaacacctctacgcaaacaaactagaaaatctagaagaaatggatacattcctcgaca

SEQ ID NO: 58005 - DNA, 120 bp, synthetic construct
  source 1..120: mol_type = other DNA
cctaggaatccaacttacaagggatgtgaaggacctcttcaaggagaactacaaaccactgctcaaggaaataaaagaggacacaagcaaatggaagaacattccatgctcatgggtagg

SEQ ID NO: 58006 - DNA, 120 bp, synthetic construct
  source 1..120: mol_type = other DNA
caggtgctggagaggatgtggagaagtaggaacacttttacactgttggtgggactgtaaactagttcaaccattgtggaagtcagtgtggcgattcctcagggatctagaactagaaat

SEQ ID NO: 58007 - DNA, 120 bp, synthetic construct; identical to SEQ ID NO: 34087
  source 1..120: mol_type = other DNA

SEQ ID NO: 58008 - DNA, 120 bp, synthetic construct
  source 1..120: mol_type = other DNA
agggctcagaagaagacaggaaaatgtgggaaagtttggaacttcctagagacgtgttgaatggttttgacaaaaatgctgatagtgatataaacaataaggtccaggctgaggtggtct

SEQ ID NO: 58009 - DNA, 120 bp, synthetic construct
  source 1..120: mol_type = other DNA
gatcctcatggagaacctctgctagggcaatgcagaagggaaaagaggggtcagagtccccatacagagtccttactggggcactgcctagtggagctgtgaaaagagggccaccatcct

SEQ ID NO: 58010 - DNA, 120 bp, synthetic construct
  source 1..120: mol_type = other DNA
tgtgttggttccaagtctttgctattgtgaatagtgccgcaataaacatacgtgtgcatgtgtctttatagcagcatgatttataatcctttgggtatatacctatccagtaatgggatg

SEQ ID NO: 58011 - DNA, 120 bp, synthetic construct
  source 1..120: mol_type = other DNA
tttgaagtcaggtagtgtgatgcctccagctttgttcttttggcttaggattaatcactagtattttttaaaaaatacatttcattgtgtatatttaaggtatacaacataatgttatgg

SEQ ID NO: 58012 - DNA, 120 bp, synthetic construct; identical to SEQ ID NO: 34077
  source 1..120: mol_type = other DNA

SEQ ID NO: 58013 - DNA, 120 bp, synthetic construct
  source 1..120: mol_type = other DNA
tggtagtttcttttgctgtgcagctctttagtttaattagatcccatttgtcaattttggcttttgttgccattgcttttggtgttttagacatgaagtccttgcccatgcctatgtcct

SEQ ID NO: 58014 - DNA, 120 bp, synthetic construct
  source 1..120: mol_type = other DNA
attgccctaggccagaacttccaacactatgttgaataggagtggtgagagggcatccctgtcttgtgccagttttcaaagggaatgcttccagtttttgcccattcagtatgatattgg

SEQ ID NO: 58015 - DNA, 120 bp, synthetic construct
  source 1..120: mol_type = other DNA
tcaaaaacccagctcctggattctttaattttttgaagggttttttgtgtctctatttccttcagttctgctctgattttagttatttcttgccttctgctagcttttgaatgtgtttgc

SEQ ID NO: 58016 - DNA, 120 bp, synthetic construct
  source 1..120: mol_type = other DNA
ctatgtgtgtctctgcacgtgagatgggtttcctgaatacagcaaactgatgggtcttgactctttatccaatttgccagtctgtgtcttttaattggagcatttagtccatttacattt

SEQ ID NO: 58017 - DNA, 120 bp, synthetic construct
  source 1..120: mol_type = other DNA
tttttcaaagttttcaacttctttgcctttgttttgaatgtcctcctgtagctcggagtaatttgatcgtctgaagccttcttctctcagctcgtcaaagtcattctccgtccggctttg

SEQ ID NO: 58018 - DNA, 120 bp, synthetic construct
  source 1..120: mol_type = other DNA
ttcttgtaaatttgtttaaattcttcatagattctggatattagccctttgtcagatgggtagattgtaaaaattttctcccactctgtaggttgcctcttcactctgatggtagtttct

SEQ ID NO: 58019 - DNA, 120 bp, synthetic construct
  source 1..120: mol_type = other DNA
gtccttcacatcccttgtaagttggattcctaggtattttattctctttgaagatttttacatattaatgagagatattggtctgaaatttttttgttgtaatatttttgcttttttttt

SEQ ID NO: 58020 - DNA, 120 bp, synthetic construct; identical to SEQ ID NO: 34078
  source 1..120: mol_type = other DNA

SEQ ID NO: 58021 - DNA, 120 bp, synthetic construct; identical to SEQ ID NO: 34079
  source 1..120: mol_type = other DNA

SEQ ID NO: 58022 - DNA, 120 bp, synthetic construct; identical to SEQ ID NO: 34080
  source 1..120: mol_type = other DNA

SEQ ID NO: 58023 - DNA, 120 bp, synthetic construct; identical to SEQ ID NO: 34081
  source 1..120: mol_type = other DNA

SEQ ID NO: 58024 - DNA, 120 bp, synthetic construct
  source 1..120: mol_type = other DNA
ttagggtacatgtgcacaatgtgcaggttagttacatatgtatacatgtgccatgctggtgcgctgcacccactaactcgtcatccagcattaggtgtatctcctaatgctatccctccc

SEQ ID NO: 58025 - DNA, 120 bp, synthetic construct
  source 1..120: mol_type = other DNA
ctttagtttaattagatcccatttgtcaattttgtcttttgttgccattgcttttggagttttagacatgaagtccttgcccatgcctatgtcctgaatggtaatgcctaggttttcttc

SEQ ID NO: 58026 - DNA, 120 bp, synthetic construct
  source 1..120: mol_type = other DNA
ttcagtttgatattggctgtgggtttgtcatagatagctcttattattttgagatatgtcccaccaatacctaatttattgagagtttttagcatgaagggttgttgaattttgtcaaag

SEQ ID NO: 58027 - DNA, 120 bp, synthetic construct
  source 1..120: mol_type = other DNA
tgtacccagtagtcattcaggagcaggttgttcagtttccatgtagttgagtagttttgagtgagattcttaatcctgagttctagtttgattgcactgtggtctgagagatagtttgtt

SEQ ID NO: 58028 - DNA, 120 bp, synthetic construct
  source 1..120: mol_type = other DNA
ttatttctccttcacttatgaagcttagtttggctggatatgaaattctgcattgaaaattcttttctttaggaatgttgaatattggcccccactctcttctggcttttagagtttctg

SEQ ID NO: 58029 - DNA, 120 bp, synthetic construct
  source 1..120: mol_type = other DNA
tgtgttcctttggaggaggagaggcgctgtgctttttagagtttccagtttttctgctctgttttttccccatctttgtggttttatctacttttggtctttgatgatcgtgatgtacag

SEQ ID NO: 58030 - DNA, 120 bp, synthetic construct
  source 1..120: mol_type = other DNA
aatgttggatttccaattgggtaaaaaaaatcataagcctctgctttagttattgtttcctcctccatatcaagatttcttgttggccaggtgcggtggctcacacctgtaatcccagca

SEQ ID NO: 58031 - DNA, 120 bp, synthetic construct; identical to SEQ ID NO: 34082
  source 1..120: mol_type = other DNA

SEQ ID NO: 58032 - DNA, 120 bp, synthetic construct; identical to SEQ ID NO: 9483
  source 1..120: mol_type = other DNA

SEQ ID NO: 58033 - DNA, 120 bp, synthetic construct
  source 1..120: mol_type = other DNA
acttctcagatggggcggccagtcagagacactcctcacttcccagactgggctgccgggcagaggcgctccccacatcccagacatgggcggccgggcggagacgctcctcacttccta

SEQ ID NO: 58034 - DNA, 120 bp, synthetic construct; identical to SEQ ID NO: 2975
  source 1..120: mol_type = other DNA

SEQ ID NO: 58035 - DNA, 120 bp, synthetic construct; identical to SEQ ID NO: 3915
  source 1..120: mol_type = other DNA

SEQ ID NO: 58036 - DNA, 120 bp, synthetic construct
  source 1..120: mol_type = other DNA
actagccgatttgatcaactggaagaaagggtatcagtgactgaagatcaaatgaatgaaatgaagcgagaagagaagtttagagaaaaaagaataaaaagaaacgaacaaagcctccaa

SEQ ID NO: 58037 - DNA, 120 bp, synthetic construct
  source 1..120: mol_type = other DNA
gcagagacacacataggctcaaaataaagggatggaggaagatgtaccaagcaaatggaaaacaaaaaaaggcaggggttgcaatcctagtctctgataaaacagactttaaaccaacaa

SEQ ID NO: 58038 - DNA, 120 bp, synthetic construct
  source 1..120: mol_type = other DNA
aatagatccaataaaaatgataaaggggatatcaccactgatcccacagaaatacaaactaccatcagagaatactataaacacctctatgcaaataaactagaaaatctagaagaaatg

SEQ ID NO: 58039 - DNA, 120 bp, synthetic construct
  source 1..120: mol_type = other DNA
aagcaacttcggcaaagtctcaggatacaaaatcaatgtacaaacatcacaagcattcttaaacaccaacaacagacaaaaagagagccaaatgatgagtgaactcccattcacaattgc

SEQ ID NO: 58040 - DNA, 120 bp, synthetic construct
  source 1..120: mol_type = other DNA
accatcagagtgaacattcaacccacaaaatgggagaaaattttctcaacctactcatctgacaaagggctaatatccagaatctacaatgaactcaaacaaatttacaagaaaaaaaca

SEQ ID NO: 58041 - DNA, 120 bp, synthetic construct; identical to SEQ ID NO: 26887
  source 1..120: mol_type = other DNA

SEQ ID NO: 58042 - DNA, 120 bp, synthetic construct
  source 1..120: mol_type = other DNA
tgttctcgttggtttcaaagaacatctttatttctgccttcatttcgttaggtacccagtagtcattcaggagcaggttgttcagtttccatgtagttgagtggttttgagtgagtttct

SEQ ID NO: 58043 - DNA, 120 bp, synthetic construct
  source 1..120: mol_type = other DNA
gattgtatatccagaaaaccccactgtctcagcccaaaatctccttaagctgagaagcaacttcagcaaagtctcagaatacaaaatcaaagtacaaaaatcacaagcattcttatacac

SEQ ID NO: 58044 - DNA, 120 bp, synthetic construct
  source 1..120: mol_type = other DNA
aacgttagacctaaaaccataaaaacccgagaagaaaacctaggcattaccattcaggacataggcatgggcaaggacttcatgtctaaaacaccaaaagcaatggcaacaaaagccaaa

SEQ ID NO: 58045 - DNA, 120 bp, synthetic construct
  source 1..120: mol_type = other DNA
atatacccaaaggactataaatcatgctgctataaagacacatgcacatctatgtttattgcggcattattcacaatagcaaagacttggaaccaacgcaaatatccaacaatgatagac

SEQ ID NO: 58046 - DNA, 120 bp, synthetic construct; identical to SEQ ID NO: 26888
  source 1..120: mol_type = other DNA

SEQ ID NO: 58047 - DNA, 120 bp, synthetic construct
  source 1..120: mol_type = other DNA
gcggccttccgcagtgtttgtgtccctgggtacttgagattagggagtggtgatgactcttaacgagcatgctgccgtcaagcatctgtttaacaaagcacatcttgcaccacccttaat

SEQ ID NO: 58048 - DNA, 120 bp, synthetic construct
  source 1..120: mol_type = other DNA
ctatctcacaccagctagaatggcgatcattaaaaagtcaggaaacaacagatgctgcagaggatgtgaagaaataggaatgcttggccgggcgcggtggctcacgcctgtaatcccagc

SEQ ID NO: 58049 - DNA, 120 bp, synthetic construct
  source 1..120: mol_type = other DNA
caaagtaacacaagaagagaaaaccaaacaccacatgttttcactcataaatgggagttgaataatgaaaacacatggacacagggaggggaacatcacacaccagggcctgtcaggggg

SEQ ID NO: 58050 - DNA, 120 bp, synthetic construct; identical to SEQ ID NO: 13121
  source 1..120: mol_type = other DNA

SEQ ID NO: 58051 - DNA, 120 bp, synthetic construct
  source 1..120: mol_type = other DNA
caaatctacatctgattggtgtacctgaaagtgatggggagaatggaaccaagttggaaaacactctgcaggatattatccaggagaacttccccaatctagcaaggcaggccaacgttc

SEQ ID NO: 58052 - DNA, 120 bp, synthetic construct
  source 1..120: mol_type = other DNA
cacaataataatgggagactttaacaccccactgtcaacattagacagatcaacgagacagaaagtcaacaaggatacccaggaattgaactcagctctgcaccaagcggacctaataga

SEQ ID NO: 58053 - DNA, 120 bp, synthetic construct
  source 1..120: mol_type = other DNA
ttgaatctctgaatagaccaataacaggatctgaaattgtggcaataatcaatagcttaccaaccaaaaagggtccaggaccagatggattcacagccaaattctaccagaggtacaagg

SEQ ID NO: 58054 - DNA, 120 bp, synthetic construct
  source 1..120: mol_type = other DNA
aggatacaaaatcaatgtacaaaaatcacaagcattcttatacaccaacaaaagacaaacagagagccaaatcatgagtgaactcccattcacaattgcttcaaagagaataaaatacct

SEQ ID NO: 58055 - DNA, 120 bp, synthetic construct
  source 1..120: mol_type = other DNA
aatttacaagaaaaaaacaaacaaccccatcaaaaagtgggcgaaggacatgaacaaacacttctcaaaagaagacatttatgcagccaaaaaacacatgaaaaaatgctcatcatcact

SEQ ID NO: 58056 - DNA, 120 bp, synthetic construct; identical to SEQ ID NO: 13122
  source 1..120: mol_type = other DNA

SEQ ID NO: 58057 - DNA, 120 bp, synthetic construct; identical to SEQ ID NO: 12170
  source 1..120: mol_type = other DNA

SEQ ID NO: 58058 - DNA, 120 bp, synthetic construct; identical to SEQ ID NO: 12171
  source 1..120: mol_type = other DNA

SEQ ID NO: 58059 - DNA, 120 bp, synthetic construct; identical to SEQ ID NO: 28083
  source 1..120: mol_type = other DNA

SEQ ID NO: 58060 - DNA, 120 bp, synthetic construct; identical to SEQ ID NO: 28084
  source 1..120: mol_type = other DNA

SEQ ID NO: 58061 - DNA, 120 bp, synthetic construct; identical to SEQ ID NO: 28085
  source 1..120: mol_type = other DNA

SEQ ID NO: 58062 - DNA, 120 bp, synthetic construct
  source 1..120: mol_type = other DNA
tctcctatcagtgcccttctctagggtctcagatttgtttatggtttctcttcttggtgggatggatggatggatggacggatggatggggaggtgggtggatggatggatggatgtatg

SEQ ID NO: 58063 - DNA, 120 bp, synthetic construct
  source 1..120: mol_type = other DNA
aatcaatggatggatggatggatggatggatagagagaaggatggatgggtggggagatggatggatggatggagaggtggatggatggatggatggatggattgatggacagaaggatg

SEQ ID NO: 58064 - DNA, 120 bp, synthetic construct; identical to SEQ ID NO: 24666
  source 1..120: mol_type = other DNA

SEQ ID NO: 58065 - DNA, 120 bp, synthetic construct; identical to SEQ ID NO: 24667
  source 1..120: mol_type = other DNA

SEQ ID NO: 58066 - DNA, 120 bp, synthetic construct
  source 1..120: mol_type = other DNA
gcctgcgattgcaggcgcgcgccgccacgcctgactggttttcctgtttctttggtggggacggggtttcactgtgttggccggactggtctccagctcctagccgcgagtgatctgcca

SEQ ID NO: 58067 - DNA, 120 bp, synthetic construct
  source 1..120: mol_type = other DNA
gggagacttttcattttgttctgtactaagaaaaattcttctgccttgggatcctattgatctatgactttacccccaaccctgtgctctctgaaacatgtgctgtgtccactcagggtt

SEQ ID NO: 58068 - DNA, 120 bp, synthetic construct; identical to SEQ ID NO: 29059
  source 1..120: mol_type = other DNA

SEQ ID NO: 58069 - DNA, 120 bp, synthetic construct
  source 1..120: mol_type = other DNA
agggggaggggggagggatagcattagaagatatacctaatgctaaatgacgagttaatgggtgcagcacaccagcatggcacatgtatacatatgtaactaacctgcacattgtgcaca

SEQ ID NO: 58070 - DNA, 120 bp, synthetic construct
  source 1..120: mol_type = other DNA
ccctcccacaacacgtgggaattatgggagttacaaaatgagatttgggtggggacacagccaatccatatcagtaacataatagagaaacacgatattatgactagggtaagatcttca

SEQ ID NO: 58071 - DNA, 120 bp, synthetic construct; identical to SEQ ID NO: 14581
  source 1..120: mol_type = other DNA

SEQ ID NO: 58072 - DNA, 120 bp, synthetic construct; identical to SEQ ID NO: 4198
  source 1..120: mol_type = other DNA

SEQ ID NO: 58073 - DNA, 120 bp, synthetic construct; identical to SEQ ID NO: 18224
  source 1..120: mol_type = other DNA

SEQ ID NO: 58074 - DNA, 120 bp, synthetic construct; identical to SEQ ID NO: 18225
  source 1..120: mol_type = other DNA

SEQ ID NO: 58075 - DNA, 120 bp, synthetic construct; identical to SEQ ID NO: 18226
  source 1..120: mol_type = other DNA

SEQ ID NO: 58076 - DNA, 120 bp, synthetic construct
  source 1..120: mol_type = other DNA
acaagaatagctactcctgcttgcttttggtgtccatttgcatggtgtatctttttccacccctttaccttaggtttatgtgagtgagtccttaagtgtcaagtgagtctcttgaagaca

SEQ ID NO: 58077 - DNA, 120 bp, synthetic construct
  source 1..120: mol_type = other DNA
tttggaaacaccgattattcttaggcttggtcatttaacgtaatcccaaacttcctggaggctttgttcatttttttttttttttttttttgagacagagtctcgctctgtcaccaggct

SEQ ID NO: 58078 - DNA, 120 bp, synthetic construct
  source 1..120: mol_type = other DNA
cttgagctggggaggcagaggttgcagtaagccgagatcgtgtgattgcattccagcctgggctacagagagataccctgtctttaaaaaagaaaattaattaattaaaaaaaagactaa

SEQ ID NO: 58079 - DNA, 120 bp, synthetic construct
  source 1..120: mol_type = other DNA
caaatggtatttctagttctagatccctgaggaattgccacactgacttccacaatgattgaactagtttacagtcccaccaacagtgtaaaagtgttcctatttctccacatcctctcc

SEQ ID NO: 58080 - DNA, 120 bp, synthetic construct; identical to SEQ ID NO: 18227
  source 1..120: mol_type = other DNA

SEQ ID NO: 58081 - DNA, 120 bp, synthetic construct; identical to SEQ ID NO: 18228
  source 1..120: mol_type = other DNA

SEQ ID NO: 58082 - DNA, 120 bp, synthetic construct
  source 1..120: mol_type = other DNA
ccgtctgagaagtgaagagcccctccacccggcagtcaccccgtctgggaagtgaggagcgtctccacccagcagccaccccatccgggagggaggtgggggtcagcccccgctaggcca

SEQ ID NO: 58083 - DNA, 120 bp, synthetic construct; identical to SEQ ID NO: 18229
  source 1..120: mol_type = other DNA

SEQ ID NO: 58084 - DNA, 120 bp, synthetic construct
  source 1..120: mol_type = other DNA
gttttaaaaatgaaataatatttttaaaaaaaacaaagttcactaccaagagatctacatataagaaatgtcccctctccctctccctctccctctccctccctctccccacggtctccc

SEQ ID NO: 58085 - DNA, 120 bp, synthetic construct
  source 1..120: mol_type = other DNA
agccgccccatctgagaagtgaggagcccctccgcccggcagccaccccgtctgggaagtgaggagcgtctccgcctggcagccaccccatccgggagggaggtgggggtcagcccccac

SEQ ID NO: 58086 - DNA, 120 bp, synthetic construct
  source 1..120: mol_type = other DNA
gtgccaaatccccctctgcgagaaacacccaagaatgagcaataaaaaaaagaaagaaagaaaaaaaaaaaagaaatgttaccaatatcaggaatgaaaaaagggacatcactacagcat

SEQ ID NO: 58087 - DNA, 120 bp, synthetic construct; identical to SEQ ID NO: 18373
  source 1..120: mol_type = other DNA

SEQ ID NO: 58088 - DNA, 120 bp, synthetic construct; identical to SEQ ID NO: 18374
  source 1..120: mol_type = other DNA

SEQ ID NO: 58089 - DNA, 120 bp, synthetic construct; identical to SEQ ID NO: 17848
  source 1..120: mol_type = other DNA

SEQ ID NO: 58090 - DNA, 120 bp, synthetic construct
  source 1..120: mol_type = other DNA
gaccaataacaggctctgaaattgtggcaataatcaatagcttaccaaccaaaaagagtccaggaccagatggattcgctgccgaattctaccagaggtacaaggaggaactggtaccat

SEQ ID NO: 58091 - DNA, 120 bp, synthetic construct
  source 1..120: mol_type = other DNA
caaaaagagagccaaatcatgagtgaactcccattcacaattgcttcaaagagaataaaagtacttaggaatccagcttacaagggatgtgaaggacctcttcaaggagaactacaaacc

SEQ ID NO: 58092 - DNA, 120 bp, synthetic construct
  source 1..120: mol_type = other DNA
acaaacccatcaaaaagtgggcaaagggtatgaacagacacttctcaaaagaagacatttatgcagccaaaagacacatgaaaaaatgctcatcatcactggccatcagagaaatgcaaa

SEQ ID NO: 58093 - DNA, 120 bp, synthetic construct; identical to SEQ ID NO: 17849
  source 1..120: mol_type = other DNA

SEQ ID NO: 58094 - DNA, 120 bp, synthetic construct; identical to SEQ ID NO: 17850
  source 1..120: mol_type = other DNA

SEQ ID NO: 58095 - DNA, 120 bp, synthetic construct; identical to SEQ ID NO: 23888
  source 1..120: mol_type = other DNA

SEQ ID NO: 58096 - DNA, 120 bp, synthetic construct; identical to SEQ ID NO: 23889
  source 1..120: mol_type = other DNA

SEQ ID NO: 58097 - DNA, 120 bp, synthetic construct; identical to SEQ ID NO: 23890
  source 1..120: mol_type = other DNA

SEQ ID NO: 58098 - DNA, 120 bp, synthetic construct; identical to SEQ ID NO: 23891
  source 1..120: mol_type = other DNA

SEQ ID NO: 58099 - DNA, 120 bp, synthetic construct; identical to SEQ ID NO: 23892
  source 1..120: mol_type = other DNA

SEQ ID NO: 58100 - DNA, 120 bp, synthetic construct; identical to SEQ ID NO: 23893
  source 1..120: mol_type = other DNA

SEQ ID NO: 58101 - DNA, 120 bp, synthetic construct; identical to SEQ ID NO: 23894
  source 1..120: mol_type = other DNA

SEQ ID NO: 58102 - DNA, 120 bp, synthetic construct; identical to SEQ ID NO: 24671
  source 1..120: mol_type = other DNA

SEQ ID NO: 58103 - DNA, 120 bp, synthetic construct; identical to SEQ ID NO: 24672
  source 1..120: mol_type = other DNA

SEQ ID NO: 58104 - DNA, 120 bp, synthetic construct; identical to SEQ ID NO: 24139
  source 1..120: mol_type = other DNA

SEQ ID NO: 58105 - DNA, 120 bp, synthetic construct
  source 1..120: mol_type = other DNA
ggattcaacttcttcccagtttagtgttgggagggtgtgtgtgtccaggaatttatccatttcctctagattttccagttttttttttttttggtgtagaggtgtttatagtattttctg

SEQ ID NO: 58106 - DNA, 120 bp, synthetic construct
  source 1..120: mol_type = other DNA
tgccttcattttgtcatgtacccagtagtcattcaggagcaggttgttcaatttccatgtagttgagtggttttgagtgagtttcttaatcctgagttctagtttgattgcactgtggtc

SEQ ID NO: 58107 - DNA, 120 bp, synthetic construct; identical to SEQ ID NO: 27824
  source 1..120: mol_type = other DNA

SEQ ID NO: 58108 - DNA, 120 bp, synthetic construct
  source 1..120: mol_type = other DNA
tacatatgtaactaacctgcacaatgtgcacatgtaccctaaaacttaaactataataaaaaaaaagaaaaagtcttgtctacaaggtagtttctcagaatcactttcaattctttgatt

SEQ ID NO: 58109 - DNA, 120 bp, synthetic construct; identical to SEQ ID NO: 33779
  source 1..120: mol_type = other DNA

SEQ ID NO: 58110 - DNA, 120 bp, synthetic construct
  source 1..120: mol_type = other DNA
aaaagaatagagacaaacaagtttgaggaagtttttcatattaaacattaatacactaaactatacttctggccaggcggggtggctcacacctgtaatctcagcaccttgggaggccac

SEQ ID NO: 58111 - DNA, 120 bp, synthetic construct; identical to SEQ ID NO: 33781
  source 1..120: mol_type = other DNA

SEQ ID NO: 58112 - DNA, 120 bp, synthetic construct
  source 1..120: mol_type = other DNA
aaaggcaccagcatgatatttttgaaaaacatgaggcaataagaaaaatactgaggctatacagtaatgttaagtgactaaaacacaggactgggccgggcacggtggctcacacctgta

SEQ ID NO: 58113 - DNA, 120 bp, synthetic construct
  source 1..120: mol_type = other DNA
cccacccaggggcaccctgtgtctgatccctaaggtgtcttgtagtcatttcatggactctgacatctccaaagggccttgtattccaaaccaaaagtaagagttttgatcggaagcact

SEQ ID NO: 58114 - DNA, 120 bp, synthetic construct
  source 1..120: mol_type = other DNA
taggtgatttgtgtattatatttgtatattataggaattctatttaaaaaaatttaaaaatcggccgggcatggtggctcacgcctgtcattccagcactttgggaggccgaggcgagcg

SEQ ID NO: 58115 - DNA, 120 bp, synthetic construct
  source 1..120: mol_type = other DNA
gcactccagcctgggcgacagagcgagactccatctcaaaaaaaaaaaaaaaaaaccgatgatgatgatgatgacaacaatgatgatactctcctaagaagagaagtcagcaactgcaag

SEQ ID NO: 58116 - DNA, 120 bp, synthetic construct; identical to SEQ ID NO: 33782
  source 1..120: mol_type = other DNA

SEQ ID NO: 58117 - DNA, 120 bp, synthetic construct; identical to SEQ ID NO: 33783
  source 1..120: mol_type = other DNA

SEQ ID NO: 58118 - DNA, 120 bp, synthetic construct; identical to SEQ ID NO: 15566
  source 1..120: mol_type = other DNA

SEQ ID NO: 58119 - DNA, 120 bp, synthetic construct; identical to SEQ ID NO: 15567
  source 1..120: mol_type = other DNA

SEQ ID NO: 58120 - DNA, 120 bp, synthetic construct; identical to SEQ ID NO: 15568
  source 1..120: mol_type = other DNA

SEQ ID NO: 58121 - DNA, 120 bp, synthetic construct; identical to SEQ ID NO: 15560
  source 1..120: mol_type = other DNA

SEQ ID NO: 58122 - DNA, 120 bp, synthetic construct; identical to SEQ ID NO: 15561
  source 1..120: mol_type = other DNA

SEQ ID NO: 58123 - DNA, 120 bp, synthetic construct; identical to SEQ ID NO: 15562
  source 1..120: mol_type = other DNA

SEQ ID NO: 58124 - DNA, 120 bp, synthetic construct; identical to SEQ ID NO: 15563
  source 1..120: mol_type = other DNA

SEQ ID NO: 58125 - DNA, 120 bp, synthetic construct; identical to SEQ ID NO: 15564
  source 1..120: mol_type = other DNA

SEQ ID NO: 58126 - DNA, 120 bp, synthetic construct
  source 1..120: mol_type = other DNA
gttgagaaaacactaacaggaatcaagagcagaagcagggatactagttgtttcattgttgttgttgttgtttgtttgtttgttttttcagatggagtcttgttccgtcgcccaggctgg

SEQ ID NO: 58127 - DNA, 120 bp, synthetic construct; identical to SEQ ID NO: 3926
  source 1..120: mol_type = other DNA

SEQ ID NO: 58128 - DNA, 120 bp, synthetic construct
  source 1..120: mol_type = other DNA
ccaacatggtgaaaccccgcctctactaaaaatacaaaaattagccgggcacggtggcatgcatctgcaatcccagcttcccaggaggctgaggcaggagaatcgctggaatccgggagg

SEQ ID NO: 58129 - DNA, 120 bp, synthetic construct; identical to SEQ ID NO: 26925
  source 1..120: mol_type = other DNA

SEQ ID NO: 58130 - DNA, 120 bp, synthetic construct; identical to SEQ ID NO: 26926
  source 1..120: mol_type = other DNA

SEQ ID NO: 58131 - DNA, 120 bp, synthetic construct
  source 1..120: mol_type = other DNA
ttcctttgtgttacctgctttgcctttattggcatgtatgagatcccctcatatagatgaaggaatttaacccatggtagatgcttaataaaaatgtattgaggccgggtgcagtggctc

SEQ ID NO: 58132 - DNA, 120 bp, synthetic construct
  source 1..120: mol_type = other DNA
cgagctaaagggggaagttcgaacccatggcaaagaagttaaaaaccttgaaaaaagattagacaaatggctaactagaataaccaatgcagagaagtccttaaaggacctgatggagct

SEQ ID NO: 58133 - DNA, 120 bp, synthetic construct
  source 1..120: mol_type = other DNA
gctaaatgctgcaattaaaagtcacagactggcaaattggattaagagtcaagacccatcagtgtgctgtattcaggaaacccatctcacgtgcagagacacacataggctcaaaataaa

SEQ ID NO: 58134 - DNA, 120 bp, synthetic construct
  source 1..120: mol_type = other DNA
aagcaggaaagatctaaaaattgacaccctaacatcacaattaaaagaactagagaagcaagagcaaacacattcaaaagctagcagaaggcaagaaataactaagatcagagcagaact

SEQ ID NO: 58135 - DNA, 120 bp, synthetic construct; identical to SEQ ID NO: 20389
  source 1..120: mol_type = other DNA

SEQ ID NO: 58136 - DNA, 120 bp, synthetic construct
  source 1..120: mol_type = other DNA
aaaaaaaaaaaaaaaaaaaaaaagatgcctttcatggctccgatcactgcggactttccatctggaccttccttcctctgttgcttcctgatgctatttcaggccctgaaaacgtgcatg

SEQ ID NO: 58137 - DNA, 120 bp, synthetic construct; identical to SEQ ID NO: 18028
  source 1..120: mol_type = other DNA

SEQ ID NO: 58138 - DNA, 120 bp, synthetic construct; identical to SEQ ID NO: 33477
  source 1..120: mol_type = other DNA

SEQ ID NO: 58139 - DNA, 120 bp, synthetic construct; identical to SEQ ID NO: 33478
  source 1..120: mol_type = other DNA

SEQ ID NO: 58140 - DNA, 120 bp, synthetic construct
  source 1..120: mol_type = other DNA
accccccacctcccagacggggcggctggccgggagggggctgccccccacctcccggacggggtggctagccgggccaaaatccacgcttatgtacatacaagagtcataaaaacaaaa

SEQ ID NO: 58141 - DNA, 120 bp, synthetic construct
  source 1..120: mol_type = other DNA
gctgtgtttgtgccactacactccagcctgagtgacagagcaagaacctgtctcaaaaaaaaagaaaaagaaagtagaaagttccggcaaggtcttcactggtttatttgggtaggagat

SEQ ID NO: 58142 - DNA, 120 bp, synthetic construct
  source 1..120: mol_type = other DNA
gaacccgggaggcggaggttgcagtgagctgagatcgcactattgcactccagcctgggcgacagaacaagactccatctccaagaaaataaataaataaaaaataaaacacaaaaaaat

SEQ ID NO: 58143 - DNA, 120 bp, synthetic construct; identical to SEQ ID NO: 33163
  source 1..120: mol_type = other DNA

SEQ ID NO: 58144 - DNA, 120 bp, synthetic construct; identical to SEQ ID NO: 33164
  source 1..120: mol_type = other DNA

SEQ ID NO: 58145 - DNA, 120 bp, synthetic construct; identical to SEQ ID NO: 26522
  source 1..120: mol_type = other DNA

SEQ ID NO: 58146 - DNA, 120 bp, synthetic construct
  source 1..120: mol_type = other DNA
gtgaaggaaaaaggaaaagcttccttttcgtggcttgatagctcatttctttttagcactgaataatactctgttgtctggaagtaccacaatttatttatccattcacctactatagaa

SEQ ID NO: 58147 - DNA, 120 bp, synthetic construct; identical to SEQ ID NO: 26523
  source 1..120: mol_type = other DNA

SEQ ID NO: 58148 - DNA, 120 bp, synthetic construct
  source 1..120: mol_type = other DNA
gcacctcttcacagggcagcaggagagggaatgagtgctgagtgaagggggaagccccttataaaatcatcagctcttgtgagaactcactcactatcacgagaacagcatgggataaac

SEQ ID NO: 58149 - DNA, 120 bp, synthetic construct
  source 1..120: mol_type = other DNA
aagaatatttggcaatgcctggagacatttttggctgtcacaactggggggaaagtgctactggcatttagtcagtagagactagagatgttgctaaatatgaataccttgcaatgcaca

SEQ ID NO: 58150 - DNA, 120 bp, synthetic construct; identical to SEQ ID NO: 26524
  source 1..120: mol_type = other DNA

SEQ ID NO: 58151 - DNA, 120 bp, synthetic construct
  source 1..120: mol_type = other DNA
tcctttcctgtttccttgagatcagctgcgccgccgaccgggaccgcgggaggaacgggacgtttcgttcttcggccgggagagtctggggcgggcggaggaggagacgcgtgggacacc

SEQ ID NO: 58152 - DNA, 120 bp, synthetic construct
  source 1..120: mol_type = other DNA
gggctcacagcaaacttctcctcaaaacccggagactttctttcttggatgtctctttttgctgtttgaagaatttgagccaaccaaaatattaaacctgtcttacacacacacacacac

SEQ ID NO: 58153 - DNA, 120 bp, synthetic construct
  source 1..120: mol_type = other DNA
tttgcctgtttgtcccgcattcactcaaaacagaatgctcctgaagacaagagagagagtaggagaacagacgctattccattacagtaacataaaagactggattttcaggggcaaatt

SEQ ID NO: 58154 - DNA, 120 bp, synthetic construct
  source 1..120: mol_type = other DNA
cagcccagggtgaaggtggacaagtcactttgacccttcaggcttctgagctgttgtttctgaattcagtgaatatttactgagtgcatagaatatgctagatattctgggctaaaggtt

SEQ ID NO: 58155 - DNA, 120 bp, synthetic construct
  source 1..120: mol_type = other DNA
acctctataatcccaaaacgttgggaggccgaggcaggcgaatcatgaagccaggagtttgagaccaggctgaccaacacggtgaaacccagtctctactaaaaatacaaaaaaaattag

SEQ ID NO: 58156 - DNA, 120 bp, synthetic construct
  source 1..120: mol_type = other DNA
gtgggttttcaaggagagactcggagtccaagtgtcctttctgaatatatctggaacttctcattaacaaaagactcaagttataatttaggggacaaggcacccaatgagaatgccttg

SEQ ID NO: 58157 - DNA, 120 bp, synthetic construct
  source 1..120: mol_type = other DNA
ctggttgataagtatatgtagcagcataagaaagaaagaatcccagattgacacccaggcttctcacttggaagcctggatagatactgaatgcaatcacaaaggctgggaagtcaatgg

SEQ ID NO: 58158 - DNA, 120 bp, synthetic construct
  source 1..120: mol_type = other DNA
tccagagtcacattttatttcacaagttagtccattaaaagtttcctgcagtgaggaaatagccagaaagaacactccacccctcctcctttttataactatagggtctggctcgacaga

SEQ ID NO: 58159 - DNA, 120 bp, synthetic construct
  source 1..120: mol_type = other DNA
ctagatacaccaagggaacaaaataactgcacttgtcctctgaggaccgacttaccttttggaagggctgagaaagagagacacatacaagatcactccctgtaatgcaatgttttataa

SEQ ID NO: 58160 - DNA, 120 bp, synthetic construct
  source 1..120: mol_type = other DNA
aatgtgatatctgacgattttaccactacatgcttgcaggccagtgcacagcagatgacgtcatgattgttttagcagtcctatcgttttacttatgatgtcattacaaccctttgctaa

SEQ ID NO: 58161 - DNA, 120 bp, synthetic construct
  source 1..120: mol_type = other DNA
ttgcagtgagctgagatcacaccactacactccagcctaggcgacagagcaagactcagtcaaaaaacaaaaaaaaagtggtcattggagaattattgtgtcacctgttgttttttaatg

SEQ ID NO: 58162 - DNA, 120 bp, synthetic construct
  source 1..120: mol_type = other DNA
ctacacagcactgtctctcaacatgcaggtcaaggttacttattcctccttcaagacgtcattgggttttttagctatggatgccccatcacttttagttctatttgtgaatcaaaggct

SEQ ID NO: 58163 - DNA, 120 bp, synthetic construct
  source 1..120: mol_type = other DNA
gttatctaggtgctgcaggtttagagaggattgccaggagaacacatcgatttttcaggcctgtgatgacgtatctcttgttgaataagtaaacccttccagtaaacagacagttagtat

SEQ ID NO: 58164 - DNA, 120 bp, synthetic construct
  source 1..120: mol_type = other DNA
tgagagaacctctaggtaccacgtaatgttattaacagtagtactgatctcacaatcgccctatgtcccattcacaagatgttctgccaagccataaaaggcccagttaagtttaagaga

SEQ ID NO: 58165 - DNA, 120 bp, synthetic construct
  source 1..120: mol_type = other DNA
agtcttcaacaatgcttgaaaacttccactggttctcagtatgtccaaaattgtcatgtctatgaatgattttctcaatctgaaaatttttatagcaggctaaagaatgagataggtcag

SEQ ID NO: 58166 - DNA, 120 bp, synthetic construct
  source 1..120: mol_type = other DNA
tcctgggccagttttgataaccctcttcatttcacttcagaaaccctgatgatttcttcctgtgctctttttaccttaggacttttactatgacgactgtgactggcccatttcttgttt

SEQ ID NO: 58167 - DNA, 120 bp, synthetic construct
  source 1..120: mol_type = other DNA
gctttaaacagtgagaggatttaatagatatttgatttgcaagtgggatgaagggtggtctaacctttgtcctgtgtttaccttccatgagatcctagaggttgtacagcacagtagtgg

SEQ ID NO: 58168 - DNA, 120 bp, synthetic construct; identical to SEQ ID NO: 29155
  source 1..120: mol_type = other DNA

SEQ ID NO: 58169 - DNA, 120 bp, synthetic construct; identical to SEQ ID NO: 29156
  source 1..120: mol_type = other DNA

SEQ ID NO: 58170 - DNA, 120 bp, synthetic construct; identical to SEQ ID NO: 29157
  source 1..120: mol_type = other DNA

SEQ ID NO: 58171 - DNA, 120 bp, synthetic construct; identical to SEQ ID NO: 29158
  source 1..120: mol_type = other DNA

SEQ ID NO: 58172 - DNA, 120 bp, synthetic construct
  source 1..120: mol_type = other DNA
tgtggaggtcagaaggaggatcccccacccgcagcctcaagaaaaatatgaaaagtggattatgcctctgtagctatattgcctataaactttctgcagaatgacagtattcatatccta

SEQ ID NO: 58173 - DNA, 120 bp, synthetic construct
  source 1..120: mol_type = other DNA
tgtaaatttaatctgtgtgtctcctgtaaataagtgcattagcagtacacaggtggtgtcagagtcagtgatgatggatagaaattctacataaaatccaggcgcagtggctcatgcctt

SEQ ID NO: 58174 - DNA, 120 bp, synthetic construct
  source 1..120: mol_type = other DNA
gcattcaccagcaccaaaaagctcagagacatatatttctttctctgtatatgtattttaaattcaagttagtataaattgacaggcaggtcagagtaatatatgatcttctgagtcccc

SEQ ID NO: 58175 - DNA, 120 bp, synthetic construct
  source 1..120: mol_type = other DNA
tattccacctctttcaaatcggatggtacctatccttcaaactgctatttaatgactgtctgctatgttcaaggcactgctctcaatgttaatacttgatgagatcgggcgcgttcaagg

SEQ ID NO: 58176 - DNA, 120 bp, synthetic construct
  source 1..120: mol_type = other DNA
acccagacacttgctcagaaaggaatcagtggggccctggccttagaaactggctccttcactgctgtagaaacaacataaatttaacataaaacacgtgcttttcttttttcttcttac

SEQ ID NO: 58177 - DNA, 120 bp, synthetic construct
  source 1..120: mol_type = other DNA
gctggcatgatcctgagtccagctttctttaaaagagcttccaaaactgcttaagctttgactgcacaaaacctgcatcacctccagttgagaaactcaagagaataagtaagttatgga

SEQ ID NO: 58178 - DNA, 120 bp, synthetic construct
  source 1..120: mol_type = other DNA
gggccacaattgttggctgttcggtgtttcacatatggttagtccaaactaagatgtgttgtgagtctcaaatacacactggattgtgaagacttaggacaaggaaaacaatgttaataa

SEQ ID NO: 58179 - DNA, 120 bp, synthetic construct
  source 1..120: mol_type = other DNA
aaagtcctgcaatacagagccctgtctaatattgccacaacccacaattgctcaaatgtaaatagatttgagtttattcacattcagatcacctcttaaggccccacctcccaatgctgt

SEQ ID NO: 58180 - DNA, 120 bp, synthetic construct
  source 1..120: mol_type = other DNA
gcatcattgtactccagcctgggcaacaagagtgaaactccatctcgaaaacaaacaaacaaacaaaaaaacactggggccaaagaactctgtgtgctgtatcacctaaccacatttcat

SEQ ID NO: 58181 - DNA, 120 bp, synthetic construct
  source 1..120: mol_type = other DNA
tgaatgagagagtgctggcagcttagtacaggtgttcattgctcttgtatggtactgtctgtggcacggctagataaaatacagtagccactgattcaaatttcaactgaggagtaaaat

SEQ ID NO: 58182 - DNA, 120 bp, synthetic construct
  source 1..120: mol_type = other DNA
ctaggcttttcaaacagaccagtgcttgtatcagcccttaaacatctctggagaaggaaatgggatccttctttggtaattcatttttgacagttggggattaggtgttctgtatctggg

SEQ ID NO: 58183 - DNA, 120 bp, synthetic construct
  source 1..120: mol_type = other DNA
catttatccattcatccacgggagggcacttgggttgcttctgctttttagctattgtgaataacgctgctatgaacatagctgtatgcctttgtcttttaaagcccaaatctgatcaag

SEQ ID NO: 58184 - DNA, 120 bp, synthetic construct
  source 1..120: mol_type = other DNA
gctggcaccatgccctgggactttccagccttcagaaccacgagccagacaaatttcttttctttataaattacccagtctgtggtattctgttatagaaacacaaaatggactaagaca

SEQ ID NO: 58185 - DNA, 120 bp, synthetic construct
  source 1..120: mol_type = other DNA
gcctggtggaatgaggaagggatgcagccaggtagagaaatgccctgccatcacttgcatcagcatctgtgaagagctggccaggcttttgctcacagtggttgacacagtcaaggagca

SEQ ID NO: 58186 - DNA, 120 bp, synthetic construct
  source 1..120: mol_type = other DNA
tttgcccatgttctactcccagagttcctccaagaaattgcggagcaatgcctgtttcatgagagctgagtttgctgtgtcttccacttagaaacaacactgtggaccaggaggacacac

SEQ ID NO: 58187 - DNA, 120 bp, synthetic construct
  source 1..120: mol_type = other DNA
tgagtgaccttgagcaagtttctcaggattccacctccaagtcactctccctttgggatatgcagcactaagttaagcttgcctggaaaacatcacttgaagctggaaaaccacttttaa

SEQ ID NO: 58188 - DNA, 120 bp, synthetic construct
  source 1..120: mol_type = other DNA
gagaatcacctgggacccttaaaaaaatcttaactcttggtccaagaattctattacaatcggtctgggatggggccctacaggtatttttttaaagctctccagttggtaatgcatagc

SEQ ID NO: 58189 - DNA, 120 bp, synthetic construct
  source 1..120: mol_type = other DNA
tggaaaaatcatcagtatttctggaattgaagtaaaatggatagtgagcctctgtgtatgtgaaggcccgcatctggaacatgaaagaacctgtctgatgtgttctagtcaggaaagcag

SEQ ID NO: 58190 - DNA, 120 bp, synthetic construct
  source 1..120: mol_type = other DNA
gtagattgaccctcctggctccagagtacggaactcagacaaacggtcagaagcttacagggaggccaattttggatcaactttaagaagaattttttaaaagctagagcaatcctaaaa

SEQ ID NO: 58191 - DNA, 120 bp, synthetic construct
  source 1..120: mol_type = other DNA
cacctgtaatcccagctactcggaaggctgaggcaggaaaattgcttgaacgcgggaggcggagtttgcagtgaacagagatgaagccactgcactttagcctaggtgacagagcgagac

SEQ ID NO: 58192 - DNA, 120 bp, synthetic construct
  source 1..120: mol_type = other DNA
ccacagaatgtgcaactcagatttccaagtaaaaacacaccaggaagcagatcttagatctctgttatctccttggcaccagctggtattcatcctcaatgctagctagagttgaaataa

SEQ ID NO: 58193 - DNA, 120 bp, synthetic construct
  source 1..120: mol_type = other DNA
acctacagacgattctgagaaaggctcacagggacaccctctgcccctaaaagaacaatttaactctaatttatttctgtcactctgcattttctgacctttcccaagtgtacagtttta

SEQ ID NO: 58194 - DNA, 120 bp, synthetic construct
  source 1..120: mol_type = other DNA
cccatgcgcctgctcttcatgactgtatctgtaccagcaatatttgtattggcaaatcacatgccccagtgggaactacttaaggggaattcaatggatttcattccttttatgtaattg

SEQ ID NO: 58195 - DNA, 120 bp, synthetic construct
  source 1..120: mol_type = other DNA
tctactgtcagtttcagggaaatttgggaccctggagcacaaaccaaaactccaattaaccaggagaggaactcgatccccaggagataagtgaagagtaagaagtctatctttagaaac

SEQ ID NO: 58196 - DNA, 120 bp, synthetic construct
  source 1..120: mol_type = other DNA
ttgcatctccattctcttcactgagggtcaaatggaaagaacacatgggggtcaagtttcagaaaataagagaaatgaagaaatatgtgcccggaagcaagaacgaccgacctcattaaa

SEQ ID NO: 58197 - DNA, 120 bp, synthetic construct
  source 1..120: mol_type = other DNA
cttgatactgtgtatgtctcttcttggcttctcatctccacacaaaaccctcaggtggtaaaaatctaattaaaaaaattatataaagtcttgtagatttattagcctgaacataataga

SEQ ID NO: 58198 - DNA, 120 bp, synthetic construct
  source 1..120: mol_type = other DNA
gaataaaagaatggtaagtagacacaaacctactggctccatcatttctgttttagcaaataacctgccacatataccaatagcccaagagatgggcatgtccctgcatttcctggtcaa

SEQ ID NO: 58199 - DNA, 120 bp, synthetic construct
  source 1..120: mol_type = other DNA
catggcagagctgaaggcaaggggaaggggacaacatagtaagtgactaagtggcttttttttttttttttttgccaagtgaagctgagtcatatggcctctgtcattccaaaactattc

SEQ ID NO: 58200 - DNA, 120 bp, synthetic construct
  source 1..120: mol_type = other DNA
acagctacataaaaacccatgatttcatatagatattccaaaacgtaaaagtaaaccatgcatccacagagacatggaattacagaactggatgctgagctggtcacttgggaggcaggc

SEQ ID NO: 58201 - DNA, 120 bp, synthetic construct
  source 1..120: mol_type = other DNA
gtgtatgcatgtatatgggtatgtgtgtacgtgtgtacgtgtgtgtgcatgtgtgtatatgtgtgtctgtgggcacaggtgtgcctgtgtgtatgtgtatatgtgtatgtgtgtacatgt

SEQ ID NO: 58202 - DNA, 120 bp, synthetic construct
  source 1..120: mol_type = other DNA
gcacagggaaaaggcatctggtcatgtatttggagtaggaggtcttgctttactattgaattgcagggacactttgggaacagtgttcacttctttttgcaaccatttcttcagagaaaa

SEQ ID NO: 58203 - DNA, 120 bp, synthetic construct
  source 1..120: mol_type = other DNA
gaagatgcctgcatagactctagtgttaaagacagaatccttacaaggaacccccatagttacctaactgctgtctccagtggtcatagaagtgtgataacccactaatcatcattctct

SEQ ID NO: 58204 - DNA, 120 bp, synthetic construct
  source 1..120: mol_type = other DNA
cccagtttatgtcttaattcgcagccagggctgattgtagaagcaaatttgcaaacatgtgcaagaagaaatcacacatcctagagcttggatttcctcgtttcttgctatttctatccg

SEQ ID NO: 58205 - DNA, 120 bp, synthetic construct
  source 1..120: mol_type = other DNA
tctcttcctttctaggcagtcttaccaggatgcatgggtgtgcctgcgtaggcacacgcacagctcccaaggactctaaaaaaagatatttttctgcttatatactaataatatgttaga

SEQ ID NO: 58206 - DNA, 120 bp, synthetic construct
  source 1..120: mol_type = other DNA
tttgctggtgcatgtgaagtgtcaatcattgctctcatgagtggtgatgctgatgccgttcccttttttagggaagtgattttcccttacaaagttaccaacagtttcatgttggcccat

SEQ ID NO: 58207 - DNA, 120 bp, synthetic construct
  source 1..120: mol_type = other DNA
caatgcttttctcagtgtgtacatcccataatacagacacgttaccagaaactccctagccaggactttgattgcagctcacattttgtatatggcccatagggaaatgaagtgtgtatt

SEQ ID NO: 58208 - DNA, 120 bp, synthetic construct
  source 1..120: mol_type = other DNA
ggttgagcagcattaatactctggctagatttaaattctggctttctccagttagaactgaaagttatgacaatgtaatcaaaatagaatgtgggtttacagctggccccctggcctggt

SEQ ID NO: 58209 - DNA, 120 bp, synthetic construct
  source 1..120: mol_type = other DNA
agttgaagcaggagctaaaaaaaaaaaaaaaaatgtttcaaagaattccaccaaccagaggatactacctaggacagtttgggcctaacttatctgtgaaggcctccagcttcctccaca

SEQ ID NO: 58210 - DNA, 120 bp, synthetic construct
  source 1..120: mol_type = other DNA
aacgcatgtcaaatattcttaaaacccaagaaagccttgtaacttccttcaatctaatgggaaatgcaggcaaatacaagactgatgtccttgagttttattatcaagactcaagggcac

SEQ ID NO: 58211 - DNA, 120 bp, synthetic construct
  source 1..120: mol_type = other DNA
gtcagatcttcatcctttgtaagcctagcagaaaatatggcagttttattgactactattctttgctgggtgtggtatttttaaactgagacatcagtgtgcctagcacagggcctcaag

SEQ ID NO: 58212 - DNA, 120 bp, synthetic construct
  source 1..120: mol_type = other DNA
gtaaggtacgcccaggaacagtttagaataacgtgcgcgagtcaaagggaagaagaagctcctgcagaccttctgggcactgtgcagggtttgctcctgtccaccgtgccgtgttcctgt

SEQ ID NO: 58213 - DNA, 120 bp, synthetic construct
  source 1..120: mol_type = other DNA
aaaacttaccaccaggggactcgagatggggaaggaaaggtcagaagaggagaggccaggcacggggtgtgggcggcctgcagagctggagcaggtgctccgcccagagccaggcatgca

SEQ ID NO: 58214 - DNA, 120 bp, synthetic construct
  source 1..120: mol_type = other DNA
tgtggcccattttgagttagtttttgcacaagagttgaggtcaaggttctttttttgcctgtgatgttcagtggctctggcaccatttgttgaaaacatgatagccaatgtcaagactta

SEQ ID NO: 58215 - DNA, 120 bp, synthetic construct
  source 1..120: mol_type = other DNA
gggtgccagtcaggatgataaagcttccttttggccactatactacttagaaatgccctgcaaaaggtgcacatcaaagattgaaagctcaatcctggattttaagtgcttcaaaagtgc

SEQ ID NO: 58216 - DNA, 120 bp, synthetic construct
  source 1..120: mol_type = other DNA
ccaaaacgtgctgtcagtgtgttctaatttactctgtaaggaattctggagctaatcataggctcacaaaaagcagcacaggaaagtttcccagataacatctatttcagtggctttcaa

SEQ ID NO: 58217 - DNA, 120 bp, synthetic construct
  source 1..120: mol_type = other DNA
ctaacagatcaccatccttgccatggcttaagaagctgcagatttatttgcttacagctctggaagccagaagtccaaaatcaaggtgtcagtagagtctctctctctgaaacctgctga

SEQ ID NO: 58218 - DNA, 120 bp, synthetic construct
  source 1..120: mol_type = other DNA
actggaagtttttggtaaaatgaaacccattgtctctgttgattactttgatgagtcaagaagtaacatcctgggaatgattggccagtttaaatgagtgcctcaggtttttggaataca

SEQ ID NO: 58219 - DNA, 120 bp, synthetic construct
  source 1..120: mol_type = other DNA
cttcaaatatttaaagggcttttattaggaagaggaatttggcatattggattttgccttcagagaagtggagtcctgagatgctcttagccattcattccagcctccagggctcacctg

SEQ ID NO: 58220 - DNA, 120 bp, synthetic construct
  source 1..120: mol_type = other DNA
caagaatccttgaacatttagaattctggttttagccataccataaagtcagtagtgcgtggtggaattctgctaacgaaaattgcgaaggatcaaggcagagtacagagctggtgtgta

SEQ ID NO: 58221 - DNA, 120 bp, synthetic construct
  source 1..120: mol_type = other DNA
gagttttctgttttaatttgagctgcagggtgactttttttcttctatgctttcatctctctgtggcttcttttgcctcgttaatttcatgccctgcccaggcgggctactgtgctgccc

SEQ ID NO: 58222 - DNA, 120 bp, synthetic construct
  source 1..120: mol_type = other DNA
gagcaggtctcagaaacattctatccggcagtcttattctatgcacccgaagggataagagccatgctttcatgaaacatgggttgtgtgtaaaatgtttaaaaggtatggcaaaatgtg

SEQ ID NO: 58223 - DNA, 120 bp, synthetic construct
  source 1..120: mol_type = other DNA
ttccagagtgattttaaagtcaactgccaggcatccgcacttgcaaattagatgcctggcacatgcttgtgttaaggtaataattcattacaatacaaattacaggggagttcctctggg

SEQ ID NO: 58224 - DNA, 120 bp, synthetic construct
  source 1..120: mol_type = other DNA
gcactgttcatacgtacttctctgtgcacgcaaaggagggcttgctagggaggcctggcagagggtgccattcaaataggattttcaatggaggaatttttaaattttcagttatttgaa

SEQ ID NO: 58225 - DNA, 120 bp, synthetic construct
  source 1..120: mol_type = other DNA
gtgcatttttagttttgatgaccaggtcctttttctgttttttaaagaacttcaaatgatctccagggtacacagcgcttgtgtgctgatgaaaaagctggcagtacaaaggccaccagc

SEQ ID NO: 58226 - DNA, 120 bp, synthetic construct
  source 1..120: mol_type = other DNA
ggggtaaaaagtgatgaaaactaccatcttgaaaggttctggtgatagtggttcctaatgcagtgaaagatgtgtaagtcaaagatttgtaaccagccagggaatgagaggcgaagccat

SEQ ID NO: 58227 - DNA, 120 bp, synthetic construct
  source 1..120: mol_type = other DNA
attcaggctccaatttcctggtgatttcatagtgtagggcacttgcaatcaaaactaggcttaaagcccaaccctcttacattttacccacccccacaaatgcagcaaataaaatgactc

SEQ ID NO: 58228 - DNA, 120 bp, synthetic construct
  source 1..120: mol_type = other DNA
atttttactctacctcgttttggaatcactaatgtggccaatttatagccaaaaatcagtatcgtagagtgagcaatgaatggcatggtgactgtgtgagcgaattcatgccctccctcc

SEQ ID NO: 58229 - DNA, 120 bp, synthetic construct
  source 1..120: mol_type = other DNA
attacaggtgacctcagaggagggagtgagaacatctgggtcatgggtttctactaggagtccacagtgaaaacaagaagaggaatttacgacaagacagtccagcaacttcctttctaa

SEQ ID NO: 58230 - DNA, 120 bp, synthetic construct
  source 1..120: mol_type = other DNA
cttgggagtgtgggccagtttcgcctttagaaccacaattctctgatatgtgcaatgagagaattaattatagactcaaaggattgcatgcagacacacacagatacaaacacatacaca

SEQ ID NO: 58231 - DNA, 120 bp, synthetic construct
  source 1..120: mol_type = other DNA
agatttgaaatcctgctatcttttcggctgccttgtaaaaataacatcaggcgatggggatacgatgccagaggtcacctgtgataagttctgtttatggccattttacttctaggaaga

SEQ ID NO: 58232 - DNA, 120 bp, synthetic construct
  source 1..120: mol_type = other DNA
gcacattcacctggaccagatctattgtaaagccaataatactgaagccccttccaaggccctgggagtcctaacagtgcactggcagtgtctataatttatattatgaaatttgcataa

SEQ ID NO: 58233 - DNA, 120 bp, synthetic construct
  source 1..120: mol_type = other DNA
atctataattctaattttgcttcaaagaacaagttactccggcaatataaaaataaaataactaatttgtcttgtcatcaaacagatagtaagaacaggcaaacctggccctccacactg

SEQ ID NO: 58234 - DNA, 120 bp, synthetic construct
  source 1..120: mol_type = other DNA
gggcacccccttctaggatctgattcctgaggaatcacaatgtggatttcacaatcacttccagtgtcttttgccaacctctgtgaacagatgtgcaattaaaaaaaaaaaaagaaaggg

SEQ ID NO: 58235 - DNA, 120 bp, synthetic construct
  source 1..120: mol_type = other DNA
gcggggccctgaagtcaattgaacacttggatgacagggaacttgccactgccagaggcaatatgctccatttttttgacagttccaacaatttttctttaaactgtcataaaaaattgc

SEQ ID NO: 58236 - DNA, 120 bp, synthetic construct
  source 1..120: mol_type = other DNA
agaacaagtttgcctgtcaacagttctccacagcatactgtgtattctaggattttctaaggttgagcaacggaggttcagcaattttgacttaatttcttcccatcccttttccacgca

SEQ ID NO: 58237 - DNA, 120 bp, synthetic construct
  source 1..120: mol_type = other DNA
caggaggcacactatgtaactgttggttgatatacctagctagatggtgaaatcagattttgtttaaagcatggaggagagggaaaaattaaatcttgcagattctgcagtccttaacat

SEQ ID NO: 58238 - DNA, 120 bp, synthetic construct
  source 1..120: mol_type = other DNA
cctgtgggtggtggtagttaaatctaaccaaagaatgatgtcgtgggtgtttggatattggatggtccacattgggccacattctttcaaacataagagtctgtagaaatatgacctgta

SEQ ID NO: 58239 - DNA, 120 bp, synthetic construct
  source 1..120: mol_type = other DNA
tcatttgtctcatctctcaattaagaaaacctagagcctatctgtgggggttatctgaaggattccagggatgcatatggcactgtctaccgcatgcggtaactgtttcacaaatgatga

SEQ ID NO: 58240 - DNA, 120 bp, synthetic construct
  source 1..120: mol_type = other DNA
tgatcaaagagaaccaggctctagtagttccagtatcctaacgtggacactaattgtttccctccttttcttcatgaaaacagcttctgcacaaatgatagccttgtgaactagccatgg

SEQ ID NO: 58241 - DNA, 120 bp, synthetic construct
  source 1..120: mol_type = other DNA
caatcttcagttctgtttcctttacatatccctccaaaaatcaggcctgcactgcctgtgcactccacaatccacaggcctgaaggaaatgttatctttgatgtagagacttaaagtaaa

SEQ ID NO: 58242 - DNA, 120 bp, synthetic construct
  source 1..120: mol_type = other DNA
agatgttcacgtctaatgaatttcatgtgaaatactggcagtataaccccaaatagaggaaatttgtgaagagtggatgctgcagggcatgagacatctgcacagagttcatctcttcca

SEQ ID NO: 58243 - DNA, 120 bp, synthetic construct
  source 1..120: mol_type = other DNA
aatctgtggtcagaggtttgtgagttttacatgctacattttcagaagttgagaaatagcagtaggctgaaggcaagtcgccatgcctggaattcatgaacactagttgaaagaactggc

SEQ ID NO: 58244 - DNA, 120 bp, synthetic construct
  source 1..120: mol_type = other DNA
gcttttattcttggaaaattttaaggactatctacagcaatggaagaatcgggtgttgggatgtgttcccaggtaataatgactgcaggctgatttggcccttgaggtgtggcctcatgg

SEQ ID NO: 58245 - DNA, 120 bp, synthetic construct
  source 1..120: mol_type = other DNA
tatttatgtattctgtgccagtaggaatgtagccaaaaagagagaaaaggggtctctgcagacatggatgtctctgtgacttgatcactgctaacccaagaagataataaagcagaagca

SEQ ID NO: 58246 - DNA, 120 bp, synthetic construct
  source 1..120: mol_type = other DNA
cccgctgagtcctctaactctaatggattccttcttacaccaaagtgcactagaactaaagtgttttgcttcattctttagacattttgtggtttagggctcaatcagccagggtatgat

SEQ ID NO: 58247 - DNA, 120 bp, synthetic construct
  source 1..120: mol_type = other DNA
tcgggtctcattgtgactcactttgatagccacacgatttaagggtggttcagtagtgatttgatgagtgctgtggctcagggtcattcccctgcccaagcatttcaaattccagaagtt

SEQ ID NO: 58248 - DNA, 120 bp, synthetic construct
  source 1..120: mol_type = other DNA
tcaaaagtcaccttggaaagaggttttgttccttaaccttctgttaaataggaagctccgtgaatgaaaacaactcccttccctaaacattctagtaatgacccaacactgccaagcctg

SEQ ID NO: 58249 - DNA, 120 bp, synthetic construct
  source 1..120: mol_type = other DNA
atttaatattttaaaagatgtttacactggccacagtagctcatacctataatcccaacactttagagggcaaggcaggaggatcacttgaggcttaaaaattagccaggtgtagtggca

SEQ ID NO: 58250 - DNA, 120 bp, synthetic construct
  source 1..120: mol_type = other DNA
tttcaccatggtctcgatctcctgacctcatgatctgcccgcctcagcctcccaatgcactgggattacaggcattatattattctttaaattcacatgagaatttagtatggcttcaaa

SEQ ID NO: 58251 - DNA, 120 bp, synthetic construct
  source 1..120: mol_type = other DNA
atgtaactggagaggggtctgaagtttgaaacaagtgttcctaggcacgggttacagtgtttgttatcatcatacttgatttagaatggggcacaacatgtggattcatggtaactgtta

SEQ ID NO: 58252 - DNA, 120 bp, synthetic construct
  source 1..120: mol_type = other DNA
tcttgcattccataactgggcagttccatcataggagaataccacactgcgttcgtccattctaccgccaatggacatatgggttctttctcttttcttgcagttacaagtttatgaata

SEQ ID NO: 58253 - DNA, 120 bp, synthetic construct
  source 1..120: mol_type = other DNA
agggtttgcatatgtgtatgtgattctgcagtcatggtgaatgacacagtcagggctgcggaaaagcattggtaaagtgtatatttgaggcttcagaagtttgaaaaggctagatttcct

SEQ ID NO: 58254 - DNA, 120 bp, synthetic construct
  source 1..120: mol_type = other DNA
agggaggggtgaagtgacacataagaagtcagcccatcagcctgaaatgctcccccaaatcttcccattcagtgttttctcagtagcaaactcgtgggaaaattggttattttacttaaa

SEQ ID NO: 58255 - DNA, 120 bp, synthetic construct
  source 1..120: mol_type = other DNA
tcctccaaaatctcagaatctgcatttttgcaaagtcctgggtaactcctatgtccatgagagtttgagaagtactggtctcatgagttcctgacatacaaatagtgctgaggccagtat

SEQ ID NO: 58256 - DNA, 120 bp, synthetic construct
  source 1..120: mol_type = other DNA
tcatctgttttgaaagcctggaagattccatgaactaaatccaagtcttacaacacagggaagtgtgtcatactgtgcagggatgaagtctccaatttagcatgaaaacaagagctcctc

SEQ ID NO: 58257 - DNA, 120 bp, synthetic construct
  source 1..120: mol_type = other DNA
cacttctggaaggaaatgataacaatttatttagataatctttgtgcaacaagtcaattcactgaagagatctgctctctaggagcctctgtgaccccaccataactgggaaggctctac

SEQ ID NO: 58258 - DNA, 120 bp, synthetic construct
  source 1..120: mol_type = other DNA
tggttcacactagcacagtgcaaccttcaatgcaaagatctcatcaaaataattcacatggtgggatattttagaaggatgaccaggctagtttgtagtaagaaaaaatcaacaagacta

SEQ ID NO: 58259 - DNA, 120 bp, synthetic construct
  source 1..120: mol_type = other DNA
tgtgcaagtaagtgtgtatacgtgtgtgggcatgtattgtgtacatgtatgtgtgttttatgcatctgtttgcaagtatgtgtgtatgcacataaaagtgtgaatgtacatgtgtgcttg

SEQ ID NO: 58260 - DNA, 120 bp, synthetic construct
  source 1..120: mol_type = other DNA
tccattgtgccccttcaccctgccatctccctggtgcactgttttgcaaagttcagcatacatgagcgtcacctgggaaccttaataaagtgcagatgttgattcagcaaatctgggatg

SEQ ID NO: 58261 - DNA, 120 bp, synthetic construct
  source 1..120: mol_type = other DNA
aggaccccctccaaaaagcagaggcattcttaaaaacacacatctgcacatgttcctcttcatttgaatctgtcagtggcttctcagtgcctttcaaatgaaatctaaagtccttacaag

SEQ ID NO: 58262 - DNA, 120 bp, synthetic construct
  source 1..120: mol_type = other DNA
agccacaaacattcagtgaaaccaaacacccccgcttaacctcaaactaacactaaataataaggaatagacttgggggcagtgcaagtgtatttctaatggtgaaaaccattccccagt

SEQ ID NO: 58263 - DNA, 120 bp, synthetic construct
  source 1..120: mol_type = other DNA
aaccacctcacatggtagggccttgcgggagccagtaataaccttatctccgtcaacatgttctgtcagattgaatggggcagccagagaagccagagttggcacaggaaccaaaacaaa

SEQ ID NO: 58264 - DNA, 120 bp, synthetic construct
  source 1..120: mol_type = other DNA
agctagtaggatgtgataggaaactaaaacctaggggagaccaaagcaaggaaaaatacttcctcatccaaacttgagagcaatttaccgtcaggcctactattaatagatggaatacag

SEQ ID NO: 58265 - DNA, 120 bp, synthetic construct
  source 1..120: mol_type = other DNA
tagctgatgatgaaataggaagagcttagcactaagaaaatccttttggagtttggccttgggggaaaatgaatcactccaaccaggtctgtcttctagaaagtataggatgaaagggct

SEQ ID NO: 58266 - DNA, 120 bp, synthetic construct
  source 1..120: mol_type = other DNA
acaaatccaaccacgcttacaaaaccatcacagagggtcaggcgaggcccttttctaaatgaaaaagaacaggggtggagactgttctgagagcatgctgggttccctgaagggaattct

SEQ ID NO: 58267 - DNA, 120 bp, synthetic construct
  source 1..120: mol_type = other DNA
tgtcagcattcagagacattcacacagcacagcctcccaggctaacagctgtcatggaacagtggagcagctagacgtggccattctgtggcccagtgctgcagaggtcaaagggacaag

SEQ ID NO: 58268 - DNA, 120 bp, synthetic construct
  source 1..120: mol_type = other DNA
agtacttctgattcatccttagcagctaccttcgcgctactttactagatatgttgtagttgaattaatgaacaaaagaacaagcaactttggtgcctggtgtgcatctcagagcagggt

SEQ ID NO: 58269 - DNA, 120 bp, synthetic construct
  source 1..120: mol_type = other DNA
tctaccagatgtctctgagctcacctttggtgataatcatgcaatctccgtcatccccacgtccacactgccccattctgtcccaccccgggttctgtggtgctgtcggctccccagcga

SEQ ID NO: 58270 - DNA, 120 bp, synthetic construct
  source 1..120: mol_type = other DNA
ccagggcaaagggtgctgcccggcacacagtagggactcaaaatgaaactattgtattgaatacataacagatcaacgggtattgctttctgaaatcttttttagcccaattttgtttct

SEQ ID NO: 58271 - DNA, 120 bp, synthetic construct
  source 1..120: mol_type = other DNA
tactttggtttaaccacttatttcattatgactcacaactataggttttctagtttccattattacaaactattgtgtggtttaaatcaatttcatagactagtctagttctatagtcac

SEQ ID NO: 58272 - DNA, 120 bp, synthetic construct
  source 1..120: mol_type = other DNA
tgtgtacacacacacacacacatccttacagacactccccagcttactacagtttgacttaagattttttgactttacgatggtgtgaaagcaatgcacattcaatggaaaccatacttc

SEQ ID NO: 58273 - DNA, 120 bp, synthetic construct
  source 1..120: mol_type = other DNA
ttcagttaaaataaagtgaggagtttctcaagaaaaataataacgagaccaccggcccgccctagatgtccaacaagaatgcacagataacttcgtatatccactttcctgaacctgccc

SEQ ID NO: 58274 - DNA, 120 bp, synthetic construct
  source 1..120: mol_type = other DNA
gaagtcctaagtcatagggcctgctgctcttgatgcagtagaatttgtcttcagatttgcaaagggtaaggcaaaccactagcattttgtatggaacttgatgcaaatacttttaattgt

SEQ ID NO: 58275 - DNA, 120 bp, synthetic construct
  source 1..120: mol_type = other DNA
cacagcagagatcaacgttattgtcaccattttcatatttgaggaaagcatggcacagagagcttggagaagtacttcaaggtcacccaatgaggaagtggctaaacaaaaaccttatct

SEQ ID NO: 58276 - DNA, 120 bp, synthetic construct
  source 1..120: mol_type = other DNA
aataaaaattctttggttcagctgagagaaacttgcaagctgacgtccttgattatttaaaatgaaagcagctgcctgttttcatctctctgcatcctgaggaaactcttctgcaacgtg

SEQ ID NO: 58277 - DNA, 120 bp, synthetic construct
  source 1..120: mol_type = other DNA
ttgcagaagtgcctttgcagatgaggaagaacctggccaaggctcaatccaacatccaaagccagaggccatatttcttcactcttaagataatttgggttcaaattatagtccctttac

SEQ ID NO: 58278 - DNA, 120 bp, synthetic construct
  source 1..120: mol_type = other DNA
tttctcagtatttcatgtgatatctgtctttttcttccagtttgccaaggcacgagtaacaagctcacgcagttgggcacttttgaagatcattttctcagcctccagaggatgttcaat

SEQ ID NO: 58279 - DNA, 120 bp, synthetic construct
  source 1..120: mol_type = other DNA
accttgagttcttgagttcctcaaaagagaaatcacgcatttatgttttctcttcttagaccatccaggaggtggctggttatgtcctcattgccctcaacacagtggagcgaattcctt

SEQ ID NO: 58280 - DNA, 120 bp, synthetic construct
  source 1..120: mol_type = other DNA
ggctaattgaatgtatattgccttcacaccatggcaaagtcgaaaatctgtgttaaatcatgctaagccggggactggctgtgctctgccatcgtacaaataaataaatggaagtcaagt

SEQ ID NO: 58281 - DNA, 120 bp, synthetic construct
  source 1..120: mol_type = other DNA
tgtgcatggctttttcatgagtgttttcacggatggttctgctgtcatctccaacctgataaacaaagcaccacgattcagcccttatgaccccaagcttccttcctcagttccttgctt

SEQ ID NO: 58282 - DNA, 120 bp, synthetic construct
  source 1..120: mol_type = other DNA
catttatgctgtgaccactgactaaaccattctcttccttcctccccatatttctaaatttctaatcattgctcaaagcccaattcagagaaaaccctagctcctccatggcaccatcat

SEQ ID NO: 58283 - DNA, 120 bp, synthetic construct
  source 1..120: mol_type = other DNA
agctcccctgggctgcgcccgttcctgatcgcttggactttctgttctttagagtaagaagtgatcaccatttcctgcttctttgtttctccacaactgtgcagtggatgcctgtttgtt

SEQ ID NO: 58284 - DNA, 120 bp, synthetic construct
  source 1..120: mol_type = other DNA
catgttctgtacaacaactgtgggaaagacccacagagaaagtgctggaaaggggaatgatgggtaggttcatgcagtaaaaagattcaaatactacagggcattgaactataggccaat

SEQ ID NO: 58285 - DNA, 120 bp, synthetic construct
  source 1..120: mol_type = other DNA
tcatctttaaaagactaagaaaaagatgaatctcttaataaaaacctggcccagaacatgagcagcctctctctctcactctcactgtctctctttctgtcacacacacacacgcacaca

SEQ ID NO: 58286 - DNA, 120 bp, synthetic construct
  source 1..120: mol_type = other DNA
ccttggtggtattctggcttcacagtcacatgggagatcaatcgtcagcttttctgtttgaaatctaaattcttcctgactgcaggggacctcgggacccatgaacacctctagtttact

SEQ ID NO: 58287 - DNA, 120 bp, synthetic construct
  source 1..120: mol_type = other DNA
cttgcttaggtgattggatttgttttccctctgaagactccaaagagttactttattacagggtcagatgtgaaccagtaggtgaaggacagtcttgcaaatctcaccgcatgcagttaa

SEQ ID NO: 58288 - DNA, 120 bp, synthetic construct
  source 1..120: mol_type = other DNA
aaagaggcaatcagaaaagggcatggtttgacttagtttgaatgtggtttcgttggaagcaaatgtgtcttcactttttcatgaaaaagtctgcaagtgctctgcgacatccctgggaaa

SEQ ID NO: 58289 - DNA, 120 bp, synthetic construct
  source 1..120: mol_type = other DNA
gacgaagcccttcctaagactaaatccagagcactctgtggtttcagagaagattcctaaattccagagtttggacccagacccaggaattgtgacttggttggcctgagctgtttctaa

SEQ ID NO: 58290 - DNA, 120 bp, synthetic construct
  source 1..120: mol_type = other DNA
tcagtgcacagggcagatctgggtggccaggccacctcacaggagaaacacctgctgctcagccctcaccactcatccagcagccacagccgtgggtattcagttgtctgctgggcacaa

SEQ ID NO: 58291 - DNA, 120 bp, synthetic construct
  source 1..120: mol_type = other DNA
tataaatatttttgaggatcttcttggggaacttaaaacaggaacaggccaggcacagtggctcattggctcatgcctttaatcccagcactttgggagactgaaggggctggattgtct

SEQ ID NO: 58292 - DNA, 120 bp, synthetic construct
  source 1..120: mol_type = other DNA
catcttcctcttctcattaaaaaacaactatacatatcgtttctttaaaacagaagataaagctgtaaagctaggttaggcaatgggaaggcactgaaggttgtgacggggtggggggct

SEQ ID NO: 58293 - DNA, 120 bp, synthetic construct
  source 1..120: mol_type = other DNA
catttcttctgaaattttaccgttaatggctgatgttttgatatttttcaaaagtgcagtttctcctgcaggcaaaaggggacacgttaagtccaggcttgggtcattcactgcggtgta

SEQ ID NO: 58294 - DNA, 120 bp, synthetic construct
  source 1..120: mol_type = other DNA
tcccacattgcacttagttgtcaaatcttttcagtccatttctaacctatattagctcctgtgtctttccttgtctttcacggccttgacacttacaaaacgtgtgggtcaggtactttg

SEQ ID NO: 58295 - DNA, 120 bp, synthetic construct
  source 1..120: mol_type = other DNA
tcctaatggtattggttacaggctcctatgcgagaccactcatctgtgtaggagaaaggaaaaagatgggggaaagaagagcagcagggagaggagaagcctctggatgatactctaacc

SEQ ID NO: 58296 - DNA, 120 bp, synthetic construct
  source 1..120: mol_type = other DNA
aacaaggaactatcttttgcctggaggaactttaaaaacacctgcagttttcaaaaggtgcagtgtgtgcctcccacagcatgacctaccatcattggaaagcagtttgtagtcaatcaa

SEQ ID NO: 58297 - DNA, 120 bp, synthetic construct
  source 1..120: mol_type = other DNA
ttcccttaatctgtttaggctttggcttcctcatccatagaatggagatatgaatgattcctacgccgtagtgctttgagagaattcagtgaaattcctgtgtgtaaaacccttccatgg

SEQ ID NO: 58298 - DNA, 120 bp, synthetic construct
  source 1..120: mol_type = other DNA
ggctccaggttgttgttatagctttacaggcattctgtttgattttctcttccttttattctttgcccttggcttttggaggttttgggttttctgtggggagacgggaagttgtttgat

SEQ ID NO: 58299 - DNA, 120 bp, synthetic construct
  source 1..120: mol_type = other DNA
ccagagaagaagcacagaagacacaaccctgtatcacattttgtttaatggtgccattgaccaaaggggaggatgaaaggcacacacttttttgttgttttttgagacagagtctcacgc

SEQ ID NO: 58300 - DNA, 120 bp, synthetic construct
  source 1..120: mol_type = other DNA
attatattactatatagtcctggagtcccaactccttgaccattacctcaagttatttggaattttgaagaggtgatttgtgttcctgcaataatgtctcaggggtgggctgacgggttt

SEQ ID NO: 58301 - DNA, 120 bp, synthetic construct
  source 1..120: mol_type = other DNA
ttgggcagaagatgacaggactgtgttttgagggataggctgccagcgtggctgcttacaaagtaaagacttggtttataggtttgcatggtgttgggttaaatttctgtcattaaaata

SEQ ID NO: 58302 - DNA, 120 bp, synthetic construct
  source 1..120: mol_type = other DNA
atttcctctcttgcaaattcagagatcaaaaatgtctcccaagttttccggcaacaaattgccgaggtttgtatttgagtcagttacttaaggtgttttggtccccacagccatgccagt

SEQ ID NO: 58303 - DNA, 120 bp, synthetic construct; identical to SEQ ID NO: 29159
  source 1..120: mol_type = other DNA

SEQ ID NO: 58304 - DNA, 120 bp, synthetic construct; identical to SEQ ID NO: 29160
  source 1..120: mol_type = other DNA

SEQ ID NO: 58305 - DNA, 120 bp, synthetic construct; identical to SEQ ID NO: 29161
  source 1..120: mol_type = other DNA

SEQ ID NO: 58306 - DNA, 120 bp, synthetic construct
  source 1..120: mol_type = other DNA
atgtattgccttctccatttctattgttaaagaaacacttacaggggtttctttaacaacttgtgaacagcagcatcagagcccagactacagcataagcagctgctgattccaaaagcc

SEQ ID NO: 58307 - DNA, 120 bp, synthetic construct
  source 1..120: mol_type = other DNA
caactggtctacctttccctacaagtctgtcacagcttcttgttagcaatccctatggttgcccaaaagcattttcagagcctgcataagactgcatcttgtagaaaatttgcagtttca

SEQ ID NO: 58308 - DNA, 120 bp, synthetic construct
  source 1..120: mol_type = other DNA
ttggttccttctgcccctctgtttgaaattctagagccagctgtgggacaattatctgtgtcaaaagccagatgtgaaaacatctcaataacaaactggctgctttgttcaatgctagaa

SEQ ID NO: 58309 - DNA, 120 bp, synthetic construct
  source 1..120: mol_type = other DNA
aaagtcttattcaaactcaccaggaaagagtggtgttactctcgatggcgtctagccaggaatcatggaattatacaccgagcacctgtttgccattttggatgtttccaaacatgaacc

SEQ ID NO: 58310 - DNA, 120 bp, synthetic construct
  source 1..120: mol_type = other DNA
caattttaaaaaatgaggaaaagtgtgcctggtaggggactggggagagcttgagaaagttggaaacgttgccttagaagcctgttttttctccttttagaagctacatagtgtctcact

SEQ ID NO: 58311 - DNA, 120 bp, synthetic construct
  source 1..120: mol_type = other DNA
aataggcgtggaaacagacatagaaattgtgtttgttgaaaggtagctgttcagttaaagaacacctgtatcagagcctgtgtttctaccaacttctgtcaagctctgtagagaaggcgt

SEQ ID NO: 58312 - DNA, 120 bp, synthetic construct
  source 1..120: mol_type = other DNA
catctcacaattgccagttaacgtcttccttctctctctgtcatagggactctggatcccagaaggtgagaaagttaaaattcccgtcgctatcaaggaattaagagaagcaacatctcc

SEQ ID NO: 58313 - DNA, 120 bp, synthetic construct
  source 1..120: mol_type = other DNA
ggactagggaagcagaatcgaggaaaaggaaaaatggctgacttattacctcaaaactctagagaatttagttgatcttacagccaagaaggacaaaagccagagagtaatatcctccgc

SEQ ID NO: 58314 - DNA, 120 bp, synthetic construct
  source 1..120: mol_type = other DNA
tggcttgagtccaggagatctaggctgcagtgagctaaaatctcaccactgcactccagcctgggtgacaaagcaagaccctgctcaaaaaaatagttagatataaatattaatatagat

SEQ ID NO: 58315 - DNA, 120 bp, synthetic construct
  source 1..120: mol_type = other DNA
cttagtgaatgagtaaagttcttaaaatgcaggggacacctgcccttcattcataaggctggacgtacacctctccttaaggagttcaagagctagtggaatcccaattcatacggtaga

SEQ ID NO: 58316 - DNA, 120 bp, synthetic construct
  source 1..120: mol_type = other DNA
agcctcagcttaccctctgactacagtgacctcagacaaaatacgcttcctggccctgtccagttctgactttttataaacaagcacttatccaagttaaagggatattttcaatatcta

SEQ ID NO: 58317 - DNA, 120 bp, synthetic construct
  source 1..120: mol_type = other DNA
agggacggccagggcagggtttagggcaaggaaagcgtgtgagcatatttgtattttagtaaatatttacagtttgccctccatgtctgcagtttcatatccatggattcaatcaaccac

SEQ ID NO: 58318 - DNA, 120 bp, synthetic construct
  source 1..120: mol_type = other DNA
ttctctttagaaatgggtcccgggcagccaggcagcctttagtcactgtagattgaatgctctgtccatttcaaaacctgggactggtctattgaaagagcttatccagctactctttgc

SEQ ID NO: 58319 - DNA, 120 bp, synthetic construct
  source 1..120: mol_type = other DNA
tcaagttgatcttcttgtgcacaaatcagtgcctgtcccatctgcatgtggaaactctcatcaatcagctacctttgaagaattttctctttattgagtgctcagtgtggtctgatgtct

SEQ ID NO: 58320 - DNA, 120 bp, synthetic construct
  source 1..120: mol_type = other DNA
aggcggcccccagcaccccaggaagtggggagcgctcatgcttctctgagcacaaaaatcactgaatatttttgccattctcatggtcataacccgggccacagagtagaacactcctat

SEQ ID NO: 58321 - DNA, 120 bp, synthetic construct
  source 1..120: mol_type = other DNA
gaatggagagcactgccctccttgcccaggcagtctctatcacctggttttagtttcttcttagcacatattgccccagaatatctggttggtttatggcttacttgagtttgtgcctac

SEQ ID NO: 58322 - DNA, 120 bp, synthetic construct
  source 1..120: mol_type = other DNA
ttacgggcagttaacgctttgtctctgttagatttgctttttagttcacaagagaaacctcattcctctgtatttgaatagttgcaatgatggaacagctgtccctggagggaaatgaaa

SEQ ID NO: 58323 - DNA, 120 bp, synthetic construct
  source 1..120: mol_type = other DNA
gcaactcatctcacattcttccaaactatttggacaacagagctttctcatcacctaatgcagattacagtctcacagaattgagtgttcaggcagacactgatgtggttctgtagtaca

SEQ ID NO: 58324 - DNA, 120 bp, synthetic construct
  source 1..120: mol_type = other DNA
ccagcacgttcacatcacacagctttgtggattcctaggtccaaggaccagagatttcagttatgtgagttattttttttatttgttcttgcgtattccacaaagggtcgcagctaaact

SEQ ID NO: 58325 - DNA, 120 bp, synthetic construct
  source 1..120: mol_type = other DNA
actcattccaccctctgattaatccattctacatatggggaaacaaaggcatgcggtgtttacgtcacttgccaagatctcaggatttgatccaggtggcctggttccatggtgcagcct

SEQ ID NO: 58326 - DNA, 120 bp, synthetic construct
  source 1..120: mol_type = other DNA
ttaaataaatacttctgaacaacagcaacaacagaatagtgttgataggaaagccctccactccaccagaaccacgcggccttctcgtcctcccctcctccacttccttcctaagtcact

SEQ ID NO: 58327 - DNA, 120 bp, synthetic construct
  source 1..120: mol_type = other DNA
ggacttccccagaggcacgggaccaaggtgcatgctcacgctgtctcatgctctcacacataatgtgtgtgtgtgtgtgtgtgtatatatatatacacatatacatatatatatatacac

SEQ ID NO: 58328 - DNA, 120 bp, synthetic construct
  source 1..120: mol_type = other DNA
acacagccaagaaggtagacactcagttgaaccagcaagaggctgagcctaactctccctttcgaatgggcaggagttcatgatatttaataaacagaggccttgctctgtaagagacag

SEQ ID NO: 58329 - DNA, 120 bp, synthetic construct
  source 1..120: mol_type = other DNA
agagagaagagagtgtggtagaaacaataataagaagtctgcagaacttgacccctcccagcctctcccacctgccagcctggcccttgcagagagatgcaggctgccattcttaggcca

SEQ ID NO: 58330 - DNA, 120 bp, synthetic construct
  source 1..120: mol_type = other DNA
gcatgtcaagatcacagattttgggctggccaaactgctgggtgcggaagagaaagaataccatgcagaaggaggcaaagtaaggaggtggctttaggtcagccagcattttcctgacac

SEQ ID NO: 58331 - DNA, 120 bp, synthetic construct
  source 1..120: mol_type = other DNA
ttaggtccagagtgagttaactttttccaacagagggaaactaatagttgtctcactgcctcatctctcaccatcccaaggtgcctatcaagtggatggcattggaatcaattttacaca

SEQ ID NO: 58332 - DNA, 120 bp, synthetic construct
  source 1..120: mol_type = other DNA
aataagttaccccagccatctacagcgacaggagcaagggaggagtcgcctcacctctctagaaatgtgtatttgaggagaacactattgaaatgaatttccaagaataatctagtcagt

SEQ ID NO: 58333 - DNA, 120 bp, synthetic construct
  source 1..120: mol_type = other DNA
tctcaaagtcagtggcttagtgccttgatgtggtcacacccattctcaggaagtccgttcccactgaaaacattgtgtgttttcaacatcattgaggctgccacggcagattataatcac

SEQ ID NO: 58334 - DNA, 120 bp, synthetic construct
  source 1..120: mol_type = other DNA
gtgttctcatcatttagctcccacttataagtaagaacatgcggtatttgattttctgttcctgcattagtttgctagggatgatggcctctagctccatccatgttcttgcaaagtaca

SEQ ID NO: 58335 - DNA, 120 bp, synthetic construct
  source 1..120: mol_type = other DNA
ccagtttcaatcttcttcatggctagctagtcatcatttattgagtagggagtcctttattcattgcttttttttttttgtcaactttgtcaacgatcacatggttgtaggtgtgcagcc

SEQ ID NO: 58336 - DNA, 120 bp, synthetic construct
  source 1..120: mol_type = other DNA
cagggatgaagccgacttgattgtggtggcttaagctttttgatgtgctgctggattcgatttgccagtattttgttgaggatttttatgtctatgttcatcagagatattggcctgaag

SEQ ID NO: 58337 - DNA, 120 bp, synthetic construct
  source 1..120: mol_type = other DNA
aagggattgtgattgttcattcatgatcccactgccttcttttcttgcttcatcctctcaggggtgactgtttgggagttgatgacctttggatccaagccatatgacggaatccctgcc

SEQ ID NO: 58338 - DNA, 120 bp, synthetic construct
  source 1..120: mol_type = other DNA
atggaaaataaatgtgatccctcaagaggcatgaggatttccaggcagtagccatacctccaaattgtttaatctggatttagattgttgggtagtcacatgcagcagcacagttaacag

SEQ ID NO: 58339 - DNA, 120 bp, synthetic construct
  source 1..120: mol_type = other DNA
tcatgtcactgtgttctgtcacatgccagcctggcctccctgtgtcccagatcgcattattaaaccctccagcgcattagagcaagcctcagtaaggcgcaggccacatcgtgaactaag

SEQ ID NO: 58340 - DNA, 120 bp, synthetic construct
  source 1..120: mol_type = other DNA
acgtcacggactcccctcctgagctctctggtatgaaatctctgtctctctctctctctcaagctgtgtctactcatttgaacaaattgaattttagggaaaataaccatctagtgaaac

SEQ ID NO: 58341 - DNA, 120 bp, synthetic construct
  source 1..120: mol_type = other DNA
tgttaatgagttaaaatgaaataaaatataaaattcagtttctcacacatgtgaagtgtccagtagccacacgtggctagtggtgaccgtattgaagagcaccgctcatagcacacctcc

SEQ ID NO: 58342 - DNA, 120 bp, synthetic construct
  source 1..120: mol_type = other DNA
tacacacatatatacacacatacaccatgcatacatacacaccacacatacatacagacacaccacacacacgtacacacaacacacaacacagacacgtacacacactacagacatgta

SEQ ID NO: 58343 - DNA, 120 bp, synthetic construct
  source 1..120: mol_type = other DNA
agaaaaatgcaagttaaggcagatgatatacctctttacacaccaactacacacaccaactacacacacacatacacacagacacacacgacacacaccatacacatgtacacacacacc

SEQ ID NO: 58344 - DNA, 120 bp, synthetic construct
  source 1..120: mol_type = other DNA
cctgtcataagtctccttgttgaggacattcacagggttcagaacccagggatcctgcatgggatggtgctttgctgattacttcacctctgatttctttccactttcagaatacataaa

SEQ ID NO: 58345 - DNA, 120 bp, synthetic construct
  source 1..120: mol_type = other DNA
gagcgttagactgacttgtttgtcttccattccattgttttgaaactcagtatgctgcccctgtcttgctgtcatgaaatcagcaagagaggatgacacatcaaataataactcggattc

SEQ ID NO: 58346 - DNA, 120 bp, synthetic construct
  source 1..120: mol_type = other DNA
atctgtgtgtgccctgtaacctgactggttaacagcagtcctttgtaaacagtgttttaaactctcctagtcaatatccaccccatccaatttatcaaggaagaaatggttcagaaaata

SEQ ID NO: 58347 - DNA, 120 bp, synthetic construct
  source 1..120: mol_type = other DNA
gttgctaaattctattaattttaagattgtgcttcccaaaatagttctcacttcatctgtccagggaggcacagttctgtctggtagaagccgcaaagcccttagcctcttcacggatct

SEQ ID NO: 58348 - DNA, 120 bp, synthetic construct
  source 1..120: mol_type = other DNA
gaaaagaatcatctgtggagcttcaaaagaaggggcctggagtctctgcagaccaattcaacccaaatctcgggggctctttcatgattctaatgggcaaccagggttgaaacccttatt

SEQ ID NO: 58349 - DNA, 120 bp, synthetic construct
  source 1..120: mol_type = other DNA
ttaaaagatgatggaaagcacatttagcttggtctgaggcaggttctgttggggcagtgttaatggaaagggctcactgttgttactactagaaaaatccagttgcatgccatactctca

SEQ ID NO: 58350 - DNA, 120 bp, synthetic construct
  source 1..120: mol_type = other DNA
aggctgcaagtctgtcctatctgaattcccagcagaagcactaagaagctccaccctatcacctagcagataaaactatggggaaaacttaaatctgtgcatacatttctggatgcattt

SEQ ID NO: 58351 - DNA, 120 bp, synthetic construct; identical to SEQ ID NO: 9446
  source 1..120: mol_type = other DNA

SEQ ID NO: 58352 - DNA, 120 bp, synthetic construct; identical to SEQ ID NO: 9447
  source 1..120: mol_type = other DNA

SEQ ID NO: 58353 - DNA, 120 bp, synthetic construct; identical to SEQ ID NO: 9448
  source 1..120: mol_type = other DNA

SEQ ID NO: 58354 - DNA, 120 bp, synthetic construct
  source 1..120: mol_type = other DNA
gcccttacctgtagccatctgattgtaatggactaccgagtcgctgctgccggagaagaggttgagcgcgctggggatctcctcggggtacagattgtcaggcagttggtttagcaaact

SEQ ID NO: 58355 - DNA, 120 bp, synthetic construct
  source 1..120: mol_type = other DNA
aaacaagaagaatgcgagaagagagaggaaagaaggatacagctgcatgcaaagcgcaaagcgcgtagcgtggagtcgaaacaccagtaactcattgtgtgtgtttatttgaggtttgcg

SEQ ID NO: 58356 - DNA, 120 bp, synthetic construct
  source 1..120: mol_type = other DNA
tctccctcactccccctctccctcccactgaatttctggcaactactaatctttttactgtcaccatagttttgccttttccagaatgttatgttgttggaatcatacattaggtagact

SEQ ID NO: 58357 - DNA, 120 bp, synthetic construct; identical to SEQ ID NO: 20559
  source 1..120: mol_type = other DNA

SEQ ID NO: 58358 - DNA, 120 bp, synthetic construct; identical to SEQ ID NO: 20560
  source 1..120: mol_type = other DNA

SEQ ID NO: 58359 - DNA, 120 bp, synthetic construct
  source 1..120: mol_type = other DNA
taataaataaataagccagacaaagaaatgagtaaacttttatttctctacttacattaaaaataaagcgggggaggagccaagatggccgaataggaacagctccggtctacagctccc

SEQ ID NO: 58360 - DNA, 120 bp, synthetic construct
  source 1..120: mol_type = other DNA
taaaacgcagagcgtctctcctcctccaaaggaacgcagttcctcaccagcaacggaacaaagctggatggagaatgactttgacgagctgagagaaggcttcagacgatcaaattactc

SEQ ID NO: 58361 - DNA, 120 bp, synthetic construct
  source 1..120: mol_type = other DNA
gaccatcgagactaggaagaaactgcatcaactaacaagcaaaatcaccagctaacatcataatgacaggatcaaattcacacataacaatattaactttaaatatacatggactaaatg

SEQ ID NO: 58362 - DNA, 120 bp, synthetic construct
  source 1..120: mol_type = other DNA
taaagatgttctttgaaactaacgagaacaaagacacaacataccacaatctctgggacacattcaaagcagtgtgtagagggaaatttatagcactaaatgcccacaagagaaagcagg

SEQ ID NO: 58363 - DNA, 120 bp, synthetic construct
  source 1..120: mol_type = other DNA
tgcaaggctggttcaatatacgcaaatcaataaatgtaatccagcatataaacagaaccaaagacaaaaaccccatgattatctcaatagatgcggaaaaagcctttgacaaaattcaac

SEQ ID NO: 58364 - DNA, 120 bp, synthetic construct
  source 1..120: mol_type = other DNA
ctacaactatctgatctttgacaaacctgagaaaaacaagcaatggggaaaggaatccctatttaataaatggtgctgggaaaactggctagccatatgtaggaagctgaaactggatcc

SEQ ID NO: 58365 - DNA, 120 bp, synthetic construct
  source 1..120: mol_type = other DNA
actggattaagaaaatgtggcacatatacaccatggaatattatgcagccataaaaaagggtgagttcatgtcctttgtatggacatggatgaaattggaaatcagcattctcagtaaac

SEQ ID NO: 58366 - DNA, 120 bp, synthetic construct; identical to SEQ ID NO: 19852
  source 1..120: mol_type = other DNA

SEQ ID NO: 58367 - DNA, 120 bp, synthetic construct; identical to SEQ ID NO: 19853
  source 1..120: mol_type = other DNA

SEQ ID NO: 58368 - DNA, 120 bp, synthetic construct; identical to SEQ ID NO: 15154
  source 1..120: mol_type = other DNA

SEQ ID NO: 58369 - DNA, 120 bp, synthetic construct; identical to SEQ ID NO: 24937
  source 1..120: mol_type = other DNA

SEQ ID NO: 58370 - DNA, 120 bp, synthetic construct
  source 1..120: mol_type = other DNA
atccagaataggcaaaacatgctaaacaaaaaaagccagtcacaggagaccacatattgtatgattctgtttatatgaaatatccagaataggcaaatctatagagacagaaagtagatt

SEQ ID NO: 58371 - DNA, 120 bp, synthetic construct; identical to SEQ ID NO: 24938
  source 1..120: mol_type = other DNA

SEQ ID NO: 58372 - DNA, 120 bp, synthetic construct; identical to SEQ ID NO: 24939
  source 1..120: mol_type = other DNA

SEQ ID NO: 58373 - DNA, 120 bp, synthetic construct; identical to SEQ ID NO: 33243
  source 1..120: mol_type = other DNA

SEQ ID NO: 58374 - DNA, 120 bp, synthetic construct; identical to SEQ ID NO: 33244
  source 1..120: mol_type = other DNA

SEQ ID NO: 58375 - DNA, 120 bp, synthetic construct; identical to SEQ ID NO: 33245
  source 1..120: mol_type = other DNA

SEQ ID NO: 58376 - DNA, 120 bp, synthetic construct; identical to SEQ ID NO: 33246
  source 1..120: mol_type = other DNA

SEQ ID NO: 58377 - DNA, 120 bp, synthetic construct; identical to SEQ ID NO: 33247
  source 1..120: mol_type = other DNA

SEQ ID NO: 58378 - DNA, 120 bp, synthetic construct; identical to SEQ ID NO: 33248
  source 1..120: mol_type = other DNA

SEQ ID NO: 58379 - DNA, 120 bp, synthetic construct; identical to SEQ ID NO: 33249
  source 1..120: mol_type = other DNA

SEQ ID NO: 58380 - DNA, 120 bp, synthetic construct; identical to SEQ ID NO: 33250
  source 1..120: mol_type = other DNA

SEQ ID NO: 58381 - DNA, 120 bp, synthetic construct; identical to SEQ ID NO: 33228
  source 1..120: mol_type = other DNA

SEQ ID NO: 58382 - DNA, 120 bp, synthetic construct; identical to SEQ ID NO: 33229
  source 1..120: mol_type = other DNA

SEQ ID NO: 58383 - DNA, 120 bp, synthetic construct; identical to SEQ ID NO: 33230
  source 1..120: mol_type = other DNA

SEQ ID NO: 58384 - DNA, 120 bp, synthetic construct
  source 1..120: mol_type = other DNA
ggtgaccaataggggggttggtgtgagggagcatgagtagttcattttctcttttactttttaaattttatttatttatttatttttgagatagagtcttgctctgttgcccaggctgga

SEQ ID NO: 58385 - DNA, 120 bp, synthetic construct
  source 1..120: mol_type = other DNA
ctcccaaagtgctgagattacaggcgtgagccaccgcgcccggccattacgcctgactaattttttttgtatttttagtagagagagggtttcaccgtgtcagccaggatggtcttgatc

SEQ ID NO: 58386 - DNA, 120 bp, synthetic construct; identical to SEQ ID NO: 33231
  source 1..120: mol_type = other DNA

SEQ ID NO: 58387 - DNA, 120 bp, synthetic construct; identical to SEQ ID NO: 33232
  source 1..120: mol_type = other DNA

SEQ ID NO: 58388 - DNA, 120 bp, synthetic construct; identical to SEQ ID NO: 33233
  source 1..120: mol_type = other DNA

SEQ ID NO: 58389 - DNA, 120 bp, synthetic construct; identical to SEQ ID NO: 33234
  source 1..120: mol_type = other DNA

SEQ ID NO: 58390 - DNA, 120 bp, synthetic construct; identical to SEQ ID NO: 33235
  source 1..120: mol_type = other DNA

SEQ ID NO: 58391 - DNA, 120 bp, synthetic construct; identical to SEQ ID NO: 33236
  source 1..120: mol_type = other DNA

SEQ ID NO: 58392 - DNA, 120 bp, synthetic construct; identical to SEQ ID NO: 33237
  source 1..120: mol_type = other DNA

SEQ ID NO: 58393 - DNA, 120 bp, synthetic construct
  source 1..120: mol_type = other DNA
tgtgcctgtgtctgtggttctgggcctgagcccggggtgtgcctgtgtccgtggttctgggcctgagcccggggtgtgcctgtgtctgtggttctgggcctgagcccggggtgtgtctgt

SEQ ID NO: 58394 - DNA, 120 bp, synthetic construct; identical to SEQ ID NO: 33240
  source 1..120: mol_type = other DNA

SEQ ID NO: 58395 - DNA, 120 bp, synthetic construct
  source 1..120: mol_type = other DNA
gatctgcccgcctcagcctctcaaagtgctgagattacagtcgtgagctaccacacccagccttttctgcattcttttgaatttgaattttttatgattccaatttatttcaatattggc

SEQ ID NO: 58396 - DNA, 120 bp, synthetic construct; identical to SEQ ID NO: 33241
  source 1..120: mol_type = other DNA

SEQ ID NO: 58397 - DNA, 120 bp, synthetic construct; identical to SEQ ID NO: 33242
  source 1..120: mol_type = other DNA

SEQ ID NO: 58398 - DNA, 120 bp, synthetic construct; identical to SEQ ID NO: 33568
  source 1..120: mol_type = other DNA

SEQ ID NO: 58399 - DNA, 120 bp, synthetic construct; identical to SEQ ID NO: 33569
  source 1..120: mol_type = other DNA

SEQ ID NO: 58400 - DNA, 120 bp, synthetic construct; identical to SEQ ID NO: 33570
  source 1..120: mol_type = other DNA

SEQ ID NO: 58401 - DNA, 120 bp, synthetic construct; identical to SEQ ID NO: 33571
  source 1..120: mol_type = other DNA

SEQ ID NO: 58402 - DNA, 120 bp, synthetic construct
  source 1..120: mol_type = other DNA
tgagccaagactgcaccactgcactccagcctgggcaaaagagtgagactccatttcaaaacaaacaaacaaaatcagtaactgtacctaattacttgcccttgcttcatggtttttttt

SEQ ID NO: 58403 - DNA, 120 bp, synthetic construct
  source 1..120: mol_type = other DNA
ggttgcagtgagccgagatcgcgcgactgcactccagcctgggcaacagagggagactccatctcaagggaaaaaaaaaaaaaaaatatatatatatatatatatataaactctgtctgg

SEQ ID NO: 58404 - DNA, 120 bp, synthetic construct; identical to SEQ ID NO: 7538
  source 1..120: mol_type = other DNA

SEQ ID NO: 58405 - DNA, 120 bp, synthetic construct
  source 1..120: mol_type = other DNA
tctgcctggccgcccctactgggaagtgaggagcccctctgcccggccacgaccccctctgggaggtgtacccaacagctcattgagaacgggccatgatgacaatggcggttttgtgga

SEQ ID NO: 58406 - DNA, 120 bp, synthetic construct
  source 1..120: mol_type = other DNA
gattcccgatggagctggccccttcgtggcgaccacaagtcctatcacgccacaagaatctcggcttgttcacctacaaatgaaggccgacgatacttgcagaccgagtctgacatctat

SEQ ID NO: 58407 - DNA, 120 bp, synthetic construct
  source 1..120: mol_type = other DNA
tcagttcagaaagagggaactgcattggatttaaggaaaatcctctctaattccctcgaaaaagcctaatggctgttcatttttgacaagtgacgggagatggctaacctctgacactta

SEQ ID NO: 58408 - DNA, 120 bp, synthetic construct
  source 1..120: mol_type = other DNA
gtcatctttgtattcccactgcctagctcagtcccaagcatatagtgagcacttacatgtttgttgaaatcttgaaaactagggaatcgcattgcttatggaagtccaggatgtaaagac

SEQ ID NO: 58409 - DNA, 120 bp, synthetic construct
  source 1..120: mol_type = other DNA
aacaaattaaagtccttgtaacttctccccacagagcctgtttcagggcagtagtgatggagtggaggttcgatatgatttactggattgtcatatcagcatctgttctcctcaggtgag

SEQ ID NO: 58410 - DNA, 120 bp, synthetic construct
  source 1..120: mol_type = other DNA
aactcctgacctcaggtgatcctcccgccttggcctcccaaagtgctgcaatcacaggtgtgagcctctgcacccagcattttttttttttttttttttttttttttgagtcggagtttc

SEQ ID NO: 58411 - DNA, 120 bp, synthetic construct
  source 1..120: mol_type = other DNA
aaaaaagaatagtacttaattctagcccactccacttcccttccacaggtggcacaactctttacagacaactttgactaccaaactcgagatgactttgtgcgaggtctcttagtgaat

SEQ ID NO: 58412 - DNA, 120 bp, synthetic construct
  source 1..120: mol_type = other DNA
acaaataaacaggctcaacaagattttcttgcccaaggtcattggtaataatggtgggacctgaatctgggtattctgaatgtaagtccagtgttcttttgagtctaccataactgcctg

SEQ ID NO: 58413 - DNA, 120 bp, synthetic construct
  source 1..120: mol_type = other DNA
tgaattgcatggcagtcacactgagccagaaggggcattatttccacccataatcctgtctaaaaaagttgctctcattatcaggatgcacttttcctccacaccctaatggttctgtgt

SEQ ID NO: 58414 - DNA, 120 bp, synthetic construct
  source 1..120: mol_type = other DNA
aggctttctcgtaagtgttttgtctccaaataggaacctattccttcgacatcccaaatggaaagaccagtagtatttggagcaaggagagcattattaagttctagcctcagcatagac

SEQ ID NO: 58415 - DNA, 120 bp, synthetic construct
  source 1..120: mol_type = other DNA
acataattccacagaacctgtatcatctcccttttgtccacccatgtcatcagtatggatttgcttggatgtccaggtataggtgaatgcttaggaatatactgcagctcccttctttct

SEQ ID NO: 58416 - DNA, 120 bp, synthetic construct
  source 1..120: mol_type = other DNA
gactgaaaggagcagaggctggaactacagtattctttcccctgctagcaaccatgtgcctcccatcctgactgtggagttgggatgtggaagtggggctggaacaaagcttctgcctag

SEQ ID NO: 58417 - DNA, 120 bp, synthetic construct; identical to SEQ ID NO: 11196
  source 1..120: mol_type = other DNA

SEQ ID NO: 58418 - DNA, 120 bp, synthetic construct; identical to SEQ ID NO: 11197
  source 1..120: mol_type = other DNA

SEQ ID NO: 58419 - DNA, 120 bp, synthetic construct; identical to SEQ ID NO: 28788
  source 1..120: mol_type = other DNA

SEQ ID NO: 58420 - DNA, 120 bp, synthetic construct; identical to SEQ ID NO: 28789
  source 1..120: mol_type = other DNA

SEQ ID NO: 58421 - DNA, 120 bp, synthetic construct
  source 1..120: mol_type = other DNA
tgtatttattttgagacagggtcttgctctttcacccaggctggagtgcagtgatacaatcattgtcctggaactacaggcgcccgtcaccacacgagacttatttatttttatttttta

SEQ ID NO: 58422 - DNA, 120 bp, synthetic construct
  source 1..120: mol_type = other DNA
agaaattattaggtaaattactaggttttctttcccttttttttttttttttttttttggcgacaaggtcttgctctgtcgcccaggctggagtgcagtggcaagatcttggctcactgc

SEQ ID NO: 58423 - DNA, 120 bp, synthetic construct
  source 1..120: mol_type = other DNA
gccactgcactccagcctaggtgatggagcaagactccgtctcgaaaagaaaaaaaaaagactaagttgaattcactcaaaaattgttggagtctggctctaaaacaacacatctctcaa

SEQ ID NO: 58424 - DNA, 120 bp, synthetic construct; identical to SEQ ID NO: 16391
  source 1..120: mol_type = other DNA

SEQ ID NO: 58425 - DNA, 120 bp, synthetic construct
  source 1..120: mol_type = other DNA
tggcagatgcctgtaattccagctactcaggaggctgaggcaggagaattgcttgaaccctgaaggtggaggttgcagtgagccaagatcgtgccactgcactccagcctgagcgacaga

SEQ ID NO: 58426 - DNA, 120 bp, synthetic construct
  source 1..120: mol_type = other DNA
gaaaccccatctctactaaaaatacaaaattagccaggcgtggtggtgcatgcctgtaagccaagctactcgggaggctgaggcaggagaatcgcttgaacccgggaggcggaggttgtg

SEQ ID NO: 58427 - DNA, 120 bp, synthetic construct
  source 1..120: mol_type = other DNA
atctacttgagaggctgaggtgggaggatcgcttgagatctgaaggtcgaggcagcagtgagctatgacccctcaaaaaaagaaaaaaaaaaggaaaaagaaaaaccattctattgttcc

SEQ ID NO: 58428 - DNA, 120 bp, synthetic construct
  source 1..120: mol_type = other DNA
gctttagggaggtggtacctaaactagatcttagcaacatttcccaaagtatgagaggccaacagcaaggagaaagtctcaatggtattaacacctccactgctagtatttttctacgat

SEQ ID NO: 58429 - DNA, 120 bp, synthetic construct
  source 1..120: mol_type = other DNA
aagatcctatacatcccaccactaaaagtacaaaaccatgaataagtggtggtaataaatataggcatcacacctcattaagatagtcctctaggtcagccaggatgcggatatagaacc

SEQ ID NO: 58430 - DNA, 120 bp, synthetic construct; identical to SEQ ID NO: 16392
  source 1..120: mol_type = other DNA

SEQ ID NO: 58431 - DNA, 120 bp, synthetic construct
  source 1..120: mol_type = other DNA
tgtggttgcagtgagccaagattgcatcactacactccagcctgggaagagtgagaccctgtctcaaaaaaagcactttttatctgtagtttgtgcaaactggctaagaaaaaataaata

SEQ ID NO: 58432 - DNA, 120 bp, synthetic construct
  source 1..120: mol_type = other DNA
tctgtatttataaaagtatagctttatagtcttagagttttttttgttttgtttcgttttctgagacagagtcttgctctgtcgcccagactggagtgcagtggcacgatctcggctcac

SEQ ID NO: 58433 - DNA, 120 bp, synthetic construct
  source 1..120: mol_type = other DNA
gaactaaattgccagagaagcagagatcaagttctggcggtcattgcacaatgtgaacgtactaaatgccactgatttgtatacctgaaaatggttaaaatgggaaatgttatgtatcac

SEQ ID NO: 58434 - DNA, 120 bp, synthetic construct; identical to SEQ ID NO: 755
  source 1..120: mol_type = other DNA

SEQ ID NO: 58435 - DNA, 120 bp, synthetic construct
  source 1..120: mol_type = other DNA
ctaattttagactattctgattaggtatacaagttagtttacaggttaacaaaaaaaaatttggctgggtgcggtggttcacgcctgtaattccagcactttgggaggctgaggtgggca

SEQ ID NO: 58436 - DNA, 120 bp, synthetic construct
  source 1..120: mol_type = other DNA
cttcccaaccacaactactgatggaaagccctagatgtatacccttgcttaggatcctaactcggacattcagtctcactagagatcctggggttcacttaaaaaacaaaaacaaaaaca

SEQ ID NO: 58437 - DNA, 120 bp, synthetic construct
  source 1..120: mol_type = other DNA
ccccacaaaacagaaaaagatcaccagctaccttaaaatggtcttaggctactggatgttgcctgaaaccatctccagacttgagtatgtatttatgtaacaaaatacaaaccaaatggc

SEQ ID NO: 58438 - DNA, 120 bp, synthetic construct
  source 1..120: mol_type = other DNA
cgtcatgtacatgccagcgggaaactgtccttgccttttccccacaaggggacctttatgtcctcccaaactgttccccaattcattttacctctgaaaccctcaccttaaccaacggca

SEQ ID NO: 58439 - DNA, 120 bp, synthetic construct
  source 1..120: mol_type = other DNA
gaggctttggagacaaatcacaaagtctctcccagcatgcccgcttcggataacgcgccctcctcatcacccatatccctgcttctcctttataaattccaaacagaagcaacaataatc

SEQ ID NO: 58440 - DNA, 120 bp, synthetic construct
  source 1..120: mol_type = other DNA
atgggcacattcacacttttactgagtaaactatgctgcactttcacaccccaatgcctctcatccaagctaaacaagagaagtgaatagatgccttaccccaaaggttctcaaagtata

SEQ ID NO: 58441 - DNA, 120 bp, synthetic construct
  source 1..120: mol_type = other DNA
cctttttactcctggaacatcaagctcgctctctgctcctcctgtcaggcgctgtcttcagctgattcttcccctaactcctcctcattggatctcacctcaggtggtccctacttaagg

SEQ ID NO: 58442 - DNA, 120 bp, synthetic construct; identical to SEQ ID NO: 16393
  source 1..120: mol_type = other DNA

SEQ ID NO: 58443 - DNA, 120 bp, synthetic construct
  source 1..120: mol_type = other DNA
cacaacccctaaaagatacacacacaccccctaaaagagacacacacacacccctaaaagatctttgagaccagcctgggcaacatagtgagaccctgtctctacaaaaaataaaaaatt

SEQ ID NO: 58444 - DNA, 120 bp, synthetic construct
  source 1..120: mol_type = other DNA
aagtcttcatgaatttcagttaggcaaaggttttttagacaggatccagaaaataattactataaaagaaaaaactgggccgggcgcagtggctcatgcctgtaatccctgcactttggg

SEQ ID NO: 58445 - DNA, 120 bp, synthetic construct
  source 1..120: mol_type = other DNA
ctcccaaagtgctgggattacaggcatgagccaccacgcccagccgagttcattacatttttataccaaccttttattcctgaagtatatccagtttggtcatgtatattgtctctttta

SEQ ID NO: 58446 - DNA, 120 bp, synthetic construct; identical to SEQ ID NO: 16394
  source 1..120: mol_type = other DNA

SEQ ID NO: 58447 - DNA, 120 bp, synthetic construct
  source 1..120: mol_type = other DNA
gcctcagtttctccactgggaaaaagggtattactagtacctaccggcatagggttattactaatgcagattaaataattatttgtaaaacacttagcacagtgccaggcagaggaggtg

SEQ ID NO: 58448 - DNA, 120 bp, synthetic construct; identical to SEQ ID NO: 16395
  source 1..120: mol_type = other DNA

SEQ ID NO: 58449 - DNA, 120 bp, synthetic construct; identical to SEQ ID NO: 16396
  source 1..120: mol_type = other DNA

SEQ ID NO: 58450 - DNA, 120 bp, synthetic construct
  source 1..120: mol_type = other DNA
agggcaccaggagtgggcaaggagaggagccgaagtactcacctcggaagtagcccccgtaggtgccctgcttgtggtcaaacacccgttcgttgttctccaccaggctgcccagcttct

SEQ ID NO: 58451 - DNA, 120 bp, synthetic construct; identical to SEQ ID NO: 16397
  source 1..120: mol_type = other DNA

SEQ ID NO: 58452 - DNA, 120 bp, synthetic construct
  source 1..120: mol_type = other DNA
acaaacgctgcggaaggccgcagggccctctgcctaggaaaaccagagacccttgttcacgtttatctgctgaccttccctccactattgtcctatgaccctgccaaatccccctctccg

SEQ ID NO: 58453 - DNA, 120 bp, synthetic construct
  source 1..120: mol_type = other DNA
gcactttgggaggccaaggcaggcggttgggaggtggaggttgtagcgagccgagatcacggcactgcactccagcctgggcaccattgagcactgagtgaacgagactccgtctgcaat

SEQ ID NO: 58454 - DNA, 120 bp, synthetic construct
  source 1..120: mol_type = other DNA
tagtgcagtggctcatgcctgtaatctcagcactttcagaggccaaggcaggtggatcacctgaggtcaggagttcgagaccagccttgctaacatggtgaaaccccgtctctactaaaa

SEQ ID NO: 58455 - DNA, 120 bp, synthetic construct; identical to SEQ ID NO: 16378
  source 1..120: mol_type = other DNA

SEQ ID NO: 58456 - DNA, 120 bp, synthetic construct; identical to SEQ ID NO: 16378
  source 1..120: mol_type = other DNA

SEQ ID NO: 58457 - DNA, 120 bp, synthetic construct; identical to SEQ ID NO: 58454
  source 1..120: mol_type = other DNA

SEQ ID NO: 58458 - DNA, 120 bp, synthetic construct; identical to SEQ ID NO: 58453
  source 1..120: mol_type = other DNA

SEQ ID NO: 58459 - DNA, 120 bp, synthetic construct
  source 1..120: mol_type = other DNA
cccctctccgataaacacccaagaatgatcaataaatactaaaaaaaaaaaaaaaaaaaaaaaatttttgtgccctgctactggcctcaagtgatcgtcctgcctcggcctcccacagtg

SEQ ID NO: 58460 - DNA, 120 bp, synthetic construct; identical to SEQ ID NO: 16379
  source 1..120: mol_type = other DNA

SEQ ID NO: 58461 - DNA, 120 bp, synthetic construct
  source 1..120: mol_type = other DNA
ctgtgcactccatcatcagcaaaatgatcattaatgaggagctgatggtaggggccggggtgggaagcgggcaggtggagccatggagggattggagcgtaggggccggggtgggaagcg

SEQ ID NO: 58462 - DNA, 120 bp, synthetic construct
  source 1..120: mol_type = other DNA
ttattacaggtgtgagccaccacgcctggctggaagaggtgtttttaggtcaaggaagcttacgagaatctgatgaaagccatgggcctttttcctaggaagaatgtacatgaggacatg

SEQ ID NO: 58463 - DNA, 120 bp, synthetic construct
  source 1..120: mol_type = other DNA
tcctgggttcaagtgattctgctgcctcagcctctcgagtagctgagactacaggcccccgccaccatgtccagctaattttttgtatttttagtagagatggggtttcttcatgttggc

SEQ ID NO: 58464 - DNA, 120 bp, synthetic construct
  source 1..120: mol_type = other DNA
cctgattacacataaggattaagagaagtgaagggagtaactctcccaccactcgactccatctgatttaatgacacctcctctgcctggcactgtgctaagtgttttacaaataattat

SEQ ID NO: 58465 - DNA, 120 bp, synthetic construct; identical to SEQ ID NO: 16394
  source 1..120: mol_type = other DNA

SEQ ID NO: 58466 - DNA, 120 bp, synthetic construct; identical to SEQ ID NO: 58445
  source 1..120: mol_type = other DNA

SEQ ID NO: 58467 - DNA, 120 bp, synthetic construct; identical to SEQ ID NO: 58444
  source 1..120: mol_type = other DNA

SEQ ID NO: 58468 - DNA, 120 bp, synthetic construct; identical to SEQ ID NO: 58443
  source 1..120: mol_type = other DNA

SEQ ID NO: 58469 - DNA, 120 bp, synthetic construct
  source 1..120: mol_type = other DNA
acatttcctagttgcctcaaatatacttttacatgatctacacttccagacacagcttttttttttttttgaacagtcttgctccattacccaggctggagtgcagtggcacaacctcgg

SEQ ID NO: 58470 - DNA, 120 bp, synthetic construct; identical to SEQ ID NO: 16380
  source 1..120: mol_type = other DNA

SEQ ID NO: 58471 - DNA, 120 bp, synthetic construct
  source 1..120: mol_type = other DNA
ctgcttcggcctcccaaagagctggaattacagacgtgagccaccacgcccggccatatcttactactattatttttcaatctgcctttctccatccagcacaaaaggtaagcttttggc

SEQ ID NO: 58472 - DNA, 120 bp, synthetic construct; identical to SEQ ID NO: 16381
  source 1..120: mol_type = other DNA

SEQ ID NO: 58473 - DNA, 120 bp, synthetic construct; identical to SEQ ID NO: 16382
  source 1..120: mol_type = other DNA

SEQ ID NO: 58474 - DNA, 120 bp, synthetic construct; identical to SEQ ID NO: 16383
  source 1..120: mol_type = other DNA

SEQ ID NO: 58475 - DNA, 120 bp, synthetic construct; identical to SEQ ID NO: 16384
  source 1..120: mol_type = other DNA

SEQ ID NO: 58476 - DNA, 120 bp, synthetic construct; identical to SEQ ID NO: 16385
  source 1..120: mol_type = other DNA

SEQ ID NO: 58477 - DNA, 120 bp, synthetic construct
  source 1..120: mol_type = other DNA
aataagaaaatatatataactagaaacggggaaaaaaaaaagaggatgagaaaatacatgtaggctaggtgtggtggctcatgcctgtaatcccagtactctgggaggctgaggcgagcg

SEQ ID NO: 58478 - DNA, 120 bp, synthetic construct
  source 1..120: mol_type = other DNA
ctggctaacatggtgaaaccctgtctctactaaaagtacaaaaaattagccaggcgtggtggcgggtggctgtagtcccagctactcaggaggctgaggcaggagaatggtgtgaacccg

SEQ ID NO: 58479 - DNA, 120 bp, synthetic construct
  source 1..120: mol_type = other DNA
ctccgcctcccaaagtgctgggattacaggcgtgagccaccacgcccagccaagaaacactcttaatcatacagcatggcagagttaaaaataaaaggacaggaaacgtccttttcataa

SEQ ID NO: 58480 - DNA, 120 bp, synthetic construct; identical to SEQ ID NO: 16386
  source 1..120: mol_type = other DNA

SEQ ID NO: 58481 - DNA, 120 bp, synthetic construct; identical to SEQ ID NO: 757
  source 1..120: mol_type = other DNA

SEQ ID NO: 58482 - DNA, 120 bp, synthetic construct
  source 1..120: mol_type = other DNA
tggcttttcaacattcaggatctttttctccctccattaccactaggctcttcagatgaggatgaggatgaggacggagtcagtgctgcaactttcttgaagaagaaatcagaagctcct

SEQ ID NO: 58483 - DNA, 120 bp, synthetic construct
  source 1..120: mol_type = other DNA
gttaatggcctctgttccttccaaacaggccattgttgctgagcgaggatgaagaagataccaagagagttgtccgcagtgccaaggacaagaggtaaagccatggcgaggctgggtgat

SEQ ID NO: 58484 - DNA, 120 bp, synthetic construct
  source 1..120: mol_type = other DNA
gggcgataaaagcaaaactccacctcaaaaaacaccgctaaaataatccaaaaaataataaaaagggaaaagaggcaggcaagatggtgcatgcctgtagtcccaactactctggaggct

SEQ ID NO: 58485 - DNA, 120 bp, synthetic construct
  source 1..120: mol_type = other DNA
cagcttcttaactggccttaagtctacagcctctacctgtctcctctcattttaccgccgagaagtccttagtgacttctcactgctcacagaaggaaatgcaaaatgcttgattggtat

SEQ ID NO: 58486 - DNA, 120 bp, synthetic construct
  source 1..120: mol_type = other DNA
tgttggaattacaggagtgagccactgtgcctggctagcattgtctacttttttttttttgagatggagtttcgcttttgttgtccaggctggagtccagtggctcgatctcggctcacc

SEQ ID NO: 58487 - DNA, 120 bp, synthetic construct
  source 1..120: mol_type = other DNA
agccaagatcgtgccactgcactccagcctgagcgacagagcaagactctgtctccaaaaaaaaaaagttaaaaaaaaaaaccaaggggttcattgtacgtctgtaaatccataaatatc

SEQ ID NO: 58488 - DNA, 120 bp, synthetic construct; identical to SEQ ID NO: 16387
  source 1..120: mol_type = other DNA

SEQ ID NO: 58489 - DNA, 120 bp, synthetic construct
  source 1..120: mol_type = other DNA
cggagtcttgctccatcacctaggctggagtgcagtggcgcgatcttggctcactgcaagctccacctcccgggttcatgccattctcctgcctcagcctcccgagtagctgggactaca

SEQ ID NO: 58490 - DNA, 120 bp, synthetic construct; identical to SEQ ID NO: 16388
  source 1..120: mol_type = other DNA

SEQ ID NO: 58491 - DNA, 120 bp, synthetic construct
  source 1..120: mol_type = other DNA
tgggttcaaacgattctcctgcctcagccttgtgagtagctggaattacaggcatgcaccaccacatccaactaatttttgtatttttagtagagacagagtttcaccatgttggtcagg

SEQ ID NO: 58492 - DNA, 120 bp, synthetic construct
  source 1..120: mol_type = other DNA
atagtacatgttcaatgatatgtttctattattattataaatttttcgtttggaaacagagccttgctgtgtcgcccaggtgtgagtgcagtggcacgatttctgctcactgcaacctcc

SEQ ID NO: 58493 - DNA, 120 bp, synthetic construct
  source 1..120: mol_type = other DNA
aagggattctaaagcagataaagctgttcccagcaaacgaagtagtggatggggaggcactgtggtagcaatatcctcttcttgaagcacagctgcattctatcatacgcattctatcca

SEQ ID NO: 58494 - DNA, 120 bp, synthetic construct
  source 1..120: mol_type = other DNA
taattctaagacatcatatattaacagatgcatcccaatttcatagagttcaggtgcaaaaaaagaggcctgggggtggaggtgggggggggtgggggggaagggattctaaagcagata

SEQ ID NO: 58495 - DNA, 120 bp, synthetic construct; identical to SEQ ID NO: 31738
  source 1..120: mol_type = other DNA

SEQ ID NO: 58496 - DNA, 120 bp, synthetic construct
  source 1..120: mol_type = other DNA
ctggcaaccgccccgtctgagaagtgaggagcccctccgtccggcagccaccccgtctgggaagtgaggagcgtctccgcccggcagccaccccgaccgggagggaggtgggggggggtc

SEQ ID NO: 58497 - DNA, 120 bp, synthetic construct
  source 1..120: mol_type = other DNA
gacaacatggtaaaaccctgtctctactaaaaatacaaaaattagccaggtgtggtggagcacgcctgtagtcctagctattcaggaggctgaggcacgagaatcacttgaactgggagg

SEQ ID NO: 58498 - DNA, 120 bp, synthetic construct; identical to SEQ ID NO: 31739
  source 1..120: mol_type = other DNA

SEQ ID NO: 58499 - DNA, 120 bp, synthetic construct
  source 1..120: mol_type = other DNA
gctttgaataaggatgtgactctaggtctgtctttagcatgacttttttttttttttttttttttctgagacggagtctcgctctgtcgcccaatctggagtgcagtggtgcaatctcgg

SEQ ID NO: 58500 - DNA, 120 bp, synthetic construct; identical to SEQ ID NO: 23798
  source 1..120: mol_type = other DNA

SEQ ID NO: 58501 - DNA, 120 bp, synthetic construct
  source 1..120: mol_type = other DNA
tgatgtacccccgttggcctcccagagtgctaggattacaagcgtgagccaccatgcccggcctgttggactttatatcctcagaaatttatacaaagcctaaaataatatcactattaa

SEQ ID NO: 58502 - DNA, 120 bp, synthetic construct; identical to SEQ ID NO: 25672
  source 1..120: mol_type = other DNA

SEQ ID NO: 58503 - DNA, 120 bp, synthetic construct; identical to SEQ ID NO: 25673
  source 1..120: mol_type = other DNA

SEQ ID NO: 58504 - DNA, 120 bp, synthetic construct
  source 1..120: mol_type = other DNA
ttttgtatttttagtagagatagggtttcaccatgttagccaggatggtctttttttttttgttgttgttgatcattcttgggtgtttctcgcagagggggatttggcagggtcacagga

SEQ ID NO: 58505 - DNA, 120 bp, synthetic construct; identical to SEQ ID NO: 10819
  source 1..120: mol_type = other DNA

SEQ ID NO: 58506 - DNA, 120 bp, synthetic construct
  source 1..120: mol_type = other DNA
tggggggggcagctaaagggagggacacataggaatactagggaacttttgggggtgataaaaatgcttatgttgattttggtaacggtttcacaggtatatacacatgtcaagacatca

SEQ ID NO: 58507 - DNA, 120 bp, synthetic construct; identical to SEQ ID NO: 11691
  source 1..120: mol_type = other DNA

SEQ ID NO: 58508 - DNA, 120 bp, synthetic construct
  source 1..120: mol_type = other DNA
cgtgatctgcctacctcagcctcccaaagtgctgggattacaggcatgaaccatcacacccagaccagatgaatcacatttttgcacattcttgctaaaattaaatgtccaattcattga

SEQ ID NO: 58509 - DNA, 120 bp, synthetic construct
  source 1..120: mol_type = other DNA
ttgcagcctctgcccggccgccaccccgtctgggaagtgaggagcgtctctgcctggccgcccatcgtctgggaggtgaggagcccctctgcctggctgcccagtctggaaagtgaggag

SEQ ID NO: 58510 - DNA, 120 bp, synthetic construct
  source 1..120: mol_type = other DNA
ctcctcacttcccagtaggggcggccgggcagaggcgcccctcacctcccggacggggcggcttagccaggatggtcttaatcttctgacctcgtgatctgcccgcctcggcctcccaaa

SEQ ID NO: 58511 - DNA, 120 bp, synthetic construct
  source 1..120: mol_type = other DNA
aataaataaaaaaaaataaaaataaaaattcatgaagtgaactgataggtaagcgaattaaggggatcccacaagaatctttcctgtagaggtatcagggaaggtgacatagtctttata

SEQ ID NO: 58512 - DNA, 120 bp, synthetic construct; identical to SEQ ID NO: 7254
  source 1..120: mol_type = other DNA

SEQ ID NO: 58513 - DNA, 120 bp, synthetic construct
  source 1..120: mol_type = other DNA
taatgccgcaataaacacacgtgtgcatgtgtctttacagcagcatgattcatagtcctttaggtatatacccagtaatgggatggctgggtcaaatggtatttccagttctagatccct

SEQ ID NO: 58514 - DNA, 120 bp, synthetic construct
  source 1..120: mol_type = other DNA
cttggcgatgcgggctcttttttggttccatatgaactttaaagtagttttttccaattctgtgaagaaagtcattggtagcttgatggggatggcactgaatctgtaaattaccttggg

SEQ ID NO: 58515 - DNA, 120 bp, synthetic construct
  source 1..120: mol_type = other DNA
caagacagggatgccctctctcaccactcctattcaacatagtgttggaagaaaaatatttaaaaattttaacgcagtaaagttctgataagaaatctttcaaaaaagcaaaataatgct

SEQ ID NO: 58516 - DNA, 120 bp, synthetic construct; identical to SEQ ID NO: 7255
  source 1..120: mol_type = other DNA

SEQ ID NO: 58517 - DNA, 120 bp, synthetic construct
  source 1..120: mol_type = other DNA
tttttttcttgtaaatttgtttgagttcattgtagattctggatattagccctttgtcagatgagtaggttgatttttgcaaatttttatgctattggaacaaaatgtttttcttcagag

SEQ ID NO: 58518 - DNA, 120 bp, synthetic construct
  source 1..120: mol_type = other DNA
tgcagcatggtttgctggctattttaaggccattgtagagagcttagattcctttcaaaatattactgcttactgggaaaacacctagtcacccaagagctctgagggagatgtatacag

SEQ ID NO: 58519 - DNA, 120 bp, synthetic construct
  source 1..120: mol_type = other DNA
taggttggcatgcgtcatcacaattaagctaggtctatttggaaaaaaccaagtctctccagttgacctacaggtggaagtattacagtatcacctcactgtccatgtagcttgtacttt

SEQ ID NO: 58520 - DNA, 120 bp, synthetic construct
  source 1..120: mol_type = other DNA
gagtgcagtggcgtgatctcggctcgctacaacctacacctcccagccgtctgccttggcctcccaaagtgccgagattgcagcctctgcccagccgccaccccgtctgggaagtgagga

SEQ ID NO: 58521 - DNA, 120 bp, synthetic construct
  source 1..120: mol_type = other DNA
ggaatagaaaggggggaaaggtggggaaaagattgagaaatcggatggttgccgtgtctgtgtagaaagaagtagacatgggagacttttcattttgttctgcactaagaaaaattcttc

SEQ ID NO: 58522 - DNA, 120 bp, synthetic construct; identical to SEQ ID NO: 7258
  source 1..120: mol_type = other DNA

SEQ ID NO: 58523 - DNA, 120 bp, synthetic construct
  source 1..120: mol_type = other DNA
cgtctctgccaggccgcccatcgtctgagatgtggggagcacctctgccctgccaccccgtctgggatgtgaggagcgtctctgcccggccgccccgtctgagaagtgaggagaccctct

SEQ ID NO: 58524 - DNA, 120 bp, synthetic construct
  source 1..120: mol_type = other DNA
ccatgtctgtgtagaaagaggtagacatgggagactttttattttgttctgtactaagaaaaattcttctgccttgggatcctgttgatctgtgaccttacccccaaccctgtgctctct

SEQ ID NO: 58525 - DNA, 120 bp, synthetic construct; identical to SEQ ID NO: 7259
  source 1..120: mol_type = other DNA

SEQ ID NO: 58526 - DNA, 120 bp, synthetic construct; identical to SEQ ID NO: 7260
  source 1..120: mol_type = other DNA

SEQ ID NO: 58527 - DNA, 120 bp, synthetic construct; identical to SEQ ID NO: 7261
  source 1..120: mol_type = other DNA

SEQ ID NO: 58528 - DNA, 120 bp, synthetic construct
  source 1..120: mol_type = other DNA
ccaacacttttagaggctgagaggggcagatcacttaaggtcaggagtccgaggccagcctggcctattatggtgaaaccccatctctactaaaaatacaaaaattgccccaatgtggtg

SEQ ID NO: 58529 - DNA, 120 bp, synthetic construct; identical to SEQ ID NO: 29356
  source 1..120: mol_type = other DNA

SEQ ID NO: 58530 - DNA, 120 bp, synthetic construct; identical to SEQ ID NO: 29357
  source 1..120: mol_type = other DNA

SEQ ID NO: 58531 - DNA, 120 bp, synthetic construct; identical to SEQ ID NO: 29358
  source 1..120: mol_type = other DNA

SEQ ID NO: 58532 - DNA, 120 bp, synthetic construct; identical to SEQ ID NO: 10877
  source 1..120: mol_type = other DNA

SEQ ID NO: 58533 - DNA, 120 bp, synthetic construct; identical to SEQ ID NO: 10878
  source 1..120: mol_type = other DNA

SEQ ID NO: 58534 - DNA, 120 bp, synthetic construct; identical to SEQ ID NO: 10879
  source 1..120: mol_type = other DNA

SEQ ID NO: 58535 - DNA, 120 bp, synthetic construct; identical to SEQ ID NO: 10880
  source 1..120: mol_type = other DNA

SEQ ID NO: 58536 - DNA, 120 bp, synthetic construct; identical to SEQ ID NO: 10881
  source 1..120: mol_type = other DNA

SEQ ID NO: 58537 - DNA, 120 bp, synthetic construct; identical to SEQ ID NO: 10882
  source 1..120: mol_type = other DNA

SEQ ID NO: 58538 - DNA, 120 bp, synthetic construct; identical to SEQ ID NO: 10883
  source 1..120: mol_type = other DNA

SEQ ID NO: 58539 - DNA, 120 bp, synthetic construct; identical to SEQ ID NO: 10884
  source 1..120: mol_type = other DNA

SEQ ID NO: 58540 - DNA, 120 bp, synthetic construct; identical to SEQ ID NO: 20297
  source 1..120: mol_type = other DNA

SEQ ID NO: 58541 - DNA, 120 bp, synthetic construct; identical to SEQ ID NO: 20298
  source 1..120: mol_type = other DNA

SEQ ID NO: 58542 - DNA, 120 bp, synthetic construct; identical to SEQ ID NO: 20299
  source 1..120: mol_type = other DNA

SEQ ID NO: 58543 - DNA, 120 bp, synthetic construct; identical to SEQ ID NO: 20300
  source 1..120: mol_type = other DNA

SEQ ID NO: 58544 - DNA, 120 bp, synthetic construct; identical to SEQ ID NO: 20301
  source 1..120: mol_type = other DNA

SEQ ID NO: 58545 - DNA, 120 bp, synthetic construct; identical to SEQ ID NO: 20302
  source 1..120: mol_type = other DNA

SEQ ID NO: 58546 - DNA, 120 bp, synthetic construct; identical to SEQ ID NO: 20305
  source 1..120: mol_type = other DNA

SEQ ID NO: 58547 - DNA, 120 bp, synthetic construct; identical to SEQ ID NO: 20306
  source 1..120: mol_type = other DNA

SEQ ID NO: 58548 - DNA, 120 bp, synthetic construct; identical to SEQ ID NO: 20307
  source 1..120: mol_type = other DNA

SEQ ID NO: 58549 - DNA, 120 bp, synthetic construct; identical to SEQ ID NO: 20308
  source 1..120: mol_type = other DNA

SEQ ID NO: 58550 - DNA, 120 bp, synthetic construct
  source 1..120: mol_type = other DNA
ctgggcgacagagtgagactctgtcaagaaaagaaaaggaaaagaaaaggaaaggaaaagaaaagaaaaggaaaagaaaagaaaagggaagggaagggaaaggaagggaaaagggaaggg

SEQ ID NO: 58551 - DNA, 120 bp, synthetic construct; identical to SEQ ID NO: 20310
  source 1..120: mol_type = other DNA

SEQ ID NO: 58552 - DNA, 120 bp, synthetic construct; identical to SEQ ID NO: 20311
  source 1..120: mol_type = other DNA

SEQ ID NO: 58553 - DNA, 120 bp, synthetic construct
  source 1..120: mol_type = other DNA
tccacaactgtaagaggccaaggcggaaagattgcttgagcccaaaagttcaagaccagcctgacaatatgatgagaccccccatctcattgattgattaagtgattgactatatagatt

SEQ ID NO: 58554 - DNA, 120 bp, synthetic construct
  source 1..120: mol_type = other DNA
gaggcagaggttgcagtgagctgagattgtaccactgcactccagcctgggtgacagcaaaaacttgtttcaaaagaaaaaagaaaagaaaagtaaaagagaaaaatgcaaagcagaact

SEQ ID NO: 58555 - DNA, 120 bp, synthetic construct
  source 1..120: mol_type = other DNA
agactgacacctcacacggccgggtactcctctgagacaaaacttccagaggaacgatcatacagcaacattcgcggatcacgaaaatccgcggttctgcagacaccgctgctgataccc

SEQ ID NO: 58556 - DNA, 120 bp, synthetic construct
  source 1..120: mol_type = other DNA
gtgaaggagaaataaaatactttacagacaagcaaatgctgagaggttttgccaccaccaggcctgccctaaaagagctcctgaaggaagcactaaacatggaaaggcataaccgtacca

SEQ ID NO: 58557 - DNA, 120 bp, synthetic construct
  source 1..120: mol_type = other DNA
tgagaacaaagacacaacataccagaatctctgggacacattcaaagcagtgtgtagagggaaatttatagcactaaatgcccacaagagaaagcaggaaagatccaaaattgacaccta

SEQ ID NO: 58558 - DNA, 120 bp, synthetic construct
  source 1..120: mol_type = other DNA
aaatactggcaaactgaatccagcagcacatcaaaaagcttatccaccatgatcaagcgggcttcatccctgggatacaaggctggttcaatctacgcaaatcaataaatgtaatccagc

SEQ ID NO: 58559 - DNA, 120 bp, synthetic construct
  source 1..120: mol_type = other DNA
attagaaaaaactactttaaagttcatatggaaccaaaaaagagccctcatcgccaagtcaatcctaagccaaaagaacaaagctggaggcatcacgctacctgacttcaaactatacta

SEQ ID NO: 58560 - DNA, 120 bp, synthetic construct
  source 1..120: mol_type = other DNA
agttcaaccattgtggaagtcagtgtggcgattcctcagggatctagaaccagaaataccatttgacccagccatcccattactgggtatatacccaaaggactataaatcatgctgcta

SEQ ID NO: 58561 - DNA, 120 bp, synthetic construct; identical to SEQ ID NO: 20288
  source 1..120: mol_type = other DNA

SEQ ID NO: 58562 - DNA, 120 bp, synthetic construct; identical to SEQ ID NO: 20289
  source 1..120: mol_type = other DNA

SEQ ID NO: 58563 - DNA, 120 bp, synthetic construct; identical to SEQ ID NO: 20290
  source 1..120: mol_type = other DNA

SEQ ID NO: 58564 - DNA, 120 bp, synthetic construct; identical to SEQ ID NO: 20303
  source 1..120: mol_type = other DNA

SEQ ID NO: 58565 - DNA, 120 bp, synthetic construct; identical to SEQ ID NO: 20304
  source 1..120: mol_type = other DNA

SEQ ID NO: 58566 - DNA, 120 bp, synthetic construct; identical to SEQ ID NO: 20291
  source 1..120: mol_type = other DNA

SEQ ID NO: 58567 - DNA, 120 bp, synthetic construct; identical to SEQ ID NO: 20292
  source 1..120: mol_type = other DNA

SEQ ID NO: 58568 - DNA, 120 bp, synthetic construct; identical to SEQ ID NO: 20293
  source 1..120: mol_type = other DNA

SEQ ID NO: 58569 - DNA, 120 bp, synthetic construct; identical to SEQ ID NO: 20294
  source 1..120: mol_type = other DNA

SEQ ID NO: 58570 - DNA, 120 bp, synthetic construct; identical to SEQ ID NO: 20295
  source 1..120: mol_type = other DNA

SEQ ID NO: 58571 - DNA, 120 bp, synthetic construct; identical to SEQ ID NO: 20296
  source 1..120: mol_type = other DNA

SEQ ID NO: 58572 - DNA, 120 bp, synthetic construct
  source 1..120: mol_type = other DNA
tgggtgacaaagcgagactacatctaaaaaaaaaaaaaaaaaaaaagaaagaaagaaaaaaagaaaagggaaaacaaccacctgaggatgtgcgagggagcggtgcagaggcccagggct

SEQ ID NO: 58573 - DNA, 120 bp, synthetic construct
  source 1..120: mol_type = other DNA
tcagggccaattaaacactgagcgttggggactgagcacttctagcttcaaaacaggagtttgcttgttttctttcagaagtgctccataagaattaaagtgttggagtccaaagaaagc

SEQ ID NO: 58574 - DNA, 120 bp, synthetic construct; identical to SEQ ID NO: 19331
  source 1..120: mol_type = other DNA

SEQ ID NO: 58575 - DNA, 120 bp, synthetic construct
  source 1..120: mol_type = other DNA
gagattgcagtgagctgagatcacaccactgcactccagcctgggtctcaaaaaaaaaaaaaaagattcctccctgggaagggttagagggagagtttccttgtcactaagttttctcat

SEQ ID NO: 58576 - DNA, 120 bp, synthetic construct; identical to SEQ ID NO: 7933
  source 1..120: mol_type = other DNA

SEQ ID NO: 58577 - DNA, 120 bp, synthetic construct
  source 1..120: mol_type = other DNA
gctgccgggcagagacgctcctcacttcccagacggggtggctgctgggcggaggggctcctcacttctcagaccgggcggctgccgggcggaggggctcctcacttctcagacggggcg

SEQ ID NO: 58578 - DNA, 120 bp, synthetic construct
  source 1..120: mol_type = other DNA
tcacaggcattcctacacaccattaacagacaaacagacaaatcatgagtgaactcccattcacaattgcttcaaagggaataaaatacctagaaatccaacttacaagggatgtgaagg

SEQ ID NO: 58579 - DNA, 120 bp, synthetic construct
  source 1..120: mol_type = other DNA
tacccatctgacaaagggctaatatccagaatctacaaagaacttaaacaaacttacaagaaaaaaacaaacaaccctatcgaaaagtgggcaaaggatatgaacagacacttctcaaaa

SEQ ID NO: 58580 - DNA, 120 bp, synthetic construct; identical to SEQ ID NO: 29685
  source 1..120: mol_type = other DNA

SEQ ID NO: 58581 - DNA, 120 bp, synthetic construct
  source 1..120: mol_type = other DNA
atgatgagtattttttcatgtgtcttttggctgcataaatgtcttcttttgagaagggtctgttcatatcctttgcccactttttgatggggttgtttttttcttgtaaatttgttggag

SEQ ID NO: 58582 - DNA, 120 bp, synthetic construct
  source 1..120: mol_type = other DNA
cttaaaacacggcgcaccacaagattatatcccgcacctggctcggagggtcctacgcccacggagtctcgctgattgctagcacagcagtctgagatcaaactgcaaggcggcagcgag

SEQ ID NO: 58583 - DNA, 120 bp, synthetic construct
  source 1..120: mol_type = other DNA
tgggcagaatggaaccaagttggaaaacacgttgcaggatgttatccaggagaacttccccaatctagcaaggcaggccaacgttcagattcaggaaatacagagaacgccacaaagata

SEQ ID NO: 58584 - DNA, 120 bp, synthetic construct
  source 1..120: mol_type = other DNA
atggaagacaaaaatggcaggggttgcaatcctagtctctgataaaacagactttaaaccaacaaagatcaaaagagacaaagaaggccattacataatggtaaagggatcaattcaaca

SEQ ID NO: 58585 - DNA, 120 bp, synthetic construct
  source 1..120: mol_type = other DNA
tcaacaaaattgaatgaccactagaaagactaataaagacaaaaagagagaggaatcaaatagacgcaataaaaaatgataaaggggatatcaccaccgatcccacagaaatacaaacta

SEQ ID NO: 58586 - DNA, 120 bp, synthetic construct
  source 1..120: mol_type = other DNA
ctccactcctattcaacatagtgctggaagttctggccagggcaatcaggcaggagaaggaaataaagggtattcaattaggaaaagaggaagtcaaattgtccctgtttgcagacgaca

SEQ ID NO: 58587 - DNA, 120 bp, synthetic construct
  source 1..120: mol_type = other DNA
gttggacctaacaccataaaaaccctagaagaaaacctaggcattaccattcaggacataggcacgggcaaggacttcatgtctaaaacaccaaaagcaatggcaacaaaagccaaaatt

SEQ ID NO: 58588 - DNA, 120 bp, synthetic construct
  source 1..120: mol_type = other DNA
tacctcaacgtaataaaagccatataaaacaggtccacagctagtatcataccaaatggggaaaaactgaaagcctttcctctaagatcttgaacacaacaagaatgcccactgtcacca

SEQ ID NO: 58589 - DNA, 120 bp, synthetic construct; identical to SEQ ID NO: 32144
  source 1..120: mol_type = other DNA

SEQ ID NO: 58590 - DNA, 120 bp, synthetic construct
  source 1..120: mol_type = other DNA
ctatatatatatatatattttttttttttttagacagggtcttgctctgttgccgaggctggagtgcagtggtgaaacatgactcactgtagcctcgccgcctcagcttaagtgatcctc

SEQ ID NO: 58591 - DNA, 120 bp, synthetic construct
  source 1..120: mol_type = other DNA
acaccacacacacatacacatacaccacacacatacacaccacacacatacacatacacaccacacacatacacataccacacacacatacacgtaatacacctacacgccacacacata

SEQ ID NO: 58592 - DNA, 120 bp, synthetic construct; identical to SEQ ID NO: 13664
  source 1..120: mol_type = other DNA

SEQ ID NO: 58593 - DNA, 120 bp, synthetic construct
  source 1..120: mol_type = other DNA
ggctcgctacaacctccacttcccagctgcctgccttggccccgcaaagtgccgagattgcagcctctgcccggccgccaccccgtctgggaagtgaggagcgtctctgcctggcggccc

SEQ ID NO: 58594 - DNA, 120 bp, synthetic construct
  source 1..120: mol_type = other DNA
atgatgacaatggcggttttgtggaatagaaaggggggaaaggtggggaaaagactgagaaatcggatggttgccgtgtctgtgtagaaagaggtagacgtgggagacttttcattttgt

SEQ ID NO: 58595 - DNA, 120 bp, synthetic construct; identical to SEQ ID NO: 13665
  source 1..120: mol_type = other DNA

SEQ ID NO: 58596 - DNA, 120 bp, synthetic construct
  source 1..120: mol_type = other DNA
ataaaattcccagtaggcatacgcatacacatacaaaattgaatagaatagtaaataattttttttttttttttttgagaaagagtctcgctctgtcgcccaggttggagtgcagtggcg

SEQ ID NO: 58597 - DNA, 120 bp, synthetic construct; identical to SEQ ID NO: 25787
  source 1..120: mol_type = other DNA

SEQ ID NO: 58598 - DNA, 120 bp, synthetic construct; identical to SEQ ID NO: 25788
  source 1..120: mol_type = other DNA

SEQ ID NO: 58599 - DNA, 120 bp, synthetic construct
  source 1..120: mol_type = other DNA
agcctgggtgacagagcaagactccgtctcaaaataaataaataaataaataaaaataaaaaaaaaacatacaaaaaattagctgagcgtggtggcatgcgcctgtaatcccagctactc

SEQ ID NO: 58600 - DNA, 120 bp, synthetic construct; identical to SEQ ID NO: 28747
  source 1..120: mol_type = other DNA

SEQ ID NO: 58601 - DNA, 120 bp, synthetic construct
  source 1..120: mol_type = other DNA
ccacagtgagaggagagaaaagccatcacacagactgattcaaagcagagagggaaaaggctatggactgagctactgaaaatagggagatgtaaagcactaaactaacccactattaaa

SEQ ID NO: 58602 - DNA, 120 bp, synthetic construct
  source 1..120: mol_type = other DNA
ggcctgggttccgaggcggcggtggaggtggtggtggcggtggcggcggcagcacctagaagccgcccctgcgtttccctacagctcacgtgggcccgaggaggaggagcccaatgtccc

SEQ ID NO: 58603 - DNA, 120 bp, synthetic construct; identical to SEQ ID NO: 19631
  source 1..120: mol_type = other DNA

SEQ ID NO: 58604 - DNA, 120 bp, synthetic construct; identical to SEQ ID NO: 19632
  source 1..120: mol_type = other DNA

SEQ ID NO: 58605 - DNA, 120 bp, synthetic construct; identical to SEQ ID NO: 26913
  source 1..120: mol_type = other DNA

SEQ ID NO: 58606 - DNA, 120 bp, synthetic construct; identical to SEQ ID NO: 26914
  source 1..120: mol_type = other DNA

SEQ ID NO: 58607 - DNA, 120 bp, synthetic construct; identical to SEQ ID NO: 26915
  source 1..120: mol_type = other DNA

SEQ ID NO: 58608 - DNA, 120 bp, synthetic construct
  source 1..120: mol_type = other DNA
ctgttgtggggtggggggaggggggagggatagcattatgatacctaacattaggttatctaatgttaaatgacgagttaatgggtgcagcacaacgtggcacatgtatacatatgtaac

SEQ ID NO: 58609 - DNA, 120 bp, synthetic construct
  source 1..120: mol_type = other DNA
gtgcaaaaatcacaagcactcttatacaccaataacagacaaacagagagctaaatcatgaatgaactcccattcacaattgcttcaaagagaataaaatacctaagaatccaacttaca

SEQ ID NO: 58610 - DNA, 120 bp, synthetic construct
  source 1..120: mol_type = other DNA
atgtctaaaacaccaaaagcaatggcaacaaaagccaaaattgacaaatgggatgtaattaaactaaagagcttctgcacagcaaaagaaactaccatcagagtgaacaggcaacctaca

SEQ ID NO: 58611 - DNA, 120 bp, synthetic construct
  source 1..120: mol_type = other DNA
gtctcaggatacaaaatcaatgtgcaaaaatcacaagcattcctatgtaccaagaatagagagccaaatcatgagtgaactcccattcaaattactataaggagaataaaatacctagga

SEQ ID NO: 58612 - DNA, 120 bp, synthetic construct
  source 1..120: mol_type = other DNA
aatctatccatctgacaaaggactaatatccagaattgacaaagtacttaaacaaatttataagaaaaaaacaaccccatcaaaaaatgggcaaaggatataaatggacacttctcaaaa

SEQ ID NO: 58613 - DNA, 120 bp, synthetic construct
  source 1..120: mol_type = other DNA
gtgatgttccccttcctgtgtccattgatctcattgttcaattcccacctatgagtgagaatatgcggtgtttggttttttgttcttgcgatagtttactgagaatgatgatttccaatt

SEQ ID NO: 58614 - DNA, 120 bp, synthetic construct
  source 1..120: mol_type = other DNA
aaggaagggatccagtttcagctttctacatatggctagccagttttcccagcaccatttgttaaatagggaatcctttccctatttcttgtttttctcaggtttgtcaaagatcagata

SEQ ID NO: 58615 - DNA, 120 bp, synthetic construct
  source 1..120: mol_type = other DNA
tatgtcccatcaatacctaatttattgagagttcttagcatgaagggctgttgaattttgtcaaaggccttttctgcatctattgagataatcatgtggtttttgtctttggttctgttt

SEQ ID NO: 58616 - DNA, 120 bp, synthetic construct
  source 1..120: mol_type = other DNA
ttttttgtgtctctatttccttcagttctgctctgattttagttatttcttgccttctgctagcttttgaatgtgtttgctcttgcttttctagttcttttaattgtgatgttagggtgt

SEQ ID NO: 58617 - DNA, 120 bp, synthetic construct
  source 1..120: mol_type = other DNA
tttttctcttttgatctttgttgctttaaagtctgttttatcagagactaggattccaacccctgcctttttttgttttccatttgcttggtagatcttcctccatccctttattttgag

SEQ ID NO: 58618 - DNA, 120 bp, synthetic construct
  source 1..120: mol_type = other DNA
agtacttctctgtattggttattctagttatacattcgtctaaatttttttcaaagtttttaacttctttgcctttggtttgaatttcctcctgtagctcatagtttgatcgtctgaagc

SEQ ID NO: 58619 - DNA, 120 bp, synthetic construct
  source 1..120: mol_type = other DNA
ggcagaagaatagcttgaacccgggaagtggaggttgcagtgagccgagatcacaccactgcaccgcagcctgggctacaagagtgaaactctgctccctctccctccccctccccctcc

SEQ ID NO: 58620 - DNA, 120 bp, synthetic construct
  source 1..120: mol_type = other DNA
tgtgctctctgacacatgtgctgtatccactcagggttgaatggattaagggcggtgcaagttgtgctttgttaaacagatgcttgaaggcagcatgctccttaagagtcatcaccactc

SEQ ID NO: 58621 - DNA, 120 bp, synthetic construct; identical to SEQ ID NO: 29065
  source 1..120: mol_type = other DNA

SEQ ID NO: 58622 - DNA, 120 bp, synthetic construct
  source 1..120: mol_type = other DNA
cttcttttgagaagtgtctgttcatgtccttcgcccactttttgatggggttgtttgtttttttcttgtaaatttgtttgagttcattgtagattctgggtattagccctttgtcagatg

SEQ ID NO: 58623 - DNA, 120 bp, synthetic construct
  source 1..120: mol_type = other DNA
atgacatgattgtatatctagaaaaccccattgtctcagcccaaaatctccttaagctgataagcaacttcagcaaagtctcaggatacaaaatcaatgtacaaaaatcacaagcattct

SEQ ID NO: 58624 - DNA, 120 bp, synthetic construct
  source 1..120: mol_type = other DNA
gtatttctgtgggatcggtggtgatatcccctttatcattttttgttgtaagactaggaagtttttaaaaagatggctaataactcaataaaggagatggtagtgaggaagagatggagc

SEQ ID NO: 58625 - DNA, 120 bp, synthetic construct; identical to SEQ ID NO: 29355
  source 1..120: mol_type = other DNA

SEQ ID NO: 58626 - DNA, 120 bp, synthetic construct
  source 1..120: mol_type = other DNA
gtccactcatccatccattcctccatgcatccattcctccatgcatccatctatccatccatccattcatccatccactcatccatccatccatttacccatccatccactcaatccatc

SEQ ID NO: 58627 - DNA, 120 bp, synthetic construct
  source 1..120: mol_type = other DNA
cctcagatgatccacccgcctcggcctcccaaagtactaagattacaggcgtgagccactgtgcccagttgggcactggattttctaataagatttcatgtttatatattatatttttta

SEQ ID NO: 58628 - DNA, 120 bp, synthetic construct
  source 1..120: mol_type = other DNA
agatcccatttgtcaattttggcttttgttgccattgcttttggtgttttggacatgaagtccttgcccatgcctatgtcctgaatggtaatgcctaggtttttatggttttaggtctaa

SEQ ID NO: 58629 - DNA, 120 bp, synthetic construct
  source 1..120: mol_type = other DNA
agactttgctgaagttgcttatcagcttaaggagattttgggctgagacatggggttttctagatatacaatcatgtcacctgcaaacagggacagtttgacttcctcttttcctaattg

SEQ ID NO: 58630 - DNA, 120 bp, synthetic construct
  source 1..120: mol_type = other DNA
ttttgaagggttttttgtgtctctatttccttcagttctgctctgattttagttatttcttgccttctgctagcttttgaatgtgtttgctcttgctcttctagttcttttcattgtgat

SEQ ID NO: 58631 - DNA, 120 bp, synthetic construct; identical to SEQ ID NO: 27483
  source 1..120: mol_type = other DNA

SEQ ID NO: 58632 - DNA, 120 bp, synthetic construct; identical to SEQ ID NO: 27484
  source 1..120: mol_type = other DNA

SEQ ID NO: 58633 - DNA, 120 bp, synthetic construct; identical to SEQ ID NO: 27485
  source 1..120: mol_type = other DNA

SEQ ID NO: 58634 - DNA, 120 bp, synthetic construct; identical to SEQ ID NO: 27486
  source 1..120: mol_type = other DNA

SEQ ID NO: 58635 - DNA, 120 bp, synthetic construct
  source 1..120: mol_type = other DNA
gaaacaaaatatgcagtacgctaactaatacatgctcaagagaagacaaatgaagcaggcaaggggaatatacactgtggtgggcggggtaggaaaggttggaattttaagattaagtgg

SEQ ID NO: 58636 - DNA, 120 bp, synthetic construct
  source 1..120: mol_type = other DNA
gcttcctcgggcatcccgggcgcccggccccgtgcatgcaacaggggactgggcgcgagcgggcgcctcgaggtgccggggcgggaccggggagaggggaccgagacaaagttcccgaga

SEQ ID NO: 58637 - DNA, 120 bp, synthetic construct
  source 1..120: mol_type = other DNA
ttttttttttttttttttttttttttaagaaatggagtctcattctattgtccagactagagggcagtggtgcacacatggctcactgcagcctccacctccagggctcaagtgatccac

SEQ ID NO: 58638 - DNA, 120 bp, synthetic construct; identical to SEQ ID NO: 28108
  source 1..120: mol_type = other DNA

SEQ ID NO: 58639 - DNA, 120 bp, synthetic construct
  source 1..120: mol_type = other DNA
aaaaaacaaaaacagaaacaaaaaatgcatgtacacacacaaacacacacacctcttttattttattttattttattttattttattgatcattcttgggtgtttctcgcagagggggat

SEQ ID NO: 58640 - DNA, 120 bp, synthetic construct
  source 1..120: mol_type = other DNA
tcacttcccagacggggtggcagccgggcggaggggctcctcacttctcagacggggcagttgccaggcggagggtctcctcacttctcagacggggcggccgggcagagacgctcctca

SEQ ID NO: 58641 - DNA, 120 bp, synthetic construct; identical to SEQ ID NO: 27832
  source 1..120: mol_type = other DNA

SEQ ID NO: 58642 - DNA, 120 bp, synthetic construct; identical to SEQ ID NO: 27833
  source 1..120: mol_type = other DNA

SEQ ID NO: 58643 - DNA, 120 bp, synthetic construct
  source 1..120: mol_type = other DNA
acgggactatgtgaaaagaccaaatctacatctgattggtgtacctgaaagtgacagggagaatggaaccaagttggaaaacactctgcaggatattatccaggagaacttcccaaatct

SEQ ID NO: 58644 - DNA, 120 bp, synthetic construct
  source 1..120: mol_type = other DNA
tatctcagaataataacagctatccgtgacaaacccacagccaatatcatactgaatgggcaaaaactgtaagcattccctttgaaaactggcacaagacagggatgccctctctcacca

SEQ ID NO: 58645 - DNA, 120 bp, synthetic construct
  source 1..120: mol_type = other DNA
attccctatttaataaatggtgctgggaaaactggctagtcatatgtataaagctgaaactggatcccttccttacaccttatacaaaaattaattcaagatggattaaagacttaaatg

SEQ ID NO: 58646 - DNA, 120 bp, synthetic construct
  source 1..120: mol_type = other DNA
catcattctcagcaaactatcgcaaggacaaaaaaccaaacaccacatgttctcactcataggtgggaattgaacaatgagaacacatggacacaggaaggggaacatcacacaccaggg

SEQ ID NO: 58647 - DNA, 120 bp, synthetic construct
  source 1..120: mol_type = other DNA
tatatattttttttttttttttttttttttgagatggagtcttgctctgtcgcccagactggagtacagtggcgtgatctcggctcactgcaacctccacctcccgagttcaagcaattt

SEQ ID NO: 58648 - DNA, 120 bp, synthetic construct; identical to SEQ ID NO: 25747
  source 1..120: mol_type = other DNA

SEQ ID NO: 58649 - DNA, 120 bp, synthetic construct
  source 1..120: mol_type = other DNA
taaaaacagataattcgctacacagagaagaaaacatcaacacaagacaaacctatcagtagacagcatggatttaagaaaacttgaggctgggcatggtggctcacgcctgtaatccca

SEQ ID NO: 58650 - DNA, 120 bp, synthetic construct
  source 1..120: mol_type = other DNA
aggtgggtggatcacctgaggtcaggagtttgagaccagcctggccaacatggtgaaaccccgtccctactaaatatacaaaaattagctcggcgtggtggcaggcgggcgcctgtaatc

SEQ ID NO: 58651 - DNA, 120 bp, synthetic construct
  source 1..120: mol_type = other DNA
ctatattctcaaaaatatcaacccagagagttagtattcagagtggggagagcctaaaccttgtaattacacctaggtttaaatcctggctgcatacttctaccagtgtagcctgagcac

SEQ ID NO: 58652 - DNA, 120 bp, synthetic construct
  source 1..120: mol_type = other DNA
aaaattagccaggcatgatggtgcatgcctgtaatcccagctactcgggaggctgaggcaggagaattgcttgaacacgggaggttgcagtaagccaagagcatgccattgcactccagc

SEQ ID NO: 58653 - DNA, 120 bp, synthetic construct; identical to SEQ ID NO: 32902
  source 1..120: mol_type = other DNA

SEQ ID NO: 58654 - DNA, 120 bp, synthetic construct
  source 1..120: mol_type = other DNA
ggaagcccatcagagtaacagcggatctctctgcagaaactctacaagccagaagagagtgggggccaatattgaacattcttaaagaaaagaatattcaacccagaatttcatatccag

SEQ ID NO: 58655 - DNA, 120 bp, synthetic construct
  source 1..120: mol_type = other DNA
aaagctctcctcagcaaatgtaaaagaacagaaattataacaaactgtctctcagaccacagtgcaatcaaactagaactcaggattaagaaactcactcaaaaccgctcaactgtatgg

SEQ ID NO: 58656 - DNA, 120 bp, synthetic construct
  source 1..120: mol_type = other DNA
aaagagggaatgttccctaactcattttatgaggccagcatcatcctgataccaaagccgggcagagacacaaccaaaaaagagaattttagaccaatatccttgttgaacattcatgca

SEQ ID NO: 58657 - DNA, 120 bp, synthetic construct
  source 1..120: mol_type = other DNA
tatggaaccaaaaaagagcccgcatggccaagtcaatcctaagccaaaagaacaaagctggaggcatcatgctacctgacttcaaactatactacaaggctacagtaaccaaaacagcat

SEQ ID NO: 58658 - DNA, 120 bp, synthetic construct
  source 1..120: mol_type = other DNA
aaaggactataaatcatgctgctataaagacacatgtacacgtatgtttattgcggcactattcacaatagcaaagacttggtacctacccaaatgtccaacaattatagactggattaa

SEQ ID NO: 58659 - DNA, 120 bp, synthetic construct
  source 1..120: mol_type = other DNA
tgttcctatgtctccacatcctctccagcacctgttatttcctgactttttaatgatcaccattctaactggtgtgagatggtatctcattgtggttttgatttgcatttctctgatggc

SEQ ID NO: 58660 - DNA, 120 bp, synthetic construct
  source 1..120: mol_type = other DNA
atgagtagattgcaaaaattttctcccattctgtaggtggcctgttcactctgatggcagtttcttttgctgtgcagaagctctttagtttaattagatcccatttgtcaattttggctt

SEQ ID NO: 58661 - DNA, 120 bp, synthetic construct; identical to SEQ ID NO: 11811
  source 1..120: mol_type = other DNA

SEQ ID NO: 58662 - DNA, 120 bp, synthetic construct
  source 1..120: mol_type = other DNA
tttgagatatgtcccatcaatacctaatttatcaaagagtttttagcatgaacggctgctgaattttttcggaggccttttctgcatctattgagataattatgtggtttttgtctttgg

SEQ ID NO: 58663 - DNA, 120 bp, synthetic construct
  source 1..120: mol_type = other DNA
agaaaaagagagaatcctccctaactcattttatgaggccagcatcatcctgataccaaagcctggcagagacacaacaaaaaaagaattttgaccaatatccttgatgaacattgatgc

SEQ ID NO: 58664 - DNA, 120 bp, synthetic construct
  source 1..120: mol_type = other DNA
ccatccccatcaagctaccaatgactttcttcacagaattggaaaaaactactttacagttcatgtggaaccaaaaaagagcccacttcgccaagtcaatcctaagccaaaagaacaaag

SEQ ID NO: 58665 - DNA, 120 bp, synthetic construct
  source 1..120: mol_type = other DNA
gccatcccattactgggtatatacccaaaggattatcaatcatgcttctataaagatacatgcacacgtatgtttattgtggcactattcacaatagcaaagacttagaaccaacccaaa

SEQ ID NO: 58666 - DNA, 120 bp, synthetic construct
  source 1..120: mol_type = other DNA
gaggatctcttgagcccagaaggtcaaggctgccctgagccatgagtgtgcctcggtactccagcctgagtgacagagtgagaccctgtctcaaaaattaaatgaatgaatgaatgaata

SEQ ID NO: 58667 - DNA, 120 bp, synthetic construct
  source 1..120: mol_type = other DNA
ttcatagacatttccaattagctcggagagacaactggatattgtgtttaagcactgtgtttaggaaaacaggcactggatggaccaatgccaaatttcctgctctgctgcttaactaag

SEQ ID NO: 58668 - DNA, 120 bp, synthetic construct
  source 1..120: mol_type = other DNA
cagcttaaaatcacatttaaagctacatggagagctgatgaaactccttaatgcccacactgaatcccaagccaaatgaaccagagttttgcgggaaaagatccaggtatcaggattttt

SEQ ID NO: 58669 - DNA, 120 bp, synthetic construct; identical to SEQ ID NO: 19913
  source 1..120: mol_type = other DNA

SEQ ID NO: 58670 - DNA, 120 bp, synthetic construct
  source 1..120: mol_type = other DNA
gatcacgccactgcactccagcctggtgacagagcgagactgtctcaaattaaaaaaaaaaaaaaaattataagttgaaccattgtaagctggggaccgtctatatttaaaacaatattc

SEQ ID NO: 58671 - DNA, 120 bp, synthetic construct
  source 1..120: mol_type = other DNA
ctaaaaccataaaaaccctagaagaaaacctaggcaataccattcaggactaggcaaggacttcctctctaaaacaccaaaagcagtggcaacaaaagccaaaattgacaaatgggatct

SEQ ID NO: 58672 - DNA, 120 bp, synthetic construct
  source 1..120: mol_type = other DNA
tggaaaccatcattctcagcaaactatcgcaaggtcaaaaacaccaaacaccgcgtgttctcactcataggtgggaattgaacagtgagaacacatggacacaggaaggggaacatcaca

SEQ ID NO: 58673 - DNA, 120 bp, synthetic construct
  source 1..120: mol_type = other DNA
atagttgtagatatgcagcattatttctgagggctgtgttctgttccattggtctatatctctgttttggtaccagtaccatgctgttttggttactgtagccttgtaatatagtttgaa

SEQ ID NO: 58674 - DNA, 120 bp, synthetic construct
  source 1..120: mol_type = other DNA
ctaagcagtgctttacttccaactatgtggtcaattttggaataggtgtgatgtggtgctgagaagaatgtatattctgttgatttggggtggagagttctgtagatgtctattaggtcc

SEQ ID NO: 58675 - DNA, 120 bp, synthetic construct
  source 1..120: mol_type = other DNA
gaatattggcccccactctcttcttgtagagtttctgctgagagatcagctattagtctgatgggcttccctttgtgggtaacctgacctttctctctggctgcccttaacattttttcc

SEQ ID NO: 58676 - DNA, 120 bp, synthetic construct
  source 1..120: mol_type = other DNA
ttaggtcgtttcctggttttggtattaggaggatactggctttatagaatgatttagggaggattctctctttctctgtcttgtggaatagtgtcaataggattggtaccaattcttctt

SEQ ID NO: 58677 - DNA, 120 bp, synthetic construct
  source 1..120: mol_type = other DNA
gctggacggggctcctcacttctcagatggagcggctgccgggtggagggactcctgacttctcagatggggcggttgccaggcagagggtctcctcacttctcagacggggtggctggg

SEQ ID NO: 58678 - DNA, 120 bp, synthetic construct; identical to SEQ ID NO: 18746
  source 1..120: mol_type = other DNA

SEQ ID NO: 58679 - DNA, 120 bp, synthetic construct; identical to SEQ ID NO: 14645
  source 1..120: mol_type = other DNA

SEQ ID NO: 58680 - DNA, 120 bp, synthetic construct
  source 1..120: mol_type = other DNA
tgtcttcacgtgttcctctgtcccctgtatttcccataaagtgattgctggatatcgaggcttggtcatattcaagctgtatatgtgttgctgtatttttcctttaggaggcacataatg

SEQ ID NO: 58681 - DNA, 120 bp, synthetic construct
  source 1..120: mol_type = other DNA
gttttggtgccattatggattgaagtttatttgctgtgttcctgtctgttatattaggtggaagttactctagttggctcctgggtccttttgacgtgacctcaggagcctttagtactt

SEQ ID NO: 58682 - DNA, 120 bp, synthetic construct; identical to SEQ ID NO: 20486
  source 1..120: mol_type = other DNA

SEQ ID NO: 58683 - DNA, 120 bp, synthetic construct
  source 1..120: mol_type = other DNA
cctgcctggagtcagaaacaaacctcaaacactaatctagggaagtatccctttaaaggagcctgaatttgattggtttagcctgtggcacaatttatacccaaggaaaatgttgaaaac

SEQ ID NO: 58684 - DNA, 120 bp, synthetic construct
  source 1..120: mol_type = other DNA
ccattctcctgcctcagcctcccaagtagctgggactacaggcgcccgccactacgcccggctaattttttgtattcttagtagagacggggtttcaccgttttagccgggatggtctcg

SEQ ID NO: 58685 - DNA, 120 bp, synthetic construct
  source 1..120: mol_type = other DNA
tagggtactttaattgttagatatttagccagtcttttgatatggtttggctctgtgtccccacctaaatctcatctcgaattgtaatcctcatgtgttgaaggagagacctggtgggag

SEQ ID NO: 58686 - DNA, 120 bp, synthetic construct; identical to SEQ ID NO: 14570
  source 1..120: mol_type = other DNA

SEQ ID NO: 58687 - DNA, 120 bp, synthetic construct
  source 1..120: mol_type = other DNA
tggctgcataaatgtcttcttttgagaagtgtctgttcatatccttttcccacttcttgatggggttgtttttttctagtaaatttgtttgagttctttgtaaattctggatatcagccc

SEQ ID NO: 58688 - DNA, 120 bp, synthetic construct; identical to SEQ ID NO: 14571
  source 1..120: mol_type = other DNA

SEQ ID NO: 58689 - DNA, 120 bp, synthetic construct; identical to SEQ ID NO: 14572
  source 1..120: mol_type = other DNA

SEQ ID NO: 58690 - DNA, 120 bp, synthetic construct; identical to SEQ ID NO: 14573
  source 1..120: mol_type = other DNA

SEQ ID NO: 58691 - DNA, 120 bp, synthetic construct; identical to SEQ ID NO: 14574
  source 1..120: mol_type = other DNA

SEQ ID NO: 58692 - DNA, 120 bp, synthetic construct; identical to SEQ ID NO: 20542
  source 1..120: mol_type = other DNA

SEQ ID NO: 58693 - DNA, 120 bp, synthetic construct; identical to SEQ ID NO: 20543
  source 1..120: mol_type = other DNA

SEQ ID NO: 58694 - DNA, 120 bp, synthetic construct; identical to SEQ ID NO: 20544
  source 1..120: mol_type = other DNA

SEQ ID NO: 58695 - DNA, 120 bp, synthetic construct
  source 1..120: mol_type = other DNA
ctgcagttcttctgcctgaatcctttccatcaccccatcactaagtatctctgtacatgattctggaagacataggaatacactcaacagagtccagttcttaggaatactgttaacaga

SEQ ID NO: 58696 - DNA, 120 bp, synthetic construct; identical to SEQ ID NO: 12705
  source 1..120: mol_type = other DNA

SEQ ID NO: 58697 - DNA, 120 bp, synthetic construct; identical to SEQ ID NO: 15992
  source 1..120: mol_type = other DNA

SEQ ID NO: 58698 - DNA, 120 bp, synthetic construct; identical to SEQ ID NO: 11194
  source 1..120: mol_type = other DNA

SEQ ID NO: 58699 - DNA, 120 bp, synthetic construct; identical to SEQ ID NO: 9413
  source 1..120: mol_type = other DNA

SEQ ID NO: 58700 - DNA, 120 bp, synthetic construct; identical to SEQ ID NO: 9414
  source 1..120: mol_type = other DNA

SEQ ID NO: 58701 - DNA, 120 bp, synthetic construct; identical to SEQ ID NO: 9415
  source 1..120: mol_type = other DNA

SEQ ID NO: 58702 - DNA, 120 bp, synthetic construct
  source 1..120: mol_type = other DNA
gagaacgggccatgatgacgatggcggttttgtcgaatagaaaaagggggaaatgtgcggaaaagaaagagaaatcagattgttactgtgtctgtgtagaaagaagcagacataggagac

SEQ ID NO: 58703 - DNA, 120 bp, synthetic construct; identical to SEQ ID NO: 26811
  source 1..120: mol_type = other DNA

SEQ ID NO: 58704 - DNA, 120 bp, synthetic construct; identical to SEQ ID NO: 26812
  source 1..120: mol_type = other DNA

SEQ ID NO: 58705 - DNA, 120 bp, synthetic construct; identical to SEQ ID NO: 12280
  source 1..120: mol_type = other DNA

SEQ ID NO: 58706 - DNA, 120 bp, synthetic construct
  source 1..120: mol_type = other DNA
ctggcctgaatctgtttcaagttctcccttcctgcccagctcagttcaccagtgctggatccaggttcaaatgacagggacttgggtttttacaacagcgtggcaagtggtctgtctcct

SEQ ID NO: 58707 - DNA, 120 bp, synthetic construct
  source 1..120: mol_type = other DNA
gctctgctcttggattgctccaagcctcattccctccacattcctgactcctgtgtggctatgggccaagcagtctttccttgagcctctgacatccgattctgtgtcatggggttatca

SEQ ID NO: 58708 - DNA, 120 bp, synthetic construct
  source 1..120: mol_type = other DNA
tccaggatagattgcctgagagtgggggtcaccagatggtgaagtgttgtgactggcaaatacagaaagccaggagtgtgtgtcctttgtccgcctctcttccctcaggtctcctgttct

SEQ ID NO: 58709 - DNA, 120 bp, synthetic construct
  source 1..120: mol_type = other DNA
atccttgtcagtgtccctgagcaatgccttctctgtctctccctctcccgtgcacccaggctgtctccctcctgactctgggagtctcatctcctctggagtcatggtgggaagaaaggc

SEQ ID NO: 58710 - DNA, 120 bp, synthetic construct
  source 1..120: mol_type = other DNA
aaagccagggagctggtcagagccagaaaggaccccagagggtatcccacccaatacgcccatttttgcagatggggagactaagccaaccaatggccaagcttgtcttgtgttctgagc

SEQ ID NO: 58711 - DNA, 120 bp, synthetic construct
  source 1..120: mol_type = other DNA
atcctggctaacatgatgaaaccccgtctctactaaaaatacaaaaaaattagccgggcgtggtggcgggctcccgtagtcccagctactcgggaggctgaggcaggaaaatggcgtgag

SEQ ID NO: 58712 - DNA, 120 bp, synthetic construct
  source 1..120: mol_type = other DNA
ccaatatggtgaaaccctgtctctactaaaaatacaaaaaagtagctaggctgcggaccaggcgcctgatttcacacctgtaatcccagcactttgggaggccgaggtgggcggatcaca

SEQ ID NO: 58713 - DNA, 120 bp, synthetic construct
  source 1..120: mol_type = other DNA
tgggaaagtgggttggcaacatgtattgaaacttcattcattttgacccagtaattccactaatgtggaaatctatcctgagaaaataatcctatataaagaaatgtttcatgcacaatg

SEQ ID NO: 58714 - DNA, 120 bp, synthetic construct
  source 1..120: mol_type = other DNA
tatttgtttgtcaaccaggcagtgatcatattgtataggcttttttttttttctttgagatggagtctctctctgtcacccaagctggagtacagtggtgcgatctcagctcactgcaag

SEQ ID NO: 58715 - DNA, 120 bp, synthetic construct
  source 1..120: mol_type = other DNA
cacttactatgtaccacatcttactgtgccacgtgattggcctgtcagactgcctttaattctcaccacgtggtaggtaccattatcaattccattatacaagtgggaaaactaaggctt

SEQ ID NO: 58716 - DNA, 120 bp, synthetic construct
  source 1..120: mol_type = other DNA
tgaggtgtgtctgggagcttgaagccacgaatgtttttctctggaaagatcttgaaggagtattctccagtggtctaatggtggggagagaggcagaacagggggccatggacacagtct

SEQ ID NO: 58717 - DNA, 120 bp, synthetic construct
  source 1..120: mol_type = other DNA
tgcaagtccccgggcctccgtgtgttaacataagggatgagcccatgacacatgttaggctgcagccccgaaaccacccagcaagacccgaaattatagatttatctgtgtacatgtaca

SEQ ID NO: 58718 - DNA, 120 bp, synthetic construct
  source 1..120: mol_type = other DNA
ctccctataccctgaggctctggatctccctacactgtgagggtctacagggggcaacgtctaccttgcccatccttgcacagtgcttgacacgtagtacgcactgagagagatttgtct

SEQ ID NO: 58719 - DNA, 120 bp, synthetic construct
  source 1..120: mol_type = other DNA
aagagtgaaactccatctcaaaaaaaaaaaaaaaaaaaaaaaaaggagaccctcctgcctcggcttaccaaagtgttgggattacagacataagccaggtcgcctggcccaagctagata

SEQ ID NO: 58720 - DNA, 120 bp, synthetic construct
  source 1..120: mol_type = other DNA
tgggtcccagctccctgacctcctctctctggtggatatagctaacacttttaaaagttgaggcttttggttgtttgtttttaattgtttttcccaaatccacagctgacctgaaaactt

SEQ ID NO: 58721 - DNA, 120 bp, synthetic construct
  source 1..120: mol_type = other DNA
ctctggccatcctcagggaattcacaataaacaaatgaaggaggtaagcccggcaaatctgaagagagaaaaaaaattaggctgggcacggtggctcacgtctgtaatcccaatactttg

SEQ ID NO: 58722 - DNA, 120 bp, synthetic construct
  source 1..120: mol_type = other DNA
ctttcaacaaccttaagacgtaaataccattttttttttttttttttagagacagagtctccctctgttgtccagactggagtgcagtgatgtgatctcggctcactgcaacctctgcct

SEQ ID NO: 58723 - DNA, 120 bp, synthetic construct
  source 1..120: mol_type = other DNA
tgcctcctgggtcaagcaattctcctgcctcagcatcctgagtagctgggactacaggcgattgccaccatgcctggctaatttttgtatttttagtagagatggggtttcagcatgttg

SEQ ID NO: 58724 - DNA, 120 bp, synthetic construct
  source 1..120: mol_type = other DNA
attcccaagaagaaaaagaacacagcaatctacaagccagtgtctattgaaagaatgacctcaaagactttctgaactagtggcatgtgaacaggtgagtgctgagactaagacaggtag

SEQ ID NO: 58725 - DNA, 120 bp, synthetic construct
  source 1..120: mol_type = other DNA
tttttcattttagtgtgccatttagtttttttctatttattattgttttttgagatggagtcttgccctgttgccaggctggagtgcaatggcatgatctcggctcactgccacctccgc

SEQ ID NO: 58726 - DNA, 120 bp, synthetic construct
  source 1..120: mol_type = other DNA
gctaatttttatattttttgtagagatggggtttcactatgttgcccaggctggtgttgaactcctagactcaaacaatccacccacctcggcctcccaaagtgctgggattacaggcgt

SEQ ID NO: 58727 - DNA, 120 bp, synthetic construct
  source 1..120: mol_type = other DNA
tgcgcctacccagccccctccctgagtgggtgggcgggagaccgcgtttctatttttgtaccaatgtcccacagatgccattgttgcccagcagttggtggcaggaaggggggatttcgg

SEQ ID NO: 58728 - DNA, 120 bp, synthetic construct
  source 1..120: mol_type = other DNA
ttggctttttaatccctctgattctccccttgcacacagtcatccaaggagagccatccacagtttaggggctgggaagcatgggtccagttagaggtgggctgcagctggtgagaacta

SEQ ID NO: 58729 - DNA, 120 bp, synthetic construct
  source 1..120: mol_type = other DNA
tgctttctccttctcatcactgtggttctgacagccagcaagggtgctcatgtgtccacatgtggacagctcagcccggatacccaaactccaccatgcctgcctccccaagtagccaac

SEQ ID NO: 58730 - DNA, 120 bp, synthetic construct
  source 1..120: mol_type = other DNA
taggcctttgctgtgcactggcttctgcctggaatgccctctaccctgctcttgggctagacaccaggggccttttccctaacgcccctccctcctctaccttcagtgctcatcacccca

SEQ ID NO: 58731 - DNA, 120 bp, synthetic construct
  source 1..120: mol_type = other DNA
gaagacattctgtaaacggtaacaaccctggcaaaatggggatgttcacagaggagaaatggaacccagagagaaataataataacaataaccgtagccaccatacgctgagccgtcact

SEQ ID NO: 58732 - DNA, 120 bp, synthetic construct
  source 1..120: mol_type = other DNA
tgttgtcatgaactcaaggatccttggaatatggcatgagttacagtggccccctgccatgcccctaaaatccctccaagaactgttattgcccacgggataaagatcaaacttcttaat

SEQ ID NO: 58733 - DNA, 120 bp, synthetic construct
  source 1..120: mol_type = other DNA
taatacatgtgagatgcttaattcctggcatagagtcggccctagcacagtctctagcacatagcgcttaacaaaggtgttgttattattcaggacagacgtatcagacaaactgatggt

SEQ ID NO: 58734 - DNA, 120 bp, synthetic construct
  source 1..120: mol_type = other DNA
tctactcagctcttcccacctgagtcttctggtggcacccaaaagactgccctgatccagaccctgcccctagaaatgccacctcttatgggccctgtgagatgcccacatcactctctt

SEQ ID NO: 58735 - DNA, 120 bp, synthetic construct
  source 1..120: mol_type = other DNA
atatatacacccacacatccacatacatatatatatatatatatatttttttttttttttttttttttttttttttttgagatggagttttgctcttcttgcccaggctggagtgcaatg

SEQ ID NO: 58736 - DNA, 120 bp, synthetic construct
  source 1..120: mol_type = other DNA
tcctgagtagctggaactataggcatgcaccaccacatccagctaatttttgcatttttatagagatgaggtttcaccatgttgctcaagctggtattgaactcctggactcaagagatc

SEQ ID NO: 58737 - DNA, 120 bp, synthetic construct
  source 1..120: mol_type = other DNA
tacctggtctataaaatgacaacagagcccacatgatccacagaggtggctgggaggactccatgagactgggcacatggcaattctttcttaaatttctatttgtttatttttcagaca

SEQ ID NO: 58738 - DNA, 120 bp, synthetic construct
  source 1..120: mol_type = other DNA
acaagcctggccattatgtaatgatcagataacaggcctggcggggagatcagataagaggtccatttattttggggccttttcgaatcctggccgcccccaccccgcagacgagaatgg

SEQ ID NO: 58739 - DNA, 120 bp, synthetic construct
  source 1..120: mol_type = other DNA
agaagctgtgaatattatttcatcatactaggacagatacttttcttcccgctgccacccccccttttcttttctgagatagagtctcactctgtcacccaggccagagtacagtgtctc

SEQ ID NO: 58740 - DNA, 120 bp, synthetic construct
  source 1..120: mol_type = other DNA
tacaggtatgagtcattatgcccaactaaattttaaaaatatttgtggagaaagagtcttgctatgttgcccaggctggtcttgaatgcctggccgcaagtgatcctcccaccttagcct

SEQ ID NO: 58741 - DNA, 120 bp, synthetic construct
  source 1..120: mol_type = other DNA
agcgggggtggataggacatattctaagttctactaggggtctgacagtctgagatttcacctaaggatgaaggcaggaggaagacagagcagggcatagatggggctgctgaaggtaaa

SEQ ID NO: 58742 - DNA, 120 bp, synthetic construct
  source 1..120: mol_type = other DNA
agcccaccctctcctggttcacacggctcctgctccaggctctttttcctcctagcaaatgggaacgcagcctctaagagacaggtgtttgtggtctcgctcttgcgccactgacccttc

SEQ ID NO: 58743 - DNA, 120 bp, synthetic construct
  source 1..120: mol_type = other DNA
gcctgcttgtccctaaaacaaaagaaaacaaaaaaacccaacatgacaggaaagtgtgtctgagaaagtcaaagtcccagccaggcatggtggctcacacctgtaatcccagcactttgg

SEQ ID NO: 58744 - DNA, 120 bp, synthetic construct
  source 1..120: mol_type = other DNA
ctgggaccagctcctacctgctcacaggaacagacggatacgtttccaggagtttttccaactggctgttacatagctattactatatatttttaaaaggtcatgaatgtccaaactcat

SEQ ID NO: 58745 - DNA, 120 bp, synthetic construct
  source 1..120: mol_type = other DNA
ctgttcaaagggtttgaggagctgcccaaaggccctggggaaggtgagctggaggaacttaaagctaaaaataaaacaacacagaagtggccagtctgccagagccctctctgcaatgat

SEQ ID NO: 58746 - DNA, 120 bp, synthetic construct
  source 1..120: mol_type = other DNA
gtgacagcagcagtcctggccccagggcgcagatgaaggctgtggtatgaccggcagcagggagctcctggctcatccagcccggccggcccagggaggcaggaaatgcgcttccttaga

SEQ ID NO: 58747 - DNA, 120 bp, synthetic construct
  source 1..120: mol_type = other DNA
aaagatgtgggaaagtttggagcttcctagagacttgttgaatgggtttgaccagaatgttgatagcaataaagacaataaagtccaggttgaggtggtttcagacggagatgaggaact

SEQ ID NO: 58748 - DNA, 120 bp, synthetic construct
  source 1..120: mol_type = other DNA
cattctaactggtgtgagatggtatctcactgtggttttgatttgcatttctctgatggccagtgatgatgaccattttttcatctgtcttttggctgcataaatgtcttcttttgagaa

SEQ ID NO: 58749 - DNA, 120 bp, synthetic construct
  source 1..120: mol_type = other DNA
ggcttaacaggcggggctatttttcgaggcggaagaatactcaagttgcaagagtggcaactttttcaagaaggggaaagtcccacttcgggccctttgggtttcttcgcagtcagatgt

SEQ ID NO: 58750 - DNA, 120 bp, synthetic construct
  source 1..120: mol_type = other DNA
gcgtgcagaagctcacaaaaggccacccgtcctcggtccattcatttttgttcactgttgattcagccccattcattgatgggctggggccgtgcgctgagcgcccacagtcgatgggga

SEQ ID NO: 58751 - DNA, 120 bp, synthetic construct
  source 1..120: mol_type = other DNA
aatcttccagccctgggggtggaggtagtaaagggtgagcatggtattggcttggaggaagtgggggacatttctgctttttttcctcctgggactggagatgcttgaaaaagctggggg

SEQ ID NO: 58752 - DNA, 120 bp, synthetic construct
  source 1..120: mol_type = other DNA
ggtttaagtgattcttgtgcctcagcctcccaagtagctgggattacaggcctgtgccatcacgcccagctaattttttttttttttttttgagatggagtctcactctgtcgcccaggc

SEQ ID NO: 58753 - DNA, 120 bp, synthetic construct
  source 1..120: mol_type = other DNA
aatctgacctctgctctcccttctcaaactcacccttccagaaactaagcgttgtggatcaagaaaaagttgacaaatttatgattgagctagatgggaccgagaataagtgtgagtgaa

SEQ ID NO: 58754 - DNA, 120 bp, synthetic construct
  source 1..120: mol_type = other DNA
agcctcgttccaaccccacaccctacacccaaatcatattgagagtttctttgaggcaaagatcttggcatttctttgtatcttcttgagtccttcttaaaccagtgccttcttgatgaa

SEQ ID NO: 58755 - DNA, 120 bp, synthetic construct
  source 1..120: mol_type = other DNA
ccagacaccctctccccatctcaggccttcaatgtgatcaacgggggctcccatgctggaaacaagctggccatgcaggagttcatgattctgcctgtgggagccagctccttcaaggaa

SEQ ID NO: 58756 - DNA, 120 bp, synthetic construct
  source 1..120: mol_type = other DNA
actccagctacagtcttacccaccaactccaagcttacctttcccctggcacctgacttacccacaccttgatctcaagactttgtttgactaatccttggcctgactccaagagctttg

SEQ ID NO: 58757 - DNA, 120 bp, synthetic construct
  source 1..120: mol_type = other DNA
tgacatagtggaaaagagttgaggctgaattgttcctggtgagaagaacaaaaacttaagtgccagaggtccaaagaaaaaggctgggcatggtggctcatgcctgtaatcccagcactt

SEQ ID NO: 58758 - DNA, 120 bp, synthetic construct; identical to SEQ ID NO: 13682
  source 1..120: mol_type = other DNA

SEQ ID NO: 58759 - DNA, 120 bp, synthetic construct; identical to SEQ ID NO: 13683
  source 1..120: mol_type = other DNA

SEQ ID NO: 58760 - DNA, 120 bp, synthetic construct; identical to SEQ ID NO: 13684
  source 1..120: mol_type = other DNA

SEQ ID NO: 58761 - DNA, 120 bp, synthetic construct; identical to SEQ ID NO: 13685
  source 1..120: mol_type = other DNA

SEQ ID NO: 58762 - DNA, 120 bp, synthetic construct
  source 1..120: mol_type = other DNA
gggttgggggtaaggttatagattaacagcatcccaaggcagaagaatttttcttagttcagaacaaaatggagcctcctatgtctaattctttctacacagacatagtaacaatctgat

SEQ ID NO: 58763 - DNA, 120 bp, synthetic construct
  source 1..120: mol_type = other DNA
tcacttcccagatgatgggtggccgggcagaggcgctcctcacttcccagacagggcggccaggtagcagcgatcctcacttcccagacagggcagccgggcagaggcgctcctcacttc

SEQ ID NO: 58764 - DNA, 120 bp, synthetic construct; identical to SEQ ID NO: 13687
  source 1..120: mol_type = other DNA

SEQ ID NO: 58765 - DNA, 120 bp, synthetic construct
  source 1..120: mol_type = other DNA
tagtttgaagtcaggtagcatgatgcctccagctttgttcttcttatgcagccaaaaaacacctgaaaaaatgctcatcattactggccatcagagaaatgcaaatcaaaaccacaatga

SEQ ID NO: 58766 - DNA, 120 bp, synthetic construct
  source 1..120: mol_type = other DNA
aacagtactgtaggaggttttatactttccttaaatttttaatttaaaaagttttaatctacaatgaactcaaacaaatttacaagaaaaaaacaaacaaccccattgaaaagtgggtga

SEQ ID NO: 58767 - DNA, 120 bp, synthetic construct
  source 1..120: mol_type = other DNA
taaatgacgagttaatgggtgcagcacaccaacattgcacatgtatacatatgtagcaaacctgcacgttgtgcacatgtaccctaaaacttaaagtataataaaataaaatttaaaaaa

SEQ ID NO: 58768 - DNA, 120 bp, synthetic construct; identical to SEQ ID NO: 13689
  source 1..120: mol_type = other DNA

SEQ ID NO: 58769 - DNA, 120 bp, synthetic construct
  source 1..120: mol_type = other DNA
atagtgtaaaagtgttcctatttctccacatcctctccagcacctgttgtttcctgacttcttaatgatcgccattctaactggtgtgagatggtatctcattgtggttttgatttgcac

SEQ ID NO: 58770 - DNA, 120 bp, synthetic construct; identical to SEQ ID NO: 13690
  source 1..120: mol_type = other DNA

SEQ ID NO: 58771 - DNA, 120 bp, synthetic construct
  source 1..120: mol_type = other DNA
caataaacatacgtgggcatgtgtctttatagcagcaagatgtataatcctttgggtatatacccagtaatgggatggctgggtcaaatggtatttctagttctagatccctgaggaatc

SEQ ID NO: 58772 - DNA, 120 bp, synthetic construct
  source 1..120: mol_type = other DNA
ttttggttccatatgaactttagttttttccaattctgtgaagaaagtcattggtagcttgatggagatggcattgaatctataaattaccttggacagtatggccattttcatgatatt

SEQ ID NO: 58773 - DNA, 120 bp, synthetic construct
  source 1..120: mol_type = other DNA
atttttgcatcaatgttcatcaaggatattcgtctaaaattctcttttttggttgtgtctctgcccggctttggtaccaagatgatgctggcctcataaaatgagttagggaggattccc

SEQ ID NO: 58774 - DNA, 120 bp, synthetic construct
  source 1..120: mol_type = other DNA
caggttgttcagtttccatgtagttgagtggttttgagtgagtttcttaatcccgagttctagtttgattgcactgtggtctgagagatagtttgttataatttctgttcttttacattt

SEQ ID NO: 58775 - DNA, 120 bp, synthetic construct
  source 1..120: mol_type = other DNA
cttcatttcaactttggtgaatctgacaattatgtgtcttggagttgctcttctcggagtgtcttggagtatctttgtggctcttctcggagtatcttggagttgctcttcttggagtat

SEQ ID NO: 58776 - DNA, 120 bp, synthetic construct; identical to SEQ ID NO: 35282
  source 1..120: mol_type = other DNA

SEQ ID NO: 58777 - DNA, 120 bp, synthetic construct; identical to SEQ ID NO: 35283
  source 1..120: mol_type = other DNA

SEQ ID NO: 58778 - DNA, 120 bp, synthetic construct; identical to SEQ ID NO: 35284
  source 1..120: mol_type = other DNA

SEQ ID NO: 58779 - DNA, 120 bp, synthetic construct; identical to SEQ ID NO: 35285
  source 1..120: mol_type = other DNA

SEQ ID NO: 58780 - DNA, 120 bp, synthetic construct; identical to SEQ ID NO: 35286
  source 1..120: mol_type = other DNA

SEQ ID NO: 58781 - DNA, 120 bp, synthetic construct; identical to SEQ ID NO: 35287
  source 1..120: mol_type = other DNA

SEQ ID NO: 58782 - DNA, 120 bp, synthetic construct
  source 1..120: mol_type = other DNA
taaataaattaaaaaaaaaaaaaaaaaaaaaaaaaaagaataagtagggcaggccaggcgcagtggctactgcaggtaatcccagcactttgggaggccgaggcaggtggatcacttaag

SEQ ID NO: 58783 - DNA, 120 bp, synthetic construct
  source 1..120: mol_type = other DNA
taccattacaggatttttcctatgtatgcctacacagatgtgtgtgtgcgtgtgcgtgtgtgtgtgcgtgtgtgtgtgtgtattatgtatatgtttttaaactgggatctgtcactctgt

SEQ ID NO: 58784 - DNA, 120 bp, synthetic construct; identical to SEQ ID NO: 28328
  source 1..120: mol_type = other DNA

SEQ ID NO: 58785 - DNA, 120 bp, synthetic construct
  source 1..120: mol_type = other DNA
ccttgggcaaatcaaaaccactatgagataccatctcacaccagttagaatggcaatcattaaaaagtcaggaaacaacaggtgctggagaggatgtggagaaataggaacacttttaca

SEQ ID NO: 58786 - DNA, 120 bp, synthetic construct; identical to SEQ ID NO: 28329
  source 1..120: mol_type = other DNA

SEQ ID NO: 58787 - DNA, 120 bp, synthetic construct; identical to SEQ ID NO: 28314
  source 1..120: mol_type = other DNA

SEQ ID NO: 58788 - DNA, 120 bp, synthetic construct
  source 1..120: mol_type = other DNA
ctcattgttcaattcccacctatgagtgagaatatgcagtgtttggttttttgttcttgcgatagtttactgagaatggatttccaatttcatccatgtccctacaaaggacatgaactc

SEQ ID NO: 58789 - DNA, 120 bp, synthetic construct
  source 1..120: mol_type = other DNA
ccccattgcttgtttttctcaggtttatcaaagattagatagttgtagatatgcggcgttatttctgagggctctgttctgttccattgatctatatctctgttttggtaccagtaccat

SEQ ID NO: 58790 - DNA, 120 bp, synthetic construct
  source 1..120: mol_type = other DNA
ttttgttcttgcgatagtttactgagaatgatgatttccaatttcatccatgtcctttgtagggcatgtatacccagtaatgggatggctgagtcaaatggtatttccagttctagatcc

SEQ ID NO: 58791 - DNA, 120 bp, synthetic construct
  source 1..120: mol_type = other DNA
aaattgacaaatgggatctaattaaactaaagagcttctgcacagcaaaagaaactaccatcagagtgaacaggcaacctataaaatgggagaaaattttcgcaacctactcatctgaca

SEQ ID NO: 58792 - DNA, 120 bp, synthetic construct; identical to SEQ ID NO: 26003
  source 1..120: mol_type = other DNA

SEQ ID NO: 58793 - DNA, 120 bp, synthetic construct
  source 1..120: mol_type = other DNA
ggaagaatcaatatcgtgaaaatggccatactgcccaaggtaatttacagattcaatgccatccccatcaagctaccaatgcctttcttcacataattggaaaaaactactttaaggttc

SEQ ID NO: 58794 - DNA, 120 bp, synthetic construct; identical to SEQ ID NO: 26004
  source 1..120: mol_type = other DNA

SEQ ID NO: 58795 - DNA, 120 bp, synthetic construct
  source 1..120: mol_type = other DNA
gaccaaaagtagataaaaccacaaagatggggaaaaaacagaacagaaaaactggaaactctaaaaagcagagcgcctctcctcttccaaaggaacgcagctcctcaccagcaatggaac

SEQ ID NO: 58796 - DNA, 120 bp, synthetic construct
  source 1..120: mol_type = other DNA
atactttacagacaagcaaatgctgagagattttgtcaccaccaggcctgtcctaaaagagctcctgaaggaagcgctaaacagggaaaggaacaaccggtaccacccgctgcaaaatca

SEQ ID NO: 58797 - DNA, 120 bp, synthetic construct
  source 1..120: mol_type = other DNA
taaatgcccacaagagaaagcaggaaagatccaaaattgacaccctaacatcacaattaaaagaactagaaaagcaagagcaaacacattcaaaagctagcagaaggcaagaaataacca

SEQ ID NO: 58798 - DNA, 120 bp, synthetic construct
  source 1..120: mol_type = other DNA
ttatttcaaaataataagagctatcaatgacaaacccacagccaatatcatactgaatgggcaaaaactggaagcattccctttgaaaactggcacaagacagggatgccctctctcacc

SEQ ID NO: 58799 - DNA, 120 bp, synthetic construct
  source 1..120: mol_type = other DNA
ccttacaccttatacaaaaatcaattcaagatggattaaagacttaaacgttagacctaaaaccataaaaaccctagaagaaaacctaggcattgccattcaggacataggcatgggcaa

SEQ ID NO: 58800 - DNA, 120 bp, synthetic construct
  source 1..120: mol_type = other DNA
gggaacatcacactctggggactgttgtggggtggggggaggcgggagggatagcattgggagatatacctaatgctagatgacgagttagtgggtgcagcgcaccagcatggcacatgt

SEQ ID NO: 58801 - DNA, 120 bp, synthetic construct; identical to SEQ ID NO: 23823
  source 1..120: mol_type = other DNA

SEQ ID NO: 58802 - DNA, 120 bp, synthetic construct
  source 1..120: mol_type = other DNA
tgtggtgttctctgtatttcctgaatctgaacgtcggcctgccttgctagattggggaagttctcctggataatatcctgcagagtgttttccaacttggttccattctccccgtcactt

SEQ ID NO: 58803 - DNA, 120 bp, synthetic construct
  source 1..120: mol_type = other DNA
tgtttactgcggcactattcacaatagtaaagacttggaaccaacccaaatgtccaacaatgatagactggattaagaaaatgtggcacatatacaccatggaatactatgcagccataa

SEQ ID NO: 58804 - DNA, 120 bp, synthetic construct
  source 1..120: mol_type = other DNA
gtttaattagatcccatttgtcgattttgacttttgttgccattgcttttggtgttttagatgtgaagtccttgcccatgcctatgtcctgaatggtaatgcctaggttttcttctaggt

SEQ ID NO: 58805 - DNA, 120 bp, synthetic construct
  source 1..120: mol_type = other DNA
attagcaaacttaaaaaaaaaaagacagggtcttgctgtgttgctcaggatggtctcaaattcctgggctcaagaaatccttccgccttgatctcccaaagtgctgagaggcatgagtca

SEQ ID NO: 58806 - DNA, 120 bp, synthetic construct; identical to SEQ ID NO: 23824
  source 1..120: mol_type = other DNA

SEQ ID NO: 58807 - DNA, 120 bp, synthetic construct; identical to SEQ ID NO: 23825
  source 1..120: mol_type = other DNA

SEQ ID NO: 58808 - DNA, 120 bp, synthetic construct
  source 1..120: mol_type = other DNA
tttacaatttggcatgtttttgcagtggctggtactggttgttcctttccatgtttagtgcttccttcaggagctcttgtaaggcaagccttgtggtgacaaaatctctcagtgtttgct

SEQ ID NO: 58809 - DNA, 120 bp, synthetic construct; identical to SEQ ID NO: 11047
  source 1..120: mol_type = other DNA

SEQ ID NO: 58810 - DNA, 120 bp, synthetic construct
  source 1..120: mol_type = other DNA
agatggggcggtggctgggcagaggtgctcctcagttcccagatggggcggctgggcagaggcactcctcacctcccagacagggcggccgggcagaggtgctcctcacttcctggacag

SEQ ID NO: 58811 - DNA, 120 bp, synthetic construct; identical to SEQ ID NO: 11048
  source 1..120: mol_type = other DNA

SEQ ID NO: 58812 - DNA, 120 bp, synthetic construct
  source 1..120: mol_type = other DNA
ctagatccttgaggaatcgccacactgtcttccataatggttgaactagtttacagtcccaccaacagtgtaaaagtgttcctatttctccacatcctctccagcacctgtcgtttcctg

SEQ ID NO: 58813 - DNA, 120 bp, synthetic construct
  source 1..120: mol_type = other DNA
tattgtgtgggagtctaagtctctttgtgggtcactaaggacttgctttatgaatttgggtgctcctgtattgggtgcatatatatttaggatagttagctcttcttgttgaattgatcc

SEQ ID NO: 58814 - DNA, 120 bp, synthetic construct
  source 1..120: mol_type = other DNA
agaatgttgaatattggctaccactctcttctggcttatagagtttctgccaaaaggtctgctgttagtctgatgggcttccctttgtgggtaacccgacctttctctctggctgccctt

SEQ ID NO: 58815 - DNA, 120 bp, synthetic construct; identical to SEQ ID NO: 33175
  source 1..120: mol_type = other DNA

SEQ ID NO: 58816 - DNA, 120 bp, synthetic construct; identical to SEQ ID NO: 33176
  source 1..120: mol_type = other DNA

SEQ ID NO: 58817 - DNA, 120 bp, synthetic construct; identical to SEQ ID NO: 3768
  source 1..120: mol_type = other DNA

SEQ ID NO: 58818 - DNA, 120 bp, synthetic construct
  source 1..120: mol_type = other DNA
gaaagtgggacacgctgtggggtcctcacgcaattctgtatgtccgggggatataagcccattttaaggagggtagatgacagaggctcagagaggacaggaggccggtccagcccagac

SEQ ID NO: 58819 - DNA, 120 bp, synthetic construct
  source 1..120: mol_type = other DNA
cgccagaccaggacagccccccccagaccaggagagccccccagaccaggacaccccctcacacagaacagattcccagaccaggacagcccccagaccaggacagccccccccagacca

SEQ ID NO: 58820 - DNA, 120 bp, synthetic construct
  source 1..120: mol_type = other DNA
tctccccgcatctcccacccgcgggtctgtctcggtgcccagggtcgccccgcccccgggggggtgggaggcaggagagggaagctgaggaggagcctggagctgcgaggggcagaactc

SEQ ID NO: 58821 - DNA, 120 bp, synthetic construct; identical to SEQ ID NO: 33155
  source 1..120: mol_type = other DNA

SEQ ID NO: 58822 - DNA, 120 bp, synthetic construct; identical to SEQ ID NO: 33156
  source 1..120: mol_type = other DNA

SEQ ID NO: 58823 - DNA, 120 bp, synthetic construct
  source 1..120: mol_type = other DNA
gttttagattattgttttctgcagttgtatctatagtgggcttttggggtggggggtgggggtctgtggttttttgttttgtaagtgggaagaggtgtgattcctgtatttaggtaatga

SEQ ID NO: 58824 - DNA, 120 bp, synthetic construct; identical to SEQ ID NO: 13446
  source 1..120: mol_type = other DNA

SEQ ID NO: 58825 - DNA, 120 bp, synthetic construct; identical to SEQ ID NO: 13447
  source 1..120: mol_type = other DNA

SEQ ID NO: 58826 - DNA, 120 bp, synthetic construct; identical to SEQ ID NO: 13448
  source 1..120: mol_type = other DNA

SEQ ID NO: 58827 - DNA, 120 bp, synthetic construct; identical to SEQ ID NO: 13449
  source 1..120: mol_type = other DNA

SEQ ID NO: 58828 - DNA, 120 bp, synthetic construct; identical to SEQ ID NO: 13450
  source 1..120: mol_type = other DNA

SEQ ID NO: 58829 - DNA, 120 bp, synthetic construct; identical to SEQ ID NO: 13451
  source 1..120: mol_type = other DNA

SEQ ID NO: 58830 - DNA, 120 bp, synthetic construct; identical to SEQ ID NO: 20513
  source 1..120: mol_type = other DNA

SEQ ID NO: 58831 - DNA, 120 bp, synthetic construct; identical to SEQ ID NO: 20514
  source 1..120: mol_type = other DNA

SEQ ID NO: 58832 - DNA, 120 bp, synthetic construct; identical to SEQ ID NO: 20515
  source 1..120: mol_type = other DNA

SEQ ID NO: 58833 - DNA, 120 bp, synthetic construct
  source 1..120: mol_type = other DNA
ggcagctgtgagccatgttcatgccactgtactctatcctggttgacaaagtgagaccctgtatcaaaaaaagaaaaagcataaataaataaatcaagatctggccaggtgaagtggctt

SEQ ID NO: 58834 - DNA, 120 bp, synthetic construct
  source 1..120: mol_type = other DNA
cccggctcaagcgatctgcctgcctcagcctcccaaagtactaagattataggcatgagtcaccgcacccagccttatttcttaatcacattatttatttgcaaatgtaaatatgttcaa

SEQ ID NO: 58835 - DNA, 120 bp, synthetic construct
  source 1..120: mol_type = other DNA
ataatcccagtactttgggaggccaaggtgggaggatcgcttgagtctgagagttcaagaccagcctgggcaacatggcaagaccctgtctctaaaaaaaaaaaaaaaaaaattagctga

SEQ ID NO: 58836 - DNA, 120 bp, synthetic construct
  source 1..120: mol_type = other DNA
gattactggaattgtcaggggaatcttcctagtggctaagattcctctggctttctgctgactcactttttctcctttttgcctataacacagacataaataccttcaacaataggctcc

SEQ ID NO: 58837 - DNA, 120 bp, synthetic construct
  source 1..120: mol_type = other DNA
aatcacaaggaactccttaagaaagctttactcagactgctgtgctggcagctctggccaggccaatcaggcaagagaaacaaataaagggtattcaaataggaagaaaggaagtcaaat

SEQ ID NO: 58838 - DNA, 120 bp, synthetic construct
  source 1..120: mol_type = other DNA
ttgggaaaactggctagccatatgccgaaaactgaaactggactccttccttacaccttatagaaaattaactcaagatggattaaagacttaaacataagactaaaaccataacaatcc

SEQ ID NO: 58839 - DNA, 120 bp, synthetic construct; identical to SEQ ID NO: 28311
  source 1..120: mol_type = other DNA

SEQ ID NO: 58840 - DNA, 120 bp, synthetic construct; identical to SEQ ID NO: 28312
  source 1..120: mol_type = other DNA

SEQ ID NO: 58841 - DNA, 120 bp, synthetic construct
  source 1..120: mol_type = other DNA
gccactgcactccagcctgggccacagagcaagactccatctcaaaaaaaaaaaatctaaaacacatggcaaaatggtaacaaatgatagaaatttttgtgctggatacacaactgtctc

SEQ ID NO: 58842 - DNA, 120 bp, synthetic construct; identical to SEQ ID NO: 18765
  source 1..120: mol_type = other DNA

SEQ ID NO: 58843 - DNA, 120 bp, synthetic construct; identical to SEQ ID NO: 26948
  source 1..120: mol_type = other DNA

SEQ ID NO: 58844 - DNA, 120 bp, synthetic construct
  source 1..120: mol_type = other DNA
tgaagagcgtctctgcccggccgcccatcttctgggatgtggggagcgcctctgccccgccactccgtctgggatgtgaggagcgcctctgccctgcctcgacccagtctgggaaatgag

SEQ ID NO: 58845 - DNA, 120 bp, synthetic construct
  source 1..120: mol_type = other DNA
tgagcctgggaggcagcagttgcagtgagccatgatcatgccactgccttcagcctggtcaacagagcaagaccctgtctcaaataaataaaaattaaaagtaattatcagagaaaataa

SEQ ID NO: 58846 - DNA, 120 bp, synthetic construct; identical to SEQ ID NO: 32905
  source 1..120: mol_type = other DNA

SEQ ID NO: 58847 - DNA, 120 bp, synthetic construct
  source 1..120: mol_type = other DNA
ttgcttaggattgtcttggctatatgggctcttttttggttccgtatgaactttaaagtagttttttccaattctgtgaagaaagtcattgttagcttgatggggacggcattgaatcta

SEQ ID NO: 58848 - DNA, 120 bp, synthetic construct
  source 1..120: mol_type = other DNA
cctggattcggtttgccagtattttattgaggagttttgcattgatgttcatcagggatattggtctaaaattctttttttgttgtgtctctgccaggctttggtatcaggatgatgctg

SEQ ID NO: 58849 - DNA, 120 bp, synthetic construct; identical to SEQ ID NO: 21395
  source 1..120: mol_type = other DNA

SEQ ID NO: 58850 - DNA, 120 bp, synthetic construct; identical to SEQ ID NO: 58847
  source 1..120: mol_type = other DNA

SEQ ID NO: 58851 - DNA, 120 bp, synthetic construct; identical to SEQ ID NO: 15163
  source 1..120: mol_type = other DNA

SEQ ID NO: 58852 - DNA, 120 bp, synthetic construct; identical to SEQ ID NO: 10195
  source 1..120: mol_type = other DNA

SEQ ID NO: 58853 - DNA, 120 bp, synthetic construct; identical to SEQ ID NO: 10196
  source 1..120: mol_type = other DNA

SEQ ID NO: 58854 - DNA, 120 bp, synthetic construct; identical to SEQ ID NO: 21659
  source 1..120: mol_type = other DNA

SEQ ID NO: 58855 - DNA, 120 bp, synthetic construct
  source 1..120: mol_type = other DNA
gattacaggcatgagccactgtgcccggccatttttgtctatttttaatatcccttgaggtagtagccaaccactctgagtggcttatgtggtcatctaaaatagcatttatagtttgtt

SEQ ID NO: 58856 - DNA, 120 bp, synthetic construct
  source 1..120: mol_type = other DNA
agacagagggaaggaagtaaattcggattcctactgacatttttttaaagggaaggtaagagattaagggactttccacctctttttccctgagaaatcagcggcgaggccaactgcaga

SEQ ID NO: 58857 - DNA, 120 bp, synthetic construct; identical to SEQ ID NO: 7198
  source 1..120: mol_type = other DNA

SEQ ID NO: 58858 - DNA, 120 bp, synthetic construct; identical to SEQ ID NO: 7199
  source 1..120: mol_type = other DNA

SEQ ID NO: 58859 - DNA, 120 bp, synthetic construct; identical to SEQ ID NO: 24489
  source 1..120: mol_type = other DNA

SEQ ID NO: 58860 - DNA, 120 bp, synthetic construct
  source 1..120: mol_type = other DNA
tgaactcatcattttttatggctgcatagtattccatggtgtatatgtgccacattttcttaatccagtctatcattgttggacatttgggttggttccaagtctttgctattgagaata

SEQ ID NO: 58861 - DNA, 120 bp, synthetic construct
  source 1..120: mol_type = other DNA
aaagatcagatagttgtagatatgcggcattatttctgagggctctgttctgttccattgatctatatctctgttttggtaccagtaccatgctgttttggttactgtagccttggagta

SEQ ID NO: 58862 - DNA, 120 bp, synthetic construct
  source 1..120: mol_type = other DNA
ctaatttattgagagtttttagcatgaagggttgttgaattttgtcaaaggctttttctgcatctattgagataatcatgtggtttttgtctttggctctatttatatgctggattacat

SEQ ID NO: 58863 - DNA, 120 bp, synthetic construct
  source 1..120: mol_type = other DNA
atgtgtcccagagattctggtatgtggtgtctttgttctcgttggtttcaaagaacatctttatttctgccttcatttcgttatgtacccagtagtcattcaggagcaggttgttcagtt

SEQ ID NO: 58864 - DNA, 120 bp, synthetic construct
  source 1..120: mol_type = other DNA
tttggcatgattttgcagcggctggtaccggttgttcctttccatgtttagcgcttccttcaggagctcttttagggcaggcctggtggtgacaaaatctctcaacatttgcttgtctat

SEQ ID NO: 58865 - DNA, 120 bp, synthetic construct
  source 1..120: mol_type = other DNA
ttgatcgtctgaagccttcttctctcagctcgtcaaaatcattctccatccagctttgttctgttgctggtgaggaactgcgttcctttggaggaggagaggcgctctgcgttttagagt

SEQ ID NO: 58866 - DNA, 120 bp, synthetic construct
  source 1..120: mol_type = other DNA
gagctgttcctattcggccatcttggctcctccctcctgtctctcttttttaatcttaaaatcaaaacagctaattttaccacacggaggaattaaaccaggtgtaacggctataacttc

SEQ ID NO: 58867 - DNA, 120 bp, synthetic construct; identical to SEQ ID NO: 24483
  source 1..120: mol_type = other DNA

SEQ ID NO: 58868 - DNA, 120 bp, synthetic construct
  source 1..120: mol_type = other DNA
aacaggtgctggagaggatgtggagaaataggaacacttttacactgttagtgggactgtaaactagttcaaccattgtggaagtcggtgtggcgattcctcagggatctagaactagaa

SEQ ID NO: 58869 - DNA, 120 bp, synthetic construct
  source 1..120: mol_type = other DNA
aacaaatgacattaaaactgtgtacgaaatttagcaatatagtattaagtaaagagtaagtccttatgagaacacatggacacaggaaggggaacatcacactctggggactgttgtggg

SEQ ID NO: 58870 - DNA, 120 bp, synthetic construct
  source 1..120: mol_type = other DNA
ttataatttattattattattgtagacacagggtactgctttgttgctcaggctggtctcaaactcctggctttacgtgatcctcagtgatcctcctaccttggactcccagaatgctgt

SEQ ID NO: 58871 - DNA, 120 bp, synthetic construct; identical to SEQ ID NO: 24486
  source 1..120: mol_type = other DNA

SEQ ID NO: 58872 - DNA, 120 bp, synthetic construct
  source 1..120: mol_type = other DNA
acccactttttgatggggttgtttgtttttttcttgtaaatttgtttgggttcattgtagattctggatattagccctttgtcagatgagtaggttgcgaaaattttctcccattttgta

SEQ ID NO: 58873 - DNA, 120 bp, synthetic construct
  source 1..120: mol_type = other DNA
tcactcatgatttggctgtttgtctgttgttggtgtataagaatgcttgtgatttttgcacattgattttgtatcctgagactttgctgaagttgcttatcagcttaaggagattttggg

SEQ ID NO: 58874 - DNA, 120 bp, synthetic construct
  source 1..120: mol_type = other DNA
atttcagctcctgttattgatctattcagagattcaacttcttcctggtttagtcttgggagagtgtatgtgtcgaggaatttatccatttcttctagattttctagtttatttgcgtag

SEQ ID NO: 58875 - DNA, 120 bp, synthetic construct
  source 1..120: mol_type = other DNA
atgtaatggccttctttgtctcttttgatctttgttggtttaaagtctgttttatcagagactaggattgcaacccctgcctttttttgttttccatttgcttggtagatcttcttccat

SEQ ID NO: 58876 - DNA, 120 bp, synthetic construct
  source 1..120: mol_type = other DNA
gtggcattctctgtatttcctgaatgtgaacgttggcctgccttgctagattggggaagttctcctggataatatcctgcagagtgttttccaacttggttccattctccccgtcacttt

SEQ ID NO: 58877 - DNA, 120 bp, synthetic construct
  source 1..120: mol_type = other DNA
tgggcgtaggaccctctgagccaggtgtgggatatagtctcgtggtgcgctgttttttaagccggtctgaaaagcgcaatattcgggtgggagtgacccgattttccaggtgcgtccgtc

SEQ ID NO: 58878 - DNA, 120 bp, synthetic construct; identical to SEQ ID NO: 24487
  source 1..120: mol_type = other DNA

SEQ ID NO: 58879 - DNA, 120 bp, synthetic construct; identical to SEQ ID NO: 24488
  source 1..120: mol_type = other DNA

SEQ ID NO: 58880 - DNA, 120 bp, synthetic construct
  source 1..120: mol_type = other DNA
agcaggtgctggagaggatgtggagaaataggaacacttttacaatgttggtgggactgtaaactagttcaaccattgtggaagtcagtgtggcgattcctcagggatctagaactagaa

SEQ ID NO: 58881 - DNA, 120 bp, synthetic construct; identical to SEQ ID NO: 22013
  source 1..120: mol_type = other DNA

SEQ ID NO: 58882 - DNA, 120 bp, synthetic construct; identical to SEQ ID NO: 25469
  source 1..120: mol_type = other DNA

SEQ ID NO: 58883 - DNA, 120 bp, synthetic construct
  source 1..120: mol_type = other DNA
ttttgatttgcatttctctgatggccagtgatgatgagtattttttcatgtgtcttttggctgcataaatgtcttcttttgagaagggtctgttcatatcctttgcccactttttgatgg

SEQ ID NO: 58884 - DNA, 120 bp, synthetic construct
  source 1..120: mol_type = other DNA
ctagaactagaaataccatttgacccagccatcccattactgggtatatacccaaaggactataaatcatgctgctataaagacacatgcacacatatgtttattaaggcattattaaca

SEQ ID NO: 58885 - DNA, 120 bp, synthetic construct; identical to SEQ ID NO: 25470
  source 1..120: mol_type = other DNA

SEQ ID NO: 58886 - DNA, 120 bp, synthetic construct; identical to SEQ ID NO: 25471
  source 1..120: mol_type = other DNA

SEQ ID NO: 58887 - DNA, 120 bp, synthetic construct; identical to SEQ ID NO: 25472
  source 1..120: mol_type = other DNA

SEQ ID NO: 58888 - DNA, 120 bp, synthetic construct; identical to SEQ ID NO: 25473
  source 1..120: mol_type = other DNA

SEQ ID NO: 58889 - DNA, 120 bp, synthetic construct; identical to SEQ ID NO: 25474
  source 1..120: mol_type = other DNA

SEQ ID NO: 58890 - DNA, 120 bp, synthetic construct
  source 1..120: mol_type = other DNA
cacctgtaaaaccagcattttgggaggccaaggcaggtgaatggcctgacatcaggactttgagaccagcccagcctggtcaacatggtgaaatcctgtctctactaaaaatacaaaaat

SEQ ID NO: 58891 - DNA, 120 bp, synthetic construct
  source 1..120: mol_type = other DNA
ttagtttaactagatcccatttgtcaattttgtcttttgttgccatgcttttggtgttttagacatgaagtccttgcccatgcctatgtcctgaatggtattgcctaggttttcttctag

SEQ ID NO: 58892 - DNA, 120 bp, synthetic construct
  source 1..120: mol_type = other DNA
acattgattttgtatcctgagactttgctgaagttgcttatcagcttgtggagattttgggctcagatgatggggttttctggatatacaatcatgtcatctgccaacagggacaatttg

SEQ ID NO: 58893 - DNA, 120 bp, synthetic construct
  source 1..120: mol_type = other DNA
atttgcatagaggtgtttatagtattctctgatggtagtttgtatttctgtgggaaatttgcgtctatttgattcttctctcttttcttctttattaggcttgctagtggtctatcaatt

SEQ ID NO: 58894 - DNA, 120 bp, synthetic construct
  source 1..120: mol_type = other DNA
ttgatctttgttgctttaaagtctgttttatcagagactaggattccaacccctgcctttttttgttttccatttgcttggtagatcttcctccatccctttattttgagcctatgtgtg

SEQ ID NO: 58895 - DNA, 120 bp, synthetic construct
  source 1..120: mol_type = other DNA
ttggttttttgtccttgtgatactttactgagaatgatgatttccaatttcatccatgtccctacaaaggacatgaactcatcatttttatggctgcatagtattccatggtgtatatgt

SEQ ID NO: 58896 - DNA, 120 bp, synthetic construct; identical to SEQ ID NO: 24494
  source 1..120: mol_type = other DNA

SEQ ID NO: 58897 - DNA, 120 bp, synthetic construct; identical to SEQ ID NO: 24495
  source 1..120: mol_type = other DNA

SEQ ID NO: 58898 - DNA, 120 bp, synthetic construct
  source 1..120: mol_type = other DNA
ttttaatgattgccattctaactggtgtgagatggtatctcattgtggttttgatttgcatttctctgatgaccagtgatgatgagcattttttcatgtgttttttggctgcataaatgt

SEQ ID NO: 58899 - DNA, 120 bp, synthetic construct
  source 1..120: mol_type = other DNA
acatccctttaagttggattcctaggtattttattctctttgaagcaattgtgaatgggagttcactcatgatttggctctctgtttgtctgttgttggtgtataagaatgcttgtgatt

SEQ ID NO: 58900 - DNA, 120 bp, synthetic construct; identical to SEQ ID NO: 24496
  source 1..120: mol_type = other DNA

SEQ ID NO: 58901 - DNA, 120 bp, synthetic construct
  source 1..120: mol_type = other DNA
ctggatggagaatgactttgacgagctgagagaagaaggcttcagacgatcaaattactcggagctacgggaggacattcaaaccaaaggcaaagaagttgaaaactttgaaaaaaattt

SEQ ID NO: 58902 - DNA, 120 bp, synthetic construct
  source 1..120: mol_type = other DNA
tgagagattttgtcaccaccaggcctgccctaaaagagctcctgaaggaagcgctaaacatggaaaggaacaaccggtaccagccactgcaaaatcatgccaaaatgtaatgaccatcca

SEQ ID NO: 58903 - DNA, 120 bp, synthetic construct
  source 1..120: mol_type = other DNA
agattataacaaactatctctcagaccacagtgcaatcaaactagagctcaggattaagaatctcactcaaaaccgctcaactacatggaaactgaacaacctgctcctgaatgactact

SEQ ID NO: 58904 - DNA, 120 bp, synthetic construct
  source 1..120: mol_type = other DNA
aaatactggcaaaacgaatccagcagcatatcaaaaagcttatccaccatgtgaaagtcaatgtggcgattcctcagggatctacaactagaaataccatttgacccagccatcccatta

SEQ ID NO: 58905 - DNA, 120 bp, synthetic construct; identical to SEQ ID NO: 24497
  source 1..120: mol_type = other DNA

SEQ ID NO: 58906 - DNA, 120 bp, synthetic construct
  source 1..120: mol_type = other DNA
aaagtaacatgtacttgttcatgtcctttgtagggacatggatgaagctagaagccatcattctaagcaaactatcgcagaaaaccaaacaccgcatgttctcactcataggtgggaact

SEQ ID NO: 58907 - DNA, 120 bp, synthetic construct
  source 1..120: mol_type = other DNA
gccctgggctcagtttgctcacttataaaatcaagggagtggattcaaggtgttttccccaaggtttcttctaacaattccatgctactagtctttgaaatgagtgttccattaatgctc

SEQ ID NO: 58908 - DNA, 120 bp, synthetic construct; identical to SEQ ID NO: 24490
  source 1..120: mol_type = other DNA

SEQ ID NO: 58909 - DNA, 120 bp, synthetic construct; identical to SEQ ID NO: 24491
  source 1..120: mol_type = other DNA

SEQ ID NO: 58910 - DNA, 120 bp, synthetic construct
  source 1..120: mol_type = other DNA
cccattgcttatttttgtcaggtttgtcaaagatcagatagttgtagatacgcggcattatttctgagggctctgttctgttccattggtctatatctctgttttagtagcagtaccatg

SEQ ID NO: 58911 - DNA, 120 bp, synthetic construct; identical to SEQ ID NO: 24492
  source 1..120: mol_type = other DNA

SEQ ID NO: 58912 - DNA, 120 bp, synthetic construct
  source 1..120: mol_type = other DNA
gggttaaatggtatttctatttctagatccttgagggatcgccacactgtcttccacaatggttgaactagtttacagacccaccaacagtgtaaaagtgttcctatttctccacatcct

SEQ ID NO: 58913 - DNA, 120 bp, synthetic construct
  source 1..120: mol_type = other DNA
gatattgattcttcctacccatgagcatggaatgttcttccatttctttgtatcctgttatttcattgagcagtggtttgtatttctttttgaagaggttcttcacatccctggtaagtt

SEQ ID NO: 58914 - DNA, 120 bp, synthetic construct
  source 1..120: mol_type = other DNA
ttagtcctgctagcggtctatcaattttgttgatcttttcaaaaaaccatccactggactcattgagtttttgaagggttttttgtgtctctatctccttcagttcttctctaatcttag

SEQ ID NO: 58915 - DNA, 120 bp, synthetic construct
  source 1..120: mol_type = other DNA
ggtagatcttcctccatccttttattttgagcctatgtgtgtctctgcatatgtgatgggtttcctgaatacagcacactgatgggtcttgactttatccaattttccagtctgtgtctt

SEQ ID NO: 58916 - DNA, 120 bp, synthetic construct
  source 1..120: mol_type = other DNA
gaaacaggaacacttttacactgttggtgggaatgtaaactagctcaaccattgtggaagtcagtgtggcgattcctcagggatctagaactagaaataccatttgacccagccatccca

SEQ ID NO: 58917 - DNA, 120 bp, synthetic construct; identical to SEQ ID NO: 24493
  source 1..120: mol_type = other DNA

SEQ ID NO: 58918 - DNA, 120 bp, synthetic construct
  source 1..120: mol_type = other DNA
cgtgcaggtttgttacatatgtatgcatgtgccatattggtgtgctgcacccagtaactcgtcatataacattaggcatatctcctaatgctatccctcccctctcccccaaccccacaa

SEQ ID NO: 58919 - DNA, 120 bp, synthetic construct
  source 1..120: mol_type = other DNA
tgtttgtttttttcttgtaaatttgtttgagttcattgtagattctgaatattggccctttgtcagatgggtagattgcaaaaattttctcccattctgtaggttgcctgttcactctga

SEQ ID NO: 58920 - DNA, 120 bp, synthetic construct
  source 1..120: mol_type = other DNA
taagtctctttttaggtctctaaggacttgttttatgaatctgggtgctcctgtattgggtgcatatatatttaggatagttagctcttcttgttgaattgatccctttaccattatgta

SEQ ID NO: 58921 - DNA, 120 bp, synthetic construct
  source 1..120: mol_type = other DNA
aactggttttttgaaaagatcaacaaaattgatagaccgctagcaagactaataagaaaagagagaagaatcaaatagatgcaataaaaaatgataaaggggatatcaccactgatccca

SEQ ID NO: 58922 - DNA, 120 bp, synthetic construct
  source 1..120: mol_type = other DNA
tttaaccctgagtggacacagcacatgtttcagagagcaaggggttgggggtaaggttatagattaacagcatcccaaggcagaagaatttttcttagtacagaacaaaatggagtctcc

SEQ ID NO: 58923 - DNA, 120 bp, synthetic construct; identical to SEQ ID NO: 7284
  source 1..120: mol_type = other DNA

SEQ ID NO: 58924 - DNA, 120 bp, synthetic construct; identical to SEQ ID NO: 7285
  source 1..120: mol_type = other DNA

SEQ ID NO: 58925 - DNA, 120 bp, synthetic construct; identical to SEQ ID NO: 7286
  source 1..120: mol_type = other DNA

SEQ ID NO: 58926 - DNA, 120 bp, synthetic construct; identical to SEQ ID NO: 7287
  source 1..120: mol_type = other DNA

SEQ ID NO: 58927 - DNA, 120 bp, synthetic construct; identical to SEQ ID NO: 24737
  source 1..120: mol_type = other DNA

SEQ ID NO: 58928 - DNA, 120 bp, synthetic construct; identical to SEQ ID NO: 24738
  source 1..120: mol_type = other DNA

SEQ ID NO: 58929 - DNA, 120 bp, synthetic construct
  source 1..120: mol_type = other DNA
atggctgcatagtattccatggtgtatatgtgccacattttcttaatccagtctatcattgttggacatttggtgggactgtaaactagttcaaccattgtggaagtcagtgtggcgatt

SEQ ID NO: 58930 - DNA, 120 bp, synthetic construct
  source 1..120: mol_type = other DNA
aatattcagtactgacatgttttgggtctatgtccccacccaaatctcctctcaaattgtaatctccatgggtccagagagggaggtgattgaattatgggggcatttattgatttgcat

SEQ ID NO: 58931 - DNA, 120 bp, synthetic construct
  source 1..120: mol_type = other DNA
tttctagctcttttaattgtgatgttagggtgtcaatttttgatctctcctgctttctcttgtaggcatttagtgctataaatttccctctacacactgctttgaatgtgtcccagagat

SEQ ID NO: 58932 - DNA, 120 bp, synthetic construct
  source 1..120: mol_type = other DNA
cattttggcatgattttgcagcagctggtactggttgttcctttccatgtttagcgcttccttcagaagctcttttagggcaggcctggtggttacaaaatctctcagcatttgcttgtc

SEQ ID NO: 58933 - DNA, 120 bp, synthetic construct
  source 1..120: mol_type = other DNA
tttccttctaacagacaggaccctcagctgcaggtctgttggagtaccctgcagtgtgaagtgtcagtgtgcccctgctggggggtgcctcccagttaggctggtcaggggtcagggtca

SEQ ID NO: 58934 - DNA, 120 bp, synthetic construct; identical to SEQ ID NO: 24739
  source 1..120: mol_type = other DNA

SEQ ID NO: 58935 - DNA, 120 bp, synthetic construct
  source 1..120: mol_type = other DNA
tgtgccacaatttgcttaatcaagtctatcattgttggacatttgggttggttccaagtctttgctattgtgaataatgccgcaataaacatacgtgtgcatgtgtctttatagcagcat

SEQ ID NO: 58936 - DNA, 120 bp, synthetic construct
  source 1..120: mol_type = other DNA
gatttttgtatatggtgtaaggaagggatccagtttcagctttctacatatggctagccagttttcccagcaccatttattaaatagggaatcctttccccattgcttgtttttctcagg

SEQ ID NO: 58937 - DNA, 120 bp, synthetic construct
  source 1..120: mol_type = other DNA
catctgcaaacagggacaatttgacttcctcttttcctaattgaataccctttatttccttctcctgcctaattgccctggccaggacttccagcactatgttgaataggagtggtgaga

SEQ ID NO: 58938 - DNA, 120 bp, synthetic construct
  source 1..120: mol_type = other DNA
tttgttgatcctttcaaaaaaccagctcctggattcactaattttttgaagggttttttgtgtctctatttccttcagttctgctctgattttagttatttcttgccttctactagctct

SEQ ID NO: 58939 - DNA, 120 bp, synthetic construct
  source 1..120: mol_type = other DNA
catccttttattttgagcctatgtgtgtctctgcacgtgagatgggtttcttgaatacagcacactgatgggtcttgactcttgccaatttgccagtctgtgtcttttaattggagcatt

SEQ ID NO: 58940 - DNA, 120 bp, synthetic construct
  source 1..120: mol_type = other DNA
tcttctaaatttttttcaaagttttcaacttctttgcctttggtttgaatttcctcccatagctcagagtaatttgatcgtctgaagccttcttctctcagctcgtcaaagtcattctcc

SEQ ID NO: 58941 - DNA, 120 bp, synthetic construct
  source 1..120: mol_type = other DNA
gtgagaacatacaatgtttggttttccattcctgagttacttcgcgtagaataatagtctccagtctcatctaggtcactacgaatgctgttaattcattccttttttatggctgagtag

SEQ ID NO: 58942 - DNA, 120 bp, synthetic construct
  source 1..120: mol_type = other DNA
gatttgcatttccctgatcattagtgatgctgagcattttttcatatgtttattggccatttgtatatttcttttgagaattgtctattcatgtccttagcccactttttgatggggttt

SEQ ID NO: 58943 - DNA, 120 bp, synthetic construct; identical to SEQ ID NO: 24740
  source 1..120: mol_type = other DNA

SEQ ID NO: 58944 - DNA, 120 bp, synthetic construct; identical to SEQ ID NO: 24741
  source 1..120: mol_type = other DNA

SEQ ID NO: 58945 - DNA, 120 bp, synthetic construct
  source 1..120: mol_type = other DNA
tttgtcagatgagtaggttgcgaaaattttctcccattttgtaggttgcctagggcctgttttcatttggggctcaggtcacggaggcatgttggacaccagcatttctcatgttgatga

SEQ ID NO: 58946 - DNA, 120 bp, synthetic construct; identical to SEQ ID NO: 24742
  source 1..120: mol_type = other DNA

SEQ ID NO: 58947 - DNA, 120 bp, synthetic construct
  source 1..120: mol_type = other DNA
tcctctccagcacctgttgtttcctgactttttaatgattgccattctaactggtgtgagatggtatgtcattgtggttttgatttgcatttctctgatggccagtgatggtgagcattt

SEQ ID NO: 58948 - DNA, 120 bp, synthetic construct
  source 1..120: mol_type = other DNA
cattttcacaatattgattcttcctacccatgagcatggaatggtcttccatttgtttgtatccttttttatttccttgagcagtggtgtgtagttctccttgaagaggtccttcacatc

SEQ ID NO: 58949 - DNA, 120 bp, synthetic construct
  source 1..120: mol_type = other DNA
ggtttagtcttgggagagtgcatgtgtcaaggaatttatccatttcttcttgattttctagtttatttgcgtagaggtgtttgtagtattctctgatggtagtttgtatttctgtgggat

SEQ ID NO: 58950 - DNA, 120 bp, synthetic construct
  source 1..120: mol_type = other DNA
gtctgcttggtgcagagctgagttcaattcctgggtatccttgttgactttctgtctcattgatctgtctaatgttgacagtggggtgttaaagtctcccattattaatgtgtgggagtc

SEQ ID NO: 58951 - DNA, 120 bp, synthetic construct
  source 1..120: mol_type = other DNA
ttagtctgatgggcttccctttgagggtaacccgacctttctctctggctgcccttaacattttttcctgcatttcaactttggtgaatctgacaattatgtcttggagttgctcttctc

SEQ ID NO: 58952 - DNA, 120 bp, synthetic construct
  source 1..120: mol_type = other DNA
agggacatttaagtctgcagaggttactgctgtctttttgtttgtctgtgccctgcccccagaggtggagcctacagaggcaggcaggcctccttgagctgggctccacccagttcgagc

SEQ ID NO: 58953 - DNA, 120 bp, synthetic construct; identical to SEQ ID NO: 7288
  source 1..120: mol_type = other DNA

SEQ ID NO: 58954 - DNA, 120 bp, synthetic construct; identical to SEQ ID NO: 7289
  source 1..120: mol_type = other DNA

SEQ ID NO: 58955 - DNA, 120 bp, synthetic construct; identical to SEQ ID NO: 7290
  source 1..120: mol_type = other DNA

SEQ ID NO: 58956 - DNA, 120 bp, synthetic construct
  source 1..120: mol_type = other DNA
ggccaggaggtccaagctgccgtgagccatgatctcaccactgcactctaacctgggcaatagagtgagaccctgtctcaaaaaaaaataatatatatatatatgtgtatatatatgtgt

SEQ ID NO: 58957 - DNA, 120 bp, synthetic construct
  source 1..120: mol_type = other DNA
gaggatcacttgagcccaggagtttgagaccagcctgggcaatatagtgagaacctgtctccattaaaaaaaaaaaaaaaaaaaaggtttgtatggtggctcacgcctgtaatcccagca

SEQ ID NO: 58958 - DNA, 120 bp, synthetic construct; identical to SEQ ID NO: 31428
  source 1..120: mol_type = other DNA

SEQ ID NO: 58959 - DNA, 120 bp, synthetic construct
  source 1..120: mol_type = other DNA
aactggggggtatagcaatggaaatgatagcaaatacattaagattaataataattggggggaactaagatggccgaataggaacagctccagtctacagctcccagcgtgagcgacgca

SEQ ID NO: 58960 - DNA, 120 bp, synthetic construct
  source 1..120: mol_type = other DNA
aatggactaaattctccaattaaaagacacagactggcaagttggatagagtcaagacccatcagtgtgctgtattcaggaaacccatctcacgtgcagagacacacataggctcaaaat

SEQ ID NO: 58961 - DNA, 120 bp, synthetic construct
  source 1..120: mol_type = other DNA
ggagctggttttttgaaaggatcaacaaaattgatagaccgctagcaagactaataaagaaaaaaagagagaagaatcaaatagacacaataaaaaatgataaaggggatatcaccactg

SEQ ID NO: 58962 - DNA, 120 bp, synthetic construct
  source 1..120: mol_type = other DNA
aatgtacaaaaatcacaagcattcttatacaccaagaacagacaaacagagagccaaatcatgagtgaactcccattcacaattgcttcaaagagaataaaatacctaggaatccaactt

SEQ ID NO: 58963 - DNA, 120 bp, synthetic construct
  source 1..120: mol_type = other DNA
aagggctaatatccagaatctacaatgaactcaaacaaatttacaagaaaaaaacaaacaaccccatcaaaaagtgggtgaaggacatgaacagacacttctcaaaagaagatatttatg

SEQ ID NO: 58964 - DNA, 120 bp, synthetic construct; identical to SEQ ID NO: 28375
  source 1..120: mol_type = other DNA

SEQ ID NO: 58965 - DNA, 120 bp, synthetic construct
  source 1..120: mol_type = other DNA
tcattgttcaattcccacctatgagtgagaacatgtggtgtttggttttttgtccttgtgatactttgctgagaatgatggtgtcaagcttcatccatgtccctacaaaggacatgaact

SEQ ID NO: 58966 - DNA, 120 bp, synthetic construct
  source 1..120: mol_type = other DNA
aggtgtaaggaagggatccagtttcagctttctacatatggctagccagttttcccagcaccatttattaaatagggaatcctttccccattgcttgtttttctcaggtttgttaaagat

SEQ ID NO: 58967 - DNA, 120 bp, synthetic construct
  source 1..120: mol_type = other DNA
tggtagactggattaagaaaatgtggcacatatacaccatggaatactatgcagccacaaaaaataatgagttcatgtcctttgtagtgacatagatgaagctggaaatcatcattctga

SEQ ID NO: 58968 - DNA, 120 bp, synthetic construct; identical to SEQ ID NO: 28377
  source 1..120: mol_type = other DNA

SEQ ID NO: 58969 - DNA, 120 bp, synthetic construct
  source 1..120: mol_type = other DNA
aatgactttcttcacagaattggaaaaaactactttaaagttcatatggaaccaaaaaagagcctgcattgccaagtcaatcctaagccaaaagaacaaagttggaggcatcacactacc

SEQ ID NO: 58970 - DNA, 120 bp, synthetic construct
  source 1..120: mol_type = other DNA
agaagacatttatgcagccaaaaaacacatgaaaaaatgctcatcatcactggccatcagagaaatgcaaatcaaaaccacaatgagataccatctcacaccagctacaatggcaatcat

SEQ ID NO: 58971 - DNA, 120 bp, synthetic construct; identical to SEQ ID NO: 19553
  source 1..120: mol_type = other DNA

SEQ ID NO: 58972 - DNA, 120 bp, synthetic construct
  source 1..120: mol_type = other DNA
aaaaaaaaaaaaaaaaaaaaaaacaacccagacacacaagtatgcctccacttctccagagttgcagaaaactgcacggaggaagcccagtcactgtagagagagagaaagaaataggag

SEQ ID NO: 58973 - DNA, 120 bp, synthetic construct
  source 1..120: mol_type = other DNA
cgatgcagctggtgccctccaggtagcgcttgaccgagtccatctccgtcacctcctgcagcgtcttagtgccctgggccaggtcccgcagggtctcggggcccaggatcccggacgtgt

SEQ ID NO: 58974 - DNA, 120 bp, synthetic construct
  source 1..120: mol_type = other DNA
cctgccagctgcagcatgtagagcccggtgtccgggtcgggcacgcagcggcgcagcagctgcacgtacgtgaggttctcgtgcgtgttggggtcgaagaagcccttggtgtcgtcgctg

SEQ ID NO: 58975 - DNA, 120 bp, synthetic construct
  source 1..120: mol_type = other DNA
aggcgtcctggagctgcggccgggccccgggggcctcctcggcctcctcgatgatggcggtcagccggcgggtcagcgcgggcaagtccagggtccccgagccaaactcggccagcagct

SEQ ID NO: 58976 - DNA, 120 bp, synthetic construct; identical to SEQ ID NO: 58973
  source 1..120: mol_type = other DNA

SEQ ID NO: 58977 - DNA, 120 bp, synthetic construct; identical to SEQ ID NO: 58974
  source 1..120: mol_type = other DNA

SEQ ID NO: 58978 - DNA, 120 bp, synthetic construct; identical to SEQ ID NO: 58975
  source 1..120: mol_type = other DNA

SEQ ID NO: 58979 - DNA, 120 bp, synthetic construct; identical to SEQ ID NO: 58973
  source 1..120: mol_type = other DNA

SEQ ID NO: 58980 - DNA, 120 bp, synthetic construct; identical to SEQ ID NO: 58974
  source 1..120: mol_type = other DNA

SEQ ID NO: 58981 - DNA, 120 bp, synthetic construct
  source 1..120: mol_type = other DNA
cgcttacctgacccggagtggccacccctgggaccgctcacccaacagcaggcagcttccccggatccgtgacgcctccctcccggcaatgttgccaggagtcacccctctcaatttgtc

SEQ ID NO: 58982 - DNA, 120 bp, synthetic construct; identical to SEQ ID NO: 7617
  source 1..120: mol_type = other DNA

SEQ ID NO: 58983 - DNA, 120 bp, synthetic construct
  source 1..120: mol_type = other DNA
agccactgcaaaatcatgccaaattgtaaagaccatcgagactaggaagaaactgcatcaactaatgagcaaaatcaccagctaacatcataacgacaggatcaaattcacacataacaa

SEQ ID NO: 58984 - DNA, 120 bp, synthetic construct
  source 1..120: mol_type = other DNA
caacctgctcctgaatgactactgggtacataacgaaatgaaggcagaaataaagatcttctttgaaaccaacgagcacaaagacacaacataccagaatctctgggacacattcaaagc

SEQ ID NO: 58985 - DNA, 120 bp, synthetic construct
  source 1..120: mol_type = other DNA
cctgggatgcaaggctggttcaatatatgccaatcaataaatgtaatccagcatataaacagaaccaaagacaaaaaccacatgattatctcaatagatgcagaaaaggcctttgacaaa

SEQ ID NO: 58986 - DNA, 120 bp, synthetic construct
  source 1..120: mol_type = other DNA
cagcatggtactggtaccaaaacagagatatagatcaatggaacagaacagagcccttagaaataacgccgcatatctacaactatctgatctttgacaaacctgagaaaaacaagcaat

SEQ ID NO: 58987 - DNA, 120 bp, synthetic construct
  source 1..120: mol_type = other DNA
ccagagtgtgatgttccccttcccgtgtccatgtgttctcattgttcaattcccacctatgagtgagaacatgcggtgtttggttttttgtccttgtgatagtttactgagaatgatgat

SEQ ID NO: 58988 - DNA, 120 bp, synthetic construct
  source 1..120: mol_type = other DNA
tagaggtctattaggtccggttggtgcagagctgagttcaattcctggatatccttgttaactgtctgtctcactgatctgactaatgttgacagtgtggtgttaaagtctcccattatt

SEQ ID NO: 58989 - DNA, 120 bp, synthetic construct
  source 1..120: mol_type = other DNA
caactttggtgaatctgacaattatgtggtcttggagttgctcttctcgaggagtatctttgtggcattctctatatttcctgaatttgaatgttggcctgccttgctaggttgggtaag

SEQ ID NO: 58990 - DNA, 120 bp, synthetic construct
  source 1..120: mol_type = other DNA
actgcactccagcctggcaacagagcaagactccatttttaaaaaaaaagaaaaaaaaatcttcactctcgccaggcttggtggcttacacctataatcctaacactttgagaagccaag

SEQ ID NO: 58991 - DNA, 120 bp, synthetic construct; identical to SEQ ID NO: 19622
  source 1..120: mol_type = other DNA

SEQ ID NO: 58992 - DNA, 120 bp, synthetic construct
  source 1..120: mol_type = other DNA
acacctcttttacagatttgataaaactgcagagatgaatttatatatctacccccctccttcaccccaccccccctgcaacttgcatacaggcctagtgttatttaagcaaacagtaaa

SEQ ID NO: 58993 - DNA, 120 bp, synthetic construct
  source 1..120: mol_type = other DNA
agtgctgggattacaggcgtgagccaccgcgcccagcctacctgtcttcttaaagtccagctctggctctgagctctcctgctcaataataataataataataataataataataataat

SEQ ID NO: 58994 - DNA, 120 bp, synthetic construct
  source 1..120: mol_type = other DNA
ctcctgagtcagagggaagaggtgctgggggtctggactcctgggtcagagggaagaggggctggggggctggactcctaggtttgagggaggaggggctgggggcctggactcctgagt

SEQ ID NO: 58995 - DNA, 120 bp, synthetic construct; identical to SEQ ID NO: 20027
  source 1..120: mol_type = other DNA

SEQ ID NO: 58996 - DNA, 120 bp, synthetic construct; identical to SEQ ID NO: 20028
  source 1..120: mol_type = other DNA

SEQ ID NO: 58997 - DNA, 120 bp, synthetic construct
  source 1..120: mol_type = other DNA
gccttagtttccccaaaatgctcggggaagaggtcagcactaggagcccagagacaggctctgaggattctgcccctgggggaggccagaggcacctgccccatagccaccctacctcgt

SEQ ID NO: 58998 - DNA, 120 bp, synthetic construct
  source 1..120: mol_type = other DNA
gaagtgtcagcgcagcccttctgtccacccaggtgtgggacaggcactggcctcagaccggggccacactgaggtctgcccttctcccgctggccgccacccaagacaccatgagccagt

SEQ ID NO: 58999 - DNA, 120 bp, synthetic construct
  source 1..120: mol_type = other DNA
ccttttcactaatagattccaactcacaaacagtcatacagtagctaaattttatccaacaaaagtctgtttatggcaggacgcggtgactcacgcctgtaatcccagatctttgggagg

SEQ ID NO: 59000 - DNA, 120 bp, synthetic construct; identical to SEQ ID NO: 13680
  source 1..120: mol_type = other DNA

SEQ ID NO: 59001 - DNA, 120 bp, synthetic construct
  source 1..120: mol_type = other DNA
cctggctgcccagtctggaaagtgaggagcatctccgcccggccgccatcccatctaggaagtgaggagcgcctcttcccagccgccatcacatttaggaagtgaggagcgtctctgccc

SEQ ID NO: 59002 - DNA, 120 bp, synthetic construct; identical to SEQ ID NO: 13681
  source 1..120: mol_type = other DNA

SEQ ID NO: 59003 - DNA, 120 bp, synthetic construct
  source 1..120: mol_type = other DNA
gattagtttgatgtgtcctcatgattagattcaagtttttgtagtttttttttgagacaaggtctggctctattgcccaggctggaatacagtggcatgatctcagctcactgcaacctc

SEQ ID NO: 59004 - DNA, 120 bp, synthetic construct
  source 1..120: mol_type = other DNA
tccataaagcaatatgaatttgttatgaataaatatagaagtcttagacgtttgaaaaatgaatgtcagctgggcggggtggctcacgcctgtaatcccagcactttgggaggccgaggc

SEQ ID NO: 59005 - DNA, 120 bp, synthetic construct; identical to SEQ ID NO: 21966
  source 1..120: mol_type = other DNA

SEQ ID NO: 59006 - DNA, 120 bp, synthetic construct
  source 1..120: mol_type = other DNA
atattgtttacttgtgcaccctttattggcatctagcttgtatattataacctcttttcctcttttaagtatttttcttcagccaggcgcagtggctcacgcctgtaatcgcagcacttt

SEQ ID NO: 59007 - DNA, 120 bp, synthetic construct
  source 1..120: mol_type = other DNA
tctgacaaagggctaatatccagaatctacaaagaacttaaacaaatttacaaattacaattgttgttacaaaaaaacgaacaattccatcaaaaagtgggcaaaggatatgaacagaca

SEQ ID NO: 59008 - DNA, 120 bp, synthetic construct; identical to SEQ ID NO: 21968
  source 1..120: mol_type = other DNA

SEQ ID NO: 59009 - DNA, 120 bp, synthetic construct; identical to SEQ ID NO: 21969
  source 1..120: mol_type = other DNA

SEQ ID NO: 59010 - DNA, 120 bp, synthetic construct; identical to SEQ ID NO: 21970
  source 1..120: mol_type = other DNA

SEQ ID NO: 59011 - DNA, 120 bp, synthetic construct; identical to SEQ ID NO: 21971
  source 1..120: mol_type = other DNA

SEQ ID NO: 59012 - DNA, 120 bp, synthetic construct; identical to SEQ ID NO: 21953
  source 1..120: mol_type = other DNA

SEQ ID NO: 59013 - DNA, 120 bp, synthetic construct; identical to SEQ ID NO: 21954
  source 1..120: mol_type = other DNA

SEQ ID NO: 59014 - DNA, 120 bp, synthetic construct; identical to SEQ ID NO: 21955
  source 1..120: mol_type = other DNA

SEQ ID NO: 59015 - DNA, 120 bp, synthetic construct
  source 1..120: mol_type = other DNA
aacagatatgtttgtaaaatgtaggcttacacatagctttaagaaatatattaaatgccagccgggcatggtggctcatgcctctaatcctagcactttgggaagccaaggcgggtagat

SEQ ID NO: 59016 - DNA, 120 bp, synthetic construct; identical to SEQ ID NO: 21957
  source 1..120: mol_type = other DNA

SEQ ID NO: 59017 - DNA, 120 bp, synthetic construct; identical to SEQ ID NO: 21958
  source 1..120: mol_type = other DNA

SEQ ID NO: 59018 - DNA, 120 bp, synthetic construct; identical to SEQ ID NO: 21959
  source 1..120: mol_type = other DNA

SEQ ID NO: 59019 - DNA, 120 bp, synthetic construct
  source 1..120: mol_type = other DNA
tcgagaccatcctgggctaacatggtgaaaccccatctctacttaaaaaaaaaaaagtacaaaaagttagccaggcgtggtggtgggcgcctgtagtcccagttacttgggaggctgagg

SEQ ID NO: 59020 - DNA, 120 bp, synthetic construct; identical to SEQ ID NO: 21960
  source 1..120: mol_type = other DNA

SEQ ID NO: 59021 - DNA, 120 bp, synthetic construct; identical to SEQ ID NO: 21961
  source 1..120: mol_type = other DNA

SEQ ID NO: 59022 - DNA, 120 bp, synthetic construct; identical to SEQ ID NO: 21962
  source 1..120: mol_type = other DNA

SEQ ID NO: 59023 - DNA, 120 bp, synthetic construct; identical to SEQ ID NO: 21963
  source 1..120: mol_type = other DNA

SEQ ID NO: 59024 - DNA, 120 bp, synthetic construct; identical to SEQ ID NO: 21964
  source 1..120: mol_type = other DNA

SEQ ID NO: 59025 - DNA, 120 bp, synthetic construct
  source 1..120: mol_type = other DNA
taatcaattttatttttgtttttattctattgtgtttcacttatgcaggtaaatattcatttcacgacaggggaggagccaagatggctgaataggaacagctccggtctacagctccca

SEQ ID NO: 59026 - DNA, 120 bp, synthetic construct
  source 1..120: mol_type = other DNA
agcagtggttctcccagcacgcagctggagatctgagaacccgcagactgcctcctcaagtgggtccctgacccctgacccccgagcagcctaactgggaggcaccccccagccggggca

SEQ ID NO: 59027 - DNA, 120 bp, synthetic construct
  source 1..120: mol_type = other DNA
ccaaactaagcttcataagtgaaggagaaataaaatacttcacagacaagcaaatgctgagagattttgtcaccactaggcctgccctaaaagagctcctgaaggaagcgctaaacatgg

SEQ ID NO: 59028 - DNA, 120 bp, synthetic construct
  source 1..120: mol_type = other DNA
taaaagaacagaaattataacaaactatctctcagaccacagtgcaatcaaactagaactcaggattaagaatctcactcaaaaccgctcaactacgtggaaactgaacaacctgctcct

SEQ ID NO: 59029 - DNA, 120 bp, synthetic construct
  source 1..120: mol_type = other DNA
ggcagagacacaaccaaaaaagagaattttagaccaatatccttgataaacattgatgcaaaaatcctcaataaaatactggcaaaacgaatccagcagcacatcaaaaagcttatccac

SEQ ID NO: 59030 - DNA, 120 bp, synthetic construct
  source 1..120: mol_type = other DNA
tcatatggaaccaaaaaagagcccgcatcgccaagtcaatcctaagccaaaagaacaaagctggaggcatcacattacctgacttcaaactatactacaaggctacagtaaccaaaacag

SEQ ID NO: 59031 - DNA, 120 bp, synthetic construct
  source 1..120: mol_type = other DNA
tcaaccattgtggaagtcagtgtggcgattcctcagggatatagaactagaaataccatttgacccagccatcccattactgggtatatacccaaaggactataaatcatgctgctataa

SEQ ID NO: 59032 - DNA, 120 bp, synthetic construct
  source 1..120: mol_type = other DNA
tagtcatgaattcaaccaatcatgaattgaaaataatttgagaagaaaatcaataaaaaaatacaatagccaggcatggtggctcacacctgtaatcccagcactttgggaggctgaggc

SEQ ID NO: 59033 - DNA, 120 bp, synthetic construct
  source 1..120: mol_type = other DNA
cgtctgggacgtgaggagcccctctgcctggctacccagtctggaaagtgaggagcgtctctgcccggccgccatcccatctaggaagtgaggagcgcctcttcccggccgccatcccat

SEQ ID NO: 59034 - DNA, 120 bp, synthetic construct; identical to SEQ ID NO: 26625
  source 1..120: mol_type = other DNA

SEQ ID NO: 59035 - DNA, 120 bp, synthetic construct
  source 1..120: mol_type = other DNA
tgttgggtacacctctaagatggggtggaggccgggcagaggggctcctcacttcccagaaggggcggcagggcagaggcgcaccccacctcccggacggggcggctgccgggcggaggg

SEQ ID NO: 59036 - DNA, 120 bp, synthetic construct; identical to SEQ ID NO: 26626
  source 1..120: mol_type = other DNA

SEQ ID NO: 59037 - DNA, 120 bp, synthetic construct
  source 1..120: mol_type = other DNA
ggtggctgctgggcggaggggctcctcacttctcagacggggcggctgccgggcggaggggctcctcacttctcggacggggtggttgccaggcagagggtctcctcacttctcagacgg

SEQ ID NO: 59038 - DNA, 120 bp, synthetic construct
  source 1..120: mol_type = other DNA
cccttccttacaccttatacgaaaattaattcacgatggattaaagacttacatgttagacctaaaaccataaaaaccctagaagaaaacctaggcaataccattcaggacataggcatg

SEQ ID NO: 59039 - DNA, 120 bp, synthetic construct
  source 1..120: mol_type = other DNA
ctttgtagggacatgggtgaagctgaaaaccatcattctcagaaaactatcacagggacagggaaccaaacactgcatgttctcactcataggtgggaattgaacaatgagaacacttgg

SEQ ID NO: 59040 - DNA, 120 bp, synthetic construct
  source 1..120: mol_type = other DNA
cttcttggcgcctttttctaggatgacttggctgtaaatgcatggatttatgtctgggttctcaattcctttccattggtctgtgtgcctatataccatgctgttttgattactatggct

SEQ ID NO: 59041 - DNA, 120 bp, synthetic construct; identical to SEQ ID NO: 26627
  source 1..120: mol_type = other DNA

SEQ ID NO: 59042 - DNA, 120 bp, synthetic construct; identical to SEQ ID NO: 26628
  source 1..120: mol_type = other DNA

SEQ ID NO: 59043 - DNA, 120 bp, synthetic construct
  source 1..120: mol_type = other DNA
tttcttaatccagtctatcattgttggacatttgcgttggttccaagtctttgctattgtgaagagtgccacaataaacatacgtgtgcatgtgtcttaatagcagcatgatttataatc

SEQ ID NO: 59044 - DNA, 120 bp, synthetic construct
  source 1..120: mol_type = other DNA
atttcttgtttttgtcaggtttgtcaaagatcagatagttgtagatatgcggcattatttctgagggctctgttctgttccattggtctatatccctgttttggtaccagtaccgtgccg

SEQ ID NO: 59045 - DNA, 120 bp, synthetic construct
  source 1..120: mol_type = other DNA
gtttgttttgagcctatgtgtgtccttgcatgtgagatgggtttcctgaatacagcacactgatgggtcttgcctctttatccaatttgccagtctgtgccttttaattggagcatttag

SEQ ID NO: 59046 - DNA, 120 bp, synthetic construct
  source 1..120: mol_type = other DNA
ccctagtaggtaggtctacaggtgcatgccaccatgcattgttaatttttaaattaaaaaaaaaattttgtagagacagagtctccctatgttgcctaggctggtcttgaactcctggcc

SEQ ID NO: 59047 - DNA, 120 bp, synthetic construct
  source 1..120: mol_type = other DNA
cgttattattattgttgttgttgttgaaagtgctgagattacaggcaatatgcctatgcctggcccattattattattattgttgttgttgaaagtgctgagattacaggcaatatgcct

SEQ ID NO: 59048 - DNA, 120 bp, synthetic construct
  source 1..120: mol_type = other DNA
gcctatgcctggcccattattattattattgttgttgttgaaagtgctgagattacaggcaatatgcctatgcctggcccattattattattattattgttgttgttgaaagtgctgaga

SEQ ID NO: 59049 - DNA, 120 bp, synthetic construct
  source 1..120: mol_type = other DNA
tgctgagattacaggcaatatgcctatgcctggcccattattattattgttgttgttgttgaaagtgctgagattacaggcaatatgcctatgcctggcccgttattattattgttgttg

SEQ ID NO: 59050 - DNA, 120 bp, synthetic construct; identical to SEQ ID NO: 59048
  source 1..120: mol_type = other DNA

SEQ ID NO: 59051 - DNA, 120 bp, synthetic construct
  source 1..120: mol_type = other DNA
attgttgttgttgaaagtgctgagattacaggcaatatgcctatgcctggcccgttattattattattgttgttgttgaaagtgctgagattacaggcaatatgcctatgcctggcccgt

SEQ ID NO: 59052 - DNA, 120 bp, synthetic construct
  source 1..120: mol_type = other DNA
ggtgatctgcctgactcggcctcccagagtgctgggattacaggcgtaagctactgcacccagccccatttttattatttatagattccttcattatttgtttctttttttatcttacaa

SEQ ID NO: 59053 - DNA, 120 bp, synthetic construct; identical to SEQ ID NO: 12561
  source 1..120: mol_type = other DNA

SEQ ID NO: 59054 - DNA, 120 bp, synthetic construct; identical to SEQ ID NO: 12562
  source 1..120: mol_type = other DNA

SEQ ID NO: 59055 - DNA, 120 bp, synthetic construct; identical to SEQ ID NO: 12563
  source 1..120: mol_type = other DNA

SEQ ID NO: 59056 - DNA, 120 bp, synthetic construct
  source 1..120: mol_type = other DNA
ctctatctctatctgtgtctctatctctatctctatctctatctctatctgtgtctctatctctatctctatctctatctctatctgtgtctctatctctatctctatctctatctctat

SEQ ID NO: 59057 - DNA, 120 bp, synthetic construct; identical to SEQ ID NO: 12564
  source 1..120: mol_type = other DNA

SEQ ID NO: 59058 - DNA, 120 bp, synthetic construct
  source 1..120: mol_type = other DNA
aatacggatggcatattattcctgcatatgcattttcatatgctattggtgcagtgtaattcaactgtagcattcacaactttcatcattgacatagccttggtggggtcggggaggagg

SEQ ID NO: 59059 - DNA, 120 bp, synthetic construct; identical to SEQ ID NO: 12565
  source 1..120: mol_type = other DNA

SEQ ID NO: 59060 - DNA, 120 bp, synthetic construct; identical to SEQ ID NO: 12566
  source 1..120: mol_type = other DNA

SEQ ID NO: 59061 - DNA, 120 bp, synthetic construct; identical to SEQ ID NO: 12567
  source 1..120: mol_type = other DNA

SEQ ID NO: 59062 - DNA, 120 bp, synthetic construct
  source 1..120: mol_type = other DNA
ggttcataaaaaataaacccccagagattgctcttcccccaccaatatatcaactttttgtttccctgccttagcaaggattgcatcagtagaaagctcaggaacacacaggcttttcct

SEQ ID NO: 59063 - DNA, 120 bp, synthetic construct; identical to SEQ ID NO: 24346
  source 1..120: mol_type = other DNA

SEQ ID NO: 59064 - DNA, 120 bp, synthetic construct; identical to SEQ ID NO: 24347
  source 1..120: mol_type = other DNA

SEQ ID NO: 59065 - DNA, 120 bp, synthetic construct
  source 1..120: mol_type = other DNA
gaaatgaatgaaatgaagcaagaagggaagtttagagaaaaaaagaataaaaagaaatgaacaaagcctccaagaaatatgggactatgtgaaaagaccaaatctacgtctgattggtgt

SEQ ID NO: 59066 - DNA, 120 bp, synthetic construct
  source 1..120: mol_type = other DNA
ggacaaaatgctccaattaaaagacacagactggcaaactggataaagagtcaagacccatctgtctgctgtattcaggaaatccatctcatgtgcagagacacacataggctcaaaata

SEQ ID NO: 59067 - DNA, 120 bp, synthetic construct
  source 1..120: mol_type = other DNA
tagagacacaaaaaacccttcaaaaccaggagctggttttttgaaaggatcaacaaaactgatagaccactagcaagactaataaagaagaaaagagagaagaatcaaatagacgcaata

SEQ ID NO: 59068 - DNA, 120 bp, synthetic construct
  source 1..120: mol_type = other DNA
agggtattcaattaggaaaagaggaagtcagattgtccctgtttgcagatgacatgattgtatatctagaaaaccccattgtctcagcccaaaatctccttaagctgataagcaacttca

SEQ ID NO: 59069 - DNA, 120 bp, synthetic construct
  source 1..120: mol_type = other DNA
caaatgggatctaattaaactaaagagcttctgcacagcaaaagaaactacgatgagagtgaacaggcaacctataaaatgggagaaaattttcccaacctactcatctgacaaagggct

SEQ ID NO: 59070 - DNA, 120 bp, synthetic construct
  source 1..120: mol_type = other DNA
gcctgcacgttgtgcacatgtaccctataacttaaagtgtaataaaaaaaaagacagaacccgccagagtaaattaaaaaaacaaaaccctactgtgtgctgtctatgagaaacccactt

SEQ ID NO: 59071 - DNA, 120 bp, synthetic construct
  source 1..120: mol_type = other DNA
tacttgtgaagtgaggctgtaggatcacttgagcccaggaattcaactccaacctgagaaacatagtgagaccctgtctgttggaagaacaaaagaaagaaaggaaagaaagaaagaaag

SEQ ID NO: 59072 - DNA, 120 bp, synthetic construct; identical to SEQ ID NO: 24349
  source 1..120: mol_type = other DNA

SEQ ID NO: 59073 - DNA, 120 bp, synthetic construct; identical to SEQ ID NO: 24350
  source 1..120: mol_type = other DNA

SEQ ID NO: 59074 - DNA, 120 bp, synthetic construct; identical to SEQ ID NO: 21422
  source 1..120: mol_type = other DNA

SEQ ID NO: 59075 - DNA, 120 bp, synthetic construct; identical to SEQ ID NO: 34142
  source 1..120: mol_type = other DNA

SEQ ID NO: 59076 - DNA, 120 bp, synthetic construct; identical to SEQ ID NO: 34143
  source 1..120: mol_type = other DNA

SEQ ID NO: 59077 - DNA, 120 bp, synthetic construct; identical to SEQ ID NO: 32840
  source 1..120: mol_type = other DNA

SEQ ID NO: 59078 - DNA, 120 bp, synthetic construct
  source 1..120: mol_type = other DNA
gaaggacctcttcaaggagaactgcaaaccactgctcaatgaaataaaagagggtaccaagaaatggaagaacattccatgctcacggataggaagaatcaatatcgtgaaaatggccat

SEQ ID NO: 59079 - DNA, 120 bp, synthetic construct; identical to SEQ ID NO: 32841
  source 1..120: mol_type = other DNA

SEQ ID NO: 59080 - DNA, 120 bp, synthetic construct
  source 1..120: mol_type = other DNA
cccagtaatgggatggctgggtcaaatggtatttctagttctagatacctggggaattcctacatggacttccacaatggttgaactagttgacagtcccaccaacagtgtaaaactgtt

SEQ ID NO: 59081 - DNA, 120 bp, synthetic construct
  source 1..120: mol_type = other DNA
tgaactttagttttttccaattctgtgaagaaagtcattggtagcttgatggggatggcattgaatctataaattaccttgggcagcatggccattttcacaatattgattcttcctacc

SEQ ID NO: 59082 - DNA, 120 bp, synthetic construct
  source 1..120: mol_type = other DNA
tcttcctccatccctttattttcagcctatgtgtgtctctccacgtgagatgggtttcctgaatacagcacactgatgggtcttgactctttatccaatttgccagtctgtgtcttttaa

SEQ ID NO: 59083 - DNA, 120 bp, synthetic construct; identical to SEQ ID NO: 19787
  source 1..120: mol_type = other DNA

SEQ ID NO: 59084 - DNA, 120 bp, synthetic construct; identical to SEQ ID NO: 19788
  source 1..120: mol_type = other DNA

SEQ ID NO: 59085 - DNA, 120 bp, synthetic construct; identical to SEQ ID NO: 19789
  source 1..120: mol_type = other DNA

SEQ ID NO: 59086 - DNA, 120 bp, synthetic construct
  source 1..120: mol_type = other DNA
ttgaagaaggtagagacagcatctgtctgattcattgctgcttctggctcctgacaggtagtaggtactcaaaaaagtatttgttgagcaaatttggattgctaacagatgccaacactg

SEQ ID NO: 59087 - DNA, 120 bp, synthetic construct
  source 1..120: mol_type = other DNA
gttgtgataatttgttacagcagccacaggaaattaatacagccgtcaagtcgtttctcagaaccggttctgcccctacggatgggcatcagggaattcctggcttcccggctgggggaa

SEQ ID NO: 59088 - DNA, 120 bp, synthetic construct; identical to SEQ ID NO: 7535
  source 1..120: mol_type = other DNA

SEQ ID NO: 59089 - DNA, 120 bp, synthetic construct; identical to SEQ ID NO: 30819
  source 1..120: mol_type = other DNA

SEQ ID NO: 59090 - DNA, 120 bp, synthetic construct; identical to SEQ ID NO: 30820
  source 1..120: mol_type = other DNA

SEQ ID NO: 59091 - DNA, 120 bp, synthetic construct; identical to SEQ ID NO: 30821
  source 1..120: mol_type = other DNA

SEQ ID NO: 59092 - DNA, 120 bp, synthetic construct; identical to SEQ ID NO: 30822
  source 1..120: mol_type = other DNA

SEQ ID NO: 59093 - DNA, 120 bp, synthetic construct
  source 1..120: mol_type = other DNA
tagtcctttctaaagttacttgtgtgtgagaataaaaaataagtaatgatgatttgcccatctgagtcagcatcaggttgcgttttgacacgaagctaagctggactccaggttggcaga

SEQ ID NO: 59094 - DNA, 120 bp, synthetic construct
  source 1..120: mol_type = other DNA
ggacagagacgcggcggcccctcgtgaggacagagacgcggcgccccctcggcgaggacagagacgcggcggcccctcgtgaggacagagacgcggcgccccctcggcgaggacagagac

SEQ ID NO: 59095 - DNA, 120 bp, synthetic construct
  source 1..120: mol_type = other DNA
cgtgaggacagaggcacactacccgtgctgctgctccctgacagaagggtatcagataagtaactggcgccatgcggggggaacagagggtgtgtgcaggccaagaacagacggcacatg

SEQ ID NO: 59096 - DNA, 120 bp, synthetic construct; identical to SEQ ID NO: 30823
  source 1..120: mol_type = other DNA

SEQ ID NO: 59097 - DNA, 120 bp, synthetic construct; identical to SEQ ID NO: 30824
  source 1..120: mol_type = other DNA

SEQ ID NO: 59098 - DNA, 120 bp, synthetic construct; identical to SEQ ID NO: 30825
  source 1..120: mol_type = other DNA

SEQ ID NO: 59099 - DNA, 120 bp, synthetic construct; identical to SEQ ID NO: 30826
  source 1..120: mol_type = other DNA

SEQ ID NO: 59100 - DNA, 120 bp, synthetic construct
  source 1..120: mol_type = other DNA
ccttcttctctcctggtaccacgacatttcaagtaattagatctgtatcaatgcgaggccacaatcacagcaacttcaagtgaaatcagtgtaaaatccaaggacaagcacgagcacaac

SEQ ID NO: 59101 - DNA, 120 bp, synthetic construct
  source 1..120: mol_type = other DNA
cccgcacaggcgcacaggcccgcacaggcgcacaggcccgcacacgcgcacaggcccgcacaggcgcacagacccgcacacatgcacacgcctgacagctccagtcagtcctcactatcc

SEQ ID NO: 59102 - DNA, 120 bp, synthetic construct; identical to SEQ ID NO: 30827
  source 1..120: mol_type = other DNA

SEQ ID NO: 59103 - DNA, 120 bp, synthetic construct; identical to SEQ ID NO: 30828
  source 1..120: mol_type = other DNA

SEQ ID NO: 59104 - DNA, 120 bp, synthetic construct; identical to SEQ ID NO: 31675
  source 1..120: mol_type = other DNA

SEQ ID NO: 59105 - DNA, 120 bp, synthetic construct
  source 1..120: mol_type = other DNA
tctttttttttttttagagacagggtctcactctgtcacccaggctggaatgcagtggcgctatcacaactcactgaagcctcgacctcccaccttagcccagcagctgggactataggc

SEQ ID NO: 59106 - DNA, 120 bp, synthetic construct
  source 1..120: mol_type = other DNA
attactaggtcagaacattttgagtcaccttgggagattcaggatggggagagcaaatttgaacaaaaggtttttcttatatcctgagattgaggggtagggggtgtccaacctgtatag

SEQ ID NO: 59107 - DNA, 120 bp, synthetic construct
  source 1..120: mol_type = other DNA
aatagggaatgagaaactttctgggagtgataaatatatacatatattttttgagacagggtctcactgcacccaggctggagtgcactgacatcatagttcactgtagccttgaccttc

SEQ ID NO: 59108 - DNA, 120 bp, synthetic construct; identical to SEQ ID NO: 9482
  source 1..120: mol_type = other DNA

SEQ ID NO: 59109 - DNA, 120 bp, synthetic construct
  source 1..120: mol_type = other DNA
gtgaaccaagatcgtgccagtgcactccagactgggtgacagagtgaaaccctgactcaacaacaacaacaacaacaacaacaacaacaacaacaacaaagttactatttctctaaatgt

SEQ ID NO: 59110 - DNA, 120 bp, synthetic construct; identical to SEQ ID NO: 32871
  source 1..120: mol_type = other DNA

SEQ ID NO: 59111 - DNA, 120 bp, synthetic construct
  source 1..120: mol_type = other DNA
ggctggcctggcgggggctgacccccacctccctcccggacggggtggctgccgggcggagacgctcctcacttcccagacggggtggctgccaggcggaggggctcctcacttctcaga

SEQ ID NO: 59112 - DNA, 120 bp, synthetic construct; identical to SEQ ID NO: 32872
  source 1..120: mol_type = other DNA

SEQ ID NO: 59113 - DNA, 120 bp, synthetic construct; identical to SEQ ID NO: 32873
  source 1..120: mol_type = other DNA

SEQ ID NO: 59114 - DNA, 120 bp, synthetic construct; identical to SEQ ID NO: 7037
  source 1..120: mol_type = other DNA

SEQ ID NO: 59115 - DNA, 120 bp, synthetic construct
  source 1..120: mol_type = other DNA
tatttccccgggggatcttcctcatcagcttgtatgtggggtcggggatgagagggggctagagttaagtccttaagctctttagccagtgtctcatctagcggctcagctcatccggct

SEQ ID NO: 59116 - DNA, 120 bp, synthetic construct; identical to SEQ ID NO: 18905
  source 1..120: mol_type = other DNA

SEQ ID NO: 59117 - DNA, 120 bp, synthetic construct
  source 1..120: mol_type = other DNA
ccattgtcatcatggcccgttctcaataagctgttgggcacacctcccagacggggtggtggccgggcagaggggctcctcacttcccagtaggggcggccgggcagaggcgcccctcac

SEQ ID NO: 59118 - DNA, 120 bp, synthetic construct
  source 1..120: mol_type = other DNA
gagatcacgccactgcactccagcctgggcaccattgagcactgagtgaaccagacaccgtctgcaatcccggcacctctggaggcgaggctggtggatcactcgcggttaggagctgga

SEQ ID NO: 59119 - DNA, 120 bp, synthetic construct; identical to SEQ ID NO: 22354
  source 1..120: mol_type = other DNA

SEQ ID NO: 59120 - DNA, 120 bp, synthetic construct
  source 1..120: mol_type = other DNA
tgctctctgaaacatgtgctgtgtccactcagggttaaatggattaaaggcggtgtaagatgtgctttgttaaacagatgcttgaaggcaacatgctcattaagagtcatcaccactccc

SEQ ID NO: 59121 - DNA, 120 bp, synthetic construct; identical to SEQ ID NO: 22355
  source 1..120: mol_type = other DNA

SEQ ID NO: 59122 - DNA, 120 bp, synthetic construct; identical to SEQ ID NO: 22356
  source 1..120: mol_type = other DNA

SEQ ID NO: 59123 - DNA, 120 bp, synthetic construct; identical to SEQ ID NO: 12962
  source 1..120: mol_type = other DNA

SEQ ID NO: 59124 - DNA, 120 bp, synthetic construct
  source 1..120: mol_type = other DNA
ttcatccaacaactattccccaaatgccatttatttttattttttattttttgagacagggtctcactctgttactgaggctggagtacagtggtgcgatctcgactcactgcaacctcc

SEQ ID NO: 59125 - DNA, 120 bp, synthetic construct; identical to SEQ ID NO: 7013
  source 1..120: mol_type = other DNA

SEQ ID NO: 59126 - DNA, 120 bp, synthetic construct; identical to SEQ ID NO: 22162
  source 1..120: mol_type = other DNA

SEQ ID NO: 59127 - DNA, 120 bp, synthetic construct; identical to SEQ ID NO: 22163
  source 1..120: mol_type = other DNA

SEQ ID NO: 59128 - DNA, 120 bp, synthetic construct; identical to SEQ ID NO: 22164
  source 1..120: mol_type = other DNA

SEQ ID NO: 59129 - DNA, 120 bp, synthetic construct; identical to SEQ ID NO: 22165
  source 1..120: mol_type = other DNA

SEQ ID NO: 59130 - DNA, 120 bp, synthetic construct; identical to SEQ ID NO: 22166
  source 1..120: mol_type = other DNA

SEQ ID NO: 59131 - DNA, 120 bp, synthetic construct; identical to SEQ ID NO: 28426
  source 1..120: mol_type = other DNA

SEQ ID NO: 59132 - DNA, 120 bp, synthetic construct
  source 1..120: mol_type = other DNA
cgattcctcagggatctagaactagaaataccatttgacccagctatcccattactgggtatatacccaaaggactataaatcatgctgctataaagacacatgcacatgtatgtttatt

SEQ ID NO: 59133 - DNA, 120 bp, synthetic construct; identical to SEQ ID NO: 28427
  source 1..120: mol_type = other DNA

SEQ ID NO: 59134 - DNA, 120 bp, synthetic construct
  source 1..120: mol_type = other DNA
attgacaaatgggatctaattaaactaaagagcttctgttctttgctggggtatctgaagactgaaaacacagcaaaagaaactaccatcagactgaacaggcaacctacagaatgggag

SEQ ID NO: 59135 - DNA, 120 bp, synthetic construct
  source 1..120: mol_type = other DNA
acaaacctgcacattgtgcacatgtaccctagaacttaaagtataataaaaaatatttaaaaaatctacagtccctttctcaataggtaaacactattaacaatttcttctgaaaattac

SEQ ID NO: 59136 - DNA, 120 bp, synthetic construct
  source 1..120: mol_type = other DNA
gagcttcttgtatttggatgtctaggtctctaataaggctaaggaagttttcctcaattatccccccagatatgttttccaaacttttagatttctcttctttctcaggaacaccaatta

SEQ ID NO: 59137 - DNA, 120 bp, synthetic construct
  source 1..120: mol_type = other DNA
gagctgacccccccacctccctcccggacggggtggctgccgggcggagacgctcctcacttcccagacggggtggctgccgggctgaggggctcctcacttctcagacagggcggttgc

SEQ ID NO: 59138 - DNA, 120 bp, synthetic construct; identical to SEQ ID NO: 28428
  source 1..120: mol_type = other DNA

SEQ ID NO: 59139 - DNA, 120 bp, synthetic construct
  source 1..120: mol_type = other DNA
tgatggctagtgatgatgagcattttttcatgtgtctgttggctgcataaatgtcttcttttgagaagtgtctgttcatgtcctttgcccactttttgatggggttgtttgtttttttct

SEQ ID NO: 59140 - DNA, 120 bp, synthetic construct
  source 1..120: mol_type = other DNA
tgttcttccgtttgtttgtatcctcttttatttcattgagcagtggtttgtagttctccttgaagaggtccttcacatcccttgtaagttgtattcctaggtattttattctctttgaag

SEQ ID NO: 59141 - DNA, 120 bp, synthetic construct
  source 1..120: mol_type = other DNA
tcaccagcaacggaacaaagctggatggagaatgactttgactaattgagaaaagaaggcttcagacgatgaaaattttctgaactaaaggaggaagttcgaacccacggcaaagaagtt

SEQ ID NO: 59142 - DNA, 120 bp, synthetic construct
  source 1..120: mol_type = other DNA
acaagagctcctgaaggaagcactaaacacggaaaggaacaactagtaccagccactgcaaaaacatgcaaattggaaagaccatcgaggctaggaagaaactgcaactaacaagcaaaa

SEQ ID NO: 59143 - DNA, 120 bp, synthetic construct
  source 1..120: mol_type = other DNA
gcagaactgaaggagatagagacacaaaaaacccttcaaaaaatcaatgaatctaggagctggttttttgaaaagatcaataaaactgatagactgctagcatgactaataaagaagaaa

SEQ ID NO: 59144 - DNA, 120 bp, synthetic construct
  source 1..120: mol_type = other DNA
gacctatctcaaaataataagagctatctatgacaaacccacagccaatatcatactgaatggacaaaacctgggagcattccctttgaaaactggcacaagacagggatgccctctctc

SEQ ID NO: 59145 - DNA, 120 bp, synthetic construct; identical to SEQ ID NO: 31657
  source 1..120: mol_type = other DNA

SEQ ID NO: 59146 - DNA, 120 bp, synthetic construct
  source 1..120: mol_type = other DNA
tgtcagctggaggaagcggagtaggaagcggccgcgatgtccttttgtgtcctacaagcagccggcggcgccgccgagtgaggggacgcggcgcggtggggcggcgcggcccgaggaggc

SEQ ID NO: 59147 - DNA, 120 bp, synthetic construct
  source 1..120: mol_type = other DNA
tgtgtgatcatgagccttgactgagttcgtggatggggtgtgcgctccaggagaagtgtgtgagcacaagtgtgagcaggagtgagcacgggtttgggaaggccggtgcaagtgtgaaag

SEQ ID NO: 59148 - DNA, 120 bp, synthetic construct
  source 1..120: mol_type = other DNA
ccctctgggtacactgctgggtgcaataggccccctgatggctgtggcaccgcttgaggctaacaatctggtgtttccagtccctctacctcccagagacactctttccctgagaagtat

SEQ ID NO: 59149 - DNA, 120 bp, synthetic construct
  source 1..120: mol_type = other DNA
attccatctcaaaaaaaaaaaaaaaaggccgggcactgtggctcatgtaatcccagcactttgggaggccgaggcgggcggatcatgaggtcaggagattgagaacatcctggctaacac

SEQ ID NO: 59150 - DNA, 120 bp, synthetic construct
  source 1..120: mol_type = other DNA
tggttactttgggggctataacacgtataattaaaaaaaaaaaaaaaaaggccaagtgtggtggctcacacctgtaatctcagcactttcggaggctaagatgggaggatcacaaggtca

SEQ ID NO: 59151 - DNA, 120 bp, synthetic construct
  source 1..120: mol_type = other DNA
atccacctgccttggactcccaaagtgctgggattacaggcgtgagccactgctcctggccaggttttttttttttttttttttttttttgagatggagttttgctcttgttgtccaggc

SEQ ID NO: 59152 - DNA, 120 bp, synthetic construct
  source 1..120: mol_type = other DNA
ttattaccgctgtggtatgtgcaggaaggggaggtgctggttctgaggctccagagggcttgtctttttttttttttttttgagacggagtctcgctttgttgcccaggctagagtccag

SEQ ID NO: 59153 - DNA, 120 bp, synthetic construct
  source 1..120: mol_type = other DNA
gtgtcttgagctgagtgcagaagcgcaaatagggggtaggagaaaatgcaccgcgaggagaaatgtgctgcgggcctgctgtctagctgtgtcatttggtcgttgcggggccctgtgagg

SEQ ID NO: 59154 - DNA, 120 bp, synthetic construct
  source 1..120: mol_type = other DNA
cagagtgtatgctgtcctagaagcaaaagaagaaagtgtttcagtgtttctaggagcaggaagtgatcaacagccttagatcctccttttaggccaagtaacatgaggactaagaattga

SEQ ID NO: 59155 - DNA, 120 bp, synthetic construct
  source 1..120: mol_type = other DNA
tcaggaaaagtagtagaactgggaacagggacgattttccaacactcacagcctgtccacaaacacacgggctttccctgggagacagttagcgctcttccctggagggaagtcactgga

SEQ ID NO: 59156 - DNA, 120 bp, synthetic construct
  source 1..120: mol_type = other DNA
ttgcagataacgaaaactgaggcttagggaagaacaatgacttgctagaagtcaaaaagcaagccaagtgcaggctccaaactgcacacaggattttgagccctagtgccacactaatgc

SEQ ID NO: 59157 - DNA, 120 bp, synthetic construct
  source 1..120: mol_type = other DNA
gggctgcacgggatgcgtgggaggcagaaacctatctcagggagggaaggggatggaggccagagtctcccagtgggtgatgcttttgctgctgcttaatcctaccccctcttcaaagca

SEQ ID NO: 59158 - DNA, 120 bp, synthetic construct; identical to SEQ ID NO: 14494
  source 1..120: mol_type = other DNA

SEQ ID NO: 59159 - DNA, 120 bp, synthetic construct; identical to SEQ ID NO: 14495
  source 1..120: mol_type = other DNA

SEQ ID NO: 59160 - DNA, 120 bp, synthetic construct; identical to SEQ ID NO: 3772
  source 1..120: mol_type = other DNA

SEQ ID NO: 59161 - DNA, 120 bp, synthetic construct; identical to SEQ ID NO: 14497
  source 1..120: mol_type = other DNA

SEQ ID NO: 59162 - DNA, 120 bp, synthetic construct; identical to SEQ ID NO: 9358
  source 1..120: mol_type = other DNA

SEQ ID NO: 59163 - DNA, 120 bp, synthetic construct
  source 1..120: mol_type = other DNA
caggacatattgatggtgactcagggatattacctgatgagaagaggtctcttcaccattctattcaaattgcattcccttagcaattcccatccatattctactgaccccatttggcat

SEQ ID NO: 59164 - DNA, 120 bp, synthetic construct
  source 1..120: mol_type = other DNA
caggtcagcagtagcagtgtttctcaacattagcaccctctgatttcgtttccacttggctcttctgttctgaaaccaaaccttcagaggggaaaaatgaattggtttagtattttgaac

SEQ ID NO: 59165 - DNA, 120 bp, synthetic construct; identical to SEQ ID NO: 30777
  source 1..120: mol_type = other DNA

SEQ ID NO: 59166 - DNA, 120 bp, synthetic construct; identical to SEQ ID NO: 30778
  source 1..120: mol_type = other DNA

SEQ ID NO: 59167 - DNA, 120 bp, synthetic construct
  source 1..120: mol_type = other DNA
tctagtaatgaatcctttttgtcgcagttcagatgggactcgcaatgcccagctccactgctgttgcttttcacctttcttctgtctccagtcttacaagtcattgattattgaagaaat

SEQ ID NO: 59168 - DNA, 120 bp, synthetic construct
  source 1..120: mol_type = other DNA
ggggaggtgagacatacaaggaatgcagccaatttaagtgggaggaataagctagcaggtttccactgtgggcgactggagctaattcccaggggaaccctatgggagactttgtagaac

SEQ ID NO: 59169 - DNA, 120 bp, synthetic construct
  source 1..120: mol_type = other DNA
tggagcatcaggaggaaggtggatgaatacttaagacccagcctggcctctaaatcggtgctgagcgttttactcagtagacagcttgggaatcatagaaacgatgtggatctgacagag

SEQ ID NO: 59170 - DNA, 120 bp, synthetic construct; identical to SEQ ID NO: 35329
  source 1..120: mol_type = other DNA

SEQ ID NO: 59171 - DNA, 120 bp, synthetic construct; identical to SEQ ID NO: 35330
  source 1..120: mol_type = other DNA

SEQ ID NO: 59172 - DNA, 120 bp, synthetic construct
  source 1..120: mol_type = other DNA
caggtaggttagttagttaatggcacaaaaggatgctctatgatcttggtatatcaggatattttacctgtgagaccactcaggtttcttctgaagaaagatctgggccagagggtaaac

SEQ ID NO: 59173 - DNA, 120 bp, synthetic construct
  source 1..120: mol_type = other DNA
tcatctgatttgaagcaccaaccatattgtttcttctatctgtcttacacatggggctgtgcagcagcctgatgggacccgggacattaaagacacactattgcatccctctaatcatta

SEQ ID NO: 59174 - DNA, 120 bp, synthetic construct
  source 1..120: mol_type = other DNA
gtgtgttgttgtcctaccaggtggcttcatttcagtcaaatgaattatctttggctgtggcctgagcaggtttgtttgacatgacacaaaaaagtgaccagagcattctatactttcctg

SEQ ID NO: 59175 - DNA, 120 bp, synthetic construct
  source 1..120: mol_type = other DNA
tgcaagatgggaaatagttggtaccaattgttttggggcactagtcaagtcggaaagtggacagagttccacttgaatgtgctgctgctctagtttggataactttactgtctatgtata

SEQ ID NO: 59176 - DNA, 120 bp, synthetic construct
  source 1..120: mol_type = other DNA
tatgaagttaaaaccaggtgatgtgattgctcacctaattcttggttcttgtggcagtgttttttgtgtgcagatagtcgttaaaatctggtgttccagtgaagggagatgggatgagtg

SEQ ID NO: 59177 - DNA, 120 bp, synthetic construct
  source 1..120: mol_type = other DNA
tctaatctattaatatataatctattaatatatattattattatatataatatataataatatgtgtgggcactggctgcaccctgcatggatttgttttcagctgtgatagggcagcat

SEQ ID NO: 59178 - DNA, 120 bp, synthetic construct
  source 1..120: mol_type = other DNA
atttcttccttgtgagtgtcacttctggaaacaaaagtcaagttctctaggtgaacactgagtagccccaaccttccagtgaatttgaagtgtaggaagttttcctcgtttaaactcggc

SEQ ID NO: 59179 - DNA, 120 bp, synthetic construct
  source 1..120: mol_type = other DNA
aagtgaggagtaagatgaaatttacataaggtgaaccattaaagccatcacagattccaagcatttctcttgtcctttcacgtgagctgcaaaataagcccctgcaagcagtcctctgtc

SEQ ID NO: 59180 - DNA, 120 bp, synthetic construct
  source 1..120: mol_type = other DNA
acacatcatggataaagaagtccctaaaggcagtcccagggagcccgcactgaacatcaagaagtcagacaaatccttcaaacgcaagaagcccaccgaaaatgtgctgatctttttaat

SEQ ID NO: 59181 - DNA, 120 bp, synthetic construct
  source 1..120: mol_type = other DNA
atgctcactgtgttctctattttgacctcccaagagagactaaaagacttgcccaagtgacagagaggtgagattggaactgagaaagcctgtatctgaagcttctgcttttacccactg

SEQ ID NO: 59182 - DNA, 120 bp, synthetic construct; identical to SEQ ID NO: 35330
  source 1..120: mol_type = other DNA

SEQ ID NO: 59183 - DNA, 120 bp, synthetic construct
  source 1..120: mol_type = other DNA
tgagcggggtggagcgcttgagcccaggagttcaagaccagcctgggcaacataaggagaccccatctctacaataaaaataaatgaatacataaataaattaaaaatttgcacagtctt

SEQ ID NO: 59184 - DNA, 120 bp, synthetic construct
  source 1..120: mol_type = other DNA
ccaagaaaatggtgtggatcaataaatccttcccctgatgcaaccattacaagtggaagctgtgttctcactgcttttggctggacatggtctttgatcacctggtttcttgacttctga

SEQ ID NO: 59185 - DNA, 120 bp, synthetic construct
  source 1..120: mol_type = other DNA
tatagatggaaaggtgagacctagctctgcagggccagtgtctaaatacataagtcagtgtcagaatctttttggcaccgtctgttccttaaatagttcaatactcgccgtttgtgaaaa

SEQ ID NO: 59186 - DNA, 120 bp, synthetic construct; identical to SEQ ID NO: 27044
  source 1..120: mol_type = other DNA

SEQ ID NO: 59187 - DNA, 120 bp, synthetic construct
  source 1..120: mol_type = other DNA
tgagccgagatcatgtcactgcactccagcctgggcgacagagctagacttagtctcgagaaaaaaaaaaaaaaatctctctctcacaaactcattctctttaaatggcaacatattaat

SEQ ID NO: 59188 - DNA, 120 bp, synthetic construct; identical to SEQ ID NO: 5602
  source 1..120: mol_type = other DNA

SEQ ID NO: 59189 - DNA, 120 bp, synthetic construct; identical to SEQ ID NO: 15513
  source 1..120: mol_type = other DNA

SEQ ID NO: 59190 - DNA, 120 bp, synthetic construct; identical to SEQ ID NO: 15514
  source 1..120: mol_type = other DNA

SEQ ID NO: 59191 - DNA, 120 bp, synthetic construct; identical to SEQ ID NO: 15515
  source 1..120: mol_type = other DNA

SEQ ID NO: 59192 - DNA, 120 bp, synthetic construct; identical to SEQ ID NO: 15516
  source 1..120: mol_type = other DNA

SEQ ID NO: 59193 - DNA, 120 bp, synthetic construct; identical to SEQ ID NO: 19933
  source 1..120: mol_type = other DNA

SEQ ID NO: 59194 - DNA, 120 bp, synthetic construct; identical to SEQ ID NO: 19934
  source 1..120: mol_type = other DNA

SEQ ID NO: 59195 - DNA, 120 bp, synthetic construct; identical to SEQ ID NO: 19935
  source 1..120: mol_type = other DNA

SEQ ID NO: 59196 - DNA, 120 bp, synthetic construct; identical to SEQ ID NO: 19936
  source 1..120: mol_type = other DNA

SEQ ID NO: 59197 - DNA, 120 bp, synthetic construct
  source 1..120: mol_type = other DNA
aaaatgctcatcatcactggccatcagagaaatgcaaatcaaaatcacaatgagataccgtctcacaccagttagaacggcgatcattaaaaagtcaggaaagaacaggtgctggagagg

SEQ ID NO: 59198 - DNA, 120 bp, synthetic construct; identical to SEQ ID NO: 19937
  source 1..120: mol_type = other DNA

SEQ ID NO: 59199 - DNA, 120 bp, synthetic construct; identical to SEQ ID NO: 19818
  source 1..120: mol_type = other DNA

SEQ ID NO: 59200 - DNA, 120 bp, synthetic construct; identical to SEQ ID NO: 19819
  source 1..120: mol_type = other DNA

SEQ ID NO: 59201 - DNA, 120 bp, synthetic construct
  source 1..120: mol_type = other DNA
tgaactcctggcatcaagcaatctgcccacactagcctcccaaagtgttgggattacaggtgtgatgtgcccgatgactaacaatttattgactttacaataatgtgaaagtgatacatt

SEQ ID NO: 59202 - DNA, 120 bp, synthetic construct
  source 1..120: mol_type = other DNA
agaattgcttgaacttgggaggcagaggttacagtgagcagagatcatgccactgcattccagcctgagtgacagagcaacactccgtctcaaaaaaaaaaaacaaaaaacaaaagtcaa

SEQ ID NO: 59203 - DNA, 120 bp, synthetic construct
  source 1..120: mol_type = other DNA
ggtccttttcagatggtccttcactaaatcaattccaataaaaaggccaatgcccctgcgagaggtgaagaaaaacttgacccacaatctgtccaactcttcactgtcacaaaaagttaa

SEQ ID NO: 59204 - DNA, 120 bp, synthetic construct; identical to SEQ ID NO: 12454
  source 1..120: mol_type = other DNA

SEQ ID NO: 59205 - DNA, 120 bp, synthetic construct; identical to SEQ ID NO: 12455
  source 1..120: mol_type = other DNA

SEQ ID NO: 59206 - DNA, 120 bp, synthetic construct
  source 1..120: mol_type = other DNA
agttcaagaccagcctagccaatatggtgaaaccctgtctctactaaaaatacaaaaaataaaaatattagctgggcatagtggcacatgcctgtaatcccagatactcggaagcctgag

SEQ ID NO: 59207 - DNA, 120 bp, synthetic construct; identical to SEQ ID NO: 12696
  source 1..120: mol_type = other DNA

SEQ ID NO: 59208 - DNA, 120 bp, synthetic construct
  source 1..120: mol_type = other DNA
gaaatgtaaatctacaagttgagatctattgaggtcatttaaaaatctatcatttttcaggctgggtactgtggctcacgcctgtaatcccagtactttggaaggccaaggctggcagat

SEQ ID NO: 59209 - DNA, 120 bp, synthetic construct; identical to SEQ ID NO: 12697
  source 1..120: mol_type = other DNA

SEQ ID NO: 59210 - DNA, 120 bp, synthetic construct; identical to SEQ ID NO: 20628
  source 1..120: mol_type = other DNA

SEQ ID NO: 59211 - DNA, 120 bp, synthetic construct
  source 1..120: mol_type = other DNA
gtgctcactgcctgatcccaaagccacccccacagtttgaggatttcattaccccggcaacccacttcaaatatcaaaatgtgaattcgttttctagtaaaatacctccaagtttaatgg

SEQ ID NO: 59212 - DNA, 120 bp, synthetic construct; identical to SEQ ID NO: 25220
  source 1..120: mol_type = other DNA

SEQ ID NO: 59213 - DNA, 120 bp, synthetic construct
  source 1..120: mol_type = other DNA
ttgggaaaatgttctcccattttgtaggttgcctgttcactctgatggtagtttcttttgctgtgcagaagctctttagtttaatgagatcccatttgtcaattttggcttttgttgcca

SEQ ID NO: 59214 - DNA, 120 bp, synthetic construct
  source 1..120: mol_type = other DNA
ctgcaaacagggacaatttgacttcctcttttcctaattgaataccctttatttcctaaagtttcttctcttttctagtgactcagcagggtgcttcatgaatgtggtcttcgagggcag

SEQ ID NO: 59215 - DNA, 120 bp, synthetic construct; identical to SEQ ID NO: 25221
  source 1..120: mol_type = other DNA

SEQ ID NO: 59216 - DNA, 120 bp, synthetic construct
  source 1..120: mol_type = other DNA
gtgtttgagttcattgtagattctggatattagccctttgtcacatgagtaggttgcgaaaattttctcccattttgtaggttgcctgttcactctgatggtagtttcttttgctgtgca

SEQ ID NO: 59217 - DNA, 120 bp, synthetic construct
  source 1..120: mol_type = other DNA
atcctcttttatttcattgagcagtggtttgtagttctccttgaagaggtccttcacatcccttgtaagtaggattcctagatattttattctctttgaagcaattgtgaatgggagttc

SEQ ID NO: 59218 - DNA, 120 bp, synthetic construct
  source 1..120: mol_type = other DNA
cttgtacctctggtagaattcggctgtgaatccatctggtcctggactctttttggttggtaagctattgattattgccacaacttcagctcctgttattggtctattcagagattcaac

SEQ ID NO: 59219 - DNA, 120 bp, synthetic construct
  source 1..120: mol_type = other DNA
tctgtctaatgttgacagtggggtgttaaagtctcccattattaatgtgtgggagtctatgtctctttggaggttactcaggacttgctttatgaatctgggtgctcctgtattgggcgc

SEQ ID NO: 59220 - DNA, 120 bp, synthetic construct
  source 1..120: mol_type = other DNA
cttaacattttttccttcatttcaactttggtgaatctgacaattatgtgtcttggagttgctcttctcgaggagtatcttggtggcgttctctgtatttcctgaatctgaatgttggcc

SEQ ID NO: 59221 - DNA, 120 bp, synthetic construct
  source 1..120: mol_type = other DNA
gggagaaccactgctctcttcaaagctgtcagacagggacatttaagtctgcagaggttactgctgtctttttgtttgtctgtgccctgcccccggagatggaacctccagaggcaggca

SEQ ID NO: 59222 - DNA, 120 bp, synthetic construct; identical to SEQ ID NO: 25222
  source 1..120: mol_type = other DNA

SEQ ID NO: 59223 - DNA, 120 bp, synthetic construct
  source 1..120: mol_type = other DNA
ttttgatggggttgtttgtttttttcttgtaaatgtgtttgagttcattgtagattctggatattagccctttgtcagatgagtaggttgggaaaatgttctcccattttgtgggttgcc

SEQ ID NO: 59224 - DNA, 120 bp, synthetic construct
  source 1..120: mol_type = other DNA
gtaagttggattcctaggtattttattctctttgaagcagttgtgaatgggagttcactcatgatttggctctctgtttgtctgttgttggtgtataagaatgcttgtgatttttgtaca

SEQ ID NO: 59225 - DNA, 120 bp, synthetic construct; identical to SEQ ID NO: 25223
  source 1..120: mol_type = other DNA

SEQ ID NO: 59226 - DNA, 120 bp, synthetic construct; identical to SEQ ID NO: 25224
  source 1..120: mol_type = other DNA

SEQ ID NO: 59227 - DNA, 120 bp, synthetic construct
  source 1..120: mol_type = other DNA
ggaagaaaggctatcagtgacggaagatgaaatgaatgaaataaagcaagaagggaagtttagagaaaaaagaataaaaagaaacgaacaaagcctccaagaaatatgggactatgtgaa

SEQ ID NO: 59228 - DNA, 120 bp, synthetic construct
  source 1..120: mol_type = other DNA
atatgcacccaatactggagcacccagattcataaagcaagtcctcagtgacctacaaagagacttagactcccacacaataacaatgggagactttaacaccccactgtcaacattaga

SEQ ID NO: 59229 - DNA, 120 bp, synthetic construct
  source 1..120: mol_type = other DNA
ctagaagaaatggataaattcctcaacacattcaccctcccaagactaaaccaggaagaagctgaaatctcggaatagactaataacaggctctgaaactgtggcaataatcaatagctt

SEQ ID NO: 59230 - DNA, 120 bp, synthetic construct
  source 1..120: mol_type = other DNA
aaaatcaatgtacaaaaatcacaagcattcttatacaccaacaacagacaaacagagagccaaatcatgagtgaactcccattcactattgcttcaaagagaataaaatacctaggaatc

SEQ ID NO: 59231 - DNA, 120 bp, synthetic construct
  source 1..120: mol_type = other DNA
gacatttctcaaaagaagacatttatgcagccaaaagacacatgaaaaaatgctcaccatcactggccatcagagaaatgcaaatcaaaaccaaaatgagataccatctcacaccagtta

SEQ ID NO: 59232 - DNA, 120 bp, synthetic construct; identical to SEQ ID NO: 25219
  source 1..120: mol_type = other DNA

SEQ ID NO: 59233 - DNA, 120 bp, synthetic construct
  source 1..120: mol_type = other DNA
tcaatgaatccaggagctgtttttgaaaggatcaacaaaatagatagaccgctagcaagactaataaagaagaaaagagagaagaatcaaatagacacaataaaaaatgataaaggggat

SEQ ID NO: 59234 - DNA, 120 bp, synthetic construct
  source 1..120: mol_type = other DNA
ggatgccctctcaccactcctattcaacatagtgctggaagttctggccagggcaatcaggcaggagaaagaaataaagggtattcaattaggaaaagaggaagtcaaattgtccctgtt

SEQ ID NO: 59235 - DNA, 120 bp, synthetic construct
  source 1..120: mol_type = other DNA
atgtagaaagctgaaactggatcccttccttacaccttatactaaaattaattcaagatgaattaaagacttaaatgttagacctaaaactataaaaaccctagaagaaaacctaggcaa

SEQ ID NO: 59236 - DNA, 120 bp, synthetic construct
  source 1..120: mol_type = other DNA
aacaaacctgcatgttgtgcacatgtaccctagaacttaaagtataattaaaaatatatatatattaaggcaggaggatcacaaggtcaggagatcgagaccatcctggctaacacagtg

SEQ ID NO: 59237 - DNA, 120 bp, synthetic construct; identical to SEQ ID NO: 7801
  source 1..120: mol_type = other DNA

SEQ ID NO: 59238 - DNA, 120 bp, synthetic construct
  source 1..120: mol_type = other DNA
cacatatctatgactatctgatctttgacaaacctaacaaaaacaagaaatgaggaaaggattccctgtttaataaatggtgctgggaaaactggctagccatatgtagaaagctgaaac

SEQ ID NO: 59239 - DNA, 120 bp, synthetic construct
  source 1..120: mol_type = other DNA
acacacggacacaggaaggggaacatcacacaccgaggcctgttgtggggtggggggaggttggagggatagcattaggagatatacctaatgttaaatgacgagttaatgggtgcagca

SEQ ID NO: 59240 - DNA, 120 bp, synthetic construct
  source 1..120: mol_type = other DNA
actcttgggctcaagatctgcctgcctcagcctcccaaagtgctgagattacaggcatgagtcattacacctgatgaacaaaaaattttttaagttaaaaaaaaattaaggctgggcgca

SEQ ID NO: 59241 - DNA, 120 bp, synthetic construct
  source 1..120: mol_type = other DNA
atcagactccaggctcttcagttttgggactcggattggctctccttgctcctcatcttgcagacggcctattgtgggatcttgcgatcgtgtaagttaatacttaataaactcatatat

SEQ ID NO: 59242 - DNA, 120 bp, synthetic construct
  source 1..120: mol_type = other DNA
ctgcacccattaactcgtcatttaacattaggtatatctcctaatgctatccctccaccctccccccaccccaaaacaggccccagggtgcgatgttccccttcctgtgtccatgtgttc

SEQ ID NO: 59243 - DNA, 120 bp, synthetic construct
  source 1..120: mol_type = other DNA
cttgcccacgcctatgtcctaaatgatactgcctaggttttcttctagggtttttatggttttaggtctaacatttaaatctttaatccatcttgaattaatttttgtataaggtgtaag

SEQ ID NO: 59244 - DNA, 120 bp, synthetic construct
  source 1..120: mol_type = other DNA
tgcccattcagtatgatattggctgtgggtttgtcataaacagctcttatgattttgagatacgtcccattgatacctaatttattgagagtttttggcatgaagggctgctgaattttg

SEQ ID NO: 59245 - DNA, 120 bp, synthetic construct
  source 1..120: mol_type = other DNA
ctctactaaaaatacaaaaaaaaaaaaaaaaaaaaaaaaaaaacaaaaaccagccgggcatggtggcaggtgccttagtcccagatactcgggaggctgagggaggagaatggcgtgaac

SEQ ID NO: 59246 - DNA, 120 bp, synthetic construct; identical to SEQ ID NO: 2843
  source 1..120: mol_type = other DNA

SEQ ID NO: 59247 - DNA, 120 bp, synthetic construct
  source 1..120: mol_type = other DNA
cccgtccaccctttgcagtgaccctcaggactcctctccgggaaccccctcagggctccccatccccccactccgccgatcagcccctcagaagcgccccccaagcccaagaacccccgt

SEQ ID NO: 59248 - DNA, 120 bp, synthetic construct; identical to SEQ ID NO: 19510
  source 1..120: mol_type = other DNA

SEQ ID NO: 59249 - DNA, 120 bp, synthetic construct; identical to SEQ ID NO: 19511
  source 1..120: mol_type = other DNA

SEQ ID NO: 59250 - DNA, 120 bp, synthetic construct
  source 1..120: mol_type = other DNA
ctgaggtgagaggatcacttgagcccgggaagtcgaggctgcagtgagctgtgatcactccactgcactctagcctgggtgacagagcaagaccctgtctgttaaaacaaaacagaatag

SEQ ID NO: 59251 - DNA, 120 bp, synthetic construct; identical to SEQ ID NO: 4154
  source 1..120: mol_type = other DNA

SEQ ID NO: 59252 - DNA, 120 bp, synthetic construct; identical to SEQ ID NO: 17648
  source 1..120: mol_type = other DNA

SEQ ID NO: 59253 - DNA, 120 bp, synthetic construct; identical to SEQ ID NO: 17649
  source 1..120: mol_type = other DNA

SEQ ID NO: 59254 - DNA, 120 bp, synthetic construct; identical to SEQ ID NO: 17650
  source 1..120: mol_type = other DNA

SEQ ID NO: 59255 - DNA, 120 bp, synthetic construct
  source 1..120: mol_type = other DNA
caaagttctgggattataggtgtgaaccaccgctaccagccaattttttgtatttctagtagagacggggtttctccatgttggccaggctggtgtccaactcctgacatcatgcaatcc

SEQ ID NO: 59256 - DNA, 120 bp, synthetic construct; identical to SEQ ID NO: 33203
  source 1..120: mol_type = other DNA

SEQ ID NO: 59257 - DNA, 120 bp, synthetic construct; identical to SEQ ID NO: 33204
  source 1..120: mol_type = other DNA

SEQ ID NO: 59258 - DNA, 120 bp, synthetic construct; identical to SEQ ID NO: 33205
  source 1..120: mol_type = other DNA

SEQ ID NO: 59259 - DNA, 120 bp, synthetic construct; identical to SEQ ID NO: 33186
  source 1..120: mol_type = other DNA

SEQ ID NO: 59260 - DNA, 120 bp, synthetic construct; identical to SEQ ID NO: 33187
  source 1..120: mol_type = other DNA

SEQ ID NO: 59261 - DNA, 120 bp, synthetic construct; identical to SEQ ID NO: 33188
  source 1..120: mol_type = other DNA

SEQ ID NO: 59262 - DNA, 120 bp, synthetic construct
  source 1..120: mol_type = other DNA
ccagtatggagtctttgggatgatacccagttctggaaaggggtggtggtgatggatatgtgatacagtgaatgtgctaatgccactgaattgtacacttaaaaatggttaaaatggtca

SEQ ID NO: 59263 - DNA, 120 bp, synthetic construct
  source 1..120: mol_type = other DNA
tgagtaaaaacaactaatatacacctatatgatgagtaaaaacaaaagtaaaaacaaacacaactggtaaataaagtaaatatacgggaaaaaaccaaaggaaacgggtcaaagggaaga

SEQ ID NO: 59264 - DNA, 120 bp, synthetic construct
  source 1..120: mol_type = other DNA
cacgggagctacacggggctacacggggctacacgggagctacacggggctacagggggctacacggggctacacgggactacacgggagctacacggggctacacggggctacacggga

SEQ ID NO: 59265 - DNA, 120 bp, synthetic construct
  source 1..120: mol_type = other DNA
aggagctacacaggactacacaggactacacaggagctacacaggactacaaaggagctacacaggagctacacaggagctacacaggactacgcaggaccacacaggagctatacagga

SEQ ID NO: 59266 - DNA, 120 bp, synthetic construct; identical to SEQ ID NO: 33193
  source 1..120: mol_type = other DNA

SEQ ID NO: 59267 - DNA, 120 bp, synthetic construct; identical to SEQ ID NO: 33194
  source 1..120: mol_type = other DNA

SEQ ID NO: 59268 - DNA, 120 bp, synthetic construct; identical to SEQ ID NO: 33195
  source 1..120: mol_type = other DNA

SEQ ID NO: 59269 - DNA, 120 bp, synthetic construct; identical to SEQ ID NO: 33196
  source 1..120: mol_type = other DNA

SEQ ID NO: 59270 - DNA, 120 bp, synthetic construct
  source 1..120: mol_type = other DNA
ttacggggagagagctagatagagaggggtggggatcacggggaaggttctagatagagagggatggggatcacggggaaggtgctagatagagaggggtggggatcacggggaggggtt

SEQ ID NO: 59271 - DNA, 120 bp, synthetic construct; identical to SEQ ID NO: 33199
  source 1..120: mol_type = other DNA

SEQ ID NO: 59272 - DNA, 120 bp, synthetic construct; identical to SEQ ID NO: 33200
  source 1..120: mol_type = other DNA

SEQ ID NO: 59273 - DNA, 120 bp, synthetic construct
  source 1..120: mol_type = other DNA
actgtaactcctacttaaaacttttttaaaattaaatgtatatatttgacacaggatctcactctgtcccccaggctggactgcagtggtgtgatcaaggctcactgcagcctcaacctc

SEQ ID NO: 59274 - DNA, 120 bp, synthetic construct
  source 1..120: mol_type = other DNA
aagatttaaaaacaggggctcacgcagatgtttgtagatgaattttcagagaagtacttatttacaacggccagaggtggagatggcgcagatgaccctcagctgtctatgaagaaacag

SEQ ID NO: 59275 - DNA, 120 bp, synthetic construct
  source 1..120: mol_type = other DNA
aaccattctgaaaccagaagaggtgcacaggttgtgaagatgtagaaagattcacgaagcacgactgggcgctccaggccattgagtcactcattgtgaaacggctggttttatatgtcg

SEQ ID NO: 59276 - DNA, 120 bp, synthetic construct
  source 1..120: mol_type = other DNA
tctgggcgtcccccccgataacgcccaccagtatcccccctctgggcatcccccccaatccctccactggttcccccccaccccaatgcccctctgggcatccccccaatcctccccacc

SEQ ID NO: 59277 - DNA, 120 bp, synthetic construct; identical to SEQ ID NO: 33202
  source 1..120: mol_type = other DNA

SEQ ID NO: 59278 - DNA, 120 bp, synthetic construct; identical to SEQ ID NO: 27416
  source 1..120: mol_type = other DNA

SEQ ID NO: 59279 - DNA, 120 bp, synthetic construct; identical to SEQ ID NO: 27417
  source 1..120: mol_type = other DNA

SEQ ID NO: 59280 - DNA, 120 bp, synthetic construct; identical to SEQ ID NO: 27418
  source 1..120: mol_type = other DNA

SEQ ID NO: 59281 - DNA, 120 bp, synthetic construct; identical to SEQ ID NO: 27419
  source 1..120: mol_type = other DNA

SEQ ID NO: 59282 - DNA, 120 bp, synthetic construct; identical to SEQ ID NO: 27420
  source 1..120: mol_type = other DNA

SEQ ID NO: 59283 - DNA, 120 bp, synthetic construct; identical to SEQ ID NO: 27422
  source 1..120: mol_type = other DNA

SEQ ID NO: 59284 - DNA, 120 bp, synthetic construct; identical to SEQ ID NO: 27423
  source 1..120: mol_type = other DNA

SEQ ID NO: 59285 - DNA, 120 bp, synthetic construct; identical to SEQ ID NO: 27424
  source 1..120: mol_type = other DNA

SEQ ID NO: 59286 - DNA, 120 bp, synthetic construct
  source 1..120: mol_type = other DNA
actgagaacatctcctctatagaacagggaaaatgctgcactgtaaaagcatggatgttcccagtaacaacattaaggaaaatattctcccagagtctcatccacgctactggttagttg

SEQ ID NO: 59287 - DNA, 120 bp, synthetic construct; identical to SEQ ID NO: 27415
  source 1..120: mol_type = other DNA

SEQ ID NO: 59288 - DNA, 120 bp, synthetic construct
  source 1..120: mol_type = other DNA
tgcgccactgcactctagcctgggtgacagagtgagactctatctcaaataataataaaaataataaaattttactaataaacccgagaactcaagtgctcagggcttcagatgccccag

SEQ ID NO: 59289 - DNA, 120 bp, synthetic construct; identical to SEQ ID NO: 27421
  source 1..120: mol_type = other DNA

SEQ ID NO: 59290 - DNA, 120 bp, synthetic construct; identical to SEQ ID NO: 14666
  source 1..120: mol_type = other DNA

SEQ ID NO: 59291 - DNA, 120 bp, synthetic construct; identical to SEQ ID NO: 14667
  source 1..120: mol_type = other DNA

SEQ ID NO: 59292 - DNA, 120 bp, synthetic construct; identical to SEQ ID NO: 30069
  source 1..120: mol_type = other DNA

SEQ ID NO: 59293 - DNA, 120 bp, synthetic construct; identical to SEQ ID NO: 30062
  source 1..120: mol_type = other DNA

SEQ ID NO: 59294 - DNA, 120 bp, synthetic construct; identical to SEQ ID NO: 30063
  source 1..120: mol_type = other DNA

SEQ ID NO: 59295 - DNA, 120 bp, synthetic construct; identical to SEQ ID NO: 30064
  source 1..120: mol_type = other DNA

SEQ ID NO: 59296 - DNA, 120 bp, synthetic construct
  source 1..120: mol_type = other DNA
aaatgcttactttttaaaaggagaaagggaaagaatctcatgttgaaaattgtcattaggtaaagtaatagaattaatggagcaggccgggcgcggtggctcacgcctgtaatcccagca

SEQ ID NO: 59297 - DNA, 120 bp, synthetic construct; identical to SEQ ID NO: 30065
  source 1..120: mol_type = other DNA

SEQ ID NO: 59298 - DNA, 120 bp, synthetic construct
  source 1..120: mol_type = other DNA
caaagtatgttcacaggtgtttggaatacgtatgatctaatctgaaaattaagagtatatatacctttcagttcttttttttttttttaattatactttaagttttagggtacatgtgca

SEQ ID NO: 59299 - DNA, 120 bp, synthetic construct
  source 1..120: mol_type = other DNA
cctttgcccactttttgatggggttgtttttttcttgtaaatttgtttgagttcattgtagattctggatattagccctttgtcagatgagtaggtggtgaaaattttctcccatgttgt

SEQ ID NO: 59300 - DNA, 120 bp, synthetic construct
  source 1..120: mol_type = other DNA
ttttctttctttctttctttttttttttttttttttttgagacagtatctccctctgtcacccaggctggagtacagtgtggtgatcttggctcactgcagcctcgacctcccacactca

SEQ ID NO: 59301 - DNA, 120 bp, synthetic construct
  source 1..120: mol_type = other DNA
catcagtgtttggtatgatgcccagatgatcccaacatgcagccagaatttgtacctctgtccttgatctttctactccatcgtatcagttattgctggcagagagagtacatcaaaaat

SEQ ID NO: 59302 - DNA, 120 bp, synthetic construct; identical to SEQ ID NO: 30066
  source 1..120: mol_type = other DNA

SEQ ID NO: 59303 - DNA, 120 bp, synthetic construct
  source 1..120: mol_type = other DNA
ctaaagccataaatgcaatagagaaacagaacactttaaaaaatattacctccactaaaggccgggtgtgttagctcagcactttgggaggccaaggcaggcggatcacgaggtcaggag

SEQ ID NO: 59304 - DNA, 120 bp, synthetic construct; identical to SEQ ID NO: 30067
  source 1..120: mol_type = other DNA

SEQ ID NO: 59305 - DNA, 120 bp, synthetic construct
  source 1..120: mol_type = other DNA
gtgtctgttcatgtccctcgcccactttttgatagggttgtttgtttttttcttgtaaatttgtttgagttcattgtagattctggatattagccctttgtcagatgagtaggttgcgaa

SEQ ID NO: 59306 - DNA, 120 bp, synthetic construct
  source 1..120: mol_type = other DNA
tcccttgtaagttggattcctaggtattttattctctttgaagcaatagtgaatgggagttcactcatgatttggctctctgtttgtctgttgttggtgtataggaatgcttgtgatttt

SEQ ID NO: 59307 - DNA, 120 bp, synthetic construct
  source 1..120: mol_type = other DNA
ctttttggttggtaaactattgattattgccacaatttcagctcctgttattggtctattcagagattcaacttcttcctggtttagtcttgggagagtgtatgtgtcaaggaatgtatc

SEQ ID NO: 59308 - DNA, 120 bp, synthetic construct
  source 1..120: mol_type = other DNA
atgttgacagtggggtgttaaagtctcccattattaatgtgtgggagtctaagtctctttgtaggtcactcaggacttgctttatgaatctgggtgctcctgtattgggtgcatgtatat

SEQ ID NO: 59309 - DNA, 120 bp, synthetic construct
  source 1..120: mol_type = other DNA
cttggttccattctccgcatcactttcaggtacaccaatcagacgtagatttggtcttttcacatagtcccatatttcttggaggctttgctcatttctttttattcttttttctctaac

SEQ ID NO: 59310 - DNA, 120 bp, synthetic construct
  source 1..120: mol_type = other DNA
ggcaggtaggcctccttgagctgtggtgggctccacccagtttgagcttcccggctgctttgtttacctaagcaagcctgggcaatggcgggcgcccctcccccagcctcgctgccgcct

SEQ ID NO: 59311 - DNA, 120 bp, synthetic construct; identical to SEQ ID NO: 30068
  source 1..120: mol_type = other DNA

SEQ ID NO: 59312 - DNA, 120 bp, synthetic construct
  source 1..120: mol_type = other DNA
tagctcactgcagccttgaactcctaggttcaagcaatccccttgtcttagtgtagtgttgggattacaggcatgagccaccacacccggcctttttttttttttttttttaaatatagt

SEQ ID NO: 59313 - DNA, 120 bp, synthetic construct
  source 1..120: mol_type = other DNA
ttattattattattatttgagacagagtctcactctgttggccaggctggagtgcagtggctgaatcttggttcactgcaacctcagcctcccaagtagctgggattacaagcatgcgcc

SEQ ID NO: 59314 - DNA, 120 bp, synthetic construct; identical to SEQ ID NO: 11028
  source 1..120: mol_type = other DNA

SEQ ID NO: 59315 - DNA, 120 bp, synthetic construct
  source 1..120: mol_type = other DNA
ccatttgtaggttgcctgttcactctgaaggtagtttcttttgctgtgcagaagctttttagtgtgatggtgtgaatggttttgtcatcatttaaaattttcttctttcagataaaaata

SEQ ID NO: 59316 - DNA, 120 bp, synthetic construct; identical to SEQ ID NO: 11029
  source 1..120: mol_type = other DNA

SEQ ID NO: 59317 - DNA, 120 bp, synthetic construct
  source 1..120: mol_type = other DNA
gcagctgccgggcggagacgctcctcacttcccagacggggtggctgccgggcggaggggctcctcacttctcagacggggcggctgccgggcggaggggctcctcacttctcagacggg

SEQ ID NO: 59318 - DNA, 120 bp, synthetic construct; identical to SEQ ID NO: 20605
  source 1..120: mol_type = other DNA

SEQ ID NO: 59319 - DNA, 120 bp, synthetic construct; identical to SEQ ID NO: 20606
  source 1..120: mol_type = other DNA

SEQ ID NO: 59320 - DNA, 120 bp, synthetic construct
  source 1..120: mol_type = other DNA
gtctgttcatgtccttcgcccactttttgatggggttgtttgtttttttcttgtaaatttgtttgagttcattgtagattctggatattagccctttgtcagatgagtaggttgtgaaaa

SEQ ID NO: 59321 - DNA, 120 bp, synthetic construct
  source 1..120: mol_type = other DNA
tgatttttgtacattgattttgtatcctgagactttgctgaagttgcttatcagcttaaggagattttgggctgagacgatggggttttctagatatacaatcatgtcgtctgcaaacag

SEQ ID NO: 59322 - DNA, 120 bp, synthetic construct
  source 1..120: mol_type = other DNA
ctgaatagaccaataacaggagctgaaattgtggcaataatcaatagcttaccaatcaaaaagagtccaggaccagatggattcacagccgaattctaccagaggtacaaggaggaactg

SEQ ID NO: 59323 - DNA, 120 bp, synthetic construct; identical to SEQ ID NO: 20607
  source 1..120: mol_type = other DNA

SEQ ID NO: 59324 - DNA, 120 bp, synthetic construct
  source 1..120: mol_type = other DNA
gtctcagatggagatgaggaacttcttgggaactggagcaaaggtgactcttaactattcttttattattattattattattattattattatactttaagtttgagggtacatgtgcac

SEQ ID NO: 59325 - DNA, 120 bp, synthetic construct
  source 1..120: mol_type = other DNA
cgaaaattttctcccattttgtaggttgcctgttcactctgatggtagtttcttttgctgtgcagaagctctttagtttaatgagatcccatttgtcaattttggcttttgttgccattg

SEQ ID NO: 59326 - DNA, 120 bp, synthetic construct
  source 1..120: mol_type = other DNA
cggttttctagatatacaatcatgttgtctgcaaacagggacaatttgacttcctcttttcctaattgaataccctttatttccttctcctgcctaattgccctggccagaatttccaac

SEQ ID NO: 59327 - DNA, 120 bp, synthetic construct
  source 1..120: mol_type = other DNA
agatacaacatttatgttaatgagctccaagtggaaggacctcaaagagatgagttccatataagaaaatgttatatatggccaggcgtggtaactcacgcctgtaaccccagcactttg

SEQ ID NO: 59328 - DNA, 120 bp, synthetic construct
  source 1..120: mol_type = other DNA
tcaactaaagaacaaaataaccagctaacatcataatgacaggatcaaattcacacataacaatattaaccttaaatgtaaatgggctaaatgctccaattaaaagacacagactggcaa

SEQ ID NO: 59329 - DNA, 120 bp, synthetic construct
  source 1..120: mol_type = other DNA
accctaacatcacaattaaaagaactagagaagcaagagcaaacacattcaaaagctagcagaaggcaagaaataactaagatcagagcagaactgaaggaatcagagacacaaaaaaac

SEQ ID NO: 59330 - DNA, 120 bp, synthetic construct; identical to SEQ ID NO: 20598
  source 1..120: mol_type = other DNA

SEQ ID NO: 59331 - DNA, 120 bp, synthetic construct
  source 1..120: mol_type = other DNA
ccaacttacaagggatgtgaaggacctcttcaaggagaactacaaaccactgctcaaggaaataaaagaggatacaaacaaatggaagaacattccatgctcatgggtgggaagaatgaa

SEQ ID NO: 59332 - DNA, 120 bp, synthetic construct
  source 1..120: mol_type = other DNA
atgctcaccatcactggtcatcaaagaaatgcaaatcaaaatcacaatgagataccatctcacaccagttagaatggcaatcattaaaaaatcaggaaactacaggtgctggagaggatg

SEQ ID NO: 59333 - DNA, 120 bp, synthetic construct; identical to SEQ ID NO: 20599
  source 1..120: mol_type = other DNA

SEQ ID NO: 59334 - DNA, 120 bp, synthetic construct
  source 1..120: mol_type = other DNA
ttattgtagattctggatattagccctttgtcagatgagtaggttgaaaaaattttctcccattctgtaggttgcctgttcactctgatggtagtttcttttgctgtgcagaagctcttt

SEQ ID NO: 59335 - DNA, 120 bp, synthetic construct; identical to SEQ ID NO: 20601
  source 1..120: mol_type = other DNA

SEQ ID NO: 59336 - DNA, 120 bp, synthetic construct; identical to SEQ ID NO: 20602
  source 1..120: mol_type = other DNA

SEQ ID NO: 59337 - DNA, 120 bp, synthetic construct; identical to SEQ ID NO: 20603
  source 1..120: mol_type = other DNA

SEQ ID NO: 59338 - DNA, 120 bp, synthetic construct; identical to SEQ ID NO: 20604
  source 1..120: mol_type = other DNA

SEQ ID NO: 59339 - DNA, 120 bp, synthetic construct
  source 1..120: mol_type = other DNA
ctgtaggtcaccagcatcaaagaccaaaggtagataaaaccacaaagatggggagaaatgagagcagagcatgggtaggaagaatcaatatcgtgaaaatggccatactgcccaaggtaa

SEQ ID NO: 59340 - DNA, 120 bp, synthetic construct
  source 1..120: mol_type = other DNA
aaaaaacatgaaaaaatgctcaccatcactggccaccagagaaatgcaaatcaaaaccacaatgagataccatctcacaccagttagaatggcaatcattaaaaaatcaggaaacaacag

SEQ ID NO: 59341 - DNA, 120 bp, synthetic construct
  source 1..120: mol_type = other DNA
agcaacagaacaaagctggatggagaatgactttgacaagctgacagaagtagacttcagaaggtcggtaataacaaacttcaagctaaagaaggatgttcaaacccatcacaaggaagc

SEQ ID NO: 59342 - DNA, 120 bp, synthetic construct
  source 1..120: mol_type = other DNA
aatgttctaatcaagattagatatatgcagctgggcatggtggatcacgcctgtaatcccagcactttgggccaaggtgggtggattgcttgaggtcaggagtttgagaccagcctgacc

SEQ ID NO: 59343 - DNA, 120 bp, synthetic construct
  source 1..120: mol_type = other DNA
atggtatttctagttctagatccctgaggaattgccacactgacttccacaatggttgaactagtttacagtcccaccaacagtgtaaaagtgttcctatttctccacatcttctccagc

SEQ ID NO: 59344 - DNA, 120 bp, synthetic construct
  source 1..120: mol_type = other DNA
ctccagctttgttcttttggcttaggattgacttggcgatgcaggctcttttttggttccatatgaactttaaactagttttttccaattctgtgaagaaagtcattggtagcttgatgg

SEQ ID NO: 59345 - DNA, 120 bp, synthetic construct
  source 1..120: mol_type = other DNA
gggaggattccctctttttctattgattggaatagtttcagaaggaatggtaccagttcctccttgtacctctggtagaattcggctgtgaatccatctggtcctagactctttttggtt

SEQ ID NO: 59346 - DNA, 120 bp, synthetic construct; identical to SEQ ID NO: 7062
  source 1..120: mol_type = other DNA

SEQ ID NO: 59347 - DNA, 120 bp, synthetic construct
  source 1..120: mol_type = other DNA
ccgagattgtgccactgccctccagcttggacaatagagcaagatttcgtctcaaaaaaaaagagaaaaagaaaaccattattttgcaatagccaatgttataatctacacaggcacaga

SEQ ID NO: 59348 - DNA, 120 bp, synthetic construct
  source 1..120: mol_type = other DNA
cacacctgtaattccagcactttgggaggccaaggcgggtggatcacctgaggtcaggcattcgagaacagcctggcccacatggcgaaaccccatctctactaaaaatacaaaaattag

SEQ ID NO: 59349 - DNA, 120 bp, synthetic construct
  source 1..120: mol_type = other DNA
caggtgtgagccaccttgcctggccagaatgaattatttatacatacgacaacctgtgtgaccctcattttactgagttaaagaagccattctcaaaaggttatgtattctgtgcttcca

SEQ ID NO: 59350 - DNA, 120 bp, synthetic construct
  source 1..120: mol_type = other DNA
gagattgtgccattgcgctccagcctgggtgacagggcaggactccatctcaaaaaaaaaaagaagaaagaaagaaagaaaagaaagaaggaaggaaggaaggaaggaaggaaggaagga

SEQ ID NO: 59351 - DNA, 120 bp, synthetic construct; identical to SEQ ID NO: 11868
  source 1..120: mol_type = other DNA

SEQ ID NO: 59352 - DNA, 120 bp, synthetic construct
  source 1..120: mol_type = other DNA
ccttgccttagtggtgaacaaggactaaacacagacaatgggtgaaacacagacgctaattcacataacagagagtaggcaaccttaagaatgaattgatgcagactcctatagaattcc

SEQ ID NO: 59353 - DNA, 120 bp, synthetic construct
  source 1..120: mol_type = other DNA
gcctctcttgagtttctgatcctagaaacagcttgctataggtccttaaggcaaatgccaggagtcaaagaaactgtagaacagtctcaggatgtaaacaataaaatcactgaccaagga

SEQ ID NO: 59354 - DNA, 120 bp, synthetic construct
  source 1..120: mol_type = other DNA
actgatttgtcaactcttccttattcctggtttctacatttcagttttatctagctccaggtaacttcataaatctgtgttctgatatgtttacaggtcaaatggcatcacaacccaaac

SEQ ID NO: 59355 - DNA, 120 bp, synthetic construct
  source 1..120: mol_type = other DNA
aggtcaggggatgggggataaaggctgggaggtttcagagaagatgcgctatttatacaatctaggagaatgaaagaaatttcacaattggctagagagggaaaagggaaaacactaaaa

SEQ ID NO: 59356 - DNA, 120 bp, synthetic construct
  source 1..120: mol_type = other DNA
acatagaaataggcttatcatttgagacacatgtctgtggtctaggcaaaacatctcctcattctagtttttgctggaccacatcatttccccattgttctctggaaggcagttctagct

SEQ ID NO: 59357 - DNA, 120 bp, synthetic construct
  source 1..120: mol_type = other DNA
aagatcacagggatagggtggggccctagagaattccataattcatctggtgccttctctccaatattgttccataccacaatcactttgtgcagatttggtacagcctgataatgattt

SEQ ID NO: 59358 - DNA, 120 bp, synthetic construct
  source 1..120: mol_type = other DNA
tctggggtagcgggtatgaagagaatctgtttataaaaagaataaatcagaataagcaagggccagattatgtgggacctctgaccctcattagagtctggattttactatacgccagat

SEQ ID NO: 59359 - DNA, 120 bp, synthetic construct
  source 1..120: mol_type = other DNA
cacaggccaccagaagcattttaggtatggtccttgttttgtactttggcaactgagtcttcatagccatttcagcacatcatggatctattttactactctattcaagtgcaaagccag

SEQ ID NO: 59360 - DNA, 120 bp, synthetic construct
  source 1..120: mol_type = other DNA
tccatgataggacagtatgctcaggcatgtgcaagcaaaggaagagtttgttcacaaagacaaggagaagatcattgtcattcagcagctctcacttttcaacagtccagatttgaaaag

SEQ ID NO: 59361 - DNA, 120 bp, synthetic construct
  source 1..120: mol_type = other DNA
gtacgaaaagcaaggactttatagactgtagtgcaagtggcacactgtactttgacaatagctgaggtctagaactccattgtaggcccattagaaacagcttcagtacaatttggagaa

SEQ ID NO: 59362 - DNA, 120 bp, synthetic construct
  source 1..120: mol_type = other DNA
atgattttgtcttccaagggacagttggcaaagtctggagatatctctgattgtcacaactagaggggagatactattgctatctagtgggtagatgttagggatgctgctaaatatcct

SEQ ID NO: 59363 - DNA, 120 bp, synthetic construct
  source 1..120: mol_type = other DNA
aatttaattttaaaacattttcaacacctcagaaagaaaccccagacccattagcagccaatccctattttcacttcccttaacccctgacctccatcccagctccaggaaaccactaat

SEQ ID NO: 59364 - DNA, 120 bp, synthetic construct
  source 1..120: mol_type = other DNA
aaggtagaaaagcaatgagcaacgtggtgttgtacaatgagaagctgtcatttttattttgctgccacagatggcagcagaacgataactattctgccatttcactacgagatttgcctc

SEQ ID NO: 59365 - DNA, 120 bp, synthetic construct
  source 1..120: mol_type = other DNA
gaaatgtgacctcaaacacagaccacacaggccccctttctacatgcagttctgtggccaagccacttgataaacaaaagatgtctcagatctctgattttttttcacatcttttcaaag

SEQ ID NO: 59366 - DNA, 120 bp, synthetic construct
  source 1..120: mol_type = other DNA
tatggccaattacagtgatatgaatggatcatttagatgactacaatctggatcaactgtgttacggactagttattagggtggaagtgatccatcttttctattgacaatagaatggct

SEQ ID NO: 59367 - DNA, 120 bp, synthetic construct
  source 1..120: mol_type = other DNA
gtgagagaggccttattcctaagaggaacatatccatgactcataggatccaaggagtcaacgcatcctaagaggaaagcctagaaatagaaaagcatttttagctcagtacagtgccat

SEQ ID NO: 59368 - DNA, 120 bp, synthetic construct
  source 1..120: mol_type = other DNA
agccaccgcgccctgcccgccacattgtattttctatgtcttctgaatagtctctatatccagctttgttctggtctacaagaatattcaactctatacatactgacttcattctgtaac

SEQ ID NO: 59369 - DNA, 120 bp, synthetic construct
  source 1..120: mol_type = other DNA
aatgaggtagatgattaatgacttccagtgaggttggtgctatattttggttttcatctttctattgagggttgtattagtctgttttcacactgctataaagaaataccccagactggg

SEQ ID NO: 59370 - DNA, 120 bp, synthetic construct
  source 1..120: mol_type = other DNA
atcctctgaaatgtagacagaggttcctaaaccttaattcttgacttctgtgcacccataggctcaacaccatgtataagctgccaaggcttggggcttgcatcctctgaaacaatgtcc

SEQ ID NO: 59371 - DNA, 120 bp, synthetic construct
  source 1..120: mol_type = other DNA
gaatacagaatgggtagtagaagaaggtagtgatcaataccagctatgaccacataagcagttgcagaaattaggactgtaattgtcatgagttttcctccttattttgttaagaatatg

SEQ ID NO: 59372 - DNA, 120 bp, synthetic construct
  source 1..120: mol_type = other DNA
tccttcccaaggctagtttggcttacattcaggaatggacgtttagaggttagaagcaagacggagttggttaggtctgatatctttcactgtcataatttcctcagttataatttttgc

SEQ ID NO: 59373 - DNA, 120 bp, synthetic construct
  source 1..120: mol_type = other DNA
ttgtattcttatgtacctttacaactccttttttaaccagcagttcccagggcgctcaatttgaagcatctaaaagggtcaaacagggttgcagataaatgccagggttgattactgagg

SEQ ID NO: 59374 - DNA, 120 bp, synthetic construct
  source 1..120: mol_type = other DNA
tttggtcattatgctctttaagactgaaagatgtgaagacatcaccatcactttttgaaaggagaaggtcctcatgggaatacctatcatatatcttgggggatggggagtgggggaatt

SEQ ID NO: 59375 - DNA, 120 bp, synthetic construct
  source 1..120: mol_type = other DNA
cactacaaaaagaaaaatactaatactggagcattttgctgtgtctccttacctcgagtgcagtagattgcagtagggccagccgatttatttccctgcagcttagttatcataaaacgg

SEQ ID NO: 59376 - DNA, 120 bp, synthetic construct; identical to SEQ ID NO: 31597
  source 1..120: mol_type = other DNA

SEQ ID NO: 59377 - DNA, 120 bp, synthetic construct; identical to SEQ ID NO: 28332
  source 1..120: mol_type = other DNA

SEQ ID NO: 59378 - DNA, 120 bp, synthetic construct
  source 1..120: mol_type = other DNA
ctgttttggtaccagtaccatgctgttttggttactgtagccttgtagtatagtttgaagtcaggtagcgtgatgcctccagctttgttcttttggcttaggagtgacttggcaatgcgg

SEQ ID NO: 59379 - DNA, 120 bp, synthetic construct
  source 1..120: mol_type = other DNA
gatgaagcccacttgatcatggtggataagctttttgatgtgctgctggattcggtttgccagtattttattgaggatttttgcatcaatgttcatcaaggatattggtctacaattctc

SEQ ID NO: 59380 - DNA, 120 bp, synthetic construct
  source 1..120: mol_type = other DNA
tttgattgcactgtggtctgagagatagtctgttataatttctgttcttttacatttgctgaggagagctttacttccaagtatgtggtcaattttggaataggtgtggtgtggtgctga

SEQ ID NO: 59381 - DNA, 120 bp, synthetic construct
  source 1..120: mol_type = other DNA
agtgagctgagatggctccactgcattccagcctgggcaacagagtgagactctgtctcaaaaaaaagaaaaaaaatctcatgtatcccatgtgtatatacacctactatgtacccacaa

SEQ ID NO: 59382 - DNA, 120 bp, synthetic construct; identical to SEQ ID NO: 28334
  source 1..120: mol_type = other DNA

SEQ ID NO: 59383 - DNA, 120 bp, synthetic construct
  source 1..120: mol_type = other DNA
tgaaattgtggcaataatccatagcttaccaaccaaaaagagtccaggaccagatggattcacagccgaattctaccagaggtacaaggaggaactggtaccattccttctgaaactatt

SEQ ID NO: 59384 - DNA, 120 bp, synthetic construct
  source 1..120: mol_type = other DNA
gtgaaggacctcttcaaggagaactacaaaacactgctcaaggaaataaaagaggatacaaacaaatggaagaacattccatgctcatgggtaggaagaatcaatatcgtgaaaatggcc

SEQ ID NO: 59385 - DNA, 120 bp, synthetic construct
  source 1..120: mol_type = other DNA
aaacaaacaaccccatcaaaaagtgggcgaaggacatgaacagacacttctctaaagaagacatttatgcagccaaaaaacacatgaaaaaatgctcatcatcactggccatcagagaaa

SEQ ID NO: 59386 - DNA, 120 bp, synthetic construct; identical to SEQ ID NO: 28335
  source 1..120: mol_type = other DNA

SEQ ID NO: 59387 - DNA, 120 bp, synthetic construct; identical to SEQ ID NO: 28012
  source 1..120: mol_type = other DNA

SEQ ID NO: 59388 - DNA, 120 bp, synthetic construct; identical to SEQ ID NO: 28013
  source 1..120: mol_type = other DNA

SEQ ID NO: 59389 - DNA, 120 bp, synthetic construct; identical to SEQ ID NO: 28014
  source 1..120: mol_type = other DNA

SEQ ID NO: 59390 - DNA, 120 bp, synthetic construct; identical to SEQ ID NO: 28015
  source 1..120: mol_type = other DNA

SEQ ID NO: 59391 - DNA, 120 bp, synthetic construct
  source 1..120: mol_type = other DNA
caaacctgcacattgtgcacatgtaccctaaaacgaagaagaaggaagaaaggaagaaaggaagaaaggaagaagaagaagaaggaagaagaagaagaagaaggaagaagaagaggaagg

SEQ ID NO: 59392 - DNA, 120 bp, synthetic construct; identical to SEQ ID NO: 28016
  source 1..120: mol_type = other DNA

SEQ ID NO: 59393 - DNA, 120 bp, synthetic construct; identical to SEQ ID NO: 28017
  source 1..120: mol_type = other DNA

SEQ ID NO: 59394 - DNA, 120 bp, synthetic construct
  source 1..120: mol_type = other DNA
cttggataaaacagactttaaaccaacaaacatcaaaagagacaaagaaggccattacataatggtaaagggatcaattcaacaagaagaactaactatcctaaatatatatgcacccaa

SEQ ID NO: 59395 - DNA, 120 bp, synthetic construct
  source 1..120: mol_type = other DNA
gaagtgttgttgaattttgtcaaaggccttttctgcatctattgagataatcatgtggtttttgtctttggttctgtttatatgctggattacgtttattgattttcgtatgttgaacca

SEQ ID NO: 59396 - DNA, 120 bp, synthetic construct
  source 1..120: mol_type = other DNA
aactgcaaggaggcagcgaggctgggggaggggtgcccgccattgcccaggcttgattaggtaaacaaagcagccaggaagctccaactgggtggagcccaccacagctcaaggaggccg

SEQ ID NO: 59397 - DNA, 120 bp, synthetic construct
  source 1..120: mol_type = other DNA
actatgtgaaaagaccaaatctacgactgattggtgtacctgaaagtgatggggagaatggaaccaagttggaaaacactctgcaggatattatccaggagaacttccccaatctagcaa

SEQ ID NO: 59398 - DNA, 120 bp, synthetic construct
  source 1..120: mol_type = other DNA
tcccacacattaataatgggagactttaacaccccactgtcaacattagacagatcaacgagacagaaagtcaacacggatacccaggaattgaactcagctctgcaccaagcagaccta

SEQ ID NO: 59399 - DNA, 120 bp, synthetic construct
  source 1..120: mol_type = other DNA
cagagggattcacagccgaattctaccataggtacaaggaggaactggtaccattccttctgaaaccattccaatcaatagaaaaagagggaatcctccctaactcattttataaggcca

SEQ ID NO: 59400 - DNA, 120 bp, synthetic construct
  source 1..120: mol_type = other DNA
tacaagggatgtgaaggacctcttcaaggagaactacaaaccactgctcaattaaataaaagaggacagaaacaaatggaagaacattccatgctcatgggtaggaagaatcaatattgt

SEQ ID NO: 59401 - DNA, 120 bp, synthetic construct
  source 1..120: mol_type = other DNA
catcagagagatgcaaatcaaaaccatgatgcgataccatctcacaccagttagaatggcgatcattaaaaagtcaggaaacaacaggtgctggagaggatgtagagaaataggaacact

SEQ ID NO: 59402 - DNA, 120 bp, synthetic construct; identical to SEQ ID NO: 59400
  source 1..120: mol_type = other DNA

SEQ ID NO: 59403 - DNA, 120 bp, synthetic construct; identical to SEQ ID NO: 28018
  source 1..120: mol_type = other DNA

SEQ ID NO: 59404 - DNA, 120 bp, synthetic construct; identical to SEQ ID NO: 28019
  source 1..120: mol_type = other DNA

SEQ ID NO: 59405 - DNA, 120 bp, synthetic construct
  source 1..120: mol_type = other DNA
aggtgtttttactgatccggagtgaattaacaaagagtctggcacctgttaaagtttgacaagaaacatttacaatgtcttctctccgaagcctgctacctggagccttcatctgcataa

SEQ ID NO: 59406 - DNA, 120 bp, synthetic construct
  source 1..120: mol_type = other DNA
tacaaccatctgatctttgacaaatctgacaaaaacaagaaatgaggaaagcgttccctatttaacaaatggtgctgggaaaactggctagccatatgtagaaagctgaaactggatccc

SEQ ID NO: 59407 - DNA, 120 bp, synthetic construct
  source 1..120: mol_type = other DNA
gaaattggaaatatcattctcagtaaactatcgcaaggacaagaaaccaaacaccacatgttctcactcatagatgggaatcgaacaatgagaacacatggacacaggaagggggtcatc

SEQ ID NO: 59408 - DNA, 120 bp, synthetic construct; identical to SEQ ID NO: 28008
  source 1..120: mol_type = other DNA

SEQ ID NO: 59409 - DNA, 120 bp, synthetic construct
  source 1..120: mol_type = other DNA
gtgatttttatacgttgattttgtatcctgagactttgctgaagttgcttatcagcttaaggagattttgggctgagacaatggggttttctagatatacaatcatgtcatctgcaaaca

SEQ ID NO: 59410 - DNA, 120 bp, synthetic construct
  source 1..120: mol_type = other DNA
acatcctctccagcacctgttgtttcctggctttttaatgattgccattctaagtggtgtgagatgatatctcattgtggttttgatttgcatttctctgatggccagtgatggtgagca

SEQ ID NO: 59411 - DNA, 120 bp, synthetic construct; identical to SEQ ID NO: 28021
  source 1..120: mol_type = other DNA

SEQ ID NO: 59412 - DNA, 120 bp, synthetic construct
  source 1..120: mol_type = other DNA
aaatgtggcacatatacaccatggaatactatatacagccataaaaatgatgagttcatgtcctttgtagagacatggatgaaattggaaatatcattctcagtaaactatcgcaaggac

SEQ ID NO: 59413 - DNA, 120 bp, synthetic construct
  source 1..120: mol_type = other DNA
taactcattttatgaggccagcatcatcctgataccaaagcctggcagagacacaaccaaaaaagagaatttcagaccaatatccctgatgaatatcgaggcaaaaatcctcaataaaat

SEQ ID NO: 59414 - DNA, 120 bp, synthetic construct
  source 1..120: mol_type = other DNA
caatctactcatctgacaaagggctaatatccagaatctaaaatgaactcaaacaaattgacaagaaaaaaacaaccccatcaaaaattgggcgaaggatatgaacagacacttctcaaa

SEQ ID NO: 59415 - DNA, 120 bp, synthetic construct; identical to SEQ ID NO: 28022
  source 1..120: mol_type = other DNA

SEQ ID NO: 59416 - DNA, 120 bp, synthetic construct
  source 1..120: mol_type = other DNA
caaacattaccaatatgataaatgaaatagaattatataaatattaaaatgattataatagggtgagcgcggtggctcacgcgtgttatcccagctctttgggaggccgaggcgggcgga

SEQ ID NO: 59417 - DNA, 120 bp, synthetic construct
  source 1..120: mol_type = other DNA
atatggaaccaaaaaaaagcatgcatagccaaagcaagactaagcaaaaagcacaaatctgtaaccaatagcaaagacttggaaccaacccaaatgtccaacaatgatagactgggttaa

SEQ ID NO: 59418 - DNA, 120 bp, synthetic construct
  source 1..120: mol_type = other DNA
ccactgcactggcccctccccttctcttcccttccctgatctgcccttctcctctcctctcctttccttttttctttctctctcctttattctttctttctctatttatttatatttttt

SEQ ID NO: 59419 - DNA, 120 bp, synthetic construct
  source 1..120: mol_type = other DNA
tgtaaactagttcaaccattgtggaagtcagtgtggtgattcctcaatgatctacaactagaaataccatttgactcagcaatcgcattactgggtatatacccaaatgattataaatca

SEQ ID NO: 59420 - DNA, 120 bp, synthetic construct
  source 1..120: mol_type = other DNA
ttttgaaaaacaatgtgttgggtaaataattactgtaacctgataaatactagtatcaaaatatagatgaggtcatgtcctttgtagggacatggatgaagctggaaaccatcattctca

SEQ ID NO: 59421 - DNA, 120 bp, synthetic construct
  source 1..120: mol_type = other DNA
ggcctcaagctacatccatgttgctgcaaagaacatgactttgttcttcttcatggctgcatagtagtccatggtgtatatgaaccacattttctttatgcaatcccatgttgatgggaa

SEQ ID NO: 59422 - DNA, 120 bp, synthetic construct; identical to SEQ ID NO: 28027
  source 1..120: mol_type = other DNA

SEQ ID NO: 59423 - DNA, 120 bp, synthetic construct
  source 1..120: mol_type = other DNA
ttataatcctctgggtatatacccagtaatgggatggctgggtcaaatggtatatatacaccatggactactacgcagccataaaaaatgatgagttcacgtcctttgtaggaacatgga

SEQ ID NO: 59424 - DNA, 120 bp, synthetic construct
  source 1..120: mol_type = other DNA
agaccagggcctattgtagggtggggggaggggggagggttagcattaagggatatacctaatgtaaatgatgagttaatgggtgcactacaccaacatggcatatgtatacatatgtaa

SEQ ID NO: 59425 - DNA, 120 bp, synthetic construct; identical to SEQ ID NO: 28028
  source 1..120: mol_type = other DNA

SEQ ID NO: 59426 - DNA, 120 bp, synthetic construct
  source 1..120: mol_type = other DNA
attgcttttggtgttttggacatgaagtccttgcccacgcctatgtcctgaatggtaatgcctaggttttcttctagggtttttatggttttaggtctaacatttaagtctctaatccat

SEQ ID NO: 59427 - DNA, 120 bp, synthetic construct
  source 1..120: mol_type = other DNA
tcactcacttggataccgacagagctcaattccttgctagctcttggctggaggctacattttctcttccttccttccttccttccttccttccttccttccttccttccttcctttctt

SEQ ID NO: 59428 - DNA, 120 bp, synthetic construct; identical to SEQ ID NO: 28036
  source 1..120: mol_type = other DNA

SEQ ID NO: 59429 - DNA, 120 bp, synthetic construct; identical to SEQ ID NO: 28037
  source 1..120: mol_type = other DNA

SEQ ID NO: 59430 - DNA, 120 bp, synthetic construct; identical to SEQ ID NO: 28038
  source 1..120: mol_type = other DNA

SEQ ID NO: 59431 - DNA, 120 bp, synthetic construct; identical to SEQ ID NO: 28039
  source 1..120: mol_type = other DNA

SEQ ID NO: 59432 - DNA, 120 bp, synthetic construct; identical to SEQ ID NO: 28040
  source 1..120: mol_type = other DNA

SEQ ID NO: 59433 - DNA, 120 bp, synthetic construct; identical to SEQ ID NO: 28041
  source 1..120: mol_type = other DNA

SEQ ID NO: 59434 - DNA, 120 bp, synthetic construct; identical to SEQ ID NO: 28042
  source 1..120: mol_type = other DNA

SEQ ID NO: 59435 - DNA, 120 bp, synthetic construct
  source 1..120: mol_type = other DNA
ccctatgttaaatttcagaatgattgattcaaaaaaaccccattgtctcagcccaaaacctccttaagctgacaagcaacttcagcaaagtctcaggatgcaaaatcaatgtacaaaaat

SEQ ID NO: 59436 - DNA, 120 bp, synthetic construct
  source 1..120: mol_type = other DNA
atgtctaaaacaccaaaagcaatggcaacaaaagccaaaattgacaaatgggatctaattaaactaaagagcttctgcacagcaaaagaaactaccatcagagtgaacaggcaagcaaca

SEQ ID NO: 59437 - DNA, 120 bp, synthetic construct
  source 1..120: mol_type = other DNA
tgttctcactcataggtgggaattgaacaatgagaacacatggacacaggaaggggaacatcacactctggggactgttgtggggtggggggacgggggagggatagcattgggagatat

SEQ ID NO: 59438 - DNA, 120 bp, synthetic construct; identical to SEQ ID NO: 28043
  source 1..120: mol_type = other DNA

SEQ ID NO: 59439 - DNA, 120 bp, synthetic construct
  source 1..120: mol_type = other DNA
acctctacgcaaacaaactagaaaatctagaagaaatggataaattcctccacacatacaccctcccaagactaaaccaggaagaagttgaatctctgaatagaccaataacaggctctg

SEQ ID NO: 59440 - DNA, 120 bp, synthetic construct
  source 1..120: mol_type = other DNA
tcaccactcctattcaacatagtgttggaagtcctggtcagggcaattaggcaggagaaggaaatcaagggtattcaattcggaaaagaggaagtcaaattgtccctgtttgcagatgac

SEQ ID NO: 59441 - DNA, 120 bp, synthetic construct
  source 1..120: mol_type = other DNA
tggtagtttcttttgctgtgcagaagctctttagtttaattagatcccatttgtcaattttggcttttgttgccattgcttttggtgttttagacatgaagtccttgcccatgcctatgt

SEQ ID NO: 59442 - DNA, 120 bp, synthetic construct
  source 1..120: mol_type = other DNA
ttataaagtctgctgggataacatatgatatactgggggcttaatgcctcagctcatatgtttttccaacctgactttctcctcaggaagaatttttctgacagcttctcccagtcaacc

SEQ ID NO: 59443 - DNA, 120 bp, synthetic construct
  source 1..120: mol_type = other DNA
tttcctgactttttaatgattgccattctaactggtgtgagatgacaaatcatgggtgaactcccattcacaattgcttcaaagagaataaaatacctaggaatccaacttacaagggat

SEQ ID NO: 59444 - DNA, 120 bp, synthetic construct
  source 1..120: mol_type = other DNA
tcatcactggccatcagagaaatgcaaatcaaaaccactatgagatactatatctttctgatcagggagaaacctcaaggcaaaatggattcagattccagacttacctcttatctcctt

SEQ ID NO: 59445 - DNA, 120 bp, synthetic construct
  source 1..120: mol_type = other DNA
aaagagcttctgcacagcaaaagaaacgatcatcacagtgaacaggcaacccacagaatgggagaaatttttctcaatctatccatctgacaaagggataatatccagaatctacaagga

SEQ ID NO: 59446 - DNA, 120 bp, synthetic construct; identical to SEQ ID NO: 28044
  source 1..120: mol_type = other DNA

SEQ ID NO: 59447 - DNA, 120 bp, synthetic construct; identical to SEQ ID NO: 28045
  source 1..120: mol_type = other DNA

SEQ ID NO: 59448 - DNA, 120 bp, synthetic construct; identical to SEQ ID NO: 28046
  source 1..120: mol_type = other DNA

SEQ ID NO: 59449 - DNA, 120 bp, synthetic construct
  source 1..120: mol_type = other DNA
atcacattgtggttttggtttgcatttctctgacggccagtgatggtgagcattttttcatgtgtttttcggctgcatgaatgtcttcttttgagaagtgtctgttcatgtccttcgccc

SEQ ID NO: 59450 - DNA, 120 bp, synthetic construct
  source 1..120: mol_type = other DNA
cctctctgtttgtctgttattggtgtataagaatgcttgtgatttttgtacattgatcttgtatcctgagactttgctgaagttgtttatcagctttaggagattttgggctgagacaat

SEQ ID NO: 59451 - DNA, 120 bp, synthetic construct
  source 1..120: mol_type = other DNA
tttttattgtgtctatttgattcttctctttttttctttattagtcttgctagcagtctctcaattttgttgatcgtttcaaaaaaccagctcctggattcgttaattttttgaagggtt

SEQ ID NO: 59452 - DNA, 120 bp, synthetic construct
  source 1..120: mol_type = other DNA
tcttgactctttatccaatttgccagtctgtgtcttttaattggaccatttagtccatttacatttaaagttaatattgttatgtgtgaatttgatcctgtcattatgatgttagctggt

SEQ ID NO: 59453 - DNA, 120 bp, synthetic construct; identical to SEQ ID NO: 28009
  source 1..120: mol_type = other DNA

SEQ ID NO: 59454 - DNA, 120 bp, synthetic construct
  source 1..120: mol_type = other DNA
ccctggaactctggcccaaggccttctcggcttagcaactgaagactgatgctgcccaattgcctcagaagcctcctggaccatcacagatgctttgggtaattcttacagtggagggta

SEQ ID NO: 59455 - DNA, 120 bp, synthetic construct
  source 1..120: mol_type = other DNA
taataggatgtcctgggtcctcccaattcttagtcctttaatacctgtttttctccttcccttatttggactttgtgtcttccatttcatttctcaattcatataaaaccatatccaggt

SEQ ID NO: 59456 - DNA, 120 bp, synthetic construct
  source 1..120: mol_type = other DNA
ttcctcaatggttgaactagtttacagtcccaccaacagtgtaaaaattctccacatcctctccagtacctgttgtttcctgactttttaatgattgccattctaactggtgtgagatgg

SEQ ID NO: 59457 - DNA, 120 bp, synthetic construct; identical to SEQ ID NO: 28010
  source 1..120: mol_type = other DNA

SEQ ID NO: 59458 - DNA, 120 bp, synthetic construct
  source 1..120: mol_type = other DNA
tgggtcaaatggtaattctagttgtagatccctgaggaatcgccacactgatacctacaatggttgaactagtttacaatcccaccaacagagtaaaagtgttcctatttctccacatcc

SEQ ID NO: 59459 - DNA, 120 bp, synthetic construct
  source 1..120: mol_type = other DNA
atgtgggctcttttttggttccatatgaactttaaagtagttttttccaattctgtgaagaaagtcattggtagcttgatggggatggcattgaatctataaattacctcgggcagtatg

SEQ ID NO: 59460 - DNA, 120 bp, synthetic construct
  source 1..120: mol_type = other DNA
gccttgcatcccagggatgaagcccacttgatcatggtggataagctttttgatgtgctgctggattcggtttgccagtattttattgaggattttcacattgatgttcatcagggatat

SEQ ID NO: 59461 - DNA, 120 bp, synthetic construct
  source 1..120: mol_type = other DNA
attattaatattattattatactttaagttttagggtacatgtgcacaatgtgcaggttagttacatatgtatacatgcgacatgctggtgcgctgcacccactaactcgtcatccagca

SEQ ID NO: 59462 - DNA, 120 bp, synthetic construct
  source 1..120: mol_type = other DNA
ttgtagattctggatattagccctttgtcagatgagtaggttgcgaaaattttctcccattttgtgggttgcttgttcactctgatggtagtttcttttgctgtgaagaagctctttagt

SEQ ID NO: 59463 - DNA, 120 bp, synthetic construct
  source 1..120: mol_type = other DNA
aactcctgaccttgtgatccgcccctcgacctcccaaagtgctggtgttaaaggcatgagccactatgcccagcttttttattactttttgttgaatttaaggttatttgtctttttcat

SEQ ID NO: 59464 - DNA, 120 bp, synthetic construct
  source 1..120: mol_type = other DNA
attcacaatagcaaagacttggaaccaacccaaatgtccaacaatgatagactggattaagaaaatgtggcacatatacaccacggaatactatgcagccatgaaaaatgatgagttcat

SEQ ID NO: 59465 - DNA, 120 bp, synthetic construct
  source 1..120: mol_type = other DNA
cattccaaccacacagaatagtaatatgtataccaaataagccacttaaatcttacttaataagaataagaaaacttgggccgggcgcggtggctcacgcctgtaatcccagcactttgg

SEQ ID NO: 59466 - DNA, 120 bp, synthetic construct; identical to SEQ ID NO: 28470
  source 1..120: mol_type = other DNA

SEQ ID NO: 59467 - DNA, 120 bp, synthetic construct; identical to SEQ ID NO: 28471
  source 1..120: mol_type = other DNA

SEQ ID NO: 59468 - DNA, 120 bp, synthetic construct
  source 1..120: mol_type = other DNA
ctatagcaactctagtctttttttttttttttaatttttattttttgagacagagtcttcccgttgcccaggctggggtgcaatggcacaatctcggctcactacaacctcctcctctca

SEQ ID NO: 59469 - DNA, 120 bp, synthetic construct; identical to SEQ ID NO: 14028
  source 1..120: mol_type = other DNA

SEQ ID NO: 59470 - DNA, 120 bp, synthetic construct
  source 1..120: mol_type = other DNA
gtagctgagattacaggcacacaccaccatgcccagctaatttttgtatgtttagtagagatggggtttcaccatgttgatcaggctgatcttgaactcctgacctcatgatctgcctgc

SEQ ID NO: 59471 - DNA, 120 bp, synthetic construct
  source 1..120: mol_type = other DNA
attctgatgtgctccaagcgtggtgaccctccaggtgattctgatgtgctccaagcgtggtgaccctccaggtgattctgatgtgctccaagcgtggtgaccctccaggtgattctgatg

SEQ ID NO: 59472 - DNA, 120 bp, synthetic construct; identical to SEQ ID NO: 27468
  source 1..120: mol_type = other DNA

SEQ ID NO: 59473 - DNA, 120 bp, synthetic construct
  source 1..120: mol_type = other DNA
tcagagtgtatggcaaggattattggacttaggctgtgtggctctggatgagttactgaatctctctctttttttttttttattatactttaagttctagggtacatgtgcacattgtgc

SEQ ID NO: 59474 - DNA, 120 bp, synthetic construct
  source 1..120: mol_type = other DNA
ctggatattagccctttgtcagatgagtaggttgcaaaaattttctcccattctgtaggttgcctgttcactctgatggtagtttcttttgctgtgcagaagctcttgagtttcattaga

SEQ ID NO: 59475 - DNA, 120 bp, synthetic construct
  source 1..120: mol_type = other DNA
tatcagcttaaggagcttttgggctgagacaatggggttttctagatatacaatcatgtcatctgcaaacagggacaatttcacttcctcttttcctaattgaataccctttatttcctt

SEQ ID NO: 59476 - DNA, 120 bp, synthetic construct
  source 1..120: mol_type = other DNA
tatttgcatagaggtgtttgtagtactctctgatggtactttgtatttctgtgggatcggtggtgatatcccctttatcattttttattgtgtctatttgattcttctctctttttttct

SEQ ID NO: 59477 - DNA, 120 bp, synthetic construct
  source 1..120: mol_type = other DNA
gaatctaagtctctttgtaggtctctaagaacttgctttatgaatctgggtgctcctgtattgggtgcatatatatttaggatagttagctcttcttgttgaattgatccctttaccatt

SEQ ID NO: 59478 - DNA, 120 bp, synthetic construct
  source 1..120: mol_type = other DNA
tctttttattcttttttctctaaacttcccatcttgcttcatttctttcatttcattttccatcgctgataccctttcttccagttgatcgcatcggctcctgaggcttctgcattcttc

SEQ ID NO: 59479 - DNA, 120 bp, synthetic construct
  source 1..120: mol_type = other DNA
accctccgagccaggtgcgggatataatctcgtggtgcgccgttttttaagcccgtcggaaaagcgcagtatttgggtgtgagtgacccgattttccaggtgccatccgtcacccctttc

SEQ ID NO: 59480 - DNA, 120 bp, synthetic construct
  source 1..120: mol_type = other DNA
gactgcctcctcaagtgggtccctgacccctgacccccaagcagcctaactgggaggcaccccccagcaggggcacactgacacctcacacggccgggtactccaacagatctgcagctg

SEQ ID NO: 59481 - DNA, 120 bp, synthetic construct
  source 1..120: mol_type = other DNA
ggggccaatattcaacattcttaaagaaagaattttcaaccccgaatttcatatccagccaaactaagcttcataagtgaaggagaaataaaatactttacagacaagcaaatgctgaga

SEQ ID NO: 59482 - DNA, 120 bp, synthetic construct
  source 1..120: mol_type = other DNA
ttggaagaaaagccctcctcagcaaatgtaaaagaacagaaattataacaaactatgtctcagaccacagtgcaatcaaactagaactcaggattaagaatctcactcaaaaccgctcaa

SEQ ID NO: 59483 - DNA, 120 bp, synthetic construct
  source 1..120: mol_type = other DNA
ggccagcatcatcctgataccaaagccgggtagagacacaacaaaaaaagagaattttagaccaatatccttgatgaacattgatgcaaaaatcctcaataaaatactggcaaaccaaat

SEQ ID NO: 59484 - DNA, 120 bp, synthetic construct
  source 1..120: mol_type = other DNA
ttggaaaaaactacctgaaagttcatatggaaccaaaagagagcctgcatcgccaagtcaatcctaagccaaaagaacaaagctggaggcatcacactacctgacttcaaactatactac

SEQ ID NO: 59485 - DNA, 120 bp, synthetic construct
  source 1..120: mol_type = other DNA
agtgtggcgattcctcagggatctagaaccagaaataccatttgacccagccatcccattacttggtatatacccaaaggactataaatcatgctgctataaagacacatgcacacatat

SEQ ID NO: 59486 - DNA, 120 bp, synthetic construct; identical to SEQ ID NO: 27470
  source 1..120: mol_type = other DNA

SEQ ID NO: 59487 - DNA, 120 bp, synthetic construct; identical to SEQ ID NO: 27473
  source 1..120: mol_type = other DNA

SEQ ID NO: 59488 - DNA, 120 bp, synthetic construct
  source 1..120: mol_type = other DNA
tgaacatcagactccaagttcttcagttttgggacttggactggctctcattgctcctcagcttgcagacagcctattgtgggaccttgtgaccatataaattaatacttaaataaactc

SEQ ID NO: 59489 - DNA, 120 bp, synthetic construct
  source 1..120: mol_type = other DNA
ttgtttcctgactttttaatgattgccattctaactggtgtgagatggcatctcattgtggttttgatttgcatttctctgatggccagtgatggtgagcattttttcatgtgttttttg

SEQ ID NO: 59490 - DNA, 120 bp, synthetic construct
  source 1..120: mol_type = other DNA
gtgaactttaaagtagttttttccaattctgtgaagaaagtcactggtagcttgatggggatggcattgaatctgtaaattaccttgggcagtatggccattttcacgatattgattctt

SEQ ID NO: 59491 - DNA, 120 bp, synthetic construct
  source 1..120: mol_type = other DNA
gtagaatttggctgtgaatccatctggtcctggactctttttggttggtaagctattgatcattgccacaatttcagatcctgttattggtctattcagagattcaacttcttcctggtt

SEQ ID NO: 59492 - DNA, 120 bp, synthetic construct
  source 1..120: mol_type = other DNA
tttccatgtagttgagccgttttgagtgagattcttaatcctgagttctagtttgattgcactgtggtctgagagatagtttgttataatttctgttcttttacatttgctgaggagagc

SEQ ID NO: 59493 - DNA, 120 bp, synthetic construct
  source 1..120: mol_type = other DNA
ttatttctccttcacttatgaagcttagtttggctggatatgaaattcggggttgaaaattcttttctttaagaatgttgaatattggcccccactctcttctggcttgtagggtttctg

SEQ ID NO: 59494 - DNA, 120 bp, synthetic construct
  source 1..120: mol_type = other DNA
agacaggacactcagctgcaggtctgttggagtaccctgccgtgtgaagtgtcagtgtgcccctgctggggggtgcctcccagttaggctgcttgggggtcaggggtcagggacccactt

SEQ ID NO: 59495 - DNA, 120 bp, synthetic construct; identical to SEQ ID NO: 9137
  source 1..120: mol_type = other DNA

SEQ ID NO: 59496 - DNA, 120 bp, synthetic construct
  source 1..120: mol_type = other DNA
aacaagcaatatccttgggcaagttgtttaatctttggggccttatttttctcaagtagagaataacgaagctggatctcatgctccattcccatctcttccctaccccccattatttca

SEQ ID NO: 59497 - DNA, 120 bp, synthetic construct
  source 1..120: mol_type = other DNA
tttatttcagacaccccaaatgactgtctatctcatgtgattttaaggatgtctaaaggttccccagttgtgcaatatctacaggatcactgaatgccaagtccccagggaaaggaatga

SEQ ID NO: 59498 - DNA, 120 bp, synthetic construct
  source 1..120: mol_type = other DNA
gagtctcttccaggggtttttgaatgttcaattctagtaaatatcacagccaaagagttccaggcgaagtgcaatactttgattccatgttttaggaatgacacggataaacctggaaat

SEQ ID NO: 59499 - DNA, 120 bp, synthetic construct
  source 1..120: mol_type = other DNA
agaggtggtacatgtcactgcatatttgtcaaatgcaaaatactgttattctcattatagcacagtcttcagattgctttctctttgcccagatgccactctaccttgtccaccatggag

SEQ ID NO: 59500 - DNA, 120 bp, synthetic construct
  source 1..120: mol_type = other DNA
aagtagagcttgatacacagtacagttattgtcctgtctctggcctaacaaaatgcctaatcacatggttggtgatatgtgtttggagaaagatcagaaggtctaaactgagttttagag

SEQ ID NO: 59501 - DNA, 120 bp, synthetic construct
  source 1..120: mol_type = other DNA
aatgaggtatttgggctgcttcaaatggtggaaggagcatggcctgtttactgggagaatgggattctagtcctgattctgctaccaaactaagctaaaattatttaatctcctgtgtat

SEQ ID NO: 59502 - DNA, 120 bp, synthetic construct
  source 1..120: mol_type = other DNA
ccatgggccaaatttggcccgctgcctgttttttgtaaacaaagttttattagaacacagccagctcattcatttacatattgtttatggctactttactgctacaatggcagagttgag

SEQ ID NO: 59503 - DNA, 120 bp, synthetic construct
  source 1..120: mol_type = other DNA
cttagagggtaattcgagttatgtaccctttggaatttttccaaggtgtaatttgaatatcataggcagcaaggcagacctgtgactgtaagaaacacagctagtgagtgaacctggctg

SEQ ID NO: 59504 - DNA, 120 bp, synthetic construct
  source 1..120: mol_type = other DNA
acaggtcacattacagcccctgagaaatagcagctaacatagaaaagacttgagtacctacacagggtatgaaagaaaatataaagaagaattgtggtttcaggaagttgggaagccaat

SEQ ID NO: 59505 - DNA, 120 bp, synthetic construct
  source 1..120: mol_type = other DNA
gaaacataagaccctgaaaagagctcagaagacagactggctagggttctcggaaggaacaaaatggtgatcagtgtcttgaattttctttttgcctcataaatcccagacttagagatg

SEQ ID NO: 59506 - DNA, 120 bp, synthetic construct
  source 1..120: mol_type = other DNA
attacagacgtgagccactgcgcccggccaagaagatttttttaaaatcgacaaatctctagcaagattcacacaaaaaagaaaggaggggcagatgacaatatcagagatgaaacaggc

SEQ ID NO: 59507 - DNA, 120 bp, synthetic construct
  source 1..120: mol_type = other DNA
acaatagtaaaatcaaaagtcttggtagccaatttttagcatgagctccttgaggcgcaagaccagatgttctactctgccgtataccattggccagtctgagaaatctgggtattttgt

SEQ ID NO: 59508 - DNA, 120 bp, synthetic construct
  source 1..120: mol_type = other DNA
cctggatccaaggtttagaggcaaattctgctgcaagtttttctacactccaagcattataagatccaccattgtttaatcttgctaatctgggctcccagtaacctaaactcaagggaa

SEQ ID NO: 59509 - DNA, 120 bp, synthetic construct
  source 1..120: mol_type = other DNA
agaaaagcataaagagaaaaactgattcatagataggattgtcatgtatggtttcataggctgcatgctgcacaactgtagggggtaccattcacagaccatggtgctacaacttaccca

SEQ ID NO: 59510 - DNA, 120 bp, synthetic construct
  source 1..120: mol_type = other DNA
attcctgtgaccttttccctcctcaactcttggaagctggaaaatttcttatatgcacttgtccatggatcacaagtcatgaagaaggatgctttacacaggtttcccaattgacaggaa

SEQ ID NO: 59511 - DNA, 120 bp, synthetic construct
  source 1..120: mol_type = other DNA
tatcttcctcaaacacactgaaaaatgtctccagttttcctctctccaatgcaggtatttaggtttgcagatttagagacaccagccaatcctagcttctcagtctgtctgcaggctgat

SEQ ID NO: 59512 - DNA, 120 bp, synthetic construct
  source 1..120: mol_type = other DNA
ggcttgggagaaactgcatgttatgttgcaactgagttgggtcacacatttagcctgtgtggtgctgcaaatagttcataaattaggtgacatttttgtactccgtatatactttgggtc

SEQ ID NO: 59513 - DNA, 120 bp, synthetic construct
  source 1..120: mol_type = other DNA
acaaatatgggcagacaaagtaaactccagggattagagtcagcaaggagatatgcagcatgtcaccttaaggccttctaaattcagagaaagtttcaggcaaattaggaagtctaggag

SEQ ID NO: 59514 - DNA, 120 bp, synthetic construct
  source 1..120: mol_type = other DNA
ctctggaatgttaaggaaccggttttagttgtagctctgggtgtctcagaagcatctcatgtctaatcttgtgaatatctaagggcagaaatcactgtgacccagtgtgatttaattagg

SEQ ID NO: 59515 - DNA, 120 bp, synthetic construct
  source 1..120: mol_type = other DNA
tcaaataaatgccatcttctgtaaatgtaggcattctaattcatggccaatcattcaagtaatctttcctcctctccactgaataaatgtttctctctctgtcatctgaagagctgcatg

SEQ ID NO: 59516 - DNA, 120 bp, synthetic construct
  source 1..120: mol_type = other DNA
cttgattcttgttcataagaagcttttaagctcctgctgaaacagacatgcacatgggcatccacactacaaatctggagacaacaggtgctatatacaaagtctaagtgggttcagatg

SEQ ID NO: 59517 - DNA, 120 bp, synthetic construct
  source 1..120: mol_type = other DNA
aaaaccctcaacaaactaggcattgaaggaacatacttcaaactaataggagccatctatgacaaacctacagccaacatcatactgaatgagcaaaagctgaaagccttccccgtgaga

SEQ ID NO: 59518 - DNA, 120 bp, synthetic construct
  source 1..120: mol_type = other DNA
gccacacacttacaaccacctgaactttgacaaagtcaacaacaacagcaacaacaacaacaaaaaacaaggggaaaaggactcatatttaataaatggtgctggaatagccggctaccc

SEQ ID NO: 59519 - DNA, 120 bp, synthetic construct
  source 1..120: mol_type = other DNA
aaagctcccggctgaataaagcccttccttctttaacttggtgtctgaggggtttttgtctgtggcttgtcctgctacaatttgacctagcaattctattactgggtatatagccaaaaa

SEQ ID NO: 59520 - DNA, 120 bp, synthetic construct
  source 1..120: mol_type = other DNA
gaaatccagggctaaaacaaagattcagtatttgatttttttccttttgcctaaggctccagtatgtctcaatgcaacattgttacttatcctgtctttattcacaattgtgaggttttg

SEQ ID NO: 59521 - DNA, 120 bp, synthetic construct
  source 1..120: mol_type = other DNA
gtaattattcattaatcctggaaaacaaacaaatcacctatagctctcttgccacctgcacctttacaaccctctggtgcttgtggaaattcctccgaagatcttagcagtgctcaaaag

SEQ ID NO: 59522 - DNA, 120 bp, synthetic construct
  source 1..120: mol_type = other DNA
agtgccagagcttggggctatcaggtgacaatggtcagattaattagaaggtcacacttatgaaagtcactggatgggtgaatgttttgtaccctaaaagtagccactcttctcacattt

SEQ ID NO: 59523 - DNA, 120 bp, synthetic construct
  source 1..120: mol_type = other DNA
ataagccaggcacagaaagacaagtactgcaggatctcacttataatgtggaaactaaaaacattgagctcatagaagcagaaggtagaacagtggttaacaaagggatacagaggtgga

SEQ ID NO: 59524 - DNA, 120 bp, synthetic construct
  source 1..120: mol_type = other DNA
atctttccagactctgagcataacatgcaaactcacagaacacaagggagtgggtaaagcaactccgaatgccataaaagtgggttgtgagccttgaatggaatacaagattttgaaggt

SEQ ID NO: 59525 - DNA, 120 bp, synthetic construct
  source 1..120: mol_type = other DNA
gggtcatctaaggtaaagaagcaatcttggaattgacaaaggaaaaagaacaggccaacttgcaataggggaaccacactgttcttagtataatttgcccacaattatccccctgaattg

SEQ ID NO: 59526 - DNA, 120 bp, synthetic construct
  source 1..120: mol_type = other DNA
gggcatctgaccgagggctggggaaaggtttgtctgactgagttctggagagagagtcatatggctgagttctggagagaggtttgtctggctgaagtctagagaaagggttgtatggct

SEQ ID NO: 59527 - DNA, 120 bp, synthetic construct
  source 1..120: mol_type = other DNA
tcgtgtcttaatgagaaactggcttttcttcagtctactctttcctccatcctgtcttacttgtagagatttatgtctaactctaggaaactttgggtggccactctgctttccaggctt

SEQ ID NO: 59528 - DNA, 120 bp, synthetic construct
  source 1..120: mol_type = other DNA
tcctgattcaatgatgagtttcggaatgacctgattcctaatgctgcagccagtctgttctggtaatcatagtcagcatcactctcttcatcttcaggttctaaacgatcatgcattttc

SEQ ID NO: 59529 - DNA, 120 bp, synthetic construct
  source 1..120: mol_type = other DNA
caggacttgcattccagtctgacaaactccaaagctgttgctgaagcagcctttaaggcactgtacctgatgattgaagatgactgttgcaaaaaaccgaatagggcattttgataaaag

SEQ ID NO: 59530 - DNA, 120 bp, synthetic construct
  source 1..120: mol_type = other DNA
gacactgctgtaggcaatatttttatttacttatgtactaagcatagtaaaaaaccaaaggtatgatttctacaagggcagggctcatgtctacctcgattaccactcttagccttagta

SEQ ID NO: 59531 - DNA, 120 bp, synthetic construct
  source 1..120: mol_type = other DNA
gtcaatccatctttggattacttgccttctttctgtcctagccatatattcaccctgaactcagtctaggatactattgacatggactataacaccttccattagtcctactctctcacc

SEQ ID NO: 59532 - DNA, 120 bp, synthetic construct
  source 1..120: mol_type = other DNA
ctctactaaaaaaaaaaaaaaaaagaaaagaaaagaaaagaaaagaaaattagccaggcatcgtggcttatgcctgtaatcccagctactcgggaggccgaggggccgaggcaggagaat

SEQ ID NO: 59533 - DNA, 120 bp, synthetic construct
  source 1..120: mol_type = other DNA
acatactgcatgttttcacttacaagtgaaagctaaattatgagaacacatggacacatagaagggaacaatacatactggggcctatcagaggatggagggtggaaagagggagaggat

SEQ ID NO: 59534 - DNA, 120 bp, synthetic construct
  source 1..120: mol_type = other DNA
attgcacacctttcaacatgaatgattgactgaatatgctctgaataagtgcaaaggatgaaagagaaggttgcaatagaaaagccttatgcttctactacctgtttcctttcctagctc

SEQ ID NO: 59535 - DNA, 120 bp, synthetic construct; identical to SEQ ID NO: 8990
  source 1..120: mol_type = other DNA

SEQ ID NO: 59536 - DNA, 120 bp, synthetic construct; identical to SEQ ID NO: 8991
  source 1..120: mol_type = other DNA

SEQ ID NO: 59537 - DNA, 120 bp, synthetic construct
  source 1..120: mol_type = other DNA
tgacatgacatttaaggagaattgtctgaggaaaactccgtgctcttgatacatggagtttaccttcatcagagtccaaccattagagagctgcatacctagactacattaaaaaatgag

SEQ ID NO: 59538 - DNA, 120 bp, synthetic construct
  source 1..120: mol_type = other DNA
aaccactttctcaaatagagatctcggtaggatggggaaacccttgtgcttaaacattctgctcttagattagctaacatactagttctctaaaaatttcttagtgtagtttgcaaagtc

SEQ ID NO: 59539 - DNA, 120 bp, synthetic construct
  source 1..120: mol_type = other DNA
gccagtcagaatggcgatgattgaaaagtcaagaaagaagagatgctggcaaggtcatggagagaaaggaacacttatacactcttggtggaatgtaaattaattcagccattgtggaag

SEQ ID NO: 59540 - DNA, 120 bp, synthetic construct; identical to SEQ ID NO: 8992
  source 1..120: mol_type = other DNA

SEQ ID NO: 59541 - DNA, 120 bp, synthetic construct; identical to SEQ ID NO: 8993
  source 1..120: mol_type = other DNA

SEQ ID NO: 59542 - DNA, 120 bp, synthetic construct; identical to SEQ ID NO: 8994
  source 1..120: mol_type = other DNA

SEQ ID NO: 59543 - DNA, 120 bp, synthetic construct
  source 1..120: mol_type = other DNA
agaaccgccaatagggctgagttcaagcacttaatcctctcagctctctagctgtagtggtcgaagctctgcctaagggaagaagatgtgaagatgatatgaggattttcaattgttatt

SEQ ID NO: 59544 - DNA, 120 bp, synthetic construct
  source 1..120: mol_type = other DNA
ctaatttatccagggccacagaaggtagtctgataatctgaagtctgaactcagattatctaaggtcgaggtcagttaactaagccccagtttttacaagctcctagtattggaacttgg

SEQ ID NO: 59545 - DNA, 120 bp, synthetic construct
  source 1..120: mol_type = other DNA
accctcagttagggtccctatgaaaggaaagacatgttttcagtagcactgcagatagaagacgctcattagctttcctggatagcaaagagtttagggcaagcaatcaaccataatgat

SEQ ID NO: 59546 - DNA, 120 bp, synthetic construct
  source 1..120: mol_type = other DNA
gtaaatgttacagatcatacaagcatgacatcagaacatactctcaaacaggaatttgcctgggagaaccttaaggactgagatgaaggaggaatgagaagaaacagaggtggatccaca

SEQ ID NO: 59547 - DNA, 120 bp, synthetic construct
  source 1..120: mol_type = other DNA
tgtccatcccctgaaacttagatgtcttactttgtactttgtgcacccaaagacacatcattaacacctccatgtatattggactttccctactgataggagagggagaggatgaagaaa

SEQ ID NO: 59548 - DNA, 120 bp, synthetic construct
  source 1..120: mol_type = other DNA
tagccaatgccctctgggcccagacaaccactaatctgctttatttcactataatttggcttttctgtaatgtcatatcaatggaatcatcattacacacccttttgtgttggattagtg

SEQ ID NO: 59549 - DNA, 120 bp, synthetic construct
  source 1..120: mol_type = other DNA
cagattcccctatcttctaccctcccaacactttaaagatgtccctaattgtcttctggtgtgcatagtttctaacgataagtctgctatcatttcttggttttgttcccctgtatgtgg

SEQ ID NO: 59550 - DNA, 120 bp, synthetic construct
  source 1..120: mol_type = other DNA
ttatccacccactgtttctaaatccttctgacaattctatccagtgctcatttattaggaggtctttctatgtttgatggtaggaacataaacgattaccggccctgagtaaggtccagg

SEQ ID NO: 59551 - DNA, 120 bp, synthetic construct
  source 1..120: mol_type = other DNA
cataaagtccttaacgtggaccacaagtccatgtatgatttacctctacttctctcttcagtcttatcatacgtcttttctcttgtttactatgggctccttgtcccttgggtcccctgt

SEQ ID NO: 59552 - DNA, 120 bp, synthetic construct
  source 1..120: mol_type = other DNA
aattttgttcactgaactacttatctggctactataggcatctgagtttgtgaactttgcgctagcataaagtggactttgttgtgtcttcccccaacacaccccaaaggatagcttgac

SEQ ID NO: 59553 - DNA, 120 bp, synthetic construct
  source 1..120: mol_type = other DNA
ctagatagtgggagaaagcacttgaacttcagggtcagagttgaaaatatcttggtggttgtatcatttgctaactgtgggaacttgggaaggtttcttgaagtccctttaacctcagtt

SEQ ID NO: 59554 - DNA, 120 bp, synthetic construct
  source 1..120: mol_type = other DNA
aaatctcccaaaggccccacctgctaatgccatcacactggaggttagatttcagtatgtgaatttttggaggacacaaacttccaatccattgtagtgatgtatctattccaaaggcga

SEQ ID NO: 59555 - DNA, 120 bp, synthetic construct
  source 1..120: mol_type = other DNA
agttgaattatgagcatcttgaaacagtgaatgatatagacttgtacataggatatattctataattacactgagtgagatggctaatgagacaattggggtgtaattttatcaatgctt

SEQ ID NO: 59556 - DNA, 120 bp, synthetic construct
  source 1..120: mol_type = other DNA
agaatttggcaacacttagatacaacgaacaatgtctggcagaaaacgtgttttatttggagagctggcttaccagcagatggctatatattatagaactaattttgtgacatcacattc

SEQ ID NO: 59557 - DNA, 120 bp, synthetic construct
  source 1..120: mol_type = other DNA
gttcattcactgtgcaaacagcccaggtagggtccaaagtctacaattcttacctcctcccttatttgaaatgaaacctgcatgtgacattttgatattttgaggtttctcccccttctt

SEQ ID NO: 59558 - DNA, 120 bp, synthetic construct
  source 1..120: mol_type = other DNA
agtgcctgatggaactctactatgcttacaatgatctgaacatcagcataatgggataattagaaccatattaacatcaggtacttactattcagcggctgatacaataacttgcatgac

SEQ ID NO: 59559 - DNA, 120 bp, synthetic construct
  source 1..120: mol_type = other DNA
gcaggtctagaggactccaaaaccttttccttttcttctctcaaaacttacaacagcaacaatttttataattaccagttgcaagagatttccctaacaacacgtggttaacagtatagt

SEQ ID NO: 59560 - DNA, 120 bp, synthetic construct
  source 1..120: mol_type = other DNA
ttctttttttttttgagatggagtctcgctctgtctcctaggctggagtgcagtgatgcaatctcaggacccactgcaacctccgcctcctgggttcaagcaattctcctacctcaacct

SEQ ID NO: 59561 - DNA, 120 bp, synthetic construct
  source 1..120: mol_type = other DNA
ttaaagatgatttaaagtatatgagaggatgtgcataggttattgcaaatactatgaaattttatataagggacttgagcatctgcaaattttggtatctgtgagtagtcctggaaccaa

SEQ ID NO: 59562 - DNA, 120 bp, synthetic construct
  source 1..120: mol_type = other DNA
tcattcctttattcattcctttatttattcaatgaatatcaagtgcctatattatcctaggcatcagaattgcaatggtgcgtaaaagagtaaaatagatacacccactccctgccttca

SEQ ID NO: 59563 - DNA, 120 bp, synthetic construct
  source 1..120: mol_type = other DNA
tagtaggcagaataatgtgcccctgctgagatgtccacgtcctaatctctgggacctggaaatatgctactttatatggcaaaagggactgtgtatctatgattaagaatcttgagatga

SEQ ID NO: 59564 - DNA, 120 bp, synthetic construct
  source 1..120: mol_type = other DNA
gccaattgtgtgccgcatttagttgccatggttctcttgcttggttgatttgtttgttggcatcacatgcctgcaaataccagatgcccagagaaagtctcctaagttatttaacctaat

SEQ ID NO: 59565 - DNA, 120 bp, synthetic construct
  source 1..120: mol_type = other DNA
aagactagccattttaaagcccaagacagaattcctaaaaatgaccccagctgtactccctcacctgcccaaatgtccacaaaccttattggatgggcatcttcatacctccaatcctac

SEQ ID NO: 59566 - DNA, 120 bp, synthetic construct
  source 1..120: mol_type = other DNA
aatgaatagactctgtgatataggacaggacatccttcaacttcctactcataactacaaacttaattttatttgcaacgttatcctctgctttcctggccccccatgaaggtggtagcc

SEQ ID NO: 59567 - DNA, 120 bp, synthetic construct
  source 1..120: mol_type = other DNA
aatcaactttagctcctaaatatctttggactccatctcagcttctctgctatctggattgatacaacagtcccatgactactttctctggctctggactggtctttctccaatctattc

SEQ ID NO: 59568 - DNA, 120 bp, synthetic construct
  source 1..120: mol_type = other DNA
gtgatccatctgccttggcctcccaaagtgcatgagccaccacgcctggcctcaatacacaattatttaaaaataaaagaatatttaaatgcagatctgtttaaaattaaataaatatat

SEQ ID NO: 59569 - DNA, 120 bp, synthetic construct
  source 1..120: mol_type = other DNA
tactgacaaggggattcaactggaggaagttctcccttgatggtctctatcatccctgcggaatatggtatcatagttaagatattagaaccctattcaacccagtcttcttgataaagg

SEQ ID NO: 59570 - DNA, 120 bp, synthetic construct
  source 1..120: mol_type = other DNA
aaactaatttgaaaggcatattcaatatctatttctcacattacaaaaaaagtagatctctcatatcttcagacttctagtagaataccagtatctttattgtatttcagaagtccacag

SEQ ID NO: 59571 - DNA, 120 bp, synthetic construct
  source 1..120: mol_type = other DNA
cccttcaggttttctcagaaagcaaaaacaaatctgtagttacagtaatgctcacaaattgtaatatgtggaatacagaaactgtgttaatatgtgggggcagaattaaaggaggcacgt

SEQ ID NO: 59572 - DNA, 120 bp, synthetic construct
  source 1..120: mol_type = other DNA
ttgtgctaaaatacactttgccaaaagatggagttggctatgttgatattcacctagtgagtatcatagctctaggggcaggacaagttagaacaagttcttagtttaagcagccagata

SEQ ID NO: 59573 - DNA, 120 bp, synthetic construct
  source 1..120: mol_type = other DNA
caactcaaggatagtattttatctgaattaaacctcctctcagttacatatgcctttaagtagccaaggtaaaccatatcccaggacatgatgaacagagagaaaaaaaaatgaagagtc

SEQ ID NO: 59574 - DNA, 120 bp, synthetic construct
  source 1..120: mol_type = other DNA
atgagctctagaggctgtgggtggcagcgtcctcctcccctgcagttcttgcaaacggcagcagcagcctctggctctcactccctccgctttttctggggcttttcctggcaggggttt

SEQ ID NO: 59575 - DNA, 120 bp, synthetic construct; identical to SEQ ID NO: 14021
  source 1..120: mol_type = other DNA

SEQ ID NO: 59576 - DNA, 120 bp, synthetic construct; identical to SEQ ID NO: 14022
  source 1..120: mol_type = other DNA

SEQ ID NO: 59577 - DNA, 120 bp, synthetic construct; identical to SEQ ID NO: 14023
  source 1..120: mol_type = other DNA

SEQ ID NO: 59578 - DNA, 120 bp, synthetic construct; identical to SEQ ID NO: 14024
  source 1..120: mol_type = other DNA

SEQ ID NO: 59579 - DNA, 120 bp, synthetic construct; identical to SEQ ID NO: 14025
  source 1..120: mol_type = other DNA

SEQ ID NO: 59580 - DNA, 120 bp, synthetic construct; identical to SEQ ID NO: 14026
  source 1..120: mol_type = other DNA

SEQ ID NO: 59581 - DNA, 120 bp, synthetic construct; identical to SEQ ID NO: 14027
  source 1..120: mol_type = other DNA

SEQ ID NO: 59582 - DNA, 120 bp, synthetic construct
  source 1..120: mol_type = other DNA
tttttagaattctgtaaagaaagtcattggtagcatgatggggatggcattgaatctataaaataccttgggcagtatggccattttcacaatattgattcttcctacccatgagcatgg

SEQ ID NO: 59583 - DNA, 120 bp, synthetic construct
  source 1..120: mol_type = other DNA
tatgctggattacgtttattgattttcgtatgttgaaccagccttgcatcccagagatgaagcccacttgatcatggtggataagctttttgatgtgctgctggatttggtttgccagta

SEQ ID NO: 59584 - DNA, 120 bp, synthetic construct
  source 1..120: mol_type = other DNA
aagagagcttctgaaggaagcactaaacatggaaaggagcaaccagtaccagccactgcaaaatcatgccaaattgtaaagaccatcaatgctaggaagaaactgaatcaactaacgagc

SEQ ID NO: 59585 - DNA, 120 bp, synthetic construct
  source 1..120: mol_type = other DNA
aggcaagaaataactaaaatcagagcagaactgaaggaaatagagacacaaaaaacccttcaaaaaattaatgaatccaggagctggttttttgaaaggatcaacagaattgatagaccg

SEQ ID NO: 59586 - DNA, 120 bp, synthetic construct
  source 1..120: mol_type = other DNA
ctcaataaatttggtattgatgggacgtatctcaaaataataagagctatctatggcaaacccacagccaatatcatactgaatgggcaaaaactggaagcattccctttgaaaactggc

SEQ ID NO: 59587 - DNA, 120 bp, synthetic construct
  source 1..120: mol_type = other DNA
gacatgaacagacacttcacaaaagaagacatttatgcagccaaaaaacacatgaaaaaatgctcaccatcactggccatcagagaaatgcaaatcaaaaccacagtgagataccatctc

SEQ ID NO: 59588 - DNA, 120 bp, synthetic construct; identical to SEQ ID NO: 35659
  source 1..120: mol_type = other DNA

SEQ ID NO: 59589 - DNA, 120 bp, synthetic construct; identical to SEQ ID NO: 35660
  source 1..120: mol_type = other DNA

SEQ ID NO: 59590 - DNA, 120 bp, synthetic construct; identical to SEQ ID NO: 35661
  source 1..120: mol_type = other DNA

SEQ ID NO: 59591 - DNA, 120 bp, synthetic construct; identical to SEQ ID NO: 35662
  source 1..120: mol_type = other DNA

SEQ ID NO: 59592 - DNA, 120 bp, synthetic construct
  source 1..120: mol_type = other DNA
gcagaaatcacccaccttctgcgttgatctggctgggagctgcagaccagagctgttcctatttgaccatcttgcctgcacccttttattctttcaaagtatatatatatatatttatta

SEQ ID NO: 59593 - DNA, 120 bp, synthetic construct
  source 1..120: mol_type = other DNA
catttgtcaatttaggtttttgttgccattgcttttggtgttttagacatgaagtccttgcccatgcctatgtcctgaatggtaatgcctaggttttcttctagggtttttatggtttta

SEQ ID NO: 59594 - DNA, 120 bp, synthetic construct
  source 1..120: mol_type = other DNA
cctgtcttgtgccagttttcaaagggaatgcttccagtttttgcccattcagtgtgatattggctattggtttgtcatagatagctcttattattttgagatacgtcccatcagtaccta

SEQ ID NO: 59595 - DNA, 120 bp, synthetic construct
  source 1..120: mol_type = other DNA
gctattgcagatagtgacacaataaacatacgtgtgcatgtgtctttatagtagcatgatttataatcctttgggtatatacccagtaatgggatggctgggtcaaatggtatttctagt

SEQ ID NO: 59596 - DNA, 120 bp, synthetic construct; identical to SEQ ID NO: 34025
  source 1..120: mol_type = other DNA

SEQ ID NO: 59597 - DNA, 120 bp, synthetic construct
  source 1..120: mol_type = other DNA
accaaaaatccatctgtacgtcaccatcatcaaagaccaaagatagataaaaccacaaagttggggaaaaaaacagagcggaaaaaccagaaactctaaaaatcagagcaccactcctct

SEQ ID NO: 59598 - DNA, 120 bp, synthetic construct
  source 1..120: mol_type = other DNA
atcttagctggttattttgctcattagttgatgcagtttctccctagccttgatggtctttacaatttggcaggtttttgcagtggctggtatcggttgttcctttccatgtttagtgct

SEQ ID NO: 59599 - DNA, 120 bp, synthetic construct
  source 1..120: mol_type = other DNA
taaatgtgtttgctcttgcttctgtagttcttttaattgtgatgttagggtgtcaattttagatctttcctgctttctcttgtgggcatttagtgctataaatttccctctacacactgc

SEQ ID NO: 59600 - DNA, 120 bp, synthetic construct
  source 1..120: mol_type = other DNA
gctcttatgattttgagatacatcccatcaatacctaatttattgagagtttttagcatgaagtgttgttgaattttgtcaaaggccttttctgcatctattgagataatcatgtggttt

SEQ ID NO: 59601 - DNA, 120 bp, synthetic construct
  source 1..120: mol_type = other DNA
actcatacaaatttacaagaaaaaaacaaacaaccccatcaaaaagtgggcaaaggatgtgaacagacacttctcaaaagaagacatttatgcagccaaaaaacacatgaaaaaatgctc

SEQ ID NO: 59602 - DNA, 120 bp, synthetic construct; identical to SEQ ID NO: 34026
  source 1..120: mol_type = other DNA

SEQ ID NO: 59603 - DNA, 120 bp, synthetic construct
  source 1..120: mol_type = other DNA
attccatggtgtatatgtgtcacattttcttaatccagtctatcattgttggacatttgggttggttccaagtctttgctattgtgaatagtgtcacaataaacatacgtgtgcatgtgt

SEQ ID NO: 59604 - DNA, 120 bp, synthetic construct
  source 1..120: mol_type = other DNA
tctggtagaattctgctgtgaatccatctggtcctgaactttttttggttggtaggctatttattattgcctcaatttcagaggctgttattagtctattcagagattgaacttcttcct

SEQ ID NO: 59605 - DNA, 120 bp, synthetic construct
  source 1..120: mol_type = other DNA
agtctctttgtaggtcactaaggacttgctttatgaatctgggtgctcctgtattgggtgcatatatatttaggatagttagctcttcttgttgaattgatccctttactattatgtaac

SEQ ID NO: 59606 - DNA, 120 bp, synthetic construct
  source 1..120: mol_type = other DNA
tccccgtgactttcaggtacaccaatcagacatagatttggtgttttcacatagtcccatatttcttggatgctggttcatttctttttattcctttttctctaaacttctcttctcact

SEQ ID NO: 59607 - DNA, 120 bp, synthetic construct
  source 1..120: mol_type = other DNA
aaacattcctcattaaatgcaaaagaacttaaatcataacaaacagtctctcagattacagtgaagggatgggttgcccctccacacctgtgggcgtttctcgttaggtggaatgagaga

SEQ ID NO: 59608 - DNA, 120 bp, synthetic construct
  source 1..120: mol_type = other DNA
agttgacacagcacatgtttcagggagcacaaggttgggggtagggttacagatcaacatcatctcaaggcagaagaatttttcttagtgtcaggcctccgagcccaagctaagccatca

SEQ ID NO: 59609 - DNA, 120 bp, synthetic construct; identical to SEQ ID NO: 34027
  source 1..120: mol_type = other DNA

SEQ ID NO: 59610 - DNA, 120 bp, synthetic construct
  source 1..120: mol_type = other DNA
gcatttattacactgaggtatgtcccttgtatgccgattttgctgagggttttaatcatgaatggatgctgaattttgtcagatgcttttctgcgtctatcaagaagatcatgcgatttt

SEQ ID NO: 59611 - DNA, 120 bp, synthetic construct
  source 1..120: mol_type = other DNA
gcctgacaaaaacaagaaatggggaaacaattccctatttaacaaatggtgctgggaaaactggctagccatatgtagaaagctgaaactggatcccttccttacaccttatacaaaaat

SEQ ID NO: 59612 - DNA, 120 bp, synthetic construct
  source 1..120: mol_type = other DNA
tgtcatttgtagggacatggatgaagctggaaaccattattctcagcaaactatcacaaggacagaaaaccaaataccgcatgttttcactcataggtgggaattgtacaatgagaatac

SEQ ID NO: 59613 - DNA, 120 bp, synthetic construct
  source 1..120: mol_type = other DNA
aaaaaaaaaaaatatatatatatatatatatatatatatatatatgaaatcagccaggcgtggtgacagagcctgtaatcccagctattcgggaggctgagggagaattgcttgaacctg

SEQ ID NO: 59614 - DNA, 120 bp, synthetic construct; identical to SEQ ID NO: 3291
  source 1..120: mol_type = other DNA

SEQ ID NO: 59615 - DNA, 120 bp, synthetic construct; identical to SEQ ID NO: 7611
  source 1..120: mol_type = other DNA

SEQ ID NO: 59616 - DNA, 120 bp, synthetic construct
  source 1..120: mol_type = other DNA
atggtctcaatctcccgacctcatgatctgcccgcctcagcctcccaaagtgctgtgtatttattattcttaaatctctcttttattttaatttttttaaaattattattatactttaag

SEQ ID NO: 59617 - DNA, 120 bp, synthetic construct
  source 1..120: mol_type = other DNA
gagttcactgtagattctggatactcgccctttgtcagatgagtaggttgctctttgtcagatgagtaggttgcatactggtaaagggatcaattcaacaagaagagctaactatcctaa

SEQ ID NO: 59618 - DNA, 120 bp, synthetic construct
  source 1..120: mol_type = other DNA
aaagcaaacacattcaaaagccagcagaaggcaagaaataactaaaatcagagcagaactgaaggaaatagagacacaaaaaacccttcaaaaaattaatgaatccaggagctggttttt

SEQ ID NO: 59619 - DNA, 120 bp, synthetic construct
  source 1..120: mol_type = other DNA
ttctggccagggcaattaggcaggagaaggaaataatgggtattcaattaggaaaagaggaagtcaaattgtccctgtttgcagatgacatgattgtatatctagaaaaccccattgtct

SEQ ID NO: 59620 - DNA, 120 bp, synthetic construct
  source 1..120: mol_type = other DNA
ggcaacctacaaaatgggagaaaattttcacaacctactcatctgataaatctctcttttaaaatatagaatgtaggccaggcgcgttggctcatacctgtaatcccagcactttgggag

SEQ ID NO: 59621 - DNA, 120 bp, synthetic construct
  source 1..120: mol_type = other DNA
caaaattcatagggctatctacatttaaaatccgtatgttttactatatgtaaattgcagtagcgcacgcctgtaatcccagcactttgggagattgaggaagggagatcgagtgagcct

SEQ ID NO: 59622 - DNA, 120 bp, synthetic construct; identical to SEQ ID NO: 7613
  source 1..120: mol_type = other DNA

SEQ ID NO: 59623 - DNA, 120 bp, synthetic construct
  source 1..120: mol_type = other DNA
acaacctatcaaaacctctgggatacagcaaaagtggtactaagaggaaagttcataccattaaatgcctagatcaaaaagtctcaaagagcacaaatagacaatctaaggtcatacctc

SEQ ID NO: 59624 - DNA, 120 bp, synthetic construct
  source 1..120: mol_type = other DNA
ttctggttggtttcaaagaacatcaaactatactacaaggctacagtaaccaaaacagcatggtactggtaccaaaacagagatatagatcaatggaacagaacagagccctcagaaata

SEQ ID NO: 59625 - DNA, 120 bp, synthetic construct
  source 1..120: mol_type = other DNA
catgcacacgtatgtttattgtggcactattcacaatagcaaagacttggaaccaacccaaatgtccaacaatgatagactggattaagaaaatgtggcacatatacaccgtggaatact

SEQ ID NO: 59626 - DNA, 120 bp, synthetic construct
  source 1..120: mol_type = other DNA
attattgcctcaatttcagagcctgttattggtctattcagagattcagcttcttcctggtttagtcttgggagggtgtatgtatcgaggaatttaaccatttcttctagattttctagt

SEQ ID NO: 59627 - DNA, 120 bp, synthetic construct
  source 1..120: mol_type = other DNA
aggtctctaaggacttgctttgtgaatctgggtgctcctgtattgggtgcatgtatatttaggatagttagctcttcttgttgaactgatccctttactactatgtaatggccctgtctc

SEQ ID NO: 59628 - DNA, 120 bp, synthetic construct; identical to SEQ ID NO: 7614
  source 1..120: mol_type = other DNA

SEQ ID NO: 59629 - DNA, 120 bp, synthetic construct
  source 1..120: mol_type = other DNA
ctccagcacctgttgtttcctgactttttaatgattgccattctaactggtgtgagatgatatctcatagtggttttgatttgcatttctctgatggccagtgatgatgagcatttcttc

SEQ ID NO: 59630 - DNA, 120 bp, synthetic construct
  source 1..120: mol_type = other DNA
agcgtctctgcccgaccgccaccccgtctgggaggtgaggagcatctctgcccggccgccccgtctgggaagcgaggagcccctccgcccggcagccgccccgtctgggaagtgaggagc

SEQ ID NO: 59631 - DNA, 120 bp, synthetic construct
  source 1..120: mol_type = other DNA
ctgtctcaaaaaaaaaatttttttttaagtagagacgggagtcttgctatgttgtccaggctgctctcaaactgctgcctcagaggttgagattacagtgttgagatgagttgcctcagt

SEQ ID NO: 59632 - DNA, 120 bp, synthetic construct
  source 1..120: mol_type = other DNA
gtgatccacctgcctcggcctcccaaagtgctcggattacaggcgtgagccaccggacctggccagcaggtaacatttattaagtatctactatgccttaggcatggtgttaatgtataa

SEQ ID NO: 59633 - DNA, 120 bp, synthetic construct
  source 1..120: mol_type = other DNA
ttgtattttacctgctatacttcataaggtgaaacttttgtagaggagcaactactacatgctacgcagtaagtcccagggattccagcgttccttcaaccagtgctttctgaaagttcc

SEQ ID NO: 59634 - DNA, 120 bp, synthetic construct; identical to SEQ ID NO: 20868
  source 1..120: mol_type = other DNA

SEQ ID NO: 59635 - DNA, 120 bp, synthetic construct
  source 1..120: mol_type = other DNA
tgtcagggagaatatttaatggcatgaaaaaatgctcctgatggagtcttaagtaaaaggtaagtatatgtacagtataaacatatacaggagtggagaaacactgggaaggtagacaga

SEQ ID NO: 59636 - DNA, 120 bp, synthetic construct
  source 1..120: mol_type = other DNA
tgcactctagcctgggtgacacagtaagaccatgccaaaaaaaaaaaaaaaaagactcagaatctataaagcagtgaggcagtggttctagccgggacagagaagcctcgtgtatcagcc

SEQ ID NO: 59637 - DNA, 120 bp, synthetic construct; identical to SEQ ID NO: 20866
  source 1..120: mol_type = other DNA

SEQ ID NO: 59638 - DNA, 120 bp, synthetic construct
  source 1..120: mol_type = other DNA
gtggaactgtaagtccaattaaacctttttcttttgtaaattgcccagtctcggatatgtctttattagcagcaagaaaacagactaatacagccctttaagaaaaagtctatggaaccc

SEQ ID NO: 59639 - DNA, 120 bp, synthetic construct; identical to SEQ ID NO: 20867
  source 1..120: mol_type = other DNA

SEQ ID NO: 59640 - DNA, 120 bp, synthetic construct; identical to SEQ ID NO: 20868
  source 1..120: mol_type = other DNA

SEQ ID NO: 59641 - DNA, 120 bp, synthetic construct; identical to SEQ ID NO: 20869
  source 1..120: mol_type = other DNA

SEQ ID NO: 59642 - DNA, 120 bp, synthetic construct; identical to SEQ ID NO: 20870
  source 1..120: mol_type = other DNA

SEQ ID NO: 59643 - DNA, 120 bp, synthetic construct; identical to SEQ ID NO: 20871
  source 1..120: mol_type = other DNA

SEQ ID NO: 59644 - DNA, 120 bp, synthetic construct; identical to SEQ ID NO: 20872
  source 1..120: mol_type = other DNA

SEQ ID NO: 59645 - DNA, 120 bp, synthetic construct
  source 1..120: mol_type = other DNA
tatattcttccagatggtttttccttgtaacatgagcggggcttgtttttgcagaacctgcatcataaagtgctgaaactctctctctctctctctctctctctctctctctctctctct

SEQ ID NO: 59646 - DNA, 120 bp, synthetic construct; identical to SEQ ID NO: 12921
  source 1..120: mol_type = other DNA

SEQ ID NO: 59647 - DNA, 120 bp, synthetic construct; identical to SEQ ID NO: 12922
  source 1..120: mol_type = other DNA

SEQ ID NO: 59648 - DNA, 120 bp, synthetic construct; identical to SEQ ID NO: 12923
  source 1..120: mol_type = other DNA

SEQ ID NO: 59649 - DNA, 120 bp, synthetic construct; identical to SEQ ID NO: 12924
  source 1..120: mol_type = other DNA

SEQ ID NO: 59650 - DNA, 120 bp, synthetic construct
  source 1..120: mol_type = other DNA
tggatcatttgcagtcaggagttcgagaccagcctcgccaacatggtaaaaccccatttctactaaaaatacaaaaaaattatcgtggtagcgtgcgcctgtaatctcagctactgagga

SEQ ID NO: 59651 - DNA, 120 bp, synthetic construct
  source 1..120: mol_type = other DNA
aatccgctcacctcagcctcccaagtagctgggaccacaggcacacaccactgtgcctggctcctaataaagctttcttaaaaaagcattttctgacaaaattcccctaaactaatataa

SEQ ID NO: 59652 - DNA, 120 bp, synthetic construct
  source 1..120: mol_type = other DNA
cccactttttgatggggttgtttgtttttttcttgtaaatttgttggagttcattgtagattctggatattagccctttgtcagatgagtaggttgcgaaaattttctcccatgttgtag

SEQ ID NO: 59653 - DNA, 120 bp, synthetic construct
  source 1..120: mol_type = other DNA
attgaataccctttatttccttctcctgcctgattgccctggccagaactttcaacactatgttgaataggagcggtgagagagggcatccctgtcttgtgccagttttcaaagggaatg

SEQ ID NO: 59654 - DNA, 120 bp, synthetic construct
  source 1..120: mol_type = other DNA
aaataaaaggatggaggaagatctaccaagcaaatggaaaacaaaaaaaggcagtggttgcaatcctagtctctgataaaacagactttaaaccaacaaagatcaaaagagacaaagaag

SEQ ID NO: 59655 - DNA, 120 bp, synthetic construct; identical to SEQ ID NO: 34006
  source 1..120: mol_type = other DNA

SEQ ID NO: 59656 - DNA, 120 bp, synthetic construct
  source 1..120: mol_type = other DNA
acatgttgtcaggacctcctgaggctgtgtcacaggtgcgtgcttaatcttggcaaaataaactttctatattgagacctgtctcagatattttgagttcacatatacagagttgggact

SEQ ID NO: 59657 - DNA, 120 bp, synthetic construct; identical to SEQ ID NO: 10087
  source 1..120: mol_type = other DNA

SEQ ID NO: 59658 - DNA, 120 bp, synthetic construct; identical to SEQ ID NO: 10088
  source 1..120: mol_type = other DNA

SEQ ID NO: 59659 - DNA, 120 bp, synthetic construct
  source 1..120: mol_type = other DNA
agaccccatctctataaaataaaataaaatgaaacaatttggtatgactaatagatttagactcatgcttttaagttgacacaataaaaccaaatttgtaaacagtactgaaaagcttag

SEQ ID NO: 59660 - DNA, 120 bp, synthetic construct; identical to SEQ ID NO: 18279
  source 1..120: mol_type = other DNA

SEQ ID NO: 59661 - DNA, 120 bp, synthetic construct; identical to SEQ ID NO: 18280
  source 1..120: mol_type = other DNA

SEQ ID NO: 59662 - DNA, 120 bp, synthetic construct; identical to SEQ ID NO: 21915
  source 1..120: mol_type = other DNA

SEQ ID NO: 59663 - DNA, 120 bp, synthetic construct
  source 1..120: mol_type = other DNA
gggcagagacgctcctcacctcccagacggggttgcggccgggcagaggcgctcctcacgtcccagacagggtggcggggcagaggcgctccccacatctcagacgatgggcggccgggc

SEQ ID NO: 59664 - DNA, 120 bp, synthetic construct; identical to SEQ ID NO: 21916
  source 1..120: mol_type = other DNA

SEQ ID NO: 59665 - DNA, 120 bp, synthetic construct; identical to SEQ ID NO: 23916
  source 1..120: mol_type = other DNA

SEQ ID NO: 59666 - DNA, 120 bp, synthetic construct
  source 1..120: mol_type = other DNA
aaaacaaaagaaaaaaaaaaagaaatacctgagactgggtaatatataaagaaaagagctgtaattggctcacggttccacagctgtctaggaagcatagcagcatctgcttccggggag

SEQ ID NO: 59667 - DNA, 120 bp, synthetic construct; identical to SEQ ID NO: 12442
  source 1..120: mol_type = other DNA

SEQ ID NO: 59668 - DNA, 120 bp, synthetic construct; identical to SEQ ID NO: 12443
  source 1..120: mol_type = other DNA

SEQ ID NO: 59669 - DNA, 120 bp, synthetic construct; identical to SEQ ID NO: 32767
  source 1..120: mol_type = other DNA

SEQ ID NO: 59670 - DNA, 120 bp, synthetic construct; identical to SEQ ID NO: 32768
  source 1..120: mol_type = other DNA

SEQ ID NO: 59671 - DNA, 120 bp, synthetic construct; identical to SEQ ID NO: 32769
  source 1..120: mol_type = other DNA

SEQ ID NO: 59672 - DNA, 120 bp, synthetic construct; identical to SEQ ID NO: 32770
  source 1..120: mol_type = other DNA

SEQ ID NO: 59673 - DNA, 120 bp, synthetic construct; identical to SEQ ID NO: 28627
  source 1..120: mol_type = other DNA

SEQ ID NO: 59674 - DNA, 120 bp, synthetic construct; identical to SEQ ID NO: 28628
  source 1..120: mol_type = other DNA

SEQ ID NO: 59675 - DNA, 120 bp, synthetic construct; identical to SEQ ID NO: 28625
  source 1..120: mol_type = other DNA

SEQ ID NO: 59676 - DNA, 120 bp, synthetic construct; identical to SEQ ID NO: 28626
  source 1..120: mol_type = other DNA

SEQ ID NO: 59677 - DNA, 120 bp, synthetic construct; identical to SEQ ID NO: 28629
  source 1..120: mol_type = other DNA

SEQ ID NO: 59678 - DNA, 120 bp, synthetic construct; identical to SEQ ID NO: 28630
  source 1..120: mol_type = other DNA

SEQ ID NO: 59679 - DNA, 120 bp, synthetic construct; identical to SEQ ID NO: 28631
  source 1..120: mol_type = other DNA

SEQ ID NO: 59680 - DNA, 120 bp, synthetic construct; identical to SEQ ID NO: 28632
  source 1..120: mol_type = other DNA

SEQ ID NO: 59681 - DNA, 120 bp, synthetic construct
  source 1..120: mol_type = other DNA
tgaaaattctgtgtagagggaaatttatagcactaaatgcccacaagagaaagcaggaaagatctaaaattgacaccctaacatcacaattaaaagaactagagaagcaagagcaaacac

SEQ ID NO: 59682 - DNA, 120 bp, synthetic construct
  source 1..120: mol_type = other DNA
tgaataccctttatttctttctcctgcctgattgccctggccagaacttccaacactatgttgaataggagtggtgagagagggcatccctgtcttgtgccagttttcaaagggaatgct

SEQ ID NO: 59683 - DNA, 120 bp, synthetic construct
  source 1..120: mol_type = other DNA
ataaaattaaattaaaaaaaataaaatttatacggaaagacaaaggaacaaatatagataacagtgaaaaataatataagttggctgggtgcagtggctcatgcctgtaatcccagtatt

SEQ ID NO: 59684 - DNA, 120 bp, synthetic construct
  source 1..120: mol_type = other DNA
ttatgtttcctgtttttgtgatacctaaacattttttttttttttgagacagagtctcactctgtcatccaggctggagtgtagtggtgcaatctcggctcaatgcaacctctgcttccc

SEQ ID NO: 59685 - DNA, 120 bp, synthetic construct
  source 1..120: mol_type = other DNA
aggacaatcgcttgaacccaggaggcggaggttgcagtgagctgacatcgcgccagcctgagtgatggagcaagactgtttttttaaaaaaaaaaaaatacaaaaaaaaaaagaatttaa

SEQ ID NO: 59686 - DNA, 120 bp, synthetic construct
  source 1..120: mol_type = other DNA
cagttctttatctctcacccccttcttcccccaccccttagccatatccacacagctatttctataatcttggttagtgtgagtcaaccactaagagatgtattcactaagagatccaat

SEQ ID NO: 59687 - DNA, 120 bp, synthetic construct
  source 1..120: mol_type = other DNA
attacaggcgtgagccactgtgcccggcctatttttttatattactttttttttttttttttgagatggagtttcgttcttgttgcccaggatggagtgcagtgacacggtctcggctca

SEQ ID NO: 59688 - DNA, 120 bp, synthetic construct; identical to SEQ ID NO: 33983
  source 1..120: mol_type = other DNA

SEQ ID NO: 59689 - DNA, 120 bp, synthetic construct
  source 1..120: mol_type = other DNA
gacagagactctgtctccaaaaaaaaaaaacacgtaaatacaagggaccctgctgtggttgaatgtcccctccaaaactcatattgaaactttatccacagtgtggcagtattgagtggt

SEQ ID NO: 59690 - DNA, 120 bp, synthetic construct
  source 1..120: mol_type = other DNA
tgatattgatgaggaccctaatgggcagtgaaacaaaatagaatccatgaatgaacttatacagatataaaaacgtagtacataatggccaggcgcggtggctcacgcctgtaatcccag

SEQ ID NO: 59691 - DNA, 120 bp, synthetic construct
  source 1..120: mol_type = other DNA
catgatcacaccactgcactccagcctgggtgacagagcaagaccctggctataaaaaaaaaaaaaagaaaaaagaaaacaaagaaaattggtactgagaagtgcgggtttctggtaacg

SEQ ID NO: 59692 - DNA, 120 bp, synthetic construct; identical to SEQ ID NO: 33984
  source 1..120: mol_type = other DNA

SEQ ID NO: 59693 - DNA, 120 bp, synthetic construct; identical to SEQ ID NO: 33985
  source 1..120: mol_type = other DNA

SEQ ID NO: 59694 - DNA, 120 bp, synthetic construct
  source 1..120: mol_type = other DNA
cttcatgtgttttttggctgcataaatgtcttcttttgagaagtgtctgttcgtgtccttcgcccactttttgatggggttgtttgtttttttcttgtaaatttgtttgagttcattgta

SEQ ID NO: 59695 - DNA, 120 bp, synthetic construct
  source 1..120: mol_type = other DNA
gtgaatgggagttcacccatgatttggctctctgtttgtctgttgttggtgtataagaatgcttgtgatttttgtacattgattttgtatcctgacactttgctgaagttgcttatcagc

SEQ ID NO: 59696 - DNA, 120 bp, synthetic construct
  source 1..120: mol_type = other DNA
cagagcctgttattggtctattcagagattcaacttcttcctggtttagtcttgggagagtgtatgtgtcgaggaatgtatccatttcttctagattttctagtttatttgcgtagaggt

SEQ ID NO: 59697 - DNA, 120 bp, synthetic construct
  source 1..120: mol_type = other DNA
atgtctattaggtctgcttggtacagagctgagttcaattcctgggtatccttgttgactttctgtctcgttgatctgtctaatgttgacagtggggtgttaaagtctcccattattaat

SEQ ID NO: 59698 - DNA, 120 bp, synthetic construct
  source 1..120: mol_type = other DNA
agacgtagatttggtcttttcacatagtcccatatttcttggaggctttgctcatttctttttattcttttttctctaaacttcccttcttgcttcatttcattcatttcatcttccatt

SEQ ID NO: 59699 - DNA, 120 bp, synthetic construct
  source 1..120: mol_type = other DNA
ggcaggcaggcctccttgagctgtggtgggctccacccagttcgagcttcccagctgctttgtttacctaagcaagcctgggcaatggcgggcgcccctcccccagcctcgttgccgcct

SEQ ID NO: 59700 - DNA, 120 bp, synthetic construct
  source 1..120: mol_type = other DNA
catatatttgtcggtcacttgtacgtattcttttgtaaaatgtcttttcttgtcctttgcctacttttttttttttttaattgatcattcttgggtgtttctcgcagagggggatttggc

SEQ ID NO: 59701 - DNA, 120 bp, synthetic construct
  source 1..120: mol_type = other DNA
cagatgatgggcggccgggcagagaagctcctcacttcctagatgggatggtggccgggaagaggcgctcctcacttcctagatcggatggaggccgggcagagacgctcctcactttcc

SEQ ID NO: 59702 - DNA, 120 bp, synthetic construct; identical to SEQ ID NO: 28029
  source 1..120: mol_type = other DNA

SEQ ID NO: 59703 - DNA, 120 bp, synthetic construct; identical to SEQ ID NO: 28030
  source 1..120: mol_type = other DNA

SEQ ID NO: 59704 - DNA, 120 bp, synthetic construct; identical to SEQ ID NO: 28031
  source 1..120: mol_type = other DNA

SEQ ID NO: 59705 - DNA, 120 bp, synthetic construct; identical to SEQ ID NO: 28032
  source 1..120: mol_type = other DNA

SEQ ID NO: 59706 - DNA, 120 bp, synthetic construct; identical to SEQ ID NO: 28033
  source 1..120: mol_type = other DNA

SEQ ID NO: 59707 - DNA, 120 bp, synthetic construct
  source 1..120: mol_type = other DNA
ttacccattttgatattttgctgtaggtggccagttttgtttctcatagggaaatctgacccacctgtcatgttggctcctaaggaactgctgttgtaagcggctcatcaagagttgaac

SEQ ID NO: 59708 - DNA, 120 bp, synthetic construct; identical to SEQ ID NO: 28034
  source 1..120: mol_type = other DNA

SEQ ID NO: 59709 - DNA, 120 bp, synthetic construct
  source 1..120: mol_type = other DNA
tggcctcccaaagtgctagaattacaggcgtgagccactgcctcaggctgaataaagagccttttagataatgtcttgcctgacaagtttaaaacaactttcttaccagatatgccataa

SEQ ID NO: 59710 - DNA, 120 bp, synthetic construct; identical to SEQ ID NO: 28035
  source 1..120: mol_type = other DNA

SEQ ID NO: 59711 - DNA, 120 bp, synthetic construct
  source 1..120: mol_type = other DNA
ttgacctcccagactcaatcaattctcccatctcagccccccaagtagctgggactacacgtgtacacaaccacgcctaattttttcaatttttagtagagatggagtttctccatgttg

SEQ ID NO: 59712 - DNA, 120 bp, synthetic construct
  source 1..120: mol_type = other DNA
gatgggtcttgactctttatccaatttgccagtctatgtcttttaattggaggatttagcccatttacatttaaggttaatattgttatgtgtgaatttgatcctgtcattatgatgtta

SEQ ID NO: 59713 - DNA, 120 bp, synthetic construct
  source 1..120: mol_type = other DNA
tttcttggaggctttgttcgtttctttttattcttttttctctaaacttctcttttcgcttcatttcattcatttcatcttccatcactgataccctttcttccagttgattgaatcggc

SEQ ID NO: 59714 - DNA, 120 bp, synthetic construct
  source 1..120: mol_type = other DNA
tcaagaactacaaaccactgctcaatgaaataaaagagggcataaaaaaatggaagaacattccatgctcatgggtaggaagaatcaatatcgtgaaaatggccatactgcccaaggtaa

SEQ ID NO: 59715 - DNA, 120 bp, synthetic construct
  source 1..120: mol_type = other DNA
tggagaaataggaacacttttacactgttggtgggactgtaaactagttcaaccattgtggaagtcagtgtggcgattcctcagggatctagaactagaaataccatttgacccagccat

SEQ ID NO: 59716 - DNA, 120 bp, synthetic construct
  source 1..120: mol_type = other DNA
gtctgggaggtgaggagcgtctctgaccagccgccccgtctgagaagtgaggagcccatccgcccagcagccgccccgtctgggggagcccctccgcctggcagccgccccatccgggaa

SEQ ID NO: 59717 - DNA, 120 bp, synthetic construct
  source 1..120: mol_type = other DNA
atctgctgaccttccctccactattgtcctatgaccctgccaaatcctcctctccgagaaacacccaagaatgatcaataaatactaaaaaaaaaaaaaaaaagaaagaaaaatagaata

SEQ ID NO: 59718 - DNA, 120 bp, synthetic construct; identical to SEQ ID NO: 21906
  source 1..120: mol_type = other DNA

SEQ ID NO: 59719 - DNA, 120 bp, synthetic construct
  source 1..120: mol_type = other DNA
ggcagccgtggtggtggtggatatgatggcagtggggatggctataatggatttggtaatgatggaagccattttggaggtggtggaagctacaatgattttggcaattacaaaaatcag

SEQ ID NO: 59720 - DNA, 120 bp, synthetic construct; identical to SEQ ID NO: 21907
  source 1..120: mol_type = other DNA

SEQ ID NO: 59721 - DNA, 120 bp, synthetic construct
  source 1..120: mol_type = other DNA
ctccacctctcaggttcaagtgattctcctgcctcagtctcccgtgtagctggggcttcaggtgtgtaccaccactcctggcaaattttttttttttttttttttttttttttttttttt

SEQ ID NO: 59722 - DNA, 120 bp, synthetic construct; identical to SEQ ID NO: 34908
  source 1..120: mol_type = other DNA

SEQ ID NO: 59723 - DNA, 120 bp, synthetic construct; identical to SEQ ID NO: 29725
  source 1..120: mol_type = other DNA

SEQ ID NO: 59724 - DNA, 120 bp, synthetic construct; identical to SEQ ID NO: 29726
  source 1..120: mol_type = other DNA

SEQ ID NO: 59725 - DNA, 120 bp, synthetic construct
  source 1..120: mol_type = other DNA
acccagccaaaccattactggatatacacccaaaggattataaatcatgctgctataaagacacatgcacggccgggcgtggtggctcacgcctgtaatcccagcactttgggaggccga

SEQ ID NO: 59726 - DNA, 120 bp, synthetic construct; identical to SEQ ID NO: 31804
  source 1..120: mol_type = other DNA

SEQ ID NO: 59727 - DNA, 120 bp, synthetic construct; identical to SEQ ID NO: 31805
  source 1..120: mol_type = other DNA

SEQ ID NO: 59728 - DNA, 120 bp, synthetic construct; identical to SEQ ID NO: 31806
  source 1..120: mol_type = other DNA

SEQ ID NO: 59729 - DNA, 120 bp, synthetic construct
  source 1..120: mol_type = other DNA
aaacataataaattttgtttgtttgtttgcttgtttgtttattttgagagatgaggtcttgctatgtcgcccaggctggcatcaaactcctggtctcaagtgatcctcccacttcggctc

SEQ ID NO: 59730 - DNA, 120 bp, synthetic construct
  source 1..120: mol_type = other DNA
ctcagcaaatgtgaaagaacagaaattatcacaaactgtctctcagaccacagtgcaatcaaactagaactcaggattaagaaactcactcaaaaccgctcaactacatggaaactgaac

SEQ ID NO: 59731 - DNA, 120 bp, synthetic construct
  source 1..120: mol_type = other DNA
tggcagagacacaacaaaaaaagagaattttagacaaatatccctgatgaacatcgatgcaaaaatcctcaataaaatactggcaaaccgaatccagcagcacatcaaaaagcttatcca

SEQ ID NO: 59732 - DNA, 120 bp, synthetic construct
  source 1..120: mol_type = other DNA
catggtactggtaccaaaacagagatatagaccaatggaacagaagagagccctcagaaataatgccgcatatctacaaccatctgatctttgacaaaactgacaaatacaagaaatggg

SEQ ID NO: 59733 - DNA, 120 bp, synthetic construct
  source 1..120: mol_type = other DNA
ttattgtggcactactcacaatagcaaagacttggaaccaacccaaatgtccaacaatggtagactggattaagaaaatgtggcacatatacaccatggaatactatgcagccataaaaa

SEQ ID NO: 59734 - DNA, 120 bp, synthetic construct
  source 1..120: mol_type = other DNA
ttctattcccacctatgagtgagaacatgcggtgtttggttttctgtccttccgatagtttactgagaatgaagatttccaatttcatccatgtccccacaaaggacatgaactcatcat

SEQ ID NO: 59735 - DNA, 120 bp, synthetic construct
  source 1..120: mol_type = other DNA
caaggctggttcaatacatgcaaatcaataaatgtaatccagcatataaacagaaccgaagacaaaaaccacatgattatctcaatagatgcagaaaaggcctttgacaaaattcaacaa

SEQ ID NO: 59736 - DNA, 120 bp, synthetic construct
  source 1..120: mol_type = other DNA
gcccaaggtaatttataggttcaatgccatccccatcaagctaccaatgactttcttcactgaattggaaaaaactactttaaagttcatatggaaccaaaaaagagcccacatcgccaa

SEQ ID NO: 59737 - DNA, 120 bp, synthetic construct
  source 1..120: mol_type = other DNA
ggctcaaaataaagggatggaggaagatctaccaagcaaatggaaaacaaaaaagggcaggggttgcaatcctagtctctgataaaacagattataaacgaacaaagatcaaagagacaa

SEQ ID NO: 59738 - DNA, 120 bp, synthetic construct
  source 1..120: mol_type = other DNA
ttgatagacctctagcaagactaataaagaagaaaagagagaagaatcaaatagccgcaataaaaaatgataaaggggatatcaccaccgatcccacagaaatacaaactaccatcagag

SEQ ID NO: 59739 - DNA, 120 bp, synthetic construct
  source 1..120: mol_type = other DNA
tctcaaaataataagagctatttatgacaaacccacggccaatatcatactgaatggacaagaacaggaagcattccctttgaaaactggcacaagacagggatgccctctctcaccact

SEQ ID NO: 59740 - DNA, 120 bp, synthetic construct
  source 1..120: mol_type = other DNA
ataaatcgttcagggaaaactggctagccatatgtagaaagctgaaactggatcccttccttacaccttatacaaaaattaattcaagatggattaaagacttacatgttagacctaaaa

SEQ ID NO: 59741 - DNA, 120 bp, synthetic construct; identical to SEQ ID NO: 25605
  source 1..120: mol_type = other DNA

SEQ ID NO: 59742 - DNA, 120 bp, synthetic construct
  source 1..120: mol_type = other DNA
cacagtgcaatcaaattagaactcaggatttaaaaactcactcacaaccacactcctatatggaaactgaataacttgctcctgaatgactactgggtaaataatgaaatgagggaggaa

SEQ ID NO: 59743 - DNA, 120 bp, synthetic construct
  source 1..120: mol_type = other DNA
ttacctggagctgagacaaatttagagagccaagcgaaatatcagagtagaggaagcagcaggaagagctctgtgggcactcttggtccacagggaagccatttctgactttgtctcata

SEQ ID NO: 59744 - DNA, 120 bp, synthetic construct
  source 1..120: mol_type = other DNA
agaaacataaaatgtatgcatgcccatcaacactgattttaaaataacttggaaacttggtaaaattcatgtctaaaacaccaaaagcaatggcaacaaaagacaaaattgacaaatggg

SEQ ID NO: 59745 - DNA, 120 bp, synthetic construct
  source 1..120: mol_type = other DNA
aatgatagactggattaagaaaatgtggcacatatacaccatggaatactatgcagccataaaaaatgattagttcatgtcctttgtagggacatggatgaaattggaaatcatcattct

SEQ ID NO: 59746 - DNA, 120 bp, synthetic construct
  source 1..120: mol_type = other DNA
tctgaatcctctactaaagagaagtctaagcctgggcaacctagtgagactctgtctctacaaaaacaacaaaataaaattaggcaggcatggtggcacattcctgtggtcctagatact

SEQ ID NO: 59747 - DNA, 120 bp, synthetic construct
  source 1..120: mol_type = other DNA
atggaggaagatctatcaagcaaatggaaaacaaaaaaaggcaggggtggcaatcctagtctctgataaaacagactttaaaccaacaaagatcaaaagagacaaagaaggccattacat

SEQ ID NO: 59748 - DNA, 120 bp, synthetic construct
  source 1..120: mol_type = other DNA
attaatgaatccaggagctggttttttgaaaggatcaacaaaattgatagaccgctagcagactaataaagaaaaaaagagagaagaatcaaatagacgcaataaaaaatgataaagggg

SEQ ID NO: 59749 - DNA, 120 bp, synthetic construct
  source 1..120: mol_type = other DNA
ctggcacaagacagggatgccctctctcaccactcctactcaactcagtgttggaagttctggccagggcaattaggcaggagaaggaaataaagggtattcaattaggaaaagaggaag

SEQ ID NO: 59750 - DNA, 120 bp, synthetic construct
  source 1..120: mol_type = other DNA
accaaaagcaatagcaacaaaagccaaaattgacaaatgggatctaattaaactaaagagctgctgcacagcaaaagaaactaccatcagagtgaacaggcaacctacaaaatgggagaa

SEQ ID NO: 59751 - DNA, 120 bp, synthetic construct; identical to SEQ ID NO: 25608
  source 1..120: mol_type = other DNA

SEQ ID NO: 59752 - DNA, 120 bp, synthetic construct; identical to SEQ ID NO: 25609
  source 1..120: mol_type = other DNA

SEQ ID NO: 59753 - DNA, 120 bp, synthetic construct
  source 1..120: mol_type = other DNA
gactgacacctcacacggccgggtgctccaacagacctgcagctgagggtcctgtctgttagaaggaaaactaacaaacagaaaggacatccacaccaaaaacccatctgtacatcacca

SEQ ID NO: 59754 - DNA, 120 bp, synthetic construct
  source 1..120: mol_type = other DNA
caggcctgccctaaaagagctcctgaaggaagcgctaaacatggaaaggaacaaccggtaccagccactgcaaaatcatgccaaaatgtaaagaccatcgagactaggaagaaactgtgt

SEQ ID NO: 59755 - DNA, 120 bp, synthetic construct
  source 1..120: mol_type = other DNA
aactcaggattaagaatctcactcaaaactgctcaactacatggcaactgaacaacctgctcctgaatgactactgggtacataacaaaatgaaggcagaaataaagatgttctttgaaa

SEQ ID NO: 59756 - DNA, 120 bp, synthetic construct
  source 1..120: mol_type = other DNA
tacacaaatcaataaatgtaatccagcatataaacagaaccaaagacaaaaaccacgattatctcaatagatgcagaaaaggcctttgacaaaattcaacaaccttcatgctaaaaactc

SEQ ID NO: 59757 - DNA, 120 bp, synthetic construct
  source 1..120: mol_type = other DNA
acaaaaacaagcaatggggaaaggattccctatttaataaatggtgctgggaaaacaggctagccatatgtagaaagctgaaactggatcccttccttacaccttatacaaaaatcaatt

SEQ ID NO: 59758 - DNA, 120 bp, synthetic construct
  source 1..120: mol_type = other DNA
tatcgcaagaacaaaaaaccaaacaccgcatattctcactcataggtgggaattgaacaatgagaacacatggacacaggaaggggaacatcacactctggagactgttgtggggtgggg

SEQ ID NO: 59759 - DNA, 120 bp, synthetic construct; identical to SEQ ID NO: 10770
  source 1..120: mol_type = other DNA

SEQ ID NO: 59760 - DNA, 120 bp, synthetic construct
  source 1..120: mol_type = other DNA
tacctgggtgattaaataatctgtacaacaaacccgcatgacacaagtttacctgtgaaacaagcctgcacttgtaccctgaacttaaaataaataaaaagagggaagggaagggaaggg

SEQ ID NO: 59761 - DNA, 120 bp, synthetic construct
  source 1..120: mol_type = other DNA
tggacatttgggttggttccaagtctttgctattgtgaataatgccgcaataaacctatgtgtgcatgtgtctttatagcagcatgatttatagtcctttgggtatatacccagtaatgg

SEQ ID NO: 59762 - DNA, 120 bp, synthetic construct
  source 1..120: mol_type = other DNA
caaagatcagatagttgtagatatgcggcattatttctgagggctctgttctgttccattgatctagatctctgttttggtaccagtaccatgctgttttggttactgtagccttgtagt

SEQ ID NO: 59763 - DNA, 120 bp, synthetic construct
  source 1..120: mol_type = other DNA
agataatcatgtggtttttgtctttggttctgtttatatgctggattacatttattgatttgcatatattgaaccagccttgcatcccagagatgaagcccacttgatcatggtggataa

SEQ ID NO: 59764 - DNA, 120 bp, synthetic construct
  source 1..120: mol_type = other DNA
tttctagtatgttgtgtctttgttctcgttggtttcaaagaacatctttatttctgccttcatttcgttatgtatccagtagtcattcaggagcaggttgttcagtttccatgtagttga

SEQ ID NO: 59765 - DNA, 120 bp, synthetic construct
  source 1..120: mol_type = other DNA
tgatgcagtttcttcctagtctcgatggtctttacattttggcatgactttgcagcggctggtaccggttgttcctttccctgtttagcgcttccttcaggagctcttttagggcaggcc

SEQ ID NO: 59766 - DNA, 120 bp, synthetic construct
  source 1..120: mol_type = other DNA
ccgtagctcagaataatttgatcttctgaagccgccttctctcagctcgtcaaagtcattctccatccagctttgttccattgctggtgaggaactgcgttcctttggaggaggagaggc

SEQ ID NO: 59767 - DNA, 120 bp, synthetic construct
  source 1..120: mol_type = other DNA
ctgggagctgtagaccggagctgttcctatttggccatcttggctcctccctcatgaccgttactttctattacagtcatatgaccattactgtcattaaagataataatgaattcaact

SEQ ID NO: 59768 - DNA, 120 bp, synthetic construct; identical to SEQ ID NO: 26013
  source 1..120: mol_type = other DNA

SEQ ID NO: 59769 - DNA, 120 bp, synthetic construct
  source 1..120: mol_type = other DNA
catagtattccatggtgtatatgtgccacattgtcttaatccagtctatcattgttgcacatttgggttggttccaagtctttgctattgtgaatagtgccacaataaacatacgtgtgc

SEQ ID NO: 59770 - DNA, 120 bp, synthetic construct; identical to SEQ ID NO: 26014
  source 1..120: mol_type = other DNA

SEQ ID NO: 59771 - DNA, 120 bp, synthetic construct; identical to SEQ ID NO: 26015
  source 1..120: mol_type = other DNA

SEQ ID NO: 59772 - DNA, 120 bp, synthetic construct
  source 1..120: mol_type = other DNA
ccccacacacaccacaccacaccacacacacaccacatcacaccacaccacacacacacacacacacacatctccccacatgggagacagtctagctgatagcagagtgaaacttgcgta

SEQ ID NO: 59773 - DNA, 120 bp, synthetic construct; identical to SEQ ID NO: 26016
  source 1..120: mol_type = other DNA

SEQ ID NO: 59774 - DNA, 120 bp, synthetic construct
  source 1..120: mol_type = other DNA
ccagcctgggtgacagagtaagacccagtctcagaaaaaaaaaaaaggattccctacaaagagacttagattcccacacaataataatgggagacgttaacatcccactgtcaacattag

SEQ ID NO: 59775 - DNA, 120 bp, synthetic construct
  source 1..120: mol_type = other DNA
aaagagagaagaatcaaatagacgcaataaaaaatgataaagcggatatcaccactgatcccacagaaatacaaattaccatcagagaatactataaacacctctacgcaaataaacgag

SEQ ID NO: 59776 - DNA, 120 bp, synthetic construct
  source 1..120: mol_type = other DNA
gtgtggtgattcctcaaggatctagaactagaaataccatttgatccagccatctcattactgggtatatacccaaaggattataagtcatgcagctataaagacatatggacacatatg

SEQ ID NO: 59777 - DNA, 120 bp, synthetic construct
  source 1..120: mol_type = other DNA
ttcccttcctttttacttttatttttattttattaatttttttttttttgaggcagagtctcactctgtcaccaggctggagttcagtggcgcgatttcgggtcactgcaacctccacct

SEQ ID NO: 59778 - DNA, 120 bp, synthetic construct; identical to SEQ ID NO: 27258
  source 1..120: mol_type = other DNA

SEQ ID NO: 59779 - DNA, 120 bp, synthetic construct
  source 1..120: mol_type = other DNA
gcaaggataagataaaccaagagctctcagtcatggtctaagctggcactggcttttatttatttatttttttttcgaggtggagtctcactctgtcacctaggctggagtgcagtggcg

SEQ ID NO: 59780 - DNA, 120 bp, synthetic construct
  source 1..120: mol_type = other DNA
ctttcttgtggcagtagttatgatgccaacttttggggttctttgtcctcctcttttcttcctacctgccagcattcaaatggccacttctattaagtgatggaattcaagaatgtattt

SEQ ID NO: 59781 - DNA, 120 bp, synthetic construct
  source 1..120: mol_type = other DNA
tccagtaagccatgactgcaccactgcactccagcctgggtgacagagcaagaccctgtcttaaaaaagaaaagtttattaacgtgaatatcagttagaaatctagttgttcattgcaaa

SEQ ID NO: 59782 - DNA, 120 bp, synthetic construct
  source 1..120: mol_type = other DNA
gtcaacatggctcagacttgatgtggatcgtgatcatttcgggaaatgtgttactccaaaaacttttataatctttgcttaatttgtttttaaatactttcctggctgggcgtggtggct

SEQ ID NO: 59783 - DNA, 120 bp, synthetic construct
  source 1..120: mol_type = other DNA
taggtcctggtgtcaagcaggggacacggcaggatccaagaagcactgaaatgtgtccagtcccaggagtccttcagcctctggggggtctgggggcctccagttccaggggtccttcag

SEQ ID NO: 59784 - DNA, 120 bp, synthetic construct
  source 1..120: mol_type = other DNA
cctcttatatgctggctgtcttttatcctctttctgactcatgagctccttttttagctctagtccttttcctctttccctctcttgtgattgttctcctgaaggacctggtctcatccc

SEQ ID NO: 59785 - DNA, 120 bp, synthetic construct
  source 1..120: mol_type = other DNA
agcacagaaatgaggggaccctcccagggtttgcctgagctgtgggaagactaggagggaaggtacctggaagacctgacacagagaacaatctgggcctgactggagtgtggggagaag

SEQ ID NO: 59786 - DNA, 120 bp, synthetic construct
  source 1..120: mol_type = other DNA
tacatgggctcatgggcaccacctctggatccatccaggaggaaatagactggtcaggtagggaccaacactccagggttgaccagtgagacagggttcttgggaattgggttacactta

SEQ ID NO: 59787 - DNA, 120 bp, synthetic construct
  source 1..120: mol_type = other DNA
gcttagccctgggcagcccatcttgggccccagtaatgttccaatgcttccaaaccctttgctgagatccagcaccagtgtgaaaaggcttcctgctcatctccttcaatctgttgtttc

SEQ ID NO: 59788 - DNA, 120 bp, synthetic construct
  source 1..120: mol_type = other DNA
aaacaaaaaacaaaaaaacaccccaacaaactaagagtccagtactctaaccatgctactgtcatccctggaagcagcagtgtcatgtaaggtggggtagtacatcagagttgggaggga

SEQ ID NO: 59789 - DNA, 120 bp, synthetic construct
  source 1..120: mol_type = other DNA
tttccacacatgccagccccgtgtccacagctccaagaccacctgagggattcactcagtggagctcatgtgcttatagcgactctgtttcctaggtgacctggaagacctggaggagca

SEQ ID NO: 59790 - DNA, 120 bp, synthetic construct
  source 1..120: mol_type = other DNA
tagtctgtgggatctgaataggttttcattctcccacatgcacacagaagtgctgggatcagttggcctaggaagaaactatacaagggctttgtgacaaattcagtgtagtagctcatg

SEQ ID NO: 59791 - DNA, 120 bp, synthetic construct
  source 1..120: mol_type = other DNA
ctctttgtttaggtttgaaatcttagtgttgtaaaggtggcgctgcttcacctgcttttgctcaagggccactctggtttgagctttctgccagaaatgagatttgggaagttcagttta

SEQ ID NO: 59792 - DNA, 120 bp, synthetic construct
  source 1..120: mol_type = other DNA
caagaaaagagaaactccatctcaaaaaaaaaaaaaaaagcaagttctgggagggacaaaaaacacagcagcaggacaggtggatcctgggaggaaatgacctcgaggggataaagaagg

SEQ ID NO: 59793 - DNA, 120 bp, synthetic construct
  source 1..120: mol_type = other DNA
ctctacatgaccctggaattatccattctgggccccattatcttatggtcaatatgagacctctatggagaaagttggggtgatttccccctaaccccgcctgcaggctcctctcttctc

SEQ ID NO: 59794 - DNA, 120 bp, synthetic construct
  source 1..120: mol_type = other DNA
ttggagcaaaatcagctacttgccagccaacatggacttcagaggaaacatcctctgagaaaaatgtgtgtctttagtatgagttgatttgttcgcttctttggggttcctttgaacact

SEQ ID NO: 59795 - DNA, 120 bp, synthetic construct
  source 1..120: mol_type = other DNA
aataattttcctaccatttaaagatgacccctacttagcatgtggtatttgttcttccactttcccttttcaacagaatttgtgtgtagcatgatgttcactgctccccatgctcacact

SEQ ID NO: 59796 - DNA, 120 bp, synthetic construct
  source 1..120: mol_type = other DNA
atattagagttgcaaagatggcactgttttgcctgcctttgttcaagagccactctggtttgagctgtctgccagaaatgagatttgggaagtttggtttaaaagaatgctaagatccag

SEQ ID NO: 59797 - DNA, 120 bp, synthetic construct
  source 1..120: mol_type = other DNA
gggcaagttagctcaggtcagattaggaaggagaagctgtcgatgctccagggaaacactgtgtggtgtgccctgtttgagatgggttacttcatctcaaagaggttgccttagctagag

SEQ ID NO: 59798 - DNA, 120 bp, synthetic construct; identical to SEQ ID NO: 27307
  source 1..120: mol_type = other DNA

SEQ ID NO: 59799 - DNA, 120 bp, synthetic construct; identical to SEQ ID NO: 27308
  source 1..120: mol_type = other DNA

SEQ ID NO: 59800 - DNA, 120 bp, synthetic construct
  source 1..120: mol_type = other DNA
tgtccctgattgttctctgcattttttttttttgagatgaaatctcactgtgttgcccaggctagaatgcagtgccatgatcaaggcttaggtgcagcaaaccaccatgacacatttata

SEQ ID NO: 59801 - DNA, 120 bp, synthetic construct; identical to SEQ ID NO: 27309
  source 1..120: mol_type = other DNA

SEQ ID NO: 59802 - DNA, 120 bp, synthetic construct; identical to SEQ ID NO: 27310
  source 1..120: mol_type = other DNA

SEQ ID NO: 59803 - DNA, 120 bp, synthetic construct; identical to SEQ ID NO: 27311
  source 1..120: mol_type = other DNA

SEQ ID NO: 59804 - DNA, 120 bp, synthetic construct
  source 1..120: mol_type = other DNA
cacacattgtggggcagggagcttttgccttactaattttgttctctctttggagcaaaatcagttacttgccaaccaacatggacttgagaggaaatatcctctgagaaaaatttgtgt

SEQ ID NO: 59805 - DNA, 120 bp, synthetic construct
  source 1..120: mol_type = other DNA
ccattttccctgatggaatctctgcacagctgggttggagagggtcagtgcccaccccttgccccgcctcgctgctccccatgacagactgtctctgtgctggagtcagtgtgagcatga

SEQ ID NO: 59806 - DNA, 120 bp, synthetic construct
  source 1..120: mol_type = other DNA
ttcaaatcttggtttagtcttctttgaaacaaaggttagtgaatatgtagaatattttggctagaattatatcacctctttgaagaaaggttgctttttacctcgtacaaaatgttctgg

SEQ ID NO: 59807 - DNA, 120 bp, synthetic construct
  source 1..120: mol_type = other DNA
caccactgcatttttgcaaaaaatcaacccattcattcctcaccacagctgtagctgaaggtaagtttaatatcccaagtcctcacatggagatgatgtagagatgaatttttcaggctt

SEQ ID NO: 59808 - DNA, 120 bp, synthetic construct
  source 1..120: mol_type = other DNA
ttgcataaaaatcttgtgcctttccagaagtgtcttcgaggctttaggaccattgcctcaaccactgtctcccatctgcttttctaatgtcaccaagtaaagaaaagacttgtatggtga

SEQ ID NO: 59809 - DNA, 120 bp, synthetic construct; identical to SEQ ID NO: 27312
  source 1..120: mol_type = other DNA

SEQ ID NO: 59810 - DNA, 120 bp, synthetic construct; identical to SEQ ID NO: 27313
  source 1..120: mol_type = other DNA

SEQ ID NO: 59811 - DNA, 120 bp, synthetic construct
  source 1..120: mol_type = other DNA
ggcatttgcctgcacacttatacgtgcaacccacagtgcaagtctttctgaagcccaactcagattcagggggctttgctctgcagatgatgaacaatggaatcaaacatttaagctgtg

SEQ ID NO: 59812 - DNA, 120 bp, synthetic construct
  source 1..120: mol_type = other DNA
aacttggtcccttgctgtggtcagttggtcatggaggggtgctcactgccagacagctgacaatacagggcaatgggtaggatgaccagacatttgaatttgttcctcagagaggcttcg

SEQ ID NO: 59813 - DNA, 120 bp, synthetic construct; identical to SEQ ID NO: 27314
  source 1..120: mol_type = other DNA

SEQ ID NO: 59814 - DNA, 120 bp, synthetic construct
  source 1..120: mol_type = other DNA
acccaggaagtgcaaagggtcagggaattccctcccctagccaaggaaagggatgacaggctgcacctggaaaatcaggtcactcccaccctaatactgcgcttttccaatggtcttagc

SEQ ID NO: 59815 - DNA, 120 bp, synthetic construct
  source 1..120: mol_type = other DNA
ctccatcaggtcatttaaggacttctctgcattggttattctagttagccattcatttaatcttttttcaaggtttttaacttctttgccattggtttgaacttcctcctttagctcgga

SEQ ID NO: 59816 - DNA, 120 bp, synthetic construct
  source 1..120: mol_type = other DNA
gataaagagtcaagatccatcagtgtgctatattcaggaaacccatctcacgtgcagagacacacacaggctcagaataaagggatggaggaagatctaccaagcaaatggaaaacaaaa

SEQ ID NO: 59817 - DNA, 120 bp, synthetic construct
  source 1..120: mol_type = other DNA
catattcaaaagctagcagaagcaagaaataactaagatcagagcagaactgaaggaaacagagacacaaaaagcccttcaaaaaatcaatgaatccaggagctggttttttgaaaagat

SEQ ID NO: 59818 - DNA, 120 bp, synthetic construct
  source 1..120: mol_type = other DNA
ttgcaaacggggacaatttgacttcctcttttcctaattgaataccctttatttccttctgcctgattgccctggccagaacttccaacactatgttgaagaggagtggtgagagagggc

SEQ ID NO: 59819 - DNA, 120 bp, synthetic construct
  source 1..120: mol_type = other DNA
accaaaagcaatgacaatgaaagccaaaattaacaaatgggatctaattaaactaaagagcttctgcacagaaaagaaactaccatcagagtgaacagggaacctacagaatgggagaaa

SEQ ID NO: 59820 - DNA, 120 bp, synthetic construct
  source 1..120: mol_type = other DNA
acaaacctgcacgttgtgcacatgtaccctaaaacttatagtataataaacaaaaagtaaaaaataaaaaaaaacaaaaaaaactgcattaacatagatgttgcattttttttcaggaat

SEQ ID NO: 59821 - DNA, 120 bp, synthetic construct; identical to SEQ ID NO: 27315
  source 1..120: mol_type = other DNA

SEQ ID NO: 59822 - DNA, 120 bp, synthetic construct
  source 1..120: mol_type = other DNA
tcagccacccacatatcgctgaaatgtcaaagagcttgtgaggaagcttctggggcacctgccttctagaggaggctgagggcagctgcggatggttatttatggggatgtttttggcct

SEQ ID NO: 59823 - DNA, 120 bp, synthetic construct; identical to SEQ ID NO: 27316
  source 1..120: mol_type = other DNA

SEQ ID NO: 59824 - DNA, 120 bp, synthetic construct
  source 1..120: mol_type = other DNA
cgatgttaacagctgtcttcagggcaatcgtccccggtgccacagctgtccttattggcttagcccaagtgttctcagctgttctcgttggacccaggccaggtgttcacagctgtcctc

SEQ ID NO: 59825 - DNA, 120 bp, synthetic construct
  source 1..120: mol_type = other DNA
actcgatctgactgggcccagaccgggtatgcaaagctgtcttaactgggagcagcccatgctttcacagcggtcttcactggtgtcagccaggtttctcagaactgtcacttggccgaa

SEQ ID NO: 59826 - DNA, 120 bp, synthetic construct
  source 1..120: mol_type = other DNA
aaatacaaatactacccgggtgtagtggcaagtgcatgtaatcccagctactcaggaggctgaggcaggagaatcgcttgaactcgggcggcagaggttgcattgagccaagattgtgcc

SEQ ID NO: 59827 - DNA, 120 bp, synthetic construct; identical to SEQ ID NO: 27317
  source 1..120: mol_type = other DNA

SEQ ID NO: 59828 - DNA, 120 bp, synthetic construct; identical to SEQ ID NO: 27318
  source 1..120: mol_type = other DNA

SEQ ID NO: 59829 - DNA, 120 bp, synthetic construct
  source 1..120: mol_type = other DNA
tcagttcatctcattacatgggcattgtatcacttcacatcatcacaagaaaaagggtgagaaccagccgggtgcagtggctcacacctgtaatcccagcactttgggaggccgaggcgg

SEQ ID NO: 59830 - DNA, 120 bp, synthetic construct
  source 1..120: mol_type = other DNA
atatcatatagtactgcctggcagcctggcataccacgccggtgtttcttaagcttctctctgaatgtgaggcgtggttccgagtggataagctcttaaaggagtgatctttccagtggt

SEQ ID NO: 59831 - DNA, 120 bp, synthetic construct
  source 1..120: mol_type = other DNA
gccgtgcatgtgtgggaggcatggaacataggagaaatctctgtaccttcctccgattttgctgtgaacctaaaactgctataagaaatagagttattgatttaaaaaacatattcattg

SEQ ID NO: 59832 - DNA, 120 bp, synthetic construct; identical to SEQ ID NO: 27319
  source 1..120: mol_type = other DNA

SEQ ID NO: 59833 - DNA, 120 bp, synthetic construct
  source 1..120: mol_type = other DNA
cgaactgggtggagcccaccacagctcaaggaggcctgcctgcctctgtaggctccacctctgggggcagggcacagacaaacaaaaaggcagcagtaacctctgcagacttaagtgtcc

SEQ ID NO: 59834 - DNA, 120 bp, synthetic construct
  source 1..120: mol_type = other DNA
agtgatgtggagaatggaaccaagttggaaaacactctgcaggatattatccaggagaacttccccaatctagcaaggcaggccaacattcagattcaggaaatacagagaacgccacaa

SEQ ID NO: 59835 - DNA, 120 bp, synthetic construct
  source 1..120: mol_type = other DNA
gcacccaatacaggagcacccagattcataaagcaagtcctgagtgacctacaaagagacttagactcccacacattaataatgggagactttaacaccccactgtcaatattagacaga

SEQ ID NO: 59836 - DNA, 120 bp, synthetic construct
  source 1..120: mol_type = other DNA
aaacacctctacgcaaataaactagaaaatctagaagaaatggatacattcctcgacacatacactctcccaagactaaaccaggaagaagttgaatctctgaatagaccaataacaggc

SEQ ID NO: 59837 - DNA, 120 bp, synthetic construct
  source 1..120: mol_type = other DNA
cgtctcagcccaaaatctccttaagctgataagcaacttcagcaaagtctcaggatacaaaatcaatgtacaaaaaccacaagcattcttatacaccaacaacagacaaacagagagcca

SEQ ID NO: 59838 - DNA, 120 bp, synthetic construct
  source 1..120: mol_type = other DNA
aacaaaagacaaaattgacaaatgggatctaattaaactaaagagcttctgcacagcaaaagaaactaccatcagagtgaacaggcaacctacaacatgggagaaaattttcgcaaccta

SEQ ID NO: 59839 - DNA, 120 bp, synthetic construct
  source 1..120: mol_type = other DNA
tggatgaaattggaaaccatcattctcagtaaactatcacaagaacaaaaaaccaaacaccgcatattctcactcataggtgggaattgaacaatgagatcacatggacacaggaagggg

SEQ ID NO: 59840 - DNA, 120 bp, synthetic construct; identical to SEQ ID NO: 27320
  source 1..120: mol_type = other DNA

SEQ ID NO: 59841 - DNA, 120 bp, synthetic construct
  source 1..120: mol_type = other DNA
gacccatgaataatgtgggggttaggggctctgattccagtgcagctgaaaatctaagtataacttttgattttcccaatttagctactaatagcccactattgactggaagccttcctg

SEQ ID NO: 59842 - DNA, 120 bp, synthetic construct; identical to SEQ ID NO: 27321
  source 1..120: mol_type = other DNA

SEQ ID NO: 59843 - DNA, 120 bp, synthetic construct
  source 1..120: mol_type = other DNA
ggagtgcagtggcgccatctcggctcactgcaagctgcgcctcccgggttcacgccattctcctgcctcagcctcccgagtagctgggactacaggcgcccgccaccacgcccggctaat

SEQ ID NO: 59844 - DNA, 120 bp, synthetic construct
  source 1..120: mol_type = other DNA
cgggccagccaggagaacccgcgagcccagcggcgcctgcacctgcggcttccgggagccgggcggctttgcgaggctcactaggtctgagaggtcggaggccgccagtgtcgctgctga

SEQ ID NO: 59845 - DNA, 120 bp, synthetic construct
  source 1..120: mol_type = other DNA
attaaaatagtttgggtattaaaatatgaaataattgggtattaattcaaaatccaagagttgccattgaacaaacctgtaggcataggtaagtgctgaggtgaaagtgccaaccaaagc

SEQ ID NO: 59846 - DNA, 120 bp, synthetic construct; identical to SEQ ID NO: 27322
  source 1..120: mol_type = other DNA

SEQ ID NO: 59847 - DNA, 120 bp, synthetic construct; identical to SEQ ID NO: 27323
  source 1..120: mol_type = other DNA

SEQ ID NO: 59848 - DNA, 120 bp, synthetic construct
  source 1..120: mol_type = other DNA
acagtcccaccaacagtgtaagtgttcctatttctccacatcctctccagcacctgtcgtttcctgactttttaatgatcaccattctaactggtgtaagatggtatctcatcgtggttt

SEQ ID NO: 59849 - DNA, 120 bp, synthetic construct
  source 1..120: mol_type = other DNA
ttggttccatatgaactttaaagtagttttttccaattcagtgaagaaagtcattggtagcttgatggggatggcattgaatctataaattaccttgggcagtatggccattttcacaat

SEQ ID NO: 59850 - DNA, 120 bp, synthetic construct
  source 1..120: mol_type = other DNA
taccaaagcctggcagagacacaacaaaaaaagagacttttagacccatatccctgatgaacatcgatgcaaaaatcctcaataaaatactggcaaaccgaatccagcagcacatcaaaa

SEQ ID NO: 59851 - DNA, 120 bp, synthetic construct
  source 1..120: mol_type = other DNA
gcgtgatctcggctcactgcaaactgcgcctcccgggttcacgccattttcctgcctcagcctccagagtagctgctgggactacaggtgcccaccaccacgcctggctaattttttgta

SEQ ID NO: 59852 - DNA, 120 bp, synthetic construct
  source 1..120: mol_type = other DNA
gctttaatggcaacatcaatttaactagttttgtaatttctgtatttaattgtcacataacattatatccgttctttttttttttaaaaaaaaaggaaagcatacaatcttagttgctag

SEQ ID NO: 59853 - DNA, 120 bp, synthetic construct
  source 1..120: mol_type = other DNA
agcctacctggtctgagggtctgctcctcctggacacctctccggatcctgatccctggcgctgggcaatccacaggatgagactcatcggctgctggcgaagccgaccgcctgactttg

SEQ ID NO: 59854 - DNA, 120 bp, synthetic construct; identical to SEQ ID NO: 27226
  source 1..120: mol_type = other DNA

SEQ ID NO: 59855 - DNA, 120 bp, synthetic construct
  source 1..120: mol_type = other DNA
tcccaaagtgctgggattacaggcctgagccaccgcgcccagccctaaaatttttacaaatgtcattacaatagtaaaagacagtaggtgtcatgcaaaaatgttaaaaccttgattttt

SEQ ID NO: 59856 - DNA, 120 bp, synthetic construct
  source 1..120: mol_type = other DNA
catgtatgtatatatgtatatatacatgcaatttacacatctttttaaacttttcttttccttcaaaactaccttaatcttacatcttaatttttttaaaccaagagtaggaccaccatg

SEQ ID NO: 59857 - DNA, 120 bp, synthetic construct
  source 1..120: mol_type = other DNA
tgtgtgtgtgcgcacccgaacgcacatgtgtgtatgtgcacgtgtgtgtgtaaactatgacagataaaaccattttgcttatgtaagaatatgtaacataacttgtgcttctcacaaagg

SEQ ID NO: 59858 - DNA, 120 bp, synthetic construct
  source 1..120: mol_type = other DNA
aaataagtgaagcaattgttagaaaataatgggaaataagcagcaatcctagttttaccagaataaaaaatagggaatcttgatgattgacaatatgttctacaatatgaatgtttctag

SEQ ID NO: 59859 - DNA, 120 bp, synthetic construct
  source 1..120: mol_type = other DNA
ttcataactctaaacagggatttagcacgacatgaaaactagattcacataatcaaaataaaagaccatttttattctaattttaactcagaaattattatgcttattcaatttaaccct

SEQ ID NO: 59860 - DNA, 120 bp, synthetic construct; identical to SEQ ID NO: 27227
  source 1..120: mol_type = other DNA

SEQ ID NO: 59861 - DNA, 120 bp, synthetic construct
  source 1..120: mol_type = other DNA
cagctactccagaggctgaggcagcagaatggtgtgaacccaggaggcagagcttgcagcgagccgagatcacagcattgcactccagcctgggcgacagcgagactccgtcccaaaaaa

SEQ ID NO: 59862 - DNA, 120 bp, synthetic construct; identical to SEQ ID NO: 27228
  source 1..120: mol_type = other DNA

SEQ ID NO: 59863 - DNA, 120 bp, synthetic construct
  source 1..120: mol_type = other DNA
cctcaaacttctgggttcctcaagtgatcctcctgcctcagcctcccaagtagttgggaatacaggcatgtatcactgtgccttcttatgcttttaatattctatacaattattattgat

SEQ ID NO: 59864 - DNA, 120 bp, synthetic construct; identical to SEQ ID NO: 27229
  source 1..120: mol_type = other DNA

SEQ ID NO: 59865 - DNA, 120 bp, synthetic construct; identical to SEQ ID NO: 27230
  source 1..120: mol_type = other DNA

SEQ ID NO: 59866 - DNA, 120 bp, synthetic construct
  source 1..120: mol_type = other DNA
tggacccggaaaaaatggctgtgaacaccttggctttgcctgatgaagatggctatgaacccatggcctgggcccaatgaggaaagctgtgaacacctgcgctagccccagtgagggaag

SEQ ID NO: 59867 - DNA, 120 bp, synthetic construct
  source 1..120: mol_type = other DNA
tgaagacagctgggaagccctgggctggaaacaatgaagacagctatgaacaggtggcctggggccagtgaaaatggctcttaaccctgggcttgatgttactgaggggtagcgtgaact

SEQ ID NO: 59868 - DNA, 120 bp, synthetic construct; identical to SEQ ID NO: 27231
  source 1..120: mol_type = other DNA

SEQ ID NO: 59869 - DNA, 120 bp, synthetic construct
  source 1..120: mol_type = other DNA
atcaaaaccactgtcagaggtagggcctgttaggatcactgtctcacagaggaggaaactgaggcagagaccgggtaggtaccccaactgaggacacacagagaataagctaggatggaa

SEQ ID NO: 59870 - DNA, 120 bp, synthetic construct; identical to SEQ ID NO: 27232
  source 1..120: mol_type = other DNA

SEQ ID NO: 59871 - DNA, 120 bp, synthetic construct; identical to SEQ ID NO: 59820
  source 1..120: mol_type = other DNA

SEQ ID NO: 59872 - DNA, 120 bp, synthetic construct
  source 1..120: mol_type = other DNA
ttgtatcctttgcccacttcttaatggggttgtttttttcttgtaaatttgtttgagttctttgtagattctggatattagccctttatcagatgagtagattgcaaaaatttttctccc

SEQ ID NO: 59873 - DNA, 120 bp, synthetic construct
  source 1..120: mol_type = other DNA
agtgaactcccattcacaattgcttcaaagggaataaaatacctaggaatccaacttccaagggatgtgaagggtctcttcaaggagaactacaaaccactgctcaatgaaataaaagag

SEQ ID NO: 59874 - DNA, 120 bp, synthetic construct
  source 1..120: mol_type = other DNA
tcttgggaaggtgtatgtgtcgaggaatttatccatttcttctagtttttctagtttatttgtgtagaggtgtttatagtattctctgacggtcatttgtatttctgtgggatcggtggt

SEQ ID NO: 59875 - DNA, 120 bp, synthetic construct
  source 1..120: mol_type = other DNA
gttgcaatcctaatctctgataaaacagactttaaaccaacaaagatcaaaatagacaaagaaggccattacataatggtaaagggatcaattcaacaagaacagctaactaacctaaat

SEQ ID NO: 59876 - DNA, 120 bp, synthetic construct; identical to SEQ ID NO: 59815
  source 1..120: mol_type = other DNA

SEQ ID NO: 59877 - DNA, 120 bp, synthetic construct
  source 1..120: mol_type = other DNA
ggatgacaggctgcacctggaaaatcaggtcactcccaccctaatactgcgcttttccaatggtcttagccaacggcacaccaggagattatatcctgcacctggctcggagggtcctat

SEQ ID NO: 59878 - DNA, 120 bp, synthetic construct; identical to SEQ ID NO: 27233
  source 1..120: mol_type = other DNA

SEQ ID NO: 59879 - DNA, 120 bp, synthetic construct
  source 1..120: mol_type = other DNA
ccaaactaactaccacttgatggctgtgccaagaataaacttcccttcaactgaaccattctgaagaagcaattaatgggaattaactgaaaatgtggccccccagtggatttttcagca

SEQ ID NO: 59880 - DNA, 120 bp, synthetic construct; identical to SEQ ID NO: 27234
  source 1..120: mol_type = other DNA

SEQ ID NO: 59881 - DNA, 120 bp, synthetic construct; identical to SEQ ID NO: 27235
  source 1..120: mol_type = other DNA

SEQ ID NO: 59882 - DNA, 120 bp, synthetic construct; identical to SEQ ID NO: 27236
  source 1..120: mol_type = other DNA

SEQ ID NO: 59883 - DNA, 120 bp, synthetic construct
  source 1..120: mol_type = other DNA
aaggaaagagaaaaagagaaagaaagaaaaagaaagaaaagaaaggaaagaaagaaggaagggagggagggaaaaggaaaacctgtgcacacaggacacagcatggtctgacccttgtag

SEQ ID NO: 59884 - DNA, 120 bp, synthetic construct; identical to SEQ ID NO: 27237
  source 1..120: mol_type = other DNA

SEQ ID NO: 59885 - DNA, 120 bp, synthetic construct; identical to SEQ ID NO: 27238
  source 1..120: mol_type = other DNA

SEQ ID NO: 59886 - DNA, 120 bp, synthetic construct; identical to SEQ ID NO: 27239
  source 1..120: mol_type = other DNA

SEQ ID NO: 59887 - DNA, 120 bp, synthetic construct; identical to SEQ ID NO: 27240
  source 1..120: mol_type = other DNA

SEQ ID NO: 59888 - DNA, 120 bp, synthetic construct; identical to SEQ ID NO: 27241
  source 1..120: mol_type = other DNA

SEQ ID NO: 59889 - DNA, 120 bp, synthetic construct; identical to SEQ ID NO: 27242
  source 1..120: mol_type = other DNA

SEQ ID NO: 59890 - DNA, 120 bp, synthetic construct; identical to SEQ ID NO: 27243
  source 1..120: mol_type = other DNA

SEQ ID NO: 59891 - DNA, 120 bp, synthetic construct; identical to SEQ ID NO: 27244
  source 1..120: mol_type = other DNA

SEQ ID NO: 59892 - DNA, 120 bp, synthetic construct
  source 1..120: mol_type = other DNA
atattaaactggccttcagctacagctgtggtggaggataaatgggcagagtgacgttaaggtgtgcagtggtaatggaatttttatttacaacactcatctttgtgttgagctgtgcac

SEQ ID NO: 59893 - DNA, 120 bp, synthetic construct
  source 1..120: mol_type = other DNA
aaaatacagaattaaccgggcatggtgatgcatgcctataatcccagctactcaggaggctgaggctggagaatcacttgaacctgggaggcagaggtggtggtgggttgagattgcaca

SEQ ID NO: 59894 - DNA, 120 bp, synthetic construct
  source 1..120: mol_type = other DNA
tgtgcctttccacgaatgtcttctagatatcggggccattgtctcaagtactatttaccatctgtttttttaacataaacaagtgaagagaagacctgtgcacacaggacacagcctggt

SEQ ID NO: 59895 - DNA, 120 bp, synthetic construct
  source 1..120: mol_type = other DNA
tgaacttctaagacttgccgtgattatctcatcaaatacaatagagtatggcactgattatcgtctgcttttgaacaggagctgaggaatgacctcaacgctgtagaccaaaagcctgag

SEQ ID NO: 59896 - DNA, 120 bp, synthetic construct; identical to SEQ ID NO: 59794
  source 1..120: mol_type = other DNA

SEQ ID NO: 59897 - DNA, 120 bp, synthetic construct; identical to SEQ ID NO: 59793
  source 1..120: mol_type = other DNA

SEQ ID NO: 59898 - DNA, 120 bp, synthetic construct; identical to SEQ ID NO: 59792
  source 1..120: mol_type = other DNA

SEQ ID NO: 59899 - DNA, 120 bp, synthetic construct
  source 1..120: mol_type = other DNA
agagtcacaccgggcacagtggctcacgcctgtaatcccagcaccttgagaggtggagacgggcggatcagcagaagtcaggagtttgagaccagcctgactgacattgagaaaccccat

SEQ ID NO: 59900 - DNA, 120 bp, synthetic construct
  source 1..120: mol_type = other DNA
tggttatctccttaaatacaatagagtatggcactgattattgtctgcttttgaacaggagctgaggaatgacctcaacactgtagtccaaaagcctgaggactctgtgtgtttgacatt

SEQ ID NO: 59901 - DNA, 120 bp, synthetic construct; identical to SEQ ID NO: 1447
  source 1..120: mol_type = other DNA

SEQ ID NO: 59902 - DNA, 120 bp, synthetic construct
  source 1..120: mol_type = other DNA
agctcatggcattaaccttccactcatccccgagttcacatgtgcctcttgcacttaaaagaccaagagcttgggaaattcaactctgcagcgtgtccatctgaggactgggtatattaa

SEQ ID NO: 59903 - DNA, 120 bp, synthetic construct
  source 1..120: mol_type = other DNA
caatgaagtgtccccctcatctctaccctggctactttggttcagcttttctccttgcagaagaggctgtttttctgtttacgagtcctcctttgctggaccaggcttttttatttttgt

SEQ ID NO: 59904 - DNA, 120 bp, synthetic construct
  source 1..120: mol_type = other DNA
gagaacaaaactcttaggactttctcattaagatacaaaaaatcccaagtcagacttctacacctgtttcatatttagtcacttcactgatcccatcctaggctccaaaataagtgtaac

SEQ ID NO: 59905 - DNA, 120 bp, synthetic construct
  source 1..120: mol_type = other DNA
tgtttccaaatattcagaagctgctgggattcttttgagggctgaatattttccaagtctctaaggtcactccaggcatagaacagtcactgtataagtgacatcggccatcatcacctc

SEQ ID NO: 59906 - DNA, 120 bp, synthetic construct
  source 1..120: mol_type = other DNA
aattgttctcttcctcacagatgtcagcaagtccttcctctgcacctgcagaagaagcaacagaaaagaccaaagtggaagaggaagtgtgagtgtgcagtgggcagaatgatgagggaa

SEQ ID NO: 59907 - DNA, 120 bp, synthetic construct
  source 1..120: mol_type = other DNA
tcagggccatgctcacttgggagggtttgaggacatgatttagcgagcctctgttttttaaatatattttccaatcttgaaataaggtacacatatgaatgtgtgtgtgtgtgtgtacat

SEQ ID NO: 59908 - DNA, 120 bp, synthetic construct
  source 1..120: mol_type = other DNA
tgatcatttcgggaaatgtgttactccaaaaacttttataatctttgcttaatttgtttttaaatactttcctggctgggcgtggtggcttatgcctgtaatcccagcactttgggaggc

SEQ ID NO: 59909 - DNA, 120 bp, synthetic construct
  source 1..120: mol_type = other DNA
agtggttagtacactcatacacaactgaacttgagcgacacaaagcttacaagacagcaaagacaacagcaaagctgggcccagcagccatcacctaaagaactcttcactcgttacatt

SEQ ID NO: 59910 - DNA, 120 bp, synthetic construct
  source 1..120: mol_type = other DNA
aagctttacgaaaagagatggggcccgtgccaggccttagacgtgcgagaaggagggcgtgtcaggaagcagaaacagtatcagcaaaggcgctgctgggaggcatgtgggcagtgtttg

SEQ ID NO: 59911 - DNA, 120 bp, synthetic construct
  source 1..120: mol_type = other DNA
agttattataaaaaaatatttaacctctttgagaggacaggacagaaagatcctgacacgttatcaaagcttagggtaggataaatgtgccatcacaaatgaatggggaagagagcaggc

SEQ ID NO: 59912 - DNA, 120 bp, synthetic construct
  source 1..120: mol_type = other DNA
gcatacgaagtagaaggactggaacctccagaaaaagtactttaagttacctacaggtgatcctagtcaggtatgttacagtcttaatggcttttcagaaatttgacagaaaatcactat

SEQ ID NO: 59913 - DNA, 120 bp, synthetic construct; identical to SEQ ID NO: 33953
  source 1..120: mol_type = other DNA

SEQ ID NO: 59914 - DNA, 120 bp, synthetic construct
  source 1..120: mol_type = other DNA
accacctgaggtcaggagtttgtgaccagcctggccaacatggtgaaaccccgactctgctaaaaatacaaaaattagctgagtatactggtgggcacctgtattcccagctactcggga

SEQ ID NO: 59915 - DNA, 120 bp, synthetic construct; identical to SEQ ID NO: 33954
  source 1..120: mol_type = other DNA

SEQ ID NO: 59916 - DNA, 120 bp, synthetic construct
  source 1..120: mol_type = other DNA
aggtagccccgctccgggggattgagcgattcatcagggagagagatccgaccccatcttagtctgtgtccttccactatatcatgaaatacaacaggttgggtgctctggactggatat

SEQ ID NO: 59917 - DNA, 120 bp, synthetic construct
  source 1..120: mol_type = other DNA
agcagcagtttgcacctgctttgtgagaaccagagcatccttgggttcttccaacatcttattgggatttagacatgtgtgtcttttaatttcaggaggcacaaatgactaaatctacct

SEQ ID NO: 59918 - DNA, 120 bp, synthetic construct
  source 1..120: mol_type = other DNA
agacagaggagaagcgccagcgagagaggcagcaggagagcaaaataatgtttcagaggctgctcaagcagtggttagaggaaaactgagacgtgcacccccatgggatggagacccgaa

SEQ ID NO: 59919 - DNA, 120 bp, synthetic construct
  source 1..120: mol_type = other DNA
ttgggaaggggttggaaaatgtcagcagggaattgacatcgtcgaactgcattgcatccttttgcaccccgtgtcacgtggatgcattaattggtatcatttgtaaatcctttattagat

SEQ ID NO: 59920 - DNA, 120 bp, synthetic construct
  source 1..120: mol_type = other DNA
gatgtgatcctgtcatttttgttcttcatctgatctctcaatctgtgggttacattgattgattttcaggtgtgggaagaacaacccttgcattcccgctataaaacccacttgatcgtg

SEQ ID NO: 59921 - DNA, 120 bp, synthetic construct
  source 1..120: mol_type = other DNA
ctcacaaagatgtcctcctacggtttctaccaaaagtcatagtattgaactttggcgtgtaggtctctgaaccctttttccttaattgcgtgtaaaggttgaggttgaggtgcatctttt

SEQ ID NO: 59922 - DNA, 120 bp, synthetic construct
  source 1..120: mol_type = other DNA
ttacaattcagtgcgggcttttttgtgaacctaagttttcatttctctagggtagatacccaggagtgggatggctgggtcctatggtaaacatctgtttgacttacaagaaactgccaa

SEQ ID NO: 59923 - DNA, 120 bp, synthetic construct
  source 1..120: mol_type = other DNA
ttgtgacacatgagaattggctgggagataattgggttaagatcattttccaaacgtttcacacattaactgtttgtgtcagatagtggtggcccaaaggatgtcagggaactaactcgt

SEQ ID NO: 59924 - DNA, 120 bp, synthetic construct; identical to SEQ ID NO: 33955
  source 1..120: mol_type = other DNA

SEQ ID NO: 59925 - DNA, 120 bp, synthetic construct; identical to SEQ ID NO: 33956
  source 1..120: mol_type = other DNA

SEQ ID NO: 59926 - DNA, 120 bp, synthetic construct; identical to SEQ ID NO: 33957
  source 1..120: mol_type = other DNA

SEQ ID NO: 59927 - DNA, 120 bp, synthetic construct; identical to SEQ ID NO: 33958
  source 1..120: mol_type = other DNA

SEQ ID NO: 59928 - DNA, 120 bp, synthetic construct; identical to SEQ ID NO: 33959
  source 1..120: mol_type = other DNA

SEQ ID NO: 59929 - DNA, 120 bp, synthetic construct
  source 1..120: mol_type = other DNA
atgaaacagcacgtgtcggttctcagcggcgcgccctagctcaaaactccagccaatcacaggagaagtcggccgcctcccaaccctccagcccagttcccacgtccctcgcccgggaag

SEQ ID NO: 59930 - DNA, 120 bp, synthetic construct; identical to SEQ ID NO: 33960
  source 1..120: mol_type = other DNA

SEQ ID NO: 59931 - DNA, 120 bp, synthetic construct; identical to SEQ ID NO: 33961
  source 1..120: mol_type = other DNA

SEQ ID NO: 59932 - DNA, 120 bp, synthetic construct
  source 1..120: mol_type = other DNA
taccttcctgcatcctatttttgcaagtaaacttttcctaaaaaccctactctcacgtgacattccagttggttggcccattgggggaattttcatgaatctccatcatgtgctattcag

SEQ ID NO: 59933 - DNA, 120 bp, synthetic construct; identical to SEQ ID NO: 33943
  source 1..120: mol_type = other DNA

SEQ ID NO: 59934 - DNA, 120 bp, synthetic construct
  source 1..120: mol_type = other DNA
atgtcctctgttcactcgattctcctggagcatttctaaggcacacagagctgctaccatcatagccattactgaccaagtactctgggtgaaattcctttattaactgaataaacttgt

SEQ ID NO: 59935 - DNA, 120 bp, synthetic construct
  source 1..120: mol_type = other DNA
tgccctgacctctttcagcttggttccttatctgtagatgggagtttgatacttacctctctgggtctttgggaaatcaacactgtacatgagtagcacacagtaggtcctcaacaacca

SEQ ID NO: 59936 - DNA, 120 bp, synthetic construct
  source 1..120: mol_type = other DNA
attctctgtcccagtgagtggggcacctttcttgactgctaatctggtcatgtcaaaccttttcaaattctactagggctgcctgctgcccttaggataaagtccagcctcctggattag

SEQ ID NO: 59937 - DNA, 120 bp, synthetic construct
  source 1..120: mol_type = other DNA
agtcgtacaagaaataaatggtggagtctcgatttaaatccaggtgtctgtgacttcatccccttcgtgctgtgcagccatacactgtcatttccaaatccacacatgtggctcgattct

SEQ ID NO: 59938 - DNA, 120 bp, synthetic construct
  source 1..120: mol_type = other DNA
ttttgttttttttttaatcagcggaagtctcagccagctgaacagggaatgtttctctctgtgcctagctacttttaggaggacagacttcccgtctaagtgaatcatttgtgataccct

SEQ ID NO: 59939 - DNA, 120 bp, synthetic construct
  source 1..120: mol_type = other DNA
cgagacggaggctgtccctagcacaggccagggtgtcttgggactcgaatccctgggttgggctggccgggagtggggctttcgaaggaagcgggtgattttccacgtcgtccatatctc

SEQ ID NO: 59940 - DNA, 120 bp, synthetic construct
  source 1..120: mol_type = other DNA
cggcacgactgcccagcccagaactgaacacttatctcaaattaatcttccaaccacacaccaaggaaagaaaatggattactgccacgtagagatttaatttgggtatttcacgaattc

SEQ ID NO: 59941 - DNA, 120 bp, synthetic construct
  source 1..120: mol_type = other DNA
gcattggataattcaccgaaggcaccgctgaatggagtgggccctcagtaaatacctggaggaatgtgacctggccagtgaggttattttcttttgtaggtgaaaggtgtagcagtcact

SEQ ID NO: 59942 - DNA, 120 bp, synthetic construct
  source 1..120: mol_type = other DNA
ttgcagtgagctgagatcatgccactgcactccagcctgggcgacacagtgagactgtctcaaaaaaaaaaaaaaaagtccatatttaattgggattattaaatgaaatctgtatcttta

SEQ ID NO: 59943 - DNA, 120 bp, synthetic construct
  source 1..120: mol_type = other DNA
aatccctcactgtgatggttttatcggtcaactcggccaggcttggtgcctggtcccttttggtcaaatgctactctagttgttgctgggaaggtatttgtggacatgattaacatttac

SEQ ID NO: 59944 - DNA, 120 bp, synthetic construct
  source 1..120: mol_type = other DNA
ctataatcccagcactctgggaggctgaggcatgcagatcatgtggagctcaggagttccagaccagcctaggcaacatggcaaaaccccgtctctacaaaaaatacaaaaattagccgg

SEQ ID NO: 59945 - DNA, 120 bp, synthetic construct
  source 1..120: mol_type = other DNA
actgccccattgcggttaccccttcttcatccatcatccctggtgtaaagtgatctgtttccttccctctagttttgtcttggggagagtgttatgtcaatgacaccatacagtttgtgg

SEQ ID NO: 59946 - DNA, 120 bp, synthetic construct
  source 1..120: mol_type = other DNA
taggacatgacctgagatgcatgatccatggaaaggaaagatggatggataggagtttggcaaaatttaaaactctggctctggccgggcgtggtggctcctgcctgtaatcccaacact

SEQ ID NO: 59947 - DNA, 120 bp, synthetic construct
  source 1..120: mol_type = other DNA
tcgttgaccattaagtggcttgttagttgtaggtttgactgtacacgccctttttcaggttgaggaagttgtcttgtgttcctagtgtgctagagcttttatatcaccagtggactttga

SEQ ID NO: 59948 - DNA, 120 bp, synthetic construct; identical to SEQ ID NO: 59919
  source 1..120: mol_type = other DNA

SEQ ID NO: 59949 - DNA, 120 bp, synthetic construct; identical to SEQ ID NO: 59918
  source 1..120: mol_type = other DNA

SEQ ID NO: 59950 - DNA, 120 bp, synthetic construct; identical to SEQ ID NO: 59917
  source 1..120: mol_type = other DNA

SEQ ID NO: 59951 - DNA, 120 bp, synthetic construct
  source 1..120: mol_type = other DNA
gctccgggggattgagcgattcatcagggagagagatccgaccccatcttagtctgtgtccttccactatatcatgaaatacaacaggttgggtgctctggactggatatggtgtgttta

SEQ ID NO: 59952 - DNA, 120 bp, synthetic construct
  source 1..120: mol_type = other DNA
atgctgagaagtccaaaacaaaggtaccagtatctggtatctggcaagagtcttcctggtatttcctcacgtggcaaaaggtggaaggacaagccggggagaatgttatgtcctcacata

SEQ ID NO: 59953 - DNA, 120 bp, synthetic construct
  source 1..120: mol_type = other DNA
ttattattattattattttattattgtttttgagacaagtcttgctctgtcacccaggctggagtgcagtggtgcgctctgggctcactgcaacttctgcctcccaggttcatgcaattc

SEQ ID NO: 59954 - DNA, 120 bp, synthetic construct
  source 1..120: mol_type = other DNA
atttttttctacaacagtaagcaacatcccctctctttccctgttccgcatcctgcctacatgtcctgcctggtcgcctggctcctccacgtgcacttgatgctccagccagatagactg

SEQ ID NO: 59955 - DNA, 120 bp, synthetic construct
  source 1..120: mol_type = other DNA
ggccatagacattatttttccaagagcctaaaatagcatcctctccctttaatcggctttttgtggaatgttgtaaatgcagccaccagattagaggataatcttccctagattggcttg

SEQ ID NO: 59956 - DNA, 120 bp, synthetic construct; identical to SEQ ID NO: 33083
  source 1..120: mol_type = other DNA

SEQ ID NO: 59957 - DNA, 120 bp, synthetic construct; identical to SEQ ID NO: 33084
  source 1..120: mol_type = other DNA

SEQ ID NO: 59958 - DNA, 120 bp, synthetic construct; identical to SEQ ID NO: 33085
  source 1..120: mol_type = other DNA

SEQ ID NO: 59959 - DNA, 120 bp, synthetic construct; identical to SEQ ID NO: 31274
  source 1..120: mol_type = other DNA

SEQ ID NO: 59960 - DNA, 120 bp, synthetic construct; identical to SEQ ID NO: 31275
  source 1..120: mol_type = other DNA

SEQ ID NO: 59961 - DNA, 120 bp, synthetic construct; identical to SEQ ID NO: 12094
  source 1..120: mol_type = other DNA

SEQ ID NO: 59962 - DNA, 120 bp, synthetic construct
  source 1..120: mol_type = other DNA
gtgaggagtgcctcttcccggccgccatcccatctaggaagtgaggagcgtctctgcctggccacccatcgtctgagatgtggggagcgcccctgccccaccgccccaccgccccgtctg

SEQ ID NO: 59963 - DNA, 120 bp, synthetic construct; identical to SEQ ID NO: 12095
  source 1..120: mol_type = other DNA

SEQ ID NO: 59964 - DNA, 120 bp, synthetic construct; identical to SEQ ID NO: 10093
  source 1..120: mol_type = other DNA

SEQ ID NO: 59965 - DNA, 120 bp, synthetic construct; identical to SEQ ID NO: 10094
  source 1..120: mol_type = other DNA

SEQ ID NO: 59966 - DNA, 120 bp, synthetic construct
  source 1..120: mol_type = other DNA
caaagcctccaagaaatatgggactatgtgaaaagaccaaatctatgtctgattggtgtacctgaaagtgatatggagaatggaacgaagttggaaaacactctgcgggatattatccaa

SEQ ID NO: 59967 - DNA, 120 bp, synthetic construct
  source 1..120: mol_type = other DNA
gatcaattcaacaagaagcgctaactaccctaaatatatatgcaccgaatacaggagcacccagattcataaagcaagtccttagagacctacaaagagacttagactcccacacaataa

SEQ ID NO: 59968 - DNA, 120 bp, synthetic construct; identical to SEQ ID NO: 26899
  source 1..120: mol_type = other DNA

SEQ ID NO: 59969 - DNA, 120 bp, synthetic construct
  source 1..120: mol_type = other DNA
tacctgacttcaaactatactacaaggctacactaaccaaaacagcatggtactggtatcaaaacagagaaacagatcaatgaaacagaacagagccctcagaaataacgccgcatatct

SEQ ID NO: 59970 - DNA, 120 bp, synthetic construct; identical to SEQ ID NO: 26900
  source 1..120: mol_type = other DNA

SEQ ID NO: 59971 - DNA, 120 bp, synthetic construct; identical to SEQ ID NO: 26901
  source 1..120: mol_type = other DNA

SEQ ID NO: 59972 - DNA, 120 bp, synthetic construct
  source 1..120: mol_type = other DNA
ggggttgtttgtttttttcttgtaaatttgttggagttcattgtagattctggatattagccctttgtcagatgagtagattgcaaaacttttcctccattctgtaggttgtctgttcac

SEQ ID NO: 59973 - DNA, 120 bp, synthetic construct; identical to SEQ ID NO: 26902
  source 1..120: mol_type = other DNA

SEQ ID NO: 59974 - DNA, 120 bp, synthetic construct; identical to SEQ ID NO: 26903
  source 1..120: mol_type = other DNA

SEQ ID NO: 59975 - DNA, 120 bp, synthetic construct
  source 1..120: mol_type = other DNA
tcccattttgtaggttgcctgttcactctgatggtagtttcctttgctatgcagaagctctttagtttcactagatcccatttgttaattttggcttttgttgccattgcttttggtgtt

SEQ ID NO: 59976 - DNA, 120 bp, synthetic construct
  source 1..120: mol_type = other DNA
gagttttctagatatacaatcatgtcatctgcaaacacggacaatttgacttcctcttttcctaattgaataccctttatttccttctcctgcctaattgccctggccagaacttccaac

SEQ ID NO: 59977 - DNA, 120 bp, synthetic construct
  source 1..120: mol_type = other DNA
ctcttcttgttgaattgatccctgtaccattatgtaatggccttctctggctcttttgatcttagttggtttaaagtctgttttatcagagactaggattgcaacccctgcctttttttg

SEQ ID NO: 59978 - DNA, 120 bp, synthetic construct
  source 1..120: mol_type = other DNA
ggataatatcctgcagagtgttttccaactgggttccattctccccgtcagtttcaggtacaccaatcagacgtagatttggtcttttcacatagtcccatatttcttggaggctttgtt

SEQ ID NO: 59979 - DNA, 120 bp, synthetic construct; identical to SEQ ID NO: 26904
  source 1..120: mol_type = other DNA

SEQ ID NO: 59980 - DNA, 120 bp, synthetic construct; identical to SEQ ID NO: 26905
  source 1..120: mol_type = other DNA

SEQ ID NO: 59981 - DNA, 120 bp, synthetic construct
  source 1..120: mol_type = other DNA
gatggctgggtcaaatggtatttctagttctagatccctgaggaatcgccacactgacttccacaagggttgaactagtttacagtcccaacaacagtgtaaaagtgttcctatttctcc

SEQ ID NO: 59982 - DNA, 120 bp, synthetic construct
  source 1..120: mol_type = other DNA
agggtacatgtgcacattgtgcaggttagttacatatgtatacatgtgccatgctggtgcgctgcacccactaactcgtcatctagcattaggtatatctccccatgctatccctcccgc

SEQ ID NO: 59983 - DNA, 120 bp, synthetic construct
  source 1..120: mol_type = other DNA
tttttatggttttaggtctaacgtttaagtctttaatccatcttgaattgatttttgtataaggtgtaaggaagggatccagtttcagctttctacatatggctagccagttttagagaa

SEQ ID NO: 59984 - DNA, 120 bp, synthetic construct
  source 1..120: mol_type = other DNA
atggtcatgggacctcaagtgagtgaccgacctcgctaacccttaaagcagaggtccctggtctgagcactaaaaactcagtaagcaagataaataatacacaaatgcaatatatatttt

SEQ ID NO: 59985 - DNA, 120 bp, synthetic construct; identical to SEQ ID NO: 14294
  source 1..120: mol_type = other DNA

SEQ ID NO: 59986 - DNA, 120 bp, synthetic construct; identical to SEQ ID NO: 20863
  source 1..120: mol_type = other DNA

SEQ ID NO: 59987 - DNA, 120 bp, synthetic construct; identical to SEQ ID NO: 20864
  source 1..120: mol_type = other DNA

SEQ ID NO: 59988 - DNA, 120 bp, synthetic construct; identical to SEQ ID NO: 20865
  source 1..120: mol_type = other DNA

SEQ ID NO: 59989 - DNA, 120 bp, synthetic construct; identical to SEQ ID NO: 28251
  source 1..120: mol_type = other DNA

SEQ ID NO: 59990 - DNA, 120 bp, synthetic construct; identical to SEQ ID NO: 28252
  source 1..120: mol_type = other DNA

SEQ ID NO: 59991 - DNA, 120 bp, synthetic construct
  source 1..120: mol_type = other DNA
aagaggatacaaacaaatggaagaacattccatgctcatggataggaagaatcaatattgtgaaaatggctatactgcccaaggtaatttatagattcaatgccatccccatcgagctac

SEQ ID NO: 59992 - DNA, 120 bp, synthetic construct
  source 1..120: mol_type = other DNA
tggagaaataggaacactttgacactgttggtgggactgtaaactggttcaaccattgtggaagacagtgtggtgattcctcaaggatctagaactagaaataccatttgacccagccat

SEQ ID NO: 59993 - DNA, 120 bp, synthetic construct
  source 1..120: mol_type = other DNA
acttcactcaagctggtttctgtgagaggcacaaaaacaacccctaagatgtccatgtctgaaaactgagtatgttaccttacatggtcaaagggactttgcagatgtgattaaggatct

SEQ ID NO: 59994 - DNA, 120 bp, synthetic construct
  source 1..120: mol_type = other DNA
caagatacatcagtgtgctgtattcaggaaacccatctcacgtgcagagacacacataggctcaaaataaagggatggaggaagatctaccaagcaaatggaaaacaaaaaaaggcaggg

SEQ ID NO: 59995 - DNA, 120 bp, synthetic construct
  source 1..120: mol_type = other DNA
gcaagactaataaagaagaaaagagagaagaatcaaatagatgcaataaaaaatgataaaggggatatcacctccgatcccacagaaatacaaactaccattagagaatactataaacac

SEQ ID NO: 59996 - DNA, 120 bp, synthetic construct
  source 1..120: mol_type = other DNA
ccctctctcaccactactattcaacatagtgttggaagttctggccacggtaatcaggcaggagacagaaagggtattcaattaggaaaagaggaagtcaaattgtccctgtttgcagat

SEQ ID NO: 59997 - DNA, 120 bp, synthetic construct
  source 1..120: mol_type = other DNA
tacatgttagacctaaaaccataaaaaccctagaagaaaacctaggcaataccattcatgacataggcatgggcaaggacttcatgtctaaaacaccaaaagcaatggcaacaaaagcca

SEQ ID NO: 59998 - DNA, 120 bp, synthetic construct
  source 1..120: mol_type = other DNA
ttctcagcaaactatcgcaaggagaaaaaaccaaacaccacatgttctcactcataggtgggaattaaacaatgaaaacacatggacacaggaaggggaacatcacactccgggtcctgt

SEQ ID NO: 59999 - DNA, 120 bp, synthetic construct; identical to SEQ ID NO: 29841
  source 1..120: mol_type = other DNA

SEQ ID NO: 60000 - DNA, 120 bp, synthetic construct
  source 1..120: mol_type = other DNA
ggttttaagcaatcttctcgcctccacctcctgagtagctgggactacaggtgcatgctaccatgcccggctaatgtttttgtttttttgtagaaatggagttttgctacattgtccagg

SEQ ID NO: 60001 - DNA, 120 bp, synthetic construct; identical to SEQ ID NO: 29842
  source 1..120: mol_type = other DNA

SEQ ID NO: 60002 - DNA, 120 bp, synthetic construct; identical to SEQ ID NO: 29843
  source 1..120: mol_type = other DNA

SEQ ID NO: 60003 - DNA, 120 bp, synthetic construct; identical to SEQ ID NO: 29844
  source 1..120: mol_type = other DNA

SEQ ID NO: 60004 - DNA, 120 bp, synthetic construct; identical to SEQ ID NO: 29845
  source 1..120: mol_type = other DNA

SEQ ID NO: 60005 - DNA, 120 bp, synthetic construct; identical to SEQ ID NO: 29846
  source 1..120: mol_type = other DNA

SEQ ID NO: 60006 - DNA, 120 bp, synthetic construct; identical to SEQ ID NO: 29847
  source 1..120: mol_type = other DNA

SEQ ID NO: 60007 - DNA, 120 bp, synthetic construct; identical to SEQ ID NO: 29848
  source 1..120: mol_type = other DNA

SEQ ID NO: 60008 - DNA, 120 bp, synthetic construct; identical to SEQ ID NO: 29849
  source 1..120: mol_type = other DNA

SEQ ID NO: 60009 - DNA, 120 bp, synthetic construct; identical to SEQ ID NO: 29850
  source 1..120: mol_type = other DNA

SEQ ID NO: 60010 - DNA, 120 bp, synthetic construct; identical to SEQ ID NO: 29851
  source 1..120: mol_type = other DNA

SEQ ID NO: 60011 - DNA, 120 bp, synthetic construct
  source 1..120: mol_type = other DNA
aatatcctcttgtggtttctaaatcctgtctctgcaagaaatattacatagttaatgtttgcattattgaaagaaaataagagtataatgatgaggtaatatggcaaagggcatgctggt

SEQ ID NO: 60012 - DNA, 120 bp, synthetic construct
  source 1..120: mol_type = other DNA
ggtacagtttatcattaattgcctagatggtagtaaaacaggtggtcttttttgaagcagtcctcaaagtacttaggtctgttgattacttaaagtagctaaaatggaaatacattgctg

SEQ ID NO: 60013 - DNA, 120 bp, synthetic construct
  source 1..120: mol_type = other DNA
aagtaactgtagaaaagcttccatgttcagccttgctttctccacctagtccttgttcctcactctgctttggtttttcagcatatacaagagagaactaagacaggaaacccctcttaa

SEQ ID NO: 60014 - DNA, 120 bp, synthetic construct
  source 1..120: mol_type = other DNA
acaagttaattagtggaatagcaaggatttgatcctagtttcttggctttctaggagaggtttttaaacagtgaacttgattgcaaccgcaaattccatcatcactttgagggcttcctg

SEQ ID NO: 60015 - DNA, 120 bp, synthetic construct
  source 1..120: mol_type = other DNA
gtataatacatgcatatatttatatgtattctacaaaatacagttttaaatataaatatggtttttctgactctattggagacaatgaaaaacttccttgaaatggtttgctaggattgg

SEQ ID NO: 60016 - DNA, 120 bp, synthetic construct
  source 1..120: mol_type = other DNA
caggtgatccgcacgcctcggcctcccaaagtgctggaattacaggcatgagccaccgcacctggccacaacttttttatatgaaatattagaaaagaattacagctttttttttttttt

SEQ ID NO: 60017 - DNA, 120 bp, synthetic construct
  source 1..120: mol_type = other DNA
gtaatgcacattgaacatgtcattctcttattcggaccgttttctactgccttagtgacgtgcccaacttccctcttccctcttctgactgtatgctttgtcttccagaattagtctttt

SEQ ID NO: 60018 - DNA, 120 bp, synthetic construct
  source 1..120: mol_type = other DNA
attttgatatgagttgaaaataagtttttgtttactgttttatttagagttgacaaaaatattttgaagtgttacttacaactagacagtatttgaaatgattccttaattccatgggtt

SEQ ID NO: 60019 - DNA, 120 bp, synthetic construct; identical to SEQ ID NO: 1676
  source 1..120: mol_type = other DNA

SEQ ID NO: 60020 - DNA, 120 bp, synthetic construct
  source 1..120: mol_type = other DNA
gaatcaacctatgtgcccatcagtggtggactggataaagagaatgtggtacatatacaccatggaatactatgcggccataaagaagaatgaaattatatcctttgcagcagcatggat

SEQ ID NO: 60021 - DNA, 120 bp, synthetic construct
  source 1..120: mol_type = other DNA
ggcccagaaactacttttaatttaatagacatggcaagtggcctgaaaaataaaagtaattctttttttccataccatattttagtgttacttggttgaaaacttcgctttgtgtggtct

SEQ ID NO: 60022 - DNA, 120 bp, synthetic construct
  source 1..120: mol_type = other DNA
ttcagttaggcaattgggggtggtctggagagggtacatttaaaccaaagccagaaaaatgagaaagagttatataaaattctggatacaggctccctagatagaggaacagcaagtgca

SEQ ID NO: 60023 - DNA, 120 bp, synthetic construct
  source 1..120: mol_type = other DNA
tccagtcagtttctaccaaaaaatacagttttgattatgtttgggattgcactgaatcacattgtatcttccaattaatgaacatggtaggtagctctctccatttatttaggtcttctt

SEQ ID NO: 60024 - DNA, 120 bp, synthetic construct
  source 1..120: mol_type = other DNA
agtgcccatgtgccaagcactgagctaatcacattacaatgtagatttattttggtatcttttgtggtgtgttttgtttttgttttttttttttgcttttgctgactttattgagacata

SEQ ID NO: 60025 - DNA, 120 bp, synthetic construct
  source 1..120: mol_type = other DNA
ttcatttcccaacgtcagtgttaacttttgacacttgaaaactaaataaattgagtctgataaagggcattttccagtatagattggaaataaattattataaatgatcttggagccgca

SEQ ID NO: 60026 - DNA, 120 bp, synthetic construct
  source 1..120: mol_type = other DNA
ttccgactcattaagttttagagtaaatgtttagagataagttattcaggttaatatagataaagatttttaaattagttgtttaatagatttctaggtttctgatactgtttacgttca

SEQ ID NO: 60027 - DNA, 120 bp, synthetic construct
  source 1..120: mol_type = other DNA
taaatatgaatttgtctgttcttctgcacacatggatgtacacatatgtgttgacaagtggcttgggtgaagtaggttggccataggggctgaagtggcttggctgcagaaagttaagaa

SEQ ID NO: 60028 - DNA, 120 bp, synthetic construct
  source 1..120: mol_type = other DNA
tccaactctgccactgtcttgctgtagggttcagagccagccactggagtctcttaggtcttcaacattttctgatgtggaaaaatatataatgcttgttttctttcaccttatgaaaat

SEQ ID NO: 60029 - DNA, 120 bp, synthetic construct
  source 1..120: mol_type = other DNA
ccatgttgtccaggctggtctcgaactcttgagctcaagcaatccacctaccttggcttcccaaagtactgagattacagccacaagccactgtgcctggctgcaatttatttcttaata

SEQ ID NO: 60030 - DNA, 120 bp, synthetic construct
  source 1..120: mol_type = other DNA
caaagctggatggagaatgactttgacgagttgagagaaggcttcagacaatcaaactactctgagctaaaggaggaagtttgaacccatggcaaagaagttaaaaaccttgaaaaaaaa

SEQ ID NO: 60031 - DNA, 120 bp, synthetic construct
  source 1..120: mol_type = other DNA
cagtaccagccactgcaaaaacatgccaaattgtgaagaccatcgaggctaggaagaaactgcatcaactaatgagcaaaataaccagctaacatcataatgacaggatcaaattcacac

SEQ ID NO: 60032 - DNA, 120 bp, synthetic construct
  source 1..120: mol_type = other DNA
agataccagaatctctggtatgctctggtatgtgaaagcagtgtgtagagggaaatttatagcactaaatgcccacaagagaaagcaggaaagatctaaaattgacaccctaacatcaca

SEQ ID NO: 60033 - DNA, 120 bp, synthetic construct
  source 1..120: mol_type = other DNA
agcatataaacagaaccaacgacaaaaaccatatgattatctcaatagatgcagaaaaggccttgacaaaattcaacaacgcttcatgctaaaaactctcaataaattaggtattgctgg

SEQ ID NO: 60034 - DNA, 120 bp, synthetic construct
  source 1..120: mol_type = other DNA
acagatcaatggaacagaacagagccctcagaaataatgctgcatatctacaaccatctgatctttgacaaacctgacaaaaacaagcaatggggaaaggattccctatttaataaatgg

SEQ ID NO: 60035 - DNA, 120 bp, synthetic construct
  source 1..120: mol_type = other DNA
tacaccatgggatactatgcagccataaaaaaggatgagttcatgtccttcgtagggacatggatgaagctggaaaccatcattctcagcaaactatcgcaaggacaaaaaaccaaacac

SEQ ID NO: 60036 - DNA, 120 bp, synthetic construct; identical to SEQ ID NO: 29869
  source 1..120: mol_type = other DNA

SEQ ID NO: 60037 - DNA, 120 bp, synthetic construct
  source 1..120: mol_type = other DNA
tggcttacgcctgtaatcccagcactttgggaggccaaggcgggcagatcgtttgaggtcaggagttcgagaccagcgtgaccaacatagtgaaacccccatttctactaaaatacaaaa

SEQ ID NO: 60038 - DNA, 120 bp, synthetic construct
  source 1..120: mol_type = other DNA
ttaggatggctacgaagtcactaggtgataggagttttttacctctattataatcttatgggacaaccatcatttctgtagttcatcgttgactgaaacataattatgcagtgtgtgact

SEQ ID NO: 60039 - DNA, 120 bp, synthetic construct
  source 1..120: mol_type = other DNA
aagaacaatggtggatgaaggagaaaaaaacaacttttgctttttaggaggttactgcagtaattcagcagaaggagtacaggggcctggactccatagtgagctatcttaaactcagca

SEQ ID NO: 60040 - DNA, 120 bp, synthetic construct
  source 1..120: mol_type = other DNA
gacttctggataatctctgcaagaagccatgccagtaaaattattcccttaggttccagcttcccacagggttttgatgtgtcagctctataattttatttgatttcctgctccatggtt

SEQ ID NO: 60041 - DNA, 120 bp, synthetic construct
  source 1..120: mol_type = other DNA
tgacagggagttaatgtaggaactgttttcacgtcatagtgcttttatggtgttttttttttgttgttgttgttgttttttgagacggagtctctctctatcacccaggctggagtgcag

SEQ ID NO: 60042 - DNA, 120 bp, synthetic construct
  source 1..120: mol_type = other DNA
agtttgctgatccctagactagagttcaaagagcaggccccaatctcagagcattatgagttctgtttgtgatgcctgtggggttttgttttattattgtctttgtatttattttggtca

SEQ ID NO: 60043 - DNA, 120 bp, synthetic construct
  source 1..120: mol_type = other DNA
aatgtcatgagtatatacaaagacatacccgaaaaatgaatgcatgtaaaaactggtgaaatctgagtaaggtctatagtccagttaatttgccagctaatttcctggttttgatagtgc

SEQ ID NO: 60044 - DNA, 120 bp, synthetic construct
  source 1..120: mol_type = other DNA
gatctgagtttttaaggataatttgatagggggccagtgagttaggagttttgattagtcagtctgagatgaaatcatagggagtcagagctgtccttttgtgttgagtcagttcctgac

SEQ ID NO: 60045 - DNA, 120 bp, synthetic construct
  source 1..120: mol_type = other DNA
ttttatctggaagatttcttgtcaaggtatcttgggttacacttttgttgagagaagattgtaaaaagttaaagaacgttgaggctgggcacggtggctcacgcctgtaatcccagcact

SEQ ID NO: 60046 - DNA, 120 bp, synthetic construct
  source 1..120: mol_type = other DNA
gtttcgagagcaaattacagagttaaacacatgtcctaggaagcctttcctcccacttagtggaagccacagtgtatagggatagagtagtcattttcccatttcttggtcaaagaaaca

SEQ ID NO: 60047 - DNA, 120 bp, synthetic construct
  source 1..120: mol_type = other DNA
gctggtctcaaactcctgacgtcaggtgatccgcccgccctgacctcccaaagtgctgggattacaggcgtgagccaccgcatctggcccaacatttattttaattactagaaaaagaaa

SEQ ID NO: 60048 - DNA, 120 bp, synthetic construct
  source 1..120: mol_type = other DNA
agaaaattcaaatagcctcaataagaaacaaaatgggagcagaaatacaaaagatcattcaaagctactatgaacacctttacgcatataaactagaaaacctagaagagatggataaat

SEQ ID NO: 60049 - DNA, 120 bp, synthetic construct
  source 1..120: mol_type = other DNA
cctcttcaacacagtactgaaagtcctagccagagcagtcagacaagagaaggaaataaagggtatccaaattggtaaagaggaagtcatactgtcactgtttgctgatgatatgattgt

SEQ ID NO: 60050 - DNA, 120 bp, synthetic construct
  source 1..120: mol_type = other DNA
cttaaatctaagacctgaaactgtaaaaattctagaagataacattagaaaaacccttctagacattggcttaggcaaggatttcatgaccaagaacccaaaagcaaatgcaataaaaac

SEQ ID NO: 60051 - DNA, 120 bp, synthetic construct; identical to SEQ ID NO: 12925
  source 1..120: mol_type = other DNA

SEQ ID NO: 60052 - DNA, 120 bp, synthetic construct; identical to SEQ ID NO: 12926
  source 1..120: mol_type = other DNA

SEQ ID NO: 60053 - DNA, 120 bp, synthetic construct
  source 1..120: mol_type = other DNA
aactctattcttcttgtaaattctcctttgtcccatgtgattgtacttgaaacttccaattatactctttctagcccctccccagccactgtggctagtccagagataggaccatgacat

SEQ ID NO: 60054 - DNA, 120 bp, synthetic construct; identical to SEQ ID NO: 14905
  source 1..120: mol_type = other DNA

SEQ ID NO: 60055 - DNA, 120 bp, synthetic construct; identical to SEQ ID NO: 14906
  source 1..120: mol_type = other DNA

SEQ ID NO: 60056 - DNA, 120 bp, synthetic construct; identical to SEQ ID NO: 14907
  source 1..120: mol_type = other DNA

SEQ ID NO: 60057 - DNA, 120 bp, synthetic construct
  source 1..120: mol_type = other DNA
caaaacgccaaaaattaactcttggggacagtcactttaatcgagacgtctttcttctatggagatttgttcaccactggcttctctgatttggtggttaagagtctgaaaatcggtcat

SEQ ID NO: 60058 - DNA, 120 bp, synthetic construct; identical to SEQ ID NO: 14897
  source 1..120: mol_type = other DNA

SEQ ID NO: 60059 - DNA, 120 bp, synthetic construct
  source 1..120: mol_type = other DNA
gtgcattttacagagcgctgattagtgcattttacagagcgctgattggtgcattttacaaacctagctatagggtgctgattggtgcgttttacaatcccctggtaagtcagaaaagtt

SEQ ID NO: 60060 - DNA, 120 bp, synthetic construct; identical to SEQ ID NO: 14899
  source 1..120: mol_type = other DNA

SEQ ID NO: 60061 - DNA, 120 bp, synthetic construct; identical to SEQ ID NO: 14900
  source 1..120: mol_type = other DNA

SEQ ID NO: 60062 - DNA, 120 bp, synthetic construct
  source 1..120: mol_type = other DNA
tctttggttctgtttatatgctggattacatttattgatttgcatatgttgaataacagacaaaaagagagccaaatcatgagtgaactcccattcacaattgattcaaagagaataaaa

SEQ ID NO: 60063 - DNA, 120 bp, synthetic construct; identical to SEQ ID NO: 14901
  source 1..120: mol_type = other DNA

SEQ ID NO: 60064 - DNA, 120 bp, synthetic construct
  source 1..120: mol_type = other DNA
ataataatgggagactttaacaccccactgtcaacattagacagatcaacgagacagaaagttaacaaggatatccaggaattggactcagctctgcaccaagcggacctaatagacatc

SEQ ID NO: 60065 - DNA, 120 bp, synthetic construct
  source 1..120: mol_type = other DNA
agatggattcacagccgaattctaccagaggtacaaggaggagctggtaccattccttctgaaactattccaatcaacagaaaaacagtgaatcccccctaactcattttatgaggccag

SEQ ID NO: 60066 - DNA, 120 bp, synthetic construct
  source 1..120: mol_type = other DNA
cataatgcccaaggtaatttatagattcaatgccatccccatcaagctaccaatggctttcttcacagaattggaaaaaactactttaaagttcatatggaaccaaaaaagagcctgcat

SEQ ID NO: 60067 - DNA, 120 bp, synthetic construct; identical to SEQ ID NO: 14902
  source 1..120: mol_type = other DNA

SEQ ID NO: 60068 - DNA, 120 bp, synthetic construct; identical to SEQ ID NO: 14903
  source 1..120: mol_type = other DNA

SEQ ID NO: 60069 - DNA, 120 bp, synthetic construct
  source 1..120: mol_type = other DNA
agcggaggttgcagtgagctgagatcacgccactgcactccagctggggcgacagagtgagactccgtctccaaaaaaaaaaagtttttgttgaaataaattattttaaataacagtgac

SEQ ID NO: 60070 - DNA, 120 bp, synthetic construct; identical to SEQ ID NO: 32603
  source 1..120: mol_type = other DNA

SEQ ID NO: 60071 - DNA, 120 bp, synthetic construct
  source 1..120: mol_type = other DNA
gcagtaccatgctgttttggttactataacctttgaagtcaggtaatgtgatgcctccagcttttctcaggattgctttggctctttgggcatttttttggtttcatatgaattttagga

SEQ ID NO: 60072 - DNA, 120 bp, synthetic construct; identical to SEQ ID NO: 5269
  source 1..120: mol_type = other DNA

SEQ ID NO: 60073 - DNA, 120 bp, synthetic construct; identical to SEQ ID NO: 25184
  source 1..120: mol_type = other DNA

SEQ ID NO: 60074 - DNA, 120 bp, synthetic construct; identical to SEQ ID NO: 27298
  source 1..120: mol_type = other DNA

SEQ ID NO: 60075 - DNA, 120 bp, synthetic construct; identical to SEQ ID NO: 29748
  source 1..120: mol_type = other DNA

SEQ ID NO: 60076 - DNA, 120 bp, synthetic construct
  source 1..120: mol_type = other DNA
tacttttacgttgttggtgggactgtaaactagttcaaccactgtggaagacagtgtggcgattcctcaaagatctagaactagaaataccatttgacccagccatcccattactgggta

SEQ ID NO: 60077 - DNA, 120 bp, synthetic construct; identical to SEQ ID NO: 32189
  source 1..120: mol_type = other DNA

SEQ ID NO: 60078 - DNA, 120 bp, synthetic construct; identical to SEQ ID NO: 32190
  source 1..120: mol_type = other DNA

SEQ ID NO: 60079 - DNA, 120 bp, synthetic construct; identical to SEQ ID NO: 32191
  source 1..120: mol_type = other DNA

SEQ ID NO: 60080 - DNA, 120 bp, synthetic construct
  source 1..120: mol_type = other DNA
aggatgaggcaatgtgaccacagaggcagagactggcatgaggtggccactagtcgataggtacaactattatgtatcaatatttttttaaaaaagaaattcctggagtcaccagaagct

SEQ ID NO: 60081 - DNA, 120 bp, synthetic construct
  source 1..120: mol_type = other DNA
gcaaggtcacagatcaacaggatcccaaggcagaagaacttttcttagcacagaacaaaatgaaaagtctcccatgtccacctccttctacacagacacggcaaccatccgactcctcaa

SEQ ID NO: 60082 - DNA, 120 bp, synthetic construct; identical to SEQ ID NO: 28652
  source 1..120: mol_type = other DNA

SEQ ID NO: 60083 - DNA, 120 bp, synthetic construct; identical to SEQ ID NO: 28653
  source 1..120: mol_type = other DNA

SEQ ID NO: 60084 - DNA, 120 bp, synthetic construct; identical to SEQ ID NO: 28635
  source 1..120: mol_type = other DNA

SEQ ID NO: 60085 - DNA, 120 bp, synthetic construct; identical to SEQ ID NO: 28636
  source 1..120: mol_type = other DNA

SEQ ID NO: 60086 - DNA, 120 bp, synthetic construct; identical to SEQ ID NO: 28637
  source 1..120: mol_type = other DNA

SEQ ID NO: 60087 - DNA, 120 bp, synthetic construct; identical to SEQ ID NO: 28638
  source 1..120: mol_type = other DNA

SEQ ID NO: 60088 - DNA, 120 bp, synthetic construct; identical to SEQ ID NO: 28639
  source 1..120: mol_type = other DNA

SEQ ID NO: 60089 - DNA, 120 bp, synthetic construct; identical to SEQ ID NO: 28640
  source 1..120: mol_type = other DNA

SEQ ID NO: 60090 - DNA, 120 bp, synthetic construct
  source 1..120: mol_type = other DNA
gtgtgtgtatgagtgtgtgtgagtgtgtgtgagtgtgtgtgagtgtgtgtgtgagagacagagtgtgtgtgagagtgtgtgtgtgtgtgagacagagtgtgtgtgtgtgtgtgtgtccgt

SEQ ID NO: 60091 - DNA, 120 bp, synthetic construct; identical to SEQ ID NO: 28641
  source 1..120: mol_type = other DNA

SEQ ID NO: 60092 - DNA, 120 bp, synthetic construct; identical to SEQ ID NO: 28642
  source 1..120: mol_type = other DNA

SEQ ID NO: 60093 - DNA, 120 bp, synthetic construct; identical to SEQ ID NO: 28643
  source 1..120: mol_type = other DNA

SEQ ID NO: 60094 - DNA, 120 bp, synthetic construct; identical to SEQ ID NO: 28644
  source 1..120: mol_type = other DNA

SEQ ID NO: 60095 - DNA, 120 bp, synthetic construct; identical to SEQ ID NO: 28645
  source 1..120: mol_type = other DNA

SEQ ID NO: 60096 - DNA, 120 bp, synthetic construct; identical to SEQ ID NO: 28646
  source 1..120: mol_type = other DNA

SEQ ID NO: 60097 - DNA, 120 bp, synthetic construct; identical to SEQ ID NO: 28647
  source 1..120: mol_type = other DNA

SEQ ID NO: 60098 - DNA, 120 bp, synthetic construct
  source 1..120: mol_type = other DNA
tggtagcaatgacggtaatgatggtggaggtgatactgatggtgatagtgatgatagccatgggagagctaatggtgataatgatgataatggtgatgaaggatggtaatgatggtagat

SEQ ID NO: 60099 - DNA, 120 bp, synthetic construct; identical to SEQ ID NO: 28648
  source 1..120: mol_type = other DNA

SEQ ID NO: 60100 - DNA, 120 bp, synthetic construct; identical to SEQ ID NO: 28649
  source 1..120: mol_type = other DNA

SEQ ID NO: 60101 - DNA, 120 bp, synthetic construct; identical to SEQ ID NO: 28650
  source 1..120: mol_type = other DNA

SEQ ID NO: 60102 - DNA, 120 bp, synthetic construct; identical to SEQ ID NO: 28651
  source 1..120: mol_type = other DNA

SEQ ID NO: 60103 - DNA, 120 bp, synthetic construct
  source 1..120: mol_type = other DNA
tttccagcttcctgattattaacattcctgagacccgacttcttttatttccagtttcctgattattaacattcctgagccctggcttatttccagttacattcctgagccccgacttct

SEQ ID NO: 60104 - DNA, 120 bp, synthetic construct
  source 1..120: mol_type = other DNA
ctgagccgtgacttatttccagtttcctgattattaacattcctgagccccgacttatttccagttccctgattattaacattcctgagccccgacttcatttccagtttcctgattatt

SEQ ID NO: 60105 - DNA, 120 bp, synthetic construct
  source 1..120: mol_type = other DNA
attcctgagacccgacttctttatttccagtttcctgattattaacattcctgagccgtgacttatttccagtttcctgattattaacattcctgagccccgacttatttccagttccct

SEQ ID NO: 60106 - DNA, 120 bp, synthetic construct
  source 1..120: mol_type = other DNA
attcctgagccctggcctctttatttccagtttcctgattattaacattcctgagccccgacttcatttccagtttcctgattattaacatttctgagccctggcctctttatttccagt

SEQ ID NO: 60107 - DNA, 120 bp, synthetic construct
  source 1..120: mol_type = other DNA
ggaggcactaaacatggaaaggaacaaccagtaccagccactgcaaaaacatgccaaattataaagaccatcgaggctaggaagaaactgcatcaactaatgagcaaaataaccagctaa

SEQ ID NO: 60108 - DNA, 120 bp, synthetic construct
  source 1..120: mol_type = other DNA
atgagaacaaagacacaacataccagaatctctgggacacagttaaatcagtgtgtagagggaaatttatacactaaatgcccacaagagaaagcaggaaagatctaaaattgacaccct

SEQ ID NO: 60109 - DNA, 120 bp, synthetic construct; identical to SEQ ID NO: 32194
  source 1..120: mol_type = other DNA

SEQ ID NO: 60110 - DNA, 120 bp, synthetic construct
  source 1..120: mol_type = other DNA
tagtctaatcaactgcactgcactgtaacagtggacggatttaggattgcatattaaatcaactgcacacatcaatcctccctgtcggaaactcgtgcttcccgtgacgcagaaattaag

SEQ ID NO: 60111 - DNA, 120 bp, synthetic construct
  source 1..120: mol_type = other DNA
agactcttccagggtagctgtgcacctttaatacatttctttctgcttaatagctagagtggattctacagtttgcaactgagaactttggtgatgattcctccttacagaggccttctt

SEQ ID NO: 60112 - DNA, 120 bp, synthetic construct
  source 1..120: mol_type = other DNA
ttgtgactgatttctctaggtacctattttactgataagaaaactgaggttcagtgagatgaaatgactcatctgagagctagaattcttttttttgagacagggtctcgctctactgcc

SEQ ID NO: 60113 - DNA, 120 bp, synthetic construct; identical to SEQ ID NO: 23804
  source 1..120: mol_type = other DNA

SEQ ID NO: 60114 - DNA, 120 bp, synthetic construct; identical to SEQ ID NO: 23805
  source 1..120: mol_type = other DNA

SEQ ID NO: 60115 - DNA, 120 bp, synthetic construct; identical to SEQ ID NO: 23806
  source 1..120: mol_type = other DNA

SEQ ID NO: 60116 - DNA, 120 bp, synthetic construct; identical to SEQ ID NO: 23807
  source 1..120: mol_type = other DNA

SEQ ID NO: 60117 - DNA, 120 bp, synthetic construct
  source 1..120: mol_type = other DNA
ttattttcaattgttgagtttaaacaagtcattcctgaacactatttacatgtttaaaaagtctgtgtatggggaggagccaagatggccgaataggaacagctccggtctacagctccc

SEQ ID NO: 60118 - DNA, 120 bp, synthetic construct
  source 1..120: mol_type = other DNA
caaaggaacgcagttcctcaccagcaaaggaacaaagctggatggagaatgactttgaagagctcagagaagaaggcttcagactatcaaattactctgagctacgggaggacattcaaa

SEQ ID NO: 60119 - DNA, 120 bp, synthetic construct
  source 1..120: mol_type = other DNA
cgctgtaaaatcatgccaaaatgtaaagaccatcgagactaggaagaaactgcatcaactaacgagcaaaataaccagctaacatcataatgacaggatcaaattcacacataacaattt

SEQ ID NO: 60120 - DNA, 120 bp, synthetic construct
  source 1..120: mol_type = other DNA
tgtagacggaaatttatagcactaaatgcccacaagagaaggcaggaaagatccaaaattgacaccctaacatcacaattaaaagaactagaaaagcaagagcaaacacattcaaaagct

SEQ ID NO: 60121 - DNA, 120 bp, synthetic construct
  source 1..120: mol_type = other DNA
acaacccttcatgctaaaagctatcaataaattaggtattgatgggacgtatttcaaaataataagagctatctatgacaaacccacagccaatatcatactgaatgggcaaaaactgga

SEQ ID NO: 60122 - DNA, 120 bp, synthetic construct
  source 1..120: mol_type = other DNA
aattcaagatagattaaagacttaaacgttagacctaaaaccataaaaaccctagaagaaaacctaggcattaccattcaggacataggcatgggcaaggacttcatgtctaaaacacca

SEQ ID NO: 60123 - DNA, 120 bp, synthetic construct
  source 1..120: mol_type = other DNA
ctaacctgcacaatgtgcacatgtaccctaaaacttatagtataaggaaaaaaaaaaaaagtctgtgtatgcatgtgtgatagtgggagcatgtgtttatagtaacattgtactcattat

SEQ ID NO: 60124 - DNA, 120 bp, synthetic construct; identical to SEQ ID NO: 15293
  source 1..120: mol_type = other DNA

SEQ ID NO: 60125 - DNA, 120 bp, synthetic construct; identical to SEQ ID NO: 15294
  source 1..120: mol_type = other DNA

SEQ ID NO: 60126 - DNA, 120 bp, synthetic construct
  source 1..120: mol_type = other DNA
aagaccaaaagtagataaaaccacaaagatggggaaaaaacagaacagaaaaactggaaactctaaaaagcagagcgcctctcctccttcaaaggaacgcagttccccaccagcaacaga

SEQ ID NO: 60127 - DNA, 120 bp, synthetic construct
  source 1..120: mol_type = other DNA
tgccctaaaagagcttctgaaggaagtgctaaacacggaaaggaaccaccggtaccagcagctgcaaaaccatgccaaaatgtaaagaccatcaagactaggaagaaactgcatcaacta

SEQ ID NO: 60128 - DNA, 120 bp, synthetic construct
  source 1..120: mol_type = other DNA
gatgttctttgaaaccaacgagaacaaagacacaacataccagaatctctgggacgcattcaaagcagtgtgtagacggaaatttatagcactaaatgcccacaagagaaggcaggaaag

SEQ ID NO: 60129 - DNA, 120 bp, synthetic construct
  source 1..120: mol_type = other DNA
aatatacacaaatcaataaatgtaatccagcatataaacagagccaaagacaaaaaccgcatgattatctcaatagatgcagaaaaagcctttgacaaaattcaacaacccttcatgcta

SEQ ID NO: 60130 - DNA, 120 bp, synthetic construct
  source 1..120: mol_type = other DNA
tggtgctgggaaaactggctagccatatgcagaaagctgaaacttgatcccttccttacaccttatacaaaaatcaattcaagatggattaaagacttaaacgttagacctaaaaccata

SEQ ID NO: 60131 - DNA, 120 bp, synthetic construct
  source 1..120: mol_type = other DNA
tcctttgtagggacatggatgaaattggaaatcatcattctcagtaaactatcgcaagaacaaaaaaccaaacaccgcatattctcactcataggtgggaattcaacaatgagatcacat

SEQ ID NO: 60132 - DNA, 120 bp, synthetic construct; identical to SEQ ID NO: 15295
  source 1..120: mol_type = other DNA

SEQ ID NO: 60133 - DNA, 120 bp, synthetic construct
  source 1..120: mol_type = other DNA
agacttgaaaacaattgatttcaatggtaggtacacactggtatcccctgttctatatatatctatagatatatagatatatacagaacaggagatatatatatatattttatatatata

SEQ ID NO: 60134 - DNA, 120 bp, synthetic construct; identical to SEQ ID NO: 15298
  source 1..120: mol_type = other DNA

SEQ ID NO: 60135 - DNA, 120 bp, synthetic construct
  source 1..120: mol_type = other DNA
ccaggcggagggtctcctcacttctcagacggggcggctgggcagagacgctcctcacctcccagacggggtcacggccgggtagaggcgctcctcacatcccaggtggggcggcggggc

SEQ ID NO: 60136 - DNA, 120 bp, synthetic construct
  source 1..120: mol_type = other DNA
ttgcagtgagccgagatcgggccattgcactccagcctgggcaacaagagcaaaactccatctcaaaaataataaaaataataataatttgccccttcctaaacattcccataaaccaaa

SEQ ID NO: 60137 - DNA, 120 bp, synthetic construct; identical to SEQ ID NO: 12703
  source 1..120: mol_type = other DNA

SEQ ID NO: 60138 - DNA, 120 bp, synthetic construct
  source 1..120: mol_type = other DNA
tgtcaattttgtcttttgttgccattgcttttggtgttttagacatgaagtccttgcccatgcctatgtcctgaatggtaatgcctaggtttctttctagggtttttatggttttaggtc

SEQ ID NO: 60139 - DNA, 120 bp, synthetic construct
  source 1..120: mol_type = other DNA
tggctagccatatgtagaaagctgaaactggatcccttccttacaccttatacaacttgtattttaaagataaggcaaaataaacactggcaaggtaaatcgcctctgtgactgcgcact

SEQ ID NO: 60140 - DNA, 120 bp, synthetic construct; identical to SEQ ID NO: 24270
  source 1..120: mol_type = other DNA

SEQ ID NO: 60141 - DNA, 120 bp, synthetic construct; identical to SEQ ID NO: 24271
  source 1..120: mol_type = other DNA

SEQ ID NO: 60142 - DNA, 120 bp, synthetic construct
  source 1..120: mol_type = other DNA
gtatctgccttcctgagcaagtctgctaggaggaggaagggcacaagtacagatacgtcactcaagggcagtgatctcagaaaaacaagccagagaaagacatttcctcctggaaaagtt

SEQ ID NO: 60143 - DNA, 120 bp, synthetic construct; identical to SEQ ID NO: 25748
  source 1..120: mol_type = other DNA

SEQ ID NO: 60144 - DNA, 120 bp, synthetic construct; identical to SEQ ID NO: 25749
  source 1..120: mol_type = other DNA

SEQ ID NO: 60145 - DNA, 120 bp, synthetic construct
  source 1..120: mol_type = other DNA
tgagtatatacccagtaatgggatggctgggtcaaatggtatttctagttctagattcctgaggaatcgccacactgacttccacaatggttgaactagtttacagtcccaccaacagtg

SEQ ID NO: 60146 - DNA, 120 bp, synthetic construct
  source 1..120: mol_type = other DNA
tgtgttccattgatctatatctctgttttggtaccagtaccatgctgttttggttattgtagccttgtagtatagtttgaagtcaggtagcatgatgcctccagctttgttcttttggct

SEQ ID NO: 60147 - DNA, 120 bp, synthetic construct
  source 1..120: mol_type = other DNA
agctttttgatgtgctgctggatttggttcgccagtattttattgaggatttttatttttaattttttgttttgttttttgaggcgaagtctcgctccgttgccaggctggagggcagtg

SEQ ID NO: 60148 - DNA, 120 bp, synthetic construct
  source 1..120: mol_type = other DNA
cgagcaaaataaccagctaacatcataatgacaggataaaattcacacataacaacactaaccttaaaggtaaatgggctaaatgctccaattaaaaggcacagactggcaaactggata

SEQ ID NO: 60149 - DNA, 120 bp, synthetic construct
  source 1..120: mol_type = other DNA
gcagaaggcaagaaacaactaagatcagagcagaactgaaggaaatagagacacaaaaagcccttcaaaaaaatcaatgaatccaggagctggttttttgaaaagatcaacaaaattgat

SEQ ID NO: 60150 - DNA, 120 bp, synthetic construct
  source 1..120: mol_type = other DNA
gctcatgggtaggaagaatcaatattgtgcaaatggccatactacccaaggtaatttatagatttaatgccatccccatcaagctaccaatgactttcttcacagaattggaaaaaacta

SEQ ID NO: 60151 - DNA, 120 bp, synthetic construct
  source 1..120: mol_type = other DNA
cataggcatggggcaaggacttcatgtctaaaacaccaaaagcaatggcaacaaaagccaaaattgacaaacgggatctaattaaactaaagagcttctgcacagcaaaagaaaccaccg

SEQ ID NO: 60152 - DNA, 120 bp, synthetic construct
  source 1..120: mol_type = other DNA
tctctgtggtctcttttatgtgggtgctaatttcaacctcccaaaggccccacctcttaatatcattacattaagactgaggatttcaacgtatgagttttgagggggaagacatcataa

SEQ ID NO: 60153 - DNA, 120 bp, synthetic construct
  source 1..120: mol_type = other DNA
tcccaggttcaagcaattctcctgcctcagcctcccgagtagcttggactacaagcgcaggccaccacgtccggctaatttttattatttttatttttttatttttttaatttttagtag

SEQ ID NO: 60154 - DNA, 120 bp, synthetic construct; identical to SEQ ID NO: 10511
  source 1..120: mol_type = other DNA

SEQ ID NO: 60155 - DNA, 120 bp, synthetic construct; identical to SEQ ID NO: 10512
  source 1..120: mol_type = other DNA

SEQ ID NO: 60156 - DNA, 120 bp, synthetic construct; identical to SEQ ID NO: 10513
  source 1..120: mol_type = other DNA

SEQ ID NO: 60157 - DNA, 120 bp, synthetic construct
  source 1..120: mol_type = other DNA
gattacaggcatgagccaccgcacccagcccattttcatcattcctaatagccgtggagtatgccatttaatcaactgcatatgcaatattatttttttttccgggggcaaggggctcat

SEQ ID NO: 60158 - DNA, 120 bp, synthetic construct; identical to SEQ ID NO: 10514
  source 1..120: mol_type = other DNA

SEQ ID NO: 60159 - DNA, 120 bp, synthetic construct; identical to SEQ ID NO: 10944
  source 1..120: mol_type = other DNA

SEQ ID NO: 60160 - DNA, 120 bp, synthetic construct
  source 1..120: mol_type = other DNA
caggttcaagggagtctcctgcctcagactcctgagtagctgggattacaggcatgtgccaccatgcccagctggtctttgtatttttagtagcaatggggttttaccatattggtcagg

SEQ ID NO: 60161 - DNA, 120 bp, synthetic construct
  source 1..120: mol_type = other DNA
cgccctcctcagcctcccaaagtgctgggattacaggcatgagccaccgtgccctgccatgttaaatgttttgtcccagtgtgctgtcacatagtcttgtgtgactttgtcttcttattc

SEQ ID NO: 60162 - DNA, 120 bp, synthetic construct; identical to SEQ ID NO: 10515
  source 1..120: mol_type = other DNA

SEQ ID NO: 60163 - DNA, 120 bp, synthetic construct
  source 1..120: mol_type = other DNA
gggcaggagtttgagaccagcctggccaaaatggcgaaaccccgtctctgctaaaaatacaaaaattagtcgggcgtggtggtgggtgcctgtaatcccagctactcaggaggctgaggc

SEQ ID NO: 60164 - DNA, 120 bp, synthetic construct; identical to SEQ ID NO: 10516
  source 1..120: mol_type = other DNA

SEQ ID NO: 60165 - DNA, 120 bp, synthetic construct; identical to SEQ ID NO: 10517
  source 1..120: mol_type = other DNA

SEQ ID NO: 60166 - DNA, 120 bp, synthetic construct; identical to SEQ ID NO: 10518
  source 1..120: mol_type = other DNA

SEQ ID NO: 60167 - DNA, 120 bp, synthetic construct; identical to SEQ ID NO: 10519
  source 1..120: mol_type = other DNA

SEQ ID NO: 60168 - DNA, 120 bp, synthetic construct; identical to SEQ ID NO: 10520
  source 1..120: mol_type = other DNA

SEQ ID NO: 60169 - DNA, 120 bp, synthetic construct; identical to SEQ ID NO: 10521
  source 1..120: mol_type = other DNA

SEQ ID NO: 60170 - DNA, 120 bp, synthetic construct
  source 1..120: mol_type = other DNA
cagaaccttccctagttctttattgccatcatgcttttttgttcattgggtcactcctctgtggagccttgcgcttgcacagactccttcccaggcctccctgggagatcttgaatggga

SEQ ID NO: 60171 - DNA, 120 bp, synthetic construct; identical to SEQ ID NO: 29975
  source 1..120: mol_type = other DNA

SEQ ID NO: 60172 - DNA, 120 bp, synthetic construct; identical to SEQ ID NO: 29976
  source 1..120: mol_type = other DNA

SEQ ID NO: 60173 - DNA, 120 bp, synthetic construct; identical to SEQ ID NO: 29977
  source 1..120: mol_type = other DNA

SEQ ID NO: 60174 - DNA, 120 bp, synthetic construct; identical to SEQ ID NO: 29978
  source 1..120: mol_type = other DNA

SEQ ID NO: 60175 - DNA, 120 bp, synthetic construct; identical to SEQ ID NO: 33733
  source 1..120: mol_type = other DNA

SEQ ID NO: 60176 - DNA, 120 bp, synthetic construct; identical to SEQ ID NO: 33734
  source 1..120: mol_type = other DNA

SEQ ID NO: 60177 - DNA, 120 bp, synthetic construct; identical to SEQ ID NO: 25166
  source 1..120: mol_type = other DNA

SEQ ID NO: 60178 - DNA, 120 bp, synthetic construct; identical to SEQ ID NO: 25167
  source 1..120: mol_type = other DNA

SEQ ID NO: 60179 - DNA, 120 bp, synthetic construct; identical to SEQ ID NO: 25168
  source 1..120: mol_type = other DNA

SEQ ID NO: 60180 - DNA, 120 bp, synthetic construct; identical to SEQ ID NO: 25169
  source 1..120: mol_type = other DNA

SEQ ID NO: 60181 - DNA, 120 bp, synthetic construct; identical to SEQ ID NO: 25170
  source 1..120: mol_type = other DNA

SEQ ID NO: 60182 - DNA, 120 bp, synthetic construct; identical to SEQ ID NO: 25171
  source 1..120: mol_type = other DNA

SEQ ID NO: 60183 - DNA, 120 bp, synthetic construct; identical to SEQ ID NO: 25172
  source 1..120: mol_type = other DNA

SEQ ID NO: 60184 - DNA, 120 bp, synthetic construct; identical to SEQ ID NO: 25173
  source 1..120: mol_type = other DNA

SEQ ID NO: 60185 - DNA, 120 bp, synthetic construct
  source 1..120: mol_type = other DNA
ggttttcttttagggtttttatggttctaggtctaacgtttaagtctttaatccatcttgaattaatttttgtataaggtgtaaggaagggatccagtttcagctttctacatatggcta

SEQ ID NO: 60186 - DNA, 120 bp, synthetic construct; identical to SEQ ID NO: 20045
  source 1..120: mol_type = other DNA

SEQ ID NO: 60187 - DNA, 120 bp, synthetic construct; identical to SEQ ID NO: 20046
  source 1..120: mol_type = other DNA

SEQ ID NO: 60188 - DNA, 120 bp, synthetic construct
  source 1..120: mol_type = other DNA
tccctcagacccaggagagttcagactgccagcccttcaccctcagacccaggagtccagggcccttagctcctccgtcagacccaggagtccaggcccccagtccctcctccctcagac

SEQ ID NO: 60189 - DNA, 120 bp, synthetic construct
  source 1..120: mol_type = other DNA
aggagaattgcttgaactcaggaggtggaggttgcagtgagctgagatcacgccactgcactccagcctgagcaacagaggaagactccatctcaaaaaaaaaaaaaaaaaaaaaaaaga

SEQ ID NO: 60190 - DNA, 120 bp, synthetic construct
  source 1..120: mol_type = other DNA
attacggacgtgagccaccatgcctggactctttcttaatttgtaaaatgggaatgatagctcccaaggttattctgaggagtaaatgacactgcatgtgaaagctcttaataaactgta

SEQ ID NO: 60191 - DNA, 120 bp, synthetic construct
  source 1..120: mol_type = other DNA
gctaaacttgattatactttaccatcagagccatcatcctcaatctgatcattttattctcctgcttaaaaacttcaataactccacattgctactggaccaagtctaaacttacaatcg

SEQ ID NO: 60192 - DNA, 120 bp, synthetic construct; identical to SEQ ID NO: 149
  source 1..120: mol_type = other DNA

SEQ ID NO: 60193 - DNA, 120 bp, synthetic construct
  source 1..120: mol_type = other DNA
aaacaaaaaaagccccacaaaccagtgtcatttagccaggtgtggtgcatgcctgtggtcctagctacaggggaggctgaggcaggaggattgcttgagtccaggacttcaaagctgcag

SEQ ID NO: 60194 - DNA, 120 bp, synthetic construct
  source 1..120: mol_type = other DNA
ttctgtctgagcacctctaaccggttatgctaccttaaacaaattacttaacttctctctgtctcacctgatttaccagtttaaaaaaaaaggaataataatggtacctacctcataggt

SEQ ID NO: 60195 - DNA, 120 bp, synthetic construct
  source 1..120: mol_type = other DNA
tggtatctggtatcaagttgtaagaaaaactcccccagattgggaggtaactgagtgatatgtgaaagaatcttcccgtctgaatttaagaatacacctacactgggcagaaaaaggtgg

SEQ ID NO: 60196 - DNA, 120 bp, synthetic construct
  source 1..120: mol_type = other DNA
gcatgagccaccatgcctggcaaacacttttttttaaagggctaggacataaacattctttaaatccttttaagcaagggcttgaattctagaattttacagctcaaaaggctctcagga

SEQ ID NO: 60197 - DNA, 120 bp, synthetic construct
  source 1..120: mol_type = other DNA
gggattacagatgtgagccaccacacttggccagaaaaacaaatcttaagctgtccagttatcagtgtggacacaaagaggatccagcaattcaggatacccaccccatatacactgaga

SEQ ID NO: 60198 - DNA, 120 bp, synthetic construct; identical to SEQ ID NO: 8151
  source 1..120: mol_type = other DNA

SEQ ID NO: 60199 - DNA, 120 bp, synthetic construct
  source 1..120: mol_type = other DNA
gcagtgagccaagattgtgccactacactccagcctgggtgacagagcaagaccctgtctccaaaaaaaaaaaaaagttccttaaaatcaacttggtctgttgtgtaaatagatgttaga

SEQ ID NO: 60200 - DNA, 120 bp, synthetic construct
  source 1..120: mol_type = other DNA
caggatctcactctgttgcccaggctggagtgcagcggtgccacctcggcttactgcaacctccacctcctaggttcaaggggggtttcatcatattggccaggctggtctcgaacccct

SEQ ID NO: 60201 - DNA, 120 bp, synthetic construct; identical to SEQ ID NO: 150
  source 1..120: mol_type = other DNA

SEQ ID NO: 60202 - DNA, 120 bp, synthetic construct; identical to SEQ ID NO: 151
  source 1..120: mol_type = other DNA

SEQ ID NO: 60203 - DNA, 120 bp, synthetic construct
  source 1..120: mol_type = other DNA
ccagcaaccaccaccctgatcagtttgcagtcatcaacatcaaggcaagaccctccaccagcaaaaagattatgacttgctgaaggttcagatgatcattagcagtttttagcaataaag

SEQ ID NO: 60204 - DNA, 120 bp, synthetic construct; identical to SEQ ID NO: 152
  source 1..120: mol_type = other DNA

SEQ ID NO: 60205 - DNA, 120 bp, synthetic construct; identical to SEQ ID NO: 153
  source 1..120: mol_type = other DNA

SEQ ID NO: 60206 - DNA, 120 bp, synthetic construct; identical to SEQ ID NO: 154
  source 1..120: mol_type = other DNA

SEQ ID NO: 60207 - DNA, 120 bp, synthetic construct
  source 1..120: mol_type = other DNA
aggcagaggttgcagtaagctgagatcgtgccactgcactctagcctgggcgacagagcaaaactccgtcttaaaaaaaaaaaaaaaagaaaagaaagaagaaaataatgtccaaaggcc

SEQ ID NO: 60208 - DNA, 120 bp, synthetic construct
  source 1..120: mol_type = other DNA
aggcctggtggtgcctgcctgtagtcccagctactcaggaggctgaggtaggagaatcacttgagcccaggagttcaaggctacagtgagctatgatcatgccactgcactccagcctga

SEQ ID NO: 60209 - DNA, 120 bp, synthetic construct
  source 1..120: mol_type = other DNA
atctgtagaatcaatggacatttggattgcttccacctcttggctattgtgaataatgctgttaatgaacatgggtgtgcaaatatctcttccaagatccagttttgaattcttttggat

SEQ ID NO: 60210 - DNA, 120 bp, synthetic construct
  source 1..120: mol_type = other DNA
aatggctattttaccaaataggaagcaaattcttaaggactctacacccaaaagcagttagtggctgaaaacaaacagattttaaaagggttcaattatgggaacaaatgtgtaatgtcc

SEQ ID NO: 60211 - DNA, 120 bp, synthetic construct; identical to SEQ ID NO: 8154
  source 1..120: mol_type = other DNA

SEQ ID NO: 60212 - DNA, 120 bp, synthetic construct
  source 1..120: mol_type = other DNA
tcgggatcagctcttcctattggctatgggccccatcggtcgatagaaaacgggcggtgattggtaaaggggtgggctctacttcccggcggggtcctgcggagttggcggaggctcctc

SEQ ID NO: 60213 - DNA, 120 bp, synthetic construct
  source 1..120: mol_type = other DNA
tcctgacatccttgcgcttcacgcaacatcgcggcccatgatcatgccccaattcccctcacctctaaggcagccttctccttgccgcctcccgccttccgagcgtgtgcaactccagtt

SEQ ID NO: 60214 - DNA, 120 bp, synthetic construct
  source 1..120: mol_type = other DNA
caggcggctgctccaaagtgttttctttcagccttaaaatccggagggagcttccttcctccccacctcgtagcgccaggctctgcgggcggggagacgttaagcggacaggaatgggcc

SEQ ID NO: 60215 - DNA, 120 bp, synthetic construct
  source 1..120: mol_type = other DNA
aaaaatagcacactgcaaatgctctgtggactggtgaggcgtgtatttccaccgtgatttgcaggttgttcatttctttgggtggagcagatgggggcaggctgaccccagaggtggttt

SEQ ID NO: 60216 - DNA, 120 bp, synthetic construct
  source 1..120: mol_type = other DNA
actggaaagagccatgtggctccagcccattgagaccttagctggggagtggaagaggtgggtggccttgaatgttacaccacatggttggagctctgggttttcctttgtttcagagta

SEQ ID NO: 60217 - DNA, 120 bp, synthetic construct
  source 1..120: mol_type = other DNA
aaaacaggaagaaaaataactccagatctccctacatctcagaactattacagaaatcaaatgaagtgatgatgtaggagcaaatgctttgtaaactacagcacacaatgtctctctctc

SEQ ID NO: 60218 - DNA, 120 bp, synthetic construct
  source 1..120: mol_type = other DNA
ggattaaattcacacataacaatattaacgtaaatgtaaatgggctaaatgctccaattaaaagacacagactggcaaattggataaagagtcaagacccatcagtgtgctgtattcagg

SEQ ID NO: 60219 - DNA, 120 bp, synthetic construct
  source 1..120: mol_type = other DNA
atacaacataccagaatctctgggacacatttaaagcagtgtgtagagggaaatttatagcactaaagcccacaagagaaagcaggaaagatctaaaattgacaccctaacatcacaatt

SEQ ID NO: 60220 - DNA, 120 bp, synthetic construct
  source 1..120: mol_type = other DNA
aaaatgatgagttcatgtcctttgtagggacatgggtgaagatggaaaccatcattctcagcaaagtatcacaaggacgaaaaaccaaacaccgtatgttctcactcacaggtgggaatt

SEQ ID NO: 60221 - DNA, 120 bp, synthetic construct; identical to SEQ ID NO: 8978
  source 1..120: mol_type = other DNA

SEQ ID NO: 60222 - DNA, 120 bp, synthetic construct
  source 1..120: mol_type = other DNA
gcccacctcagcctcccaaactgctgggattacaggtgtgagccaccacgcctggcctgtcatcagtttttaaagaatttttcttaatgtggctattagaaagtttaaaattgtctataa

SEQ ID NO: 60223 - DNA, 120 bp, synthetic construct; identical to SEQ ID NO: 31759
  source 1..120: mol_type = other DNA

SEQ ID NO: 60224 - DNA, 120 bp, synthetic construct; identical to SEQ ID NO: 27836
  source 1..120: mol_type = other DNA

SEQ ID NO: 60225 - DNA, 120 bp, synthetic construct
  source 1..120: mol_type = other DNA
ttatacatttcccggtcgttccactaatgcccttttttatggtccaggatccaatccagtccaggatcacaccttacatttagttgtcaagtctccttcatgtgatttaatctggaacag

SEQ ID NO: 60226 - DNA, 120 bp, synthetic construct
  source 1..120: mol_type = other DNA
tatggcgaaaccccgtctctactaaaaatacaaaacaattaaccaggcatgatggcaggtgcctgtagtcttagctactcgggaggctgaggcaggagaattgcttgaacctgggagatg

SEQ ID NO: 60227 - DNA, 120 bp, synthetic construct; identical to SEQ ID NO: 23826
  source 1..120: mol_type = other DNA

SEQ ID NO: 60228 - DNA, 120 bp, synthetic construct; identical to SEQ ID NO: 23827
  source 1..120: mol_type = other DNA

SEQ ID NO: 60229 - DNA, 120 bp, synthetic construct
  source 1..120: mol_type = other DNA
cccaccccttgcaaactgcccgcagccagcccagtcttccccacagcaagagacgggcctccaaaaaagatgctgggaggcagcgagcaggagaatccaagtaggaaaggaagtgaagcc

SEQ ID NO: 60230 - DNA, 120 bp, synthetic construct
  source 1..120: mol_type = other DNA
atgtggtaaaatagacaccttttaattggaccatatttactctacctcgacgtaggcctcagtgtcttcaaggagattctccttgacatgcagtcatggccatgatccatcttcagagtt

SEQ ID NO: 60231 - DNA, 120 bp, synthetic construct; identical to SEQ ID NO: 31315
  source 1..120: mol_type = other DNA

SEQ ID NO: 60232 - DNA, 120 bp, synthetic construct; identical to SEQ ID NO: 31316
  source 1..120: mol_type = other DNA

SEQ ID NO: 60233 - DNA, 120 bp, synthetic construct; identical to SEQ ID NO: 31317
  source 1..120: mol_type = other DNA

SEQ ID NO: 60234 - DNA, 120 bp, synthetic construct; identical to SEQ ID NO: 31318
  source 1..120: mol_type = other DNA

SEQ ID NO: 60235 - DNA, 120 bp, synthetic construct; identical to SEQ ID NO: 31319
  source 1..120: mol_type = other DNA

SEQ ID NO: 60236 - DNA, 120 bp, synthetic construct
  source 1..120: mol_type = other DNA
tgtcacctttctgccgtgttcctaacactttcattcctgtcttgaaaaaagcgcctgctgcaccataagccctgggatgtggcagctgcagcgggcttggctttgtgaggaaccgagtgt

SEQ ID NO: 60237 - DNA, 120 bp, synthetic construct
  source 1..120: mol_type = other DNA
ctgctcagtcaactcactcttcacaaagcttagaaagtggccgggcacagccagactctgtctcaaaaaaaaaaaaaggttggttgaggcttatactatgtgtgctgcttggcactgttt

SEQ ID NO: 60238 - DNA, 120 bp, synthetic construct
  source 1..120: mol_type = other DNA
agccctgaccccgactgccgctctcgccacctccattttatagatgaggaaaccgaggcccaagggcttagggaaccctgctctgaagcacatagtagggctgctgggctcagaccctcc

SEQ ID NO: 60239 - DNA, 120 bp, synthetic construct; identical to SEQ ID NO: 31320
  source 1..120: mol_type = other DNA

SEQ ID NO: 60240 - DNA, 120 bp, synthetic construct; identical to SEQ ID NO: 31321
  source 1..120: mol_type = other DNA

SEQ ID NO: 60241 - DNA, 120 bp, synthetic construct; identical to SEQ ID NO: 31333
  source 1..120: mol_type = other DNA

SEQ ID NO: 60242 - DNA, 120 bp, synthetic construct
  source 1..120: mol_type = other DNA
ctggccaacatggtgaaactctgtctctactaaaaatacaaaaactaaccagacatggtggcatgtgcctgtagtcccagcttcttagcaggctaggcacgagaactgcttgaacccagg

SEQ ID NO: 60243 - DNA, 120 bp, synthetic construct; identical to SEQ ID NO: 31322
  source 1..120: mol_type = other DNA

SEQ ID NO: 60244 - DNA, 120 bp, synthetic construct
  source 1..120: mol_type = other DNA
agctaatttttttttatttttagtagagatgggtttttgccatgttggctaggctggtcttgaactcctgaccttaggtgatccgtccacctcagcctcccaaagacctgggattacagg

SEQ ID NO: 60245 - DNA, 120 bp, synthetic construct; identical to SEQ ID NO: 31323
  source 1..120: mol_type = other DNA

SEQ ID NO: 60246 - DNA, 120 bp, synthetic construct; identical to SEQ ID NO: 31334
  source 1..120: mol_type = other DNA

SEQ ID NO: 60247 - DNA, 120 bp, synthetic construct; identical to SEQ ID NO: 31324
  source 1..120: mol_type = other DNA

SEQ ID NO: 60248 - DNA, 120 bp, synthetic construct; identical to SEQ ID NO: 31325
  source 1..120: mol_type = other DNA

SEQ ID NO: 60249 - DNA, 120 bp, synthetic construct; identical to SEQ ID NO: 31326
  source 1..120: mol_type = other DNA

SEQ ID NO: 60250 - DNA, 120 bp, synthetic construct
  source 1..120: mol_type = other DNA
gatctcggctcactgcaacctccacctcccaggttcaagcgattctcctgcctcagcctcccgaggagctgggattacaggcgtgagccaccctgcctggccacttttgtatttttagta

SEQ ID NO: 60251 - DNA, 120 bp, synthetic construct; identical to SEQ ID NO: 31335
  source 1..120: mol_type = other DNA

SEQ ID NO: 60252 - DNA, 120 bp, synthetic construct; identical to SEQ ID NO: 31327
  source 1..120: mol_type = other DNA

SEQ ID NO: 60253 - DNA, 120 bp, synthetic construct; identical to SEQ ID NO: 60230
  source 1..120: mol_type = other DNA

SEQ ID NO: 60254 - DNA, 120 bp, synthetic construct; identical to SEQ ID NO: 31315
  source 1..120: mol_type = other DNA

SEQ ID NO: 60255 - DNA, 120 bp, synthetic construct; identical to SEQ ID NO: 31329
  source 1..120: mol_type = other DNA

SEQ ID NO: 60256 - DNA, 120 bp, synthetic construct; identical to SEQ ID NO: 31317
  source 1..120: mol_type = other DNA

SEQ ID NO: 60257 - DNA, 120 bp, synthetic construct; identical to SEQ ID NO: 31318
  source 1..120: mol_type = other DNA

SEQ ID NO: 60258 - DNA, 120 bp, synthetic construct; identical to SEQ ID NO: 31319
  source 1..120: mol_type = other DNA

SEQ ID NO: 60259 - DNA, 120 bp, synthetic construct; identical to SEQ ID NO: 31330
  source 1..120: mol_type = other DNA

SEQ ID NO: 60260 - DNA, 120 bp, synthetic construct; identical to SEQ ID NO: 31331
  source 1..120: mol_type = other DNA

SEQ ID NO: 60261 - DNA, 120 bp, synthetic construct; identical to SEQ ID NO: 31332
  source 1..120: mol_type = other DNA

SEQ ID NO: 60262 - DNA, 120 bp, synthetic construct
  source 1..120: mol_type = other DNA
gtagtatgcctgtctccaacaacagggctgtggcttgaaggtcaccttaagaggcacccctgtcctttgatgtcaccctggaggcccagagtaactcttctggaagccccatcacatcca

SEQ ID NO: 60263 - DNA, 120 bp, synthetic construct
  source 1..120: mol_type = other DNA
ttttcctttgtggttttctgtatctatgttttatctcatttttttttttttgagctctgtcacccaggctggagtcagtggcacgatcttggcttactgcaacatctgcctcctgggttc

SEQ ID NO: 60264 - DNA, 120 bp, synthetic construct; identical to SEQ ID NO: 31333
  source 1..120: mol_type = other DNA

SEQ ID NO: 60265 - DNA, 120 bp, synthetic construct; identical to SEQ ID NO: 60242
  source 1..120: mol_type = other DNA

SEQ ID NO: 60266 - DNA, 120 bp, synthetic construct; identical to SEQ ID NO: 31322
  source 1..120: mol_type = other DNA

SEQ ID NO: 60267 - DNA, 120 bp, synthetic construct; identical to SEQ ID NO: 60244
  source 1..120: mol_type = other DNA

SEQ ID NO: 60268 - DNA, 120 bp, synthetic construct; identical to SEQ ID NO: 31323
  source 1..120: mol_type = other DNA

SEQ ID NO: 60269 - DNA, 120 bp, synthetic construct; identical to SEQ ID NO: 31334
  source 1..120: mol_type = other DNA

SEQ ID NO: 60270 - DNA, 120 bp, synthetic construct; identical to SEQ ID NO: 31324
  source 1..120: mol_type = other DNA

SEQ ID NO: 60271 - DNA, 120 bp, synthetic construct; identical to SEQ ID NO: 31325
  source 1..120: mol_type = other DNA

SEQ ID NO: 60272 - DNA, 120 bp, synthetic construct; identical to SEQ ID NO: 31326
  source 1..120: mol_type = other DNA

SEQ ID NO: 60273 - DNA, 120 bp, synthetic construct; identical to SEQ ID NO: 60250
  source 1..120: mol_type = other DNA

SEQ ID NO: 60274 - DNA, 120 bp, synthetic construct; identical to SEQ ID NO: 31335
  source 1..120: mol_type = other DNA

SEQ ID NO: 60275 - DNA, 120 bp, synthetic construct; identical to SEQ ID NO: 31327
  source 1..120: mol_type = other DNA

SEQ ID NO: 60276 - DNA, 120 bp, synthetic construct
  source 1..120: mol_type = other DNA
ccatttcagagtttttaaaaaatgcaattacaaggtcaaaagacaggcacatattcaatttcagaggtattaccaaactgcgctcaaaaaaccctgcagcactttacaccgccccacccc

SEQ ID NO: 60277 - DNA, 120 bp, synthetic construct
  source 1..120: mol_type = other DNA
tttacccaccaattcagcatgctgcagtacatttcttttcgcattcccaccttggtcttatcccacacatggagacggaaatgctttctcgttttctgttccaagaattactagtaacga

SEQ ID NO: 60278 - DNA, 120 bp, synthetic construct
  source 1..120: mol_type = other DNA
tggccgtgactgcatgtcaaggagaatctccttgatgacactgaggcccacgtcgagatagagtaaatatggtccaattaaaaggtgtctattttaccacattttttaaaacaaaacaca

SEQ ID NO: 60279 - DNA, 120 bp, synthetic construct
  source 1..120: mol_type = other DNA
caggtccaagccacgactcccaacttggagaaatcaacggggaaagagacagaggcaaaggagaaccatctcactgggagaggcgacgctgtttgacacatcgtccctgcacctcccaaa

SEQ ID NO: 60280 - DNA, 120 bp, synthetic construct
  source 1..120: mol_type = other DNA
tcagcagcagtaactgtgggacaggggctcttccgtttgaaaaattaaaagaggcttggttaaggtaccaatgacatggccgggcacagtggctcatatctataatttcagcatattggg

SEQ ID NO: 60281 - DNA, 120 bp, synthetic construct
  source 1..120: mol_type = other DNA
tcttagagtgggctgtgcagatagacctttccaggtcatgtaattggattaagttaagtgtaattaacgtacatgtaactgattaggttagggtacgttccacgtcaggtgaccagaggc

SEQ ID NO: 60282 - DNA, 120 bp, synthetic construct
  source 1..120: mol_type = other DNA
tatcacgattcactccggtagaagacacgatgactctatctcccttgaccgacagaatgatcgaagccacagggcatggcgtgtgtcaccctttggcaggtctgtttgaaatctgggata

SEQ ID NO: 60283 - DNA, 120 bp, synthetic construct
  source 1..120: mol_type = other DNA
cccctctttggaatccttattcagctctgaattcacaatccgtctcaatgttgacgtgggatcgctgcctgtggcttcagctcactcaccgacatcacttcctttccacccacagctcaa

SEQ ID NO: 60284 - DNA, 120 bp, synthetic construct
  source 1..120: mol_type = other DNA
tctttcttgccttcttggggtcagggactccacgatccttccaggtcaatttgattccaggcgaaggcatctgaagatgccgtatttcctgttgttttctttctgtccaattatggcaag

SEQ ID NO: 60285 - DNA, 120 bp, synthetic construct
  source 1..120: mol_type = other DNA
tccaaaacccacggcctgctccaggccatcagcccccaggcacaagacaaacgtcctgcggtgacctcacagccctgcccaccagccgccacacatagcttgggtctaggctccaatctc

SEQ ID NO: 60286 - DNA, 120 bp, synthetic construct
  source 1..120: mol_type = other DNA
tgggaagcgtgctgtgcaaagcgctctcggggtctttcctcagcctcgaaaactgggctctggaatgcctttgtaaataggtgtgttgaatttgtttggaagtgaataaaattctcaaaa

SEQ ID NO: 60287 - DNA, 120 bp, synthetic construct
  source 1..120: mol_type = other DNA
gaggacacggagctccggcctatttctctgcagcgctccttccctggcccggagacggaaaggcacacggtgtgcaggtgcagagacaccatctccttagaggcagcaccctaagagtgg

SEQ ID NO: 60288 - DNA, 120 bp, synthetic construct
  source 1..120: mol_type = other DNA
gaagccacctgctaactccctgcctgtgtggtcatgaggagacctcaccaccagtcggtcaaatctgtagaacacaatgtgctgtgcgcatcctcggatattgtgtgttcctctgccatg

SEQ ID NO: 60289 - DNA, 120 bp, synthetic construct
  source 1..120: mol_type = other DNA
aggggcagagagggacctccgctttccaggctgccttttatactgcctctggtcacctgacatggaacgtaccctaacctaatcagttacctgtaccttaattgcaattaacttaatcca

SEQ ID NO: 60290 - DNA, 120 bp, synthetic construct
  source 1..120: mol_type = other DNA
tggtcctgctccttctgctgtcagaggagcagagagttgatcttattcattctggatacggatactttctagttgatctggataatcaagataacgacccacaacagcggcggagaggga

SEQ ID NO: 60291 - DNA, 120 bp, synthetic construct
  source 1..120: mol_type = other DNA
cagtatccttggtaggagtcattgccattccctagtctcaataaaccaggggcgcaatgcaccgtggaaagccacagggacctctgcccttgaaagcagggtattgtccaaggtttctcc

SEQ ID NO: 60292 - DNA, 120 bp, synthetic construct
  source 1..120: mol_type = other DNA
tctctggcacggaagcttttcctggcgcgtttcgggagaaccacgccaactacaacgtccctcaccagaattcaatgaggcagagtccctgcatctgctccctgcctggcctgggctccc

SEQ ID NO: 60293 - DNA, 120 bp, synthetic construct
  source 1..120: mol_type = other DNA
gtcagacaccagggccccgagcctctcctcgtggtgaagccgacacacagcagccctgagggtggctgccgagaagttccccaggctgcctccaaaacccacggcctgctccaggccatc

SEQ ID NO: 60294 - DNA, 120 bp, synthetic construct
  source 1..120: mol_type = other DNA
gtggaggagagcgttcctctgcgggtcttgttgcctgcagaacagaaaaaggtcaggcggtgccccctggttttccccaggagacagggagaaccccgtctggggcccagccccattccg

SEQ ID NO: 60295 - DNA, 120 bp, synthetic construct
  source 1..120: mol_type = other DNA
aaggggcacgatggtgaagccgatgtcaacaacgcagccaaacgtggctacacaggactcgaagtagaaagggaggttgcccccaagagtctctcaagggacctatcgggccggggagaa

SEQ ID NO: 60296 - DNA, 120 bp, synthetic construct
  source 1..120: mol_type = other DNA
ggtgatggtctttcctgttctatcttttggctttagctccagcccctctttatttattttcctggtattttacgcacaccacacgaattcatctgaacaaacggggaagaagtgccgtat

SEQ ID NO: 60297 - DNA, 120 bp, synthetic construct
  source 1..120: mol_type = other DNA
gagctgaaaaaggagccaggcactgaaggagaaagaggtgttgactttcttcatctgtgtttcccagtgcggtccaattcacggtggtttccaagcgcctcctggagaagaaaacacatg

SEQ ID NO: 60298 - DNA, 120 bp, synthetic construct
  source 1..120: mol_type = other DNA
ttaggatcagggggagaaccatggtgtcagacatccagaaagaagacgggatgaatgttttacctctgaggtacatcccaaatgtgggagttaacttcagctttgctggggtctatttgg

SEQ ID NO: 60299 - DNA, 120 bp, synthetic construct
  source 1..120: mol_type = other DNA
tgcccctgggaactgaatgtctcggtgtaaagcccgatcgtacatttgttcaactctgagctcggcgaaaagctgccctgtggcgggaggcgagacatgctggcagtaatgctgccttgt

SEQ ID NO: 60300 - DNA, 120 bp, synthetic construct; identical to SEQ ID NO: 60292
  source 1..120: mol_type = other DNA

SEQ ID NO: 60301 - DNA, 120 bp, synthetic construct; identical to SEQ ID NO: 60293
  source 1..120: mol_type = other DNA

SEQ ID NO: 60302 - DNA, 120 bp, synthetic construct; identical to SEQ ID NO: 15143
  source 1..120: mol_type = other DNA

SEQ ID NO: 60303 - DNA, 120 bp, synthetic construct; identical to SEQ ID NO: 15144
  source 1..120: mol_type = other DNA

SEQ ID NO: 60304 - DNA, 120 bp, synthetic construct
  source 1..120: mol_type = other DNA
gaaacttttatgtaaacttttttgaaatattaggaactaaaagaaaatgtttcttcacacaggtgctgatgggaagggtgcctgacaggggaggccggccgaatgaaattgaaccaccac

SEQ ID NO: 60305 - DNA, 120 bp, synthetic construct; identical to SEQ ID NO: 33431
  source 1..120: mol_type = other DNA

SEQ ID NO: 60306 - DNA, 120 bp, synthetic construct; identical to SEQ ID NO: 33432
  source 1..120: mol_type = other DNA

SEQ ID NO: 60307 - DNA, 120 bp, synthetic construct
  source 1..120: mol_type = other DNA
atggttggctgtcctgggaagttagaggcgatccctgaacctggttgagtgcaaagtcaaactaagtaagctaaggaaacaggatatgtgaaaggagagccaacgggatctcggattcaa

SEQ ID NO: 60308 - DNA, 120 bp, synthetic construct
  source 1..120: mol_type = other DNA
tcttagcacgtgcatggtggactccaaagccacaaaggggccaggggtctcgggctgcccatgtgccccccgcgcagagagcaaacagaccatctccttgggcgtgcaccttctttcgtg

SEQ ID NO: 60309 - DNA, 120 bp, synthetic construct
  source 1..120: mol_type = other DNA
ggatcactcaggtgtctccagctccctccctgccctggcccatcccagcccaccctcagggcctcgccctgacccaggccccaggcaacgatgccagggccatttcctgctttgaaaacc

SEQ ID NO: 60310 - DNA, 120 bp, synthetic construct
  source 1..120: mol_type = other DNA
gcaagctcaggtaatggttcacctgcatggcaggatttgctcagaaagttaacaccgccccagtgctgtcttttcagcaactttatcaaaatacacatgtgtgtatatgtaaatacatgt

SEQ ID NO: 60311 - DNA, 120 bp, synthetic construct; identical to SEQ ID NO: 17166
  source 1..120: mol_type = other DNA

SEQ ID NO: 60312 - DNA, 120 bp, synthetic construct
  source 1..120: mol_type = other DNA
aaagagataaaagacaagacagctgggcccgggggaccactaccatcaatgcgcggagaccggtagtggccctgaatgtctggttgtgctgttatttattggatacaaagcaaaaggggc

SEQ ID NO: 60313 - DNA, 120 bp, synthetic construct
  source 1..120: mol_type = other DNA
gaacctgggaggtagaggctgcagtgagccgagatcacgccactgcactccaacctggatgacaaagcgagactctgtctcaaaaaaaatataaaaaaataaaaataaaaagatgaaaaa

SEQ ID NO: 60314 - DNA, 120 bp, synthetic construct
  source 1..120: mol_type = other DNA
taaatctttctcaaccttgacactattgacattttgggctggataactgttgtgaattttcatgtacactggaggatgtttggcagcttccctggtctctatccactagtagccagtgag

SEQ ID NO: 60315 - DNA, 120 bp, synthetic construct
  source 1..120: mol_type = other DNA
aactagtaaaatactgaaaatgaaaatattcatgctaggtgtggtagcttatgtctgcaatcccagaactttgggaggttaaggtgggtggactgcttcagcccaggagtttgagataag

SEQ ID NO: 60316 - DNA, 120 bp, synthetic construct
  source 1..120: mol_type = other DNA
gtcttggctcactgcaacctcaacctccccaggctcaagcgatgctcccacctcagcctccctagtagctgggattacaggtgcttgccaccacatctggctttttttgggttttttttt

SEQ ID NO: 60317 - DNA, 120 bp, synthetic construct
  source 1..120: mol_type = other DNA
gctgggattacaggcatgcgccaccacgcctggctaatttttgtactttcagtagaaacggagtttcaccacatggtctcaaactccttacctcaggtgccttgacctcccaaagtgctg

SEQ ID NO: 60318 - DNA, 120 bp, synthetic construct; identical to SEQ ID NO: 32838
  source 1..120: mol_type = other DNA

SEQ ID NO: 60319 - DNA, 120 bp, synthetic construct; identical to SEQ ID NO: 24078
  source 1..120: mol_type = other DNA

SEQ ID NO: 60320 - DNA, 120 bp, synthetic construct
  source 1..120: mol_type = other DNA
gccaatgtagcgaaaccccgtctctactaaaaatacaaaaaaaattagcctggcctggtggcacacgccactgcactccagcctgggcgacagtgcaagactccatctcaaaagataaaa

SEQ ID NO: 60321 - DNA, 120 bp, synthetic construct; identical to SEQ ID NO: 24079
  source 1..120: mol_type = other DNA

SEQ ID NO: 60322 - DNA, 120 bp, synthetic construct; identical to SEQ ID NO: 24080
  source 1..120: mol_type = other DNA

SEQ ID NO: 60323 - DNA, 120 bp, synthetic construct
  source 1..120: mol_type = other DNA
gtgaaccgcctgcctcagcctctcaaagtgctgggattataggcgtgagccattgggcctggccgagacacattttaatagcatatatccagagagggaggactgtatttgtggaaaatg

SEQ ID NO: 60324 - DNA, 120 bp, synthetic construct
  source 1..120: mol_type = other DNA
catctgctatgatgatgaatgctgtctttgtaaaggtatcttattggcttcttgtactttagatattgaatactataattggtgggaggtggtgggaaggaggtgagatgatgggcaagt

SEQ ID NO: 60325 - DNA, 120 bp, synthetic construct
  source 1..120: mol_type = other DNA
atatgttgggaaagatttttttttttttgagacagagtctagctctgtctcctagactggagtgcagttggcacgatctcagctcattgcaacctctgcctcctgggttcaagcgattct

SEQ ID NO: 60326 - DNA, 120 bp, synthetic construct; identical to SEQ ID NO: 24083
  source 1..120: mol_type = other DNA

SEQ ID NO: 60327 - DNA, 120 bp, synthetic construct; identical to SEQ ID NO: 24084
  source 1..120: mol_type = other DNA

SEQ ID NO: 60328 - DNA, 120 bp, synthetic construct; identical to SEQ ID NO: 24085
  source 1..120: mol_type = other DNA

SEQ ID NO: 60329 - DNA, 120 bp, synthetic construct
  source 1..120: mol_type = other DNA
tcagagaaatgcaaatcaaaactgccatgtgatgtcatctcaccctagttaagatgcctctccccctccccctccccctccccctctcccgtctccctctgatgccgagccaaagctgga

SEQ ID NO: 60330 - DNA, 120 bp, synthetic construct
  source 1..120: mol_type = other DNA
ccatctgagaagtgaggagtccctccgcccggcagccaccctgtctgggaagtgaggagcgtctccgcccggcagccaccccgtccgggagggaggtgggggtcaggccccgccaggcca

SEQ ID NO: 60331 - DNA, 120 bp, synthetic construct
  source 1..120: mol_type = other DNA
aaaagagaacctttgtacactgttggtgggaatgtcaattagtacaagcactatggagaacagtttggagtttcctcaaaaaactaaaaatagaatcaccatatgatccaggaatgccac

SEQ ID NO: 60332 - DNA, 120 bp, synthetic construct
  source 1..120: mol_type = other DNA
ttgctgattttttttttttttttttttttttttttctgagacagagtcttgcttgttctgttgcccagactggagtgcagtggcatgatctcggctcactgcaacctcacctcctgggtt

SEQ ID NO: 60333 - DNA, 120 bp, synthetic construct
  source 1..120: mol_type = other DNA
atttttctatttttagtagaggcggggttttgtcgtgttgctcaggctggtcttgaactcataggctcaagcaatcctcccgcctcagcctcccaaagtgctgggattataggcataaac

SEQ ID NO: 60334 - DNA, 120 bp, synthetic construct
  source 1..120: mol_type = other DNA
ggttgctacatctaaggataattggcttaaatatctgtatagctatgtaattcaagaactatatcttagtgggaatacagtaagggaagtatttggctgtgactcagaggtgcccatata

SEQ ID NO: 60335 - DNA, 120 bp, synthetic construct; identical to SEQ ID NO: 27712
  source 1..120: mol_type = other DNA

SEQ ID NO: 60336 - DNA, 120 bp, synthetic construct
  source 1..120: mol_type = other DNA
gagaaagctccaaatgaatcagaaatttaaatgtaaaaaacaaatctaaataaatgttagggctgggcacaggggcttatccctgtaatcccagcactttgggaggctgaggtgggaaga

SEQ ID NO: 60337 - DNA, 120 bp, synthetic construct
  source 1..120: mol_type = other DNA
aactcctgggctcaagcgatacgcccatctcagcctcccaaagtgctgggattacaggcctgagccactgtggcttttgttttttcgttttttttgttttgttttgtttttgtttttgtt

SEQ ID NO: 60338 - DNA, 120 bp, synthetic construct; identical to SEQ ID NO: 15638
  source 1..120: mol_type = other DNA

SEQ ID NO: 60339 - DNA, 120 bp, synthetic construct; identical to SEQ ID NO: 15639
  source 1..120: mol_type = other DNA

SEQ ID NO: 60340 - DNA, 120 bp, synthetic construct
  source 1..120: mol_type = other DNA
tctcagcccaaaatctccttaagctgataagcaacttcagcaaagtctcaggatacaaaatcaatgtacaaaaatcacaagcattcttacacactaataacagacaaacagccaaatcat

SEQ ID NO: 60341 - DNA, 120 bp, synthetic construct
  source 1..120: mol_type = other DNA
aacattttcgcaacctactcatctgacaaagggctaatatccagaatctacaaagaactcaaacaaatttacaagaaaaaaacaaacaaccccatcaaaaagtgggcaaaggacatgaac

SEQ ID NO: 60342 - DNA, 120 bp, synthetic construct
  source 1..120: mol_type = other DNA
atgtaagtaacctgcacattgtgcacatgtacactaaaacttaataataaaataaaaaagattaaaaaaaaaagaaaaagaaaaaacaaaaaaaacccaaatagaccgctagccagacta

SEQ ID NO: 60343 - DNA, 120 bp, synthetic construct; identical to SEQ ID NO: 20553
  source 1..120: mol_type = other DNA

SEQ ID NO: 60344 - DNA, 120 bp, synthetic construct; identical to SEQ ID NO: 14324
  source 1..120: mol_type = other DNA

SEQ ID NO: 60345 - DNA, 120 bp, synthetic construct
  source 1..120: mol_type = other DNA
gcagcctaactgggaggcaccccgcagcaggggcacactgacacctcacacggcagggtattccaacagacctgcagctgagggtcctgtctgttagaaggaaaactaacaaacagaaag

SEQ ID NO: 60346 - DNA, 120 bp, synthetic construct
  source 1..120: mol_type = other DNA
ttgtcaccaccaggcctgccctaaaagagctcctgaaggaagcgctaaacatggaaaggaacaaccggtaccagctgctgcaaaatcatgccaaaatgtaaagaccatcaagactaggaa

SEQ ID NO: 60347 - DNA, 120 bp, synthetic construct
  source 1..120: mol_type = other DNA
acaattaaaagaactagaaaagcaagagcaaacacattcaaaagctagcagaaggcaagaaataactaaaatcagagcagaactgaaggaaatagagacacaaaaaccccttcaaaaaaa

SEQ ID NO: 60348 - DNA, 120 bp, synthetic construct
  source 1..120: mol_type = other DNA
acagggatgccctctctcaccactcctattcaacatagtgttgtaagttctggccagggcaattaggcaggagaaggaaataaagggtattcaattaggaaaagaggaagtcaaattgtc

SEQ ID NO: 60349 - DNA, 120 bp, synthetic construct
  source 1..120: mol_type = other DNA
ccataaaaaccctagaagaaaacctaggcattaccattcaggacataggcatgggcaaggacttcatgtccaaaacaccaaaagcaatggcagcaaaagccaaaattgacaaatgggatc

SEQ ID NO: 60350 - DNA, 120 bp, synthetic construct
  source 1..120: mol_type = other DNA
tagatgacgagttagtgggtgcagcgcaccagcatggcacatgtatacatatgtaacctgcacaatgtgcacatgtaccctaaaacttaaagtataaaaaaaaaaaaaagaacaaaacaa

SEQ ID NO: 60351 - DNA, 120 bp, synthetic construct; identical to SEQ ID NO: 11293
  source 1..120: mol_type = other DNA

SEQ ID NO: 60352 - DNA, 120 bp, synthetic construct; identical to SEQ ID NO: 11267
  source 1..120: mol_type = other DNA

SEQ ID NO: 60353 - DNA, 120 bp, synthetic construct; identical to SEQ ID NO: 11268
  source 1..120: mol_type = other DNA

SEQ ID NO: 60354 - DNA, 120 bp, synthetic construct; identical to SEQ ID NO: 11269
  source 1..120: mol_type = other DNA

SEQ ID NO: 60355 - DNA, 120 bp, synthetic construct; identical to SEQ ID NO: 11270
  source 1..120: mol_type = other DNA

SEQ ID NO: 60356 - DNA, 120 bp, synthetic construct; identical to SEQ ID NO: 11271
  source 1..120: mol_type = other DNA

SEQ ID NO: 60357 - DNA, 120 bp, synthetic construct; identical to SEQ ID NO: 11272
  source 1..120: mol_type = other DNA

SEQ ID NO: 60358 - DNA, 120 bp, synthetic construct; identical to SEQ ID NO: 11273
  source 1..120: mol_type = other DNA

SEQ ID NO: 60359 - DNA, 120 bp, synthetic construct
  source 1..120: mol_type = other DNA
ccataccccgctaatttatttatttatttagagacagagtttcgctgttgttgcccaagctggagtgcaatgatgtgatcttggcttactgcaacctccgcctcccgggttcaagtaatt

SEQ ID NO: 60360 - DNA, 120 bp, synthetic construct; identical to SEQ ID NO: 11274
  source 1..120: mol_type = other DNA

SEQ ID NO: 60361 - DNA, 120 bp, synthetic construct; identical to SEQ ID NO: 11275
  source 1..120: mol_type = other DNA

SEQ ID NO: 60362 - DNA, 120 bp, synthetic construct
  source 1..120: mol_type = other DNA
ggtggaggttgcagtgagccgagatagcaccactgtactccatcgtgggagacaagagcaatgtgaggtggggggaggagggagggatagcgttaggagatatacctaatgctaaatgat

SEQ ID NO: 60363 - DNA, 120 bp, synthetic construct; identical to SEQ ID NO: 11276
  source 1..120: mol_type = other DNA

SEQ ID NO: 60364 - DNA, 120 bp, synthetic construct
  source 1..120: mol_type = other DNA
tgggtttaagctattctcctgcctcagcctcccgcgtagctgggaccacagaatgtgatcccacagctgtgaccacacctggctaattttttatttttttgaactggagtctctctttgt

SEQ ID NO: 60365 - DNA, 120 bp, synthetic construct
  source 1..120: mol_type = other DNA
gatcacgaggtcaggagatcgagaccgtcctggctaacagggtgaaaccccgtctctgctaaaaatacaacaaaaaaaaattagccgggtgtggtggtgggcgcctgtagtcccagctac

SEQ ID NO: 60366 - DNA, 120 bp, synthetic construct
  source 1..120: mol_type = other DNA
ttatcttaatctcaaaaaatgagcttggctctgttccctctattttctcttaaaagtttctgcagcctgaagtcccagctactcaggaaggtgaggtgggaggatcacttgaggccagga

SEQ ID NO: 60367 - DNA, 120 bp, synthetic construct; identical to SEQ ID NO: 11277
  source 1..120: mol_type = other DNA

SEQ ID NO: 60368 - DNA, 120 bp, synthetic construct
  source 1..120: mol_type = other DNA
gacccacagaaaatacgagagaataaatatgttttttctccctttttttttttttttttgagacaagagtttccctcttgtttcccaggctggagtgcagtggtgcgctctcggctcact

SEQ ID NO: 60369 - DNA, 120 bp, synthetic construct; identical to SEQ ID NO: 11278
  source 1..120: mol_type = other DNA

SEQ ID NO: 60370 - DNA, 120 bp, synthetic construct; identical to SEQ ID NO: 11279
  source 1..120: mol_type = other DNA

SEQ ID NO: 60371 - DNA, 120 bp, synthetic construct; identical to SEQ ID NO: 11280
  source 1..120: mol_type = other DNA

SEQ ID NO: 60372 - DNA, 120 bp, synthetic construct; identical to SEQ ID NO: 11281
  source 1..120: mol_type = other DNA

SEQ ID NO: 60373 - DNA, 120 bp, synthetic construct; identical to SEQ ID NO: 11282
  source 1..120: mol_type = other DNA

SEQ ID NO: 60374 - DNA, 120 bp, synthetic construct; identical to SEQ ID NO: 11283
  source 1..120: mol_type = other DNA

SEQ ID NO: 60375 - DNA, 120 bp, synthetic construct; identical to SEQ ID NO: 11284
  source 1..120: mol_type = other DNA

SEQ ID NO: 60376 - DNA, 120 bp, synthetic construct
  source 1..120: mol_type = other DNA
tcactcgaatctgggggttcaagctttcagtgaattatgatcatgccactgtactccaacctgggcgacagagtgagaccctgtcagaaaaaagaaaaaaaaagggtagtttggtggttg

SEQ ID NO: 60377 - DNA, 120 bp, synthetic construct; identical to SEQ ID NO: 11277
  source 1..120: mol_type = other DNA

SEQ ID NO: 60378 - DNA, 120 bp, synthetic construct; identical to SEQ ID NO: 11285
  source 1..120: mol_type = other DNA

SEQ ID NO: 60379 - DNA, 120 bp, synthetic construct; identical to SEQ ID NO: 11286
  source 1..120: mol_type = other DNA

SEQ ID NO: 60380 - DNA, 120 bp, synthetic construct; identical to SEQ ID NO: 11287
  source 1..120: mol_type = other DNA

SEQ ID NO: 60381 - DNA, 120 bp, synthetic construct
  source 1..120: mol_type = other DNA
tgaatttgtttatttgagacagggtctcactctgttgcccaggctggagtacagtggtacaatcatggctcactgcagcctccgcctcccaggctcaagccaccctcttgcttcagcctc

SEQ ID NO: 60382 - DNA, 120 bp, synthetic construct
  source 1..120: mol_type = other DNA
ttccttttctaatgttctcatttaagactataaatttccccagcctggacaacatggtgaaactttatctctaccaaacacacaaaaaattagcctggcgtggtggtgtgagcctgtggt

SEQ ID NO: 60383 - DNA, 120 bp, synthetic construct
  source 1..120: mol_type = other DNA
tgtgtatctttcacgtgtatgtgtgtatttttttcccactgtgctgcccaggctatagtgcaggggctgttcacaggtgttcacaggtggctccctgctgccttgaactcctgggctcaa

SEQ ID NO: 60384 - DNA, 120 bp, synthetic construct; identical to SEQ ID NO: 452
  source 1..120: mol_type = other DNA

SEQ ID NO: 60385 - DNA, 120 bp, synthetic construct
  source 1..120: mol_type = other DNA
tgacattcaggttcttccaagcttgggtccattatgagtaatgccattataaacttttttttttttgagatggagtctcactcttgtcgcccaagctggagtgcaatggcgcaatctcag

SEQ ID NO: 60386 - DNA, 120 bp, synthetic construct; identical to SEQ ID NO: 11698
  source 1..120: mol_type = other DNA

SEQ ID NO: 60387 - DNA, 120 bp, synthetic construct
  source 1..120: mol_type = other DNA
catcctgctgattggtccattttatagagtgctgactggtgcatttacaatcctttagctagacacagagtgctgattggagcatttttacacagtgctggttggtgcatttacagtctt

SEQ ID NO: 60388 - DNA, 120 bp, synthetic construct
  source 1..120: mol_type = other DNA
tataaccttgttattgacattaagtatggtttaaagagaggcaaatggttgccaagttgacacggggtggacttgtgatggttaattttatgtgtcaacttggctgggcagtagtgccca

SEQ ID NO: 60389 - DNA, 120 bp, synthetic construct; identical to SEQ ID NO: 12790
  source 1..120: mol_type = other DNA

SEQ ID NO: 60390 - DNA, 120 bp, synthetic construct; identical to SEQ ID NO: 12791
  source 1..120: mol_type = other DNA

SEQ ID NO: 60391 - DNA, 120 bp, synthetic construct
  source 1..120: mol_type = other DNA
gccatttactttaaggaaggaaggaagggaggaagggaagaaggaagggagggaaggagggaaggaaggaaggaaaaaaatctcttccaatcacattaagtctttttcttaaaagcttca

SEQ ID NO: 60392 - DNA, 120 bp, synthetic construct
  source 1..120: mol_type = other DNA
accaagatggaaaacactctgcagggtattatccaggagaacttccccaatctagcaaggcaggccaacattcaaattcaggaaatacagagaatgccacaaagatactcctcgagaaga

SEQ ID NO: 60393 - DNA, 120 bp, synthetic construct
  source 1..120: mol_type = other DNA
aataatgggggactttaacaccccactgtcaacattagacagatcaatgacacagaaagttaacaaggatatccaggaattgaactcagctctgcaccaagcagacctaatagacatcta

SEQ ID NO: 60394 - DNA, 120 bp, synthetic construct
  source 1..120: mol_type = other DNA
caggaccagatggattcacagccgaattctaccagagttacgaggaggacctggtaccattccttctgaaactattccaatcaatagaaaaagagggaatcctccctaactcattttatg

SEQ ID NO: 60395 - DNA, 120 bp, synthetic construct
  source 1..120: mol_type = other DNA
tcacaagtatacctatacaccaatgacagacaaatggagagccaaatcatgagtaaacacccattcataattgctacaaagagaataaaatacctaggaatccaacttacaagggatatg

SEQ ID NO: 60396 - DNA, 120 bp, synthetic construct
  source 1..120: mol_type = other DNA
gggatctaattaaactaaagagcttctgcacagcaaaagaaaccaccatcagagtaaacaggcaacctacagaatgggagaaaatttttgcaacctactcatctgacaaagggctaatat

SEQ ID NO: 60397 - DNA, 120 bp, synthetic construct
  source 1..120: mol_type = other DNA
gatagcattaggagatatacgtaatgctaaatgacgagttaatgcgtgcagcacaccaacatggcacatgtatacatatgtaacaagcctgcacgttatgcacacgtatcctaaaactta

SEQ ID NO: 60398 - DNA, 120 bp, synthetic construct; identical to SEQ ID NO: 13871
  source 1..120: mol_type = other DNA

SEQ ID NO: 60399 - DNA, 120 bp, synthetic construct; identical to SEQ ID NO: 13872
  source 1..120: mol_type = other DNA

SEQ ID NO: 60400 - DNA, 120 bp, synthetic construct; identical to SEQ ID NO: 13873
  source 1..120: mol_type = other DNA

SEQ ID NO: 60401 - DNA, 120 bp, synthetic construct
  source 1..120: mol_type = other DNA
acagaaaatgcagaaatgtatcccattcttaggatttttgagataaattcttttttttatttggagagggagtctcactctgtcacccaggctggagtgcagtggtgcgatctcggctca

SEQ ID NO: 60402 - DNA, 120 bp, synthetic construct; identical to SEQ ID NO: 13874
  source 1..120: mol_type = other DNA

SEQ ID NO: 60403 - DNA, 120 bp, synthetic construct; identical to SEQ ID NO: 13875
  source 1..120: mol_type = other DNA

SEQ ID NO: 60404 - DNA, 120 bp, synthetic construct; identical to SEQ ID NO: 22257
  source 1..120: mol_type = other DNA

SEQ ID NO: 60405 - DNA, 120 bp, synthetic construct
  source 1..120: mol_type = other DNA
ataccatttgacccagccatcccattactgggtatatacccaaaggactataaatcatgctgctataaagacacatgcacacgtgtgtttcttgcggcactattcacaatggcaaagact

SEQ ID NO: 60406 - DNA, 120 bp, synthetic construct; identical to SEQ ID NO: 22258
  source 1..120: mol_type = other DNA

SEQ ID NO: 60407 - DNA, 120 bp, synthetic construct; identical to SEQ ID NO: 22259
  source 1..120: mol_type = other DNA

SEQ ID NO: 60408 - DNA, 120 bp, synthetic construct; identical to SEQ ID NO: 27462
  source 1..120: mol_type = other DNA

SEQ ID NO: 60409 - DNA, 120 bp, synthetic construct
  source 1..120: mol_type = other DNA
tctttcctttttttttaaaaaaattattaactataattttttactgtgctgtctttagttactttcaaggcttctacccaccccccgcccccccccccatttttgtttttcagccatgtg

SEQ ID NO: 60410 - DNA, 120 bp, synthetic construct; identical to SEQ ID NO: 27464
  source 1..120: mol_type = other DNA

SEQ ID NO: 60411 - DNA, 120 bp, synthetic construct; identical to SEQ ID NO: 27465
  source 1..120: mol_type = other DNA

SEQ ID NO: 60412 - DNA, 120 bp, synthetic construct; identical to SEQ ID NO: 27466
  source 1..120: mol_type = other DNA

SEQ ID NO: 60413 - DNA, 120 bp, synthetic construct; identical to SEQ ID NO: 27467
  source 1..120: mol_type = other DNA

SEQ ID NO: 60414 - DNA, 120 bp, synthetic construct
  source 1..120: mol_type = other DNA
gagcctgttattggtctattcagagattcaacttcttcctggtttagtcttgggagggtgtatgtgtcgaggaatttatccattgcttctagattttctagtttatttgcatagaggtgt

SEQ ID NO: 60415 - DNA, 120 bp, synthetic construct
  source 1..120: mol_type = other DNA
tatgtaatggccttctttgtctcttttgatcttgttggtttaaagtctgttttatccaagactaggattgcaacctctgcctttttttattttccatgtgcttggtagatcttccttcat

SEQ ID NO: 60416 - DNA, 120 bp, synthetic construct
  source 1..120: mol_type = other DNA
catttgatcgaatcggctaccgaggcttgtgcattcatcacatagttctcgtgccgtggttttcaggtcctttaaggacttccctgcattggttattccagttagccattcatctaattt

SEQ ID NO: 60417 - DNA, 120 bp, synthetic construct
  source 1..120: mol_type = other DNA
atggcaccaaaaaagagcctgccttgccaagacaatcctaagcaaaaagaacaaagctagaggcatcatgctacctcaaacttcaaactatactacaaggctacagtaaccaaaacagca

SEQ ID NO: 60418 - DNA, 120 bp, synthetic construct; identical to SEQ ID NO: 22018
  source 1..120: mol_type = other DNA

SEQ ID NO: 60419 - DNA, 120 bp, synthetic construct; identical to SEQ ID NO: 26021
  source 1..120: mol_type = other DNA

SEQ ID NO: 60420 - DNA, 120 bp, synthetic construct; identical to SEQ ID NO: 26022
  source 1..120: mol_type = other DNA

SEQ ID NO: 60421 - DNA, 120 bp, synthetic construct; identical to SEQ ID NO: 26023
  source 1..120: mol_type = other DNA

SEQ ID NO: 60422 - DNA, 120 bp, synthetic construct; identical to SEQ ID NO: 26024
  source 1..120: mol_type = other DNA

SEQ ID NO: 60423 - DNA, 120 bp, synthetic construct
  source 1..120: mol_type = other DNA
acaaaaattggtgctatagtttcagcatgcctcttttgctaggtattacatgtgggggtgctatggtccactccaaacctcatgttgaaatttgatcctaatgttggaggtgaggcttaa

SEQ ID NO: 60424 - DNA, 120 bp, synthetic construct
  source 1..120: mol_type = other DNA
cccaaaaccgaaaacaaacaaaaaaaccctctctccagttctagcttgttagctttttccaaacctttgggagcttgccttaccaatcaatgagtcagaaaccttgacagtttctgcagt

SEQ ID NO: 60425 - DNA, 120 bp, synthetic construct; identical to SEQ ID NO: 12253
  source 1..120: mol_type = other DNA

SEQ ID NO: 60426 - DNA, 120 bp, synthetic construct
  source 1..120: mol_type = other DNA
catacgtgtgcatgtgtctttatagcagcatgatttatagtcctttgggtatatacccagtaatgggatggctgggtcaaatggtatttctagttctagatccctgaggaatcgctacac

SEQ ID NO: 60427 - DNA, 120 bp, synthetic construct; identical to SEQ ID NO: 12254
  source 1..120: mol_type = other DNA

SEQ ID NO: 60428 - DNA, 120 bp, synthetic construct; identical to SEQ ID NO: 12255
  source 1..120: mol_type = other DNA

SEQ ID NO: 60429 - DNA, 120 bp, synthetic construct
  source 1..120: mol_type = other DNA
gaggcattctggtttttggaattttccgccttttgcactgttttttccttatcttcatggatttgtctacctttggtctttgattttggtggcctttggatggggtttttttttaatata

SEQ ID NO: 60430 - DNA, 120 bp, synthetic construct
  source 1..120: mol_type = other DNA
cgcccactttttgatggggttgtttgtttttttcttgtaaatttgtttgagttcattgtagattctggatattagccctttgtcagatcagtagattgcaaaaattttctcctattctgt

SEQ ID NO: 60431 - DNA, 120 bp, synthetic construct
  source 1..120: mol_type = other DNA
tcacgtcccttgtaagttggattcctaggtattttattctctttgaagcaattgtgaatgggagttcactaatgatttggctctctgtttgtctgttattggtgtataagaatgtttgtg

SEQ ID NO: 60432 - DNA, 120 bp, synthetic construct; identical to SEQ ID NO: 12256
  source 1..120: mol_type = other DNA

SEQ ID NO: 60433 - DNA, 120 bp, synthetic construct; identical to SEQ ID NO: 12257
  source 1..120: mol_type = other DNA

SEQ ID NO: 60434 - DNA, 120 bp, synthetic construct
  source 1..120: mol_type = other DNA
aaaagacacagactggcaagttggataaagagtcaagacccatcagtgtgctgtattcagtaaacccatctcacatgcagagacacacataggctcaaaataaaaggatgaaggaagatc

SEQ ID NO: 60435 - DNA, 120 bp, synthetic construct
  source 1..120: mol_type = other DNA
acacattcaaaagctagcagaaggcaagaaataactaaaatcagagcagaactgaaggaaatagagacacaataaacccttcaaaaaattaatgaatccaggagctggttttttgaaagg

SEQ ID NO: 60436 - DNA, 120 bp, synthetic construct
  source 1..120: mol_type = other DNA
atctagaaaaccccattgtctcagtacaaaatctccttaagctgataagcaacttcagcatagtctcaggatacaaaatcaatgtacaaaaatcacaagcattcttatacaccaataaca

SEQ ID NO: 60437 - DNA, 120 bp, synthetic construct
  source 1..120: mol_type = other DNA
gaaactgccatcagagtgaacaggcaaccttcaaaataggagaaaattttcacaacctactcatctgacaaagggctaatatccagaatctacaatgaactcaaagaaatttacaagaaa

SEQ ID NO: 60438 - DNA, 120 bp, synthetic construct; identical to SEQ ID NO: 12258
  source 1..120: mol_type = other DNA

SEQ ID NO: 60439 - DNA, 120 bp, synthetic construct
  source 1..120: mol_type = other DNA
caaggctacacaaatgcatcagactttattagggactgcagcaactacaatacagtagaaaaacctctgtctaaatttgagggttcccgtgcttcatgctccatattccaagggagaatt

SEQ ID NO: 60440 - DNA, 120 bp, synthetic construct
  source 1..120: mol_type = other DNA
tagtgatggtggtggtgtgatggtggtggtggtggtgtgatggtggtggtgatggtggtggtttgatggtggtggtgtgatggtggtgattgtggtgtggtggttgtgatggtgatggta

SEQ ID NO: 60441 - DNA, 120 bp, synthetic construct; identical to SEQ ID NO: 12261
  source 1..120: mol_type = other DNA

SEQ ID NO: 60442 - DNA, 120 bp, synthetic construct; identical to SEQ ID NO: 12262
  source 1..120: mol_type = other DNA

SEQ ID NO: 60443 - DNA, 120 bp, synthetic construct; identical to SEQ ID NO: 5011
  source 1..120: mol_type = other DNA

SEQ ID NO: 60444 - DNA, 120 bp, synthetic construct
  source 1..120: mol_type = other DNA
ctaatttttgtattttcagtagagatggggttttgccgtgttggccaggttggtctcgagctcttgacctcaggtgatccacccctcggcttcccaaagtgctgggattgcaggcgtgag

SEQ ID NO: 60445 - DNA, 120 bp, synthetic construct
  source 1..120: mol_type = other DNA
tgagtttctataacaaagtaccatagactgggtggcttaaaataatagaaatgtattacttcatggttctggaggccagaagtccaaaatcaaggtgtcagcagggctgcacttcctctg

SEQ ID NO: 60446 - DNA, 120 bp, synthetic construct; identical to SEQ ID NO: 23919
  source 1..120: mol_type = other DNA

SEQ ID NO: 60447 - DNA, 120 bp, synthetic construct; identical to SEQ ID NO: 23920
  source 1..120: mol_type = other DNA

SEQ ID NO: 60448 - DNA, 120 bp, synthetic construct
  source 1..120: mol_type = other DNA
cgtgtgcatgtgtctttatagcagcatgatttataatcctttgggtatatacccagtaatgggatggctgggtcaaatggtatttctagttctagatccctgagcaatcgccatactgtc

SEQ ID NO: 60449 - DNA, 120 bp, synthetic construct
  source 1..120: mol_type = other DNA
atccagtttcagctttctacatatggctagccagttttcccagcaccgtttattaaatagggaatcgttttcccatttcttgtttttgtcaggtttgtcaaagatcagatggttgtagat

SEQ ID NO: 60450 - DNA, 120 bp, synthetic construct
  source 1..120: mol_type = other DNA
ccatccatctatccatctactcatccattcatctacccatccatctatccatccacccacccatccatccattcagccaaatactcattcatccgtctacccatgtatccatctatccac

SEQ ID NO: 60451 - DNA, 120 bp, synthetic construct; identical to SEQ ID NO: 21313
  source 1..120: mol_type = other DNA

SEQ ID NO: 60452 - DNA, 120 bp, synthetic construct; identical to SEQ ID NO: 21314
  source 1..120: mol_type = other DNA

SEQ ID NO: 60453 - DNA, 120 bp, synthetic construct; identical to SEQ ID NO: 21315
  source 1..120: mol_type = other DNA

SEQ ID NO: 60454 - DNA, 120 bp, synthetic construct
  source 1..120: mol_type = other DNA
tgcaagtttaaacatttcacaaggccagctgagttcatttcaaccctacttacaaaataattattggcaaatgaaatgggctgagggggtagagacaagatattttcaagcttctgagag

SEQ ID NO: 60455 - DNA, 120 bp, synthetic construct
  source 1..120: mol_type = other DNA
tttttgagagcactttcctgtgtcctacctagtttctccgcccaccaccttcatgccatcttatttcctcttattttcactaccacgaaatgctttcctgcccttagggatttaaaaaat

SEQ ID NO: 60456 - DNA, 120 bp, synthetic construct
  source 1..120: mol_type = other DNA
tgtaatttggtttctaagttgtgtacatattacagtgcatttataaatctagtttgaaaatttactagcaccaaataggtaccataaatggacaacctagtacttgtatttggagaagca

SEQ ID NO: 60457 - DNA, 120 bp, synthetic construct
  source 1..120: mol_type = other DNA
ggaatctgttagaaatgcaaattctcggcatcaccccagaactactgaatcagaaaccctgggatgtctcccaacaatcaattttaacaagacctagtaggtgattcagatgcatgctaa

SEQ ID NO: 60458 - DNA, 120 bp, synthetic construct
  source 1..120: mol_type = other DNA
atagatgtttttcattagaatgggaagacaaggtaggtggtacaagagttctggtgaagcctgttccttgcagttgtgagatacagcccttgcttgtccactggaggatcagctagttct

SEQ ID NO: 60459 - DNA, 120 bp, synthetic construct
  source 1..120: mol_type = other DNA
gccacttggaatgtgtatttatcaagctcctctttccaaatgtgttgaaacatttgaatggtccttaaaagaatctttatttgggggcagagtccattctagtgattcggagaggccaaa

SEQ ID NO: 60460 - DNA, 120 bp, synthetic construct
  source 1..120: mol_type = other DNA
ggacacccgagtccagattaattcagcaggaaaaaagatccaaactttgaaaacttaacactaaacttttaaatcactgggtaaaataaaaataggccttcccggccgggtacagtggct

SEQ ID NO: 60461 - DNA, 120 bp, synthetic construct
  source 1..120: mol_type = other DNA
ttttgagttcagtatacttaattatattacgaatgaaagaatctccaaccatgaccaggaagagcactgcttacccttggcctatgcggaagtaaccaggtggacagccacacaggtaac

SEQ ID NO: 60462 - DNA, 120 bp, synthetic construct
  source 1..120: mol_type = other DNA
ttcacaagcagtaattggggaaaacccacaagtgagacagaagctgcagggctggctacccacagggacctgccaagtctgatgctaagaagcaggaaaaagaaatcttactttaaaaaa

SEQ ID NO: 60463 - DNA, 120 bp, synthetic construct
  source 1..120: mol_type = other DNA
ctttccctccttcccttcagctacaggtctttgatcttaactgcctgtctgaaaatcttttgtatccaaagaccttcaagtcttcacccaaggtcacttaggctccagggctcttaaaat

SEQ ID NO: 60464 - DNA, 120 bp, synthetic construct
  source 1..120: mol_type = other DNA
cagcatgtttgtgcactcgccctttttatcaatatacaaacaccacgatttggttaacatgttttgcacttttcctgacctttttcatcctctgcactctggagcaaatgactccacaag

SEQ ID NO: 60465 - DNA, 120 bp, synthetic construct
  source 1..120: mol_type = other DNA
tcagaaactggtgattaaaatcaaagacctccctgagctgctaatgaacaaagacatttttattaaaaccagatagctagccagagactcacgcagtcgaaactcctatagcacaggggt

SEQ ID NO: 60466 - DNA, 120 bp, synthetic construct
  source 1..120: mol_type = other DNA
agcagtgcagcgggagggtggaggatattgcgcttcaagaaattctgggggcatttcatttcagatgctctcaaagcaccctcaattataattttttttcttagtttgctgttttgcaaa

SEQ ID NO: 60467 - DNA, 120 bp, synthetic construct
  source 1..120: mol_type = other DNA
aaaaagtcttgatatacttaggaaaggcatgtgtgttagacacaatcaagcatgaaacaaaacacgactctctaagatacaggacctgtgcacactattttagctgagtgcccccctggg

SEQ ID NO: 60468 - DNA, 120 bp, synthetic construct
  source 1..120: mol_type = other DNA
aagagaaatgttgaagctggaaatgaatttgctggcttagttctcttctgtttgctgtttttaatctactcaaatgaagtcatcaaaaacaaaatctgatttctttagtcgtgattcttc

SEQ ID NO: 60469 - DNA, 120 bp, synthetic construct
  source 1..120: mol_type = other DNA
atcatgacacatttgctgaagctcacctgcaacaggtgaggaagatgactcagtgatttctcctaacaccatttcatgagtacaacacatgaagaacagcagcacttgctgctcttgcct

SEQ ID NO: 60470 - DNA, 120 bp, synthetic construct
  source 1..120: mol_type = other DNA
cctttaccttccttacttctgtatgtttctataaatttccttcaaagtttcatggcatgacatgatatctcttgctctaccacttggtctatcttttcttctccaaatctctgatttccc

SEQ ID NO: 60471 - DNA, 120 bp, synthetic construct
  source 1..120: mol_type = other DNA
tggtaactcccttctgtgtttttgcagataaaattgcagggtttgggagcctggttgcactcgttcagatctatgatcaaagaaatacagcgtgactgtgcatctaaaaatgatgtgtac

SEQ ID NO: 60472 - DNA, 120 bp, synthetic construct
  source 1..120: mol_type = other DNA
atttttgttgtctttgtggttaatcctgaaaaagttcaaattacataatattggggaaatgagatgaacttctgtcctctggtgaggggggaaactaaccagggctctgaggtggatgac

SEQ ID NO: 60473 - DNA, 120 bp, synthetic construct
  source 1..120: mol_type = other DNA
taatcaagtggaccaaggccactttggcagcatgacctcaaatgtctaaaactccataatgaagaatttttgttggcctcagctgtgcaattcaacctaggcacatattgcaaactccat

SEQ ID NO: 60474 - DNA, 120 bp, synthetic construct
  source 1..120: mol_type = other DNA
tccctggcttcgtctgacattcattctcatctgtttgattttattgaaggaccaaaaacaagaagagtcatctgaccattttatagaggatggagctccttccttcgttccttccttcct

SEQ ID NO: 60475 - DNA, 120 bp, synthetic construct
  source 1..120: mol_type = other DNA
atttagaaagatcaaaaataatttgctgaggtgcttcccttcctttgagaatagttcagggtccctcagatggagctctcactaggaaagagagaaagttggaaggtgaatccagaacag

SEQ ID NO: 60476 - DNA, 120 bp, synthetic construct
  source 1..120: mol_type = other DNA
taagtcaatagggaagcattccaatgtgatggggagaattgacccccaaatcaacaaaagagtatggaaagtaaaggaggagaatagagaaaaggcatgctgttcaaatcctggcagcaa

SEQ ID NO: 60477 - DNA, 120 bp, synthetic construct
  source 1..120: mol_type = other DNA
cagcctcccaaagtgctgggattacaggcatgagccatcgtgcctggctgtccctttatgttttatactcctttgttgaagcatgatttctaattcttgttgactaattgaactaaaagg

SEQ ID NO: 60478 - DNA, 120 bp, synthetic construct
  source 1..120: mol_type = other DNA
ctctatgattactgcagtttgtgaaatagagcctagttcagtgcttaggaaattgcaggtgttcaggaggtatttttaatggagatggtttagctaaagtagattccacgtgttacccca

SEQ ID NO: 60479 - DNA, 120 bp, synthetic construct
  source 1..120: mol_type = other DNA
atcccggttctcccagcacagtcccagtttatgtttgttgtcctggtataattattaatgattatttaggtggatgggaaattacaggccacccaacatttgaggggctcttctgaaatt

SEQ ID NO: 60480 - DNA, 120 bp, synthetic construct
  source 1..120: mol_type = other DNA
cagatgcttatatattacaggcaaccgcttttgctgtgattgcctccaaatggctacaggatgatggtgggtatcttagtgtgcagtgctcctagaaatagaaaagaagagaaaaagaga

SEQ ID NO: 60481 - DNA, 120 bp, synthetic construct
  source 1..120: mol_type = other DNA
cagcctgatctgtaatgtttaattctcattctgttcttgcaaaaagggagtgtgcatgtcttattatctcaggtttatagccgtgaaattcgacttgctcagtggcagtggcaatgacag

SEQ ID NO: 60482 - DNA, 120 bp, synthetic construct
  source 1..120: mol_type = other DNA
agtaaaggcaagaggctatggtggggagctcctaggcgaagaggctcatttcatatgcacatattagcactaactgaagattctgaggagaaaacattgaaatatttgcttttgttctac

SEQ ID NO: 60483 - DNA, 120 bp, synthetic construct
  source 1..120: mol_type = other DNA
aagaaaacttattactcacctacacattcattccctgctagaatataaccaaagggacactcgcagcgataggaaccatctgtattgatgcactgtccatgtttacagacatcgggttct

SEQ ID NO: 60484 - DNA, 120 bp, synthetic construct
  source 1..120: mol_type = other DNA
tatgacacccttcagttgctttcctactgagtccgtattgcaccatagcaaataaagaacaacccactatgttatatatgttctcctctcaggaccacagcaatactccttacgtgattc

SEQ ID NO: 60485 - DNA, 120 bp, synthetic construct
  source 1..120: mol_type = other DNA
ggcttttccatttctcatacaacacattgactccaaaaagtgagctcaaccagaggtatggactgtgttttccctcgaacttgacttcttaaagccttccaaaactcctctcattacaca

SEQ ID NO: 60486 - DNA, 120 bp, synthetic construct
  source 1..120: mol_type = other DNA
ccgaaaaaaaaaaatcttggcattagacagagactcaaatgcacgaagtcttgagtcagtctaagtggcaaattctcttcgttgaactttgcaagtgggagtggctcatttacacctgtg

SEQ ID NO: 60487 - DNA, 120 bp, synthetic construct
  source 1..120: mol_type = other DNA
gcaccaccctgaaatccacacagaccactgacaactaccaacaagctgaaatcaaccggagaactctcaaccctctccttcttacttcccaaataactagttgaaaagtaaaaagttaat

SEQ ID NO: 60488 - DNA, 120 bp, synthetic construct
  source 1..120: mol_type = other DNA
ggctcaaggtgtttccccactgatgggcctatcagcatttgtgttcttagtgggagagaggtttatgtgtcagtacaattgtataagcaaccataacttgatggatgagtttttaacctt

SEQ ID NO: 60489 - DNA, 120 bp, synthetic construct
  source 1..120: mol_type = other DNA
tctttagtatattatacatcttagctcctgtacagtggtagttaagagtagccaataagaagtttgaatggcttgagtaaccatatgtcctagtttgcctgggggagccccagctcatgc

SEQ ID NO: 60490 - DNA, 120 bp, synthetic construct
  source 1..120: mol_type = other DNA
ttctcattgtggattagatgcagacctgtttaaagtcaggggtgtgaactaggtgacttcttgaaaatcctttcaaccctacttatttatgaaattctagcaattaatgtccttcactta

SEQ ID NO: 60491 - DNA, 120 bp, synthetic construct
  source 1..120: mol_type = other DNA
aggacccatccaagttttgacaggtacctggtgcacattttctgggttctagaagacattcattgatatctgcaaagaaaagggaaaaataaggaagaggttcccactggcatgacttcc

SEQ ID NO: 60492 - DNA, 120 bp, synthetic construct
  source 1..120: mol_type = other DNA
cttcattgcactggcactggaaagaccccactgtattaatgcattggccatttctgcaaagattcccatttccacttgcacattcatcaacatctgcagaaaaatccccaacaatccttt

SEQ ID NO: 60493 - DNA, 120 bp, synthetic construct
  source 1..120: mol_type = other DNA
tgtggtttcaggcatctgctgggggtctcagaatgtatccctcacggataaggggagacttctgtaatatatttcatgttgagcacattgtatttgacaagtcccataaccaattgttat

SEQ ID NO: 60494 - DNA, 120 bp, synthetic construct
  source 1..120: mol_type = other DNA
ttcttttcatacatgcttgcattcttattcgccttttgattggtccgtacttttctctgatgattttgtaaagctactctgacatcttatatgtctttgcatctcatcacagcagctagc

SEQ ID NO: 60495 - DNA, 120 bp, synthetic construct
  source 1..120: mol_type = other DNA
gagctctttttcctctagaaaaatgattaacttttctttgcctttgtaggatttataaatttgcctttgagaatctggtacacactataaacccttccaaaaaaatggtcatctcacact

SEQ ID NO: 60496 - DNA, 120 bp, synthetic construct
  source 1..120: mol_type = other DNA
atggacaacctacatggctgcttgttcaagttgcatctctttgttttgtcttatgcctgtaactttttgttccatcttcaccaagtattcacgtctacacagggctccttttagcatgtg

SEQ ID NO: 60497 - DNA, 120 bp, synthetic construct
  source 1..120: mol_type = other DNA
ggacgaggtctgtctcatatctgagttccacaaggaaatggagagccttaaggatcttattagaaagggatccccaattaggaatttcctttcatctactgccctatttcatgatggttt

SEQ ID NO: 60498 - DNA, 120 bp, synthetic construct
  source 1..120: mol_type = other DNA
tttggctgcaaatgatgctcactcacaacacttatggctggctgcattttatgtatgatagtctcctacaagaaaacagtaaatgacttaagctccagcaggctatggctgaatgtctta

SEQ ID NO: 60499 - DNA, 120 bp, synthetic construct
  source 1..120: mol_type = other DNA
gggaataaatagctaataaaggctgttgatgtttgctgccttcagtgagtgaccctttccctgtaagatgactgggaagaaaagcgatggctttgtttgttctgtttctgcagattaatc

SEQ ID NO: 60500 - DNA, 120 bp, synthetic construct
  source 1..120: mol_type = other DNA
tacttagcactaaaaagaaatgagctatcaagccatgaaaagacatggaagaaaattaaatatggccaggtgcggttgctcacacctgtaatcctagcactttgggaagctaaggcgggc

SEQ ID NO: 60501 - DNA, 120 bp, synthetic construct
  source 1..120: mol_type = other DNA
gctagggccagcacttgacatgggtatagattaatatcctaggaagccttgtatttactcaaagatctggattttatgattcaataaggttgctattgtctgaaaggctgcaagagcaga

SEQ ID NO: 60502 - DNA, 120 bp, synthetic construct
  source 1..120: mol_type = other DNA
ctgaggcatgtatgcactcaaccttcattttcctattctaagagctaagagtatgctaggaagcagctgaccctggattaaacattcaccctgaagacggatattctgtgaaatggaaat

SEQ ID NO: 60503 - DNA, 120 bp, synthetic construct
  source 1..120: mol_type = other DNA
ggaattctctcatgcatttggaatatctgcattaaccttgttttcacttgggagtagcaaagtctctgtctggaagagaaatgattttgagagtcaactaggatgactgtccactcatac

SEQ ID NO: 60504 - DNA, 120 bp, synthetic construct
  source 1..120: mol_type = other DNA
tgcctatatttagggaaaaaggcagaggtgagctggtaaagaaccacagaggagcacatggtcatatggaactctgatctttcaaattccagtttaactcccccttcctacttcatgtgg

SEQ ID NO: 60505 - DNA, 120 bp, synthetic construct
  source 1..120: mol_type = other DNA
ttattatagtcaggagcctttgcaaggtacatactttgcttgcatacttgtgagaagatgatcacggactgaagtggagcctacaagagctgctgcaattttagaagaaccacactctat

SEQ ID NO: 60506 - DNA, 120 bp, synthetic construct
  source 1..120: mol_type = other DNA
ttgtgatcacagattctagggaggttaaaagatctgttttgggaaggggaaaaacaaagcagctagggccaggtgttccatgccaatgtcatttagcagtttttctttccaaaccatgaa

SEQ ID NO: 60507 - DNA, 120 bp, synthetic construct
  source 1..120: mol_type = other DNA
aatgggaactgaaaaaataatgctaacacaaaggcaaaaaaccagaaagttctgacaatgccgtcatgactcaccaacgggtaaaccggtataaatgtcgatgacaaagcctggcctttg

SEQ ID NO: 60508 - DNA, 120 bp, synthetic construct
  source 1..120: mol_type = other DNA
gtctccttaatctatgagtgttcacttccaacactgtaacgccagctgacattggtcacctaaagaaattacagggactcttaaaatatgtgcagatttcacagctaatgaaaagccatg

SEQ ID NO: 60509 - DNA, 120 bp, synthetic construct
  source 1..120: mol_type = other DNA
actgtggaaaatggtgtaggattccctttatagaataccctaatcaattccttgcatgataatttcaactaacccaaatcataatcttggcaaatgatgtcatcatcatatacataatgc

SEQ ID NO: 60510 - DNA, 120 bp, synthetic construct
  source 1..120: mol_type = other DNA
tgtgactcagtgttcggctggaatgaccagcaccaactgtgaatttaaatcatgagccgtttttttccctgtaaagataaacaatgcacactttgcttccttcgctaagactgatttccc

SEQ ID NO: 60511 - DNA, 120 bp, synthetic construct
  source 1..120: mol_type = other DNA
acagatacaggtgtagttgccaacggtgttgtaacatgtccctggaccacagattccaggagtctcacattcattcacatctataatccaaagagaaagtggtatgtgaatatgaaaact

SEQ ID NO: 60512 - DNA, 120 bp, synthetic construct
  source 1..120: mol_type = other DNA
gggaatatttcttatgcagagcacaaggaggtctctttcctaaacaattgtgtgattcctccatgtagatgaaaaccatggctcatggctgaagtgctctgaaacctgtaagtggttaat

SEQ ID NO: 60513 - DNA, 120 bp, synthetic construct
  source 1..120: mol_type = other DNA
tgttcattttcaggaatctttagttgttactctgcccgtctgaagtaagttaacacctttgtgtacacttcccattttccagtggtttttattatgtgtccccagtgcaaggccactgtc

SEQ ID NO: 60514 - DNA, 120 bp, synthetic construct
  source 1..120: mol_type = other DNA
catgagtgatttcatttaatcctatgaggtattttatgaatgctaaggaacttgcccaaggttacatgggtgacaactagtggagtcctaatgtgcaccaggtgtgctctttgtaccaac

SEQ ID NO: 60515 - DNA, 120 bp, synthetic construct
  source 1..120: mol_type = other DNA
attgctgcaggctgtatctccattgtctcctcgaggtcgaatatccaaatagcaatttccagagcgggtatctatttaccatatacaaacacaaaagcatcaggcagaatctttctactg

SEQ ID NO: 60516 - DNA, 120 bp, synthetic construct
  source 1..120: mol_type = other DNA
agcttgcagtgagccaagatggtaccactgtactccagcctgggcgacagagcgagactccgtctcaaaaaaaaaaaaatatatatatatataaaatataatatatattacatatatata

SEQ ID NO: 60517 - DNA, 120 bp, synthetic construct
  source 1..120: mol_type = other DNA
cttagtgccaaagagaaccgagtgtcagtctgctgggtgcctgtagtttttctaagctttttctaatgttccctgagagtccttggctcaacaagaaaatgatttatacactagagatag

SEQ ID NO: 60518 - DNA, 120 bp, synthetic construct
  source 1..120: mol_type = other DNA
aggtgagaggttacttttcctcagtctctattacatgccaagcagcgggctgagcattttatagatacatatctcatttgtagtgttccacgtaggtccacatcactttcgtaaagtaag

SEQ ID NO: 60519 - DNA, 120 bp, synthetic construct
  source 1..120: mol_type = other DNA
actgaaatcttcttttcaatgaaggagaatgtgcttaaatttgacaaatgtgggtaaagggaagaatcttgtgttccctaatgggatccagccttagctaacaggttcccaggactcttc

SEQ ID NO: 60520 - DNA, 120 bp, synthetic construct
  source 1..120: mol_type = other DNA
acatgtggctgattcagaatcctgaatgataatttaccctgaatgatataaaatgaataagccgaaggaatcatgcaaactaaggcctgttcaagaagggtcatccgcatggagggcaca

SEQ ID NO: 60521 - DNA, 120 bp, synthetic construct
  source 1..120: mol_type = other DNA
tgatgatggcctgttggagagaaatacatactgttcttctaatctagaacatctaatcccttctccttacatagttccctacagcaagcttatccttgtgttggtacagaaaggaagtca

SEQ ID NO: 60522 - DNA, 120 bp, synthetic construct
  source 1..120: mol_type = other DNA
catttgaagcttcctgctgtattggtacatacagcatgtttgccacagttgtgtgctccaatttcacattcattgatgtctggaaaaatgagcagtgatttagaaaaaggctcagcacaa

SEQ ID NO: 60523 - DNA, 120 bp, synthetic construct
  source 1..120: mol_type = other DNA
gaagcccaattaaatgatttgaaagtgtttgcaaacatgctatctgccaagtgttccatctgaagctctgaaatggtcctgggatctttggcttcttcataacttctagagcaaacacaa

SEQ ID NO: 60524 - DNA, 120 bp, synthetic construct
  source 1..120: mol_type = other DNA
ggcttttttttttttttttttttttttttgtatttttagtagggatggggtatcaccatgttggtgaggctggtcctgaactcctaacctcaggtgatccacccgccttggcctcccaaa

SEQ ID NO: 60525 - DNA, 120 bp, synthetic construct
  source 1..120: mol_type = other DNA
tagcataagccaagaaaagcaaagaaattcaaacttaaagtgacaccgcaaccttcttaaccccaccaaacctttgtcacaaagactcaaaggtcctcttgcatggctctcttgaagggc

SEQ ID NO: 60526 - DNA, 120 bp, synthetic construct
  source 1..120: mol_type = other DNA
tacattgggtcatagaaaaattgtaatccagcccacttaagccaaggatagaagagctgtgttctgcgtttcaagcaaatgtgttctctctccattaaatggaacattcccccttggcaa

SEQ ID NO: 60527 - DNA, 120 bp, synthetic construct
  source 1..120: mol_type = other DNA
gacttcaaatctatgttcatgtgattgactcaaaggctgctgttcttaacgtaaagctggtgtcacttcatgcaactgtagtgcacagctctgttaccatggtcttagtatctgtgcaaa

SEQ ID NO: 60528 - DNA, 120 bp, synthetic construct
  source 1..120: mol_type = other DNA
ctagacaggcttcatgtaaggagtagcatagtgaaaatgaaaacattccagcttcatgcttcttctcataatttggctagcatctgttatttttgaaccaacaataatattattgccctt

SEQ ID NO: 60529 - DNA, 120 bp, synthetic construct
  source 1..120: mol_type = other DNA
gtgctatttacagtgttaatttattcaatacacctttttccccccacaggtcaagaaaaaaacctgcaacttggatccaatataaacgatgacaaatttcaaagaagtggaagctaaatt

SEQ ID NO: 60530 - DNA, 120 bp, synthetic construct
  source 1..120: mol_type = other DNA
gacattaggcaacaaaagacagtgatccctgagagaaagaaaaactaggtgaatcctacaattgcccgagattactgaataggagagttttaacttcatggcataaggaggaggtaccag

SEQ ID NO: 60531 - DNA, 120 bp, synthetic construct
  source 1..120: mol_type = other DNA
gaggaatgattgaacttatgcagagacacagaatatatgaaaaaatacccaagtcgaacttttagaggtgaaaactacaacatctgagatgaaaaatacactgtatgtgaggaaaggcag

SEQ ID NO: 60532 - DNA, 120 bp, synthetic construct
  source 1..120: mol_type = other DNA
aagaattacttgaaataaccatacctacttagatgctcttagtaataatatttactttcaacaatttttttttttttttgagacagagtctcactctgtcaccaggctggagtgcaatgg

SEQ ID NO: 60533 - DNA, 120 bp, synthetic construct
  source 1..120: mol_type = other DNA
caggcattagtgcaaatcccggctgacagctacattcatagctgccttcagagtttgtgcagaaggtttcacaaccaccattcattatgctgcattcatcaatgtctaaaagaaatgaaa

SEQ ID NO: 60534 - DNA, 120 bp, synthetic construct
  source 1..120: mol_type = other DNA
accatgcatgatgtgccatttgcaatgcaggagaagtattgggtgctaggagaacacatctcagttatgataataggcacgtggatgaaattctcttggccacagattcacttataaact

SEQ ID NO: 60535 - DNA, 120 bp, synthetic construct
  source 1..120: mol_type = other DNA
tggggcacaggtgtgcactcagctcacattcattgatgtctgtcgggaaaataagaagaacaaacacccaaacataagcttccaactttggcaatgatgtcattcaaacaactgaccaca

SEQ ID NO: 60536 - DNA, 120 bp, synthetic construct
  source 1..120: mol_type = other DNA
cagcaggaagaacctggaacataggctatgagccatcaaagcttcatggaatccttctctttctgtgttgatcaaatgatcccaaacttacccatgcagttcttcatcatcatgaatcca

SEQ ID NO: 60537 - DNA, 120 bp, synthetic construct
  source 1..120: mol_type = other DNA
ttttcttaatgtatataccttaagatgtctttctttctttttttgagacaggatctgctctgtcatcaaggctggagtacagtggtgtgcttggctcactgcaacctctgcctcccagat

SEQ ID NO: 60538 - DNA, 120 bp, synthetic construct
  source 1..120: mol_type = other DNA
aattggccatggaaaacgtaacattgtacctttgaagaaaggctttccatttgtaatttcttttgtggcaaatccgggtcctctcggacacagctcctcgtactcaggagtatttctcat

SEQ ID NO: 60539 - DNA, 120 bp, synthetic construct
  source 1..120: mol_type = other DNA
caaatatttctttcacctaaacacgtgcttaagggcacattcttcaaggtacttgtgggatacctctagccccaaacccaaattcatgggattataaagaagagcagaaagcctagcaga

SEQ ID NO: 60540 - DNA, 120 bp, synthetic construct
  source 1..120: mol_type = other DNA
cacccggcccacttttttaactacctacaatagtcttcactgagcctacacttcaaagtaatgtggtttcagatgcaaagtacaggtaagcatcatttccagagtcatgaactcagaaac

SEQ ID NO: 60541 - DNA, 120 bp, synthetic construct
  source 1..120: mol_type = other DNA
catccaaagtcattccactgggacactgacacttgaatgaccccctagtgttaacacacaggccatttttacacactcctgggaacacttcacattcatctatatctaaaaagaaaaaaa

SEQ ID NO: 60542 - DNA, 120 bp, synthetic construct
  source 1..120: mol_type = other DNA
gggtggaatctacctttttgggttttttgttttgttttggccacttgtacaacaaaatatgctgctgaggtcagataagttattaacagcgggtctggaccagagaaaggccaaaggatt

SEQ ID NO: 60543 - DNA, 120 bp, synthetic construct
  source 1..120: mol_type = other DNA
gtctcctcaaataaagctcaattccactaagatactccaaaagacacagacgtgccctatagatcatgttaaagtgatagctaagagggaaactgaaggtagctttctctcttgctgttc

SEQ ID NO: 60544 - DNA, 120 bp, synthetic construct
  source 1..120: mol_type = other DNA
tgcagatggtttttgttggatccaaagtactttcagaagaacattcacaaataaaagagcctgggctgttcttgcagactccattaatgcaaggacttgattcgcattcatcaatgtctg

SEQ ID NO: 60545 - DNA, 120 bp, synthetic construct
  source 1..120: mol_type = other DNA
aacagaggcttgacctggttttaaactaagtatctaaactaaatatctacaaagcctaaagtcactaggctatttaattcacttatttctttagcaggaagaaaatacagatttgctgga

SEQ ID NO: 60546 - DNA, 120 bp, synthetic construct
  source 1..120: mol_type = other DNA
accttaggagctacaggaggaaaaaaatcgatttcactggaaagagaacactctgtctctttttctcactgtaagatattctgagtccaatctttctcccacaagttcctgagaggaact

SEQ ID NO: 60547 - DNA, 120 bp, synthetic construct
  source 1..120: mol_type = other DNA
ctccacattttcattcacgcacaatgatgaaactaatcatactgaatgaactgacaatcaattcagccagtccatgttctttcagatctccctgaatcaaactatgtagctttatattaa

SEQ ID NO: 60548 - DNA, 120 bp, synthetic construct
  source 1..120: mol_type = other DNA
tttctcccaccatcttggggataattttgtttctcagtgctagctgttttttcagtacaattggttcttaacatttcctcatttctctctgcaaattctctagcctcctctcacaagagc

SEQ ID NO: 60549 - DNA, 120 bp, synthetic construct
  source 1..120: mol_type = other DNA
aggcaggatctggtactagaccattttttgtagtgagttcaaataagcatgggttttaataccgatgacaacgctaattgctgggagttttggaagcagcccttttcctctgttagtttc

SEQ ID NO: 60550 - DNA, 120 bp, synthetic construct
  source 1..120: mol_type = other DNA
ttattatgggagtgagttagttatcatgagagtgactttgttataaaagcacattcagtcctctctagctttctctcactcctgcatgctctgttgcccttccactttcagctgtgaagt

SEQ ID NO: 60551 - DNA, 120 bp, synthetic construct
  source 1..120: mol_type = other DNA
ctttttgtttgtttgtttgttcgtttgtatttttagtagagatgagatttcaccatgtcagccaagctggtcttgaactcctaacctcaagtgatacacctgccttggcctcccatagtg

SEQ ID NO: 60552 - DNA, 120 bp, synthetic construct
  source 1..120: mol_type = other DNA
actccagcctgggcaacagggcgagactccatctcaaaaaaaaaaaaaaaaaagaagaagaagaagaagaaagaaaaagaaaaccacaccaaaatcaatacgtgggatgtaaacaaaatt

SEQ ID NO: 60553 - DNA, 120 bp, synthetic construct
  source 1..120: mol_type = other DNA
ttcgttatataaatatgtagatgttggtcaactaagctgtgttatctttaccaccaggaagacagtctcctgctatgccctatccttttccaattcaaatggcttactgagtacctttct

SEQ ID NO: 60554 - DNA, 120 bp, synthetic construct
  source 1..120: mol_type = other DNA
aaaagacaaagggttttgtgaaatgtataaccagggtagctcttccagggctctcagaaatctagggtaatagtaaactacaggaagactttccttttggtattcatcacccagactggc

SEQ ID NO: 60555 - DNA, 120 bp, synthetic construct
  source 1..120: mol_type = other DNA
gtgtatgggactattaactttctcctgaccttaaaaaggcaaattgagagtaaaacaccttcgtgttttacttagcttgtgttgtttggcacaaaatatattcgggtggtccaaggttct

SEQ ID NO: 60556 - DNA, 120 bp, synthetic construct
  source 1..120: mol_type = other DNA
cagcaggagcctagaggcatgaagagtgaatcttagtgtgctctgtgtatcatcaagaagattatgtattctcctaggtctgctcacaaaggggctttcatatctctttctattattttt

SEQ ID NO: 60557 - DNA, 120 bp, synthetic construct
  source 1..120: mol_type = other DNA
ataacagtctacactattctgtccaggtaaagatgtaagaggtggcaaataacagccaccaagaagcctaaccaccattattccctaactggaaagaagaggtagaactcagcttcttga

SEQ ID NO: 60558 - DNA, 120 bp, synthetic construct
  source 1..120: mol_type = other DNA
cttgtagtttgaagcaattttaaataggggcaggtaaaaagtggacttttagaatacatggctcaactatggattatagctgtggcagtgaacctttaagatcccttaaacattggggat

SEQ ID NO: 60559 - DNA, 120 bp, synthetic construct
  source 1..120: mol_type = other DNA
agcgtccattattgcagatccggccattctgtaaacactcatcaatgtctaaaatcaaagtttaaaaagaagaaatagctttatttaggggagttaaaattattttatttccccctccct

SEQ ID NO: 60560 - DNA, 120 bp, synthetic construct
  source 1..120: mol_type = other DNA
attcccagaagacagggaccaagaaactatgtggagttggatgcgagcattcctatctatgcagagttgaggtcacatttgtctgagtataagtgccctaaatatcccctgaacaatgag

SEQ ID NO: 60561 - DNA, 120 bp, synthetic construct
  source 1..120: mol_type = other DNA
tcaaagtccttgctccagtttttttctgcttaaaatggtcatttatatgtagtgcactaaaatacactggtggcaagaaatctctacgtgagaacaaaattcataaattttgaagccagt

SEQ ID NO: 60562 - DNA, 120 bp, synthetic construct
  source 1..120: mol_type = other DNA
acctgagattctgcctttccaagcagctctaggagatgctgttgctgaccacactaaaaagcagcaagggcttagagtgacatccctatcttttagaactttccattaagaaattaattg

SEQ ID NO: 60563 - DNA, 120 bp, synthetic construct
  source 1..120: mol_type = other DNA
ttagaacaaaacatgaagcaactgttgtttaaagggcagttctcaatcaccacagagtctcccccatccccagatgtgttcaatacacaggctcacactagttttacagtcacttagaat

SEQ ID NO: 60564 - DNA, 120 bp, synthetic construct
  source 1..120: mol_type = other DNA
tagatggaattaaggtagctaatcagtgatcttgagatggagagtctcctggattatacaggtggccaaatgcagtcacaaatatccttaaatgtggaagagggaattgcaagagagagc

SEQ ID NO: 60565 - DNA, 120 bp, synthetic construct
  source 1..120: mol_type = other DNA
ctttctgtgaatcagatttaactatcgcccataactctcccatagttgcctgaaaacaccaataacaaaaggacattaatctctggagaataggaagcctcccgtttttctctatgcaat

SEQ ID NO: 60566 - DNA, 120 bp, synthetic construct
  source 1..120: mol_type = other DNA
aagggggagatgatgatgtccggatgggggagtcagtgattgaatcggacagaagtggacaaatctgaagcacattttagagataaatgtgtagtgttcagtgaagtagatttttgagat

SEQ ID NO: 60567 - DNA, 120 bp, synthetic construct
  source 1..120: mol_type = other DNA
cacacatttgttctgggcttccaaaaaggtgtttttaagcagtatccaggtttccaaggatgtatttattttatttattttcatgttgcctacaaatagccatgttttttcatagttccc

SEQ ID NO: 60568 - DNA, 120 bp, synthetic construct
  source 1..120: mol_type = other DNA
cctatctccacttaacccaagatgatgctgatttattttttaaagagtgaaaagctggccaatctaaaatccttcctgcatcactctctgtaagagcccagatctctgtagcaccagtac

SEQ ID NO: 60569 - DNA, 120 bp, synthetic construct
  source 1..120: mol_type = other DNA
agaaaagaggatatataacaggcaaggatggcaggagtagggagaaagagcctgaactggcaagaagttttagaaaaaaaagccaacttgaattcagaaatgctcggattgggtgcaatg

SEQ ID NO: 60570 - DNA, 120 bp, synthetic construct
  source 1..120: mol_type = other DNA
ttttttcctgtgcattttctagggaaatttccctggacgtcatctcttatatttcctggagactactcatttacccaagtttccattacatctgcatcatgcacattgccactgggcttg

SEQ ID NO: 60571 - DNA, 120 bp, synthetic construct
  source 1..120: mol_type = other DNA
tttattgggttacatcatgtctaattgtcatgacatccgacacactgcagcgcagctctgggttacggaaagagtttgtggcataggaaaacctaacttctccatatgcctttgagatat

SEQ ID NO: 60572 - DNA, 120 bp, synthetic construct
  source 1..120: mol_type = other DNA
tcccttgtgccaaaaaggttggggaccactgatttaaaggaatataagggttaaatccttttgtaaagcaaagatctttcatagccaaaaatccatccctgggtttcctgtaagtctgaa

SEQ ID NO: 60573 - DNA, 120 bp, synthetic construct
  source 1..120: mol_type = other DNA
atgggctatctttcagagcaaaactagggcctacagttgccaatgacaaaagcttaatgggctaatgtctattattttgcaaatcaactatgataccatgttattgcccatctggctgac

SEQ ID NO: 60574 - DNA, 120 bp, synthetic construct
  source 1..120: mol_type = other DNA
aaccctacaggcaatattacaaatgccacaggaagatcacagaacaagaaataaaataatactaaaagagcttagaacacaaagggagctcggggctgggaggtctgagagtctcagaat

SEQ ID NO: 60575 - DNA, 120 bp, synthetic construct
  source 1..120: mol_type = other DNA
cacgtcctggcttccagtgattctcctgcttcagcctcctgagtagctgggattacaggcacccgccacgacgcctggcaaatttttgtatttttagtagagacagggtttcaccatgtt

SEQ ID NO: 60576 - DNA, 120 bp, synthetic construct
  source 1..120: mol_type = other DNA
ttacacaaaccatgcatgctgtttgtcattaaacctacctatgcatctggtaccatctggagaggtgtaaaaaccagggggacatttgcaaaagtaactgctgactgtgtttgtacattc

SEQ ID NO: 60577 - DNA, 120 bp, synthetic construct
  source 1..120: mol_type = other DNA
ctcagggcttgacaccactggttcccatcaaggaagcagtaaaattcccttaggacaaatatggccatttccttcaaggagaggttttcaatagcctgacccacacactgacaaatgtca

SEQ ID NO: 60578 - DNA, 120 bp, synthetic construct
  source 1..120: mol_type = other DNA
tctgagtcctacaacacctgccaaagatcgcatgaggagacaatgtggtattaaatattttttctcaacccattaatataaatgacagctaccattcttattaaggccacttagcgtaca

SEQ ID NO: 60579 - DNA, 120 bp, synthetic construct; identical to SEQ ID NO: 15285
  source 1..120: mol_type = other DNA

SEQ ID NO: 60580 - DNA, 120 bp, synthetic construct; identical to SEQ ID NO: 15286
  source 1..120: mol_type = other DNA

SEQ ID NO: 60581 - DNA, 120 bp, synthetic construct; identical to SEQ ID NO: 15287
  source 1..120: mol_type = other DNA

SEQ ID NO: 60582 - DNA, 120 bp, synthetic construct
  source 1..120: mol_type = other DNA
tcttgctgctgactttcacatgtagctggaaaatttttgtgtgtggaaaaggattaagtaatagactgagtttttggtccactggatacaccaccataataggtttcttagcatcaataa

SEQ ID NO: 60583 - DNA, 120 bp, synthetic construct
  source 1..120: mol_type = other DNA
aaagctgtcttttgctcatctgatatacagtggcaactgacaaggttaattatccagcccagacaaataacttagaatgtactcactgttagagtctaggggcataaatataacagcatc

SEQ ID NO: 60584 - DNA, 120 bp, synthetic construct
  source 1..120: mol_type = other DNA
aagcataagatttcttaccttcacatttttgtgacacttcattaagtttgtgtccagcagggcatttgcactcaaaagacccaacagtattaatgcaatttcctccctgacagagcccgg

SEQ ID NO: 60585 - DNA, 120 bp, synthetic construct
  source 1..120: mol_type = other DNA
ccttgacagtccaacagcaacacctggctgctggctctaatcatccttccttccctgtttatttttttccacaggactaaccacccactgacctaatacatgcctgtttgttttatttaa

SEQ ID NO: 60586 - DNA, 120 bp, synthetic construct
  source 1..120: mol_type = other DNA
acccaaggactggaaacaccagcaaggagcaagagccacaacctggtggcagaatctcttagaaaaaacaacaacaacaacaacaacaacaaccaaacatgaagaatttcactctcaaaa

SEQ ID NO: 60587 - DNA, 120 bp, synthetic construct
  source 1..120: mol_type = other DNA
aagaacaggagtaaaagccaaaaacagagtaagggcttctacgggaggcaggagaagcagctagcaggcgacatctggggatatttaaaactgtgaaacaaatcctaatttattttggac

SEQ ID NO: 60588 - DNA, 120 bp, synthetic construct
  source 1..120: mol_type = other DNA
acagaatcatgcatcactgtccctgtgtaaggccttggatagaccattctacttctgaacccgatttcctaacctacaaaatagggatgaaaacatcagttgttacccactttgaaaacg

SEQ ID NO: 60589 - DNA, 120 bp, synthetic construct
  source 1..120: mol_type = other DNA
ggacaacttttcattacagtaccagcaagagtcaacattctggatcgtaacaatgttttggcaatagctgaatcttatctgctggcatccctctatcctgtgtgttctctcttgctttct

SEQ ID NO: 60590 - DNA, 120 bp, synthetic construct
  source 1..120: mol_type = other DNA
agctgttgaataaatctcagccctcatttcgttctttcgatgaagaaaaagtcactcagcactgcagtaatttggaacaaaatctctttaaaatgcaggaactatgtggacaaagtgaaa

SEQ ID NO: 60591 - DNA, 120 bp, synthetic construct
  source 1..120: mol_type = other DNA
tttccacctcctcttgccaagatactctatggaattatcttatatatgaggattgccaaggttcaggatagatacaaatatggtgttttgtgagtgacaccagcaaaatccagacactct

SEQ ID NO: 60592 - DNA, 120 bp, synthetic construct
  source 1..120: mol_type = other DNA
ataagaccttcatgaactagggcaacaggccaagtctttccaaaattaaagtgcgactctaattgtttttaactggcttactccagtgtggctggttcatgggaaattctgcatctccat

SEQ ID NO: 60593 - DNA, 120 bp, synthetic construct
  source 1..120: mol_type = other DNA
tgaagagtactcgtgtgccatgattaattggagatctctgcaagataacaactacttatctgaaagtctaactttaggaacataagccagcccataaactggcatcactgccactcgaca

SEQ ID NO: 60594 - DNA, 120 bp, synthetic construct
  source 1..120: mol_type = other DNA
gactacatactacatgacactgcagaattgttgtttttctaggtgtgataacggtattgtggttacatacaagaatgtccttagtgcttagaggtgacgtctcatgatgtatgcaactta

SEQ ID NO: 60595 - DNA, 120 bp, synthetic construct
  source 1..120: mol_type = other DNA
catgcagactaagcaattcaccaaaatccaggccatagttctgtgggacccaattatgtgtggcagcaattcaactgcagcaaattgttaccacattttattctgttccatgatgaagaa

SEQ ID NO: 60596 - DNA, 120 bp, synthetic construct
  source 1..120: mol_type = other DNA
aattgatataaaatatcaatcgattgcagtgcactaatatgaggtacccagagcagtcaaattcatagacagcagtgcaatgatggttgccagggatttaggggagggaggaatggagag

SEQ ID NO: 60597 - DNA, 120 bp, synthetic construct
  source 1..120: mol_type = other DNA
ccttggtaaaagttatcagaaaagacttctttgaggaggtgacatttaaactgaggcctaaaggatgagcacaagccagctgtgcaacatctaagcgctttctaagtatgggagacagca

SEQ ID NO: 60598 - DNA, 120 bp, synthetic construct
  source 1..120: mol_type = other DNA
ggaaatggagacacaccacattcacattccatgatagcatcaattctgagagatctggtggaaaacttaaagcagggacaaaagttcagccattattaaccacagctgagaaatgccttc

SEQ ID NO: 60599 - DNA, 120 bp, synthetic construct
  source 1..120: mol_type = other DNA
tgctctttggaattaatagttatttcccagacaccccaggtacacatgatgtgaagagttaaatcttaatactatcccatgggcagataggccactctagttctagctaagtgttgccca

SEQ ID NO: 60600 - DNA, 120 bp, synthetic construct
  source 1..120: mol_type = other DNA
atacataaatcacatctgcaagttcgatgaatctgaacacaattaagtgagcaatcacatattctcttccagaaatctggaattgggattgacgagcactggtgttcacctctgcagctg

SEQ ID NO: 60601 - DNA, 120 bp, synthetic construct
  source 1..120: mol_type = other DNA
gggattacagagtatccctcacacccccacctaatcacccgcaaactttgtcaaatttaccacctcaacagcttctttattgcccctcctctgaaattcaattgctactgctttagtgta

SEQ ID NO: 60602 - DNA, 120 bp, synthetic construct
  source 1..120: mol_type = other DNA
catcccgctattcttagaaacaaatgacgtcaatgacccacaatctgcaagacacaccttttaatccattctgaagagctaagagatttgttctaagttatctctactcccttgcctggc

SEQ ID NO: 60603 - DNA, 120 bp, synthetic construct
  source 1..120: mol_type = other DNA
atgactttttttttcttttttttttttttgagacagaatctcattgtgtcgccctagctagagttcagtggtgggatcacagctcactatatcctcaacctcctgggctcaagcaatcct

SEQ ID NO: 60604 - DNA, 120 bp, synthetic construct
  source 1..120: mol_type = other DNA
gatatgccctatatactaccgtcaattgaaagtaaagaccaccatcccctcccctcagttcccaaatgttacatatttgattgcttaccataacaatcataaaaatataaacagagtgga

SEQ ID NO: 60605 - DNA, 120 bp, synthetic construct
  source 1..120: mol_type = other DNA
gctttccccactactttgccttcctcaaaatgacggtacaatgtacacaagggtaaatcaaaacacagagcggcaaagttattttctcaatgtcacagaacaaattagtggcagatggaa

SEQ ID NO: 60606 - DNA, 120 bp, synthetic construct
  source 1..120: mol_type = other DNA
tgtaaatctcacatactgttccttcacatcttgttcccttccttgtccctttcctgtgttttcttcttgatccaaggctaaactgtcccagccctgaaaatctgtgctcggttaaaaact

SEQ ID NO: 60607 - DNA, 120 bp, synthetic construct
  source 1..120: mol_type = other DNA
taattttttaccctcatagatcacatccatgcacaattcaactacttaatggggtaaggctgtaggtgagtgcaacaaacctcacgaacctcaaaggttagtgactgtctataccactgg

SEQ ID NO: 60608 - DNA, 120 bp, synthetic construct
  source 1..120: mol_type = other DNA
aggaaggtctttttggtacctgaacccaagattgagaggggagttgagtgcacactacaaaacaatatagagatggcccctgttttgtgtaaaaaggcagtgcagtagatgaaaagaaaa

SEQ ID NO: 60609 - DNA, 120 bp, synthetic construct
  source 1..120: mol_type = other DNA
tcagccaggccaagttaccatccaactccatttcccctctccctatttgaggtctccttgttccatataaactgttaaatctttgatcctacaacacatttcatgtatttctctgcacac

SEQ ID NO: 60610 - DNA, 120 bp, synthetic construct
  source 1..120: mol_type = other DNA
gtagagaaatcccacttacctgatttcccacaaagaaagctgtttcagctctttggattcacactgggaacaagaagtgccgattatctgaaagttcagactaggaagcaggtgaataaa

SEQ ID NO: 60611 - DNA, 120 bp, synthetic construct
  source 1..120: mol_type = other DNA
ttgtctatttctacttagtacatgtggaaggcaaaacgaagtaacagatgctacacaggagaagccaggctcacataataaagagttttgaggcaagaaggcagaattcatgggcctcct

SEQ ID NO: 60612 - DNA, 120 bp, synthetic construct
  source 1..120: mol_type = other DNA
ctgggtcataatttcctcatctgaacaatagggatcatgccatactacccaacccccagagttgttgtgaaaactaagtaatgtattcagaaatcgtcagccaactgaaatacagggagt

SEQ ID NO: 60613 - DNA, 120 bp, synthetic construct
  source 1..120: mol_type = other DNA
acttattgaaacgcaaatccctggactgaaccctcaataattttgattctgctgggggccaggaatcatttttgctgagtaaccctgccaatcatgacgtaagttgtcagtagatcacat

SEQ ID NO: 60614 - DNA, 120 bp, synthetic construct
  source 1..120: mol_type = other DNA
ctttagaggaggattatatgcccagtacctagtactacagtccttagcacagactatgtcttcaatagatacatgagagacagtgaatgaatgaacagatgaacaatcaaatgaaccaag

SEQ ID NO: 60615 - DNA, 120 bp, synthetic construct
  source 1..120: mol_type = other DNA
ctatgtaaaaacagtgctcaaaatctagaagggccaacgagcaggtatcacgcatgctctgcacttcaccctttctctttccaagcatctggatccttttatatactatattgttccagt

SEQ ID NO: 60616 - DNA, 120 bp, synthetic construct
  source 1..120: mol_type = other DNA
ctttcccccaggctatctaaacagaccggcctaactccagaggtaatgagttcatcaccatgaatgtgcaaagcacagtaatcatgattactttcctatgtaccaagtattagaccaagt

SEQ ID NO: 60617 - DNA, 120 bp, synthetic construct
  source 1..120: mol_type = other DNA
cttacacaccctgtaaaccagaatttttttcttaccctaagaatatgttattcatgtactctgtacattaggtcaaatattagtcactttctttggaggctgaccaaatgcctccaccct

SEQ ID NO: 60618 - DNA, 120 bp, synthetic construct
  source 1..120: mol_type = other DNA
ccaaaatatgtcccaaagcaatttatgacagggttatttaaaaatcacatttacgttgctgtctgcattgtttttcatagccttggcactcaaagtgtgacctgtggcccagcagcagcc

SEQ ID NO: 60619 - DNA, 120 bp, synthetic construct
  source 1..120: mol_type = other DNA
aaactacctcaacctgttgaagggtacctacgaaaaacctacagctaacatgatacataatggcgaaataacaaatgctttctttctaatatcaggagcaagataaggatatcagttctt

SEQ ID NO: 60620 - DNA, 120 bp, synthetic construct
  source 1..120: mol_type = other DNA
gtcaaggaaattcaatgagaaaagatggtcttttcaacaaatagtactagtaacattggatatggatatgtacatgcaaaacagttgaccctcacctcacaccatatacaaaaattaatt

SEQ ID NO: 60621 - DNA, 120 bp, synthetic construct
  source 1..120: mol_type = other DNA
tatttgaaaggtccagaaaaggcatatctatagagacagaaagtgtattagtggttgcccagggctctgggagagagcaaggattttttgccaacaggtgtaagaaatcttttgggggat

SEQ ID NO: 60622 - DNA, 120 bp, synthetic construct
  source 1..120: mol_type = other DNA
aacaaaagagcaatgttattgctcttatttattctgcagtcatggagctaaaaaagaaagcctttcagtcagctaaggagagagagctggtgtgaatgtgctgaccagcccaggcaaact

SEQ ID NO: 60623 - DNA, 120 bp, synthetic construct
  source 1..120: mol_type = other DNA
aaaatccctatgatggcaagaatgaggtgaaaccaaaacttagacatgcaggtgcacacgtgaccacattcataataggtagtaagggctttaaagtgcctgtagccatcctccaacaat

SEQ ID NO: 60624 - DNA, 120 bp, synthetic construct
  source 1..120: mol_type = other DNA
aatctacacagttacaaatggccacgaaatcatacacatagtaaattgacaagattaaaaactctagcacaaattcatgatggcagtcacctctggagagaggaatggcaaaggaactag

SEQ ID NO: 60625 - DNA, 120 bp, synthetic construct
  source 1..120: mol_type = other DNA
gcatagctctcaattaatgatttgtggccagcaaggagatcttggattctcatcagtcccttgaagtctgtcatgttccctttaaccagattcttggcaaacaattaaaggaaccatcag

SEQ ID NO: 60626 - DNA, 120 bp, synthetic construct
  source 1..120: mol_type = other DNA
tgcttccaggttgtaaatggcctggtggctctggcaaaggagtctggactttttcctaaaggcagtaggaagtggttaatgatccaatgcatgttttaaaaatataactcttacttgccc

SEQ ID NO: 60627 - DNA, 120 bp, synthetic construct
  source 1..120: mol_type = other DNA
caatgtccatcattccactctctctgtccaagtgtacccactgtttagctcacacttataagtgaaaacatgtaatatttggctctgtccaacctctgcggaaaacagtatggacatttc

SEQ ID NO: 60628 - DNA, 120 bp, synthetic construct
  source 1..120: mol_type = other DNA
ctctcagcctgattaaatgtttttttccccctctactctgatctccctttgtgcacatgtctaatatagcattatcactctgtactggactccttcatttacccatgggttgatcccaac

SEQ ID NO: 60629 - DNA, 120 bp, synthetic construct
  source 1..120: mol_type = other DNA
tcaggtctagccagtacctcctgtgagcacttgctgtacagaaataactaggtcacaatagtgttctcaagattctgaatccctaattacaattcccccatgataaaggcatgagggtac

SEQ ID NO: 60630 - DNA, 120 bp, synthetic construct; identical to SEQ ID NO: 15288
  source 1..120: mol_type = other DNA

SEQ ID NO: 60631 - DNA, 120 bp, synthetic construct; identical to SEQ ID NO: 15289
  source 1..120: mol_type = other DNA

SEQ ID NO: 60632 - DNA, 120 bp, synthetic construct
  source 1..120: mol_type = other DNA
attttcttttccttccttgtccagtttttccaattgcttctaagccaacagatcctcatacctacccacaccatggcgctatcaaagaagaatatacagtcatcatgcatgcactaggac

SEQ ID NO: 60633 - DNA, 120 bp, synthetic construct
  source 1..120: mol_type = other DNA
ggtgagctcagaacatcatcacagcaatgcaccaacaaatcatgcactacaccatcaacccatgtcctattgcaaaaagtgatcagctgtatatatgccagatccattctttaattcaac

SEQ ID NO: 60634 - DNA, 120 bp, synthetic construct
  source 1..120: mol_type = other DNA
acagaggttccccttcaatctcactctttgctataaaatatgaagggttgccccaaggactgactaaggtggtatatgttcataagtgctgcataaatggaagggatgacataaatgtgg

SEQ ID NO: 60635 - DNA, 120 bp, synthetic construct
  source 1..120: mol_type = other DNA
gcttccatctctccacaggaatgtgactccagaaggcgggatgcgtgtgtttcattcattattatacatctccagtcattagcatagtgcctgagaaatactcatgcatgatagataaac

SEQ ID NO: 60636 - DNA, 120 bp, synthetic construct
  source 1..120: mol_type = other DNA
tagataaatactataattaccctcattgtatagattaggaaactgtgcctgagagacatgcagtaacttgctcaaggccaccaatccagcaagtagcaagatttatcctcagagcgtgag

SEQ ID NO: 60637 - DNA, 120 bp, synthetic construct
  source 1..120: mol_type = other DNA
gcctacaatggtaaaggtcaacaatgcctcctaggagagggcaggcaacaagataagggctctctaaggacagagatagaaatggatctatcttataaactcaaccattagaacattctt

SEQ ID NO: 60638 - DNA, 120 bp, synthetic construct
  source 1..120: mol_type = other DNA
gaataaaaatgctaaaatgtctgatgtaatccttaaagtgaatggcaaaaaccaaaaatttaatagattcactgagcaactgaaatgtgggtggggtccgggaggccagaggtggccatg

SEQ ID NO: 60639 - DNA, 120 bp, synthetic construct
  source 1..120: mol_type = other DNA
ccaaaaatgatattatatccatggcaacttaatttcatggaacccctcatgggactgatgttctacaaaaagtactttggcacatcgtcgggaccatgaagccccatgtatttgtccaac

SEQ ID NO: 60640 - DNA, 120 bp, synthetic construct
  source 1..120: mol_type = other DNA
ggaaatctagtagatactttgggtaaagtttggatatgtattactggaagttctagagttgtgctgtccaagatgatagccacatgtggatattagctggtccaaactgagatgtggtat

SEQ ID NO: 60641 - DNA, 120 bp, synthetic construct
  source 1..120: mol_type = other DNA
acgtgtcaatagtttgcactccagcaatttatcgtggcagaaaaaatgcatgaatgttttctgccaacaagctaggggccgccaaaaagaaagctgatgtggactgagcctagctccttt

SEQ ID NO: 60642 - DNA, 120 bp, synthetic construct
  source 1..120: mol_type = other DNA
gtttactgccttttgcttttggaaagaagaaaatatacatagttcacagagctctgccttccaaaggcacatggagaatgggagttagcctgtggcattaccttgggaactttagtgata

SEQ ID NO: 60643 - DNA, 120 bp, synthetic construct
  source 1..120: mol_type = other DNA
gagtccacgtgcatgctaatattctgaggatacatgatgagcagcttcagatggagaaatgagagaaaacttcttgctatttgcatttatgcttccaaaaggcttcatcctctggctcac

SEQ ID NO: 60644 - DNA, 120 bp, synthetic construct
  source 1..120: mol_type = other DNA
aagctgtcccttcttggacaaggcacttgatctctctttgcctctgcttattcctccataagatgggacttattacaggacttttctcataaggttgttgcaaatcatcaaagtgaagtg

SEQ ID NO: 60645 - DNA, 120 bp, synthetic construct
  source 1..120: mol_type = other DNA
cctctgggtgtagagaaacaatggtagtggcaatggtaaaatatatcattgctacctgcccactggggatgaggctggccagccaagaatgtttttaaacaaacttatcttaatgacaaa

SEQ ID NO: 60646 - DNA, 120 bp, synthetic construct
  source 1..120: mol_type = other DNA
caccatcggaagtcaccctgaatacttccccacacttcaggatggatctgtcctgactcggtatcagatttttattcatcactcttgaaatcacgaacatacatctaagtaagagaatct

SEQ ID NO: 60647 - DNA, 120 bp, synthetic construct
  source 1..120: mol_type = other DNA
tctgtgcaagttgtaaagagaagcagtttaaggagggactcctaaaggatatcaacatgcaatgtaaaggtctattatgcattacacatcaataccatgcagtggtcccattaatagaga

SEQ ID NO: 60648 - DNA, 120 bp, synthetic construct
  source 1..120: mol_type = other DNA
taactgagtaccaccaaattagcaaataactgaatttaggtaaacttggactgacaaacattgccgaatatcatgcatagattcagggccgctgtcttgtcatcctagggaccttcccaa

SEQ ID NO: 60649 - DNA, 120 bp, synthetic construct
  source 1..120: mol_type = other DNA
agttccacccactcttcaaagcccagctgaaatcttactgctccatgaggctcccccaaaacctccattcaaattccttgctccttatatattttctatacatttttccatacattaccc

SEQ ID NO: 60650 - DNA, 120 bp, synthetic construct
  source 1..120: mol_type = other DNA
ctgtaaaccttcgtaagtgaagggtaataaggttggtatttcacaagagtaaacacatgggctatggagtcagactgcttgggttccaaccccaactctgccgattaccatctatatacc

SEQ ID NO: 60651 - DNA, 120 bp, synthetic construct
  source 1..120: mol_type = other DNA
gccatgtggaactgtaagtccaataaacctctttcttttataaattggccagtcttgggtatgtctttatcagcagcatgaaaacagactaacacagatggtcactagggcattctctac

SEQ ID NO: 60652 - DNA, 120 bp, synthetic construct
  source 1..120: mol_type = other DNA
tacttacgttgtccacagtgagtccctatgtatcctttctggcatagacagtgatcgtcactgcagctacctccattcatacagcgaatattgcagtgttgtacttgaaaaaaaagaaga

SEQ ID NO: 60653 - DNA, 120 bp, synthetic construct
  source 1..120: mol_type = other DNA
aacagcgcaggcaagtgctctcatttctccagtgttcaggctatctctaggtcagtaatttaggaatgctaatagcactttcaaaatcctaggctatttcctagtccaaagcttgattga

SEQ ID NO: 60654 - DNA, 120 bp, synthetic construct
  source 1..120: mol_type = other DNA
ctaactcctaaaccccaacacaacacacacacagttctcccccaaacctgaaatcctatctatctccaaaacccatttcaaatattgcttccttccgctaatcttttctgatatctccca

SEQ ID NO: 60655 - DNA, 120 bp, synthetic construct
  source 1..120: mol_type = other DNA
tcaagcagcataggaactcagccttcaaactgatttcaattaaagcagttcatgccaagagctaatttccattcccacatgagcaacaaagccatttaactactttgagataaaaaagct

SEQ ID NO: 60656 - DNA, 120 bp, synthetic construct
  source 1..120: mol_type = other DNA
ccttgaagacgagcagacagccgtaaagggtttcatgtaaggctcaataacccagagctaacagaaaatgttgccatctccccatatccataaaagatcccaaattaattttgtgttcat

SEQ ID NO: 60657 - DNA, 120 bp, synthetic construct
  source 1..120: mol_type = other DNA
actcttgctcccagctgattaaagccccttcctaaaaccggtgtccgagaggttttgtctgcgactggtcctgctgacactctcattgaattgaagtaaattaaatgagaaaatgtgatc

SEQ ID NO: 60658 - DNA, 120 bp, synthetic construct
  source 1..120: mol_type = other DNA
gagacggaggttgcagtgagctgagatcgcaccactgtactccaacctgggtgacagagtaagaccccgtctaaaaaaattattttaatgaaaaataagaatctggacaaaagatataaa

SEQ ID NO: 60659 - DNA, 120 bp, synthetic construct
  source 1..120: mol_type = other DNA
tcattgtgatggtattaagaggtggaacctttaagacgtgataaggtcatgagggctttgccctcataaatggatttatgccattatctcaggagtgggttggtcatctcgggagttcag

SEQ ID NO: 60660 - DNA, 120 bp, synthetic construct
  source 1..120: mol_type = other DNA
gacatagcaaagaacagtcctaaagagggctggaattaaagtctagaaaaactactgttttgacgctgtctagccaatcattctttttgccctggtgctgaatgacgagtgtcgagagtt

SEQ ID NO: 60661 - DNA, 120 bp, synthetic construct
  source 1..120: mol_type = other DNA
ttatcagttcacattatcattgaagaccttcccaacttaatacccagttttgccatctggctatatttcttcccccagaggagtgcaatgttgttagttggttcagggaccaatctgaga

SEQ ID NO: 60662 - DNA, 120 bp, synthetic construct
  source 1..120: mol_type = other DNA
tgctacacaggacaatttgccctaacctgttaattggcttgtgagagacacactcaaatgttcagactcttaacaggtaatgagccttgacacagtgaagtctctacttgcagtaaacaa

SEQ ID NO: 60663 - DNA, 120 bp, synthetic construct
  source 1..120: mol_type = other DNA
aataaaccagaggtctgttagcacatggatttggaacacgatttgttataggggaccaatcctcaaatgaggaaacctgggttctcaggtccctcacaaactttgctatcatgacttata

SEQ ID NO: 60664 - DNA, 120 bp, synthetic construct
  source 1..120: mol_type = other DNA
ttcctcaagctcctgcacaatcttgcaagtgcaaacatgatatgcaaggctaaaagagtacacttgatagaaagtgcattcaaacatccaaagagtttaggatggaaactggaaacgact

SEQ ID NO: 60665 - DNA, 120 bp, synthetic construct
  source 1..120: mol_type = other DNA
gttacaaaaggccacattctaaggctccccatgcaaccaacacaacaaaagaaggacatgcagaatgacaagttttctatttacttacggacaatacactgatttccgccaggtaaggtt

SEQ ID NO: 60666 - DNA, 120 bp, synthetic construct
  source 1..120: mol_type = other DNA
cactccagcctgggcgacagagtgagactctgtctccaaaaacaaaaagtttggaaacacacttgataacagcagttacaagaaaataaaatcagtgtcactctgggtttcttgtttaca

SEQ ID NO: 60667 - DNA, 120 bp, synthetic construct
  source 1..120: mol_type = other DNA
catcctgatggaatcatcttctgacccaggttactcagccagtggaaacacaaggaataaaggaagaaagatgttatggagaattttaagtcaaaggctctcaaccctttgtccctccat

SEQ ID NO: 60668 - DNA, 120 bp, synthetic construct
  source 1..120: mol_type = other DNA
gagagaaagagggtacagatactttagtgagctaagtccccatctttcaaagcaagaaaccagtgggtactgtttaaatctagatacagaggtacaaacatggtagatggtgttacatga

SEQ ID NO: 60669 - DNA, 120 bp, synthetic construct
  source 1..120: mol_type = other DNA
aaaaaaaactatggcttaagaaggtcaaacaacctggccaaggtcacatagcttagacgtgtctaatggagatttgaactcaagaagcctcctgattctagagtacgctctcctaacctt

SEQ ID NO: 60670 - DNA, 120 bp, synthetic construct
  source 1..120: mol_type = other DNA
cttagccaaagcccacttctgcaatttggcctcttacagcaagatagcctttctgtttcctatgcaaagtgcaaactccttttcagaaaaggttaaggtaataaaaacaaggtcaggagg

SEQ ID NO: 60671 - DNA, 120 bp, synthetic construct
  source 1..120: mol_type = other DNA
ggacagcattagattctcatagaagcacaaacctgattgtgaactgcgtgtgggagggatctaggttgcccactccttatgagaatctaatgactgatgatctgtcactgtctcctatca

SEQ ID NO: 60672 - DNA, 120 bp, synthetic construct
  source 1..120: mol_type = other DNA
tcctgtgtagccagtaagttcactgccaggtccacaaccggatacatcaggactattcaccttgcccacaagcacaaagctgttcaacaattttttttttttaccaacccaaaggttttt

SEQ ID NO: 60673 - DNA, 120 bp, synthetic construct
  source 1..120: mol_type = other DNA
cattccattactgctggctgttcagcaatatttaatgagagcctattatgtgctaggcactgtgttagataagaaataaaactgaccaagaagagcacacctaatgcctagatcttggtt

SEQ ID NO: 60674 - DNA, 120 bp, synthetic construct
  source 1..120: mol_type = other DNA
aaactcagaacatttgaataaggaatagactttaatcactaactacatatcaatattggttcattggttgggcacgatggctcacgcctgtaatcccagtactttcggaggctgaggcag

SEQ ID NO: 60675 - DNA, 120 bp, synthetic construct
  source 1..120: mol_type = other DNA
actcatgcacgcactgctatctctgacacacactaaaaccagacacttcctccatttttatatcagctcttccatctttccatttcaatatgtagttccatctcccttagtgttccctga

SEQ ID NO: 60676 - DNA, 120 bp, synthetic construct
  source 1..120: mol_type = other DNA
aaagaagaaaaaaaatcccacaagcaactaagtgaaggttttcagctcacaagttggcatgcattttattatggcagattgctgcaactgatcaaggccatagatggagccagcctcatg

SEQ ID NO: 60677 - DNA, 120 bp, synthetic construct
  source 1..120: mol_type = other DNA
atctaaggatgaggaagcattgcttccaaacagaaaatccagcttatctcaaatgtttgcttctggagcatctgagaggatatggccaatgacacgatgagaacatgttgcctgtgtaaa

SEQ ID NO: 60678 - DNA, 120 bp, synthetic construct
  source 1..120: mol_type = other DNA
ttctcatcctcgatgcacctgatttattttaaaggccagaagatcccgccccattagcaactataacataaaatcagtatcctggactggctcacagatagacttcagtgagctatttct

SEQ ID NO: 60679 - DNA, 120 bp, synthetic construct
  source 1..120: mol_type = other DNA
aaaagcttcagagatcttgtagctcaaaccatatttcatagcagtcaacaggccatggatctttaaaacatttctctatctagccctcccatcaaaacagggacaatattgttgctcagg

SEQ ID NO: 60680 - DNA, 120 bp, synthetic construct
  source 1..120: mol_type = other DNA
agaatgagtattctgtcctgcaccctccggtaaaaacattagtcagctcttaacatgctcaacgtttgagggagtggatgtgtagagagcacaagaaagattcaacatgtggataattca

SEQ ID NO: 60681 - DNA, 120 bp, synthetic construct
  source 1..120: mol_type = other DNA
gcagatatcttctttattaccctcatagtccaaaatcttaccaacttttcataaggttcttgcctgaaatcccttactttaaaataaaaacacattgagtgcttccaccttgacactcac

SEQ ID NO: 60682 - DNA, 120 bp, synthetic construct
  source 1..120: mol_type = other DNA
gacaggaaccaatttcttcaatacataaattacaaggaaaaactgacagggggacaatctacatattcaaaaatatttaagacagatcaaccaattgcaaaatatggacttttttggatc

SEQ ID NO: 60683 - DNA, 120 bp, synthetic construct
  source 1..120: mol_type = other DNA
cttctgacctttcaatgtgtgagaatgtgtgtcaaacaacctattttcaaggaaggtcccaaatgcaaatgagcagatgagtcagtctgcagtcaaattagaccctgctgtcttctgtca

SEQ ID NO: 60684 - DNA, 120 bp, synthetic construct
  source 1..120: mol_type = other DNA
tggagggaatactgacgctatggaaaagggagctttctccctgtgagtgcagatgtgttgtgtttgcccatccagtatcccttccccttctctgctaaccaaactcttcgtttcctaagc

SEQ ID NO: 60685 - DNA, 120 bp, synthetic construct
  source 1..120: mol_type = other DNA
cttgaaatgtaccatcccattaaatcttaggacaacacagaaagatgagtaatttaatcgcatttacaagtgaagaaactgaggcccagagaggtcaaatcactcgtctgaggtttcctc

SEQ ID NO: 60686 - DNA, 120 bp, synthetic construct
  source 1..120: mol_type = other DNA
gtttggataactgagccagcaagttacacaacaagaaaccaagcttaatcacagacccagaactgccttagttgatcccaggtcatttgactctttgactgccaattagaagtgtgagta

SEQ ID NO: 60687 - DNA, 120 bp, synthetic construct
  source 1..120: mol_type = other DNA
tttccactgcattcctctaaatgttttcatacgaatcttttctggcatccaagtgtctttcttttatgtcctgactctcctccataagctctctgtcccctaaaagaggctgattaaggc

SEQ ID NO: 60688 - DNA, 120 bp, synthetic construct
  source 1..120: mol_type = other DNA
tgcaaacttgactatattcctaatccaattttattctattgataatgtggctactccatttataagaaaaatagtacagttcagctcattacaacaccaattctattagcaactgcaacc

SEQ ID NO: 60689 - DNA, 120 bp, synthetic construct
  source 1..120: mol_type = other DNA
atgtgaccagggtcaggaggctgttgttcaagatccagccccaacagacactcactctgagcaaggcctagtcgctgcatctggggctcagtctccccatttgaaaaaaaacacattcaa

SEQ ID NO: 60690 - DNA, 120 bp, synthetic construct
  source 1..120: mol_type = other DNA
gccaaccctgcccaactgcagtcaatgtcctaagacctcagacacttcatatccctttcccttgatgtatttttcactcatctttcctttatttctcagctatacttactccaagctcta

SEQ ID NO: 60691 - DNA, 120 bp, synthetic construct
  source 1..120: mol_type = other DNA
gcagtaaaatattaagattaagagctccagctatgaagctagattttccaactctaccacttactagtttatgtccctggagtaattactgaaactctgcatcccttgtttcttcatttg

SEQ ID NO: 60692 - DNA, 120 bp, synthetic construct
  source 1..120: mol_type = other DNA
ctgaagtacccccagggttatggggtatatgtctctggccttccacagaactaaactcaagctagcattcaatcaagacttcctgaattaatgaactttctgaaaccccacttaatgatg

SEQ ID NO: 60693 - DNA, 120 bp, synthetic construct
  source 1..120: mol_type = other DNA
ttgtgtcccaatattttagcttaatcttttcaataaatgtaaaccatacccctgcaggagtctttccccatatttaattattagcccatctgacttcaggtgaagtcttaaagtcccctt

SEQ ID NO: 60694 - DNA, 120 bp, synthetic construct
  source 1..120: mol_type = other DNA
tcctgtaaaaacagaaattggcaatttactctaagaaaacacagcagaagctgggaagaaacttgaggatgcctaaatttccactgtggaacaacttttgctgcccagtggggagagaat

SEQ ID NO: 60695 - DNA, 120 bp, synthetic construct
  source 1..120: mol_type = other DNA
tggtaatagcaaaagactcaatgtaatctaaagagccatcactagggaactgttccagtgacataatgaggttctatacaacaagaaaatggggtagggcgcagtggctcaagcctgtaa

SEQ ID NO: 60696 - DNA, 120 bp, synthetic construct
  source 1..120: mol_type = other DNA
gtgagtaaaagtgtggcatcctgttaagcaacaaagtaaagcttagtttcttttttcacattcccaagggaacacactagttggtgacagcccagagaaatgagacaaatgtctgaccag

SEQ ID NO: 60697 - DNA, 120 bp, synthetic construct
  source 1..120: mol_type = other DNA
agtctaattaaaatttttccggctgaaacatctgtaacagcggcatgggaagccagtgaaatggtcagttgcatgtacacaacacaaacaccactagttaaaaatactcccttaaggccg

SEQ ID NO: 60698 - DNA, 120 bp, synthetic construct
  source 1..120: mol_type = other DNA
tggctctggtttccttcacgttcccagcctccaaattggcgtccgccccatggctcgtgtaggacgctaaaagcacggtaaatcccagggcgatctccagcagacgccctcgacgcatga

SEQ ID NO: 60699 - DNA, 120 bp, synthetic construct
  source 1..120: mol_type = other DNA
cactggagaagcggcggctccgactcccgaggaggcggcggcggctgctcccagtcgtggccgctacagccactgctcggctccgctcgcagctgtcccagctgtggctcctgtccgctt

SEQ ID NO: 60700 - DNA, 120 bp, synthetic construct; identical to SEQ ID NO: 26999
  source 1..120: mol_type = other DNA

SEQ ID NO: 60701 - DNA, 120 bp, synthetic construct
  source 1..120: mol_type = other DNA
ttgagaagtgtctgttcatgtcctttgcccactttttgatggggttgtttgtttttttcttgtaaatttgtttgagttcattgtagattctggatattagccctttgtcagagtaggttg

SEQ ID NO: 60702 - DNA, 120 bp, synthetic construct
  source 1..120: mol_type = other DNA
gagacaatggggttttctagatatacaatcatgtcgtctgcaaacagggacaatttgacttcctcttttcctaattgaataccctttatttccttctcctgcctgattgccctggccaga

SEQ ID NO: 60703 - DNA, 120 bp, synthetic construct
  source 1..120: mol_type = other DNA
tgatatcccctttatcattttttattgcatctatttgattcttctctcttttattctttattagtcttgctagtggtctatcaattttgttgatcctttcaaaaaaccagctcctggatt

SEQ ID NO: 60704 - DNA, 120 bp, synthetic construct
  source 1..120: mol_type = other DNA
ttgatcccttaccattaagtaatggccttctttgtctcttttgatctttgttggtttaaaggctgttttatcagagactaggattgcaacccctgcctttttttgttttccatttgctcg

SEQ ID NO: 60705 - DNA, 120 bp, synthetic construct
  source 1..120: mol_type = other DNA
tttattcttttttctctaaacttcccttctcacttcatttcattcatttcatcttccatcgctgataccctttcttccagttgatcgcgtcagctcctgaggcttctgcattcttcacgt

SEQ ID NO: 60706 - DNA, 120 bp, synthetic construct
  source 1..120: mol_type = other DNA
tcctggtgcgccgttttttaagcccgtcggaaaaccgcagtattcgggtggaagtgacccgattctccaggtgccgtctgtcaccactttctttgactaggaaagggaactccctgaccc

SEQ ID NO: 60707 - DNA, 120 bp, synthetic construct; identical to SEQ ID NO: 19514
  source 1..120: mol_type = other DNA

SEQ ID NO: 60708 - DNA, 120 bp, synthetic construct; identical to SEQ ID NO: 19515
  source 1..120: mol_type = other DNA

SEQ ID NO: 60709 - DNA, 120 bp, synthetic construct; identical to SEQ ID NO: 19516
  source 1..120: mol_type = other DNA

SEQ ID NO: 60710 - DNA, 120 bp, synthetic construct; identical to SEQ ID NO: 19517
  source 1..120: mol_type = other DNA

SEQ ID NO: 60711 - DNA, 120 bp, synthetic construct
  source 1..120: mol_type = other DNA
aggctagaagtttgagacaagcctgggcaacatggcaaaatctcatctctactaaaaaaaaaaaaatacaaaaattagccgggcatggagctgcatgcctgtaatcccagctatttggga

SEQ ID NO: 60712 - DNA, 120 bp, synthetic construct; identical to SEQ ID NO: 19518
  source 1..120: mol_type = other DNA

SEQ ID NO: 60713 - DNA, 120 bp, synthetic construct; identical to SEQ ID NO: 19519
  source 1..120: mol_type = other DNA

SEQ ID NO: 60714 - DNA, 120 bp, synthetic construct
  source 1..120: mol_type = other DNA
gcaccattgcactccagcctgggcaacaagagcgaaacgctgtctcaaaaaaataaaaaaaagaaagaatgggaggaaatgaaaaagccctaaagaagcccaaataagtcagctagtaat

SEQ ID NO: 60715 - DNA, 120 bp, synthetic construct
  source 1..120: mol_type = other DNA
tctcaccacagaactgacggggctgcccgcatccaccaagccatgcaggccctcgccacagaactgacagggctggggccgggcacagtggctcacgcctgtaatcccagcactttggga

SEQ ID NO: 60716 - DNA, 120 bp, synthetic construct
  source 1..120: mol_type = other DNA
aagagcgaaagaacaaagcctccacagtgtggaaagagacccaaacgggttgccgatgctggtttaggcagcctgcttttattctcttatctggcccacccacatcctgctgattggtag

SEQ ID NO: 60717 - DNA, 120 bp, synthetic construct
  source 1..120: mol_type = other DNA
tctccactcattattcaagtcttctccccagagcactctgtgtttcctgagaaagcccgttattaacttgccagctgcttgcagcttaacccccacagccgaggcacacaagtgacagat

SEQ ID NO: 60718 - DNA, 120 bp, synthetic construct; identical to SEQ ID NO: 13479
  source 1..120: mol_type = other DNA

SEQ ID NO: 60719 - DNA, 120 bp, synthetic construct; identical to SEQ ID NO: 13480
  source 1..120: mol_type = other DNA

SEQ ID NO: 60720 - DNA, 120 bp, synthetic construct; identical to SEQ ID NO: 13481
  source 1..120: mol_type = other DNA

SEQ ID NO: 60721 - DNA, 120 bp, synthetic construct; identical to SEQ ID NO: 13482
  source 1..120: mol_type = other DNA

SEQ ID NO: 60722 - DNA, 120 bp, synthetic construct; identical to SEQ ID NO: 13483
  source 1..120: mol_type = other DNA

SEQ ID NO: 60723 - DNA, 120 bp, synthetic construct
  source 1..120: mol_type = other DNA
cccattccagcaagaaggtggaatccacacctggtcttctctgatacgttgatggtttttcacttctatgtttgcgatctgtctggaattattttcagataagaggtgaaacaggagctt

SEQ ID NO: 60724 - DNA, 120 bp, synthetic construct
  source 1..120: mol_type = other DNA
actgaaataattagaaatttttgtctagctgcaagattttcatttagagataatctgcataaaaaatacacattcgaggccgggcgcggtggctcacgcctgtaatcccagcactttggg

SEQ ID NO: 60725 - DNA, 120 bp, synthetic construct
  source 1..120: mol_type = other DNA
gatgatccatagaaatacaaatactagaccccaaaagagtagtcaagaatagaccaagcacctctacgcaaataaactagaaaatctagaagaaatggataaattcccggacacatacac

SEQ ID NO: 60726 - DNA, 120 bp, synthetic construct
  source 1..120: mol_type = other DNA
agtctcaggatacaaaatcaatgcacaaaaatcacaagcattcttatacaccaacaacagacaaacagagagccaaatcatgagtgaactcccattcacaattgcttcaaagagaataaa

SEQ ID NO: 60727 - DNA, 120 bp, synthetic construct
  source 1..120: mol_type = other DNA
caaaagacaaaattgacaaatgggatctaattaaactaaagagcttctgcacagcaaaagaaactaccatcagagtgaacaggcaacctacaaaatgggagaaaattttcacaactactc

SEQ ID NO: 60728 - DNA, 120 bp, synthetic construct
  source 1..120: mol_type = other DNA
aggataataaaaatatatatatatatatatataaaaaaaaaaaaaagaatagaccaagaaccagccgggcacagtggcttatgcctgtaatcccagcactttgggaggccgaggcgggtg

SEQ ID NO: 60729 - DNA, 120 bp, synthetic construct
  source 1..120: mol_type = other DNA
ggtcccacacccatggagcctccctcattgctcgcacagcagtctgagatcaaactgcaaggcggcagtgagactgggggaggggcgcccgccattgctgaggcttgagtaggtaaacaa

SEQ ID NO: 60730 - DNA, 120 bp, synthetic construct
  source 1..120: mol_type = other DNA
acaaaaaccccatctgtacgtcaccatcatcaaagaccaaaggcagataaaaccacaaagacggggaaaaaacagagcagaaaagctgaaaattctaaaaatcagagcacctctccccct

SEQ ID NO: 60731 - DNA, 120 bp, synthetic construct; identical to SEQ ID NO: 12568
  source 1..120: mol_type = other DNA

SEQ ID NO: 60732 - DNA, 120 bp, synthetic construct
  source 1..120: mol_type = other DNA
tccccctcgcatcctccccacactgcatttgtatttatttatttatttatttattcattcattcattcaatcattttgagacagagccttactctgttgcccaggtcccaggctggagtg

SEQ ID NO: 60733 - DNA, 120 bp, synthetic construct
  source 1..120: mol_type = other DNA
cagaacttgggctggtacagcacgcgccgccaggccttgcacacctgggccagcacacacttctcgcaggccgagaaataccagaagagcccattgaggatcttctcgtccgtggccagc

SEQ ID NO: 60734 - DNA, 120 bp, synthetic construct; identical to SEQ ID NO: 26927
  source 1..120: mol_type = other DNA

SEQ ID NO: 60735 - DNA, 120 bp, synthetic construct; identical to SEQ ID NO: 26928
  source 1..120: mol_type = other DNA

SEQ ID NO: 60736 - DNA, 120 bp, synthetic construct; identical to SEQ ID NO: 26929
  source 1..120: mol_type = other DNA

SEQ ID NO: 60737 - DNA, 120 bp, synthetic construct
  source 1..120: mol_type = other DNA
aagtactttacaaggtaaaagaatatcacaaggcaagtggaggcagggcgagatcacaggaccataggaccgaggcgggatagcattaggagatatacctaatgctaaacgacgagttaa

SEQ ID NO: 60738 - DNA, 120 bp, synthetic construct; identical to SEQ ID NO: 26930
  source 1..120: mol_type = other DNA

SEQ ID NO: 60739 - DNA, 120 bp, synthetic construct
  source 1..120: mol_type = other DNA
aagttaacgaattcttattccttaaatactaggaacggacaagaacaccgttcactccacagcacaattcagcataaattcatgttgtgcttggctctggaaatgccatgggccctggac

SEQ ID NO: 60740 - DNA, 120 bp, synthetic construct
  source 1..120: mol_type = other DNA
cagtgacttgggattcccacccagggactcaagccagccacccccttctttcccccctgcactgatatctctgggggtttctccttcctatgtcctgcccctgctacctgcttcattgtc

SEQ ID NO: 60741 - DNA, 120 bp, synthetic construct
  source 1..120: mol_type = other DNA
cggtcttcctctccctctctttccaccgtctccctctgatgctgagccgaagctggactgtactgctgccatctcggctcactgcaacctccctgcctgattctcctgcctcagcctgcc

SEQ ID NO: 60742 - DNA, 120 bp, synthetic construct
  source 1..120: mol_type = other DNA
catgtgctgtgtccactcagggttaaatggattaagggtggtgcaagatgtttttgttaaacagatgcttgaaggcagcatgctcattaagagtcatcaccactccctaatctcaagtac

SEQ ID NO: 60743 - DNA, 120 bp, synthetic construct
  source 1..120: mol_type = other DNA
cttcccctgacatttctcatgcgccccaccctgggcagtttgctttgacatttcagtgcctcattgctcaagctaccagcacgggcgtagccgacgccgggagagcccacagagtgcgag

SEQ ID NO: 60744 - DNA, 120 bp, synthetic construct
  source 1..120: mol_type = other DNA
ccctaactcattttatgaggccagcatcatcctgataccaaagctgggcagagacacaaccaaaaaagagagttttagaccaatatccttgatgaacattgatgcaaaaaaatcctcaat

SEQ ID NO: 60745 - DNA, 120 bp, synthetic construct
  source 1..120: mol_type = other DNA
gaagaatcaatatcgtgaaaatggccatactgcccaaggtaatttatagattcaatgccatccccatcaagctaccaatgaatttcttcacagaattggaaaaaactactttaaagttca

SEQ ID NO: 60746 - DNA, 120 bp, synthetic construct
  source 1..120: mol_type = other DNA
aaaaaatgctcatcatcactggccatcagagaaacgcaaatcaaaaccacaatgagataccatctcacaccagttagaatggcaatcattaaaaagtcaggaaacaacaggtgctggaga

SEQ ID NO: 60747 - DNA, 120 bp, synthetic construct
  source 1..120: mol_type = other DNA
ctgagcctcccacccactccatgggctcctgtgccgccccagcctccccaacgagcactaccccctgctccacggcacccagtcccatcaaccacccaagggctgaggagtgcaagcaca

SEQ ID NO: 60748 - DNA, 120 bp, synthetic construct
  source 1..120: mol_type = other DNA
cgggaggaatgaacaactccagacgcgctgccttaagagctgtaacactcaccgcgaaggtctgcagcttcactcctgagccagcgagaccacaaacccaccagatgcaagaaactccga

SEQ ID NO: 60749 - DNA, 120 bp, synthetic construct; identical to SEQ ID NO: 25318
  source 1..120: mol_type = other DNA

SEQ ID NO: 60750 - DNA, 120 bp, synthetic construct
  source 1..120: mol_type = other DNA
aaccccatctctactaaaaacacaaaaattagcagggagtggtggtgtgcacctgtagtcccagctactcgggaggctgagacaggagaatcacttgaacccaggaggcagaggttgcag

SEQ ID NO: 60751 - DNA, 120 bp, synthetic construct; identical to SEQ ID NO: 26330
  source 1..120: mol_type = other DNA

SEQ ID NO: 60752 - DNA, 120 bp, synthetic construct
  source 1..120: mol_type = other DNA
tgacttccacaatggttgaactagtttacagtcccaccaacagtgtaaaagtgttcctatttctccgcatcctctccagcacctgttgtttcctgactttttaatgattgccattctaac

SEQ ID NO: 60753 - DNA, 120 bp, synthetic construct
  source 1..120: mol_type = other DNA
ttcttcctacccatgagcatggaatgttcttccaattgtttgtgtcctcttttatttccttgagcagtggtttgtagttctccttgaagaggtccttcacatcccttgtaagttggattc

SEQ ID NO: 60754 - DNA, 120 bp, synthetic construct
  source 1..120: mol_type = other DNA
aaaatgagttagggaggattccctctttttctattgattggaatagtttcagaaggaatggtaccagttcctccttgtacctctggtagaattcgtctgtgaatccatctggtcctggac

SEQ ID NO: 60755 - DNA, 120 bp, synthetic construct
  source 1..120: mol_type = other DNA
gagagttctgtagatgtctattaggtctgcttggtacagagctgagttcaattcctgggtatccttgttgactttctgtctcgttgatctgtctaatgttgacagtggggtgttaaagtc

SEQ ID NO: 60756 - DNA, 120 bp, synthetic construct
  source 1..120: mol_type = other DNA
catcactttcaggtacaccaatcagatgtagatttggtcttttcacatagtcccatatttcttggaggctttgctcatttctttttattcttttttctctaaacttcccttcttgcttca

SEQ ID NO: 60757 - DNA, 120 bp, synthetic construct
  source 1..120: mol_type = other DNA
agaggcaggcaggcctccttgagctgtggtgggctccacccagttcgagcttcccagctgctttgtttacctaagcaagcctgggcaatggcgggcgcccctcccccagcctcgttgccg

SEQ ID NO: 60758 - DNA, 120 bp, synthetic construct
  source 1..120: mol_type = other DNA
ctggtgtgagatgatatctcatagtggttttgatttgcatttctctggccagtgatgatgagcattttttcatgtgtcttttggctgcataaatgtcttcttttgagaagtgtctgttca

SEQ ID NO: 60759 - DNA, 120 bp, synthetic construct
  source 1..120: mol_type = other DNA
tttgctgaagttgcctatcagcttaaggagattttgggctgagacgatggggttttctagatatacaatcatgtcatctgcaaacagggacaatttgacttcctcttttcctaattgaat

SEQ ID NO: 60760 - DNA, 120 bp, synthetic construct
  source 1..120: mol_type = other DNA
tctagattttctagtttatttgcatagaggtgtttatagtattctctgatcgtagtttgtatttctgtggggtcagtggtgatatcccctttatcactttttattgcgtctatttgattc

SEQ ID NO: 60761 - DNA, 120 bp, synthetic construct; identical to SEQ ID NO: 26329
  source 1..120: mol_type = other DNA

SEQ ID NO: 60762 - DNA, 120 bp, synthetic construct; identical to SEQ ID NO: 26331
  source 1..120: mol_type = other DNA

SEQ ID NO: 60763 - DNA, 120 bp, synthetic construct; identical to SEQ ID NO: 26332
  source 1..120: mol_type = other DNA

SEQ ID NO: 60764 - DNA, 120 bp, synthetic construct; identical to SEQ ID NO: 26333
  source 1..120: mol_type = other DNA

SEQ ID NO: 60765 - DNA, 120 bp, synthetic construct; identical to SEQ ID NO: 20525
  source 1..120: mol_type = other DNA

SEQ ID NO: 60766 - DNA, 120 bp, synthetic construct; identical to SEQ ID NO: 20526
  source 1..120: mol_type = other DNA

SEQ ID NO: 60767 - DNA, 120 bp, synthetic construct; identical to SEQ ID NO: 19750
  source 1..120: mol_type = other DNA

SEQ ID NO: 60768 - DNA, 120 bp, synthetic construct; identical to SEQ ID NO: 19751
  source 1..120: mol_type = other DNA

SEQ ID NO: 60769 - DNA, 120 bp, synthetic construct
  source 1..120: mol_type = other DNA
tcagttttcacagtggatgttttcactcccttcctctcttcctccctccctccctctcccttccgttcccttcctctttttatttttttattttttgagatggagtctcgctcagtcgcc

SEQ ID NO: 60770 - DNA, 120 bp, synthetic construct; identical to SEQ ID NO: 30806
  source 1..120: mol_type = other DNA

SEQ ID NO: 60771 - DNA, 120 bp, synthetic construct; identical to SEQ ID NO: 30807
  source 1..120: mol_type = other DNA

SEQ ID NO: 60772 - DNA, 120 bp, synthetic construct; identical to SEQ ID NO: 30808
  source 1..120: mol_type = other DNA

SEQ ID NO: 60773 - DNA, 120 bp, synthetic construct; identical to SEQ ID NO: 30809
  source 1..120: mol_type = other DNA

SEQ ID NO: 60774 - DNA, 120 bp, synthetic construct; identical to SEQ ID NO: 30810
  source 1..120: mol_type = other DNA

SEQ ID NO: 60775 - DNA, 120 bp, synthetic construct; identical to SEQ ID NO: 30811
  source 1..120: mol_type = other DNA

SEQ ID NO: 60776 - DNA, 120 bp, synthetic construct; identical to SEQ ID NO: 30812
  source 1..120: mol_type = other DNA

SEQ ID NO: 60777 - DNA, 120 bp, synthetic construct; identical to SEQ ID NO: 30813
  source 1..120: mol_type = other DNA

SEQ ID NO: 60778 - DNA, 120 bp, synthetic construct; identical to SEQ ID NO: 30814
  source 1..120: mol_type = other DNA

SEQ ID NO: 60779 - DNA, 120 bp, synthetic construct; identical to SEQ ID NO: 30815
  source 1..120: mol_type = other DNA

SEQ ID NO: 60780 - DNA, 120 bp, synthetic construct; identical to SEQ ID NO: 30816
  source 1..120: mol_type = other DNA

SEQ ID NO: 60781 - DNA, 120 bp, synthetic construct
  source 1..120: mol_type = other DNA
aaaaccataaaaaccctacaagaaaagctaggcagtaccattcaggacataggcatgggcaaagacttgatgtctaaaacaccaaaagcaatggcaacaaaagccaaaattgacaaatgg

SEQ ID NO: 60782 - DNA, 120 bp, synthetic construct
  source 1..120: mol_type = other DNA
tggtcttgaactcctgacctcaggtgatctggctgcctcggcctcccaaagtgctaggatttcaggcgttagccaccctgcccagcctatttccactttataaaaagattctacacaaag

SEQ ID NO: 60783 - DNA, 120 bp, synthetic construct; identical to SEQ ID NO: 30817
  source 1..120: mol_type = other DNA

SEQ ID NO: 60784 - DNA, 120 bp, synthetic construct; identical to SEQ ID NO: 9399
  source 1..120: mol_type = other DNA

SEQ ID NO: 60785 - DNA, 120 bp, synthetic construct
  source 1..120: mol_type = other DNA
acagtgttggattttacattttactcagtgtgccattaaaaatttttttactaaaattatttttttggccgggcacggtggctcacgcctgtaatcccagcactttgggaggctgaggtg

SEQ ID NO: 60786 - DNA, 120 bp, synthetic construct; identical to SEQ ID NO: 14351
  source 1..120: mol_type = other DNA

SEQ ID NO: 60787 - DNA, 120 bp, synthetic construct; identical to SEQ ID NO: 14352
  source 1..120: mol_type = other DNA

SEQ ID NO: 60788 - DNA, 120 bp, synthetic construct; identical to SEQ ID NO: 14353
  source 1..120: mol_type = other DNA

SEQ ID NO: 60789 - DNA, 120 bp, synthetic construct; identical to SEQ ID NO: 14354
  source 1..120: mol_type = other DNA

SEQ ID NO: 60790 - DNA, 120 bp, synthetic construct
  source 1..120: mol_type = other DNA
attgcttgagcccaagagctggagctgcggtgagctatgataatcatgccattgcactgctgcctgggtgacagaatgaaactttgtctcaaaaaacacaaaaaaaaaagaaaagaaaag

SEQ ID NO: 60791 - DNA, 120 bp, synthetic construct
  source 1..120: mol_type = other DNA
aatctgcccgcctcagcctcccacagtgctgggattacaggcgtgagccaccatgcccagctatcaaattatgtcttaatagaataatattgtttttaaaaaaagaatcgctaatgtaaa

SEQ ID NO: 60792 - DNA, 120 bp, synthetic construct; identical to SEQ ID NO: 7200
  source 1..120: mol_type = other DNA

SEQ ID NO: 60793 - DNA, 120 bp, synthetic construct; identical to SEQ ID NO: 19834
  source 1..120: mol_type = other DNA

SEQ ID NO: 60794 - DNA, 120 bp, synthetic construct
  source 1..120: mol_type = other DNA
gtagtgagccaagatcgtgccactgcactccagcctgggtgacagagcgagactctggctcaaaaaaaaaaaaaatatatatatatatataaatatataaatatatatacaaatatataa

SEQ ID NO: 60795 - DNA, 120 bp, synthetic construct; identical to SEQ ID NO: 28434
  source 1..120: mol_type = other DNA

SEQ ID NO: 60796 - DNA, 120 bp, synthetic construct; identical to SEQ ID NO: 17693
  source 1..120: mol_type = other DNA

SEQ ID NO: 60797 - DNA, 120 bp, synthetic construct; identical to SEQ ID NO: 17694
  source 1..120: mol_type = other DNA

SEQ ID NO: 60798 - DNA, 120 bp, synthetic construct; identical to SEQ ID NO: 17695
  source 1..120: mol_type = other DNA

SEQ ID NO: 60799 - DNA, 120 bp, synthetic construct
  source 1..120: mol_type = other DNA
ctcctgaccttgtgatccgcctgcctcagcctcccagagtgctgggattacaggcatgaaccatcacgccgggccaacaaccttctcttttcttagagcagattctctcttaaaaaatta

SEQ ID NO: 60800 - DNA, 120 bp, synthetic construct
  source 1..120: mol_type = other DNA
ttagccaggcgcagtggcaggcacctgtagtcccagctactgaggcagcagaagggcgtgaagccgggaggcagagcttgcagtgagccgagatcatgccactgcactccagcctgggca

SEQ ID NO: 60801 - DNA, 120 bp, synthetic construct
  source 1..120: mol_type = other DNA
agtgcggtggctcacgcctgtaatcccagcactctgggaggccgaggcgggcggatcacacggtcaggagatcgagaccatcctggctaacacggtgaaaccccgcctctactaaaaaaa

SEQ ID NO: 60802 - DNA, 120 bp, synthetic construct
  source 1..120: mol_type = other DNA
acctttcagtaaacccttagctggcctcctcctctacatttgtggccttttaggcttcctgggtcccttctttttggtccaaactcctgttaataactgagtactctttcattgtcagtg

SEQ ID NO: 60803 - DNA, 120 bp, synthetic construct
  source 1..120: mol_type = other DNA
tcctggctaacacggtgaaaccccgcctctactaaaaaaaaaaaaaatacaaaaaattagccgggcgtggtggcgggctcctgtagtcccagctactcaggaggctgaggcaggagaatg

SEQ ID NO: 60804 - DNA, 120 bp, synthetic construct
  source 1..120: mol_type = other DNA
ctgaggcaggtggatcacctgaggtcaggagttcaagaccatcctggccaacatgacaaaaccttgtctctactaaaaatatagaaaattagccaggcatggtggtgcatgcctataatc

SEQ ID NO: 60805 - DNA, 120 bp, synthetic construct; identical to SEQ ID NO: 17700
  source 1..120: mol_type = other DNA

SEQ ID NO: 60806 - DNA, 120 bp, synthetic construct; identical to SEQ ID NO: 17701
  source 1..120: mol_type = other DNA

SEQ ID NO: 60807 - DNA, 120 bp, synthetic construct; identical to SEQ ID NO: 17702
  source 1..120: mol_type = other DNA

SEQ ID NO: 60808 - DNA, 120 bp, synthetic construct; identical to SEQ ID NO: 17703
  source 1..120: mol_type = other DNA

SEQ ID NO: 60809 - DNA, 120 bp, synthetic construct
  source 1..120: mol_type = other DNA
agcctcccgagtagctgggactacaggcatgtgccaccacgcccggcggctaatgtttttttgtattttagtagagacgaggtttcactatgttggccaggatggtctcaatctcctgac

SEQ ID NO: 60810 - DNA, 120 bp, synthetic construct; identical to SEQ ID NO: 17704
  source 1..120: mol_type = other DNA

SEQ ID NO: 60811 - DNA, 120 bp, synthetic construct; identical to SEQ ID NO: 17705
  source 1..120: mol_type = other DNA

SEQ ID NO: 60812 - DNA, 120 bp, synthetic construct
  source 1..120: mol_type = other DNA
gccaggcagttgctctaacacagtctgtgttgaagcagcagtaaacccacccctagctgtgaccatttctccataaaattgaaaagtcagattcagaagtatttaaaaatgtaagtgagg

SEQ ID NO: 60813 - DNA, 120 bp, synthetic construct
  source 1..120: mol_type = other DNA
tagaggaaggctgcattctgactcagcatgagatatgggctcagggccttctaacagcagtggaggtgaagtacctttttctcctccagagtattgcactctgtagggccaggcgcagtg

SEQ ID NO: 60814 - DNA, 120 bp, synthetic construct
  source 1..120: mol_type = other DNA
ttcttccttccttccttccttccttccttctttctttctttctttcttctttcttttttgagacagagtctcactctgtcaccaggctggagcacagcagtggtgagatcttggcgcact

SEQ ID NO: 60815 - DNA, 120 bp, synthetic construct
  source 1..120: mol_type = other DNA
ccagctaattttttgtatttttagtagagatggggtttcacggtgttagccaggatggtcttaatctcctgacctcatgatccacccgcctcagcctcccaaagtgctgggattacaggc

SEQ ID NO: 60816 - DNA, 120 bp, synthetic construct
  source 1..120: mol_type = other DNA
aactcccgacctcgtgatccacccgtcacggccttccaaagcgctgggattacaggtgtgagccaccacgcccggcctgttttgactcttaattcatcctaggtgtttgtgggaattgca

SEQ ID NO: 60817 - DNA, 120 bp, synthetic construct
  source 1..120: mol_type = other DNA
agtgctgtgggggcacaggaaggggacagggagggcaagttccggagctctttgtctatggagcattaaagtggggatcagagaagttagaaatcatctcactttataaagtatagatgt

SEQ ID NO: 60818 - DNA, 120 bp, synthetic construct; identical to SEQ ID NO: 27197
  source 1..120: mol_type = other DNA

SEQ ID NO: 60819 - DNA, 120 bp, synthetic construct
  source 1..120: mol_type = other DNA
actccagcctggcgacagagcaagactccgtctcaaaaaaaaaaagatacagacgctgacctgaaaaggcacccactgcctaaactttaaacactctgaccatcgaaataaataatgata

SEQ ID NO: 60820 - DNA, 120 bp, synthetic construct
  source 1..120: mol_type = other DNA
acctaacacttcaaactatgagctcatatccccaggaataaaggtgctaaaaatcctttgtgacttttaggttgggaaagacgcatgaacctgtagtgtcagtcagtgctagtttgagaa

SEQ ID NO: 60821 - DNA, 120 bp, synthetic construct
  source 1..120: mol_type = other DNA
ctcagaaggctgaggtaggacgatcacctgagcccaggaggttgaggctgcagtgggcagtgatcacaccaccgtactctggcctgggtgacagagtaaggccctatctcaaaaattaat

SEQ ID NO: 60822 - DNA, 120 bp, synthetic construct; identical to SEQ ID NO: 25877
  source 1..120: mol_type = other DNA

SEQ ID NO: 60823 - DNA, 120 bp, synthetic construct; identical to SEQ ID NO: 13249
  source 1..120: mol_type = other DNA

SEQ ID NO: 60824 - DNA, 120 bp, synthetic construct; identical to SEQ ID NO: 13250
  source 1..120: mol_type = other DNA

SEQ ID NO: 60825 - DNA, 120 bp, synthetic construct; identical to SEQ ID NO: 19567
  source 1..120: mol_type = other DNA

SEQ ID NO: 60826 - DNA, 120 bp, synthetic construct; identical to SEQ ID NO: 19507
  source 1..120: mol_type = other DNA

SEQ ID NO: 60827 - DNA, 120 bp, synthetic construct; identical to SEQ ID NO: 19508
  source 1..120: mol_type = other DNA

SEQ ID NO: 60828 - DNA, 120 bp, synthetic construct
  source 1..120: mol_type = other DNA
aggcagaaggatcacctgagcctaggagtttcaagccagcctggacaacaagacccccatctctttttttttttttttattatactttaagttttagggtacatgtgcacaatgtgcagg

SEQ ID NO: 60829 - DNA, 120 bp, synthetic construct
  source 1..120: mol_type = other DNA
cttgagtttaattagatcccatttgtcaattttggcttttgttgccattgcttttggtgttttagacatgaagtccttgcccatgcctatgtcctgaatggtaaagcctaggttttcttt

SEQ ID NO: 60830 - DNA, 120 bp, synthetic construct
  source 1..120: mol_type = other DNA
aatggggttttctagatatacaatcatgtcgtctgcaaacggacaatttgacttcctcttttcctaattgaataccctttatttccttctcctgcctaattgccctggccagaacttcca

SEQ ID NO: 60831 - DNA, 120 bp, synthetic construct
  source 1..120: mol_type = other DNA
ttttttattgcgtctatttgattcttctgtctttttttctttattagtcttggtagcggtttatcagttttgttgatcgtttcaaaaaaccagctcctggattcattaattttttgaagg

SEQ ID NO: 60832 - DNA, 120 bp, synthetic construct; identical to SEQ ID NO: 19755
  source 1..120: mol_type = other DNA

SEQ ID NO: 60833 - DNA, 120 bp, synthetic construct; identical to SEQ ID NO: 19756
  source 1..120: mol_type = other DNA

SEQ ID NO: 60834 - DNA, 120 bp, synthetic construct; identical to SEQ ID NO: 19757
  source 1..120: mol_type = other DNA

SEQ ID NO: 60835 - DNA, 120 bp, synthetic construct; identical to SEQ ID NO: 19758
  source 1..120: mol_type = other DNA

SEQ ID NO: 60836 - DNA, 120 bp, synthetic construct
  source 1..120: mol_type = other DNA
tgatttttgtatttttagtagagacagggtttcaccatgttggccaggctggtctcgggctcctgacatcaagtgatcagccaaccttggcctcccagagtgttgggattacaggcatga

SEQ ID NO: 60837 - DNA, 120 bp, synthetic construct; identical to SEQ ID NO: 19759
  source 1..120: mol_type = other DNA

SEQ ID NO: 60838 - DNA, 120 bp, synthetic construct; identical to SEQ ID NO: 19760
  source 1..120: mol_type = other DNA

SEQ ID NO: 60839 - DNA, 120 bp, synthetic construct; identical to SEQ ID NO: 19761
  source 1..120: mol_type = other DNA

SEQ ID NO: 60840 - DNA, 120 bp, synthetic construct; identical to SEQ ID NO: 19762
  source 1..120: mol_type = other DNA

SEQ ID NO: 60841 - DNA, 120 bp, synthetic construct
  source 1..120: mol_type = other DNA
aggattgcttgagccaaggaatttggggctgcagtgaactatgatggtaccactgcactccagcctgggtgacaagagtgagaccctgactctaaaagaaataaataagaggctaagtag

SEQ ID NO: 60842 - DNA, 120 bp, synthetic construct; identical to SEQ ID NO: 19763
  source 1..120: mol_type = other DNA

SEQ ID NO: 60843 - DNA, 120 bp, synthetic construct; identical to SEQ ID NO: 19764
  source 1..120: mol_type = other DNA

SEQ ID NO: 60844 - DNA, 120 bp, synthetic construct
  source 1..120: mol_type = other DNA
gttgcagtgagccgagatcgcgccactgcactccagcctgggtgacaaagccagactctgtgccaaaaaaaaaaaaaaaaaagtcacgcctgtccagttcgccagattaagtcagtaatt

SEQ ID NO: 60845 - DNA, 120 bp, synthetic construct; identical to SEQ ID NO: 19765
  source 1..120: mol_type = other DNA

SEQ ID NO: 60846 - DNA, 120 bp, synthetic construct
  source 1..120: mol_type = other DNA
gatcaaatgactctgcttggctgatattttttttttttttttttttgagacaggctctcactctatctcacccaggctggagtgcagaggcgcaatcacagctcgctgcagcctccacct

SEQ ID NO: 60847 - DNA, 120 bp, synthetic construct; identical to SEQ ID NO: 19766
  source 1..120: mol_type = other DNA

SEQ ID NO: 60848 - DNA, 120 bp, synthetic construct; identical to SEQ ID NO: 19767
  source 1..120: mol_type = other DNA

SEQ ID NO: 60849 - DNA, 120 bp, synthetic construct; identical to SEQ ID NO: 19768
  source 1..120: mol_type = other DNA

SEQ ID NO: 60850 - DNA, 120 bp, synthetic construct; identical to SEQ ID NO: 19758
  source 1..120: mol_type = other DNA

SEQ ID NO: 60851 - DNA, 120 bp, synthetic construct; identical to SEQ ID NO: 60836
  source 1..120: mol_type = other DNA

SEQ ID NO: 60852 - DNA, 120 bp, synthetic construct; identical to SEQ ID NO: 19759
  source 1..120: mol_type = other DNA

SEQ ID NO: 60853 - DNA, 120 bp, synthetic construct; identical to SEQ ID NO: 19760
  source 1..120: mol_type = other DNA

SEQ ID NO: 60854 - DNA, 120 bp, synthetic construct; identical to SEQ ID NO: 19761
  source 1..120: mol_type = other DNA

SEQ ID NO: 60855 - DNA, 120 bp, synthetic construct; identical to SEQ ID NO: 19762
  source 1..120: mol_type = other DNA

SEQ ID NO: 60856 - DNA, 120 bp, synthetic construct; identical to SEQ ID NO: 60841
  source 1..120: mol_type = other DNA

SEQ ID NO: 60857 - DNA, 120 bp, synthetic construct; identical to SEQ ID NO: 19763
  source 1..120: mol_type = other DNA

SEQ ID NO: 60858 - DNA, 120 bp, synthetic construct; identical to SEQ ID NO: 19764
  source 1..120: mol_type = other DNA

SEQ ID NO: 60859 - DNA, 120 bp, synthetic construct; identical to SEQ ID NO: 60844
  source 1..120: mol_type = other DNA

SEQ ID NO: 60860 - DNA, 120 bp, synthetic construct; identical to SEQ ID NO: 19765
  source 1..120: mol_type = other DNA

SEQ ID NO: 60861 - DNA, 120 bp, synthetic construct; identical to SEQ ID NO: 8761
  source 1..120: mol_type = other DNA

SEQ ID NO: 60862 - DNA, 120 bp, synthetic construct; identical to SEQ ID NO: 8762
  source 1..120: mol_type = other DNA

SEQ ID NO: 60863 - DNA, 120 bp, synthetic construct
  source 1..120: mol_type = other DNA
atcacaaggtcaagagattgagaccatcttggccaacatggtaaaaccccgtctctactagagatacaaaaattaactgggcatggtggtgtgcacctgtgatcccagctactgggcagg

SEQ ID NO: 60864 - DNA, 120 bp, synthetic construct; identical to SEQ ID NO: 8763
  source 1..120: mol_type = other DNA

SEQ ID NO: 60865 - DNA, 120 bp, synthetic construct; identical to SEQ ID NO: 8764
  source 1..120: mol_type = other DNA

SEQ ID NO: 60866 - DNA, 120 bp, synthetic construct; identical to SEQ ID NO: 8765
  source 1..120: mol_type = other DNA

SEQ ID NO: 60867 - DNA, 120 bp, synthetic construct; identical to SEQ ID NO: 8766
  source 1..120: mol_type = other DNA

SEQ ID NO: 60868 - DNA, 120 bp, synthetic construct; identical to SEQ ID NO: 8767
  source 1..120: mol_type = other DNA

SEQ ID NO: 60869 - DNA, 120 bp, synthetic construct; identical to SEQ ID NO: 8768
  source 1..120: mol_type = other DNA

SEQ ID NO: 60870 - DNA, 120 bp, synthetic construct; identical to SEQ ID NO: 8769
  source 1..120: mol_type = other DNA

SEQ ID NO: 60871 - DNA, 120 bp, synthetic construct; identical to SEQ ID NO: 8770
  source 1..120: mol_type = other DNA

SEQ ID NO: 60872 - DNA, 120 bp, synthetic construct; identical to SEQ ID NO: 8771
  source 1..120: mol_type = other DNA

SEQ ID NO: 60873 - DNA, 120 bp, synthetic construct; identical to SEQ ID NO: 8772
  source 1..120: mol_type = other DNA

SEQ ID NO: 60874 - DNA, 120 bp, synthetic construct; identical to SEQ ID NO: 8773
  source 1..120: mol_type = other DNA

SEQ ID NO: 60875 - DNA, 120 bp, synthetic construct; identical to SEQ ID NO: 8774
  source 1..120: mol_type = other DNA

SEQ ID NO: 60876 - DNA, 120 bp, synthetic construct; identical to SEQ ID NO: 8775
  source 1..120: mol_type = other DNA

SEQ ID NO: 60877 - DNA, 120 bp, synthetic construct; identical to SEQ ID NO: 8776
  source 1..120: mol_type = other DNA

SEQ ID NO: 60878 - DNA, 120 bp, synthetic construct; identical to SEQ ID NO: 8777
  source 1..120: mol_type = other DNA

SEQ ID NO: 60879 - DNA, 120 bp, synthetic construct; identical to SEQ ID NO: 8778
  source 1..120: mol_type = other DNA

SEQ ID NO: 60880 - DNA, 120 bp, synthetic construct; identical to SEQ ID NO: 8779
  source 1..120: mol_type = other DNA

SEQ ID NO: 60881 - DNA, 120 bp, synthetic construct; identical to SEQ ID NO: 8905
  source 1..120: mol_type = other DNA

SEQ ID NO: 60882 - DNA, 120 bp, synthetic construct; identical to SEQ ID NO: 8906
  source 1..120: mol_type = other DNA

SEQ ID NO: 60883 - DNA, 120 bp, synthetic construct; identical to SEQ ID NO: 8907
  source 1..120: mol_type = other DNA

SEQ ID NO: 60884 - DNA, 120 bp, synthetic construct; identical to SEQ ID NO: 8908
  source 1..120: mol_type = other DNA

SEQ ID NO: 60885 - DNA, 120 bp, synthetic construct; identical to SEQ ID NO: 8909
  source 1..120: mol_type = other DNA

SEQ ID NO: 60886 - DNA, 120 bp, synthetic construct; identical to SEQ ID NO: 8910
  source 1..120: mol_type = other DNA

SEQ ID NO: 60887 - DNA, 120 bp, synthetic construct; identical to SEQ ID NO: 8911
  source 1..120: mol_type = other DNA

SEQ ID NO: 60888 - DNA, 120 bp, synthetic construct
  source 1..120: mol_type = other DNA
ctaaacttcatgaattgcgcctcagatttttcctttaacatcttttttttttttgacagagtctcaatctgttacccaggctggagtgcagtggtgctatcttggctcactgcaaacccg

SEQ ID NO: 60889 - DNA, 120 bp, synthetic construct; identical to SEQ ID NO: 8912
  source 1..120: mol_type = other DNA

SEQ ID NO: 60890 - DNA, 120 bp, synthetic construct; identical to SEQ ID NO: 8913
  source 1..120: mol_type = other DNA

SEQ ID NO: 60891 - DNA, 120 bp, synthetic construct; identical to SEQ ID NO: 8914
  source 1..120: mol_type = other DNA

SEQ ID NO: 60892 - DNA, 120 bp, synthetic construct; identical to SEQ ID NO: 8928
  source 1..120: mol_type = other DNA

SEQ ID NO: 60893 - DNA, 120 bp, synthetic construct
  source 1..120: mol_type = other DNA
ccatttcacagatgagacaacagagcttacaaagcatgaataggccaggcacggtggctcacacctgtaatcccagcgctctgggaggccgaggtgggcagatcacttgaggtcaggagt

SEQ ID NO: 60894 - DNA, 120 bp, synthetic construct; identical to SEQ ID NO: 8929
  source 1..120: mol_type = other DNA

SEQ ID NO: 60895 - DNA, 120 bp, synthetic construct; identical to SEQ ID NO: 8930
  source 1..120: mol_type = other DNA

SEQ ID NO: 60896 - DNA, 120 bp, synthetic construct; identical to SEQ ID NO: 8931
  source 1..120: mol_type = other DNA

SEQ ID NO: 60897 - DNA, 120 bp, synthetic construct; identical to SEQ ID NO: 8932
  source 1..120: mol_type = other DNA

SEQ ID NO: 60898 - DNA, 120 bp, synthetic construct; identical to SEQ ID NO: 8933
  source 1..120: mol_type = other DNA

SEQ ID NO: 60899 - DNA, 120 bp, synthetic construct; identical to SEQ ID NO: 8934
  source 1..120: mol_type = other DNA

SEQ ID NO: 60900 - DNA, 120 bp, synthetic construct; identical to SEQ ID NO: 8935
  source 1..120: mol_type = other DNA

SEQ ID NO: 60901 - DNA, 120 bp, synthetic construct; identical to SEQ ID NO: 8936
  source 1..120: mol_type = other DNA

SEQ ID NO: 60902 - DNA, 120 bp, synthetic construct; identical to SEQ ID NO: 8937
  source 1..120: mol_type = other DNA

SEQ ID NO: 60903 - DNA, 120 bp, synthetic construct; identical to SEQ ID NO: 8938
  source 1..120: mol_type = other DNA

SEQ ID NO: 60904 - DNA, 120 bp, synthetic construct; identical to SEQ ID NO: 8939
  source 1..120: mol_type = other DNA

SEQ ID NO: 60905 - DNA, 120 bp, synthetic construct; identical to SEQ ID NO: 8940
  source 1..120: mol_type = other DNA

SEQ ID NO: 60906 - DNA, 120 bp, synthetic construct; identical to SEQ ID NO: 8941
  source 1..120: mol_type = other DNA

SEQ ID NO: 60907 - DNA, 120 bp, synthetic construct; identical to SEQ ID NO: 8942
  source 1..120: mol_type = other DNA

SEQ ID NO: 60908 - DNA, 120 bp, synthetic construct; identical to SEQ ID NO: 8943
  source 1..120: mol_type = other DNA

SEQ ID NO: 60909 - DNA, 120 bp, synthetic construct; identical to SEQ ID NO: 8944
  source 1..120: mol_type = other DNA

SEQ ID NO: 60910 - DNA, 120 bp, synthetic construct; identical to SEQ ID NO: 8945
  source 1..120: mol_type = other DNA

SEQ ID NO: 60911 - DNA, 120 bp, synthetic construct
  source 1..120: mol_type = other DNA
aggaggcctggaaacccctcaatttgctgaggaatctgcctctgtggagggatggggtggagtggccaggctcagctgtctgtggaacactaagaggaggtttgggcttgagaaaattct

SEQ ID NO: 60912 - DNA, 120 bp, synthetic construct
  source 1..120: mol_type = other DNA
aaggctcctgcttgtttgacagagatgtgacagggagcgttaacaagttaggttgtaagctgggttttgtgtgacagttaagaaattgtcagacaatgctatggtctagaaactgggata

SEQ ID NO: 60913 - DNA, 120 bp, synthetic construct; identical to SEQ ID NO: 8918
  source 1..120: mol_type = other DNA

SEQ ID NO: 60914 - DNA, 120 bp, synthetic construct; identical to SEQ ID NO: 8919
  source 1..120: mol_type = other DNA

SEQ ID NO: 60915 - DNA, 120 bp, synthetic construct
  source 1..120: mol_type = other DNA
gattgcgccactgcactccagcttgggtgacagagagagactctgtctcaaaaacaaaaacaaaaacaaacacaaacaaacaaacaaaaaaagaagtaaaaaatgcttctcagaggagga

SEQ ID NO: 60916 - DNA, 120 bp, synthetic construct
  source 1..120: mol_type = other DNA
aatttattcaataaatattattggccaggtgtggtggctcacgcctgtagtcccagcactttgggaagccaaggctggtgaatcacctgaggtcaggagtttgagaccagactgaccaac

SEQ ID NO: 60917 - DNA, 120 bp, synthetic construct
  source 1..120: mol_type = other DNA
ctgttcagtatcttaaggaaagctggccagagaagcacagggccaagttctgctgtgttggaggaactatccctgctaaccccacatcagcattttcccattcaacaagcatttcccaat

SEQ ID NO: 60918 - DNA, 120 bp, synthetic construct
  source 1..120: mol_type = other DNA
ccctgacttacctagaagtagcagagcagttgggaggagcagctgccacatgatgccacactggagtggacaagtcaccaaagatatccggagccctaaagggaccaaaccgactagaca

SEQ ID NO: 60919 - DNA, 120 bp, synthetic construct; identical to SEQ ID NO: 8923
  source 1..120: mol_type = other DNA

SEQ ID NO: 60920 - DNA, 120 bp, synthetic construct; identical to SEQ ID NO: 8924
  source 1..120: mol_type = other DNA

SEQ ID NO: 60921 - DNA, 120 bp, synthetic construct; identical to SEQ ID NO: 8925
  source 1..120: mol_type = other DNA

SEQ ID NO: 60922 - DNA, 120 bp, synthetic construct; identical to SEQ ID NO: 8926
  source 1..120: mol_type = other DNA

SEQ ID NO: 60923 - DNA, 120 bp, synthetic construct
  source 1..120: mol_type = other DNA
ccctgcaatcagggacttttggggacctcctggtgatcaccaggagggaaccacatatgaagaagtgcgtgtaagaatcaggaatctcctcccaactcaacttcccagtgtgattgcagg

SEQ ID NO: 60924 - DNA, 120 bp, synthetic construct; identical to SEQ ID NO: 8927
  source 1..120: mol_type = other DNA

SEQ ID NO: 60925 - DNA, 120 bp, synthetic construct
  source 1..120: mol_type = other DNA
ggttgcagtgaaccaagattgcgccactgcactccagcttgggtgacagagagaaactctgtctcaaaaacaaaaacaaaaacaaacaaacaaacaaagaagtaaaaagtgcttctcaga

SEQ ID NO: 60926 - DNA, 120 bp, synthetic construct
  source 1..120: mol_type = other DNA
aaattattggccaggtgtggtggctcacgcctgtagtcccagcactttggaaagccaagaccggtgaatcacctgaggtcaggagtttgagaccagactgaccaacatggtgaaaccctg

SEQ ID NO: 60927 - DNA, 120 bp, synthetic construct; identical to SEQ ID NO: 60917
  source 1..120: mol_type = other DNA

SEQ ID NO: 60928 - DNA, 120 bp, synthetic construct; identical to SEQ ID NO: 60918
  source 1..120: mol_type = other DNA

SEQ ID NO: 60929 - DNA, 120 bp, synthetic construct; identical to SEQ ID NO: 26803
  source 1..120: mol_type = other DNA

SEQ ID NO: 60930 - DNA, 120 bp, synthetic construct
  source 1..120: mol_type = other DNA
cagatgagtaggttgtgaaaattttctcccattttgtaggttgcctgttcactctaatggtagtttcttttgctgtgcagaagctcttgagtttaattagtcccatttgtcaattttggc

SEQ ID NO: 60931 - DNA, 120 bp, synthetic construct
  source 1..120: mol_type = other DNA
aatcatgccatctgcaaacaaggacaatttgacttcctcttttcctagttgaatgccctttatttccttctcctgcctaattgccctggctagaacttccaacactatgttgactaggag

SEQ ID NO: 60932 - DNA, 120 bp, synthetic construct
  source 1..120: mol_type = other DNA
ccagctcctggattcattaattttttgaagggttttttgtgtctctatttccttcagttctgctctgattttagttatttcttgccttctgctagctttcgaatgtgtttgctcttgctt

SEQ ID NO: 60933 - DNA, 120 bp, synthetic construct
  source 1..120: mol_type = other DNA
atgattttgcagcggctggtactggttgttcctttccatgtttagcgcttccttcgggagctcttgtagggcaggcctgctggtgacaaaatctctcagcatttgcttgtctgtaaagta

SEQ ID NO: 60934 - DNA, 120 bp, synthetic construct
  source 1..120: mol_type = other DNA
atctcagcagtttgggaggccaaggcaggaagattacttgagcccagaagtttgagaccagcctgggcaacatagggagacctcatctctacacaaaatttaaaaaatattttaaattgt

SEQ ID NO: 60935 - DNA, 120 bp, synthetic construct
  source 1..120: mol_type = other DNA
cctcaaagggccttgggtcaaaaatacatattttgatataattaattttaattgtcttgtgtaagttttatctgaaatacactaagaatgtggaaaaagaaaaagttatctttatttcat

SEQ ID NO: 60936 - DNA, 120 bp, synthetic construct; identical to SEQ ID NO: 26804
  source 1..120: mol_type = other DNA

SEQ ID NO: 60937 - DNA, 120 bp, synthetic construct; identical to SEQ ID NO: 12087
  source 1..120: mol_type = other DNA

SEQ ID NO: 60938 - DNA, 120 bp, synthetic construct
  source 1..120: mol_type = other DNA
gaagaatcaatatcgtgaaaatggccatactgcccaaggtaaattatagattcaatgccatcctcatcaagctaccaatgactttctcacagaattggaaaaaactactttaaaattcat

SEQ ID NO: 60939 - DNA, 120 bp, synthetic construct
  source 1..120: mol_type = other DNA
aacaactggtgctggaggggatgtggagaaataggaacacttttacactgttggtgggactgtaaactagttcaaccattgtggaagtcagtgtggcgattcctcagggatctagaacta

SEQ ID NO: 60940 - DNA, 120 bp, synthetic construct; identical to SEQ ID NO: 12088
  source 1..120: mol_type = other DNA

SEQ ID NO: 60941 - DNA, 120 bp, synthetic construct; identical to SEQ ID NO: 12089
  source 1..120: mol_type = other DNA

SEQ ID NO: 60942 - DNA, 120 bp, synthetic construct; identical to SEQ ID NO: 12090
  source 1..120: mol_type = other DNA

SEQ ID NO: 60943 - DNA, 120 bp, synthetic construct; identical to SEQ ID NO: 12091
  source 1..120: mol_type = other DNA

SEQ ID NO: 60944 - DNA, 120 bp, synthetic construct
  source 1..120: mol_type = other DNA
tgctcaatgaaataaaagaggatacaaacgaatggaagaacattccatgctcatgggtagaaagaatcaatatcgtgaaaatgaccatactgcccaaggtaatttatagattcaatgcca

SEQ ID NO: 60945 - DNA, 120 bp, synthetic construct
  source 1..120: mol_type = other DNA
tgcagccaacagacacatgaaaaaatgctcatcatcactggccatcagagaaatgcaaatcaaaaccacaatgagataccatctcacaccagttagaatggcgatcattagaaagtcagg

SEQ ID NO: 60946 - DNA, 120 bp, synthetic construct; identical to SEQ ID NO: 12092
  source 1..120: mol_type = other DNA

SEQ ID NO: 60947 - DNA, 120 bp, synthetic construct; identical to SEQ ID NO: 3323
  source 1..120: mol_type = other DNA

SEQ ID NO: 60948 - DNA, 120 bp, synthetic construct
  source 1..120: mol_type = other DNA
gctgcttccctctttagtaaagtacaaaatatatcaaaattcctttcaatgagtacttactgaatgcctactatgttcagactgctgaacactgccacgcgggtgtgaaccttctctagc

SEQ ID NO: 60949 - DNA, 120 bp, synthetic construct; identical to SEQ ID NO: 33127
  source 1..120: mol_type = other DNA

SEQ ID NO: 60950 - DNA, 120 bp, synthetic construct; identical to SEQ ID NO: 33128
  source 1..120: mol_type = other DNA

SEQ ID NO: 60951 - DNA, 120 bp, synthetic construct; identical to SEQ ID NO: 33125
  source 1..120: mol_type = other DNA

SEQ ID NO: 60952 - DNA, 120 bp, synthetic construct; identical to SEQ ID NO: 33126
  source 1..120: mol_type = other DNA

SEQ ID NO: 60953 - DNA, 120 bp, synthetic construct; identical to SEQ ID NO: 8882
  source 1..120: mol_type = other DNA

SEQ ID NO: 60954 - DNA, 120 bp, synthetic construct
  source 1..120: mol_type = other DNA
gtgttttttggctgcataaatgtcttcttttgagaagtgtctgttcatatcctttgcccactttttgatggggttgtttgtttttttcttgtaaatttgtttgagttcatcgtagattcc

SEQ ID NO: 60955 - DNA, 120 bp, synthetic construct; identical to SEQ ID NO: 8883
  source 1..120: mol_type = other DNA

SEQ ID NO: 60956 - DNA, 120 bp, synthetic construct
  source 1..120: mol_type = other DNA
acagtagcaaagacttggaaccaacccaaatgtccaacaatgatagactggatcaaggaaatgtggcacatatacaccatggaatactatgcagccataaaaaatgatgagttcatgtcc

SEQ ID NO: 60957 - DNA, 120 bp, synthetic construct; identical to SEQ ID NO: 12347
  source 1..120: mol_type = other DNA

SEQ ID NO: 60958 - DNA, 120 bp, synthetic construct; identical to SEQ ID NO: 4366
  source 1..120: mol_type = other DNA

SEQ ID NO: 60959 - DNA, 120 bp, synthetic construct; identical to SEQ ID NO: 26934
  source 1..120: mol_type = other DNA

SEQ ID NO: 60960 - DNA, 120 bp, synthetic construct
  source 1..120: mol_type = other DNA
ggttgaactagtttacagtcccaccaacagtgtaaaaaagtgttcctatttctccacatcctctccagcacctgttgtttcctgactttttaatgattgccattctaactggtgtgagat

SEQ ID NO: 60961 - DNA, 120 bp, synthetic construct
  source 1..120: mol_type = other DNA
tatcctcttttatttcattgagcagtggtttgtagttctccttgaagaggtccatcacgtcccttgtaagttggattcctaggtattttattctaaaaatatggaatgcttaatgaattt

SEQ ID NO: 60962 - DNA, 120 bp, synthetic construct; identical to SEQ ID NO: 26935
  source 1..120: mol_type = other DNA

SEQ ID NO: 60963 - DNA, 120 bp, synthetic construct
  source 1..120: mol_type = other DNA
tgagactttgctgaagttgcctatcagcttaaggagattttgggctgagacaatggggttttctagatatacaatcatgtcgtctgcaaacagggacaatttgacttcctcttttcctaa

SEQ ID NO: 60964 - DNA, 120 bp, synthetic construct
  source 1..120: mol_type = other DNA
caagcaatcctcccaccttggcctcccaaagatctgggattataggcatgagccactgtgaccagccattctttcctcttaacacagaaaaactatgatttattctacctataagtaaag

SEQ ID NO: 60965 - DNA, 120 bp, synthetic construct; identical to SEQ ID NO: 26931
  source 1..120: mol_type = other DNA

SEQ ID NO: 60966 - DNA, 120 bp, synthetic construct; identical to SEQ ID NO: 26932
  source 1..120: mol_type = other DNA

SEQ ID NO: 60967 - DNA, 120 bp, synthetic construct
  source 1..120: mol_type = other DNA
ataagaatgcttgtgatttttgcacattgattttgtatcctgagactttgctgaagttgcctatcagcttaaggagattttgggctgagatgatggggttttctaaataaacaatcatgt

SEQ ID NO: 60968 - DNA, 120 bp, synthetic construct
  source 1..120: mol_type = other DNA
taccaaaaatattataaatcatgctgctataaagacacatgcacatgtatgtttattgcggtactattcacaatagcaaagacttggaaccaacccaatgtccaacagtgatagactgga

SEQ ID NO: 60969 - DNA, 120 bp, synthetic construct
  source 1..120: mol_type = other DNA
aagaagtctttgcctagtcctagatctcagaggtttttttctcttttgtttgttttttttttcttttttttttattatactttacgttttagggtacatgtgcacaacgtgcaggttagt

SEQ ID NO: 60970 - DNA, 120 bp, synthetic construct
  source 1..120: mol_type = other DNA
tttgtttttttcttgtaaatttgtttgagttcattgtagattctggatattagccctttgtcagatgagcagcttgcaaaaattttctctctttctgtaggttgcctgttcactctgatg

SEQ ID NO: 60971 - DNA, 120 bp, synthetic construct; identical to SEQ ID NO: 26933
  source 1..120: mol_type = other DNA

SEQ ID NO: 60972 - DNA, 120 bp, synthetic construct
  source 1..120: mol_type = other DNA
ttacattttttaacttaaaaaaatgttttgtagagacacagtcatgttttgttgcccaggctggtctcaaactcctggcttcaagcagtcttcctgaccaggcctcccaaagtaaaagga

SEQ ID NO: 60973 - DNA, 120 bp, synthetic construct
  source 1..120: mol_type = other DNA
cccaaggcagaagaatttttctagtacagaacaaaatgaaaagtctcccatgtctacttcttcctacacagacacggcaatcatccgatttctcaatcttttccccacctttaccccctt

SEQ ID NO: 60974 - DNA, 120 bp, synthetic construct
  source 1..120: mol_type = other DNA
cccagacgatgggcggccaagcagagaggctcctcacttcccagacggggtggcggccgggcagaggctgcaatctcagcactttgggaggccaaggcaggcggctgggaggtggaggtt

SEQ ID NO: 60975 - DNA, 120 bp, synthetic construct
  source 1..120: mol_type = other DNA
tagcatgaaatgcccacaagagaaagcaggaaagatctaaaattgacaccctaacatcacaattaaaagaactagagaagcaagagcaaacacattcaaaagctagcagaaggcaagaaa

SEQ ID NO: 60976 - DNA, 120 bp, synthetic construct
  source 1..120: mol_type = other DNA
tgcagaaaaggcctttgacaaaattcaacaaccattcatgctaaaaactctcaatcaattaggtattgatgggacatatctcaaagtaataagagctatctatgacaaacccactgccaa

SEQ ID NO: 60977 - DNA, 120 bp, synthetic construct
  source 1..120: mol_type = other DNA
agaaaacctaggcattaccattcaggacataggcatgggcaaggacttcatgtctagaacagcaaaagcaatggcaacaaaagccaaaattgacaaatgggatctaatgaaactaaaaac

SEQ ID NO: 60978 - DNA, 120 bp, synthetic construct
  source 1..120: mol_type = other DNA
cagcctcccaaagtgctgggattacaggcgtgagccactgtcattttcttaacagtgtctttcaaaagcagactttttcattttgatgaagtccaatttatcaagctttccttccttcct

SEQ ID NO: 60979 - DNA, 120 bp, synthetic construct
  source 1..120: mol_type = other DNA
cccacaaagttgtaaacagagtggagcaagagaacggatgtgaaggagacttttaaagtgaaaaccatatgtgtgtgtgtgtgtgtgtgtatatgtacacacacacacacacacatatac

SEQ ID NO: 60980 - DNA, 120 bp, synthetic construct; identical to SEQ ID NO: 31761
  source 1..120: mol_type = other DNA

SEQ ID NO: 60981 - DNA, 120 bp, synthetic construct
  source 1..120: mol_type = other DNA
ctcagtaatgggatggctgggtcaaatggtatttctacttctagatccctgaggaatcgccacactgacttccacaatggttgaactagtttacagtcccaccaacagtgtaaaagtgtt

SEQ ID NO: 60982 - DNA, 120 bp, synthetic construct
  source 1..120: mol_type = other DNA
tactgtatccttgtagtatagtttgaagtcaggtggtgtgatgcctccagctttgttcttttggcttaggattgacttggcgatgcgggctcttttttggttccatatgaactttaaagt

SEQ ID NO: 60983 - DNA, 120 bp, synthetic construct
  source 1..120: mol_type = other DNA
gcatttattgatttgcgtatagtgaaccagccttgcatcccagggatgaagcccacttgatcatggtggataagctttttgatgtgctgctggattcggtttgccagtattttattgagg

SEQ ID NO: 60984 - DNA, 120 bp, synthetic construct
  source 1..120: mol_type = other DNA
acacactgctttgaatgcatcccagagattctggtatgttgtgtctttgttctcgttggtttcaaagaacatctttatttctgccttcatttcgttatgtacccagtagtcattcaggag

SEQ ID NO: 60985 - DNA, 120 bp, synthetic construct
  source 1..120: mol_type = other DNA
gatggtctttacattttggcatgattttgcagcggctggtaccggttgttcctttccatgtttagcgcttccttcaggagctcttttagggcaggcctggtggtgacaaaatctcagcat

SEQ ID NO: 60986 - DNA, 120 bp, synthetic construct
  source 1..120: mol_type = other DNA
gctgcgttcctttggaggaggagaggtgctctgtgttttagagtttccagtttttctgttctgttttttccccatctttgtggttttatctacttttggtctttgatgatggtgatgtac

SEQ ID NO: 60987 - DNA, 120 bp, synthetic construct
  source 1..120: mol_type = other DNA
ttggacatttgggttggttccaagtctttgctattgtgaataatgccgcaataaacatacgtgtgcatgtgtctttatagcagcatgatttatgctctgtttctatgaggtcgacttttt

SEQ ID NO: 60988 - DNA, 120 bp, synthetic construct; identical to SEQ ID NO: 31762
  source 1..120: mol_type = other DNA

SEQ ID NO: 60989 - DNA, 120 bp, synthetic construct; identical to SEQ ID NO: 14344
  source 1..120: mol_type = other DNA

SEQ ID NO: 60990 - DNA, 120 bp, synthetic construct; identical to SEQ ID NO: 24945
  source 1..120: mol_type = other DNA

SEQ ID NO: 60991 - DNA, 120 bp, synthetic construct
  source 1..120: mol_type = other DNA
ggagaaccgcttgaacctgagaggcggaggttgcagtgagcagagatcacaccactgtactctagcctgggcaacaacaagagcaaaactctatcttaaaataaaaataaataaataaat

SEQ ID NO: 60992 - DNA, 120 bp, synthetic construct
  source 1..120: mol_type = other DNA
tgaggcaggaggattggttgagcccatgagtttgaggctatagtgagctatgatcacactactgtatgccagcctgggtgacaaagtgagaccctatctttaaaaaaaaaaaaaaaaaag

SEQ ID NO: 60993 - DNA, 120 bp, synthetic construct; identical to SEQ ID NO: 12441
  source 1..120: mol_type = other DNA

SEQ ID NO: 60994 - DNA, 120 bp, synthetic construct; identical to SEQ ID NO: 19700
  source 1..120: mol_type = other DNA

SEQ ID NO: 60995 - DNA, 120 bp, synthetic construct; identical to SEQ ID NO: 19701
  source 1..120: mol_type = other DNA

SEQ ID NO: 60996 - DNA, 120 bp, synthetic construct; identical to SEQ ID NO: 19702
  source 1..120: mol_type = other DNA

SEQ ID NO: 60997 - DNA, 120 bp, synthetic construct; identical to SEQ ID NO: 19703
  source 1..120: mol_type = other DNA

SEQ ID NO: 60998 - DNA, 120 bp, synthetic construct; identical to SEQ ID NO: 11032
  source 1..120: mol_type = other DNA

SEQ ID NO: 60999 - DNA, 120 bp, synthetic construct
  source 1..120: mol_type = other DNA
tgaggttcatcctggggcctcagatagggttgggattgatacaaaacaggaagctcaatttcttcaactcaggctgctctgcctatggagtagccattctttatttctttactttcttaa

SEQ ID NO: 61000 - DNA, 120 bp, synthetic construct
  source 1..120: mol_type = other DNA
tctgtggcaataagataccaaattataaacaggaccaggcaagtgtacacaccatacacttaaagaataaactatattctggctgggcgcggtggctcacgcctataatcctagcacttt

SEQ ID NO: 61001 - DNA, 120 bp, synthetic construct
  source 1..120: mol_type = other DNA
gccttggcttcccaagttgtcaggattatagctgtgagccaccatgccaagcaccaactgatttttttgtgttcattttgtattctgtaaccttactgaactggttcgttagtcctaaca

SEQ ID NO: 61002 - DNA, 120 bp, synthetic construct
  source 1..120: mol_type = other DNA
ctccatgggctcctgtgtggcccaagcctcccggacgagcaccaccccctgctccacggcgcccagtcccatcgatcacccaagggctgaggaatgcgagtgcggggcgcaggactggca

SEQ ID NO: 61003 - DNA, 120 bp, synthetic construct; identical to SEQ ID NO: 12835
  source 1..120: mol_type = other DNA

SEQ ID NO: 61004 - DNA, 120 bp, synthetic construct; identical to SEQ ID NO: 12836
  source 1..120: mol_type = other DNA

SEQ ID NO: 61005 - DNA, 120 bp, synthetic construct
  source 1..120: mol_type = other DNA
tcacttcccagagggggtggctgccgggcagaggggctcctcacttctcagacggggcggttgccaggcggagggtctcctcacttctcagacggggcggccgggcagagacgctcctca

SEQ ID NO: 61006 - DNA, 120 bp, synthetic construct
  source 1..120: mol_type = other DNA
gtctccacctaaagaaattagtgaagcaaagatgcttcattactaatactatatagccagtccatctttgtctaaaaaatcccttccaaatatatatataatataatatatagcatatat

SEQ ID NO: 61007 - DNA, 120 bp, synthetic construct; identical to SEQ ID NO: 13134
  source 1..120: mol_type = other DNA

SEQ ID NO: 61008 - DNA, 120 bp, synthetic construct
  source 1..120: mol_type = other DNA
ggaggttgcagcgagcttgagatcacgctgctgcactccagcctgggtgacagagctagactctgtctacaaaacaaaacaaaacaaaacaaaaaaacattttgagtaatttcgtatttt

SEQ ID NO: 61009 - DNA, 120 bp, synthetic construct
  source 1..120: mol_type = other DNA
aagttctcagacttgattgaactttacccagtgctcacccttaaggtcttgttatattagggtgaaatctgtatcagcatcatggccctcgcgaaaaaggacttttccctggtttcataa

SEQ ID NO: 61010 - DNA, 120 bp, synthetic construct; identical to SEQ ID NO: 17402
  source 1..120: mol_type = other DNA

SEQ ID NO: 61011 - DNA, 120 bp, synthetic construct; identical to SEQ ID NO: 24969
  source 1..120: mol_type = other DNA

SEQ ID NO: 61012 - DNA, 120 bp, synthetic construct
  source 1..120: mol_type = other DNA
tggttgaactagtttacagtcccaccaacagtgtaaaagtgttcctatttctccacgtcctctccagcacctgttgtctcctgactttttaatgattgccattctaactggtgtgagatg

SEQ ID NO: 61013 - DNA, 120 bp, synthetic construct
  source 1..120: mol_type = other DNA
tgtagttctccttgaagaggtccttcacaccccttgtaagttggattcctaggtattttattctctttgaagcaattgtgaatgggagttcactcatgatttggctctctgtttgtctgt

SEQ ID NO: 61014 - DNA, 120 bp, synthetic construct
  source 1..120: mol_type = other DNA
tttatttgcgtagaggtgtttgtagtattctctgatggtagtttgtatttctgtgggatcggtggtgatatcccctttatcattttttattgtgtctatttgattcttctttttttcttt

SEQ ID NO: 61015 - DNA, 120 bp, synthetic construct
  source 1..120: mol_type = other DNA
ggtttcctgaatacagcacactgatgggtcttgactctttatccaatttgccagtctgtgtcttttaattggagcatttagtccatttacattgaaagttaatattgttatgtgtgaatt

SEQ ID NO: 61016 - DNA, 120 bp, synthetic construct
  source 1..120: mol_type = other DNA
ttttttctctaaacttcccttctcgcttcatttcattcatttcatcttccattgctgatacccttcttccagttgatcgcatcggctcctgaggcttctgcattcttcatgtagttctcg

SEQ ID NO: 61017 - DNA, 120 bp, synthetic construct
  source 1..120: mol_type = other DNA
cgtctgtcacccctttctttgactcggaaagggaactccctgcccccttgcgcttcccaggtgaggcaatgcctcgccctgcttcggctcgcgcacggtgcgcgcacccactgacctgcg

SEQ ID NO: 61018 - DNA, 120 bp, synthetic construct; identical to SEQ ID NO: 24970
  source 1..120: mol_type = other DNA

SEQ ID NO: 61019 - DNA, 120 bp, synthetic construct; identical to SEQ ID NO: 24971
  source 1..120: mol_type = other DNA

SEQ ID NO: 61020 - DNA, 120 bp, synthetic construct
  source 1..120: mol_type = other DNA
ggtctcaatgatccacctgcctcagcctcccaaaatactgggactacagttgtgagccatagtgcctggcctttcacttttttttttttttttttttttgagacggagtctcactctgtc

SEQ ID NO: 61021 - DNA, 120 bp, synthetic construct; identical to SEQ ID NO: 24972
  source 1..120: mol_type = other DNA

SEQ ID NO: 61022 - DNA, 120 bp, synthetic construct
  source 1..120: mol_type = other DNA
gagcattttttcatgtgtcttttggctgcataaatgtctcctcttgagaaatatctgttcatatccttcatgatttataatcctttgggtatatatccattactgggtatatacccaaag

SEQ ID NO: 61023 - DNA, 120 bp, synthetic construct; identical to SEQ ID NO: 24973
  source 1..120: mol_type = other DNA

SEQ ID NO: 61024 - DNA, 120 bp, synthetic construct; identical to SEQ ID NO: 35377
  source 1..120: mol_type = other DNA

SEQ ID NO: 61025 - DNA, 120 bp, synthetic construct; identical to SEQ ID NO: 35378
  source 1..120: mol_type = other DNA

SEQ ID NO: 61026 - DNA, 120 bp, synthetic construct
  source 1..120: mol_type = other DNA
acacacacacacacacacacacacacacacacacacacaaacccagaaaaccaagagttatacaggggaaaatgagaaaacaccttgattttatcatcaaaattaacgtccaatgagggg

SEQ ID NO: 61027 - DNA, 120 bp, synthetic construct
  source 1..120: mol_type = other DNA
tttgtcgcagctggtcttgcctttgctggggctgctgacacacttgcaggcgttggatttctcgcgctcgcgggcttgcctcttctgacggatgagcgagctggcgatagccgccgccat

SEQ ID NO: 61028 - DNA, 120 bp, synthetic construct
  source 1..120: mol_type = other DNA
aaaggagcttcgggaggaaacagtgatggaggaggaactgagatgaggtagttgggctgacggagcgggggtttgctcggcattgggggatggagtggtgggggtgtttcctcagtgttt

SEQ ID NO: 61029 - DNA, 120 bp, synthetic construct; identical to SEQ ID NO: 13897
  source 1..120: mol_type = other DNA

SEQ ID NO: 61030 - DNA, 120 bp, synthetic construct
  source 1..120: mol_type = other DNA
atatatatatttttttttttttttttttttttttttttacggagttttgctgttgtcaccaaggttggagtgcaatggcgctatctcagcccactgcaacctctgcctcccagcctggtt

SEQ ID NO: 61031 - DNA, 120 bp, synthetic construct
  source 1..120: mol_type = other DNA
tcattctaacctaggaggtggaggttgcagtgagctgagatcgtgccactacactccagcctgggaaacagggcgagactctgtctctaaaggcaatatatatatatatatatatatata

SEQ ID NO: 61032 - DNA, 120 bp, synthetic construct
  source 1..120: mol_type = other DNA
gactgggatctacacggcttctcctcgtctctggggaacgtgcccttagctgactccccaggtttcctgaacgagcgcctgggccaaatcgaggggaagctgcagcgtggctcacccaca

SEQ ID NO: 61033 - DNA, 120 bp, synthetic construct
  source 1..120: mol_type = other DNA
cccaaagcaggaaacgttcaacctccatccaggattgtctgtttgcctgccactatacaaactgttcaacacagctgcctgtctcacatatagaactaattacacaattaatataagcct

SEQ ID NO: 61034 - DNA, 120 bp, synthetic construct
  source 1..120: mol_type = other DNA
caaaggaaataagattggcaggaggaagggacattttcactgctgcttaactgactgcttcatttttggttttgcctttgaaaaagaaaacaacactggctaagagcacctctgcatcac

SEQ ID NO: 61035 - DNA, 120 bp, synthetic construct
  source 1..120: mol_type = other DNA
actagattaaatgacacattagacagtcatctagctaggttctgaagcagtggggcccagaacagatcagttttgactgagggcctggggagagaggtataagaagtgtctggaaattgt

SEQ ID NO: 61036 - DNA, 120 bp, synthetic construct
  source 1..120: mol_type = other DNA
ccatggcagagcagagtgggacaatcctccctcccttttgttagttaccagacctgtatcagtgaggccttagatcacactagctttttttctattttttccactagctttctaattttt

SEQ ID NO: 61037 - DNA, 120 bp, synthetic construct
  source 1..120: mol_type = other DNA
tgccatacctgaacagcagcccaccaacttgagtcactggggttcctcaggagacttcccagtagagttttaacctgattttaaaattagccgcttaaaattcttgatcttggaaaatca

SEQ ID NO: 61038 - DNA, 120 bp, synthetic construct
  source 1..120: mol_type = other DNA
tccaataccacctgccaactctttgctgtggataaacttaaaattctcaaaagagaatgataggcttgtcagcttggggctgtactagctgagaatgctttttaggagaaagctctcatg

SEQ ID NO: 61039 - DNA, 120 bp, synthetic construct
  source 1..120: mol_type = other DNA
tttttggtcagaggttattacaaccagtgtttggacaatgtaaagcaaaagtataaaaatatttatctggggaccaggcatggtggctcacgcctgtaatcccagcactttgggaggctg

SEQ ID NO: 61040 - DNA, 120 bp, synthetic construct
  source 1..120: mol_type = other DNA
aataggcagtggaagagctggctttcaaattgaggattctgaggttaacaacacagtccctgatttccagattgcttcagctgagtcccaaaggccaaatgaaacaaacaaatgaagaat

SEQ ID NO: 61041 - DNA, 120 bp, synthetic construct
  source 1..120: mol_type = other DNA
ggttctgctttattttctcaccctcacagaagaaactcacacgtgaatgtgttttccgggaacagtttgaagaaaactggtacaacacctatgcctcaaccttgtacaaacattcggact

SEQ ID NO: 61042 - DNA, 120 bp, synthetic construct; identical to SEQ ID NO: 25777
  source 1..120: mol_type = other DNA

SEQ ID NO: 61043 - DNA, 120 bp, synthetic construct; identical to SEQ ID NO: 25778
  source 1..120: mol_type = other DNA

SEQ ID NO: 61044 - DNA, 120 bp, synthetic construct; identical to SEQ ID NO: 19326
  source 1..120: mol_type = other DNA

SEQ ID NO: 61045 - DNA, 120 bp, synthetic construct; identical to SEQ ID NO: 19327
  source 1..120: mol_type = other DNA

SEQ ID NO: 61046 - DNA, 120 bp, synthetic construct; identical to SEQ ID NO: 12612
  source 1..120: mol_type = other DNA

SEQ ID NO: 61047 - DNA, 120 bp, synthetic construct; identical to SEQ ID NO: 12042
  source 1..120: mol_type = other DNA

SEQ ID NO: 61048 - DNA, 120 bp, synthetic construct; identical to SEQ ID NO: 11236
  source 1..120: mol_type = other DNA

SEQ ID NO: 61049 - DNA, 120 bp, synthetic construct; identical to SEQ ID NO: 11237
  source 1..120: mol_type = other DNA

SEQ ID NO: 61050 - DNA, 120 bp, synthetic construct; identical to SEQ ID NO: 11234
  source 1..120: mol_type = other DNA

SEQ ID NO: 61051 - DNA, 120 bp, synthetic construct; identical to SEQ ID NO: 11235
  source 1..120: mol_type = other DNA

SEQ ID NO: 61052 - DNA, 120 bp, synthetic construct
  source 1..120: mol_type = other DNA
tcagggtgtgtcccggccagaaggacaacactaacaacaactcctcgtcctcctcctcctcttcctcttcctcctcctcctcttcctcctcctcctcttcctcctcctcttcctcctcct

SEQ ID NO: 61053 - DNA, 120 bp, synthetic construct
  source 1..120: mol_type = other DNA
gagacgtcacagggccactgttaactgtgtattggaggaacacgcggccccaggccccatcgagatggcctggagcagctgctacctcttggtgttctgcacgcagcctggacgctccca

SEQ ID NO: 61054 - DNA, 120 bp, synthetic construct
  source 1..120: mol_type = other DNA
gggacccaggcagggaatgggggtggggtggggacccaggcagggaatggggtggggacccaggcaggggaaggggtgaggtggggacccagacagggggtggggtgggatggggaccca

SEQ ID NO: 61055 - DNA, 120 bp, synthetic construct
  source 1..120: mol_type = other DNA
acttccccaacctagctaggcagaccaacattcagattcaggaaatacagagaatgccacaaagatactcctcgagaagagcaactccaagacacataattgtcagattcaccaaagttg

SEQ ID NO: 61056 - DNA, 120 bp, synthetic construct; identical to SEQ ID NO: 7656
  source 1..120: mol_type = other DNA

SEQ ID NO: 61057 - DNA, 120 bp, synthetic construct
  source 1..120: mol_type = other DNA
gtagattctggatattagccctttgtcagatgagtaggttgcgaaaattttcacccattttgtaggttgcctgttcagtctgatggtagtttcttttgctgtgcagaagctctttagttt

SEQ ID NO: 61058 - DNA, 120 bp, synthetic construct
  source 1..120: mol_type = other DNA
taccctttatttccttctcttgcctaattgccctggccagaacttccaacactgtgttgaataggagtggtgagagagggcatccctgtcttgtgccagttttcaaagggaatgcttcca

SEQ ID NO: 61059 - DNA, 120 bp, synthetic construct
  source 1..120: mol_type = other DNA
ctatttccttcagttctgctctgatcttagttatttcttgccttctgctagctgttgaatgtgtttgctcttgcttctctagttcttttaattgtgatgttagggtgtcaattttggatc

SEQ ID NO: 61060 - DNA, 120 bp, synthetic construct
  source 1..120: mol_type = other DNA
ctgatggttcttgactctttatccaatttgccagtctgtgtctttcaattggagaatttagtccatttacatttaaacttaatattgttatgtgtgaatttgatcctgtcattatgatgt

SEQ ID NO: 61061 - DNA, 120 bp, synthetic construct
  source 1..120: mol_type = other DNA
tgaggcttctgcattcttcacgtagttctcgagccttggttttcagctccatcggctcctttaagcacttctctgtattggttattctagttatacattcttctaaatttttttcaaagt

SEQ ID NO: 61062 - DNA, 120 bp, synthetic construct
  source 1..120: mol_type = other DNA
tgcctcgccctgcttcggcttgcgcatggtgcttgcacccactggcctgcgcccactgtctgggactccctagtgagatgaacccggtacctcagatggaaatgcggaaatcacccgtct

SEQ ID NO: 61063 - DNA, 120 bp, synthetic construct; identical to SEQ ID NO: 7651
  source 1..120: mol_type = other DNA

SEQ ID NO: 61064 - DNA, 120 bp, synthetic construct
  source 1..120: mol_type = other DNA
aaggacttcatgtctaaaacaccaaaagcaatggcaacaaaagccaaaattgacaaatgggatctcattaaactaaagagcttctgcacagcaaaagaaactaccatcagactgaacagg

SEQ ID NO: 61065 - DNA, 120 bp, synthetic construct
  source 1..120: mol_type = other DNA
gaaccaaactgaaaaacactctgcaggatattatccaggagaacttccccaatctagcaaggcaggccaacattcagattcaggaaatacagagaacgccacaaagatactcctcgagaa

SEQ ID NO: 61066 - DNA, 120 bp, synthetic construct
  source 1..120: mol_type = other DNA
aaacagactttaaaccaacaaagatcaaaagagacaaagaaggccattacataatggtaaagggatcaattcaacaggaagagctaactctcctaaatatatatgcacccaatacaggaa

SEQ ID NO: 61067 - DNA, 120 bp, synthetic construct
  source 1..120: mol_type = other DNA
aaactgaatccagcaccacatcaaaaagcttatccaccatgatcaagtggccgtcatccctgggatgtaaggctggtccaatatacgcaaatcaataaatgtaatccagcatataaacag

SEQ ID NO: 61068 - DNA, 120 bp, synthetic construct
  source 1..120: mol_type = other DNA
ttggaaaaaactactttaaagttcatatggaaccaaaaaagagcccgcatccccaagtcaatcctaagccaaaagaacaaagctggaggcatcacgctacctgacttcaaactatactac

SEQ ID NO: 61069 - DNA, 120 bp, synthetic construct
  source 1..120: mol_type = other DNA
gacttggaaccaacccaaatgtccaacaatgatagactggattaagaaaatgtggcacatatacaccatggaatactatgcagccataaaaatgttgagttcacatcatgtcctttgtag

SEQ ID NO: 61070 - DNA, 120 bp, synthetic construct; identical to SEQ ID NO: 7652
  source 1..120: mol_type = other DNA

SEQ ID NO: 61071 - DNA, 120 bp, synthetic construct; identical to SEQ ID NO: 7653
  source 1..120: mol_type = other DNA

SEQ ID NO: 61072 - DNA, 120 bp, synthetic construct; identical to SEQ ID NO: 7654
  source 1..120: mol_type = other DNA

SEQ ID NO: 61073 - DNA, 120 bp, synthetic construct
  source 1..120: mol_type = other DNA
gcttcagacgatcaaattactccgagctacgggaggacattcaaaccaaaggcaaagaagttgaaaactttgaaaaacatttagaagaatgtataattagaataaccaatacagagaagt

SEQ ID NO: 61074 - DNA, 120 bp, synthetic construct
  source 1..120: mol_type = other DNA
aatatatgtgcacccaatacaggagcacccagattcataaagcaagtcctgagtgacctacaaagagacttagactcccacacattaataatgggagactttaacacctcactgtcaaca

SEQ ID NO: 61075 - DNA, 120 bp, synthetic construct
  source 1..120: mol_type = other DNA
cctctctgcaaataaactagaaaatctagaagaaatggataaattcctcgacacatacactttcccaagactaaaccaggaagaagttgaatctctgaatagaccaataacaggctctga

SEQ ID NO: 61076 - DNA, 120 bp, synthetic construct
  source 1..120: mol_type = other DNA
tcagcaaagtctcaggatacaaaatcaatgtgcaaaaatcacaagcattcttatacaccaataacagacaaacagagatccaaatcatgagtgaactcccattcacaattgcttcaaaga

SEQ ID NO: 61077 - DNA, 120 bp, synthetic construct
  source 1..120: mol_type = other DNA
gaatctacaatgaactcaaacaaatttacgagaaaaaaacaaccccatgaaaaagtgggcgagggacataaacagacacttctcaaaagaagacatttatgcagccaaaacacacatgaa

SEQ ID NO: 61078 - DNA, 120 bp, synthetic construct; identical to SEQ ID NO: 7655
  source 1..120: mol_type = other DNA

SEQ ID NO: 61079 - DNA, 120 bp, synthetic construct
  source 1..120: mol_type = other DNA
tcaaactatactacaaggctacagtaaccaaaagagcatggtactggtaacaaaacagagatatagaccaatgtaacaggacagagccctcagaaataacaccgcatatctataactacc

SEQ ID NO: 61080 - DNA, 120 bp, synthetic construct
  source 1..120: mol_type = other DNA
tcatgtcctttgtggggacatggatgaaattggaaatcattattctcagtaaactatagcaagaacaaaagaccaaacaccgcatattctcactcataggtgggaattgaacaatgagaa

SEQ ID NO: 61081 - DNA, 120 bp, synthetic construct
  source 1..120: mol_type = other DNA
tatgtgttttctaaacagtaatgtggtttatagaagttaattgtactgttggcatgtaaatctccataataaatgaggtttttgaatggctgtctggtataaatacttttaaatatgtat

SEQ ID NO: 61082 - DNA, 120 bp, synthetic construct
  source 1..120: mol_type = other DNA
gcactccagcctgggtgacagagtgagactccatctcaaaaaacaaacaaacaaacaacaacaacaaaaaacacctagagcttaaaaaagaaattttctcattccaatgtttgattctgg

SEQ ID NO: 61083 - DNA, 120 bp, synthetic construct; identical to SEQ ID NO: 7409
  source 1..120: mol_type = other DNA

SEQ ID NO: 61084 - DNA, 120 bp, synthetic construct
  source 1..120: mol_type = other DNA
tacattttcttttctttttttaattttattattattatacttttaagttttagggtacatgtgcacaatgtgcaggttagttacatatgtatacatgtgccatgctggtgtgctgcaccc

SEQ ID NO: 61085 - DNA, 120 bp, synthetic construct
  source 1..120: mol_type = other DNA
tcagatgagtaggttgtgaaaattttctcccattttgtaggttgcctgttcactctatatttattatagaatataaatattccataataaatatatccatgggatcagctgtgatggcct

SEQ ID NO: 61086 - DNA, 120 bp, synthetic construct; identical to SEQ ID NO: 7183
  source 1..120: mol_type = other DNA

SEQ ID NO: 61087 - DNA, 120 bp, synthetic construct; identical to SEQ ID NO: 7184
  source 1..120: mol_type = other DNA

SEQ ID NO: 61088 - DNA, 120 bp, synthetic construct; identical to SEQ ID NO: 7185
  source 1..120: mol_type = other DNA

SEQ ID NO: 61089 - DNA, 120 bp, synthetic construct
  source 1..120: mol_type = other DNA
actcagggttaaatggattaagggctgtgcaagatgtgctttgttaaacagatgcttgaaggcagcatgctccttaagagtcatcaccactccctaatctcaagtacccagggacacaaa

SEQ ID NO: 61090 - DNA, 120 bp, synthetic construct; identical to SEQ ID NO: 25876
  source 1..120: mol_type = other DNA

SEQ ID NO: 61091 - DNA, 120 bp, synthetic construct
  source 1..120: mol_type = other DNA
aaggatatgaactcatcattttttatggctgcatagtattccatggtgtatatgtgccacattttcttaatccagtctatcattgttggacatttgggttggttccaagtctttgctatt

SEQ ID NO: 61092 - DNA, 120 bp, synthetic construct
  source 1..120: mol_type = other DNA
aaagaccaaaagtagataaaaccacaaagatggggaaaaaacagagcggaaaaaacagagcagaaaaagtggaaactctaaaaagcagagcgccgctcctcctccaaaggaacacagctc

SEQ ID NO: 61093 - DNA, 120 bp, synthetic construct
  source 1..120: mol_type = other DNA
aggcttgccctaaaagagctcctgaaggaagcactaaacatgtaaaggaacaatcagtaccagccactgcaaaatcatgccaaattgtaaagaccatcgaggctaggaagaaactgcatc

SEQ ID NO: 61094 - DNA, 120 bp, synthetic construct
  source 1..120: mol_type = other DNA
caatgagaacaaagacacagcataccagaatctctgggacacattcaaagcagtgtgtagagggaaatttatagcactaaatgcccacaagagaaagcaggaaagatccaaaattgacac

SEQ ID NO: 61095 - DNA, 120 bp, synthetic construct
  source 1..120: mol_type = other DNA
atgcaaatcaataaatgtaatccaacatataaacagaaccaaagacaaaaaccacatgattatctcaatagatgcagaaaaggcctttgacaaaattcaacaaccttcatgctaaaaact

SEQ ID NO: 61096 - DNA, 120 bp, synthetic construct
  source 1..120: mol_type = other DNA
ctacaactgtttgatctttgacaaacctgacaaaaacaagcaatggggaaaggattccctatttaataaatggtgctgggaaaactggctagccatatgtagaaagctgaaactggatcc

SEQ ID NO: 61097 - DNA, 120 bp, synthetic construct
  source 1..120: mol_type = other DNA
cataggcgggaattgaacaatgagaacacatggacacaggaaggggaacatcacatctggggactgttgtggggttgggggaggggggaggcatagctttaggagatatacctaatgcta

SEQ ID NO: 61098 - DNA, 120 bp, synthetic construct
  source 1..120: mol_type = other DNA
ttcttgggtgtttctcgcagagggggatttggcagggtcacaggacaatattggagggaaggtcagcagttaaacaagtgaacaaaggtctctggttttcctaggcagaggaccctgcgg

SEQ ID NO: 61099 - DNA, 120 bp, synthetic construct
  source 1..120: mol_type = other DNA
gatggggcggctgccgggcggaggggctcttcacttctcagacggggcggttgccgggcagagggtctcctcacctctcagatggggcggccgggcagagacgctcctcacatcccggac

SEQ ID NO: 61100 - DNA, 120 bp, synthetic construct; identical to SEQ ID NO: 11175
  source 1..120: mol_type = other DNA

SEQ ID NO: 61101 - DNA, 120 bp, synthetic construct; identical to SEQ ID NO: 11176
  source 1..120: mol_type = other DNA

SEQ ID NO: 61102 - DNA, 120 bp, synthetic construct
  source 1..120: mol_type = other DNA
ggaggcggaggttccagtgagccgagattgtgccattgcactccagcctggtgaagaagtgggactacatctcaaaaaaacaaaaagatacatatatatgatatatctgatatatgatat

SEQ ID NO: 61103 - DNA, 120 bp, synthetic construct
  source 1..120: mol_type = other DNA
agagctcctgaaggaagcactaaacatggaaaggaacaactggtaccagccactgcagaaatataccaaattgtaaagcccatcgaggctaggaagaaactgcatcaactaatgagcaaa

SEQ ID NO: 61104 - DNA, 120 bp, synthetic construct
  source 1..120: mol_type = other DNA
ttagacagatcaacgagacagaaagttaacaaggatatccaggaattgaactcagctctgcaccaagtggacctaacagacatctacagaactctccaccccaaatcaacagaatataca

SEQ ID NO: 61105 - DNA, 120 bp, synthetic construct
  source 1..120: mol_type = other DNA
agaagaatcaaatagatgcagtaaaaaatgataaaggggatatcaccaccgatcccacggaaatacaaactaccatcagagaatactataaacacctctatgcaaataaactagaaaatc

SEQ ID NO: 61106 - DNA, 120 bp, synthetic construct; identical to SEQ ID NO: 24371
  source 1..120: mol_type = other DNA

SEQ ID NO: 61107 - DNA, 120 bp, synthetic construct
  source 1..120: mol_type = other DNA
tttatttgagttcattgtagattcgggatattagccctttgtcagatgagtagattgcaaaaattttctcccattctgtaggttgcctgttcactctgatggtagtttcttttgctgtgc

SEQ ID NO: 61108 - DNA, 120 bp, synthetic construct
  source 1..120: mol_type = other DNA
ttgtgatttttgcacattgattttgtatcctgagactttcctgaagttgcttatcagcttaaggagattttgggctgagacgatggggttttctagatatacaatcatgtcatctgcaaa

SEQ ID NO: 61109 - DNA, 120 bp, synthetic construct
  source 1..120: mol_type = other DNA
catattcaacattcttaaaggaaagaattttcaacccagcatttcatatccagccaaactaagcttcataagtgaaggagaaataaaatcctttacagacaagcaaatgctgagagattt

SEQ ID NO: 61110 - DNA, 120 bp, synthetic construct
  source 1..120: mol_type = other DNA
cccagagattctggtatgttgtgtctttgttctcgttggtttcaaagaacatctttatttctgccttcatttcgttatgtacccagtagtcattcaggagcaggttgttcagtttccatg

SEQ ID NO: 61111 - DNA, 120 bp, synthetic construct; identical to SEQ ID NO: 24366
  source 1..120: mol_type = other DNA

SEQ ID NO: 61112 - DNA, 120 bp, synthetic construct; identical to SEQ ID NO: 24367
  source 1..120: mol_type = other DNA

SEQ ID NO: 61113 - DNA, 120 bp, synthetic construct
  source 1..120: mol_type = other DNA
cttgtgcccttacttctcaaacagttattccctttgctatatcacccagaagtctgtgattggatctcccttggactccaaagggctctgggtatgagaaagtagtccaaaatatatata

SEQ ID NO: 61114 - DNA, 120 bp, synthetic construct; identical to SEQ ID NO: 24368
  source 1..120: mol_type = other DNA

SEQ ID NO: 61115 - DNA, 120 bp, synthetic construct
  source 1..120: mol_type = other DNA
ttgtaaatttgtttgagttcattgcagattctggatattagccctttgtcagatgaatagattgcaaaaattttctcccattttgtaggttgcctgttcactctgatggtagtttctttt

SEQ ID NO: 61116 - DNA, 120 bp, synthetic construct; identical to SEQ ID NO: 24369
  source 1..120: mol_type = other DNA

SEQ ID NO: 61117 - DNA, 120 bp, synthetic construct
  source 1..120: mol_type = other DNA
aggtagcttcaggatggggttgatcacaagaaggaccaagcacacttatacaccaataacagacaacagagagcaaactcatgagtgaactcccattcacaattgcttcaaagagaataa

SEQ ID NO: 61118 - DNA, 120 bp, synthetic construct
  source 1..120: mol_type = other DNA
cctaagtgtcaaaggaaaggggaatctcacgtttgatctgcgagttgaatgataagaagtccactgtatgtgactatatggggataaaatgttccagatggaggaaacagcaattgccaa

SEQ ID NO: 61119 - DNA, 120 bp, synthetic construct
  source 1..120: mol_type = other DNA
agcagtcatttcacattttcctctagcccacagcccctggcaactactattctactttctgtctctgtggatttgccttttctggacattctatagaaatggagtcatacgatatatagc

SEQ ID NO: 61120 - DNA, 120 bp, synthetic construct
  source 1..120: mol_type = other DNA
ctttacttccaactaagtggtcaattttggaatcagtgcggtgcggtgctgagaagaatgtatattctgttgatttggggttgagagttctgtagatgatcaagtgggtttcatccctgg

SEQ ID NO: 61121 - DNA, 120 bp, synthetic construct
  source 1..120: mol_type = other DNA
tcttcacagaattggaaaaaactactttaaagttcttatggaaccaaaaaagagcccacactgccaagtcaatcctaagccaaaagaacaaagctggaggcatcacgctacctgacttcg

SEQ ID NO: 61122 - DNA, 120 bp, synthetic construct
  source 1..120: mol_type = other DNA
cagaaatactacaagccagaagagactgggggccaatattcaacattcttaaagaaaagaattttcaacccagaatttcatatccagccaaacaaactaagcttcataagtgaaggagaa

SEQ ID NO: 61123 - DNA, 120 bp, synthetic construct
  source 1..120: mol_type = other DNA
caggattaagaaactcactcaaaaccgctcaactacatggaaactgaacaacctgttcctgaatgactactgggtacataatgaaatgaaggcagaaataaagatgttctttgaaaccaa

SEQ ID NO: 61124 - DNA, 120 bp, synthetic construct
  source 1..120: mol_type = other DNA
gcagcacaacaaaaagcttatccaccatgagcaggtgggcttcatccctgggatgcaaggctggttcaatatacgcaaatcaataaatgtaatccagcatataaacagaaccaaagacaa

SEQ ID NO: 61125 - DNA, 120 bp, synthetic construct
  source 1..120: mol_type = other DNA
gaaataatgccgcatatctacaactatctgatctttgacaaacctgacaaaaacaagcaatggggaaaggattccctatttaataaatggtgctgggaaaactggctagccataggtaga

SEQ ID NO: 61126 - DNA, 120 bp, synthetic construct
  source 1..120: mol_type = other DNA
tcacctgaggtcaggagttcgagaccaacattgcaaaaccctgtctttactaaaaatacaaacaaattagccaggtgtggtggtgcatgcctgtaatcccagctactcgggaggctgagg

SEQ ID NO: 61127 - DNA, 120 bp, synthetic construct; identical to SEQ ID NO: 4043
  source 1..120: mol_type = other DNA

SEQ ID NO: 61128 - DNA, 120 bp, synthetic construct
  source 1..120: mol_type = other DNA
ctcctggctcaagtgatctgactgccttgacctcccaaaatgctgggattatagatatgagatgtgagctatgtacccaacccacttatctgatcttgatgtattggatggctaaaataa

SEQ ID NO: 61129 - DNA, 120 bp, synthetic construct
  source 1..120: mol_type = other DNA
cagtgagccaagatggcgccattgcactcaagcctgggcgaagaagcaagactctgtctcaaaatatatatatatatgtattatatattttatatatattataaatatataatcatatat

SEQ ID NO: 61130 - DNA, 120 bp, synthetic construct; identical to SEQ ID NO: 18960
  source 1..120: mol_type = other DNA

SEQ ID NO: 61131 - DNA, 120 bp, synthetic construct
  source 1..120: mol_type = other DNA
tcctctttgtacctctggtagaatttggctgtgaatctatctggtactgggctttttttggtttgtagcctattaactattgcctcagtttcataacttgttattggtttattcagggat

SEQ ID NO: 61132 - DNA, 120 bp, synthetic construct
  source 1..120: mol_type = other DNA
agtgtaaaagtgttcctatttctccacatcctctccagtacctgttgtttcctgacattttaatgatcgccattctaactggtgtgagatggtatctcattgtggttttgatttgcgttt

SEQ ID NO: 61133 - DNA, 120 bp, synthetic construct
  source 1..120: mol_type = other DNA
ttggtagcttgatggggatggcattgaatctataaattaccttgggcaatagggccattttcacaatattgattgttcctacccgtgagcatggaatgttcttccatttgtttgtatcct

SEQ ID NO: 61134 - DNA, 120 bp, synthetic construct
  source 1..120: mol_type = other DNA
tttgctgtgaatccatctggtcctggactctttttagttggtaagctattgattattgccacaatttcagatcctgttattggtctattcagagattcaacttcttcctggtttagtctt

SEQ ID NO: 61135 - DNA, 120 bp, synthetic construct
  source 1..120: mol_type = other DNA
tcccattattattgtgtgggagtcaaagtctctttgtaggtcactcaggacttgcttaatgaatcttggtgctcctgtattgggtgcatatatatttaggatagttagctcttcttgttg

SEQ ID NO: 61136 - DNA, 120 bp, synthetic construct
  source 1..120: mol_type = other DNA
tgaatgttggcctgccttgctagattggggaagttctcctggataatatcctgcagagtgttttccaacttggttccattctccccgtcactttcaggtacaccaatcagagcagatttg

SEQ ID NO: 61137 - DNA, 120 bp, synthetic construct; identical to SEQ ID NO: 28206
  source 1..120: mol_type = other DNA

SEQ ID NO: 61138 - DNA, 120 bp, synthetic construct; identical to SEQ ID NO: 21746
  source 1..120: mol_type = other DNA

SEQ ID NO: 61139 - DNA, 120 bp, synthetic construct; identical to SEQ ID NO: 28089
  source 1..120: mol_type = other DNA

SEQ ID NO: 61140 - DNA, 120 bp, synthetic construct
  source 1..120: mol_type = other DNA
ttgcagtgagccgagatcgtgccgttgcactccagcctgggcaacaaggagcgacgtctcaaaaaaaaaaaaaaaaaggtatgaccgaagagtaaaacttccttttttttttttttattg

SEQ ID NO: 61141 - DNA, 120 bp, synthetic construct
  source 1..120: mol_type = other DNA
agccaggcagaggggctcctcacgtcccagacgatggatggccaggcagagacgctcctcacttcccagacggggtggcggcctggcagaggctgcactctcggcactttgggaggccaa

SEQ ID NO: 61142 - DNA, 120 bp, synthetic construct
  source 1..120: mol_type = other DNA
tgggaatagataacatgtatgtatgagaaaacgttgactacaacgttttcttaaaatattttttattcatttgtgcacatatgcatagattttccccccggcccccccccccccccccgc

SEQ ID NO: 61143 - DNA, 120 bp, synthetic construct; identical to SEQ ID NO: 25448
  source 1..120: mol_type = other DNA

SEQ ID NO: 61144 - DNA, 120 bp, synthetic construct
  source 1..120: mol_type = other DNA
tcattgttggacatttgggttggttccaagtctttgctattgtgaataatgctgcaatagacatacgtgtgcatgtgtctttatagcagcatgatttagagtcctttgcgtatataccca

SEQ ID NO: 61145 - DNA, 120 bp, synthetic construct
  source 1..120: mol_type = other DNA
aatctataaattaccttgggcagtatggccattttcacgatattgattcttcctacccatgagcatggaatgttcttccatttgtttgtgtcctcttttatttccttgagcagtggtttg

SEQ ID NO: 61146 - DNA, 120 bp, synthetic construct
  source 1..120: mol_type = other DNA
ttactgaggatttttgcgtcaatgttcatcagggatattggtctaaaattctcttttttggttgtttctctacccggctttggtatcaggatgatgctggcctcacaaaatgagttaggg

SEQ ID NO: 61147 - DNA, 120 bp, synthetic construct; identical to SEQ ID NO: 32936
  source 1..120: mol_type = other DNA

SEQ ID NO: 61148 - DNA, 120 bp, synthetic construct; identical to SEQ ID NO: 32937
  source 1..120: mol_type = other DNA

SEQ ID NO: 61149 - DNA, 120 bp, synthetic construct
  source 1..120: mol_type = other DNA
aacaaagtgaaaccctatctttacaaaaaattttaaaaaattagcccagtgtggtagtgtgcttgtcctagctactcaggaggctgaggtgggaggatcacttgatccagagaagtcaag

SEQ ID NO: 61150 - DNA, 120 bp, synthetic construct; identical to SEQ ID NO: 27716
  source 1..120: mol_type = other DNA

SEQ ID NO: 61151 - DNA, 120 bp, synthetic construct
  source 1..120: mol_type = other DNA
attgaatcttttaccagggcctcccacctccagcctcttctccaaaggggagaccctccccaaaagcaccaactgtaatcacccagaaaccccaagcgttttttccttccacactctgaa

SEQ ID NO: 61152 - DNA, 120 bp, synthetic construct; identical to SEQ ID NO: 29026
  source 1..120: mol_type = other DNA

SEQ ID NO: 61153 - DNA, 120 bp, synthetic construct; identical to SEQ ID NO: 29027
  source 1..120: mol_type = other DNA

SEQ ID NO: 61154 - DNA, 120 bp, synthetic construct
  source 1..120: mol_type = other DNA
tgccacataagtcatctgcttagcttttcctttcctttttttttttttttttttttctggaggcagagtctccctttgtcgccaggctggagtgcagtggtgccatctcggctcactgca

SEQ ID NO: 61155 - DNA, 120 bp, synthetic construct; identical to SEQ ID NO: 29028
  source 1..120: mol_type = other DNA

SEQ ID NO: 61156 - DNA, 120 bp, synthetic construct
  source 1..120: mol_type = other DNA
gagtcgagattgcaccactgcactacagcctgggcaacgagagctaaactccttctcaaaaactaactaactaaataaaagaatcatgaactcaataacaggggtcaacttcattttgta

SEQ ID NO: 61157 - DNA, 120 bp, synthetic construct
  source 1..120: mol_type = other DNA
catgttgcccaggctggtctcgaactcctgagctcaagtgatccacccgcctgggcctcccaacgtgctgggattaccgcttgagccaccatgcccagcctgtcatttgtccttttaaaa

SEQ ID NO: 61158 - DNA, 120 bp, synthetic construct; identical to SEQ ID NO: 29007
  source 1..120: mol_type = other DNA

SEQ ID NO: 61159 - DNA, 120 bp, synthetic construct; identical to SEQ ID NO: 29008
  source 1..120: mol_type = other DNA

SEQ ID NO: 61160 - DNA, 120 bp, synthetic construct
  source 1..120: mol_type = other DNA
agagtcttttgttctgttgcccagggtcgagtgcagtggcatgatcacagcttactgcagccttgacctcctgagctcaagtgatcctctcacttcaacctcccgagtacctgggactac

SEQ ID NO: 61161 - DNA, 120 bp, synthetic construct; identical to SEQ ID NO: 1514
  source 1..120: mol_type = other DNA

SEQ ID NO: 61162 - DNA, 120 bp, synthetic construct
  source 1..120: mol_type = other DNA
cagtgagccgagattgcaccactgcactctagcctgggcgacagagtgagactctatctcaaaaaaagaaaaaaattccgtatgaattttagtttagtttttttttttctatttctgcaa

SEQ ID NO: 61163 - DNA, 120 bp, synthetic construct
  source 1..120: mol_type = other DNA
gtgttgaaaccaagcatcttttccttgttcccaatcacaggggaacacctttcagtttttcaccattgattatgatctcagctgtgcacaaccccattattaaactttcctggaacagct

SEQ ID NO: 61164 - DNA, 120 bp, synthetic construct; identical to SEQ ID NO: 29012
  source 1..120: mol_type = other DNA

SEQ ID NO: 61165 - DNA, 120 bp, synthetic construct
  source 1..120: mol_type = other DNA
catagctcactgcagcctcaaactcttgggctcaagcgatcctcctacctcagcttccaaagtagctgggactataggcatgcaccaccacacctggctaattatatgtatttatttatt

SEQ ID NO: 61166 - DNA, 120 bp, synthetic construct; identical to SEQ ID NO: 29013
  source 1..120: mol_type = other DNA

SEQ ID NO: 61167 - DNA, 120 bp, synthetic construct; identical to SEQ ID NO: 29014
  source 1..120: mol_type = other DNA

SEQ ID NO: 61168 - DNA, 120 bp, synthetic construct
  source 1..120: mol_type = other DNA
tgagccaagattgagctattacactccagcctgggcaacagagcgagactccgtctcaagaaaaaaaaaaagaaaagaaaaatttaaaccccatggttacttttaaggctttcatttttc

SEQ ID NO: 61169 - DNA, 120 bp, synthetic construct; identical to SEQ ID NO: 1516
  source 1..120: mol_type = other DNA

SEQ ID NO: 61170 - DNA, 120 bp, synthetic construct; identical to SEQ ID NO: 1517
  source 1..120: mol_type = other DNA

SEQ ID NO: 61171 - DNA, 120 bp, synthetic construct
  source 1..120: mol_type = other DNA
ccctaccccttagagttaaccatctttattggtttctatttttaatttttccaatgtctggatttttttttttttttgaggcagagtctcactctgtcacccaggctgcagtgcagtggc

SEQ ID NO: 61172 - DNA, 120 bp, synthetic construct
  source 1..120: mol_type = other DNA
cagcacactgcaacctccgtctcgtgggttcaagcgattctcgtgtctcagcctccttagtagctaggattacaggcatgagccaccactcccagctaattttgtatttttagtagagat

SEQ ID NO: 61173 - DNA, 120 bp, synthetic construct
  source 1..120: mol_type = other DNA
tgtggctcaagcctgtaattccacactttcggaggccagggcaggcagatcgcttgagcccaggagttcgagaccaacctgggcaacgtggtgaaaccccatctttactaaaaatacaaa

SEQ ID NO: 61174 - DNA, 120 bp, synthetic construct; identical to SEQ ID NO: 29018
  source 1..120: mol_type = other DNA

SEQ ID NO: 61175 - DNA, 120 bp, synthetic construct; identical to SEQ ID NO: 29019
  source 1..120: mol_type = other DNA

SEQ ID NO: 61176 - DNA, 120 bp, synthetic construct; identical to SEQ ID NO: 29020
  source 1..120: mol_type = other DNA

SEQ ID NO: 61177 - DNA, 120 bp, synthetic construct
  source 1..120: mol_type = other DNA
gtgaataatgcttaatgcttctgtgaatatgagtgtacaaatatctgttcgcatctccagcttcaattcttttgtatatatacccaagaaagatatttttatttaatgttttcttgaaat

SEQ ID NO: 61178 - DNA, 120 bp, synthetic construct
  source 1..120: mol_type = other DNA
tctttctttcttttttgaggacggagtctcactctgttgcccaggctagagtacagtggtgcaatcctaactcactgtagccttgacctcctggcctcaagcaatcctcctgcctcaacc

SEQ ID NO: 61179 - DNA, 120 bp, synthetic construct
  source 1..120: mol_type = other DNA
ctgtaaaatgaggatgaggttacatctaacagccctttcagcgtcagtcttggagtcctcctagggttctgtatctgggtgcccgttttcctcacttggagggccttgaggacatacctg

SEQ ID NO: 61180 - DNA, 120 bp, synthetic construct
  source 1..120: mol_type = other DNA
agcctccctagtagctgggactacaggcacccgccaccgcgcctggctaattttttgtatttttagtagagacggggtttcaccttgttagccaggatggtctcgatctcctgacctcat

SEQ ID NO: 61181 - DNA, 120 bp, synthetic construct
  source 1..120: mol_type = other DNA
tgagcaacagagtgagactctgtctccaaaaagaaagaaaaagaaaagaccctatggatatactcttcagagctctccctctcggtatgggatcctgtatgctaatgcatttaatgtatt

SEQ ID NO: 61182 - DNA, 120 bp, synthetic construct
  source 1..120: mol_type = other DNA
atggaaagcttggccagcacctgcctatctggtcccagctagagccccgtgtgggctgggccccattcatcaggactaaggcagcagctgctgcctagaagggaggagaggagtgggagt

SEQ ID NO: 61183 - DNA, 120 bp, synthetic construct; identical to SEQ ID NO: 29025
  source 1..120: mol_type = other DNA

SEQ ID NO: 61184 - DNA, 120 bp, synthetic construct
  source 1..120: mol_type = other DNA
agaaacgctttaaaaattgttgtatattctggccgggtgcggtggctcatgcctgtaatcccagcactttgggatgccgaggtgggcagatcacgaggtcaggagatggagaccatcctg

SEQ ID NO: 61185 - DNA, 120 bp, synthetic construct
  source 1..120: mol_type = other DNA
tgaaaccaaggagaacaaagacacaacataccagaatctctgggacatgtttaaagcaatgtgtagagggaaatttatagcactaaatgcccacaagagaaagcaggaaagatctaaaat

SEQ ID NO: 61186 - DNA, 120 bp, synthetic construct
  source 1..120: mol_type = other DNA
taaacagaaccaacaacaaaagccacataagattatctcaatagatgcagaaaaggcctttgacaaaattcaacaactcttcatgctaaaaagtctcaataaattaggtattgatgggac

SEQ ID NO: 61187 - DNA, 120 bp, synthetic construct; identical to SEQ ID NO: 32894
  source 1..120: mol_type = other DNA

SEQ ID NO: 61188 - DNA, 120 bp, synthetic construct
  source 1..120: mol_type = other DNA
gcccactttttgatggggtggtttgtttttttcttgtaaatttgtttgagttcattgtagattctggatattagccctttgtcagatgagtaggttgcaaaaattttctcccattttgta

SEQ ID NO: 61189 - DNA, 120 bp, synthetic construct
  source 1..120: mol_type = other DNA
tatatctagaaaaccccattgtctcagcccaaaatctccttaagctgataggcaacttcagcaaagtctcaagatacaaaatcaatgtgcaaaaatcacaagcattcttatacaccaaca

SEQ ID NO: 61190 - DNA, 120 bp, synthetic construct
  source 1..120: mol_type = other DNA
aattcaggagctggttttttgaaaaggtcaacaaaattgatagaccactagcaagactaataaagaagaaaagagagaagaatgaaatagacgcaataaaaaacgataaaggggatatca

SEQ ID NO: 61191 - DNA, 120 bp, synthetic construct
  source 1..120: mol_type = other DNA
caacccctgcctttttttgttttccatttgcttggtagatcttcctccatccttttattttgagcctatgtgtgtctctgcacgtgagatgggtttcctgaatacagcatactggtgggt

SEQ ID NO: 61192 - DNA, 120 bp, synthetic construct
  source 1..120: mol_type = other DNA
ccatcactttcaggtacaccaatcagacgtagatttggtcttttcacatagtcccatatttcttggaggctttgctcatttctttttattcttttttctctaaacttcccttctcgcttc

SEQ ID NO: 61193 - DNA, 120 bp, synthetic construct
  source 1..120: mol_type = other DNA
aaagcgcaatattcgggtgggagtgacccgattttccaggtgtgtccgtcacccctttctttgactcagaaagggaactccctgacaccttgcgcttcccaggtgaggcaatgcctcgcc

SEQ ID NO: 61194 - DNA, 120 bp, synthetic construct
  source 1..120: mol_type = other DNA
gtcaagaatggctctactgctccaattctagagttaatgtaaaacttaagtttaaaaaagccaggttcgggaacaggcaacctacaaaatgggagaaaatttttgcaacctactcatctg

SEQ ID NO: 61195 - DNA, 120 bp, synthetic construct; identical to SEQ ID NO: 32895
  source 1..120: mol_type = other DNA

SEQ ID NO: 61196 - DNA, 120 bp, synthetic construct
  source 1..120: mol_type = other DNA
attcctcagggatctagaactagaaatcccatttggcccagccatcccattactgggtatatacccaaaggattataaatcatgctgctataaagacacatgcacacgtatgtttattgc

SEQ ID NO: 61197 - DNA, 120 bp, synthetic construct
  source 1..120: mol_type = other DNA
caccagcaatggaacaaagctggacagagaatgaattgacgagttgagagaagaaggcttcagatgatcagtaataacaagcttctccaagttaaaggaggatgttcgaacccatcacaa

SEQ ID NO: 61198 - DNA, 120 bp, synthetic construct
  source 1..120: mol_type = other DNA
aactaatgaacagataaccaggtaacatcatatcgagaggatcaaattcacacataacaatattaaccttaaatgtaaatgggctaaatgctccaattaaaagacacagactggcaaatt

SEQ ID NO: 61199 - DNA, 120 bp, synthetic construct
  source 1..120: mol_type = other DNA
gaagtttttaagactagagctaagcaagacatttaaaaggacatgggttgggatttgggaacacgtttattccagaggcaggaacaaaggagtcgcttgtcaaggatctggttagagaag

SEQ ID NO: 61200 - DNA, 120 bp, synthetic construct
  source 1..120: mol_type = other DNA
aaaaaagagttttacccagcctttttggaaatgactcaaggtactcagcgtagtggataagtgagctagaaggaaggtactagaagggatgaatcccctccgaatgatcaggaaagtctt

SEQ ID NO: 61201 - DNA, 120 bp, synthetic construct
  source 1..120: mol_type = other DNA
gtgatccacccacctcagcctcccaaaatgttgggattacaggcgtgagccacctcacctggccctgaccccaattttttttttttttttttttttttttgagacagagtttcacttttg

SEQ ID NO: 61202 - DNA, 120 bp, synthetic construct
  source 1..120: mol_type = other DNA
tcccaaagtgatgggattacaggcatgagcaaccttgcccagccccccacccttttttttttttttttttttttgagacaaagtctcactgtcgcctaggctagagctaattttttgtat

SEQ ID NO: 61203 - DNA, 120 bp, synthetic construct
  source 1..120: mol_type = other DNA
ggtatacgccacagacagccccaaatactctgcaaaggaatttgaactttcttctgtatacagttggaaacaacaaatggcttttgagtccaagagtgatgcaatcacagtgacgcatta

SEQ ID NO: 61204 - DNA, 120 bp, synthetic construct
  source 1..120: mol_type = other DNA
ggagaagctatcattggtgccctcctctgcccgcctgcattatggcacagatccttgcactggtcaacctttcagattccctctggtctccgtccgaaacgtctacctcttcccaggcat

SEQ ID NO: 61205 - DNA, 120 bp, synthetic construct
  source 1..120: mol_type = other DNA
cagcatgaaggagtttggactttatcctcagaacactgggaagatattgaagggtttaagcaagggcagcatgccttcactcccctttgatagccatatgtgtccatctgatgccctctt

SEQ ID NO: 61206 - DNA, 120 bp, synthetic construct
  source 1..120: mol_type = other DNA
cattcatgcgcatcaacccactgctggtaatggggaagagggtttatcaccttcagtctcacgtgccccagcagtcactgcaccctagctcacctgcagtagtggggaggctagagcctg

SEQ ID NO: 61207 - DNA, 120 bp, synthetic construct
  source 1..120: mol_type = other DNA
tgcagtgagccaagatggcaccactatactccagcctgagcaacagagtgagactccgtccaaacaaacaaaaaaaaaatacagttattcagttgtactagccacatttcaaatgaccac

SEQ ID NO: 61208 - DNA, 120 bp, synthetic construct
  source 1..120: mol_type = other DNA
aaaaaaaaaatagacggtttctccctgtcctcaagctccacccttgcactagagggtggttcaagaatggaaagcagagagtggagaagatgaagtccttctctttctctttgcatacat

SEQ ID NO: 61209 - DNA, 120 bp, synthetic construct; identical to SEQ ID NO: 8821
  source 1..120: mol_type = other DNA

SEQ ID NO: 61210 - DNA, 120 bp, synthetic construct; identical to SEQ ID NO: 8822
  source 1..120: mol_type = other DNA

SEQ ID NO: 61211 - DNA, 120 bp, synthetic construct; identical to SEQ ID NO: 8823
  source 1..120: mol_type = other DNA

SEQ ID NO: 61212 - DNA, 120 bp, synthetic construct; identical to SEQ ID NO: 8823
  source 1..120: mol_type = other DNA

SEQ ID NO: 61213 - DNA, 120 bp, synthetic construct; identical to SEQ ID NO: 8824
  source 1..120: mol_type = other DNA

SEQ ID NO: 61214 - DNA, 120 bp, synthetic construct; identical to SEQ ID NO: 8825
  source 1..120: mol_type = other DNA

SEQ ID NO: 61215 - DNA, 120 bp, synthetic construct; identical to SEQ ID NO: 8826
  source 1..120: mol_type = other DNA

SEQ ID NO: 61216 - DNA, 120 bp, synthetic construct; identical to SEQ ID NO: 12456
  source 1..120: mol_type = other DNA

SEQ ID NO: 61217 - DNA, 120 bp, synthetic construct
  source 1..120: mol_type = other DNA
cacctgaggtcaggagtttgagaacagcctggccaacatggtgaaatctcgtctctactaaaattaccaaaattagctgggcatggtggcgggcacctgtaatcccagctacttgggagg

SEQ ID NO: 61218 - DNA, 120 bp, synthetic construct
  source 1..120: mol_type = other DNA
aagcgcatgtaccgcaagttccatccgcgccccaacttccgccaaatgaagctggagaacgtgtccgtggccctcgagttcctcgagcgcgagcacatcaagctcgtgtccataggtcag

SEQ ID NO: 61219 - DNA, 120 bp, synthetic construct
  source 1..120: mol_type = other DNA
aaaggcctgtggaagggaggaagtctttgagtgtaaccagatttggaaggtgtgtagtgcagggtgggggcggggaggcactctagtcttgggagcagagacgccaagggtgggcttgga

SEQ ID NO: 61220 - DNA, 120 bp, synthetic construct
  source 1..120: mol_type = other DNA
caccatgaggaggttcaaaggggctgcccacgaggcaggggcatcctgcttctgctagctcccctactccatttagtggtggaaaggggctatccatggggccaccttctgagtattgtc

SEQ ID NO: 61221 - DNA, 120 bp, synthetic construct
  source 1..120: mol_type = other DNA
tgcaagaagtacttctgggcgtgtgagctttggaggctgtcggggttgtgagaggctgggggcactggggcatccagactgtgtgaaagtgttggagcctgtgtgtttgagagaaagcac

SEQ ID NO: 61222 - DNA, 120 bp, synthetic construct
  source 1..120: mol_type = other DNA
agtatatactgtgtgattccatttatataacactctaggaaatacaaagtaatctatcgtgacagagagcagatcagttgttgcttgggatggagggacaaggacggcaggagggagggc

SEQ ID NO: 61223 - DNA, 120 bp, synthetic construct
  source 1..120: mol_type = other DNA
atcaccaacttcaaccgtgactggcaggacggcaaagctctgggcgccctggtggacaactgcgcccccggtgagtgggccagtgagcacagcatggagcccttagctcccaaagacaga

SEQ ID NO: 61224 - DNA, 120 bp, synthetic construct
  source 1..120: mol_type = other DNA
ctggcctaaaccaagcgccccttcacctgcaccgttcataggagtgatctggggctgcctcagcgtccttcctgttaggaaggcagggctcctgagggctgcagaggagaagtcattctc

SEQ ID NO: 61225 - DNA, 120 bp, synthetic construct
  source 1..120: mol_type = other DNA
atgagcattctgttatgacctacctgtcccagttccccaaggccaagctcaaacctggtgcccctgttcgatccaagcagctgaaccccaagaaagccatcgcctatgggcctggtatgt

SEQ ID NO: 61226 - DNA, 120 bp, synthetic construct
  source 1..120: mol_type = other DNA
aacaaggtgtcagcccgtggccctggcctggaacctgtgggcaatgtggccaacaaacccacctactttgacatctacactgcgggtaggacgggccccagggggtgcaggtggaaagcc

SEQ ID NO: 61227 - DNA, 120 bp, synthetic construct
  source 1..120: mol_type = other DNA
atttctatgatgaaatctgggctctgagccattgcctgtgttccgtggtaccccttgggcagtgccatcgcctatggtcatggtagtcctggaatatgtgtcgtgtcctgtttcgtagca

SEQ ID NO: 61228 - DNA, 120 bp, synthetic construct
  source 1..120: mol_type = other DNA
ccccagaatctcaggctcattgtctcctctctgcctcagtttcttggtctacaagccaggaatgattctctccaccctaagtgctatacggggtgttatgcacagggatgacaagtgttc

SEQ ID NO: 61229 - DNA, 120 bp, synthetic construct
  source 1..120: mol_type = other DNA
gagtacgctgtgcacgtcatctgtgacgatgaggacatccgagactcacccttcattgcccacatcctgcccgccccacctgactgcttcccagataaggtgtggtcccagctcacacac

SEQ ID NO: 61230 - DNA, 120 bp, synthetic construct
  source 1..120: mol_type = other DNA
tcccatcgacatcaaggtgatccccaacggcgacggcaccttccgctgctcctacgtgcccaccaagcccattaagcacaccatcatcatctcctggggaggcgtaaacgtgcccaagag

SEQ ID NO: 61231 - DNA, 120 bp, synthetic construct
  source 1..120: mol_type = other DNA
aggccctcaccacatctctgggtgggtcctcaggtgtggaagtcgggaagcccacccacttcacggtgctgaccaagggagccggcaaggccaagctggatgtgcagtttgcagggacag

SEQ ID NO: 61232 - DNA, 120 bp, synthetic construct
  source 1..120: mol_type = other DNA
acaacttagctattaagagcctggccttggagtcacacctgggcttgaatcccaggtccactaactggggcaaattgcttcatctcgctgcctcaatgtcatcacctgggattgttataa

SEQ ID NO: 61233 - DNA, 120 bp, synthetic construct
  source 1..120: mol_type = other DNA
gatctcttctttcatgtgcttaaggggtaccctgatccaaaaagctaaaactctgctctggacgggggcacggggaaagctttggggtagaggatgacaagagtcagaagacagtaagtg

SEQ ID NO: 61234 - DNA, 120 bp, synthetic construct
  source 1..120: mol_type = other DNA
cagattggcccctgtagctcgtttctcctcagctgggtccccagcggcctgccctctttcctccctgtccccccattcagctactccctcatcctcactcactggtcttatgaagctgat

SEQ ID NO: 61235 - DNA, 120 bp, synthetic construct
  source 1..120: mol_type = other DNA
aacattttattttcacattttattaatttaggaaggccttctcttccaggcctgggacccacatgagtgaggtttgcccagcctcagtctgcagtcaagttcatttattcttgtgtgtgt

SEQ ID NO: 61236 - DNA, 120 bp, synthetic construct
  source 1..120: mol_type = other DNA
catgtctatggggaggactctggctcaagatgagatcaccccccaccgccccgtccatgccacccagccaactgtttatcccttctgctcctcaagccccttcaagatcaaggtcctccc

SEQ ID NO: 61237 - DNA, 120 bp, synthetic construct
  source 1..120: mol_type = other DNA
agctcgatgtggatgtggttgagaaccatgacggtacctttgacatctactacacagcgcccgagccgggcaagtacgtcatcaccatccgcttcgggggtgagcacatccccaacagcc

SEQ ID NO: 61238 - DNA, 120 bp, synthetic construct
  source 1..120: mol_type = other DNA
ttcatgattaactaccttgttctttcctcactctccagcttcagtcatagcatgggtcaaactcctgggccttccccagtcactgactgttccctctcacctgctgcaggccacagagga

SEQ ID NO: 61239 - DNA, 120 bp, synthetic construct
  source 1..120: mol_type = other DNA
gttctatgtggatgccatcaacagccgccatgtcagtgcctatgggccaggcctgagccatggcatggtcaacaagccagccaccttcactattgtcaccaaagatgctggagaaggtga

SEQ ID NO: 61240 - DNA, 120 bp, synthetic construct
  source 1..120: mol_type = other DNA
tttgttatcacaacatcatgtgactcagggttaaaatgcaggaggtttcctttagggatttagcccacaaggactgaggcagccacagtggaattggggtacaggcccctcttagtctct

SEQ ID NO: 61241 - DNA, 120 bp, synthetic construct
  source 1..120: mol_type = other DNA
gccccgcatcagttctctcccttttaagagaaagctcagctgtcctgagtttctgtccctcccttgctcactggaatccaagaggcttaccttagggaattttccagaccgcctgtcccg

SEQ ID NO: 61242 - DNA, 120 bp, synthetic construct
  source 1..120: mol_type = other DNA
gcgcctgacacgcaccttcacacgcagcagccacacctacacccgcacggagcgcacggagatcagcaagacgcggggcggggagacaaagcgcgaggtgcgggtggaggagtccaccca

SEQ ID NO: 61243 - DNA, 120 bp, synthetic construct
  source 1..120: mol_type = other DNA
cctgtccattgctgtggagggtcctagcaaagcggagattgcatttgaggatcgcaaagatggctcctgcggcgtctcctatgtcgtccaggaaccaggtgggcgtccacactggcagtg

SEQ ID NO: 61244 - DNA, 120 bp, synthetic construct
  source 1..120: mol_type = other DNA
ttgctttctcttgctgctgacttctagagatgtggtgtgttcctttcattctgtcacagcggacatgtgcaaggaaggctttcagcaagtcacactgaaacatgcaaaccagggggccag

SEQ ID NO: 61245 - DNA, 120 bp, synthetic construct
  source 1..120: mol_type = other DNA
caccaaccctttatccacagacaagcacaccatccgcttcatcccccacgagaatggcgtccactccatcgatgtcaagttcaacggtgcccacatccctggaagtcccttcaagatccg

SEQ ID NO: 61246 - DNA, 120 bp, synthetic construct
  source 1..120: mol_type = other DNA
agaagacacagtcggtattgagcaagcttcccctcttgaggctgtctgtaggatgagttgggtgggtgttcctttgtaaagtggctcttaccctgtgagttagcctgagttcccagacaa

SEQ ID NO: 61247 - DNA, 120 bp, synthetic construct
  source 1..120: mol_type = other DNA
gtcccttgaatcccaaaagtgcctccccagcctcagcccccacctccagccacacacacattacacacacacacacacacacacaaatgtgccacacccagacacgcacagaatcagaca

SEQ ID NO: 61248 - DNA, 120 bp, synthetic construct; identical to SEQ ID NO: 14560
  source 1..120: mol_type = other DNA

SEQ ID NO: 61249 - DNA, 120 bp, synthetic construct
  source 1..120: mol_type = other DNA
cttgaaattcctatttttaatgtccctcttgaggtgtaaactaaacagcaagtctggcaccacctaagtctggcactacctttattcctggtgctatatatttcttcctttcctcccctc

SEQ ID NO: 61250 - DNA, 120 bp, synthetic construct; identical to SEQ ID NO: 13603
  source 1..120: mol_type = other DNA

SEQ ID NO: 61251 - DNA, 120 bp, synthetic construct
  source 1..120: mol_type = other DNA
cagtgagccaagactgcgcaattgcactccagcctgggtgacagagcaagactatatctcaaaagaaagaaagaaagaaagaaagaaagagagagagagagagagagagaaagaaaagaa

SEQ ID NO: 61252 - DNA, 120 bp, synthetic construct
  source 1..120: mol_type = other DNA
atttcccaagaataaatttcctttaaaaaaatttttttttaaagaatttcttggctggatgctgtggctcatgcctgtaatcccagcactttgggaggccgaggtgggcagatcaagagg

SEQ ID NO: 61253 - DNA, 120 bp, synthetic construct
  source 1..120: mol_type = other DNA
attattaacatcttgtataggtgtgatatgtttgttacaattgatgaaccaattttaaagttcatagtttgggccgggcacggtggctcatgcctgtaattccagtactttgggaggccg

SEQ ID NO: 61254 - DNA, 120 bp, synthetic construct; identical to SEQ ID NO: 13601
  source 1..120: mol_type = other DNA

SEQ ID NO: 61255 - DNA, 120 bp, synthetic construct; identical to SEQ ID NO: 19898
  source 1..120: mol_type = other DNA

SEQ ID NO: 61256 - DNA, 120 bp, synthetic construct; identical to SEQ ID NO: 19899
  source 1..120: mol_type = other DNA

SEQ ID NO: 61257 - DNA, 120 bp, synthetic construct; identical to SEQ ID NO: 27382
  source 1..120: mol_type = other DNA

SEQ ID NO: 61258 - DNA, 120 bp, synthetic construct; identical to SEQ ID NO: 27383
  source 1..120: mol_type = other DNA

SEQ ID NO: 61259 - DNA, 120 bp, synthetic construct; identical to SEQ ID NO: 27384
  source 1..120: mol_type = other DNA

SEQ ID NO: 61260 - DNA, 120 bp, synthetic construct; identical to SEQ ID NO: 27385
  source 1..120: mol_type = other DNA

SEQ ID NO: 61261 - DNA, 120 bp, synthetic construct; identical to SEQ ID NO: 27386
  source 1..120: mol_type = other DNA

SEQ ID NO: 61262 - DNA, 120 bp, synthetic construct
  source 1..120: mol_type = other DNA
tgctagaacacaaccagactgaactgtggttttatgatcacatctgaacagaggctcaattttattcatcttcctaagcccaagacagagatgtgcaaaggagattcaacgggtggatat

SEQ ID NO: 61263 - DNA, 120 bp, synthetic construct
  source 1..120: mol_type = other DNA
gggtggatggatggatggaagtatgggtggatgggtgggtgggtggatggatggatggaagtatgggtggatgggtgggtgggtggatggatggatggaagtatgggtggatgggtggat

SEQ ID NO: 61264 - DNA, 120 bp, synthetic construct
  source 1..120: mol_type = other DNA
cgcaagctttttcatgacatgtctcctttttcatgacataccataacttattccagtgacccctctgcctttaccaaccttccactgtgccctgtgtgatcggcaaactttgctgtagac

SEQ ID NO: 61265 - DNA, 120 bp, synthetic construct; identical to SEQ ID NO: 27387
  source 1..120: mol_type = other DNA

SEQ ID NO: 61266 - DNA, 120 bp, synthetic construct; identical to SEQ ID NO: 27388
  source 1..120: mol_type = other DNA

SEQ ID NO: 61267 - DNA, 120 bp, synthetic construct
  source 1..120: mol_type = other DNA
ggtcaataagcacgtaaaaagatgctcaacatcattagtcatcagaaaatgcaaatcaaaaccacaatgggataccacttcacatccactaggacggctagaatcagaaaggaagacagt

SEQ ID NO: 61268 - DNA, 120 bp, synthetic construct; identical to SEQ ID NO: 15078
  source 1..120: mol_type = other DNA

SEQ ID NO: 61269 - DNA, 120 bp, synthetic construct; identical to SEQ ID NO: 3846
  source 1..120: mol_type = other DNA

SEQ ID NO: 61270 - DNA, 120 bp, synthetic construct
  source 1..120: mol_type = other DNA
ctaggcaataccattcaggacacaggcacaggcaaatatttcatgatgaagatgccaaaagcaattacaacaaaagcaaaaattaacaaacgggatgtaattaaactaaagagctcctac

SEQ ID NO: 61271 - DNA, 120 bp, synthetic construct; identical to SEQ ID NO: 15080
  source 1..120: mol_type = other DNA

SEQ ID NO: 61272 - DNA, 120 bp, synthetic construct
  source 1..120: mol_type = other DNA
gccaaaaaacacatgaaaaaatgctcaccatcactggccatcagagaaatgcaaatcaaaaccacaatgagataccatctcaaaccagttagaatggcaatcattaaaaagtcaggaaac

SEQ ID NO: 61273 - DNA, 120 bp, synthetic construct; identical to SEQ ID NO: 15081
  source 1..120: mol_type = other DNA

SEQ ID NO: 61274 - DNA, 120 bp, synthetic construct; identical to SEQ ID NO: 15082
  source 1..120: mol_type = other DNA

SEQ ID NO: 61275 - DNA, 120 bp, synthetic construct; identical to SEQ ID NO: 15083
  source 1..120: mol_type = other DNA

SEQ ID NO: 61276 - DNA, 120 bp, synthetic construct
  source 1..120: mol_type = other DNA
aaataaaagaggatacaaacaaatggaagaacattctatgctcatgggtaagaatcaatatcgtgaaaatggccatactgcccaaggtaatttatagattcaatgccatccccatcaagc

SEQ ID NO: 61277 - DNA, 120 bp, synthetic construct
  source 1..120: mol_type = other DNA
gagatactatctcacatcagttagaatggcgatcattaaagtcaggaaacaacaggtgctggagaggatgtgaagaaataggaacacttttacactgttggtgggactgtaaaccagttc

SEQ ID NO: 61278 - DNA, 120 bp, synthetic construct; identical to SEQ ID NO: 15084
  source 1..120: mol_type = other DNA

SEQ ID NO: 61279 - DNA, 120 bp, synthetic construct; identical to SEQ ID NO: 9535
  source 1..120: mol_type = other DNA

SEQ ID NO: 61280 - DNA, 120 bp, synthetic construct; identical to SEQ ID NO: 9536
  source 1..120: mol_type = other DNA

SEQ ID NO: 61281 - DNA, 120 bp, synthetic construct
  source 1..120: mol_type = other DNA
ccattctatttctaccgagtttcaaaccagccacgaacactctgtttcctctgcctttaaaaacagctgtaacatcccatctccaccacctctgccttgcacagagtcctccagctccat

SEQ ID NO: 61282 - DNA, 120 bp, synthetic construct
  source 1..120: mol_type = other DNA
cccctctacctggagtgggaatacctcctccgccccctctacctggagtgggaatacctcctccgccccctctacctggtgctgggattcccccacctcctcccttgccaggtatgggga

SEQ ID NO: 61283 - DNA, 120 bp, synthetic construct; identical to SEQ ID NO: 9539
  source 1..120: mol_type = other DNA

SEQ ID NO: 61284 - DNA, 120 bp, synthetic construct; identical to SEQ ID NO: 9540
  source 1..120: mol_type = other DNA

SEQ ID NO: 61285 - DNA, 120 bp, synthetic construct; identical to SEQ ID NO: 21685
  source 1..120: mol_type = other DNA

SEQ ID NO: 61286 - DNA, 120 bp, synthetic construct; identical to SEQ ID NO: 21686
  source 1..120: mol_type = other DNA

SEQ ID NO: 61287 - DNA, 120 bp, synthetic construct; identical to SEQ ID NO: 21687
  source 1..120: mol_type = other DNA

SEQ ID NO: 61288 - DNA, 120 bp, synthetic construct; identical to SEQ ID NO: 21688
  source 1..120: mol_type = other DNA

SEQ ID NO: 61289 - DNA, 120 bp, synthetic construct; identical to SEQ ID NO: 21689
  source 1..120: mol_type = other DNA

SEQ ID NO: 61290 - DNA, 120 bp, synthetic construct; identical to SEQ ID NO: 9005
  source 1..120: mol_type = other DNA

SEQ ID NO: 61291 - DNA, 120 bp, synthetic construct
  source 1..120: mol_type = other DNA
tcatcattttttatggctgcatagtattccatggtgtatatgtgccacattttcttaatccagtctatcattgttggacatttgggttggttccaagtctttgctattgagaatagtgct

SEQ ID NO: 61292 - DNA, 120 bp, synthetic construct
  source 1..120: mol_type = other DNA
tgtcaaagatcagatagttgtagatgtgtggtattatttctgagggctctgttctgttccactggtttatatctctgttttggtaccagtaccatgctgttttggttactgtagccttgt

SEQ ID NO: 61293 - DNA, 120 bp, synthetic construct
  source 1..120: mol_type = other DNA
gtcagatgagtaggttgtgaaaattttttcccattttcttggttgcctgttcactctgatggtagtttctttagtccatcttgaattgatttttgtataaggtgtaaggaagggatccag

SEQ ID NO: 61294 - DNA, 120 bp, synthetic construct
  source 1..120: mol_type = other DNA
aggagctcttttagagcaggcctggtggtcacaaaatctctcagcatttgcttgtctgtaaagtattttatgtctccttcacttatgaagcttagtttggctggatatgaaattctgggt

SEQ ID NO: 61295 - DNA, 120 bp, synthetic construct
  source 1..120: mol_type = other DNA
tatttcttatatagaccaatggaacagaacagagccctcagaaataataccacatatctacaactatttgatctttgacaaacctgacaaaaacaagaaatggggaaaggattccctatt

SEQ ID NO: 61296 - DNA, 120 bp, synthetic construct
  source 1..120: mol_type = other DNA
gatgctataaagacacatgcacacgtatgtttattgcggcactattcacaatagcaaggacttggaaccaacccaaatgtccaacaatgatagactggattaagaaaatgtggcacatat

SEQ ID NO: 61297 - DNA, 120 bp, synthetic construct
  source 1..120: mol_type = other DNA
acccaaaattcaaaatactggcaacaccaaatgttggcaaggatgtggagtaacaggaagtctcactcattgctggtgaaaatgcaaactgttacagccactttggaagatcatctggta

SEQ ID NO: 61298 - DNA, 120 bp, synthetic construct
  source 1..120: mol_type = other DNA
gcgaaggagcaggaaatagcacagaataaatcaatgcaaagacaacaggcagcaatttaatggaaaccaagggccaaggcagggctagaaacactgaagcatcattccaatatcagataa

SEQ ID NO: 61299 - DNA, 120 bp, synthetic construct
  source 1..120: mol_type = other DNA
ctgaattcaggtaagctatcttgaaaggggaaatatcaaaagctagagatcagagtaaggctgagactcagagtcaagtggggaagactaagttgcagtatgtactggcagtgaagataa

SEQ ID NO: 61300 - DNA, 120 bp, synthetic construct
  source 1..120: mol_type = other DNA
aaggatgtgtagagacatgaacggatgaaagtgcatcacaggttcagggaacaacacaggttgagtgtggcttgtagtaaaaatggttgtgaagagttgacatatttttaagccctgggt

SEQ ID NO: 61301 - DNA, 120 bp, synthetic construct; identical to SEQ ID NO: 35424
  source 1..120: mol_type = other DNA

SEQ ID NO: 61302 - DNA, 120 bp, synthetic construct; identical to SEQ ID NO: 35425
  source 1..120: mol_type = other DNA

SEQ ID NO: 61303 - DNA, 120 bp, synthetic construct
  source 1..120: mol_type = other DNA
tgtgcccctaagaacttgaccacatttcctttgaatttgtggtgttgcagtggactgaattgttgaggctttatataggcattcatgggtttactgtgctttttaaagttacaccattgc

SEQ ID NO: 61304 - DNA, 120 bp, synthetic construct
  source 1..120: mol_type = other DNA
gttttgtaacgaagttgtttaacttgaaggtgaatgaagaataggttggttgccccttagttccctgaggagaaatgttaatacttgaacaagtgtgtgtcagacaaattgctgttatgt

SEQ ID NO: 61305 - DNA, 120 bp, synthetic construct
  source 1..120: mol_type = other DNA
aagttcagtgtttgaggacagactttcatttggttagtagtattatggcagctagcagctaaatatgataaagtgtacaatcaaaaggatatttttaatgaagatattagtggtctaaca

SEQ ID NO: 61306 - DNA, 120 bp, synthetic construct
  source 1..120: mol_type = other DNA
attcttgaaccttggcgctgtacttcttcatgtggatgcctgttaaggaaagataaagttagaaatctttgaccctgctaggaaatttgtctttgttatattgggagctcataaaactga

SEQ ID NO: 61307 - DNA, 120 bp, synthetic construct
  source 1..120: mol_type = other DNA
accattcctggctattttttgcatttttagtagagatgaggtttcgccatgttggccaggctgatctcaagttatctgcctgcctcagccctccaaagtgctggaattacaggcatgaga

SEQ ID NO: 61308 - DNA, 120 bp, synthetic construct
  source 1..120: mol_type = other DNA
aacacctagggcctggggaggtcgaggctacagcgagccattatcatgccactgcactccagcctggataacagaataaaaagaccctgtctcaaaaaaaaaaaaaaaaaaagaggcgga

SEQ ID NO: 61309 - DNA, 120 bp, synthetic construct; identical to SEQ ID NO: 35426
  source 1..120: mol_type = other DNA

SEQ ID NO: 61310 - DNA, 120 bp, synthetic construct
  source 1..120: mol_type = other DNA
ctgccattgtcatcccgtcccgttctcaatgagctgttgggcacacctcccagacggggtggtggccgggcagaggggctcctcacttcccagtaggggtggctgggcagaggcgcccct

SEQ ID NO: 61311 - DNA, 120 bp, synthetic construct
  source 1..120: mol_type = other DNA
gggaggccgaggttggcggatcactcgcggccaggggctggagaccggcccggccaacacagcgaaaccccgtctccaccaaaaccagtcaggcgtggcggcgcgtgcctgcaatcgcag

SEQ ID NO: 61312 - DNA, 120 bp, synthetic construct; identical to SEQ ID NO: 35427
  source 1..120: mol_type = other DNA

SEQ ID NO: 61313 - DNA, 120 bp, synthetic construct
  source 1..120: mol_type = other DNA
gagaagtgtctgttcatgccaagtcaatcctaagccaaaagaacaaagctggaggcatcacactacctgacttcaaactatactacaaggctacagtaaccaaaacagcatggtactggt

SEQ ID NO: 61314 - DNA, 120 bp, synthetic construct
  source 1..120: mol_type = other DNA
cctggtgacagagcaagactgtctcaaaaaaaaaaaaaaaaaaaaaaaaaaggctgggcatgatggcttgcacctgtaatcccagctactcaggaggctgaggcaggagaatcacttgaa

SEQ ID NO: 61315 - DNA, 120 bp, synthetic construct
  source 1..120: mol_type = other DNA
gtcaaagaaaggggagacagacggcatctggaaaattgggtcactcctacccgaatactgcgcttttccgacaggcttaaaaaatggcgcaccaggagattatatcccgcacatggctcg

SEQ ID NO: 61316 - DNA, 120 bp, synthetic construct
  source 1..120: mol_type = other DNA
agccgatgggatcaactggaagaaagggtatcagcgatggaagatgaaatgaatgaaacgaagcgagaagggaagtttagagaaaatagaataaaaagaaacgaacaaagcctcgaagaa

SEQ ID NO: 61317 - DNA, 120 bp, synthetic construct
  source 1..120: mol_type = other DNA
ggcgacagagcgagactccgtctcaaaaaaaaaaaaaaaaaaaaaaagagtcaagacccatcagtgtgctgtattcaggaaacccatctcatgtgcagagacacacataggctcaaaata

SEQ ID NO: 61318 - DNA, 120 bp, synthetic construct
  source 1..120: mol_type = other DNA
atgaatccaggagctggttttttgaaaggatcaacaaaattgacaaaccactagcaagactaataaaaaaagagagaagaatcaaatagacgcaataaaaaatgataaaggggatatcac

SEQ ID NO: 61319 - DNA, 120 bp, synthetic construct
  source 1..120: mol_type = other DNA
ccactccttttcaacatagtgttggaagttctggccagggcaattaggcaggagaaagaaataaagggtattcaattaggaaaagaggaagtcaaattgtccctgtttgcagacgacatg

SEQ ID NO: 61320 - DNA, 120 bp, synthetic construct
  source 1..120: mol_type = other DNA
gaactcaaacaaatttacaagaaaaaaacaaccccatcaaaaagtgggtgaaggacattaacagacactgctcaaaagaagacatttatgcagccaaaaaacacatgaaaaaatgctcgc

SEQ ID NO: 61321 - DNA, 120 bp, synthetic construct; identical to SEQ ID NO: 7807
  source 1..120: mol_type = other DNA

SEQ ID NO: 61322 - DNA, 120 bp, synthetic construct; identical to SEQ ID NO: 28472
  source 1..120: mol_type = other DNA

SEQ ID NO: 61323 - DNA, 120 bp, synthetic construct; identical to SEQ ID NO: 28473
  source 1..120: mol_type = other DNA

SEQ ID NO: 61324 - DNA, 120 bp, synthetic construct
  source 1..120: mol_type = other DNA
ctatctatccatacttcaatctatctatccacctatccatgtatctatttatccatccatccatccatccatccatccatccatccatccacccacctctaggtatctatctatctgtct

SEQ ID NO: 61325 - DNA, 120 bp, synthetic construct
  source 1..120: mol_type = other DNA
tggctgcatgaatgtcttcttttgagaaatgtcttcatatccttcgcccactttttcatggggttgatttttttcttataaatttgttttaagttctttgtagattctggatattagccc

SEQ ID NO: 61326 - DNA, 120 bp, synthetic construct
  source 1..120: mol_type = other DNA
atgtccttcgcccactttttgatggggttgtttgttttttcttgtaaatttgtttgagttcattgtggattctggatattagccctttgtcagatgagtaggttgcaaaaattttctccc

SEQ ID NO: 61327 - DNA, 120 bp, synthetic construct
  source 1..120: mol_type = other DNA
tattggtgtataagaatgcttgtgatttttgtacattgattttgtatcctgagactttgctgaagttgcttatcagcttaaggagattttgggctgagacactggggttttctaaatata

SEQ ID NO: 61328 - DNA, 120 bp, synthetic construct
  source 1..120: mol_type = other DNA
tatttgcgtagaggtgtttgtagtattctctgatggtagtttgtatttctgtgggatcagtggtgatatcccctttatcattttttttgtgtgtctatttgattcttctctctttttttc

SEQ ID NO: 61329 - DNA, 120 bp, synthetic construct
  source 1..120: mol_type = other DNA
gtcttgactctttatccaatttgccagtctgtgccttttaattggagcattaagtccatttacatttaaagttaatattgttatgtgtgaatttgatcctgtcattatgatgttagctgg

SEQ ID NO: 61330 - DNA, 120 bp, synthetic construct
  source 1..120: mol_type = other DNA
ggttttcagctccatcagctcctttaagcacttctctgtattggttattctagttatacattcttctaaatttttttcaaagttttcaacttctttgcctttggtttcaatgtcctcccg

SEQ ID NO: 61331 - DNA, 120 bp, synthetic construct
  source 1..120: mol_type = other DNA
gaaagggaactccctgaccccttgcgcttcccaagtgaggcaatgcctcgccctgcttcggctcgcccacggtacgcgcgctcactgacctgcgcccactgtctggcactccctagtgag

SEQ ID NO: 61332 - DNA, 120 bp, synthetic construct; identical to SEQ ID NO: 13714
  source 1..120: mol_type = other DNA

SEQ ID NO: 61333 - DNA, 120 bp, synthetic construct
  source 1..120: mol_type = other DNA
ggtgagcattttttcatgtgttttttggctgcataaatgtcttcttttgagaagtgtctgttcatgtccttcacccactttttgatggggttgtttgtttttttcttgtaaatttgtttg

SEQ ID NO: 61334 - DNA, 120 bp, synthetic construct
  source 1..120: mol_type = other DNA
agacagtggggttttctcgatatacaatcatgtcgtctgcaaacggggacaatttgacttcctcttttcctaattgaataccctttatttccttctcctgcctaattgccctggccagaa

SEQ ID NO: 61335 - DNA, 120 bp, synthetic construct
  source 1..120: mol_type = other DNA
tgtcgaggaatgtatccatttcttctagattttctagtttatttgcgtagaggtgtttgtagtattctctgatggtagtttgtatttctgtgggatctggtgatatcccctttatcattt

SEQ ID NO: 61336 - DNA, 120 bp, synthetic construct
  source 1..120: mol_type = other DNA
agtcttggtgctcctgtattgagtgcacatatatttaggatagttagctcttcttgttgaattgatccctttaccattatgtaatggccttctttgtctcttttgatctttgttggttta

SEQ ID NO: 61337 - DNA, 120 bp, synthetic construct
  source 1..120: mol_type = other DNA
attctccccgtcactttcaggtacaccaatcagacgtagatttggtcttttcacatagtcgcatatttcttggaggctttattcgtttctttttattcttttttctctaaacttcccttc

SEQ ID NO: 61338 - DNA, 120 bp, synthetic construct
  source 1..120: mol_type = other DNA
gttcgagcttctgggctgctttgtttacctgagcaagcctgggcaatggcgggcgcccctcccccagcctcgctgctgccttgcagtttgatctcagactgctgtgctagcaatcagcga

SEQ ID NO: 61339 - DNA, 120 bp, synthetic construct
  source 1..120: mol_type = other DNA
catattgagactaaaaaaaaattaaaattgaaagagggggcttgtgtttgttttagagatgagatctcactctgtcactcaggctggagtgcagtggcgtgatcataactcactgcagcc

SEQ ID NO: 61340 - DNA, 120 bp, synthetic construct
  source 1..120: mol_type = other DNA
ccccgaagtatcaccatgttgattatcactattgaagggaaactgtgcctttctcatagagacatctgacagatactaccttaacaaaatgatcaaaccttacaccacccaggtactcta

SEQ ID NO: 61341 - DNA, 120 bp, synthetic construct; identical to SEQ ID NO: 13715
  source 1..120: mol_type = other DNA

SEQ ID NO: 61342 - DNA, 120 bp, synthetic construct; identical to SEQ ID NO: 13716
  source 1..120: mol_type = other DNA

SEQ ID NO: 61343 - DNA, 120 bp, synthetic construct; identical to SEQ ID NO: 24875
  source 1..120: mol_type = other DNA

SEQ ID NO: 61344 - DNA, 120 bp, synthetic construct; identical to SEQ ID NO: 24876
  source 1..120: mol_type = other DNA

SEQ ID NO: 61345 - DNA, 120 bp, synthetic construct; identical to SEQ ID NO: 24877
  source 1..120: mol_type = other DNA

SEQ ID NO: 61346 - DNA, 120 bp, synthetic construct; identical to SEQ ID NO: 24878
  source 1..120: mol_type = other DNA

SEQ ID NO: 61347 - DNA, 120 bp, synthetic construct; identical to SEQ ID NO: 24879
  source 1..120: mol_type = other DNA

SEQ ID NO: 61348 - DNA, 120 bp, synthetic construct
  source 1..120: mol_type = other DNA
agattctcagatgaagagcctgtagcctccagtggactgactttagtaaaaaggctttaattgcagaacctctgagttgactgtaacaaatgcagtttattcccctagactggaaataac

SEQ ID NO: 61349 - DNA, 120 bp, synthetic construct; identical to SEQ ID NO: 24880
  source 1..120: mol_type = other DNA

SEQ ID NO: 61350 - DNA, 120 bp, synthetic construct
  source 1..120: mol_type = other DNA
caggtgatccacccactttggcctcccaaagtgttaggattacaggcgtgagccactgtgctggctggttttatttttaattgttaataaccaactatacagtaaatgatttataaaata

SEQ ID NO: 61351 - DNA, 120 bp, synthetic construct
  source 1..120: mol_type = other DNA
ctggccatcagagagatgcaaatcaaaaccacaatgagatatctcacaccagttagaatggcgatcattaaaaagtcaggaaacaacaagggctggagaggatgtggagaaataggaatg

SEQ ID NO: 61352 - DNA, 120 bp, synthetic construct; identical to SEQ ID NO: 27011
  source 1..120: mol_type = other DNA

SEQ ID NO: 61353 - DNA, 120 bp, synthetic construct
  source 1..120: mol_type = other DNA
cagatgatcgaggctgcactgagccatgaccacgccactgcactccagcctgggcgacagagtgagactgtctctcaaaaaaataataataaaaacaaaaatattaaagtaaatattcaa

SEQ ID NO: 61354 - DNA, 120 bp, synthetic construct
  source 1..120: mol_type = other DNA
aatgtattaaacttaccagaattatataaaatgaataacaaatgggagttcaaatgaagccaaagactctccctctccctctccgtctccctccacggtctccctctccctctctttcca

SEQ ID NO: 61355 - DNA, 120 bp, synthetic construct
  source 1..120: mol_type = other DNA
cagtctaggaagtgaggagtgtctctgcccagtctctgcccggccgcccattgtctgagatgtggggagtgcctctgccccaccgcaaccctgtctgggaggtgaggagcgtctctgcct

SEQ ID NO: 61356 - DNA, 120 bp, synthetic construct
  source 1..120: mol_type = other DNA
cgagattacaccactgcactccagcctgggtgacagagtgaaattccatcttaacaacaacaacaaaaatttgtggaaagattcctgggcttgaagttgattaggttaaataacccctag

SEQ ID NO: 61357 - DNA, 120 bp, synthetic construct; identical to SEQ ID NO: 32134
  source 1..120: mol_type = other DNA

SEQ ID NO: 61358 - DNA, 120 bp, synthetic construct
  source 1..120: mol_type = other DNA
tgcatttctctaagggccagtgatggtgagcattttttcatgtgttttttggctgcataaatgttgtcttttgagaagtgtctgttcatgtccttcgcccactttttgatggggttgttt

SEQ ID NO: 61359 - DNA, 120 bp, synthetic construct
  source 1..120: mol_type = other DNA
cttcacatcccttgtaagctggattcctaggtattttattctctttgaagcaattgggaatgggagttcactcatgatttggctctctgtttgtctgttgttggtgtataagaatgcttg

SEQ ID NO: 61360 - DNA, 120 bp, synthetic construct; identical to SEQ ID NO: 32135
  source 1..120: mol_type = other DNA

SEQ ID NO: 61361 - DNA, 120 bp, synthetic construct
  source 1..120: mol_type = other DNA
aagaggaagtcaaattgtccctgtttgcagatgacatgattgtatatctagaaaaccccactgactcagcccaaaatctccttaagctgataagcaacttcagcaaagtctcaggataca

SEQ ID NO: 61362 - DNA, 120 bp, synthetic construct; identical to SEQ ID NO: 32136
  source 1..120: mol_type = other DNA

SEQ ID NO: 61363 - DNA, 120 bp, synthetic construct; identical to SEQ ID NO: 32137
  source 1..120: mol_type = other DNA

SEQ ID NO: 61364 - DNA, 120 bp, synthetic construct
  source 1..120: mol_type = other DNA
cgcccactttttgatggggttgtttgtttttttcttgtgaatttgtttgagttcattgtagattctggatattagccctttgtcagatgagtaggttgcgaaaattttctcccattttgt

SEQ ID NO: 61365 - DNA, 120 bp, synthetic construct; identical to SEQ ID NO: 32138
  source 1..120: mol_type = other DNA

SEQ ID NO: 61366 - DNA, 120 bp, synthetic construct
  source 1..120: mol_type = other DNA
agaaatgaaatattattaaatttagtattttaggcaactttcaatggtttttaaagattgactgtttaggccgggctcggtggctcacgcctgtaatcccagcactttgggaggccgagg

SEQ ID NO: 61367 - DNA, 120 bp, synthetic construct
  source 1..120: mol_type = other DNA
tgagataatcatgtggtttttgtctttggttctgtttatatgctggattacatttattgatttgcgtatgttgaaccagccttgcatcctagggatgaagcccacttgatcatggtggtt

SEQ ID NO: 61368 - DNA, 120 bp, synthetic construct
  source 1..120: mol_type = other DNA
acacactgctttgaatgtgtcccagagattctggtatgctgtgtctttgttctcattggtttcaaacaacatctttatttctgccttcatttcgttatgtacccagtagtcattcaggag

SEQ ID NO: 61369 - DNA, 120 bp, synthetic construct
  source 1..120: mol_type = other DNA
catgctacctgacttcaaactatactacaaggctacagtaaccaaaacagcatggaactggtaccaaaacagagatatacaccaacggaacagaacagagctctcagaaataacaccgca

SEQ ID NO: 61370 - DNA, 120 bp, synthetic construct
  source 1..120: mol_type = other DNA
tgggtatatacccaaaggactataaatcatgctgctataaagacacatgcacacgtatgtttattgcggcactattcacaatagcaaagacttggaaccaacccaaatgtccaacaatga

SEQ ID NO: 61371 - DNA, 120 bp, synthetic construct
  source 1..120: mol_type = other DNA
ggcaacttcagcaaagtctcagaatacaaaatcaatgtgcaaaaatcacaaacatttttatacatcaataacagacaaacaaagagccaaatcatgagtgaactcccattcacaattgct

SEQ ID NO: 61372 - DNA, 120 bp, synthetic construct
  source 1..120: mol_type = other DNA
aattcacaagaaaaaaacagacaaccccatcaacaagtgggcaaaggatatgaacagacacttctcaaaagaagacatttatgcagccaaaagacacatgaaaaaatgctcatcatcact

SEQ ID NO: 61373 - DNA, 120 bp, synthetic construct; identical to SEQ ID NO: 32139
  source 1..120: mol_type = other DNA

SEQ ID NO: 61374 - DNA, 120 bp, synthetic construct; identical to SEQ ID NO: 32140
  source 1..120: mol_type = other DNA

SEQ ID NO: 61375 - DNA, 120 bp, synthetic construct; identical to SEQ ID NO: 11894
  source 1..120: mol_type = other DNA

SEQ ID NO: 61376 - DNA, 120 bp, synthetic construct
  source 1..120: mol_type = other DNA
tttatctctaaaaggataagcaaattgggatctggaaatgattttgaggtgttcttccaacgacttggaattgcttcaggcagagcacggtatactaaaaattgggtaagtgaatctcaa

SEQ ID NO: 61377 - DNA, 120 bp, synthetic construct; identical to SEQ ID NO: 11895
  source 1..120: mol_type = other DNA

SEQ ID NO: 61378 - DNA, 120 bp, synthetic construct
  source 1..120: mol_type = other DNA
tatacacatacattttagggtggagacctagaagaacaattttgtttgcaagctgggatgcagaagaatttggtcttcttggttctactgagtgggcagaggttagttggtaatttgcta

SEQ ID NO: 61379 - DNA, 120 bp, synthetic construct; identical to SEQ ID NO: 11896
  source 1..120: mol_type = other DNA

SEQ ID NO: 61380 - DNA, 120 bp, synthetic construct; identical to SEQ ID NO: 11897
  source 1..120: mol_type = other DNA

SEQ ID NO: 61381 - DNA, 120 bp, synthetic construct
  source 1..120: mol_type = other DNA
gagataccgccactgcactccagcctgggcgacaaagcgagactccgtctcaaaaaaaacaaaaacaaaaactaaaatatattatatgtctgctcttttccacattgtacctagacaatt

SEQ ID NO: 61382 - DNA, 120 bp, synthetic construct; identical to SEQ ID NO: 11898
  source 1..120: mol_type = other DNA

SEQ ID NO: 61383 - DNA, 120 bp, synthetic construct; identical to SEQ ID NO: 12194
  source 1..120: mol_type = other DNA

SEQ ID NO: 61384 - DNA, 120 bp, synthetic construct
  source 1..120: mol_type = other DNA
tgcaccactgtattccagcctggcaacacaatgagactctgtctcttataaaaaaaaaaaaaaaagaaataatgtgacaatactagaaacacatttaaagcatccctacagtgatatata

SEQ ID NO: 61385 - DNA, 120 bp, synthetic construct; identical to SEQ ID NO: 12195
  source 1..120: mol_type = other DNA

SEQ ID NO: 61386 - DNA, 120 bp, synthetic construct
  source 1..120: mol_type = other DNA
ctcaggtgatccacccacctcagcctcccaaagttgtagaattacatgcatgaggcactgcgcctgaccaagagatacatttttgataggtttaatttttaaagacactgcacagatttg

SEQ ID NO: 61387 - DNA, 120 bp, synthetic construct
  source 1..120: mol_type = other DNA
ctagacaattctcaaatttgatagatcaaagagacgtttaagcatatgtatacattttaacattgtcaatattttatttctttaaataaattttctgaacatgttttaaagacccctcgg

SEQ ID NO: 61388 - DNA, 120 bp, synthetic construct; identical to SEQ ID NO: 12196
  source 1..120: mol_type = other DNA

SEQ ID NO: 61389 - DNA, 120 bp, synthetic construct
  source 1..120: mol_type = other DNA
tagaaaagtttccagtaaagccaggtccaacattgtagggcactttgagacttcctctccagctgctatctggtggtgctgagccacccatttttctattggacacaaaaaaacattatt

SEQ ID NO: 61390 - DNA, 120 bp, synthetic construct
  source 1..120: mol_type = other DNA
gtcattggtggtctgcaactgcctagaacaaagaaagaaatttctagatgcatttggtattctgaaagcagatataactgaaagaaaatcctttagaactctttcctgttgttctgacat

SEQ ID NO: 61391 - DNA, 120 bp, synthetic construct
  source 1..120: mol_type = other DNA
tttacctgggcatgccactgaactctggggaaggactttttttagtccaactttcataaagagatttgccttcaaagccttcatcagggcttttcagctacacaaattaaaagaaaaaaa

SEQ ID NO: 61392 - DNA, 120 bp, synthetic construct
  source 1..120: mol_type = other DNA
ttgttgtacataatagagtgaaaagcaaatatttttcagataatttggacataaattttgcccttaataatataaatagtgctgttgacatcgataaactcagagcactgagatatttat

SEQ ID NO: 61393 - DNA, 120 bp, synthetic construct; identical to SEQ ID NO: 12197
  source 1..120: mol_type = other DNA

SEQ ID NO: 61394 - DNA, 120 bp, synthetic construct
  source 1..120: mol_type = other DNA
ggagagagagaaagactctgtctcaaaaaataaaaataaaaagagaaaagaaagctgggcatggtggcacacacctgtaatcccagctattcaggaggctgaggcacaataattgcttga

SEQ ID NO: 61395 - DNA, 120 bp, synthetic construct
  source 1..120: mol_type = other DNA
atgatacaaattttgccattgatgctgcctgtggctgatctcagctaaaaagaggaaatgtgaaataaaaagaaaacccgccgggtgcggtggctcacacctgtaatcccaacactttgg

SEQ ID NO: 61396 - DNA, 120 bp, synthetic construct
  source 1..120: mol_type = other DNA
ggttctggccaatttagagaggcggcacacaaagtgcctttgtgtcctatgtttcgccttttgatgtgtacagcctaagtctgcatttttttttttttttttttgagacgtagtctcgct

SEQ ID NO: 61397 - DNA, 120 bp, synthetic construct
  source 1..120: mol_type = other DNA
cacttgaggccaggaatttgagacaagcctggccaacacagtgaaaccccatctctactaagaaataatatcaaaaaatagctgggtgtggtggtgcacacctataatcccagctactct

SEQ ID NO: 61398 - DNA, 120 bp, synthetic construct
  source 1..120: mol_type = other DNA
tcacaagattcaggtatggctcactgttgcaggacataagctgggatctcctgggaattggtctgcttgcaggccctagagagccttccttcttggttgattttcctctagagatccaac

SEQ ID NO: 61399 - DNA, 120 bp, synthetic construct
  source 1..120: mol_type = other DNA
acatacaataattaactgctgagtggccttcgcccaatcccaggctccactcctgggctccattcccactccctgcctgtctcctaggccactaaaccacagctgtcccctggaataagg

SEQ ID NO: 61400 - DNA, 120 bp, synthetic construct
  source 1..120: mol_type = other DNA
caaggttagtgagtgagcaggtccacaggggcatgattggatcctggaatgaatgaatcaaccatgagagagtgaatgaacactggaatcaatagagtagcagagtaatggattgtggag

SEQ ID NO: 61401 - DNA, 120 bp, synthetic construct
  source 1..120: mol_type = other DNA
ttccaaagtgctgggattacaggcatgagccaccgcgcccagcccatttttgtaaacttttacaatgaagtaatttggtgtcaaaatctgacctgaaaattaatgtgagtttatgtatag

SEQ ID NO: 61402 - DNA, 120 bp, synthetic construct
  source 1..120: mol_type = other DNA
tcaagaagggagagtctctcacattatgaggctgtgtgcaaagcattcttttttttttttcctgagacaaagtctccatatgttgcccaggctggtctcaaattcctggactcaagtgat

SEQ ID NO: 61403 - DNA, 120 bp, synthetic construct
  source 1..120: mol_type = other DNA
tcttggcctcccaaagtgctgagattacaggtgtgagccactgcgcccggccttaagtgcacattttatttatttatttatttatttatttattgagatggagtcttgctctgttgccca

SEQ ID NO: 61404 - DNA, 120 bp, synthetic construct
  source 1..120: mol_type = other DNA
cccagcctggggttacaatttaaattgcttttttaccttcaaatctttgacacctcagtgaggcttaatctgaccgcactattacactacaagtccccatccgtctctgcttaatttttg

SEQ ID NO: 61405 - DNA, 120 bp, synthetic construct
  source 1..120: mol_type = other DNA
tctctacagggtttaacaagtgcgcagtgggagctgcctgccaacctttccatttctacttccccacacccactgttctgtgcaatgaaatctggactcactcctacaaggtcagcaact

SEQ ID NO: 61406 - DNA, 120 bp, synthetic construct
  source 1..120: mol_type = other DNA
tttgagatggagtttcgctcttgttgcccaggctggagtgcaatggcatgatcttggcccactgcaacctcctcctcccaagttcaagtgattctcttgcctcagcctccagagtagctg

SEQ ID NO: 61407 - DNA, 120 bp, synthetic construct
  source 1..120: mol_type = other DNA
cagtgaccagagatcacaccattgcactcctgcctgggcaacagagcgaaactccgcctcaaaaaaaaaaaaaaaaaaaaaagaaaggacatgctctttcccatcatggagtgaataaat

SEQ ID NO: 61408 - DNA, 120 bp, synthetic construct
  source 1..120: mol_type = other DNA
acaaatttaattttttggttagatcctagtaagaaggaggatcaactctttaaacctatgcaaataactacatcaacccaggccgggcatggtggcttatgcctgtaaccccagcacttt

SEQ ID NO: 61409 - DNA, 120 bp, synthetic construct
  source 1..120: mol_type = other DNA
agccactatgcccgacctatttcttttacttatttattttgtgtgtgtgtgtgtgtgtgtgtgtgtgtgtgtgtgtgtgtgtgtgttggtttttgttttgagacggagtctctctcttgt

SEQ ID NO: 61410 - DNA, 120 bp, synthetic construct
  source 1..120: mol_type = other DNA
tataccattttatacctattagaatggcaataataataagatagacaataacaaatgttggcaaggatgtgaaccctcacacagtgctggtggggatgtaaaatggtacagccctttgga

SEQ ID NO: 61411 - DNA, 120 bp, synthetic construct
  source 1..120: mol_type = other DNA
aagacgaaagagaaatttcatccagcttttcagggaccttcagcaaagtttataactgatcagtttgcttggccattttgaacagcgggcttacaggcgtcatagtgagagacaggacta

SEQ ID NO: 61412 - DNA, 120 bp, synthetic construct
  source 1..120: mol_type = other DNA
tttggggagcaaaaagctctcatgtcccaggatcctgtacatacacaattctgtcacccacagccatcagcaaagatttcaaggtagattaatccaaagagaatagcaattaatatccca

SEQ ID NO: 61413 - DNA, 120 bp, synthetic construct
  source 1..120: mol_type = other DNA
ctattcaagatggggttgctttggttgaaacgcctctgacagacccaccagaggagcccttcagtttgtattaatatgatatgtgactacttatttcacagacactgtgtgtcaaatgtc

SEQ ID NO: 61414 - DNA, 120 bp, synthetic construct
  source 1..120: mol_type = other DNA
agttgacctcaaactcctgcactcaagtgatcctcccaccttggcctccaaagtactgggattataggtgtaaaccactgtgcctgggcttttatatattttttaagtgcacattttaat

SEQ ID NO: 61415 - DNA, 120 bp, synthetic construct
  source 1..120: mol_type = other DNA
aacatagctggatctttttctaccaggcccttccaatcataaagagattaactaagtgtagcaccttttatagatctgaataggaaacacttgtcatctgttgtttctaagggcagccac

SEQ ID NO: 61416 - DNA, 120 bp, synthetic construct
  source 1..120: mol_type = other DNA
atgtaggatctctataaaagctgaattaacgaattttgtaatgactgcacctccagacaggagctgtcttccgggcttccacagtctctgacagccctctcccacaaagagtttaccaac

SEQ ID NO: 61417 - DNA, 120 bp, synthetic construct
  source 1..120: mol_type = other DNA
ctaacaagtgccaggtggcagctgcctgactacctttccatctctactttctcacacccactgctctgtgcagtgaaatctggactcactcctacagggtcagcaactacaaccgaggga

SEQ ID NO: 61418 - DNA, 120 bp, synthetic construct
  source 1..120: mol_type = other DNA
tataaaacatgtattatatatgtaatagtagagacagggtctcactattttacccaggttgttctcaaactcctgcgctggagtgatcctcccaaaatgctgggattacaggcatgagtc

SEQ ID NO: 61419 - DNA, 120 bp, synthetic construct
  source 1..120: mol_type = other DNA
ccaccttgacctcctaaagtgctgggattagaggcgtgagacacctctgccagcccactgatttcttttttgaaccgaaagcatagttgatcaatgcaaaagctaataattggatattaa

SEQ ID NO: 61420 - DNA, 120 bp, synthetic construct
  source 1..120: mol_type = other DNA
ttcatgtggcatgatttcacttacatgaaatgtgcagggaaggcaaatttatagaggcagaaagtagattagtagttgcctggggctggaagtgacaacagggattaattgtaaatgggc

SEQ ID NO: 61421 - DNA, 120 bp, synthetic construct
  source 1..120: mol_type = other DNA
cgaggctccggttgcacgaccatttggagtttgatggcctgaaggcaagaggagaaaaaccaggttattagaaaacatgtgttaaaacgaaacaagggagggtaaggacagcttaaaatc

SEQ ID NO: 61422 - DNA, 120 bp, synthetic construct
  source 1..120: mol_type = other DNA
gaataggaattatccgctcttacctatgtttctataccccctacagtcagtagtcttggagtttcctagacctcatttatgctgtggggaaaagcaagagagatcagattgttactctgt

SEQ ID NO: 61423 - DNA, 120 bp, synthetic construct; identical to SEQ ID NO: 19833
  source 1..120: mol_type = other DNA

SEQ ID NO: 61424 - DNA, 120 bp, synthetic construct; identical to SEQ ID NO: 15349
  source 1..120: mol_type = other DNA

SEQ ID NO: 61425 - DNA, 120 bp, synthetic construct
  source 1..120: mol_type = other DNA
ccaaaacaagtatttttctttgttttcaaacatctacttccatctacttatctatttattttttacttttatttgtaacttaattccatcaaggagagagagttcattttctgttatgct

SEQ ID NO: 61426 - DNA, 120 bp, synthetic construct
  source 1..120: mol_type = other DNA
cttttattgcccaggctagagtgcaatggcacaatcttggcccactgcaacctcagcctcccagggtcaagtaattctcctagctcagcctcccaagtagctgagattacaggcatgcac

SEQ ID NO: 61427 - DNA, 120 bp, synthetic construct
  source 1..120: mol_type = other DNA
ctgtgcattactgtaaccagccgtctaatataaagaattaattaaggtagcagctgcttttcaaagagcgcattttttcacagacctattaaataagacaaataacatttaaactttatt

SEQ ID NO: 61428 - DNA, 120 bp, synthetic construct
  source 1..120: mol_type = other DNA
agaggaatgtaaactgtagtaagttagcagaaccaatccgtaaaatttttacgttgtttgttgcaaaatgcagcgttggtgtctccatcactaaccttttctatccctcattgctctttc

SEQ ID NO: 61429 - DNA, 120 bp, synthetic construct
  source 1..120: mol_type = other DNA
caatgttgtggcaggcagttcagtaacttcaggatgcgtatttgtctgttgttgttttaaatcttctctttaaactttgtggagttagtctagagccatctgtaatttggagctaaatga

SEQ ID NO: 61430 - DNA, 120 bp, synthetic construct
  source 1..120: mol_type = other DNA
ttcctcccttccatttatgatcctgttcatgaaaaagagaaattctttcattgtgctagaagcttaaaataatgaaaatgccactttctacattaaacagaaactgaagggaatcaaggt

SEQ ID NO: 61431 - DNA, 120 bp, synthetic construct; identical to SEQ ID NO: 32463
  source 1..120: mol_type = other DNA

SEQ ID NO: 61432 - DNA, 120 bp, synthetic construct; identical to SEQ ID NO: 32464
  source 1..120: mol_type = other DNA

SEQ ID NO: 61433 - DNA, 120 bp, synthetic construct; identical to SEQ ID NO: 32465
  source 1..120: mol_type = other DNA

SEQ ID NO: 61434 - DNA, 120 bp, synthetic construct
  source 1..120: mol_type = other DNA
tcccaaagtgctgggattaccggcgtgagccaccgtgcccggcctcttcattctttcagaaatgtcaacattaagtgcttttactgtaataaaacttgagatttcaatgaggcaagaagg

SEQ ID NO: 61435 - DNA, 120 bp, synthetic construct; identical to SEQ ID NO: 32466
  source 1..120: mol_type = other DNA

SEQ ID NO: 61436 - DNA, 120 bp, synthetic construct; identical to SEQ ID NO: 32467
  source 1..120: mol_type = other DNA

SEQ ID NO: 61437 - DNA, 120 bp, synthetic construct; identical to SEQ ID NO: 32468
  source 1..120: mol_type = other DNA

SEQ ID NO: 61438 - DNA, 120 bp, synthetic construct; identical to SEQ ID NO: 32469
  source 1..120: mol_type = other DNA

SEQ ID NO: 61439 - DNA, 120 bp, synthetic construct
  source 1..120: mol_type = other DNA
aacagaaagaatatttcatgaagtcagaggtggtcgagttttgcgaggggtgggggtcgtccccctggcagaaccggagtgagtctgtgatccctcaattggaaagagggtgagtgaggg

SEQ ID NO: 61440 - DNA, 120 bp, synthetic construct; identical to SEQ ID NO: 11324
  source 1..120: mol_type = other DNA

SEQ ID NO: 61441 - DNA, 120 bp, synthetic construct; identical to SEQ ID NO: 11325
  source 1..120: mol_type = other DNA

SEQ ID NO: 61442 - DNA, 120 bp, synthetic construct
  source 1..120: mol_type = other DNA
agaagcttgtttcaaaaccgttgtactctgatgagttgctttgctttcctttgactctgagctggcattctgtgcatttttgcctgcatctcgctggagggaatgagcctttataattcc

SEQ ID NO: 61443 - DNA, 120 bp, synthetic construct
  source 1..120: mol_type = other DNA
cacaaagtaacaataaagatctgcacatggtaaaagagctacaacaagcaatgatgattaaaaacattattctgggcaaggcatggtggctcaggtctataatcccagcactttgggagg

SEQ ID NO: 61444 - DNA, 120 bp, synthetic construct
  source 1..120: mol_type = other DNA
aaggcattctgtatttggctgctcacaagtctttaccctccagtggaaagccagactatccaggcttgagatggcctcagagataatctaatctgaccttacctctgtccatgcagatag

SEQ ID NO: 61445 - DNA, 120 bp, synthetic construct
  source 1..120: mol_type = other DNA
ccctcttctactccttgacactagtttccttggaatagtttaattgcttgcaagcccaaattaaaaagcaaaatgcaaaaaggtcaggaaactggccaaacacaggtggctcacacctta

SEQ ID NO: 61446 - DNA, 120 bp, synthetic construct
  source 1..120: mol_type = other DNA
cgatagtttgctgagaatgatggtttccagcctcatccatgtccctaaaaaggacatgaactcatcatttttatggctgcatagtattccatggtgtatatgtgccacattttcttaatc

SEQ ID NO: 61447 - DNA, 120 bp, synthetic construct
  source 1..120: mol_type = other DNA
cttatttttctcaggtttgtcaaaatcagatggttgtagatatgcggcattatttctgagggctctgttctgtcccattgatctatatctctgttttggtaccagtaccatgctgttttg

SEQ ID NO: 61448 - DNA, 120 bp, synthetic construct
  source 1..120: mol_type = other DNA
gccttttctgcatctgatatagatttggtcttttcacatagtcccatatttcttggagactttgttcgtttctttttattcttttttctctaaacttctcttctcacttcatttcattca

SEQ ID NO: 61449 - DNA, 120 bp, synthetic construct; identical to SEQ ID NO: 7514
  source 1..120: mol_type = other DNA

SEQ ID NO: 61450 - DNA, 120 bp, synthetic construct
  source 1..120: mol_type = other DNA
ttcctccttgtatctctggtagaatttggctgtgaatccatctggtcctggactctttttggttggtaaattactgattattgccacaatttcagatcctgttattggtctattcagaga

SEQ ID NO: 61451 - DNA, 120 bp, synthetic construct
  source 1..120: mol_type = other DNA
gaggaaagtcattggtagctcgatggggatggcattgaatctataaattaccttgggcagtatggccattttcacgatattgattcttcctacccatgagcatggaatgttcttccattt

SEQ ID NO: 61452 - DNA, 120 bp, synthetic construct
  source 1..120: mol_type = other DNA
cgccacactgacttccacaatggttgaactagtttacagtcccaccaatagtgtaaaagtgttcctatttctccacatcctctccagcacctgttgtttcctgactttttaatgattgcc

SEQ ID NO: 61453 - DNA, 120 bp, synthetic construct
  source 1..120: mol_type = other DNA
taatctaaaattctttcaagataaatattttttaaaagtcttggccaggcacagtgtctcacacctgtaaccccaaaactttggcaggccgaagcaggaggatcacttgaagccaggagt

SEQ ID NO: 61454 - DNA, 120 bp, synthetic construct
  source 1..120: mol_type = other DNA
tcccaaagtgctgggatgacaggcgtgagctactgagcctggcttagtagtacagtgtttgatttggtgtcctgagtgtctgtatgtggatgtggagtgcggttttccactgagcttcag

SEQ ID NO: 61455 - DNA, 120 bp, synthetic construct; identical to SEQ ID NO: 18666
  source 1..120: mol_type = other DNA

SEQ ID NO: 61456 - DNA, 120 bp, synthetic construct; identical to SEQ ID NO: 18667
  source 1..120: mol_type = other DNA

SEQ ID NO: 61457 - DNA, 120 bp, synthetic construct; identical to SEQ ID NO: 18668
  source 1..120: mol_type = other DNA

SEQ ID NO: 61458 - DNA, 120 bp, synthetic construct; identical to SEQ ID NO: 18669
  source 1..120: mol_type = other DNA

SEQ ID NO: 61459 - DNA, 120 bp, synthetic construct
  source 1..120: mol_type = other DNA
ggcgtgagccactgcgcccggcccagtttcctcttttattgagtattgacattttcttttttataaagaactgtgggaagaggggttaccagatatctaaatagagccaaaattgcattt

SEQ ID NO: 61460 - DNA, 120 bp, synthetic construct
  source 1..120: mol_type = other DNA
tacagtggctcacacctgtaatcccagcactatggggggctgagacggtcggatcacctgaggttaggagttggagaccagcctgaccaacacggagaaaccctgtctctactaaaaata

SEQ ID NO: 61461 - DNA, 120 bp, synthetic construct; identical to SEQ ID NO: 17838
  source 1..120: mol_type = other DNA

SEQ ID NO: 61462 - DNA, 120 bp, synthetic construct; identical to SEQ ID NO: 17839
  source 1..120: mol_type = other DNA

SEQ ID NO: 61463 - DNA, 120 bp, synthetic construct; identical to SEQ ID NO: 17840
  source 1..120: mol_type = other DNA

SEQ ID NO: 61464 - DNA, 120 bp, synthetic construct; identical to SEQ ID NO: 14575
  source 1..120: mol_type = other DNA

SEQ ID NO: 61465 - DNA, 120 bp, synthetic construct
  source 1..120: mol_type = other DNA
tccatcagaagctggtgctggcgccatgaagttgtacagcctacagaaccatgagccagataaacctcttttctttataaattacgcaggctcaggtattcctttctagtaatacaaaaa

SEQ ID NO: 61466 - DNA, 120 bp, synthetic construct; identical to SEQ ID NO: 14577
  source 1..120: mol_type = other DNA

SEQ ID NO: 61467 - DNA, 120 bp, synthetic construct; identical to SEQ ID NO: 14578
  source 1..120: mol_type = other DNA

SEQ ID NO: 61468 - DNA, 120 bp, synthetic construct; identical to SEQ ID NO: 14579
  source 1..120: mol_type = other DNA

SEQ ID NO: 61469 - DNA, 120 bp, synthetic construct; identical to SEQ ID NO: 14580
  source 1..120: mol_type = other DNA

SEQ ID NO: 61470 - DNA, 120 bp, synthetic construct
  source 1..120: mol_type = other DNA
tccagcactacctccaccaccaccacctccaccaccacctccaccaccacctccaccaccaccacctccagcaccaccacctccaccaccaccacctccaccaccacctccaccaccacc

SEQ ID NO: 61471 - DNA, 120 bp, synthetic construct
  source 1..120: mol_type = other DNA
tctacgaccaccaccaccaccatctccaccaccacctccaccaccaccaccaccaccatctctacgaccaccaccaccaccaccatctctacgaccaccaccacctccaccaccatctcc

SEQ ID NO: 61472 - DNA, 120 bp, synthetic construct
  source 1..120: mol_type = other DNA
gaggaggaggaggaggagaagaaggaggagggatgaatgaacatatttaaaagcaaagacataggccaggcatggtagctcatgcttataatcccatcactttgggagtctgaggcagga

SEQ ID NO: 61473 - DNA, 120 bp, synthetic construct
  source 1..120: mol_type = other DNA
cgtcgattcgctcgcggctccatcgcggcctggccggggggcggtgtctgctgcgccaggttcgctggccgcacgtcttcaggtcctcctgttcctgggaggcgggcgcggcaggactgg

SEQ ID NO: 61474 - DNA, 120 bp, synthetic construct
  source 1..120: mol_type = other DNA
tacttcaaggataagggcgacagcaacagctctgccggctggaaggtgcgtacccaccccgggctggcagcaggacccgccgggcctcctgcgcagcgcgagacgcgtctcggattcgtc

SEQ ID NO: 61475 - DNA, 120 bp, synthetic construct; identical to SEQ ID NO: 28193
  source 1..120: mol_type = other DNA

SEQ ID NO: 61476 - DNA, 120 bp, synthetic construct; identical to SEQ ID NO: 28194
  source 1..120: mol_type = other DNA

SEQ ID NO: 61477 - DNA, 120 bp, synthetic construct
  source 1..120: mol_type = other DNA
tccgaagtgagcaggtcctggagtgtctggttaccatagtgtgacatggaagagaaggtagctggcttgttctcttggatggtctgcatgggagactggcgtagggagttcagagatgaa

SEQ ID NO: 61478 - DNA, 120 bp, synthetic construct; identical to SEQ ID NO: 28195
  source 1..120: mol_type = other DNA

SEQ ID NO: 61479 - DNA, 120 bp, synthetic construct
  source 1..120: mol_type = other DNA
tgttggtgcccactgtcacggtgcaagcatcagcaagaactcaagcagggaagtctgtgctgaaatactagcctgtattcctaaggcccatgcataaggttccatttttgtactgtacat

SEQ ID NO: 61480 - DNA, 120 bp, synthetic construct; identical to SEQ ID NO: 28196
  source 1..120: mol_type = other DNA

SEQ ID NO: 61481 - DNA, 120 bp, synthetic construct; identical to SEQ ID NO: 28197
  source 1..120: mol_type = other DNA

SEQ ID NO: 61482 - DNA, 120 bp, synthetic construct; identical to SEQ ID NO: 28198
  source 1..120: mol_type = other DNA

SEQ ID NO: 61483 - DNA, 120 bp, synthetic construct; identical to SEQ ID NO: 28199
  source 1..120: mol_type = other DNA

SEQ ID NO: 61484 - DNA, 120 bp, synthetic construct; identical to SEQ ID NO: 17675
  source 1..120: mol_type = other DNA

SEQ ID NO: 61485 - DNA, 120 bp, synthetic construct; identical to SEQ ID NO: 17676
  source 1..120: mol_type = other DNA

SEQ ID NO: 61486 - DNA, 120 bp, synthetic construct
  source 1..120: mol_type = other DNA
agaatcgcttgaacccaggaggcggaggtcgcagtgagccgagatcatgccagtgcactccagcctgggtaacaagagtgaaactccgtgtcaaaaaaaaaaaaaaaatgttactcatcc

SEQ ID NO: 61487 - DNA, 120 bp, synthetic construct; identical to SEQ ID NO: 17677
  source 1..120: mol_type = other DNA

SEQ ID NO: 61488 - DNA, 120 bp, synthetic construct; identical to SEQ ID NO: 61479
  source 1..120: mol_type = other DNA

SEQ ID NO: 61489 - DNA, 120 bp, synthetic construct; identical to SEQ ID NO: 17680
  source 1..120: mol_type = other DNA

SEQ ID NO: 61490 - DNA, 120 bp, synthetic construct; identical to SEQ ID NO: 17681
  source 1..120: mol_type = other DNA

SEQ ID NO: 61491 - DNA, 120 bp, synthetic construct; identical to SEQ ID NO: 17682
  source 1..120: mol_type = other DNA

SEQ ID NO: 61492 - DNA, 120 bp, synthetic construct; identical to SEQ ID NO: 17683
  source 1..120: mol_type = other DNA

SEQ ID NO: 61493 - DNA, 120 bp, synthetic construct; identical to SEQ ID NO: 17684
  source 1..120: mol_type = other DNA

SEQ ID NO: 61494 - DNA, 120 bp, synthetic construct; identical to SEQ ID NO: 17685
  source 1..120: mol_type = other DNA

SEQ ID NO: 61495 - DNA, 120 bp, synthetic construct
  source 1..120: mol_type = other DNA
acccaccttggcctcccaaagtgctgggattacaggcgtgagtcaccacacccagctgagaataaaagggctttaactgaatatgtaatatttttatttcttaaaaaataaaagatatca

SEQ ID NO: 61496 - DNA, 120 bp, synthetic construct
  source 1..120: mol_type = other DNA
agaagagaattattcccttaagataaaataatatgtaaaaatcactaagtagcccctaagtagaaaagacattatgaggaaaaatgacctttagcctagaatctgcatatacataactaa

SEQ ID NO: 61497 - DNA, 120 bp, synthetic construct; identical to SEQ ID NO: 875
  source 1..120: mol_type = other DNA

SEQ ID NO: 61498 - DNA, 120 bp, synthetic construct
  source 1..120: mol_type = other DNA
caaaaattcttttttttttttttgagacagagtttccctcattgcccaggccggaatgcagtggtgcgatctcggcttactgcaacctccacctcctaggttcaagtgattctcctgcct

SEQ ID NO: 61499 - DNA, 120 bp, synthetic construct
  source 1..120: mol_type = other DNA
tccaataatcagcagactcactcacctgggatctggccgtgaggcgcagagcagccacttctccctcttctgtgctcttctcttggaaatggggagaatcctgggaagacagaactaacg

SEQ ID NO: 61500 - DNA, 120 bp, synthetic construct
  source 1..120: mol_type = other DNA
tacaagttcaacacgtccgcaattctcacctcctttctcaggcatttcagccaaatctgtctccatgatcaccacctcctccttgttctggagattctgctcttcaccccaattcagatc

SEQ ID NO: 61501 - DNA, 120 bp, synthetic construct
  source 1..120: mol_type = other DNA
gcttttatccatattttgtgcgcccagaactcatccttttgctttcaaaacatacgaaggatgtttttaggaagagcaggtccctctttgtacactcagtcagatgttcctgtatccaca

SEQ ID NO: 61502 - DNA, 120 bp, synthetic construct
  source 1..120: mol_type = other DNA
tgacaaggaactgaggatggcctccagccaatagcctgcaagaaccgaaggcccttggtcccacaacctgcaaggagctgaaccctttggacagctctgtgtgcttggaagtgaatcatt

SEQ ID NO: 61503 - DNA, 120 bp, synthetic construct; identical to SEQ ID NO: 34111
  source 1..120: mol_type = other DNA

SEQ ID NO: 61504 - DNA, 120 bp, synthetic construct; identical to SEQ ID NO: 34112
  source 1..120: mol_type = other DNA

SEQ ID NO: 61505 - DNA, 120 bp, synthetic construct; identical to SEQ ID NO: 7499
  source 1..120: mol_type = other DNA

SEQ ID NO: 61506 - DNA, 120 bp, synthetic construct; identical to SEQ ID NO: 7500
  source 1..120: mol_type = other DNA

SEQ ID NO: 61507 - DNA, 120 bp, synthetic construct
  source 1..120: mol_type = other DNA
gagttcgtggtggatgctgaaccccgagggcggaaagacagggaagaccccgcggcgcagggccgtgtccatggacaacggggccaagttcctgcgcatcaagggcaaggcgagcaagaa

SEQ ID NO: 61508 - DNA, 120 bp, synthetic construct; identical to SEQ ID NO: 24422
  source 1..120: mol_type = other DNA

SEQ ID NO: 61509 - DNA, 120 bp, synthetic construct; identical to SEQ ID NO: 24413
  source 1..120: mol_type = other DNA

SEQ ID NO: 61510 - DNA, 120 bp, synthetic construct; identical to SEQ ID NO: 24414
  source 1..120: mol_type = other DNA

SEQ ID NO: 61511 - DNA, 120 bp, synthetic construct; identical to SEQ ID NO: 24415
  source 1..120: mol_type = other DNA

SEQ ID NO: 61512 - DNA, 120 bp, synthetic construct; identical to SEQ ID NO: 24416
  source 1..120: mol_type = other DNA

SEQ ID NO: 61513 - DNA, 120 bp, synthetic construct; identical to SEQ ID NO: 24417
  source 1..120: mol_type = other DNA

SEQ ID NO: 61514 - DNA, 120 bp, synthetic construct; identical to SEQ ID NO: 24418
  source 1..120: mol_type = other DNA

SEQ ID NO: 61515 - DNA, 120 bp, synthetic construct; identical to SEQ ID NO: 24419
  source 1..120: mol_type = other DNA

SEQ ID NO: 61516 - DNA, 120 bp, synthetic construct; identical to SEQ ID NO: 24420
  source 1..120: mol_type = other DNA

SEQ ID NO: 61517 - DNA, 120 bp, synthetic construct; identical to SEQ ID NO: 24421
  source 1..120: mol_type = other DNA

SEQ ID NO: 61518 - DNA, 120 bp, synthetic construct
  source 1..120: mol_type = other DNA
agatgaacatttgtactatatacacacatgcctgcacacacacaaatagagagactcagagatttttcagcttcaccaaggagtcctgaccgccaaacagtttaaagcgcttggctaaca

SEQ ID NO: 61519 - DNA, 120 bp, synthetic construct
  source 1..120: mol_type = other DNA
ggaagggacggagggagggaagaagggacggagggagggaagaagggacggagggagggaagaagggacggagggagggaagaagggagggagggaagaagggacggagggagggaggaa

SEQ ID NO: 61520 - DNA, 120 bp, synthetic construct; identical to SEQ ID NO: 29957
  source 1..120: mol_type = other DNA

SEQ ID NO: 61521 - DNA, 120 bp, synthetic construct
  source 1..120: mol_type = other DNA
aaaattggaaatcatcattctcagtaaactatcacaagaacaaaaaaccaaacaccacatattctcactcataggtgggaattgaacaatgagatcacatggacacaggaaggggaatat

SEQ ID NO: 61522 - DNA, 120 bp, synthetic construct
  source 1..120: mol_type = other DNA
gcatgttttataatcctttgggtatatacccagtaatgggatggctgggccaaatggtatttctagttctagatccctgaggaatcgccacactgacttccacaatggttgaactagttt

SEQ ID NO: 61523 - DNA, 120 bp, synthetic construct
  source 1..120: mol_type = other DNA
gagggtgtatgtgtccaggaatttatccattccttctagattttctagtttatttgcgtagaggtgtttatagtattctctggtggcagtttgtatttctgtgggatcggtggtgatatc

SEQ ID NO: 61524 - DNA, 120 bp, synthetic construct
  source 1..120: mol_type = other DNA
atttattttttatattttctttttctattttattattattgaactttaagttttagggtacatgtgcacaatgtgttatttacatatgtatacatgtgccatgctggtgtgctgcaccca

SEQ ID NO: 61525 - DNA, 120 bp, synthetic construct
  source 1..120: mol_type = other DNA
acatgaagtccttgctcatgcctatgtcctgaattgcttcaaagagaataaaataccgaggaatccaacttacaagggatgtgaaggacctcttcaaggagaactacaaaccactgctca

SEQ ID NO: 61526 - DNA, 120 bp, synthetic construct; identical to SEQ ID NO: 27755
  source 1..120: mol_type = other DNA

SEQ ID NO: 61527 - DNA, 120 bp, synthetic construct
  source 1..120: mol_type = other DNA
tacggcctatttttcattttcttctctgcaggttttgtctcttcatctcaacgcatgttgaccacagatgacaaagcggtggtcttgaaaaggatccatgaagtccatgtaagtttctag

SEQ ID NO: 61528 - DNA, 120 bp, synthetic construct; identical to SEQ ID NO: 25546
  source 1..120: mol_type = other DNA

SEQ ID NO: 61529 - DNA, 120 bp, synthetic construct
  source 1..120: mol_type = other DNA
gcttaagaaacggcgcaccacgagactatatcccacacctggctcggagggtcctacgcccacggaatctcgctgattgctagcacagcagtctgagaccaaactgcaaggcggcaacga

SEQ ID NO: 61530 - DNA, 120 bp, synthetic construct
  source 1..120: mol_type = other DNA
aagcgagaagggaagtttagagaaaaaagaataaaaagaaatgagcaaagcctccaagaaatatgggactatgtgaaaagaccaaatctacgtctgattggtgtacctgaaagtgatgtg

SEQ ID NO: 61531 - DNA, 120 bp, synthetic construct
  source 1..120: mol_type = other DNA
tcccacacattaataatgggagactttaacaccccactgtcaacattagacagatcaacaagacagaaagtcaacaaggatacccaggaattgaactcagctctgcaccaagcggaccta

SEQ ID NO: 61532 - DNA, 120 bp, synthetic construct
  source 1..120: mol_type = other DNA
ctctacgcaaataaactagaaaatctagaagaaatggatacattcctcgacacatacactctcccaagactaaaccaggaagaagttgaatctctgaatagaccaataacaggctctgaa

SEQ ID NO: 61533 - DNA, 120 bp, synthetic construct
  source 1..120: mol_type = other DNA
ctagaaaaccccatcgtctcagcccaaaatctccttaagctgataagtaacttcagcaaagtctcaggatacaaaatcaatgtacaaaaatcacaagcattcttatacaccaacaacaga

SEQ ID NO: 61534 - DNA, 120 bp, synthetic construct
  source 1..120: mol_type = other DNA
aaacaaatttacaagaaaaaaacaaacaaccccatcaaaaagtgggcgaaggacatgaacagacacttctcaaaagaagacatttatgcagccaaaaaacacatgaagaaatgctcatca

SEQ ID NO: 61535 - DNA, 120 bp, synthetic construct; identical to SEQ ID NO: 25547
  source 1..120: mol_type = other DNA

SEQ ID NO: 61536 - DNA, 120 bp, synthetic construct; identical to SEQ ID NO: 25548
  source 1..120: mol_type = other DNA

SEQ ID NO: 61537 - DNA, 120 bp, synthetic construct; identical to SEQ ID NO: 25539
  source 1..120: mol_type = other DNA

SEQ ID NO: 61538 - DNA, 120 bp, synthetic construct
  source 1..120: mol_type = other DNA
cccccagcaggggcacactgacacctcacacggcagggtattccaacagacctgcagctgagggtcctgtctgttagaaggaaaactaacaaccagaaaggacatctacaccgaaaaccc

SEQ ID NO: 61539 - DNA, 120 bp, synthetic construct
  source 1..120: mol_type = other DNA
aaaatactttatagacaagcaaatgctgagagattttgtcaccaccaggcctgccctaaaagagctcctgaaggaagcgctaaacatggaaaggaacaaccggtaccagccgctgcaaaa

SEQ ID NO: 61540 - DNA, 120 bp, synthetic construct
  source 1..120: mol_type = other DNA
aactgaacaacctgctcctgaatgactactgggtacataacgaaatgaaggcagaaataaagatgttctttgaaaccaacgagaacaaagacaccacatgccagaatctctgggacacat

SEQ ID NO: 61541 - DNA, 120 bp, synthetic construct
  source 1..120: mol_type = other DNA
atcaaaaagcttatccaccatgatcaagtgggcttcatccctgggatgcaaggctggttcaacatacgaaaatcaataaacgtaatctagcatataaacagagccaaagacaaaaaccac

SEQ ID NO: 61542 - DNA, 120 bp, synthetic construct
  source 1..120: mol_type = other DNA
tatggaaccaaaaaagagcccgcatcgccaagtcaatcctaagccaaaagaacaaagctggaggcatcacactacctgagttcaaactataatacaaggctacagtaaccaaaacagcat

SEQ ID NO: 61543 - DNA, 120 bp, synthetic construct
  source 1..120: mol_type = other DNA
ctatgcagccataaaaaatgatgagttcatatcctttgtagggacatggatgaaattggaaaccatcattctcagtaaactatcgcaagaacaaaaaaccaaacaccgcatattctcact

SEQ ID NO: 61544 - DNA, 120 bp, synthetic construct; identical to SEQ ID NO: 25538
  source 1..120: mol_type = other DNA

SEQ ID NO: 61545 - DNA, 120 bp, synthetic construct
  source 1..120: mol_type = other DNA
tcttctagttgatcgaatcagctactgaggcttgcattcatcatgtagttctcgtgccatggttttcagctccatcaggtcttttgaagatttctctgcattggttattctagttagcca

SEQ ID NO: 61546 - DNA, 120 bp, synthetic construct; identical to SEQ ID NO: 25540
  source 1..120: mol_type = other DNA

SEQ ID NO: 61547 - DNA, 120 bp, synthetic construct
  source 1..120: mol_type = other DNA
ctttttgagaagtgtctgttcatatccttcacccacttgttgatggggttgtttgtttttttcttgtaaatttgtttgagttcattgtagattctggatattagccctttgtcagatgag

SEQ ID NO: 61548 - DNA, 120 bp, synthetic construct
  source 1..120: mol_type = other DNA
ttcctccatccctttattttgagcctatgtgtgtccctgcacgtgagatgggttacctgaatacagcacactgatgggtcttgactctttatccaatttgccagtctgtgtcttttaatt

SEQ ID NO: 61549 - DNA, 120 bp, synthetic construct; identical to SEQ ID NO: 25541
  source 1..120: mol_type = other DNA

SEQ ID NO: 61550 - DNA, 120 bp, synthetic construct; identical to SEQ ID NO: 25542
  source 1..120: mol_type = other DNA

SEQ ID NO: 61551 - DNA, 120 bp, synthetic construct; identical to SEQ ID NO: 25543
  source 1..120: mol_type = other DNA

SEQ ID NO: 61552 - DNA, 120 bp, synthetic construct
  source 1..120: mol_type = other DNA
atgggatggctgggtcaaatggtatttctagttctagatccctgaggaatcaccacactgacttccacaatggttgaagtagtttacagtcccaccaacagtgtaaaagtgttcctattt

SEQ ID NO: 61553 - DNA, 120 bp, synthetic construct
  source 1..120: mol_type = other DNA
tcaggtagtgtgatgcctccagctttattcttttggcttaggattgacttggcaatgcgggctcttttttggttccatatgaactttaaagtagttttttccaattctgtgaagaaagtc

SEQ ID NO: 61554 - DNA, 120 bp, synthetic construct; identical to SEQ ID NO: 25544
  source 1..120: mol_type = other DNA

SEQ ID NO: 61555 - DNA, 120 bp, synthetic construct; identical to SEQ ID NO: 25545
  source 1..120: mol_type = other DNA

SEQ ID NO: 61556 - DNA, 120 bp, synthetic construct
  source 1..120: mol_type = other DNA
ccttcacccactttttgatggggttgtttgtttttttttcttgtaaatttgtttgagttcattgtacattctggatattagtcctttgtcagatgagtaggctgcgaaaatcttctccca

SEQ ID NO: 61557 - DNA, 120 bp, synthetic construct
  source 1..120: mol_type = other DNA
attgtgaatgggagttcacccattatttggctctctgtttgtctgttgttggtgtataagaatgcttgtgatttttgtacattgattttgtatcctgagactttgctgaagttgcttatc

SEQ ID NO: 61558 - DNA, 120 bp, synthetic construct
  source 1..120: mol_type = other DNA
tgatatcccctttatcattttttattgcatctatttgattcttctttttttctttattagaaaaaaaagtggtctatcaattttgttgatcctttcaaaaaaccagctcctggattcatt

SEQ ID NO: 61559 - DNA, 120 bp, synthetic construct
  source 1..120: mol_type = other DNA
tggggtgttaaagtctcccattattattgtgtgggagtctaagtctctttgtaggtcgctaaggacttgctttatgaatctgggtgctgctgtattgggtgcatatatattcaggatagt

SEQ ID NO: 61560 - DNA, 120 bp, synthetic construct
  source 1..120: mol_type = other DNA
tgaatgttggcctgccttgctagattggggaagttctcctggataatatcctgcagagtgttttccaacttggttccattctccacatcactttcaggtacaccaatcagacgtagattt

SEQ ID NO: 61561 - DNA, 120 bp, synthetic construct; identical to SEQ ID NO: 32093
  source 1..120: mol_type = other DNA

SEQ ID NO: 61562 - DNA, 120 bp, synthetic construct; identical to SEQ ID NO: 32094
  source 1..120: mol_type = other DNA

SEQ ID NO: 61563 - DNA, 120 bp, synthetic construct
  source 1..120: mol_type = other DNA
cttcctacccatgagcatggaatgttcttccatttctttgtatcctcttttatttcattgagcagtggtttgtagttctccttgaagaggtccttcaggtcccttgtaagttggatgcct

SEQ ID NO: 61564 - DNA, 120 bp, synthetic construct
  source 1..120: mol_type = other DNA
aatgagttagggaggattccctctttttctattgattggaatagtttcagaaggaatggtaccagctcctccttgtacctctggtagaattcggctgtgaatccatcaggtcctggactc

SEQ ID NO: 61565 - DNA, 120 bp, synthetic construct
  source 1..120: mol_type = other DNA
gtgtggtgctgaaaaaaatgtatattctgttgatttggggtggagggttctgcagatgcctattaggtctgcttggtgcagaggtgagttcaattcctgggtacccttgttaacttttgt

SEQ ID NO: 61566 - DNA, 120 bp, synthetic construct
  source 1..120: mol_type = other DNA
gaagttttcctggataatatcttgcagagtgttttccaacttggttccattctccccatcactcatcactttcaggtacaccaatcagacgtagatttggtcttttcacatagtcccata

SEQ ID NO: 61567 - DNA, 120 bp, synthetic construct
  source 1..120: mol_type = other DNA
caggtctccttgagctgtggtgggctccacgcagttcgagcttcctggctgctttgtttacctaagcaagcctgggcaatggcgggcgcccctcccccagcctcgctgccgccttgcagt

SEQ ID NO: 61568 - DNA, 120 bp, synthetic construct; identical to SEQ ID NO: 13658
  source 1..120: mol_type = other DNA

SEQ ID NO: 61569 - DNA, 120 bp, synthetic construct; identical to SEQ ID NO: 13659
  source 1..120: mol_type = other DNA

SEQ ID NO: 61570 - DNA, 120 bp, synthetic construct
  source 1..120: mol_type = other DNA
tcattgttcaattcccacctatgagtgagaacatgcagtgtttggttttttctcctcgcgatagtttgctgagaatgatggtttccagcttcatcgatgtccctacaatggacatgaact

SEQ ID NO: 61571 - DNA, 120 bp, synthetic construct
  source 1..120: mol_type = other DNA
gccagttttcccagcaccatttattaaatagggaatcctttccccattgcttgtttttctcaggtttggcaaagatcagatagttgtagatatgtggcattatttctgagggctctcttc

SEQ ID NO: 61572 - DNA, 120 bp, synthetic construct
  source 1..120: mol_type = other DNA
tattttgtgatacgtcccatcaatacctaatttattgagagtttttagcatgaagcattgttgaattttgtcaaaggccttttctgcatctattgagataatcacgtgttttttgtcttt

SEQ ID NO: 61573 - DNA, 120 bp, synthetic construct
  source 1..120: mol_type = other DNA
cttctctagttcttttaattgtgatgttagggtgtgaattttagatctttcctgctttctcttgtgggcatttagtgctataaatttccctctacacactgctttgaatgtgtcccagag

SEQ ID NO: 61574 - DNA, 120 bp, synthetic construct
  source 1..120: mol_type = other DNA
catcggttactgaggcttgtgcattcatcacattctcgtgctgtggttttcagctccatcaggtcctttaaggacttctctgcattggttattctagttatccatttatctaattttttt

SEQ ID NO: 61575 - DNA, 120 bp, synthetic construct
  source 1..120: mol_type = other DNA
taagttttaaggtacatgtgcacaatgtgcaggttacatatgtatacatgtgccatgctggtgtgctgcacccattaactcgtcatttagcattaggtatatctcctaatgctatccctc

SEQ ID NO: 61576 - DNA, 120 bp, synthetic construct
  source 1..120: mol_type = other DNA
ctgaatggtaatgcctaggttttcttctagggtttttaatggttttaggtctaacatttaagtctttaatccatcttgaattaatttttgtataaggtgtaaggaagggatccagtttca

SEQ ID NO: 61577 - DNA, 120 bp, synthetic construct
  source 1..120: mol_type = other DNA
atacgtcccatcaatacctaatttattgagagtttttagcatgaaggtaagggttgttgaattttgtcaaaggccttttctgcatctattgagataatcaagtggtttttgtctttggtt

SEQ ID NO: 61578 - DNA, 120 bp, synthetic construct
  source 1..120: mol_type = other DNA
ttgttcagtttccatgtagttgagtggttttgagtgagtttcttaatcctgagtagtagtttgattgcactgtggtctgagagacagtttgttataatttctgttcttttacatttgctg

SEQ ID NO: 61579 - DNA, 120 bp, synthetic construct
  source 1..120: mol_type = other DNA
atctgctgttagtcggatgtgcttccctttgtgggtaacccgaccttgctctctggctgcccttaacattttttccttcatttcaactttggtgaatctgacaatttatgtgtcttggag

SEQ ID NO: 61580 - DNA, 120 bp, synthetic construct
  source 1..120: mol_type = other DNA
ccgttctcagatctccagctgcatgctgggacaaccactgctctcttcaaagctgtcagacttggacatttaagtctgcagaggttactgctgtctttttgtttgtctgtgccctgcccc

SEQ ID NO: 61581 - DNA, 120 bp, synthetic construct; identical to SEQ ID NO: 25814
  source 1..120: mol_type = other DNA

SEQ ID NO: 61582 - DNA, 120 bp, synthetic construct
  source 1..120: mol_type = other DNA
cattttatgaagccagcattatcctgataccaaagtctggcagagacacaacaaagaaagagaattttagaccaatatccctgatgaacattgatgcaaaaatcctcaataaaatactgg

SEQ ID NO: 61583 - DNA, 120 bp, synthetic construct
  source 1..120: mol_type = other DNA
tattcacaattgcttcaaagagaataaaatacctaagaatccaacttacaagggacgtgaaggacctcttcaaggagaactacaaaccactgctcaatgaaataaaagaggatacaaaca

SEQ ID NO: 61584 - DNA, 120 bp, synthetic construct; identical to SEQ ID NO: 26025
  source 1..120: mol_type = other DNA

SEQ ID NO: 61585 - DNA, 120 bp, synthetic construct; identical to SEQ ID NO: 26026
  source 1..120: mol_type = other DNA

SEQ ID NO: 61586 - DNA, 120 bp, synthetic construct; identical to SEQ ID NO: 26027
  source 1..120: mol_type = other DNA

SEQ ID NO: 61587 - DNA, 120 bp, synthetic construct; identical to SEQ ID NO: 26028
  source 1..120: mol_type = other DNA

SEQ ID NO: 61588 - DNA, 120 bp, synthetic construct; identical to SEQ ID NO: 26029
  source 1..120: mol_type = other DNA

SEQ ID NO: 61589 - DNA, 120 bp, synthetic construct; identical to SEQ ID NO: 26030
  source 1..120: mol_type = other DNA

SEQ ID NO: 61590 - DNA, 120 bp, synthetic construct; identical to SEQ ID NO: 26031
  source 1..120: mol_type = other DNA

SEQ ID NO: 61591 - DNA, 120 bp, synthetic construct; identical to SEQ ID NO: 26032
  source 1..120: mol_type = other DNA

SEQ ID NO: 61592 - DNA, 120 bp, synthetic construct; identical to SEQ ID NO: 26033
  source 1..120: mol_type = other DNA

SEQ ID NO: 61593 - DNA, 120 bp, synthetic construct
  source 1..120: mol_type = other DNA
acataaaatagctattaagctttcaatccgatcaaatgaacacttgtctactagggataatttgatcctagtgtattcacttggaggacaaaattaaattagttaatgatcgctttattt

SEQ ID NO: 61594 - DNA, 120 bp, synthetic construct
  source 1..120: mol_type = other DNA
atctttgttgaaaagctccagcttatttaaaaaaatacaattagacctttttttttctcccccaagatggagtctcgctctctcccccagactagagtgccatggcgcgatctcggctca

SEQ ID NO: 61595 - DNA, 120 bp, synthetic construct
  source 1..120: mol_type = other DNA
ctccctttctctacttccctctccaccttgcccgctctcctccctctctctctctctctctctctcgctgtttctctctctccttccgtttctatctttccatccctctgtcctttgctt

SEQ ID NO: 61596 - DNA, 120 bp, synthetic construct; identical to SEQ ID NO: 26036
  source 1..120: mol_type = other DNA

SEQ ID NO: 61597 - DNA, 120 bp, synthetic construct; identical to SEQ ID NO: 26037
  source 1..120: mol_type = other DNA

SEQ ID NO: 61598 - DNA, 120 bp, synthetic construct
  source 1..120: mol_type = other DNA
ggtgctgtccgagggtgtcgggagggccatcgcggtgagccccggccggaatttcacggacggacgcgggcagagagaggccggcgggctcccgtgcacctcagccggcctgtgcactgc

SEQ ID NO: 61599 - DNA, 120 bp, synthetic construct; identical to SEQ ID NO: 11496
  source 1..120: mol_type = other DNA

SEQ ID NO: 61600 - DNA, 120 bp, synthetic construct; identical to SEQ ID NO: 11497
  source 1..120: mol_type = other DNA

SEQ ID NO: 61601 - DNA, 120 bp, synthetic construct; identical to SEQ ID NO: 11498
  source 1..120: mol_type = other DNA

SEQ ID NO: 61602 - DNA, 120 bp, synthetic construct
  source 1..120: mol_type = other DNA
gggtgttcagttggaggcactttctcaaactctcattgtgttcacagaaccagagtccagctcatatcaggaaaactgcaggaaaagaaaaatcagttccaaggatatctgccaagacag

SEQ ID NO: 61603 - DNA, 120 bp, synthetic construct; identical to SEQ ID NO: 11499
  source 1..120: mol_type = other DNA

SEQ ID NO: 61604 - DNA, 120 bp, synthetic construct; identical to SEQ ID NO: 11500
  source 1..120: mol_type = other DNA

SEQ ID NO: 61605 - DNA, 120 bp, synthetic construct
  source 1..120: mol_type = other DNA
atggatgtgttgatgtatcaaacatgtacagttaaaattgtacctttttttgacagagcctcactctgtccctctggaaggagtgcagtggtgcaatcacagctcactgcagccttgacc

SEQ ID NO: 61606 - DNA, 120 bp, synthetic construct; identical to SEQ ID NO: 11501
  source 1..120: mol_type = other DNA

SEQ ID NO: 61607 - DNA, 120 bp, synthetic construct; identical to SEQ ID NO: 11502
  source 1..120: mol_type = other DNA

SEQ ID NO: 61608 - DNA, 120 bp, synthetic construct; identical to SEQ ID NO: 11493
  source 1..120: mol_type = other DNA

SEQ ID NO: 61609 - DNA, 120 bp, synthetic construct; identical to SEQ ID NO: 11494
  source 1..120: mol_type = other DNA

SEQ ID NO: 61610 - DNA, 120 bp, synthetic construct; identical to SEQ ID NO: 11495
  source 1..120: mol_type = other DNA

SEQ ID NO: 61611 - DNA, 120 bp, synthetic construct
  source 1..120: mol_type = other DNA
ctttttttttttttgagccggagtctcgctctgtcgcccaggctggagtgcggtggcgcgatctcggctcactgcaagctccgcgtcccgggttcgcgccattctcctgcctcagcctcc

SEQ ID NO: 61612 - DNA, 120 bp, synthetic construct; identical to SEQ ID NO: 11496
  source 1..120: mol_type = other DNA

SEQ ID NO: 61613 - DNA, 120 bp, synthetic construct; identical to SEQ ID NO: 11497
  source 1..120: mol_type = other DNA

SEQ ID NO: 61614 - DNA, 120 bp, synthetic construct; identical to SEQ ID NO: 11498
  source 1..120: mol_type = other DNA

SEQ ID NO: 61615 - DNA, 120 bp, synthetic construct; identical to SEQ ID NO: 61602
  source 1..120: mol_type = other DNA

SEQ ID NO: 61616 - DNA, 120 bp, synthetic construct; identical to SEQ ID NO: 11499
  source 1..120: mol_type = other DNA

SEQ ID NO: 61617 - DNA, 120 bp, synthetic construct; identical to SEQ ID NO: 11500
  source 1..120: mol_type = other DNA

SEQ ID NO: 61618 - DNA, 120 bp, synthetic construct; identical to SEQ ID NO: 61605
  source 1..120: mol_type = other DNA

SEQ ID NO: 61619 - DNA, 120 bp, synthetic construct; identical to SEQ ID NO: 11501
  source 1..120: mol_type = other DNA

SEQ ID NO: 61620 - DNA, 120 bp, synthetic construct; identical to SEQ ID NO: 11502
  source 1..120: mol_type = other DNA

SEQ ID NO: 61621 - DNA, 120 bp, synthetic construct; identical to SEQ ID NO: 24433
  source 1..120: mol_type = other DNA

SEQ ID NO: 61622 - DNA, 120 bp, synthetic construct; identical to SEQ ID NO: 24434
  source 1..120: mol_type = other DNA

SEQ ID NO: 61623 - DNA, 120 bp, synthetic construct; identical to SEQ ID NO: 24435
  source 1..120: mol_type = other DNA

SEQ ID NO: 61624 - DNA, 120 bp, synthetic construct; identical to SEQ ID NO: 24436
  source 1..120: mol_type = other DNA

SEQ ID NO: 61625 - DNA, 120 bp, synthetic construct; identical to SEQ ID NO: 28221
  source 1..120: mol_type = other DNA

SEQ ID NO: 61626 - DNA, 120 bp, synthetic construct
  source 1..120: mol_type = other DNA
aaaatgatgagttcatgtcctttgcagggacatggatgaaattagaaatcatcattctcagtaaaccatcgcaaggacaaaaaaccaaacaccgcatgttcttactcataggtgggaatt

SEQ ID NO: 61627 - DNA, 120 bp, synthetic construct; identical to SEQ ID NO: 28222
  source 1..120: mol_type = other DNA

SEQ ID NO: 61628 - DNA, 120 bp, synthetic construct; identical to SEQ ID NO: 28223
  source 1..120: mol_type = other DNA

SEQ ID NO: 61629 - DNA, 120 bp, synthetic construct
  source 1..120: mol_type = other DNA
tagatccaaacaagttaagaagtatttatctaggggaggagccaagatggccgaataggaacagctcctgtctacagctcccagcgtgagcgacgcagaagacgggtgatttctgcattt

SEQ ID NO: 61630 - DNA, 120 bp, synthetic construct
  source 1..120: mol_type = other DNA
tctaaaacgcagagcgcctctcctcctccaaaggaacgcagttcctcaccagcaacggaacaaagctggatggagaatgattttgacgagctgagagaagaaggcttcagacgatcaaat

SEQ ID NO: 61631 - DNA, 120 bp, synthetic construct
  source 1..120: mol_type = other DNA
gtaaagaccatcgagactaggaagaaactgcatcaactaacgagcaaaatcaccagctaacatcataatgacaggatcaaattcacacataacaatattaactttaaatataaatggagt

SEQ ID NO: 61632 - DNA, 120 bp, synthetic construct
  source 1..120: mol_type = other DNA
acaccctaacatcacaattaaaagaactagaaaagcaagagcaaacacattcaaaagctagcagaaggcaagaaataactaaaatcagagcagaactgaaggagatagagacacaaaaaa

SEQ ID NO: 61633 - DNA, 120 bp, synthetic construct
  source 1..120: mol_type = other DNA
ggcaaaaactggaagcattacctttgaaaactggcacaagacagggatgccctctctcaccactcctattcaacatagtgttggaagttctggccagggcaatcaggcaggagaaggaaa

SEQ ID NO: 61634 - DNA, 120 bp, synthetic construct
  source 1..120: mol_type = other DNA
ttccttacaccttatacaaaaatcaattcaagatggattaaagatttaaacgctagacctaaaaccataaaaaccctagaagaaaacctaggcattaccattcaggacataggcgtgggc

SEQ ID NO: 61635 - DNA, 120 bp, synthetic construct
  source 1..120: mol_type = other DNA
agatcacatggacacaggaaggggaatatcacactctggggactgtggtggggtcgggggaggggggagggatagcattgggagatatacctaatgctagatgacacgttagtgggtgca

SEQ ID NO: 61636 - DNA, 120 bp, synthetic construct; identical to SEQ ID NO: 28226
  source 1..120: mol_type = other DNA

SEQ ID NO: 61637 - DNA, 120 bp, synthetic construct; identical to SEQ ID NO: 28227
  source 1..120: mol_type = other DNA

SEQ ID NO: 61638 - DNA, 120 bp, synthetic construct
  source 1..120: mol_type = other DNA
ggccagtgatggtgagcattttttcatgtgttttttggctgcataaatgtcttacctttttaaaaaaggtcttctggagagagggctttaaagcaaagaatagaaagaattgcaggcccc

SEQ ID NO: 61639 - DNA, 120 bp, synthetic construct; identical to SEQ ID NO: 28228
  source 1..120: mol_type = other DNA

SEQ ID NO: 61640 - DNA, 120 bp, synthetic construct; identical to SEQ ID NO: 28577
  source 1..120: mol_type = other DNA

SEQ ID NO: 61641 - DNA, 120 bp, synthetic construct; identical to SEQ ID NO: 28578
  source 1..120: mol_type = other DNA

SEQ ID NO: 61642 - DNA, 120 bp, synthetic construct; identical to SEQ ID NO: 28579
  source 1..120: mol_type = other DNA

SEQ ID NO: 61643 - DNA, 120 bp, synthetic construct
  source 1..120: mol_type = other DNA
gatgtcaggagcccctctgcccggccgcccagtctgggaagtgaggagcgcctctgcccggctgcccagtctggtaagtgaggagcgcctctgcccggctgcccagtctgggaagtgagg

SEQ ID NO: 61644 - DNA, 120 bp, synthetic construct; identical to SEQ ID NO: 32685
  source 1..120: mol_type = other DNA

SEQ ID NO: 61645 - DNA, 120 bp, synthetic construct
  source 1..120: mol_type = other DNA
tcccgagtccccaaagtccgtcatatcatttttatgccttgtagcttagctcatagcttagctcccacatacgagtgataacatgcgatgtttggttttccattcctgaaatactcaatt

SEQ ID NO: 61646 - DNA, 120 bp, synthetic construct; identical to SEQ ID NO: 10082
  source 1..120: mol_type = other DNA

SEQ ID NO: 61647 - DNA, 120 bp, synthetic construct; identical to SEQ ID NO: 10083
  source 1..120: mol_type = other DNA

SEQ ID NO: 61648 - DNA, 120 bp, synthetic construct
  source 1..120: mol_type = other DNA
tattgacttcttttttatttatttacttattttagagacagagtctcgctctgtctcacaggctggaatgcagtggtgtaatttcagctcactgcaacctctgcctcctagctaggctca

SEQ ID NO: 61649 - DNA, 120 bp, synthetic construct
  source 1..120: mol_type = other DNA
tcagcctcccaagtagtgggaaatataagcatgcaccaccatgtccagctatattaagaagatttttttttttttggtacagatggtgtcttgctatgttgccaaggctggtctggaact

SEQ ID NO: 61650 - DNA, 120 bp, synthetic construct
  source 1..120: mol_type = other DNA
gactggcacttgcaaatctttagacggatttacattttcagcaaatacaaatgagttgtttcacatctagagggctgcagggcaaaagaaaggagtcactgaacccgaatcagatggaat

SEQ ID NO: 61651 - DNA, 120 bp, synthetic construct; identical to SEQ ID NO: 10085
  source 1..120: mol_type = other DNA

SEQ ID NO: 61652 - DNA, 120 bp, synthetic construct; identical to SEQ ID NO: 10086
  source 1..120: mol_type = other DNA

SEQ ID NO: 61653 - DNA, 120 bp, synthetic construct; identical to SEQ ID NO: 24407
  source 1..120: mol_type = other DNA

SEQ ID NO: 61654 - DNA, 120 bp, synthetic construct; identical to SEQ ID NO: 24408
  source 1..120: mol_type = other DNA

SEQ ID NO: 61655 - DNA, 120 bp, synthetic construct; identical to SEQ ID NO: 24409
  source 1..120: mol_type = other DNA

SEQ ID NO: 61656 - DNA, 120 bp, synthetic construct; identical to SEQ ID NO: 5125
  source 1..120: mol_type = other DNA

SEQ ID NO: 61657 - DNA, 120 bp, synthetic construct
  source 1..120: mol_type = other DNA
taatcttgatgaatattgatgcaaaaatcctcagtaaaatactggcaaaccgaatccagcatcacatcaaaaagcttatccaccatgatcaagtgggcttcatccctgggatgcaaggct

SEQ ID NO: 61658 - DNA, 120 bp, synthetic construct
  source 1..120: mol_type = other DNA
tgccaagtcaatcctaagccaaaagaacaaagctggaggcatcacactacctgacttcaaactatactacaaggctacagtaacaaaatcagcatggtactggtatcaaaacagagatat

SEQ ID NO: 61659 - DNA, 120 bp, synthetic construct
  source 1..120: mol_type = other DNA
atgctgctataaagacacatgcacacgtatgtttattgcggcattattcacaatagcaaagacttggaaccaacccaaatgtccaacaatgatagactggattaagaacatttggcacat

SEQ ID NO: 61660 - DNA, 120 bp, synthetic construct
  source 1..120: mol_type = other DNA
aagactatccacactatgaagaaactgcatcaactaacaggtaaaataaccagctagcatcataatgacaggatcaaattcacacataacaatattaaccttaaatgtaaatgggctaaa

SEQ ID NO: 61661 - DNA, 120 bp, synthetic construct
  source 1..120: mol_type = other DNA
ggagctcgtgaaagcacaagtcccgacaagcagaggaaaacactcagataaatgaaaagctctatgattgccattctaactggtgtgagatggtatctcattgtggttttgatttgcatt

SEQ ID NO: 61662 - DNA, 120 bp, synthetic construct; identical to SEQ ID NO: 15242
  source 1..120: mol_type = other DNA

SEQ ID NO: 61663 - DNA, 120 bp, synthetic construct; identical to SEQ ID NO: 35291
  source 1..120: mol_type = other DNA

SEQ ID NO: 61664 - DNA, 120 bp, synthetic construct; identical to SEQ ID NO: 12009
  source 1..120: mol_type = other DNA

SEQ ID NO: 61665 - DNA, 120 bp, synthetic construct; identical to SEQ ID NO: 10522
  source 1..120: mol_type = other DNA

SEQ ID NO: 61666 - DNA, 120 bp, synthetic construct; identical to SEQ ID NO: 10523
  source 1..120: mol_type = other DNA

SEQ ID NO: 61667 - DNA, 120 bp, synthetic construct
  source 1..120: mol_type = other DNA
ccaaagtgctgggattacaggcgtgagccaccgcacccagccctaagccccctttaaaaacagaaataagaatatcactcaaaactgacataaggattaagttaaatcacatgtagaaac

SEQ ID NO: 61668 - DNA, 120 bp, synthetic construct; identical to SEQ ID NO: 10524
  source 1..120: mol_type = other DNA

SEQ ID NO: 61669 - DNA, 120 bp, synthetic construct; identical to SEQ ID NO: 10525
  source 1..120: mol_type = other DNA

SEQ ID NO: 61670 - DNA, 120 bp, synthetic construct; identical to SEQ ID NO: 10526
  source 1..120: mol_type = other DNA

SEQ ID NO: 61671 - DNA, 120 bp, synthetic construct; identical to SEQ ID NO: 10527
  source 1..120: mol_type = other DNA

SEQ ID NO: 61672 - DNA, 120 bp, synthetic construct; identical to SEQ ID NO: 10528
  source 1..120: mol_type = other DNA

SEQ ID NO: 61673 - DNA, 120 bp, synthetic construct; identical to SEQ ID NO: 10529
  source 1..120: mol_type = other DNA

SEQ ID NO: 61674 - DNA, 120 bp, synthetic construct; identical to SEQ ID NO: 10530
  source 1..120: mol_type = other DNA

SEQ ID NO: 61675 - DNA, 120 bp, synthetic construct; identical to SEQ ID NO: 10531
  source 1..120: mol_type = other DNA

SEQ ID NO: 61676 - DNA, 120 bp, synthetic construct; identical to SEQ ID NO: 10532
  source 1..120: mol_type = other DNA

SEQ ID NO: 61677 - DNA, 120 bp, synthetic construct; identical to SEQ ID NO: 10533
  source 1..120: mol_type = other DNA

SEQ ID NO: 61678 - DNA, 120 bp, synthetic construct; identical to SEQ ID NO: 10534
  source 1..120: mol_type = other DNA

SEQ ID NO: 61679 - DNA, 120 bp, synthetic construct; identical to SEQ ID NO: 10535
  source 1..120: mol_type = other DNA

SEQ ID NO: 61680 - DNA, 120 bp, synthetic construct; identical to SEQ ID NO: 10536
  source 1..120: mol_type = other DNA

SEQ ID NO: 61681 - DNA, 120 bp, synthetic construct; identical to SEQ ID NO: 10537
  source 1..120: mol_type = other DNA

SEQ ID NO: 61682 - DNA, 120 bp, synthetic construct; identical to SEQ ID NO: 10538
  source 1..120: mol_type = other DNA

SEQ ID NO: 61683 - DNA, 120 bp, synthetic construct; identical to SEQ ID NO: 10539
  source 1..120: mol_type = other DNA

SEQ ID NO: 61684 - DNA, 120 bp, synthetic construct; identical to SEQ ID NO: 10540
  source 1..120: mol_type = other DNA

SEQ ID NO: 61685 - DNA, 120 bp, synthetic construct; identical to SEQ ID NO: 10541
  source 1..120: mol_type = other DNA

SEQ ID NO: 61686 - DNA, 120 bp, synthetic construct; identical to SEQ ID NO: 10542
  source 1..120: mol_type = other DNA

SEQ ID NO: 61687 - DNA, 120 bp, synthetic construct; identical to SEQ ID NO: 10543
  source 1..120: mol_type = other DNA

SEQ ID NO: 61688 - DNA, 120 bp, synthetic construct; identical to SEQ ID NO: 10544
  source 1..120: mol_type = other DNA

SEQ ID NO: 61689 - DNA, 120 bp, synthetic construct; identical to SEQ ID NO: 10545
  source 1..120: mol_type = other DNA

SEQ ID NO: 61690 - DNA, 120 bp, synthetic construct; identical to SEQ ID NO: 10546
  source 1..120: mol_type = other DNA

SEQ ID NO: 61691 - DNA, 120 bp, synthetic construct; identical to SEQ ID NO: 10547
  source 1..120: mol_type = other DNA

SEQ ID NO: 61692 - DNA, 120 bp, synthetic construct; identical to SEQ ID NO: 10548
  source 1..120: mol_type = other DNA

SEQ ID NO: 61693 - DNA, 120 bp, synthetic construct; identical to SEQ ID NO: 10549
  source 1..120: mol_type = other DNA

SEQ ID NO: 61694 - DNA, 120 bp, synthetic construct; identical to SEQ ID NO: 10550
  source 1..120: mol_type = other DNA

SEQ ID NO: 61695 - DNA, 120 bp, synthetic construct; identical to SEQ ID NO: 10551
  source 1..120: mol_type = other DNA

SEQ ID NO: 61696 - DNA, 120 bp, synthetic construct; identical to SEQ ID NO: 35113
  source 1..120: mol_type = other DNA

SEQ ID NO: 61697 - DNA, 120 bp, synthetic construct; identical to SEQ ID NO: 35114
  source 1..120: mol_type = other DNA

SEQ ID NO: 61698 - DNA, 120 bp, synthetic construct
  source 1..120: mol_type = other DNA
catttatttttgtatacaacttaagatgtattcaagtttaaaattgcatcaagatgagccaggcatggtggctcacgcctgtaatcccagcactttgggaggctgaggtgagaggatcac

SEQ ID NO: 61699 - DNA, 120 bp, synthetic construct
  source 1..120: mol_type = other DNA
agtgagccgagatcgcaccactgcactctagcctgggcgacagagcaagactccttctcagaaaaaaaaaaaaaaaaaattaaaaatataacccgcacaatcctacttgtggatatatat

SEQ ID NO: 61700 - DNA, 120 bp, synthetic construct
  source 1..120: mol_type = other DNA
atgtggtgcaaggtatccatcaaagtttcgtgtgtgtgtgtgtgtgtgtgtgtgtgtgtttttttttgcatatggatatccaattgttatagcaccttttgttgagaagagtatccttcc

SEQ ID NO: 61701 - DNA, 120 bp, synthetic construct
  source 1..120: mol_type = other DNA
cggggaggggggtggggggaggggggaaaggggtaggggtggggggtgttgatgactatatcttaaacttctggaagctagcgtgatatgttaatcctgagtatatgcttttggctgtgt

SEQ ID NO: 61702 - DNA, 120 bp, synthetic construct
  source 1..120: mol_type = other DNA
tctaacaaggcaggccaacattcggattcaggaaatacagagaacgccacaaagatactcctcgagaagagcaactccaagacacataattgtcagattcaccaaagttgaaatgaagga

SEQ ID NO: 61703 - DNA, 120 bp, synthetic construct
  source 1..120: mol_type = other DNA
aatggcaacaaaagccaaaattgacaaatgggatctaattaaactaaagagcttctgcacagcaaaagaaactaccatcagagtgaacaggcaacctacagtatgggagaacatttttgc

SEQ ID NO: 61704 - DNA, 120 bp, synthetic construct
  source 1..120: mol_type = other DNA
agcacaccaacatggcacacgtatacatatgtaacaaacctgcacgttgtgcacatgtaccctaaaacttaaagtataataataataaaattaaaaaaatatatatgtgttaggcacagt

SEQ ID NO: 61705 - DNA, 120 bp, synthetic construct; identical to SEQ ID NO: 33470
  source 1..120: mol_type = other DNA

SEQ ID NO: 61706 - DNA, 120 bp, synthetic construct; identical to SEQ ID NO: 33471
  source 1..120: mol_type = other DNA

SEQ ID NO: 61707 - DNA, 120 bp, synthetic construct; identical to SEQ ID NO: 33472
  source 1..120: mol_type = other DNA

SEQ ID NO: 61708 - DNA, 120 bp, synthetic construct; identical to SEQ ID NO: 33473
  source 1..120: mol_type = other DNA

SEQ ID NO: 61709 - DNA, 120 bp, synthetic construct; identical to SEQ ID NO: 33474
  source 1..120: mol_type = other DNA

SEQ ID NO: 61710 - DNA, 120 bp, synthetic construct; identical to SEQ ID NO: 33475
  source 1..120: mol_type = other DNA

SEQ ID NO: 61711 - DNA, 120 bp, synthetic construct; identical to SEQ ID NO: 33476
  source 1..120: mol_type = other DNA

SEQ ID NO: 61712 - DNA, 120 bp, synthetic construct; identical to SEQ ID NO: 33464
  source 1..120: mol_type = other DNA

SEQ ID NO: 61713 - DNA, 120 bp, synthetic construct; identical to SEQ ID NO: 6515
  source 1..120: mol_type = other DNA

SEQ ID NO: 61714 - DNA, 120 bp, synthetic construct
  source 1..120: mol_type = other DNA
ttttggggaaacataaggcatcaatcaatacatgtaagatgtacattggttcagtctggaaaggcagggcaatcggaagtgggggcttccaggttatatgtagattcaaagattttccga

SEQ ID NO: 61715 - DNA, 120 bp, synthetic construct; identical to SEQ ID NO: 33466
  source 1..120: mol_type = other DNA

SEQ ID NO: 61716 - DNA, 120 bp, synthetic construct; identical to SEQ ID NO: 33467
  source 1..120: mol_type = other DNA

SEQ ID NO: 61717 - DNA, 120 bp, synthetic construct
  source 1..120: mol_type = other DNA
gaataaggcctcaaaagcgcagacagccaacataaaaattgacaaatgggattacatcaagctaaaaagcttctgcacaacaaaggaagcaatcaacaaagtaaagagacagcccacgga

SEQ ID NO: 61718 - DNA, 120 bp, synthetic construct
  source 1..120: mol_type = other DNA
tctgaattagatctctgacacagagaacaaaaggcattttgaaacttgaatacctatagaagccccgtgaagtgcaaggctacttgagttagaagcaacaatgaaactcatctcacttag

SEQ ID NO: 61719 - DNA, 120 bp, synthetic construct; identical to SEQ ID NO: 33468
  source 1..120: mol_type = other DNA

SEQ ID NO: 61720 - DNA, 120 bp, synthetic construct
  source 1..120: mol_type = other DNA
ttcatccatgtccctacaaaggacatgaactcatcattttttatggctgcatagtattccatggtgtatatgtgtcacattttcttaacccagtctatcgttgttggacatttgggttgg

SEQ ID NO: 61721 - DNA, 120 bp, synthetic construct
  source 1..120: mol_type = other DNA
ttttaaaaaatcaattcaaatttgtagatgcaagatatattcttaacaaaactaaaaataggctgggtgcggtggctcacgcctgtaatcccagcactttgggaggccaaagcgggcaga

SEQ ID NO: 61722 - DNA, 120 bp, synthetic construct; identical to SEQ ID NO: 33469
  source 1..120: mol_type = other DNA

SEQ ID NO: 61723 - DNA, 120 bp, synthetic construct
  source 1..120: mol_type = other DNA
cagaccattcagataaactagtaaaaatagtttttctttaaagtaccacagcacctttgtagttcaaaatatatttaccataggctgggcgtggtggctcacgcctgtaatcccagcact

SEQ ID NO: 61724 - DNA, 120 bp, synthetic construct; identical to SEQ ID NO: 7843
  source 1..120: mol_type = other DNA

SEQ ID NO: 61725 - DNA, 120 bp, synthetic construct; identical to SEQ ID NO: 13633
  source 1..120: mol_type = other DNA

SEQ ID NO: 61726 - DNA, 120 bp, synthetic construct; identical to SEQ ID NO: 13634
  source 1..120: mol_type = other DNA

SEQ ID NO: 61727 - DNA, 120 bp, synthetic construct; identical to SEQ ID NO: 25429
  source 1..120: mol_type = other DNA

SEQ ID NO: 61728 - DNA, 120 bp, synthetic construct; identical to SEQ ID NO: 25430
  source 1..120: mol_type = other DNA

SEQ ID NO: 61729 - DNA, 120 bp, synthetic construct; identical to SEQ ID NO: 25431
  source 1..120: mol_type = other DNA

SEQ ID NO: 61730 - DNA, 120 bp, synthetic construct
  source 1..120: mol_type = other DNA
aattttcttcaaaaaatgttttaacatttttaaactttactacaaaaaggaagcaggggccaggtgcagtggctcacgcctgtaatcccaacactttgggaagccaaggtgggtggattg

SEQ ID NO: 61731 - DNA, 120 bp, synthetic construct; identical to SEQ ID NO: 25432
  source 1..120: mol_type = other DNA

SEQ ID NO: 61732 - DNA, 120 bp, synthetic construct; identical to SEQ ID NO: 25433
  source 1..120: mol_type = other DNA

SEQ ID NO: 61733 - DNA, 120 bp, synthetic construct; identical to SEQ ID NO: 25434
  source 1..120: mol_type = other DNA

SEQ ID NO: 61734 - DNA, 120 bp, synthetic construct
  source 1..120: mol_type = other DNA
ggtatacccacaatggaatattaccttgccatgaaaaggaataaagtactgatacatgctacaacatggatgaatcctaaaaaaaacattatgctggggggaggagccaagatggccgaa

SEQ ID NO: 61735 - DNA, 120 bp, synthetic construct
  source 1..120: mol_type = other DNA
ttgcggttcacgaaaaaccgctgctctgcaaacaccgctgctaatacccaggcaaacagggtctggagtggacctttagcaaactccaacagacctgcagctgagggtcctgtctgttag

SEQ ID NO: 61736 - DNA, 120 bp, synthetic construct
  source 1..120: mol_type = other DNA
caggagcacccagattcataaagcaagtcctgagtgacctacaaagagacttagactcccacacattaataatgggagactttaacaccccactgtcaacattaaacagatcaatgagat

SEQ ID NO: 61737 - DNA, 120 bp, synthetic construct
  source 1..120: mol_type = other DNA
tggcaataatcaatagcttaccaaccaaaaagagtccaggaccagatggattcaaagccgaattctaccagaggtacaaggaggaactggtaccattccttctgaaactattccaatcaa

SEQ ID NO: 61738 - DNA, 120 bp, synthetic construct
  source 1..120: mol_type = other DNA
cgtctcagcccaaaatctcctcaaggtgacaagcaaattcagcaaagtctcaggatacaaaatcaatgtacaaaaatcacaagcattcttatacaccaataacagacaaacagagagcca

SEQ ID NO: 61739 - DNA, 120 bp, synthetic construct
  source 1..120: mol_type = other DNA
tgacaaagggctaatatccagaatctacaatgaactccaacaaatttacaagaaaaaaacaaacaaccccgtcagaaagtgggcgaaggacatgaacagacacttctcaaaagaggacat

SEQ ID NO: 61740 - DNA, 120 bp, synthetic construct
  source 1..120: mol_type = other DNA
gttgtggggtggggggaggggggagggatagcactggaagatatacctaatggtagatgacgagttagtgggtgcagtgcaccagcatggcacatgtatacatatgtaactaacctgcac

SEQ ID NO: 61741 - DNA, 120 bp, synthetic construct; identical to SEQ ID NO: 25435
  source 1..120: mol_type = other DNA

SEQ ID NO: 61742 - DNA, 120 bp, synthetic construct
  source 1..120: mol_type = other DNA
tggtcatcagagaaatgcaaatcaaaaccactatgagatatcatctcacaccagttagaatggcaatcattaaaaagtcaggaaacaacaggtgctggagaggatgtggagaaataggaa

SEQ ID NO: 61743 - DNA, 120 bp, synthetic construct; identical to SEQ ID NO: 25436
  source 1..120: mol_type = other DNA

SEQ ID NO: 61744 - DNA, 120 bp, synthetic construct; identical to SEQ ID NO: 14320
  source 1..120: mol_type = other DNA

SEQ ID NO: 61745 - DNA, 120 bp, synthetic construct; identical to SEQ ID NO: 14321
  source 1..120: mol_type = other DNA

SEQ ID NO: 61746 - DNA, 120 bp, synthetic construct; identical to SEQ ID NO: 18635
  source 1..120: mol_type = other DNA

SEQ ID NO: 61747 - DNA, 120 bp, synthetic construct; identical to SEQ ID NO: 18636
  source 1..120: mol_type = other DNA

SEQ ID NO: 61748 - DNA, 120 bp, synthetic construct; identical to SEQ ID NO: 18637
  source 1..120: mol_type = other DNA

SEQ ID NO: 61749 - DNA, 120 bp, synthetic construct; identical to SEQ ID NO: 18638
  source 1..120: mol_type = other DNA

SEQ ID NO: 61750 - DNA, 120 bp, synthetic construct; identical to SEQ ID NO: 18639
  source 1..120: mol_type = other DNA

SEQ ID NO: 61751 - DNA, 120 bp, synthetic construct; identical to SEQ ID NO: 19428
  source 1..120: mol_type = other DNA

SEQ ID NO: 61752 - DNA, 120 bp, synthetic construct; identical to SEQ ID NO: 19429
  source 1..120: mol_type = other DNA

SEQ ID NO: 61753 - DNA, 120 bp, synthetic construct; identical to SEQ ID NO: 19430
  source 1..120: mol_type = other DNA

SEQ ID NO: 61754 - DNA, 120 bp, synthetic construct
  source 1..120: mol_type = other DNA
tccatgtgttctcattgttcaattcccacctatgagtgagaatatgcggtgttaggttttttgttcttgtgatagtttactgagaatgatgatttccagtttcatccacgtccctacaaa

SEQ ID NO: 61755 - DNA, 120 bp, synthetic construct
  source 1..120: mol_type = other DNA
agcatggtactggtaccaaaacagagatatagatcaatggaacagaacagagccctcagaaataacgctgcatatctacaactatctgatctttgacaaacctgagaaaaacaagaaatg

SEQ ID NO: 61756 - DNA, 120 bp, synthetic construct
  source 1..120: mol_type = other DNA
gctggattcggtttgccattatcttattgaggatttttgcatcaatgttcatcaaggatattggtctaaaattctcttttttggttgtgtctctgcccggctttggtatcaggatgatgc

SEQ ID NO: 61757 - DNA, 120 bp, synthetic construct
  source 1..120: mol_type = other DNA
taatttctgatattttacatttgctgaggagagctttacttccaagtatgtggtcaattttggaataggtgtggtgtggtgctgaaaaaaatgtatattctgttgatttggggtggagag

SEQ ID NO: 61758 - DNA, 120 bp, synthetic construct
  source 1..120: mol_type = other DNA
ttgtagagtttctgccgagagatccgctgttagtctgatgggcttccctttgtggataacccgacctttctctctggctgcccttaacattttttccttcatttcaaccttggtgaatct

SEQ ID NO: 61759 - DNA, 120 bp, synthetic construct
  source 1..120: mol_type = other DNA
ctgcttgttagttttccttctaacagacaggacctcagctgcaggtcttttgaagtttgctagaggtgcactccagaccctgtttgcctgggtaccagcagcggtggctgcagaacagtg

SEQ ID NO: 61760 - DNA, 120 bp, synthetic construct; identical to SEQ ID NO: 32890
  source 1..120: mol_type = other DNA

SEQ ID NO: 61761 - DNA, 120 bp, synthetic construct; identical to SEQ ID NO: 32891
  source 1..120: mol_type = other DNA

SEQ ID NO: 61762 - DNA, 120 bp, synthetic construct; identical to SEQ ID NO: 32892
  source 1..120: mol_type = other DNA

SEQ ID NO: 61763 - DNA, 120 bp, synthetic construct; identical to SEQ ID NO: 32893
  source 1..120: mol_type = other DNA

SEQ ID NO: 61764 - DNA, 120 bp, synthetic construct; identical to SEQ ID NO: 20528
  source 1..120: mol_type = other DNA

SEQ ID NO: 61765 - DNA, 120 bp, synthetic construct
  source 1..120: mol_type = other DNA
atttccagttctagatccctgaggaatcgccacactgacttccacaatggttgaactagtttacagtcccaccaacagtgtaaaagtgttcctatttctccacatcctctccagcacctg

SEQ ID NO: 61766 - DNA, 120 bp, synthetic construct
  source 1..120: mol_type = other DNA
gggctctgttctgttccattgatctatatctctgttttggtacgagtaccatgccgttttggttactgtagccttgtagtatagtttgaagtcaggtagtgtgatgcctccagctttgtt

SEQ ID NO: 61767 - DNA, 120 bp, synthetic construct
  source 1..120: mol_type = other DNA
tgtgtatattgaaccagccttgcatcccagggatgaagcccacttgatcatggtggataagctttttgatgtgttgctggattcagtttgccagtattttattgaagatttttgcatcaa

SEQ ID NO: 61768 - DNA, 120 bp, synthetic construct
  source 1..120: mol_type = other DNA
cactagtcattcaggagcaggttgttcagtttccatgtagttgagtggttttgagtgagattcttaatcctgagttctagtttgattgcaatgtggtctgagagatagtttgttataatt

SEQ ID NO: 61769 - DNA, 120 bp, synthetic construct
  source 1..120: mol_type = other DNA
tatgatggcccaagtgtaaatgatactgggttctgtgttctttgaatttcacacaagtttaaaagttaaagttaggcggaggagccaagatggccgaataggaacagctccagtctacag

SEQ ID NO: 61770 - DNA, 120 bp, synthetic construct
  source 1..120: mol_type = other DNA
ctatgtgaaaacaccaaatctacgtctgattggtgtacctgaaagtgacggggagaatggaaccaagttggaaaacactctgcaggatattatccaggagaacttccccaatcgagcaag

SEQ ID NO: 61771 - DNA, 120 bp, synthetic construct
  source 1..120: mol_type = other DNA
aacaagaagagctaactatcctaaatatatatgcacccaatacaggagcacccagatgcataaagcaagtcctgagtgacctacaaagagacttagactcccacacattaataatgggag

SEQ ID NO: 61772 - DNA, 120 bp, synthetic construct
  source 1..120: mol_type = other DNA
gatatcatcaccgatcccacagaaatacaaactaccatcagagaatactacaaacacctctatgcaaataaactagaaaatctagaagaaatggataaatttctggacacatacactctc

SEQ ID NO: 61773 - DNA, 120 bp, synthetic construct
  source 1..120: mol_type = other DNA
tccaacaatgatagactggattaagaaaatgtggcacatatacaccatggaatactatgcagccataaaaaaggatgagttcatgtcctttgtagggacatggataaagctggaaaccat

SEQ ID NO: 61774 - DNA, 120 bp, synthetic construct; identical to SEQ ID NO: 20529
  source 1..120: mol_type = other DNA

SEQ ID NO: 61775 - DNA, 120 bp, synthetic construct; identical to SEQ ID NO: 3855
  source 1..120: mol_type = other DNA

SEQ ID NO: 61776 - DNA, 120 bp, synthetic construct; identical to SEQ ID NO: 21862
  source 1..120: mol_type = other DNA

SEQ ID NO: 61777 - DNA, 120 bp, synthetic construct
  source 1..120: mol_type = other DNA
tagaagaaaacctaggcattaccattcgggacataggcatgggcaaggacttcatgtctaaaacaccaaaagcaatggcaacaaaagccaaaattgacaaatgggatctaattaaactaa

SEQ ID NO: 61778 - DNA, 120 bp, synthetic construct
  source 1..120: mol_type = other DNA
agaacaaaaaaccaaacaccgcatattctcactcataggtgggaattgaacaatgagatcacatggacacaggaaggggaatatcacactctggggactgttgtggggtgggggcagggg

SEQ ID NO: 61779 - DNA, 120 bp, synthetic construct
  source 1..120: mol_type = other DNA
gattgattatggtaagaaggcttgtcaagtgtcagttattctcttatgactgcaaaccatcaagcaggattttttttttttactatactttaagttttagggtacatgtgcacattgtgc

SEQ ID NO: 61780 - DNA, 120 bp, synthetic construct
  source 1..120: mol_type = other DNA
tcccattttgtaggttgcctgttcactctgatggtagtttcttttgtcaagcaggatttttttatctaagcttccacagaattaaggatagaacactcccagaccatctgttaactctat

SEQ ID NO: 61781 - DNA, 120 bp, synthetic construct; identical to SEQ ID NO: 24582
  source 1..120: mol_type = other DNA

SEQ ID NO: 61782 - DNA, 120 bp, synthetic construct
  source 1..120: mol_type = other DNA
cgtctgggatgtgaggagcccctctgcctggctgcccagtctggaacgtgagaagcgtctctgcccggccgccatcccacctaggaagtgaggagcacctcttcccggccgccatcacat

SEQ ID NO: 61783 - DNA, 120 bp, synthetic construct; identical to SEQ ID NO: 24583
  source 1..120: mol_type = other DNA

SEQ ID NO: 61784 - DNA, 120 bp, synthetic construct; identical to SEQ ID NO: 24584
  source 1..120: mol_type = other DNA

SEQ ID NO: 61785 - DNA, 120 bp, synthetic construct
  source 1..120: mol_type = other DNA
cctgagtaagggcgtctttatacttccgagggagtatcacggggtagggtcttttgtagggttgggatttggaaaatagtgggcctctgggggctcacactgggcaagaggtatgtggca

SEQ ID NO: 61786 - DNA, 120 bp, synthetic construct
  source 1..120: mol_type = other DNA
cgccctcaatgctcttatcgacccttgcaggcacccctgaggagccgccaggtggtgagtctgcagaagaggaagagaacttcgtgtgagcctgcaggacaggcctgggcctggtgcccg

SEQ ID NO: 61787 - DNA, 120 bp, synthetic construct; identical to SEQ ID NO: 27017
  source 1..120: mol_type = other DNA

SEQ ID NO: 61788 - DNA, 120 bp, synthetic construct; identical to SEQ ID NO: 27018
  source 1..120: mol_type = other DNA

SEQ ID NO: 61789 - DNA, 120 bp, synthetic construct; identical to SEQ ID NO: 27019
  source 1..120: mol_type = other DNA

SEQ ID NO: 61790 - DNA, 120 bp, synthetic construct; identical to SEQ ID NO: 27020
  source 1..120: mol_type = other DNA

SEQ ID NO: 61791 - DNA, 120 bp, synthetic construct; identical to SEQ ID NO: 27021
  source 1..120: mol_type = other DNA

SEQ ID NO: 61792 - DNA, 120 bp, synthetic construct; identical to SEQ ID NO: 27022
  source 1..120: mol_type = other DNA

SEQ ID NO: 61793 - DNA, 120 bp, synthetic construct
  source 1..120: mol_type = other DNA
aactgggaggcacactgacacctcacacggcagggtattccaacagacctgcagctgagggtcctgtctgttagaaggaaaactaacaaccagaaaggacatctacaccgaaaacccatc

SEQ ID NO: 61794 - DNA, 120 bp, synthetic construct
  source 1..120: mol_type = other DNA
ataagtgaaggagaaataaaatactttatagacaagcaaatgctgagagattttgtcaccaccaggcctgccctaaaagagctcctgaaggaagcgctaaacctggaaaggaacaaccag

SEQ ID NO: 61795 - DNA, 120 bp, synthetic construct
  source 1..120: mol_type = other DNA
aaccaacgagaacaaagacaccacataccagaatctctgggacgcattcaaagcagtgtgtagagggaaatttatagcactaaatgcctacaagagaaagcaggaaagatccaaaattga

SEQ ID NO: 61796 - DNA, 120 bp, synthetic construct
  source 1..120: mol_type = other DNA
gccaaagacaaaaaccacatgattatctcaatagatgcagaaaaagcctttgacaaaattcaacaacccttcatgctaaaaactctcaataaattaggtattgatgggatgtatttcaaa

SEQ ID NO: 61797 - DNA, 120 bp, synthetic construct
  source 1..120: mol_type = other DNA
gattccctatttaataaatggtgctgggaaaactggctagccatatgtagaaagctgaaactggatcccttccttacaccttatacaaaaatcaatccaagatggattaaagatttaaac

SEQ ID NO: 61798 - DNA, 120 bp, synthetic construct
  source 1..120: mol_type = other DNA
gcggcactattcacaatagcaaagacttggaaccaacccaaatgtccaacaatgatagactggattaagaaaatgtggcacatatacaccatggaatactatacagccataaaaaatgat

SEQ ID NO: 61799 - DNA, 120 bp, synthetic construct; identical to SEQ ID NO: 27023
  source 1..120: mol_type = other DNA

SEQ ID NO: 61800 - DNA, 120 bp, synthetic construct
  source 1..120: mol_type = other DNA
ttccacattgcttgtttttctcaggtttgtcaaaaatcagatagttgtagatatgcggtgttatttctgagggctctgttctgttccattgatctatatctctgttttggtaccagtacc

SEQ ID NO: 61801 - DNA, 120 bp, synthetic construct
  source 1..120: mol_type = other DNA
catgctgctataaagacacatgcacacgtatgtttgttgcggcactattcacaatagcaaagacttggaaccaacccaaatgtccaacaatgatagactggattaagaaaatgtggcaca

SEQ ID NO: 61802 - DNA, 120 bp, synthetic construct; identical to SEQ ID NO: 25894
  source 1..120: mol_type = other DNA

SEQ ID NO: 61803 - DNA, 120 bp, synthetic construct
  source 1..120: mol_type = other DNA
agtgatgatgagcattttttcatgtgttttttggctgcataaatgtcttcttttgagaagtgtctgttcatgtcctttgtccactttttgatggggttgtttgtttttttcttgtaaatt

SEQ ID NO: 61804 - DNA, 120 bp, synthetic construct
  source 1..120: mol_type = other DNA
tcattctcagcaaactatcccaaggacaaaaaaccaaacaccgcatgttctcactcgtaggtgggaactgaacaatgacaacacttggacacaggaaggggaacatcacacaccggggcc

SEQ ID NO: 61805 - DNA, 120 bp, synthetic construct
  source 1..120: mol_type = other DNA
cattgatgagtggtttgtagttctccttgaagaggtccttcacgtcccttgtaagttggattcctaggtattttattctctttgaagcaattgtgaatgggagttcactcatgatttggc

SEQ ID NO: 61806 - DNA, 120 bp, synthetic construct
  source 1..120: mol_type = other DNA
acaagaaatggggaaaggattccctatttaataaatggtgctgggaaaactggctagccatatgtagaaagctgaaactggatcccatccttacaccttatacaaaaattaattcaagat

SEQ ID NO: 61807 - DNA, 120 bp, synthetic construct
  source 1..120: mol_type = other DNA
ggatgaaattggaaatcatcattctcagtaaactatcgcaagaagaaaaaaagaaccaccgcatattctcactcataggtgggaattgaacaatgagatcacatggacacaggaagggga

SEQ ID NO: 61808 - DNA, 120 bp, synthetic construct; identical to SEQ ID NO: 25896
  source 1..120: mol_type = other DNA

SEQ ID NO: 61809 - DNA, 120 bp, synthetic construct
  source 1..120: mol_type = other DNA
agatggtatctcactgtggttttgatttgcatttctctgatggccagtgatgatgagcattttttcatgtgttttttggctgcataaatgtcttcttttgagaagtgtctgttcatgtcc

SEQ ID NO: 61810 - DNA, 120 bp, synthetic construct
  source 1..120: mol_type = other DNA
gctcttttttggttccatatgaactttaaagtagttttttccaattctgtgaagaaaatcactggtagctttatggggatggcattgaatctgtaaattaccttgggcagtatggccatt

SEQ ID NO: 61811 - DNA, 120 bp, synthetic construct
  source 1..120: mol_type = other DNA
tgcaaggctggttcaatatacgcaaatcgataaatgtaatccagcatataaacagagccaaagacaaaaaccacatgattatctcaatagatgcagaaaaagcctttgacaaaattcaac

SEQ ID NO: 61812 - DNA, 120 bp, synthetic construct
  source 1..120: mol_type = other DNA
gctgtgagtttgtcatagttggcttttattacattgaggtgtgtcccttgtaggccaattttgctgagagttttaatcataaagaaacgctggattttgtcaaatgctttttctgcagct

SEQ ID NO: 61813 - DNA, 120 bp, synthetic construct; identical to SEQ ID NO: 25897
  source 1..120: mol_type = other DNA

SEQ ID NO: 61814 - DNA, 120 bp, synthetic construct
  source 1..120: mol_type = other DNA
tctattaggtcctcttggtgcagagctgagttcaattcctgggtatccttgttaactttctgtctcgttgatctgtctaatgttgacagtggggtgttaaagtctcccattattattgtg

SEQ ID NO: 61815 - DNA, 120 bp, synthetic construct
  source 1..120: mol_type = other DNA
gattatctcaatagatgcagaaaaggcctttgacaaaattcaacaaccttcatgctaaaaactctcaataaattaggtattgatgggacgtatctcaaaataacaagagttatctatgac

SEQ ID NO: 61816 - DNA, 120 bp, synthetic construct
  source 1..120: mol_type = other DNA
acttgacttcaaactatactataaggctacagtaaccaaaacagcatggtactggtaccaaaacagagatatagatcaatggaacagaacagagccctcagaaataacgctgcatatcta

SEQ ID NO: 61817 - DNA, 120 bp, synthetic construct
  source 1..120: mol_type = other DNA
atgcacacatatgtttattgcagcaccattcaccatagcaaagacttggaaacaacccaaatgtccaacaatgatagactggattaagaaaatgtggcacatatacaccatggaatacta

SEQ ID NO: 61818 - DNA, 120 bp, synthetic construct
  source 1..120: mol_type = other DNA
gtgaaggacctcttcaaggagaactacaaaccactgctcaaggaaatacaagaggatacaaacaaatggaagaatattccatgctcatgggtaggaagaatcaatatcgtgaaaatggcc

SEQ ID NO: 61819 - DNA, 120 bp, synthetic construct
  source 1..120: mol_type = other DNA
ccatctcacaccagttagaatggcaatcattaaaaagtcaggaaacaacaggggctggagaggatgtggagaaataggaacactttgacactgttggtgggactgtaaactagttcaacc

SEQ ID NO: 61820 - DNA, 120 bp, synthetic construct; identical to SEQ ID NO: 23377
  source 1..120: mol_type = other DNA

SEQ ID NO: 61821 - DNA, 120 bp, synthetic construct; identical to SEQ ID NO: 23378
  source 1..120: mol_type = other DNA

SEQ ID NO: 61822 - DNA, 120 bp, synthetic construct
  source 1..120: mol_type = other DNA
cctgtgatgctgtgctttagagctcatgctcctgtttcacttttatgttccactctgtacacctggctccgccctctagataacagtagcaaacttagtaaaagtattagtctttaatct

SEQ ID NO: 61823 - DNA, 120 bp, synthetic construct
  source 1..120: mol_type = other DNA
gtgttatctgaagatggtgtttctgtcttatgctgtggctgaaacgggtcgtctctggcctgcctgagagcactcatcactgtgttcctgagattcttgcaggcctcctttcctggaatt

SEQ ID NO: 61824 - DNA, 120 bp, synthetic construct
  source 1..120: mol_type = other DNA
aaggcgcgcagggacttgctgcccaggcctcgctcaggcccgcgctcagggaccaggtacctgcagggtgggcgcggctcagcgggtctggccggggttggtggggggagcgcagtcctc

SEQ ID NO: 61825 - DNA, 120 bp, synthetic construct; identical to SEQ ID NO: 16473
  source 1..120: mol_type = other DNA

SEQ ID NO: 61826 - DNA, 120 bp, synthetic construct
  source 1..120: mol_type = other DNA
cttgcttaggtaaacaaagcagccaggaagcttgaactgggtggagcccaccacagctcaaggaggcctgcctgcctctgtaggctccacctctgggggcagggcacagacaaacaaaaa

SEQ ID NO: 61827 - DNA, 120 bp, synthetic construct; identical to SEQ ID NO: 61539
  source 1..120: mol_type = other DNA

SEQ ID NO: 61828 - DNA, 120 bp, synthetic construct
  source 1..120: mol_type = other DNA
aaagcagtgtgtagagggaaatttatagcaccaaatgcctacaggagaaagcaggaaagatccaaaattgacaccctaacatcacaattaaaagaactagaaaagcaagagcaaacacat

SEQ ID NO: 61829 - DNA, 120 bp, synthetic construct
  source 1..120: mol_type = other DNA
aaaaaccacatgattatctcaatagatgcagaaaaagcctttgacaaaattcaacaacccttcatgctaaaaactctcaataaattaggtattgatgggaagtatttcaaaataataaga

SEQ ID NO: 61830 - DNA, 120 bp, synthetic construct
  source 1..120: mol_type = other DNA
gccatatgtagaaagctgaaactggatcccttccttacaccttatacaaaaatcaattcaagatggattaaagatttaaacgttagacttaaaaccataaaaaccctagaagaaaaccta

SEQ ID NO: 61831 - DNA, 120 bp, synthetic construct
  source 1..120: mol_type = other DNA
atcgcaagaacaaaaaaccaaacaccgcatattctcactcataggtgggaattgaacaatgagatcacatggacacaggaaggagaatatcacactctggggactgtggtggggtcgggg

SEQ ID NO: 61832 - DNA, 120 bp, synthetic construct; identical to SEQ ID NO: 16470
  source 1..120: mol_type = other DNA

SEQ ID NO: 61833 - DNA, 120 bp, synthetic construct; identical to SEQ ID NO: 16471
  source 1..120: mol_type = other DNA

SEQ ID NO: 61834 - DNA, 120 bp, synthetic construct; identical to SEQ ID NO: 16472
  source 1..120: mol_type = other DNA

SEQ ID NO: 61835 - DNA, 120 bp, synthetic construct
  source 1..120: mol_type = other DNA
aataataataataaaaagtggtttgagatccatagttaaaaaatagtgaactcaggccagctgccatggctcatgcctgtaatccagtgctttgggaggctgaggctagatctcttgagg

SEQ ID NO: 61836 - DNA, 120 bp, synthetic construct
  source 1..120: mol_type = other DNA
ccggccgcgaccccgtctgggaggtgaggagcgtctctgcccagccgccccatctgagaagtgaggaaaccctccgcctggcaaccgccccatatgagaagtgaggagcctctccgcccg

SEQ ID NO: 61837 - DNA, 120 bp, synthetic construct; identical to SEQ ID NO: 7295
  source 1..120: mol_type = other DNA

SEQ ID NO: 61838 - DNA, 120 bp, synthetic construct
  source 1..120: mol_type = other DNA
attgaagggacggtcttctaaccattgcattggttgaaacaatgggttggaggaggacaagtcacacataataaatacatcccaccaatctcttaaaaaaacagtatccaaggccaggcg

SEQ ID NO: 61839 - DNA, 120 bp, synthetic construct
  source 1..120: mol_type = other DNA
gaaaaaaaagctaaaaatattaaaaggaggtgggctacttctgctcatatatccacctgtctatacaaatgcagacgaagtcgtgactcctctaacagtaggccaagaggaggctggtcc

SEQ ID NO: 61840 - DNA, 120 bp, synthetic construct
  source 1..120: mol_type = other DNA
tgtaacaattgtaactgtaactccctgataagcctacaggcatggggtctggatgagtagacaggggatgtgatcagagctgactatgtttaaggtttcttctttcaccctccaaaaaac

SEQ ID NO: 61841 - DNA, 120 bp, synthetic construct
  source 1..120: mol_type = other DNA
ataaataaataaataattaaaaaaaaaatatccgggctgggcacagtggctcatgccagtaatcccagcactttgggaggccaagacaggtggatgacaaggtcaggagatcgagaccat

SEQ ID NO: 61842 - DNA, 120 bp, synthetic construct
  source 1..120: mol_type = other DNA
agatgccaggcctctgaagccacgtactgctggctctagaaagatcaggctacttcagaaagtctccctggctctcaaggcttagccaatgtccagagtggagacaagtctgcattaatg

SEQ ID NO: 61843 - DNA, 120 bp, synthetic construct
  source 1..120: mol_type = other DNA
gtctggacacaggatcgacaggcctaggccatgtggaaagctgtcttgatggatatggaggaagaagattacagagaggacacagactagcaggaaggccaggcagagctgacgatggct

SEQ ID NO: 61844 - DNA, 120 bp, synthetic construct
  source 1..120: mol_type = other DNA
acagagagggaccctgtcttaaaaaaaaaaaaaaaaaaaaaaaaagaaagtggtccaggttcctacacctttcctgaaggaatctcgagtctcccctcctgtaagttccgctgatactgg

SEQ ID NO: 61845 - DNA, 120 bp, synthetic construct
  source 1..120: mol_type = other DNA
acctggcttctgagcagccgcagcatcattgcgtggaccaggagacggagcgcccagttgcaatgctggagccgggaggtccaatccgccgccctctctcttccggtgccagggcttaga

SEQ ID NO: 61846 - DNA, 120 bp, synthetic construct
  source 1..120: mol_type = other DNA
ctggctaacacggtgaaaccctgtctctactaaaaatacaaaaaattatccgggcgcgtggtggagggcgcctgtagtcctagctatttgggagggtgaggcaggagaatggtgtgaacc

SEQ ID NO: 61847 - DNA, 120 bp, synthetic construct
  source 1..120: mol_type = other DNA
ttcctcagacccaggagtccaggaccccagcccctccttcctcacacccacgagtccagatccctagcccctactccctcagacccaggagtccagaccaaagctccctcctccctcaga

SEQ ID NO: 61848 - DNA, 120 bp, synthetic construct
  source 1..120: mol_type = other DNA
aaaaatacaaaaatttgccaggtgtggtggcatgaacctgtagtcccagctagtcaggatgctgaggcaggataattgctggactccaaaaggcagaggttgcagtgggctgagatcata

SEQ ID NO: 61849 - DNA, 120 bp, synthetic construct
  source 1..120: mol_type = other DNA
gggtctggcttggcatcgagaggaagcagcatgcagtcttcttaggctatcatcagagcagctggagatttctccaaataagaaggaatcaaaaaaattctgcaacaaaagatcatcttt

SEQ ID NO: 61850 - DNA, 120 bp, synthetic construct
  source 1..120: mol_type = other DNA
atctgaaatgaatgatcttttcaaaaaagttgtaaaaatgaactaaatgagtgccaggtacagtggctcatacctttaatcacagcactttgggaggccaaggcaggaggatggcttgtg

SEQ ID NO: 61851 - DNA, 120 bp, synthetic construct; identical to SEQ ID NO: 19463
  source 1..120: mol_type = other DNA

SEQ ID NO: 61852 - DNA, 120 bp, synthetic construct; identical to SEQ ID NO: 19464
  source 1..120: mol_type = other DNA

SEQ ID NO: 61853 - DNA, 120 bp, synthetic construct; identical to SEQ ID NO: 19465
  source 1..120: mol_type = other DNA

SEQ ID NO: 61854 - DNA, 120 bp, synthetic construct
  source 1..120: mol_type = other DNA
ggtccccttgggcaggggcttgtgggagcgtccgtacacgtccaccttgagatgagcctgcaggctctggtagtagcgcaccctggctgagtccggcttccagttggacaccgcccaggc

SEQ ID NO: 61855 - DNA, 120 bp, synthetic construct; identical to SEQ ID NO: 3751
  source 1..120: mol_type = other DNA

SEQ ID NO: 61856 - DNA, 120 bp, synthetic construct; identical to SEQ ID NO: 14406
  source 1..120: mol_type = other DNA

SEQ ID NO: 61857 - DNA, 120 bp, synthetic construct
  source 1..120: mol_type = other DNA
cgcaataaacgtaacgtgtgcatgtgtctttatagcagcatgatttataatcctttgggtatatacccagtaatgggatggctgggtcaaatggtatttctagttctagatccttgagga

SEQ ID NO: 61858 - DNA, 120 bp, synthetic construct
  source 1..120: mol_type = other DNA
actgttagtctgatgggcttcactttgtgggtaacccgacctttctctctggctgcccttaacattttttccttcatttcaactttggtgaatctgacaattatgtgtcttggagttgct

SEQ ID NO: 61859 - DNA, 120 bp, synthetic construct; identical to SEQ ID NO: 14407
  source 1..120: mol_type = other DNA

SEQ ID NO: 61860 - DNA, 120 bp, synthetic construct
  source 1..120: mol_type = other DNA
tcctttgtcagatgcagactttgcaaagattttctcctgctctgtgggttgtgtgtttactctgctgactgttccttttgctgtgcaaaaactctttagtttaattacctctgagctatt

SEQ ID NO: 61861 - DNA, 120 bp, synthetic construct
  source 1..120: mol_type = other DNA
ccagccgccatcccatctaggaagtgaggagcgcctcttcccggccaccatcccatctaggaagtgaggagcgtctctgcccggccgcccatcgtctgagatgtggggagcgcctctgcc

SEQ ID NO: 61862 - DNA, 120 bp, synthetic construct
  source 1..120: mol_type = other DNA
gggtgtcctttccccacttgtttgctttgttgaagatcagttggctgtaagtttttggctgtaaataaatttctgagttctctattctgttgcattggtctatgtgcctatttttatacc

SEQ ID NO: 61863 - DNA, 120 bp, synthetic construct; identical to SEQ ID NO: 14408
  source 1..120: mol_type = other DNA

SEQ ID NO: 61864 - DNA, 120 bp, synthetic construct
  source 1..120: mol_type = other DNA
agggtctcctcacttctcagagggggcggccgggcagagacgctcctcacctcccagacggggtcacggccgggcagaggcgctcctcacatcccagacggggtggcggggcagaggcgc

SEQ ID NO: 61865 - DNA, 120 bp, synthetic construct; identical to SEQ ID NO: 14409
  source 1..120: mol_type = other DNA

SEQ ID NO: 61866 - DNA, 120 bp, synthetic construct; identical to SEQ ID NO: 14410
  source 1..120: mol_type = other DNA

SEQ ID NO: 61867 - DNA, 120 bp, synthetic construct
  source 1..120: mol_type = other DNA
tctgatttctctttcttttccccacatttcccccttttctttttgacaaaaccaccatcatcatcatggcctgttctcgatggtcgctgtctctttggagctgttgggtacacctcccag

SEQ ID NO: 61868 - DNA, 120 bp, synthetic construct; identical to SEQ ID NO: 14411
  source 1..120: mol_type = other DNA

SEQ ID NO: 61869 - DNA, 120 bp, synthetic construct
  source 1..120: mol_type = other DNA
tcacctcccaccaggccccatctccaacattggggattacagttcaccatgagatttgggcaggtaacacaaatctaaaccatatcaccattcaagtttttaatcttcataaatgccaag

SEQ ID NO: 61870 - DNA, 120 bp, synthetic construct; identical to SEQ ID NO: 14412
  source 1..120: mol_type = other DNA

SEQ ID NO: 61871 - DNA, 120 bp, synthetic construct
  source 1..120: mol_type = other DNA
ctcttaatacatgcatacaacacatttaatttcttccatttttaagaggtaagtttggaaatattggcccatagttttgaagatcaatgtaatatttacccaggagaacttcaaaagata

SEQ ID NO: 61872 - DNA, 120 bp, synthetic construct
  source 1..120: mol_type = other DNA
caaagtgctgggattacaggcgtgagccatggcacctggccagcatacttaacctttacagaggcatttttagctggacatttacagcatttaaaggatggaattcaattaataaaaaag

SEQ ID NO: 61873 - DNA, 120 bp, synthetic construct; identical to SEQ ID NO: 28139
  source 1..120: mol_type = other DNA

SEQ ID NO: 61874 - DNA, 120 bp, synthetic construct
  source 1..120: mol_type = other DNA
ggtactggtaccaaaacagagatatagaccaatggaatagaacagagccctccgaaataatgctgcatatctacaactatctaatctttgacaaacctgacaaaaacaagcaatggggaa

SEQ ID NO: 61875 - DNA, 120 bp, synthetic construct
  source 1..120: mol_type = other DNA
ctggcaatcctgttactgggtttataccgaaaggattataaatcatgctgctataaagacacatgcacatgtatgtttattgtggcactattcacaatagcaaagacttggaaccaaccc

SEQ ID NO: 61876 - DNA, 120 bp, synthetic construct; identical to SEQ ID NO: 28140
  source 1..120: mol_type = other DNA

SEQ ID NO: 61877 - DNA, 120 bp, synthetic construct; identical to SEQ ID NO: 28141
  source 1..120: mol_type = other DNA

SEQ ID NO: 61878 - DNA, 120 bp, synthetic construct
  source 1..120: mol_type = other DNA
taaagcacattagaatcacctggaggtcttgttaaaccatggattgctgggccttgaaaccccagagattctgattcagtagatcgagaatagggcctgagaatttgtatttctaacaag

SEQ ID NO: 61879 - DNA, 120 bp, synthetic construct
  source 1..120: mol_type = other DNA
taataataataataataactaatgatgcagctttctctctctgagtatataatgcagttctgatgatgtgaggaagggcctcactgttggtgtggcagagtctgagaccatggctggcaa

SEQ ID NO: 61880 - DNA, 120 bp, synthetic construct
  source 1..120: mol_type = other DNA
acaatttgcatccctttgtaatatgtaacagaaataaaattctcttttaaaatctatcaacaataggcaaggcacggtggctcacgcctgtcgtctcagcactttgtgaggcccaggcgg

SEQ ID NO: 61881 - DNA, 120 bp, synthetic construct
  source 1..120: mol_type = other DNA
ctggttgcactccgtgctttgcacaaagcaggctctccatttttgttaaatgcacgaatagtgctaagctgggaagttcttcctgaggtctaacctctagctgctcccccacagaagagt

SEQ ID NO: 61882 - DNA, 120 bp, synthetic construct
  source 1..120: mol_type = other DNA
tttgcggacctggtgtgaggattaaatgggaataacatagataaagtcttcagaacttcaaattagttcccctttcttcctttggggggtacaaagaaatatctgacccagttacgccac

SEQ ID NO: 61883 - DNA, 120 bp, synthetic construct
  source 1..120: mol_type = other DNA
aataaaatggatttcccagcatctctggaaaaataggcaagtgtggccatgatggtccttagatctcctctaggaaagcagacatttattacttggcttctgtgcactatctgagctgcc

SEQ ID NO: 61884 - DNA, 120 bp, synthetic construct
  source 1..120: mol_type = other DNA
agtacatacaaaatattatcattccaacatgtaatcagtattttaaaaatcagtaatgagaccaggcacggtggctcacgactgtaatcccaggactttgggaggccgaggcgagtggat

SEQ ID NO: 61885 - DNA, 120 bp, synthetic construct
  source 1..120: mol_type = other DNA
ttatcacctcaaataattaaaattaaatgaagttgaaaatccaggtcctcagtcccattagccacatttctagtgctcagtagccacgggggctggtgaccaccacatgggacagcatat

SEQ ID NO: 61886 - DNA, 120 bp, synthetic construct
  source 1..120: mol_type = other DNA
agcttttagacatctgtccattttcctagagggacaagaccaccacctgtgatcctatgaccttttggctttaggcctaacaagcaggttataccctcactcactttcaaatcattttta

SEQ ID NO: 61887 - DNA, 120 bp, synthetic construct
  source 1..120: mol_type = other DNA
gctatggcttgccccttttgttcaacactgtttttgtgcgtcatctgcattgatgcatgcagttgtcctttatttgttctcactgctggatagtatctggttgggtaaatatatcacact

SEQ ID NO: 61888 - DNA, 120 bp, synthetic construct
  source 1..120: mol_type = other DNA
gaggcggaggttgcaataagcctagattgtgccactgcattccagcctgggcaacagagcaagactccgtctcagaaaaaaaaaaaaaaaggaagaacactcatcctatgaccttgacct

SEQ ID NO: 61889 - DNA, 120 bp, synthetic construct; identical to SEQ ID NO: 32602
  source 1..120: mol_type = other DNA

SEQ ID NO: 61890 - DNA, 120 bp, synthetic construct
  source 1..120: mol_type = other DNA
cctatcagcagtatctgaaaagtctagttgcttcttttcttggccaactctttttttttttttgagatggagttttgctcttgttgcccaggctggagcgcaatggcacgtcctctgctc

SEQ ID NO: 61891 - DNA, 120 bp, synthetic construct
  source 1..120: mol_type = other DNA
ggggaagagatctacaatgacctataagcgtcttctagataagcttgcagaacagctgggttttcttttttttttttcttttttttgagatggggtctgtcacccaggctagagtgcagt

SEQ ID NO: 61892 - DNA, 120 bp, synthetic construct
  source 1..120: mol_type = other DNA
tgggtgacagagcgagactccgtctcaaaaacaaaacaaaacaaaacaaaacaaaaaaccagaaggcactgttaactcaatggcttctcagtatacgcacaataaaatcccccctcctca

SEQ ID NO: 61893 - DNA, 120 bp, synthetic construct
  source 1..120: mol_type = other DNA
tacaaaagatcaatgaaacaaaaagctggtgttttgaaaagaaacaaaattgacaaaccattacctagactagagagagagatggggtgagaaggagaggggaggggagggaggagggga

SEQ ID NO: 61894 - DNA, 120 bp, synthetic construct; identical to SEQ ID NO: 7643
  source 1..120: mol_type = other DNA

SEQ ID NO: 61895 - DNA, 120 bp, synthetic construct
  source 1..120: mol_type = other DNA
gtttgaaatttgttttataattctcccaaccagcaagtttgaaattttccaaaataaaaagttgggaaagaaactgggagagaaagagagggagggagggaaagaggggagggggaggga

SEQ ID NO: 61896 - DNA, 120 bp, synthetic construct
  source 1..120: mol_type = other DNA
tctcatcttttccaaagacagtactctctctcacacctgcactggacactgatagagataggacaggtacaatataacatgctggctagccaggccactggggttttagagagcctgttt

SEQ ID NO: 61897 - DNA, 120 bp, synthetic construct; identical to SEQ ID NO: 25058
  source 1..120: mol_type = other DNA

SEQ ID NO: 61898 - DNA, 120 bp, synthetic construct; identical to SEQ ID NO: 25059
  source 1..120: mol_type = other DNA

SEQ ID NO: 61899 - DNA, 120 bp, synthetic construct; identical to SEQ ID NO: 19416
  source 1..120: mol_type = other DNA

SEQ ID NO: 61900 - DNA, 120 bp, synthetic construct; identical to SEQ ID NO: 19417
  source 1..120: mol_type = other DNA

SEQ ID NO: 61901 - DNA, 120 bp, synthetic construct; identical to SEQ ID NO: 19418
  source 1..120: mol_type = other DNA

SEQ ID NO: 61902 - DNA, 120 bp, synthetic construct
  source 1..120: mol_type = other DNA
aaattttttaatttttatttttagcagagacgaggtctggctacaatgccctgactggtctcgaactcctggcctcaagtgatcctctcacttcaggtgtgagccacaaacaaaacttat

SEQ ID NO: 61903 - DNA, 120 bp, synthetic construct
  source 1..120: mol_type = other DNA
taaaagtactaaaaaaaaaaaatcataattcctaagcatgtatctactgggtaaatcaggatgcagttgaaattcctgcttagccaggtgcggtggctgacgcctgtaatcccagcactt

SEQ ID NO: 61904 - DNA, 120 bp, synthetic construct
  source 1..120: mol_type = other DNA
cgtgatagccgaggcgctacagaaccagctagcctggctggagaacgtgtggctctggatcacctttctgggcgatcccaagatcctctttctgttctacttccccgcggcctactacgc

SEQ ID NO: 61905 - DNA, 120 bp, synthetic construct
  source 1..120: mol_type = other DNA
gaggtatttcaatgagctggaatgacttgctgaaaaacaacatagagttcccctcccttccactcttttccacgagggcctcatccttatgtaaagggaaccacagtgatctgttcactt

SEQ ID NO: 61906 - DNA, 120 bp, synthetic construct
  source 1..120: mol_type = other DNA
agaggattttgacatttttttgtcctccttattctttctcagccttctctgtccatttcccacccccattttcagacctgagaggctcacctaaataatttaggtgtggataattcaggc

SEQ ID NO: 61907 - DNA, 120 bp, synthetic construct
  source 1..120: mol_type = other DNA
aagcctcaaacattctccctttcccaatgtggttagggttcgggtgaacatttcagagtacttttcagcctgggtggcccaaccaaaggaccagcctctcaattactggcgcagagaaca

SEQ ID NO: 61908 - DNA, 120 bp, synthetic construct
  source 1..120: mol_type = other DNA
atctttcttggtaagtctcgctttgaagcctgggcaggctgggccctgtcctatctcgcctgcacctagcctggtgtgtctctggttcattatagctaaaaaaggacacattacctattc

SEQ ID NO: 61909 - DNA, 120 bp, synthetic construct
  source 1..120: mol_type = other DNA
tctgcttttcttatagcagagaggctgcctacgggtggcacggggtggccatggagtgcagagttggtgggacaggggacatccagggggctcgagatgttgctggtgacaaggaatgtc

SEQ ID NO: 61910 - DNA, 120 bp, synthetic construct
  source 1..120: mol_type = other DNA
tccacactgctccttctctgtagggcaccttgtatctgttgccgtaggtcaggtccagctccgactcctcggggttgaagaacatgcccggcttcttggtcatcatcttggtgtacacgg

SEQ ID NO: 61911 - DNA, 120 bp, synthetic construct
  source 1..120: mol_type = other DNA
gaagaggccagagctcgccttagctccccgccctgttcacctggttcaagggcatggggaccccaaacaaggcttcctagtgacaagctgcaagactcacttcctgatcccccttgtctt

SEQ ID NO: 61912 - DNA, 120 bp, synthetic construct
  source 1..120: mol_type = other DNA
tcccgaagggcttctccacgatgatgcggttccagcctctgctgggagcccggagctgcgttacccccttgaacccctcttcggggagtgaggatcagagctgcatcattcagacgccct

SEQ ID NO: 61913 - DNA, 120 bp, synthetic construct
  source 1..120: mol_type = other DNA
cacataggagttgcgggcaaagaagtcctccagcttgagcttctcctctggggtggcctgggagacacggacagacagacacacagacagatgtcagcccctctctttgagtccgtgtgt

SEQ ID NO: 61914 - DNA, 120 bp, synthetic construct
  source 1..120: mol_type = other DNA
ccaagggacgacagaagtaccatgtagccacatttgtgagacgtgacctcaagtgcttacattagcaaaaaagagtggttcaaaaataaggagctaagcattccacttaagaagtgagaa

SEQ ID NO: 61915 - DNA, 120 bp, synthetic construct
  source 1..120: mol_type = other DNA
tggacgcggtggctcaagcctataatcccagcactttggaaggccgaggcggatggattacctgagttcgggagttcaagaccagcctgaccaacatggagaaaccgtttctactaaaaa

SEQ ID NO: 61916 - DNA, 120 bp, synthetic construct
  source 1..120: mol_type = other DNA
tctagcaatcttgctcaacccaacagatgtagatcaagtgtttcagaaatcacctattcacgctaaaactcttagcagagggggaatgcaagggaacttcactaacttgataaagggcat

SEQ ID NO: 61917 - DNA, 120 bp, synthetic construct
  source 1..120: mol_type = other DNA
gggaatgggtacccaggaactttctggggagatgacgatggcctttattgtgatgagggtgtacagccaattgtacagttaagatttgcgcaccaacaaaagacggcgagaaaaccaaca

SEQ ID NO: 61918 - DNA, 120 bp, synthetic construct
  source 1..120: mol_type = other DNA
aagagcaagactccatctcaaaaaaaagaaaaaacaaaaattagctggatgtggtggcaggcacctggaatcccagctactcaggaggctaaggcaggagaatcacttgaatccaggaga

SEQ ID NO: 61919 - DNA, 120 bp, synthetic construct
  source 1..120: mol_type = other DNA
gaacaaacatgggaagacatcgggaaacctgacagcttggtcaagagtctactcgtgccatgtgggtgggggcaattcaaggggtccttagtgaaaagcagttgggagcttctcatcttc

SEQ ID NO: 61920 - DNA, 120 bp, synthetic construct
  source 1..120: mol_type = other DNA
tctggaagggggcagtaagtacctcggctccctttctggtaggggtgggagtcctgagaaggcaggaagtggcccacttggtaactctgaggtgccatcagggcccccaggaaggaagct

SEQ ID NO: 61921 - DNA, 120 bp, synthetic construct; identical to SEQ ID NO: 2131
  source 1..120: mol_type = other DNA

SEQ ID NO: 61922 - DNA, 120 bp, synthetic construct
  source 1..120: mol_type = other DNA
accatgttggccaggatggtctcgatctcttgaccttgtgatctgcccaccttggccccccaaagtgctgggattacagatgtgagccactgcgcccagccaatttttgtattttaagta

SEQ ID NO: 61923 - DNA, 120 bp, synthetic construct
  source 1..120: mol_type = other DNA
ctaagtgtttgtatcgacggaacttgaagtgttagtgaagaggcagagatcaggcctcagatcctgcctttggaactcatttgttaaggcatgaacaggtctgaaaaaactacagaatga

SEQ ID NO: 61924 - DNA, 120 bp, synthetic construct
  source 1..120: mol_type = other DNA
cttcattcagggtgtacattacaaaattactcaaagcattggtgtattccgactacagcatcaattctggacaaccgagtaaaatccttgtggggcatggaactgcgtgcccaggaccat

SEQ ID NO: 61925 - DNA, 120 bp, synthetic construct
  source 1..120: mol_type = other DNA
attgggcagtctcttcttgattcctcccccggagagggcggggcggccgagcgccccgaggctagacgccgccgtccgagagacgagggggcgtgtaggcggtgacgccctgcaaagtgg

SEQ ID NO: 61926 - DNA, 120 bp, synthetic construct
  source 1..120: mol_type = other DNA
tatctgagttcagcttagagatgaacggggagccgccctcctgtgctgggcttggggctggaggctgcatcttcccgtttctagggtttcctttccccttttgatcgacgcagtgctcag

SEQ ID NO: 61927 - DNA, 120 bp, synthetic construct
  source 1..120: mol_type = other DNA
aagccttctgtaacatgacatgacaggtcagactccctcgggccctgagttcacttcttcctggtatgtgaccagctcccagtaccagagaaggttgcacagtcctctgctccaaggagc

SEQ ID NO: 61928 - DNA, 120 bp, synthetic construct
  source 1..120: mol_type = other DNA
ctgaaatcccagcacttcggaaggccaaggggggtggatcacttgagctcaggagttcgagaccagcctgggtaacatggcaaaatcccgtctctacaaaaatacagaaaattagctggg

SEQ ID NO: 61929 - DNA, 120 bp, synthetic construct
  source 1..120: mol_type = other DNA
caagctggagaacctgagctcctctgaaatgggctacacggccaccctgacccgtaccacccccaccttcttccccaaggacatcctgaccctgcggctggacgtgatgatggagactga

SEQ ID NO: 61930 - DNA, 120 bp, synthetic construct
  source 1..120: mol_type = other DNA
gtttctcacacgatgggcagggcgacacatgtttgtttctcacacggcggggagggcgacgggcatttctcacagggcgctccctgggtcttttactcacataggtctaaatcccatgta

SEQ ID NO: 61931 - DNA, 120 bp, synthetic construct
  source 1..120: mol_type = other DNA
tgcgaaattagctgtgctgtgttaacagaggacgcgtcttcctgtggaccgggtttatctgcggctttcatttctcggaggtgctgtttgccttgcacttgacccccagcaaacctcagg

SEQ ID NO: 61932 - DNA, 120 bp, synthetic construct
  source 1..120: mol_type = other DNA
ttttctgggaaatgagtcctatgggctgatgcctctcccaactctggccttctgtgctcctaaggagggttctggggccctgcctggaggtgggctggcaccacatatctttccgtccca

SEQ ID NO: 61933 - DNA, 120 bp, synthetic construct
  source 1..120: mol_type = other DNA
tgagggtccccagaaatggccgggtgctactcagggttctgtcagatgtaggttacttgaactgccttaaagcaaaaggccaggggcatgataaactgatgtcacctggtcctggaaagt

SEQ ID NO: 61934 - DNA, 120 bp, synthetic construct
  source 1..120: mol_type = other DNA
ctcaggaagacggtgggatttgaggagccatcacgcccagtgggacagctgagaggaatgggccacagtggcccgtgacgatggtggctcctacaaggaatggccccgtgagttcttcca

SEQ ID NO: 61935 - DNA, 120 bp, synthetic construct
  source 1..120: mol_type = other DNA
gagaacccaccctacgtgcctggtcagctcgccccccacctaccctggggacttaatcaaatcagagactcccttgtctggcctgggagacttagcaccctcatctctgagaagcagatg

SEQ ID NO: 61936 - DNA, 120 bp, synthetic construct
  source 1..120: mol_type = other DNA
agtttctctccacacactacaacctgcacaacctctacggcctgaccgaagccatcgcctcccacaggtgagggccacgtcccgccccactgggctctgccctcacagcctgtcctacaa

SEQ ID NO: 61937 - DNA, 120 bp, synthetic construct; identical to SEQ ID NO: 18572
  source 1..120: mol_type = other DNA

SEQ ID NO: 61938 - DNA, 120 bp, synthetic construct; identical to SEQ ID NO: 18573
  source 1..120: mol_type = other DNA

SEQ ID NO: 61939 - DNA, 120 bp, synthetic construct
  source 1..120: mol_type = other DNA
cagattctctgtctttggcctttgaagtcccgatggtgtgtctaggtgtagatctctgagtttatcttactgggagtttgttgagcttcttggacgtatgcattgatgtttttcatcaaa

SEQ ID NO: 61940 - DNA, 120 bp, synthetic construct
  source 1..120: mol_type = other DNA
ttttgttaaatacatgctccccagatggctgcaaacccttggttagtttcaagagtcctaaaaatgtcaactctgaccatttttgccgatgttcctgttttcacagaggagaggatcttg

SEQ ID NO: 61941 - DNA, 120 bp, synthetic construct
  source 1..120: mol_type = other DNA
tccccagggtgggcatatgagccagccccatcccattcatcacccgtatgcctgtgtgcccatcccccttgcaggttccccaaggactctagcacctggactgtggaccaccagctcctg

SEQ ID NO: 61942 - DNA, 120 bp, synthetic construct
  source 1..120: mol_type = other DNA
aaaggcgtggagcatggccggcaggagctcagtggtctgcatggtggaggttctgccgggcccggcctcgggcagccgtgggatagcacttgaggtggggaaggtcttgggtcatcacca

SEQ ID NO: 61943 - DNA, 120 bp, synthetic construct
  source 1..120: mol_type = other DNA
gaagggtcaggccacacaggctgtgcctttcctcctcctgtgtctacacgtgggtgatggggccacaatgacgacctctgagccgtgttgaagcagcaccgcgtttctggcgtgcgttaa

SEQ ID NO: 61944 - DNA, 120 bp, synthetic construct; identical to SEQ ID NO: 25812
  source 1..120: mol_type = other DNA

SEQ ID NO: 61945 - DNA, 120 bp, synthetic construct; identical to SEQ ID NO: 25813
  source 1..120: mol_type = other DNA

SEQ ID NO: 61946 - DNA, 120 bp, synthetic construct
  source 1..120: mol_type = other DNA
gtcttcttttgagaagtgtctgttcatatcctttgcccactttttgatggggttgtttgcttctttcttgtaaatttgtttgagttcattgtagattctggatattagccctttgccaga

SEQ ID NO: 61947 - DNA, 120 bp, synthetic construct
  source 1..120: mol_type = other DNA
ctttgaagcaattgtgaatgggagttcactcatgatttggctctctgttattggtgtataagaatgcttgtgatttttgtagattgattttgtgtcctgagactttgctgaagttgctta

SEQ ID NO: 61948 - DNA, 120 bp, synthetic construct
  source 1..120: mol_type = other DNA
gattctgttattggtctattcagagattcaacttcttcctggtttagtcttgggagagtgtatgtgtcgaggaatttatccatttcttctagattttctagtttatttgcgtagaggtgt

SEQ ID NO: 61949 - DNA, 120 bp, synthetic construct
  source 1..120: mol_type = other DNA
gtctcgttgatctgtctaatgttgacagtggagtgttaaagtctcccattattattgtgtgggagtctaagtctctttgtaggtcactcaggacttgctttatgaatctgggtgctcctg

SEQ ID NO: 61950 - DNA, 120 bp, synthetic construct
  source 1..120: mol_type = other DNA
ggaaaccatcattctcagtcaactattgcagggacaaaaaaccaaacaccgcatgttctcactcataggtgggaattgaacaatgagaacacttggacacaggaaggggaacatcacaca

SEQ ID NO: 61951 - DNA, 120 bp, synthetic construct; identical to SEQ ID NO: 35646
  source 1..120: mol_type = other DNA

SEQ ID NO: 61952 - DNA, 120 bp, synthetic construct
  source 1..120: mol_type = other DNA
atcacaagcattcttatacaccaacaacagacaaacggagagccaaatcatgagtgaactcccattcacaactgcttcaaagagaataaaatacctaggaatccaacttacaagggatat

SEQ ID NO: 61953 - DNA, 120 bp, synthetic construct
  source 1..120: mol_type = other DNA
aaacaaacaaccccatcaaaaaatgggcaaaggacatgaacagacacttcgcaaaagaagatatttatgcagctaaaaaacacatgaaaaaatgctcaccatcactggccatcagagaaa

SEQ ID NO: 61954 - DNA, 120 bp, synthetic construct
  source 1..120: mol_type = other DNA
caaattcaagaaatacaaagaccaccaccatgatactcctcgagaaaagcaaccccaagacacgtaattgtcagattgacaaaggttgaaatgaagggaaaaaatggtaagggcagccag

SEQ ID NO: 61955 - DNA, 120 bp, synthetic construct
  source 1..120: mol_type = other DNA
gaaagggcctgctcctcctcaccttcaggaagttctactaaaattcagtaatcttactaggcagtaagattcaggacataggcatgggcaaggacttcatgtctaaaacaccaaaagcaa

SEQ ID NO: 61956 - DNA, 120 bp, synthetic construct
  source 1..120: mol_type = other DNA
agatcacatggacacaggaaggggaacatcacactctggggactgttgtggtgtggggggaggggggagggatagcattgggagatatacttaatactagatgacgagttagtgggtgca

SEQ ID NO: 61957 - DNA, 120 bp, synthetic construct
  source 1..120: mol_type = other DNA
ttttaacaaataaaattaaatttattaactaaaaaatataaggccgggcgcagtggctgatgtctgtaatcccagcactttgggaggctggggcgggcggatcacttgaggtcaggagtt

SEQ ID NO: 61958 - DNA, 120 bp, synthetic construct; identical to SEQ ID NO: 32859
  source 1..120: mol_type = other DNA

SEQ ID NO: 61959 - DNA, 120 bp, synthetic construct
  source 1..120: mol_type = other DNA
aatgtccaacaacgatagactgggttaagcaaatgtggcacatatacaccatggaatactgtgcagccttaaaaaatgatgagttcatgtcctttgtagggacatggatgaaattggaag

SEQ ID NO: 61960 - DNA, 120 bp, synthetic construct
  source 1..120: mol_type = other DNA
gcgttatttctgagggctccgttctgttctatatctatatctatatctgatctatatctctgttttggtaccagtaccatgctgttttggttactgtagccttgtagtatagtttgaagt

SEQ ID NO: 61961 - DNA, 120 bp, synthetic construct
  source 1..120: mol_type = other DNA
aagaatcaatatcgtgaaaatggccatactgcccaaggtaatttatagattcaatgccatccccatcaagctaccaatgactgtcttcacagaattggaaaaaactactttaaagttcat

SEQ ID NO: 61962 - DNA, 120 bp, synthetic construct
  source 1..120: mol_type = other DNA
cctctgccctgctgccctgtctgggaggaagtgaggagcgcctctggccggctgccccaaatgggaactgaggagcgcctctgcctggccgcccccatctgggaagtgaggagtgcctct

SEQ ID NO: 61963 - DNA, 120 bp, synthetic construct
  source 1..120: mol_type = other DNA
gaaatgaagtgagaagagaagtttagagaaaaaagaataaaaagaaatgaacaaagtctccaagaaatatgggactatgtgaaaagaccagatctatgtctgattggtgtacctgaaagt

SEQ ID NO: 61964 - DNA, 120 bp, synthetic construct
  source 1..120: mol_type = other DNA
ctagtctctgataaaacagactgtaaaccaacaaagatcaaaagagacaaagaaggccattacataatggtaaagggatcaattcaacaagaagagctaactatcctaaatatatatgca

SEQ ID NO: 61965 - DNA, 120 bp, synthetic construct
  source 1..120: mol_type = other DNA
aatggataaatacctcgacacatacatcctcccaagactaaaccaggaagaaattgaatctctgaatagaccaataacaggctctgaaattgaggcaataatcaatagattaccaaccaa

SEQ ID NO: 61966 - DNA, 120 bp, synthetic construct
  source 1..120: mol_type = other DNA
ccatgctcatgggtaggaagaatcaatatcgtgcaaatggccacactgcccaaggtaatttatagattcaatgccatcctcatcaagctaccaatgactttcttcacagaattggagaaa

SEQ ID NO: 61967 - DNA, 120 bp, synthetic construct
  source 1..120: mol_type = other DNA
gatctagaagtagaaataccatttgacccagccatcctattactgggtatatacccacaggactataaatcatgctgctataaagacacatgcacacatgtgtttattgcgggactattc

SEQ ID NO: 61968 - DNA, 120 bp, synthetic construct; identical to SEQ ID NO: 32860
  source 1..120: mol_type = other DNA

SEQ ID NO: 61969 - DNA, 120 bp, synthetic construct; identical to SEQ ID NO: 32861
  source 1..120: mol_type = other DNA

SEQ ID NO: 61970 - DNA, 120 bp, synthetic construct; identical to SEQ ID NO: 32862
  source 1..120: mol_type = other DNA

SEQ ID NO: 61971 - DNA, 120 bp, synthetic construct; identical to SEQ ID NO: 32863
  source 1..120: mol_type = other DNA

SEQ ID NO: 61972 - DNA, 120 bp, synthetic construct; identical to SEQ ID NO: 32864
  source 1..120: mol_type = other DNA

SEQ ID NO: 61973 - DNA, 120 bp, synthetic construct; identical to SEQ ID NO: 32865
  source 1..120: mol_type = other DNA

SEQ ID NO: 61974 - DNA, 120 bp, synthetic construct; identical to SEQ ID NO: 32866
  source 1..120: mol_type = other DNA

SEQ ID NO: 61975 - DNA, 120 bp, synthetic construct; identical to SEQ ID NO: 15300
  source 1..120: mol_type = other DNA

SEQ ID NO: 61976 - DNA, 120 bp, synthetic construct
  source 1..120: mol_type = other DNA
gaccatatgtatatttaacttgaaaatgatttaggccaggcacggtggctcacacctgtaatcccagcactttgggaggccaaagcaggtggatcacctgaggtcggagttcgagacgag

SEQ ID NO: 61977 - DNA, 120 bp, synthetic construct; identical to SEQ ID NO: 27156
  source 1..120: mol_type = other DNA

SEQ ID NO: 61978 - DNA, 120 bp, synthetic construct; identical to SEQ ID NO: 27157
  source 1..120: mol_type = other DNA

SEQ ID NO: 61979 - DNA, 120 bp, synthetic construct; identical to SEQ ID NO: 25413
  source 1..120: mol_type = other DNA

SEQ ID NO: 61980 - DNA, 120 bp, synthetic construct
  source 1..120: mol_type = other DNA
tttgaatcttgttaaaatgtagattctgatttaataaggagtggggcctaagattccaaatgtctaaaaagctggaaaccatcattctcagcaaactatcgcaaggacaaaaaaccaaac

SEQ ID NO: 61981 - DNA, 120 bp, synthetic construct
  source 1..120: mol_type = other DNA
cacttctcaaaagaagacatttatgcagccaaaagtcacatgaaaaaatgctcatcatcactggccatcagagaaatgcaaatcaaaaccacaatgagataccatctcacaccagttaga

SEQ ID NO: 61982 - DNA, 120 bp, synthetic construct; identical to SEQ ID NO: 25415
  source 1..120: mol_type = other DNA

SEQ ID NO: 61983 - DNA, 120 bp, synthetic construct
  source 1..120: mol_type = other DNA
aaaaatgttttcagatgaaaacaaaacactagtattagttcattaaaacatgggtagtggccaggcgtagtgggtcatgcctgttatcccagcactttgggaggccaaagtgggaggatc

SEQ ID NO: 61984 - DNA, 120 bp, synthetic construct
  source 1..120: mol_type = other DNA
ccgtctgagaagtgaggagcccctccgcccagcagccaccccgtctgggaagtgaggggcgtctctgcccggcagccacctcgtccggcagggaggtggggggtcagccccccgcccggc

SEQ ID NO: 61985 - DNA, 120 bp, synthetic construct
  source 1..120: mol_type = other DNA
cagcctgggcaacatagcaagattctgcctcaaaaaaaaaaaaaagtaggcaatattttctgggccatgcactttactgacatcaccttgaattttgcctgacacttgctgtatggggag

SEQ ID NO: 61986 - DNA, 120 bp, synthetic construct
  source 1..120: mol_type = other DNA
aaagacaaacaggaaagtgtctctatcgggaccaacgtgtgcgaccctacctgaaacggcaagcagaattcggtgttttcttccttttgccctgatcttgacgagataggaaacttggga

SEQ ID NO: 61987 - DNA, 120 bp, synthetic construct
  source 1..120: mol_type = other DNA
cctgctggagggcaaggggactaatcacgcctttacttagtcatcaacgcatccacgcaggaccaagttcaaagcatgttgcgtgaaatcagacagcaggaagtttatttgattccttaa

SEQ ID NO: 61988 - DNA, 120 bp, synthetic construct; identical to SEQ ID NO: 35511
  source 1..120: mol_type = other DNA

SEQ ID NO: 61989 - DNA, 120 bp, synthetic construct
  source 1..120: mol_type = other DNA
acaattacatgcaacaacctgtacacatctcacaaacctaacattaaattaacaagcaagaagccacaaaggttgtgaaaattttctcccattttgtaggttgcctgttcactctgatgg

SEQ ID NO: 61990 - DNA, 120 bp, synthetic construct
  source 1..120: mol_type = other DNA
tccttcacgtcccttgtaagttggattcctaggtattttattctctttgaagcaatcgtgaatgggagttcactcatgaattttcacaacctactcatctgacaaagggctaatatccag

SEQ ID NO: 61991 - DNA, 120 bp, synthetic construct
  source 1..120: mol_type = other DNA
actaagctgcacattgtgcacatgtaccctaaaacttaaagtataataataataaagaagccacaaaggaaaatcatgattccattcatataaagttcaaaaacagcaaaactaaagtgt

SEQ ID NO: 61992 - DNA, 120 bp, synthetic construct; identical to SEQ ID NO: 35512
  source 1..120: mol_type = other DNA

SEQ ID NO: 61993 - DNA, 120 bp, synthetic construct
  source 1..120: mol_type = other DNA
atatagatcaatggaacagaacagagccctcagaaataacaccacatatctacaactatctgatctttgacaaacctgagaaaaacaagaaatggggaaaggattccctgtttaataaat

SEQ ID NO: 61994 - DNA, 120 bp, synthetic construct
  source 1..120: mol_type = other DNA
aatgtccaacaatgatagactggattaagaaaatgtggcacatatacaccatggaatactatgcagccataaaaaatgatgagttcatgtcctttgtagggacatggatgaagttggaaa

SEQ ID NO: 61995 - DNA, 120 bp, synthetic construct; identical to SEQ ID NO: 35513
  source 1..120: mol_type = other DNA

SEQ ID NO: 61996 - DNA, 120 bp, synthetic construct; identical to SEQ ID NO: 35514
  source 1..120: mol_type = other DNA

SEQ ID NO: 61997 - DNA, 120 bp, synthetic construct; identical to SEQ ID NO: 35515
  source 1..120: mol_type = other DNA

SEQ ID NO: 61998 - DNA, 120 bp, synthetic construct
  source 1..120: mol_type = other DNA
gcatctactgagatgacaacttggttttggacttcattctgttaatgtggtgtagcatatttatatatttacacatgttgaaccatcctttcatccctgggataaatcccacttggtcaa

SEQ ID NO: 61999 - DNA, 120 bp, synthetic construct
  source 1..120: mol_type = other DNA
caacaggcgagactctgtctcaaaaaaaaaaaaataaaaaaagcaaaaaacaagcagaggttggagtggtgcagctgcaagccaaggaatgccaaagattacagccaccaccagaaacta

SEQ ID NO: 62000 - DNA, 120 bp, synthetic construct; identical to SEQ ID NO: 35508
  source 1..120: mol_type = other DNA

SEQ ID NO: 62001 - DNA, 120 bp, synthetic construct
  source 1..120: mol_type = other DNA
gagtaggttgcgaaaattttctcccattttgtgggatgcctgttcactctgatggtagtttcttttgctgtgcagaagctctttagtttaattagatcccatttgtcaattttggctttt

SEQ ID NO: 62002 - DNA, 120 bp, synthetic construct; identical to SEQ ID NO: 35509
  source 1..120: mol_type = other DNA

SEQ ID NO: 62003 - DNA, 120 bp, synthetic construct
  source 1..120: mol_type = other DNA
aatcgccacactgacttccacaatggttgaactagtttacagtcccaccaacagtgtaaaagtgttcctatttctccacatcttgtccagcacctgttgtttcctgactttttaatgatt

SEQ ID NO: 62004 - DNA, 120 bp, synthetic construct
  source 1..120: mol_type = other DNA
tggaatattcttccatttgtatcctcttttatttccttgagcagtggtttgtggttctccttgaagaggtccttcacatcccttgtaagttggattcctaggtattttattctctttgaa

SEQ ID NO: 62005 - DNA, 120 bp, synthetic construct
  source 1..120: mol_type = other DNA
tttagtcttgggagagtgtatgtgtcgaggaatttatccatttcttctagattttctagtttatttgcatagaggtgtttgtagtattctctgatggtagtttgtatttctgtgggatca

SEQ ID NO: 62006 - DNA, 120 bp, synthetic construct
  source 1..120: mol_type = other DNA
tttcaagtctgttttatcagagacgaggattgcaacccctgcctttttttgttttccattagcttggtagatcttcctccatccttttattttgagcctatgtgtgtctctgcacgtgag

SEQ ID NO: 62007 - DNA, 120 bp, synthetic construct
  source 1..120: mol_type = other DNA
tatctttttattcttttttctctaaacttcccttctcgcttcatttcattcatttcatcttccattactgataccctttcttccagttgatcgcatcggctcctgaggcttctgcattct

SEQ ID NO: 62008 - DNA, 120 bp, synthetic construct
  source 1..120: mol_type = other DNA
atattcgggtgggagtgacccgattttccaggtgcgtccgtcacccctttcttggactcagaaagggaactccctgaccccttgctcttcccaagtgaggcaatgcctcgccctgcttgg

SEQ ID NO: 62009 - DNA, 120 bp, synthetic construct
  source 1..120: mol_type = other DNA
taagtttaattgagaaaacgagacagggagaattgttatgggtaggggtaagaatatgggtacatggagcccaattacactatttttttctactttggggtgtgtgtgtggcatatgttt

SEQ ID NO: 62010 - DNA, 120 bp, synthetic construct
  source 1..120: mol_type = other DNA
ctgaactttgtaacaattccatccaaacgtgaagtttcctggccagaactcaggggaaggcatgaatctggtgtgcagattcgacaggtgaggaggcgtgaaagccctgcttgctttctc

SEQ ID NO: 62011 - DNA, 120 bp, synthetic construct
  source 1..120: mol_type = other DNA
atggctgctgaccagtcagggcagtggttgctaaaggttggggcagctgtggcaatttcttaaaataagacaacaatgaagtttgcctcatcaattgactcttcttttcacaaaagattt

SEQ ID NO: 62012 - DNA, 120 bp, synthetic construct
  source 1..120: mol_type = other DNA
ccacacattaataatgggagactttaacaccccactgtcaacattagacagatcaacgagacagaaagtcaacaaggatacccaggaattgaactcagctctgcaccaagaggacctaat

SEQ ID NO: 62013 - DNA, 120 bp, synthetic construct; identical to SEQ ID NO: 35510
  source 1..120: mol_type = other DNA

SEQ ID NO: 62014 - DNA, 120 bp, synthetic construct
  source 1..120: mol_type = other DNA
agtatcatgcctcaaaagtattaattgcactgggcttggaggaaagtaaagaaaaaaatgtttctaattcttgcgatagtttactgagaatgatggtttccaatttcatccatgtcccta

SEQ ID NO: 62015 - DNA, 120 bp, synthetic construct
  source 1..120: mol_type = other DNA
cctgtaataccaacactttgggaggtcaatgtgggaagatcttttgaggtcaggagtttgagatcagcctgggcaagacagtgagaccctatctctaaaaaataattttaaaaatcagcc

SEQ ID NO: 62016 - DNA, 120 bp, synthetic construct; identical to SEQ ID NO: 14801
  source 1..120: mol_type = other DNA

SEQ ID NO: 62017 - DNA, 120 bp, synthetic construct
  source 1..120: mol_type = other DNA
gatggtagtttgtatttctgtgggattggtggtgatatcccctttatcatttttttttgacccatctcattactgggtatatacccaaaggattataaaacatgctgctataaagacaca

SEQ ID NO: 62018 - DNA, 120 bp, synthetic construct
  source 1..120: mol_type = other DNA
aaacatggcacgtggtgtacatttccttttccttgtgcatgaaatggaattaataatactattgtcagtttttaatgtaggtgttaggacagtgagagcaaagagtaattatgaagtatt

SEQ ID NO: 62019 - DNA, 120 bp, synthetic construct
  source 1..120: mol_type = other DNA
ttattttttcactcttttaaatacaatttattcactacctactttacaaaaggtactattctgggctagagacgaaataaatccagttcttatacatacatatgtgtatgtgtgtgtgtg

SEQ ID NO: 62020 - DNA, 120 bp, synthetic construct
  source 1..120: mol_type = other DNA
gagcttgcagtgagccaagatcatgccactgcactccagcctgggcacagagggagactccgtctcaaaataaataaatagatagatagatagatgatagatagatagatagatagatag

SEQ ID NO: 62021 - DNA, 120 bp, synthetic construct
  source 1..120: mol_type = other DNA
ttttcgtgttttagacatgaagtctttgcccttgcctatgtcctgaatggtattgcctagttttcttgtagggtttttatggttttaggtctgacatttaagtctttaatccatcttgaa

SEQ ID NO: 62022 - DNA, 120 bp, synthetic construct
  source 1..120: mol_type = other DNA
atctgcaaacagggacaatttgacttcctcttttcctaattgaatgccctttatttccttctcctgcctgattgccctggccagaacttccaactctatgttgaataggattagtgagag

SEQ ID NO: 62023 - DNA, 120 bp, synthetic construct; identical to SEQ ID NO: 25419
  source 1..120: mol_type = other DNA

SEQ ID NO: 62024 - DNA, 120 bp, synthetic construct
  source 1..120: mol_type = other DNA
gtttctgccaagagatccgctgttagtctgatgggcttcgataccaaagccgggcagagacacaaccaaaaaagagaattttagaccaatatccttgatgaacattgatgcaaaaatcct

SEQ ID NO: 62025 - DNA, 120 bp, synthetic construct
  source 1..120: mol_type = other DNA
agcccgcatcaccaagtcaatcctaagacaaaagaacaaagctggaggcatcacgctacctgacttcaaactatactacaagcctacagtaaccaaaacagcatggtacttttaccaaaa

SEQ ID NO: 62026 - DNA, 120 bp, synthetic construct
  source 1..120: mol_type = other DNA
ttcaacccttgtggaagtcagtgtggcgattcttcagggatctggaactaaaaataccatttgacacagccttcccattactgggtatatacccaagggactataaatcatgctgctata

SEQ ID NO: 62027 - DNA, 120 bp, synthetic construct; identical to SEQ ID NO: 25420
  source 1..120: mol_type = other DNA

SEQ ID NO: 62028 - DNA, 120 bp, synthetic construct
  source 1..120: mol_type = other DNA
ctcagaattaagaaactcactcaaaaccactcagctacatggaaactgaacaacctgctcctgaatgactactgggtacataatgaaatgaaggcagaaataaagatgttctttgaaacc

SEQ ID NO: 62029 - DNA, 120 bp, synthetic construct
  source 1..120: mol_type = other DNA
cgcaaatcaattaatgtaatgcagcatataaacagaatcaaagacaaaaactacatgattatctcaatagatgcagaaaaggcctttgacaaaattcaacaacgcttcatgctaaaaact

SEQ ID NO: 62030 - DNA, 120 bp, synthetic construct
  source 1..120: mol_type = other DNA
agagaacagagccctcagaaataacgccgcatatctacaactatctgatctttgacaaagctgagaaaaacaagcaatggggaaaggattccctatttaataaatggtgctgggaaaact

SEQ ID NO: 62031 - DNA, 120 bp, synthetic construct
  source 1..120: mol_type = other DNA
cataaaaaatgatgagttcatgtcctttgtagggacatggatgaaactggaactcatcattctcagtaaactatcgcaaggacaaaaatccaaacaccacatgttctcactcataggtgg

SEQ ID NO: 62032 - DNA, 120 bp, synthetic construct; identical to SEQ ID NO: 25422
  source 1..120: mol_type = other DNA

SEQ ID NO: 62033 - DNA, 120 bp, synthetic construct
  source 1..120: mol_type = other DNA
tttatagtcctttgggtatatacccagtaatgggatggctgggtcaaatggtatttctagttctagatccctgaggaatcgccacactaacttccacaatggttgaactagtttacagtc

SEQ ID NO: 62034 - DNA, 120 bp, synthetic construct; identical to SEQ ID NO: 25423
  source 1..120: mol_type = other DNA

SEQ ID NO: 62035 - DNA, 120 bp, synthetic construct
  source 1..120: mol_type = other DNA
cagagacagactgacatactctacttctgttaaaaaaaaaaacaaaaagtgtatgtgtcgaggaatttatccatcgacacatacactctcccaagactaaaccaggaagaagttgaatct

SEQ ID NO: 62036 - DNA, 120 bp, synthetic construct
  source 1..120: mol_type = other DNA
acaaaatcaatgtacaaaaatcacaagcattcttatacaccaataacagacaaacagagagccaaatcatgagtgaactcccattcacaattgcttcaaagagaataaaacacctaggaa

SEQ ID NO: 62037 - DNA, 120 bp, synthetic construct
  source 1..120: mol_type = other DNA
acatttatgcagccaaaaaacacatgaaaaaatgctcaccatcactggccatcagagaaatgcaaatcaaaaccacaatgagataccatctcacaccagttagaatggcaatcattcaaa

SEQ ID NO: 62038 - DNA, 120 bp, synthetic construct; identical to SEQ ID NO: 14798
  source 1..120: mol_type = other DNA

SEQ ID NO: 62039 - DNA, 120 bp, synthetic construct
  source 1..120: mol_type = other DNA
gctgcagcaagttatccagaagatcccgctaaaatcactgatgaaggtggttacactaaacaacaggttttcagagtagactttggaagaagtcttttctaatggaagaagaggccatgt

SEQ ID NO: 62040 - DNA, 120 bp, synthetic construct
  source 1..120: mol_type = other DNA
atttccctgaatttctggaatctcatgattaaacttgaatgaatgaggagttgcttcctatggatgagcaaagagtggtttcttgagatggaatctactcctggtgaggatgttgtgaac

SEQ ID NO: 62041 - DNA, 120 bp, synthetic construct; identical to SEQ ID NO: 14799
  source 1..120: mol_type = other DNA

SEQ ID NO: 62042 - DNA, 120 bp, synthetic construct
  source 1..120: mol_type = other DNA
ttaagctagcagattttgtaatctttaaagttaatacaaaataaaataaaacaaatggaccgggcatggtggctcacacctgtcattccagcactttgggaggccgaggcgggtggatca

SEQ ID NO: 62043 - DNA, 120 bp, synthetic construct
  source 1..120: mol_type = other DNA
caaactgtgagactctacctttggcacaagatggtaatgttatctctgtctctctctctctctctctctctctctctctgtctctctttgtctctctctctctctctctctatatatata

SEQ ID NO: 62044 - DNA, 120 bp, synthetic construct
  source 1..120: mol_type = other DNA
ttggatatcattgctatattctccatggcttcccctactcaagatcctacaatagtctcccatcgtttaaatctttaatccatcttgaattgatttttgtataaggtgtaaggaagggat

SEQ ID NO: 62045 - DNA, 120 bp, synthetic construct
  source 1..120: mol_type = other DNA
agagggcatccctgtcttgtgccagttttcaaagggaatgcttccagtttttgcccattcagtatgatattggctgtgggtttgtcataaaaaccctagaagaaaacctaggcattacca

SEQ ID NO: 62046 - DNA, 120 bp, synthetic construct
  source 1..120: mol_type = other DNA
cacactctggggactgtggtggggtcggggggaggggggagggatagcattgggagatatacctaatgctagatgacacattagtgggtgcagtgcaccagcatggcacatgtatacata

SEQ ID NO: 62047 - DNA, 120 bp, synthetic construct
  source 1..120: mol_type = other DNA
cacctgttgtttcctgactttttaatgatcgccattttaactggtgtgagatggtatcacattctgcttttgatttgcatttctccaatggccagtgatggtgagcattttttcatgtgt

SEQ ID NO: 62048 - DNA, 120 bp, synthetic construct
  source 1..120: mol_type = other DNA
agaaaacctaggcattaccattcaggatataggcatgggcaaggacttcatgtctaaaacaccaaaagcaatggcaacaaaagccaaaattgacaaatgggatctaattaaactaaagag

SEQ ID NO: 62049 - DNA, 120 bp, synthetic construct; identical to SEQ ID NO: 14810
  source 1..120: mol_type = other DNA

SEQ ID NO: 62050 - DNA, 120 bp, synthetic construct; identical to SEQ ID NO: 14811
  source 1..120: mol_type = other DNA

SEQ ID NO: 62051 - DNA, 120 bp, synthetic construct; identical to SEQ ID NO: 14812
  source 1..120: mol_type = other DNA

SEQ ID NO: 62052 - DNA, 120 bp, synthetic construct; identical to SEQ ID NO: 14805
  source 1..120: mol_type = other DNA

SEQ ID NO: 62053 - DNA, 120 bp, synthetic construct
  source 1..120: mol_type = other DNA
gggaggattgcctgagcccaggagtttgaggttacagtgagctacgattgcatcactgtattccagcctgggtaacagaatgagaccctgactcgaaaattaaataaaataaaatacaat

SEQ ID NO: 62054 - DNA, 120 bp, synthetic construct
  source 1..120: mol_type = other DNA
ctcaatgagctgttgggtacacctcccagacggggtggtggcctggcagaggggctcctcacttcccagtaggggcggctgggcagaggcgcccctcacctccaggacggggtggctggc

SEQ ID NO: 62055 - DNA, 120 bp, synthetic construct
  source 1..120: mol_type = other DNA
ggaggccaaggcaggcggctgggaggtggaggttgtagccagccgagatcacgccactgcactccagcctgggcaccattgagcactccatgaaatagtttttaaactgcatcttgattg

SEQ ID NO: 62056 - DNA, 120 bp, synthetic construct
  source 1..120: mol_type = other DNA
agccagtcagaaagacaaattctgtatgattctacttttatgaaatacttagagtggtcaaattcatagagacagaaagtagaatggtggttgccaggtactgaggggtggggggtggga

SEQ ID NO: 62057 - DNA, 120 bp, synthetic construct
  source 1..120: mol_type = other DNA
ttcctatttctccacatactctccagcacctgttgtttcctgactttttcatgattgccattctaactggtgtgagatgatatctcattgtggttttgatttgcatttctctgatggcca

SEQ ID NO: 62058 - DNA, 120 bp, synthetic construct
  source 1..120: mol_type = other DNA
atgttcttccatttctttgtatcctcttttatttcattgagcagtggtttatagttttccttgaagaggtccttcacgtcccttgtaaggtggattcctaggtattttattctctttgaa

SEQ ID NO: 62059 - DNA, 120 bp, synthetic construct
  source 1..120: mol_type = other DNA
attgccacaatttcagctcctgttattggtctattcagagattcaactttttcctggtttagtcttgggagagtgtatgtgttgaggaatttatccatttcttctcgattttctggttta

SEQ ID NO: 62060 - DNA, 120 bp, synthetic construct
  source 1..120: mol_type = other DNA
tgcatatatatttaggatagttagctcttcttgttgaattgatccctttaccattatgtaatggccttctttgtctcttttgatctttgttagtttaaagtctgttttatcagactaaga

SEQ ID NO: 62061 - DNA, 120 bp, synthetic construct
  source 1..120: mol_type = other DNA
tcttcacgtagttcttgagccttggttttcagctccatcagctcctttaagcaattctctgtattggttattctagttatacattcgtctaaattgttttcaaagtttttaatttctttg

SEQ ID NO: 62062 - DNA, 120 bp, synthetic construct
  source 1..120: mol_type = other DNA
taggaaagggaactccctgaccccttgcacttcccgagtgaggcaatgcctctccctgcttcggcttgtgcacggtgcgctgcacccactgacctgcgcccactgtctggcactccctag

SEQ ID NO: 62063 - DNA, 120 bp, synthetic construct; identical to SEQ ID NO: 14803
  source 1..120: mol_type = other DNA

SEQ ID NO: 62064 - DNA, 120 bp, synthetic construct; identical to SEQ ID NO: 14804
  source 1..120: mol_type = other DNA

SEQ ID NO: 62065 - DNA, 120 bp, synthetic construct; identical to SEQ ID NO: 14806
  source 1..120: mol_type = other DNA

SEQ ID NO: 62066 - DNA, 120 bp, synthetic construct; identical to SEQ ID NO: 14807
  source 1..120: mol_type = other DNA

SEQ ID NO: 62067 - DNA, 120 bp, synthetic construct; identical to SEQ ID NO: 14808
  source 1..120: mol_type = other DNA

SEQ ID NO: 62068 - DNA, 120 bp, synthetic construct; identical to SEQ ID NO: 14809
  source 1..120: mol_type = other DNA

SEQ ID NO: 62069 - DNA, 120 bp, synthetic construct; identical to SEQ ID NO: 35516
  source 1..120: mol_type = other DNA

SEQ ID NO: 62070 - DNA, 120 bp, synthetic construct; identical to SEQ ID NO: 28127
  source 1..120: mol_type = other DNA

SEQ ID NO: 62071 - DNA, 120 bp, synthetic construct; identical to SEQ ID NO: 28128
  source 1..120: mol_type = other DNA

SEQ ID NO: 62072 - DNA, 120 bp, synthetic construct
  source 1..120: mol_type = other DNA
ttgcatttgactccaaaagcttgggcaacaaaagcaaatagacaaatgagattacatcaaactaaaaagcttctgcacagcagaataaataactaatgcagtgaagagacaacctgcaga

SEQ ID NO: 62073 - DNA, 120 bp, synthetic construct
  source 1..120: mol_type = other DNA
ccattaaaaccacaataagatattcttactatatactaacaaaagtggctcaaatgaatgggtgactatcccaggtgttggcaaggatatggggcaacaggaactctcataccttgccag

SEQ ID NO: 62074 - DNA, 120 bp, synthetic construct; identical to SEQ ID NO: 28129
  source 1..120: mol_type = other DNA

SEQ ID NO: 62075 - DNA, 120 bp, synthetic construct; identical to SEQ ID NO: 28130
  source 1..120: mol_type = other DNA

SEQ ID NO: 62076 - DNA, 120 bp, synthetic construct
  source 1..120: mol_type = other DNA
taatgtcttttgagaagtatctgttcttatcctttgcccactttttgatgggatttttttttaatttgtttgagttcattgtagattctggatattagccctgtgtcagatgagtagatt

SEQ ID NO: 62077 - DNA, 120 bp, synthetic construct; identical to SEQ ID NO: 21794
  source 1..120: mol_type = other DNA

SEQ ID NO: 62078 - DNA, 120 bp, synthetic construct; identical to SEQ ID NO: 21795
  source 1..120: mol_type = other DNA

SEQ ID NO: 62079 - DNA, 120 bp, synthetic construct; identical to SEQ ID NO: 19398
  source 1..120: mol_type = other DNA

SEQ ID NO: 62080 - DNA, 120 bp, synthetic construct; identical to SEQ ID NO: 33848
  source 1..120: mol_type = other DNA

SEQ ID NO: 62081 - DNA, 120 bp, synthetic construct; identical to SEQ ID NO: 33849
  source 1..120: mol_type = other DNA

SEQ ID NO: 62082 - DNA, 120 bp, synthetic construct; identical to SEQ ID NO: 25124
  source 1..120: mol_type = other DNA

SEQ ID NO: 62083 - DNA, 120 bp, synthetic construct; identical to SEQ ID NO: 25125
  source 1..120: mol_type = other DNA

SEQ ID NO: 62084 - DNA, 120 bp, synthetic construct; identical to SEQ ID NO: 25126
  source 1..120: mol_type = other DNA

SEQ ID NO: 62085 - DNA, 120 bp, synthetic construct; identical to SEQ ID NO: 25127
  source 1..120: mol_type = other DNA

SEQ ID NO: 62086 - DNA, 120 bp, synthetic construct; identical to SEQ ID NO: 25128
  source 1..120: mol_type = other DNA

SEQ ID NO: 62087 - DNA, 120 bp, synthetic construct; identical to SEQ ID NO: 25129
  source 1..120: mol_type = other DNA

SEQ ID NO: 62088 - DNA, 120 bp, synthetic construct; identical to SEQ ID NO: 25130
  source 1..120: mol_type = other DNA

SEQ ID NO: 62089 - DNA, 120 bp, synthetic construct; identical to SEQ ID NO: 25131
  source 1..120: mol_type = other DNA

SEQ ID NO: 62090 - DNA, 120 bp, synthetic construct; identical to SEQ ID NO: 25132
  source 1..120: mol_type = other DNA

SEQ ID NO: 62091 - DNA, 120 bp, synthetic construct; identical to SEQ ID NO: 25133
  source 1..120: mol_type = other DNA

SEQ ID NO: 62092 - DNA, 120 bp, synthetic construct; identical to SEQ ID NO: 25134
  source 1..120: mol_type = other DNA

SEQ ID NO: 62093 - DNA, 120 bp, synthetic construct; identical to SEQ ID NO: 25135
  source 1..120: mol_type = other DNA

SEQ ID NO: 62094 - DNA, 120 bp, synthetic construct; identical to SEQ ID NO: 22279
  source 1..120: mol_type = other DNA

SEQ ID NO: 62095 - DNA, 120 bp, synthetic construct
  source 1..120: mol_type = other DNA
gccacagaggaaacaaatttccttgtcaattgtgtctttgactatggttgccctaaaactttttgtcatccacggacatttgttgtcttgttttggtcctccttagaaagtggttttgta

SEQ ID NO: 62096 - DNA, 120 bp, synthetic construct
  source 1..120: mol_type = other DNA
tatcctggtacacacctgtagtcccagctactcaagaggctgaggtggtaggattgcttaagcccaggagttcaagacaagcctgagcaacacagcaagaccctgccttgaaagaaaggg

SEQ ID NO: 62097 - DNA, 120 bp, synthetic construct; identical to SEQ ID NO: 15290
  source 1..120: mol_type = other DNA

SEQ ID NO: 62098 - DNA, 120 bp, synthetic construct
  source 1..120: mol_type = other DNA
ttttttttttttttttttttttttgcgatggagtctcaatctgttgcccaggctggagtgcagtggcatgatgttggttcactacagcctctgcatcctgggttcaagtgattctcatgt

SEQ ID NO: 62099 - DNA, 120 bp, synthetic construct; identical to SEQ ID NO: 15291
  source 1..120: mol_type = other DNA

SEQ ID NO: 62100 - DNA, 120 bp, synthetic construct
  source 1..120: mol_type = other DNA
gtttcatccacgtccctacaaaggatatgaactcatcattttttatggctgcatagtattccatggtgtatatgtgccacattttcttaatccagtctatcattgttggacatttgggtt

SEQ ID NO: 62101 - DNA, 120 bp, synthetic construct
  source 1..120: mol_type = other DNA
gatatgtggtgttatttctgagggctctgttctgttccattgatctatatctctgtttcggtaccagtaccatgctgttttggttactgtagccttgtagtatagtttgaagtcaggtag

SEQ ID NO: 62102 - DNA, 120 bp, synthetic construct
  source 1..120: mol_type = other DNA
catagatagctcttattattttgaaatacatcccatcaatacctaatttattcagagtttttagcatgaagggttgttgaattttgtcaaaggctttttctgcatctattgagataatca

SEQ ID NO: 62103 - DNA, 120 bp, synthetic construct
  source 1..120: mol_type = other DNA
gtctttgttctcgttggtttcaaagaacatctttatttctaccttcatttcattatgtacccagtagtcattcaggagcaggttgttcagtttccatgtagttgagcagttttgagtgag

SEQ ID NO: 62104 - DNA, 120 bp, synthetic construct
  source 1..120: mol_type = other DNA
tggttgttcctttccatgtttagtgcttccttcaggagctcttgtaaggcaggcctgttggtgagaaaatctctcagcatttgcttgtctgtaaagtattttatttctccttcacttatg

SEQ ID NO: 62105 - DNA, 120 bp, synthetic construct
  source 1..120: mol_type = other DNA
tggagtttgctagaggtccactccagaccctgtttgcctgggtaccagcagtggtggctgtagtacagcggattttcgtgaaccgcgaatgctgctgtctgatcgttcctctggtagttt

SEQ ID NO: 62106 - DNA, 120 bp, synthetic construct
  source 1..120: mol_type = other DNA
attctctgcttccttttacagtgtagtgctgttaaggcaccagatcccttcattaatggttctctgagttcaggtcatgctatctctggcttaggccatgggcctagctaatttatttat

SEQ ID NO: 62107 - DNA, 120 bp, synthetic construct; identical to SEQ ID NO: 4558
  source 1..120: mol_type = other DNA

SEQ ID NO: 62108 - DNA, 120 bp, synthetic construct; identical to SEQ ID NO: 20477
  source 1..120: mol_type = other DNA

SEQ ID NO: 62109 - DNA, 120 bp, synthetic construct; identical to SEQ ID NO: 17090
  source 1..120: mol_type = other DNA

SEQ ID NO: 62110 - DNA, 120 bp, synthetic construct; identical to SEQ ID NO: 17091
  source 1..120: mol_type = other DNA

SEQ ID NO: 62111 - DNA, 120 bp, synthetic construct; identical to SEQ ID NO: 17088
  source 1..120: mol_type = other DNA

SEQ ID NO: 62112 - DNA, 120 bp, synthetic construct; identical to SEQ ID NO: 17089
  source 1..120: mol_type = other DNA

SEQ ID NO: 62113 - DNA, 120 bp, synthetic construct; identical to SEQ ID NO: 4097
  source 1..120: mol_type = other DNA

SEQ ID NO: 62114 - DNA, 120 bp, synthetic construct
  source 1..120: mol_type = other DNA
gagccgatccgctgtgagggctcctccatctcctcccaccccgtgacctgctcgacgcgcaacagcccgagttgtctttaacttgctgcggcagcctctttgtcccgacccagggtcggg

SEQ ID NO: 62115 - DNA, 120 bp, synthetic construct; identical to SEQ ID NO: 18956
  source 1..120: mol_type = other DNA

SEQ ID NO: 62116 - DNA, 120 bp, synthetic construct; identical to SEQ ID NO: 18957
  source 1..120: mol_type = other DNA

SEQ ID NO: 62117 - DNA, 120 bp, synthetic construct
  source 1..120: mol_type = other DNA
gttcatatggagccaaaaaagagcccacattgtcaagtcaatcctaagccaaaagaacaaagctggaggcatcatgctacctgacttcaaactatactacaaggctacagtaaccaaaac

SEQ ID NO: 62118 - DNA, 120 bp, synthetic construct
  source 1..120: mol_type = other DNA
aaccaaggcaataccattcaggacataggcatgggcaaggacttcatgtctaaaacaccaaaagcaatggcaacaaaagacaaaattgacaaatgggatctcattaaactaaagagcttc

SEQ ID NO: 62119 - DNA, 120 bp, synthetic construct
  source 1..120: mol_type = other DNA
tgatttttgcacattgattttgtatcctgagactttgctgaagttgcttatcagcttaaggagattttgggctgagacgatggggttttctagatatacaattgtgtcatctgcaaaaag

SEQ ID NO: 62120 - DNA, 120 bp, synthetic construct
  source 1..120: mol_type = other DNA
tattcagagattcaacttcttcctggtttagtcttgggagggtgtatgtgttgaggaatttatccatttcttccagattttctactttatttgcatagagatgtttatagtattctctga

SEQ ID NO: 62121 - DNA, 120 bp, synthetic construct
  source 1..120: mol_type = other DNA
cataggttgcagtttgatctgttttgtgaccatgtctttcaggcatgctttcattgtctatagaaagtcctttgtagggacatggatgaagctggaaaccatcattctcagcaaattatc

SEQ ID NO: 62122 - DNA, 120 bp, synthetic construct
  source 1..120: mol_type = other DNA
catagtgactttagaagcaggtttgcagcttgagcagttattagcaaggtcagatggtacatacaattaacagactccatcaccaaagcaaagttagccaagcaccttgtaagggagcaa

SEQ ID NO: 62123 - DNA, 120 bp, synthetic construct
  source 1..120: mol_type = other DNA
tcccaacactttgggaggccaaggcgaaaggattgcttgagaccaagagttcaagaccagcctgggccacatagtgagaccccccatccctacttaaaaaatagagtttattttggaaaa

SEQ ID NO: 62124 - DNA, 120 bp, synthetic construct; identical to SEQ ID NO: 21697
  source 1..120: mol_type = other DNA

SEQ ID NO: 62125 - DNA, 120 bp, synthetic construct; identical to SEQ ID NO: 21698
  source 1..120: mol_type = other DNA

SEQ ID NO: 62126 - DNA, 120 bp, synthetic construct
  source 1..120: mol_type = other DNA
gaggaaaatcaggagactccaagaaaacagtcaacaagataataaatgcatcaagggatatttgttattttgaccagaggaattgtgaggagctacataaataaacagtattttttacag

SEQ ID NO: 62127 - DNA, 120 bp, synthetic construct
  source 1..120: mol_type = other DNA
gacacagggttttgagatcaaccagtctgaccaaagtttattaggcgggaatttcctcttcctaataagcctgggagcgctatgggagactggagtttatttcacctctgcaatctcgac

SEQ ID NO: 62128 - DNA, 120 bp, synthetic construct; identical to SEQ ID NO: 21700
  source 1..120: mol_type = other DNA

SEQ ID NO: 62129 - DNA, 120 bp, synthetic construct; identical to SEQ ID NO: 21691
  source 1..120: mol_type = other DNA

SEQ ID NO: 62130 - DNA, 120 bp, synthetic construct; identical to SEQ ID NO: 21692
  source 1..120: mol_type = other DNA

SEQ ID NO: 62131 - DNA, 120 bp, synthetic construct; identical to SEQ ID NO: 21693
  source 1..120: mol_type = other DNA

SEQ ID NO: 62132 - DNA, 120 bp, synthetic construct
  source 1..120: mol_type = other DNA
atttgcatttctctgatggccagtgatgatgagcgttttttcatgtgttttttggctgcataaatgtcttcttttgagaagtgtctgttcatatcctttgcccagtttttgatggggttg

SEQ ID NO: 62133 - DNA, 120 bp, synthetic construct
  source 1..120: mol_type = other DNA
caagaaaaatgcacatgtttaaatgattttttgttttttttgtttttttcattttattatactttaagttttagagtacatgtgcacaacgtacaggtttgttacatatgtatacatgtg

SEQ ID NO: 62134 - DNA, 120 bp, synthetic construct
  source 1..120: mol_type = other DNA
cattgtagattctggatatcagccctttgtcagatgagtaggttgtgaaaattttctcccattttgtaggttgcctgttcactctgatggtagtttcttttgctgtgcagaagctcttta

SEQ ID NO: 62135 - DNA, 120 bp, synthetic construct
  source 1..120: mol_type = other DNA
tgaagttgcttatcagcttgaggagattttgggctgagacattggggttttctagatatacaatcatgtcatctgcaaacagggacaatttgactttctcttttcctaattgaataccct

SEQ ID NO: 62136 - DNA, 120 bp, synthetic construct
  source 1..120: mol_type = other DNA
cacaatttcagatcctgttattggtctattcagagattcacttcttagtcttgggaggatgtatgtgtcgaggaatttatccatttcttctagattttctagtttatttttaatggaggt

SEQ ID NO: 62137 - DNA, 120 bp, synthetic construct
  source 1..120: mol_type = other DNA
agttaatgttgttatgtatgaatttgatcctgtcattatgatgttagctggttattttgctcgttagttgatgcagtttcttcctagccttgatggtctttacaatttggcatgtttttg

SEQ ID NO: 62138 - DNA, 120 bp, synthetic construct
  source 1..120: mol_type = other DNA
agtttgatcgtctgaagccttcttctctcagcttgtcaaactcattctccatccagctttgttccgttgctggtgaggagctgcattcctttggaggaggagaggcactctgatttttag

SEQ ID NO: 62139 - DNA, 120 bp, synthetic construct; identical to SEQ ID NO: 21694
  source 1..120: mol_type = other DNA

SEQ ID NO: 62140 - DNA, 120 bp, synthetic construct
  source 1..120: mol_type = other DNA
gtgctgcacccattaattcgtcatttaacgttaggtatatctcctaatgctatccctccaccctccaccttcccccctccccacaacagtccccagagtgtgatgttcccctttctgtgt

SEQ ID NO: 62141 - DNA, 120 bp, synthetic construct
  source 1..120: mol_type = other DNA
actctgatggtagtttcttttgctgtgcagaagctcttgagtttaattagataccatttgtcagttttggcttttgttgccattgcttttggtgttttagacatgaagtccctgcccatg

SEQ ID NO: 62142 - DNA, 120 bp, synthetic construct
  source 1..120: mol_type = other DNA
aggccttttcggcatctattgagataatcatgtggtttttgtctttggttctgtttatatactggattacatttattgatttgtgtatattgaaccagccttgcatcccagggatgaagc

SEQ ID NO: 62143 - DNA, 120 bp, synthetic construct
  source 1..120: mol_type = other DNA
tatttgcatagaggtgtttgtagtattctcagatggtagtttgtttttctgtgggatcggtggtgatatccgctttatcattttttattgcgtctatttgattcttctctcttttcttct

SEQ ID NO: 62144 - DNA, 120 bp, synthetic construct
  source 1..120: mol_type = other DNA
tgtgtctgcatgtgagatgggtttcctgaatacagcacactgatgggtcttgactctttatccaatttgccagtctgtgtcttttaattggagcatttagcccatttacatttaaggcta

SEQ ID NO: 62145 - DNA, 120 bp, synthetic construct; identical to SEQ ID NO: 21695
  source 1..120: mol_type = other DNA

SEQ ID NO: 62146 - DNA, 120 bp, synthetic construct; identical to SEQ ID NO: 21696
  source 1..120: mol_type = other DNA

SEQ ID NO: 62147 - DNA, 120 bp, synthetic construct
  source 1..120: mol_type = other DNA
aaaaagatactgaatggaaagaaaggttaacagtggatgtctttgcatgatagaattttggttgattctataaatcatgctgctataaagacacatgcacacgtatgtttattgcggcat

SEQ ID NO: 62148 - DNA, 120 bp, synthetic construct; identical to SEQ ID NO: 29256
  source 1..120: mol_type = other DNA

SEQ ID NO: 62149 - DNA, 120 bp, synthetic construct; identical to SEQ ID NO: 29257
  source 1..120: mol_type = other DNA

SEQ ID NO: 62150 - DNA, 120 bp, synthetic construct
  source 1..120: mol_type = other DNA
taagtgcacgtcttcattcattcattcactcaactaatatgtcttgattacctattctaaaatgctaggcaccactgtaacacaggcagctggtatgatgcagtctttgctcccaaatcg

SEQ ID NO: 62151 - DNA, 120 bp, synthetic construct
  source 1..120: mol_type = other DNA
tccctctctcccttcctccctccctctctcccttcctccctccctcccttcctccctccctctctcccttcctccctccctctctcccttcctccctctatcccttcctccctccctctc

SEQ ID NO: 62152 - DNA, 120 bp, synthetic construct; identical to SEQ ID NO: 29258
  source 1..120: mol_type = other DNA

SEQ ID NO: 62153 - DNA, 120 bp, synthetic construct; identical to SEQ ID NO: 11692
  source 1..120: mol_type = other DNA

SEQ ID NO: 62154 - DNA, 120 bp, synthetic construct; identical to SEQ ID NO: 11693
  source 1..120: mol_type = other DNA

SEQ ID NO: 62155 - DNA, 120 bp, synthetic construct; identical to SEQ ID NO: 11694
  source 1..120: mol_type = other DNA

SEQ ID NO: 62156 - DNA, 120 bp, synthetic construct; identical to SEQ ID NO: 9434
  source 1..120: mol_type = other DNA

SEQ ID NO: 62157 - DNA, 120 bp, synthetic construct; identical to SEQ ID NO: 25976
  source 1..120: mol_type = other DNA

SEQ ID NO: 62158 - DNA, 120 bp, synthetic construct
  source 1..120: mol_type = other DNA
ctcgcggtcaggagctggagaccagcccgaccaacacggcgaaaccccgtctccaccaagaaatatgaaaaccagtcaggcatggtggcgcccgcctgcaatcccaggcactcggcaggc

SEQ ID NO: 62159 - DNA, 120 bp, synthetic construct
  source 1..120: mol_type = other DNA
agtatcattgctgttttggtgactgtgatctcatggtatagtttgaagttgggaaatgtaatacctccagatttgttcttttgcttagtcttgcattggctatgcgagctcttttttggt

SEQ ID NO: 62160 - DNA, 120 bp, synthetic construct; identical to SEQ ID NO: 25977
  source 1..120: mol_type = other DNA

SEQ ID NO: 62161 - DNA, 120 bp, synthetic construct; identical to SEQ ID NO: 25978
  source 1..120: mol_type = other DNA

SEQ ID NO: 62162 - DNA, 120 bp, synthetic construct; identical to SEQ ID NO: 12615
  source 1..120: mol_type = other DNA

SEQ ID NO: 62163 - DNA, 120 bp, synthetic construct; identical to SEQ ID NO: 12616
  source 1..120: mol_type = other DNA

SEQ ID NO: 62164 - DNA, 120 bp, synthetic construct; identical to SEQ ID NO: 13470
  source 1..120: mol_type = other DNA

SEQ ID NO: 62165 - DNA, 120 bp, synthetic construct; identical to SEQ ID NO: 13471
  source 1..120: mol_type = other DNA

SEQ ID NO: 62166 - DNA, 120 bp, synthetic construct
  source 1..120: mol_type = other DNA
agataactcactcccataactaacccactcccaccacacctaactcatccctgagataaccaagccactgctgagataacccactcccatgataactaacctgctcccaccacacctaac

SEQ ID NO: 62167 - DNA, 120 bp, synthetic construct; identical to SEQ ID NO: 13472
  source 1..120: mol_type = other DNA

SEQ ID NO: 62168 - DNA, 120 bp, synthetic construct; identical to SEQ ID NO: 13473
  source 1..120: mol_type = other DNA

SEQ ID NO: 62169 - DNA, 120 bp, synthetic construct; identical to SEQ ID NO: 13474
  source 1..120: mol_type = other DNA

SEQ ID NO: 62170 - DNA, 120 bp, synthetic construct; identical to SEQ ID NO: 13475
  source 1..120: mol_type = other DNA

SEQ ID NO: 62171 - DNA, 120 bp, synthetic construct; identical to SEQ ID NO: 13476
  source 1..120: mol_type = other DNA

SEQ ID NO: 62172 - DNA, 120 bp, synthetic construct
  source 1..120: mol_type = other DNA
atcctgtcttccctttctcaatgcttgtctgtcctcactctatagagtctcctactatatttattcaccctccactcatctacccacccatccatccacccactcacccacccatccacc

SEQ ID NO: 62173 - DNA, 120 bp, synthetic construct
  source 1..120: mol_type = other DNA
ccatccatccacatatctacccatccacccacccacccatccatccgtacatacatacatacatacgtacatacacccaaccacctgcccatccacccactcacccatccacccacccat

SEQ ID NO: 62174 - DNA, 120 bp, synthetic construct; identical to SEQ ID NO: 13452
  source 1..120: mol_type = other DNA

SEQ ID NO: 62175 - DNA, 120 bp, synthetic construct; identical to SEQ ID NO: 13453
  source 1..120: mol_type = other DNA

SEQ ID NO: 62176 - DNA, 120 bp, synthetic construct; identical to SEQ ID NO: 13461
  source 1..120: mol_type = other DNA

SEQ ID NO: 62177 - DNA, 120 bp, synthetic construct
  source 1..120: mol_type = other DNA
acaccacacccccttcccagggccgtccctatacccattacacacacaccacacacccttcccggggccctccctatccccattacacacacgccacacccccttcccggggccctccct

SEQ ID NO: 62178 - DNA, 120 bp, synthetic construct
  source 1..120: mol_type = other DNA
cacacacgccacacccccttcccggggccctccctatacccattacacacacaccatacccccttcccggggccctccctatacccattacacacacgccacacccccttcccggggcct

SEQ ID NO: 62179 - DNA, 120 bp, synthetic construct; identical to SEQ ID NO: 13462
  source 1..120: mol_type = other DNA

SEQ ID NO: 62180 - DNA, 120 bp, synthetic construct; identical to SEQ ID NO: 13463
  source 1..120: mol_type = other DNA

SEQ ID NO: 62181 - DNA, 120 bp, synthetic construct; identical to SEQ ID NO: 13454
  source 1..120: mol_type = other DNA

SEQ ID NO: 62182 - DNA, 120 bp, synthetic construct; identical to SEQ ID NO: 13455
  source 1..120: mol_type = other DNA

SEQ ID NO: 62183 - DNA, 120 bp, synthetic construct; identical to SEQ ID NO: 13456
  source 1..120: mol_type = other DNA

SEQ ID NO: 62184 - DNA, 120 bp, synthetic construct; identical to SEQ ID NO: 13457
  source 1..120: mol_type = other DNA

SEQ ID NO: 62185 - DNA, 120 bp, synthetic construct; identical to SEQ ID NO: 13458
  source 1..120: mol_type = other DNA

SEQ ID NO: 62186 - DNA, 120 bp, synthetic construct; identical to SEQ ID NO: 13459
  source 1..120: mol_type = other DNA

SEQ ID NO: 62187 - DNA, 120 bp, synthetic construct
  source 1..120: mol_type = other DNA
tggagtccctagtgccacacactcgatggggtgacagggacagcgtggagcccctagtgctacacactcgatggggcgacagaggagacagcgtggagtccctagtgccacacactcgat

SEQ ID NO: 62188 - DNA, 120 bp, synthetic construct
  source 1..120: mol_type = other DNA
tcgatggggcgacagaggagacagcgtggagtcccctactgccacacactcgatggggcgacagaggagacagcgtggagtccctagtgccacacactcgatggggcgacagaggagaca

SEQ ID NO: 62189 - DNA, 120 bp, synthetic construct
  source 1..120: mol_type = other DNA
tggggcgacagaggagacagcgtggagtccctagtgccacacactcgatggggcgacagaggagacagcatggagtccctagtgccacacactcgatggggcgacagaggagacagcgtg

SEQ ID NO: 62190 - DNA, 120 bp, synthetic construct; identical to SEQ ID NO: 62189
  source 1..120: mol_type = other DNA

SEQ ID NO: 62191 - DNA, 120 bp, synthetic construct; identical to SEQ ID NO: 13460
  source 1..120: mol_type = other DNA

SEQ ID NO: 62192 - DNA, 120 bp, synthetic construct; identical to SEQ ID NO: 13464
  source 1..120: mol_type = other DNA

SEQ ID NO: 62193 - DNA, 120 bp, synthetic construct; identical to SEQ ID NO: 13465
  source 1..120: mol_type = other DNA

SEQ ID NO: 62194 - DNA, 120 bp, synthetic construct; identical to SEQ ID NO: 13466
  source 1..120: mol_type = other DNA

SEQ ID NO: 62195 - DNA, 120 bp, synthetic construct; identical to SEQ ID NO: 13467
  source 1..120: mol_type = other DNA

SEQ ID NO: 62196 - DNA, 120 bp, synthetic construct; identical to SEQ ID NO: 13468
  source 1..120: mol_type = other DNA

SEQ ID NO: 62197 - DNA, 120 bp, synthetic construct; identical to SEQ ID NO: 13469
  source 1..120: mol_type = other DNA

SEQ ID NO: 62198 - DNA, 120 bp, synthetic construct
  source 1..120: mol_type = other DNA
agtggctgcacttagctgataagaaagggtacaattacctatgttgcaagctaaacaaaactaaatttttgttttgttttgttttgcttttgagatggagtctcgctctgtcgcccaggc

SEQ ID NO: 62199 - DNA, 120 bp, synthetic construct; identical to SEQ ID NO: 25975
  source 1..120: mol_type = other DNA

SEQ ID NO: 62200 - DNA, 120 bp, synthetic construct
  source 1..120: mol_type = other DNA
aaggctgcccatagtgaaggaggcaagcccagagaaaagagagagtagagacttggagagaaagggtgggggtgcttgccctccaggaaagtggagaaggggtagagacacggggagaag

SEQ ID NO: 62201 - DNA, 120 bp, synthetic construct
  source 1..120: mol_type = other DNA
gaggctccacctctgggggcagggcacagacaaacaaaaagacagcagtaacttctgcagacttaaatgtccccgtctgacagctttgaagagagcagtggttctcccagcacgcagctg

SEQ ID NO: 62202 - DNA, 120 bp, synthetic construct
  source 1..120: mol_type = other DNA
aataaaaagaaacgagtaaagcctccaagaaatatgggactatgtgaaaagaccaaatctgcgtctgattggtgtacatgaaagtgacggggagaatggaaccaagttggaaaacactct

SEQ ID NO: 62203 - DNA, 120 bp, synthetic construct
  source 1..120: mol_type = other DNA
caggagcacccagattcataaagcaagtcctgagtgacctacaaagagacttagactcccacacattaataatgggagactttaacaccccactgtcaacgttagacagatcaacgagac

SEQ ID NO: 62204 - DNA, 120 bp, synthetic construct
  source 1..120: mol_type = other DNA
tctgaaattgtggcaataatcaatagcttaccaaccaaaaagagtccaggtccagatggattcacagccaaattctaccagaggtacaaggaggaactggtgccattcgttctgaaacta

SEQ ID NO: 62205 - DNA, 120 bp, synthetic construct
  source 1..120: mol_type = other DNA
gagaactacaaaccactgctcaatgaaacaaaagaggatacaaacaaatggaagaatattccatgctcatgggtaggaagaatcaatatcgtgaaaatggccatactgtccaaggtaatt

SEQ ID NO: 62206 - DNA, 120 bp, synthetic construct
  source 1..120: mol_type = other DNA
atctataatgaactcaaacaaatttacaagaaaaaaaacaaacaaacccatcaaaaagtgggagaaggacatgaacagacacttctcaaaagaagacatttatgcagccaaaaaacacac

SEQ ID NO: 62207 - DNA, 120 bp, synthetic construct; identical to SEQ ID NO: 25970
  source 1..120: mol_type = other DNA

SEQ ID NO: 62208 - DNA, 120 bp, synthetic construct
  source 1..120: mol_type = other DNA
cttggctgcctctactcttattactgcacatcttgaaggcaatgttaattaagtcctgttgtggggtttgaggtctggaatttaatttttgcagttttatttaatgtcaggagcggattg

SEQ ID NO: 62209 - DNA, 120 bp, synthetic construct; identical to SEQ ID NO: 25971
  source 1..120: mol_type = other DNA

SEQ ID NO: 62210 - DNA, 120 bp, synthetic construct; identical to SEQ ID NO: 5442
  source 1..120: mol_type = other DNA

SEQ ID NO: 62211 - DNA, 120 bp, synthetic construct
  source 1..120: mol_type = other DNA
cctcaacccccaacaggctgcagtgtgtgatgttcccctccctgtgtgcatgtgttctcattgttcaactcctacttatgagtaagaatatgtagtgtttggttttctgttcctgtgttt

SEQ ID NO: 62212 - DNA, 120 bp, synthetic construct
  source 1..120: mol_type = other DNA
aaattttctcccattttgtaggttggctgttcactctgatggtagtttcttttgctgtgcagaagctctttagtttaattagatcccatttgtcaattttggcttttgttgccattgctt

SEQ ID NO: 62213 - DNA, 120 bp, synthetic construct
  source 1..120: mol_type = other DNA
tgaactcatcattttttatggctgcatagtattccatggtgtatatgtgccacattttcttaatccagtctatcattgttggacatttgtcttggttccaagtctttgctattgtgaata

SEQ ID NO: 62214 - DNA, 120 bp, synthetic construct
  source 1..120: mol_type = other DNA
tttgatgtgctgctgaattcggtttgccactattttattgaggatttttgcatcgatgttcatgagggatattggtctaaaattctctttttttgttgtgtctctgccaggctttggtat

SEQ ID NO: 62215 - DNA, 120 bp, synthetic construct
  source 1..120: mol_type = other DNA
catttcgttatgtacccagtggtcattcaggagcaggtggttcagtttccatgtagttgagcagttttgagtgcgtttcttaatcctgagttctagtttgattgcactgtggtctgacag

SEQ ID NO: 62216 - DNA, 120 bp, synthetic construct; identical to SEQ ID NO: 25973
  source 1..120: mol_type = other DNA

SEQ ID NO: 62217 - DNA, 120 bp, synthetic construct; identical to SEQ ID NO: 25974
  source 1..120: mol_type = other DNA

SEQ ID NO: 62218 - DNA, 120 bp, synthetic construct; identical to SEQ ID NO: 20083
  source 1..120: mol_type = other DNA

SEQ ID NO: 62219 - DNA, 120 bp, synthetic construct; identical to SEQ ID NO: 20084
  source 1..120: mol_type = other DNA

SEQ ID NO: 62220 - DNA, 120 bp, synthetic construct; identical to SEQ ID NO: 19177
  source 1..120: mol_type = other DNA

SEQ ID NO: 62221 - DNA, 120 bp, synthetic construct; identical to SEQ ID NO: 19178
  source 1..120: mol_type = other DNA

SEQ ID NO: 62222 - DNA, 120 bp, synthetic construct; identical to SEQ ID NO: 19179
  source 1..120: mol_type = other DNA

SEQ ID NO: 62223 - DNA, 120 bp, synthetic construct
  source 1..120: mol_type = other DNA
caggagagagggagctagagagctctgaggactgatcttgactgtctgcccccagaccatcagcatatccgctacaacccgctgcaggatgagtgggtgctggtgtcagctcaccgcatg

SEQ ID NO: 62224 - DNA, 120 bp, synthetic construct
  source 1..120: mol_type = other DNA
ggagtaacatttctgtttccacagggtgtggtcaggagggagttgacttggtgtcttttggctaacagagctccgtatccctatctgatagatctttgaaaacaaaggtgccatgatggg

SEQ ID NO: 62225 - DNA, 120 bp, synthetic construct
  source 1..120: mol_type = other DNA
cctccatcatgaagaagctcttgaccaagtatgacaacctctttgagacgtcctttccctactccatgggctggcatggtgaggcttttcaagtacctatatttagccccaacaccattt

SEQ ID NO: 62226 - DNA, 120 bp, synthetic construct
  source 1..120: mol_type = other DNA
aggattgcttgagcccagaagttcgagactagcctgggaaacataggaagccctcgtctctacaaaaaaaatttaaaaagttagccaggtatggtggcatatacttgtggtcccagatac

SEQ ID NO: 62227 - DNA, 120 bp, synthetic construct
  source 1..120: mol_type = other DNA
tagggtgtcagctccaagcctgggcctgagggtttgatggggagcgggtgagctggatcctgatcccagtggtcagtggccagatcctgggctgctggccagaaccctggctttgtgagt

SEQ ID NO: 62228 - DNA, 120 bp, synthetic construct; identical to SEQ ID NO: 16990
  source 1..120: mol_type = other DNA

SEQ ID NO: 62229 - DNA, 120 bp, synthetic construct
  source 1..120: mol_type = other DNA
gctactcaggaggctgaggcaggagaatcgcttgaactcgggaggcggaggttgcagtgagccaagatcacgacactgcgctccagcctgggcaactgaatgagactcagtctcaaaaaa

SEQ ID NO: 62230 - DNA, 120 bp, synthetic construct; identical to SEQ ID NO: 24554
  source 1..120: mol_type = other DNA

SEQ ID NO: 62231 - DNA, 120 bp, synthetic construct; identical to SEQ ID NO: 24555
  source 1..120: mol_type = other DNA

SEQ ID NO: 62232 - DNA, 120 bp, synthetic construct
  source 1..120: mol_type = other DNA
ccctccttacatggagtccatgccacagggaggaaattgtttcatctttcaatgcaaaggatatagctctaaaagcagagaaccattttagcaaattcaaaaccactgggaattctgccc

SEQ ID NO: 62233 - DNA, 120 bp, synthetic construct
  source 1..120: mol_type = other DNA
ttgttgtagagagtaaattatctgttctgcttttctcctaatattatttaatatataggtttccagctgggtgtggtggctgacacctgtaatcctagcactttgggaggccgaggtggg

SEQ ID NO: 62234 - DNA, 120 bp, synthetic construct; identical to SEQ ID NO: 32998
  source 1..120: mol_type = other DNA

SEQ ID NO: 62235 - DNA, 120 bp, synthetic construct
  source 1..120: mol_type = other DNA
ggccgggcaggggggctcacctcgggaggccgaggctggcggatcactcgcggttaggggctggagaccgcccggccaacacagtgaaaccccgtctccaccaaaaccagtcaggcgtgg

SEQ ID NO: 62236 - DNA, 120 bp, synthetic construct; identical to SEQ ID NO: 18942
  source 1..120: mol_type = other DNA

SEQ ID NO: 62237 - DNA, 120 bp, synthetic construct
  source 1..120: mol_type = other DNA
ggtttgaatctcaacttcaccacctgtagatggtaggaccttggctaaggtcccaaagcctgctttcctcatccagaaaaggacagtttctatattaaatgagataacagcagtgtataa

SEQ ID NO: 62238 - DNA, 120 bp, synthetic construct
  source 1..120: mol_type = other DNA
aaaccactgctcaacgaaataaaacaggacacgaacaaatggaagaacattccatgctcatggataggaagaatcaatatcgtgaaaatggccatactgcccaaggtaatttatagattc

SEQ ID NO: 62239 - DNA, 120 bp, synthetic construct
  source 1..120: mol_type = other DNA
accgtaaactagttcaaccattgtggaagacagtgtggcgattcctcaaggatctagaactagaaataccatttgacccagccatctcattactgggtatatacccaaaggattatagat

SEQ ID NO: 62240 - DNA, 120 bp, synthetic construct
  source 1..120: mol_type = other DNA
ccaaaattgcttccatcattaccaaatccattagagccatccccactgccaccatatctaccaccagcacggctgccaccaaagccaccacgaccactgaagtttcctccatgaccgaag

SEQ ID NO: 62241 - DNA, 120 bp, synthetic construct; identical to SEQ ID NO: 18943
  source 1..120: mol_type = other DNA

SEQ ID NO: 62242 - DNA, 120 bp, synthetic construct; identical to SEQ ID NO: 18944
  source 1..120: mol_type = other DNA

SEQ ID NO: 62243 - DNA, 120 bp, synthetic construct; identical to SEQ ID NO: 18945
  source 1..120: mol_type = other DNA

SEQ ID NO: 62244 - DNA, 120 bp, synthetic construct
  source 1..120: mol_type = other DNA
cactttcctaaatggagtattcaaaaaaaaactatataaacaggaaaagcaggataaatgcttgatttcaccccccccccccacccccagcagttttcagaacaatagcttggtgcctta

SEQ ID NO: 62245 - DNA, 120 bp, synthetic construct; identical to SEQ ID NO: 11773
  source 1..120: mol_type = other DNA

SEQ ID NO: 62246 - DNA, 120 bp, synthetic construct
  source 1..120: mol_type = other DNA
tttgcatttctctgatggccagtgatgatgagcattttttcatgtgttttttggctgcataaatgtcttcttttgagaagtgtctgttcatgtccttcacccactttttgatggagttgt

SEQ ID NO: 62247 - DNA, 120 bp, synthetic construct
  source 1..120: mol_type = other DNA
cagttttcaaagggaatgcttccagtttttgcccattcagtatgatattggctatggagctgggtttttgaaaggatcagcaaaattgatagaccgctagcaagactaataaagaagaaa

SEQ ID NO: 62248 - DNA, 120 bp, synthetic construct; identical to SEQ ID NO: 11774
  source 1..120: mol_type = other DNA

SEQ ID NO: 62249 - DNA, 120 bp, synthetic construct
  source 1..120: mol_type = other DNA
ttgctattgtgaatagtgctgcaataaacatatgtgtgcatgtgtctttatagcagcatgatttataatcctttgggtatatacccagtaataggatggctgggtcaaatggtatttcta

SEQ ID NO: 62250 - DNA, 120 bp, synthetic construct; identical to SEQ ID NO: 14102
  source 1..120: mol_type = other DNA

SEQ ID NO: 62251 - DNA, 120 bp, synthetic construct; identical to SEQ ID NO: 14103
  source 1..120: mol_type = other DNA

SEQ ID NO: 62252 - DNA, 120 bp, synthetic construct; identical to SEQ ID NO: 14104
  source 1..120: mol_type = other DNA

SEQ ID NO: 62253 - DNA, 120 bp, synthetic construct; identical to SEQ ID NO: 14105
  source 1..120: mol_type = other DNA

SEQ ID NO: 62254 - DNA, 120 bp, synthetic construct; identical to SEQ ID NO: 14106
  source 1..120: mol_type = other DNA

SEQ ID NO: 62255 - DNA, 120 bp, synthetic construct; identical to SEQ ID NO: 14100
  source 1..120: mol_type = other DNA

SEQ ID NO: 62256 - DNA, 120 bp, synthetic construct; identical to SEQ ID NO: 14101
  source 1..120: mol_type = other DNA

SEQ ID NO: 62257 - DNA, 120 bp, synthetic construct
  source 1..120: mol_type = other DNA
actaaaaccccaaccccaaagagaagcatttactggtttcaatcaattttcactaccgggttaaaccacaatcctaagacttgagcatctaatgtgggacagatgctgtttacggccaag

SEQ ID NO: 62258 - DNA, 120 bp, synthetic construct
  source 1..120: mol_type = other DNA
ctgtgggcagtaactgtgagcctagactttgccgggagtgcccgactggtgcagggacccacgggagatgctttagacgtcatctctcaggatcggcctagtcttcacctctctttaaac

SEQ ID NO: 62259 - DNA, 120 bp, synthetic construct
  source 1..120: mol_type = other DNA
gggtgcacagcccagccctggagcagggagggagcccgggggtgcacagcccagcactggagcagggaaggagccgggggggtgcacagcccagcactggagcaggaggaagggaccgcg

SEQ ID NO: 62260 - DNA, 120 bp, synthetic construct; identical to SEQ ID NO: 14109
  source 1..120: mol_type = other DNA

SEQ ID NO: 62261 - DNA, 120 bp, synthetic construct; identical to SEQ ID NO: 14110
  source 1..120: mol_type = other DNA

SEQ ID NO: 62262 - DNA, 120 bp, synthetic construct; identical to SEQ ID NO: 17419
  source 1..120: mol_type = other DNA

SEQ ID NO: 62263 - DNA, 120 bp, synthetic construct
  source 1..120: mol_type = other DNA
tccacatcctctccagcacctgttgtttcctgactttctaatgattgccattctaactggtgtgagatggtatctcattgtggttttgatttgcatttctctgatggccagtgatggtga

SEQ ID NO: 62264 - DNA, 120 bp, synthetic construct
  source 1..120: mol_type = other DNA
aagagcccacatcgccaagtcaatcctaagccaaaagaacaaagctggaggcatcacgctacctgacttcaaactatactataaggctacagtaaccaaaacagcatggtactggtacca

SEQ ID NO: 62265 - DNA, 120 bp, synthetic construct
  source 1..120: mol_type = other DNA
ccgtgattgcagacggagtctcgttcactcagtgctcaatgttgcccaggctggagtgcagtggcgtgatctcggcttgctacaacctccacctcccagccgcctgccttggcctcccaa

SEQ ID NO: 62266 - DNA, 120 bp, synthetic construct
  source 1..120: mol_type = other DNA
tctctgaaacatgtgctgtgtccactcagggttaaatggattaagggcagtgcaagatgtgctttgttaaacagatgcttgaaggcagcatgcttgttaagagtcatcaccactccctaa

SEQ ID NO: 62267 - DNA, 120 bp, synthetic construct
  source 1..120: mol_type = other DNA
ggaaagggaaggagggggagtcgggggagggaaaggaaaggaaaggaaaagaaaggagaaaggaaaagaaaaaaaaagaaaagagattgcaaaggaagaaacggctgacatattcataca

SEQ ID NO: 62268 - DNA, 120 bp, synthetic construct; identical to SEQ ID NO: 17182
  source 1..120: mol_type = other DNA

SEQ ID NO: 62269 - DNA, 120 bp, synthetic construct; identical to SEQ ID NO: 17183
  source 1..120: mol_type = other DNA

SEQ ID NO: 62270 - DNA, 120 bp, synthetic construct; identical to SEQ ID NO: 24246
  source 1..120: mol_type = other DNA

SEQ ID NO: 62271 - DNA, 120 bp, synthetic construct
  source 1..120: mol_type = other DNA
gagctatgatcatgtcactgcattccagcctgggtgacagagtgagaccccgtctcaaaaaaaaaaaaaaaagggtccctatgcatacacccttggggataactcccaaccagcttctca

SEQ ID NO: 62272 - DNA, 120 bp, synthetic construct; identical to SEQ ID NO: 24247
  source 1..120: mol_type = other DNA

SEQ ID NO: 62273 - DNA, 120 bp, synthetic construct; identical to SEQ ID NO: 24248
  source 1..120: mol_type = other DNA

SEQ ID NO: 62274 - DNA, 120 bp, synthetic construct; identical to SEQ ID NO: 24249
  source 1..120: mol_type = other DNA

SEQ ID NO: 62275 - DNA, 120 bp, synthetic construct
  source 1..120: mol_type = other DNA
cctcggcctcccaaagtgctgggattacaagcgtgagccaccgcgcccggccgatgttgtggtttctttttttttttttttttttttttttttttttttttgagacggagtctcgctctg

SEQ ID NO: 62276 - DNA, 120 bp, synthetic construct
  source 1..120: mol_type = other DNA
tttttttttttttttttttttttttgaaacagagtcttgctccattgtccagtctggagggcagtggtgcaatctcggctcactgcaacctctgcatcacggttcaagcgattcttgtgc

SEQ ID NO: 62277 - DNA, 120 bp, synthetic construct
  source 1..120: mol_type = other DNA
agccttttttttttttggagatggagtctcactctgttgcccaggctggaatgcagtggcacaatcttggctcactgtaacctccgcttcccagattcaagcgattctcctgccccagcc

SEQ ID NO: 62278 - DNA, 120 bp, synthetic construct
  source 1..120: mol_type = other DNA
gaggaggtaagtatgggggggggggaggggagggaaaagaagtagattaagttctgtctccaaagaaagagatgtccttttttactgtaaactttttccaattgtaaattctgtaccatg

SEQ ID NO: 62279 - DNA, 120 bp, synthetic construct
  source 1..120: mol_type = other DNA
taacacatggatgtgtgcatccatatccagtggctgaacatggagttgacaccatctagagttaacttatttgggcaaacaactgttgggagttatttgtcaatatctgtctgtcttcac

SEQ ID NO: 62280 - DNA, 120 bp, synthetic construct
  source 1..120: mol_type = other DNA
tgccgagattgcagcctctgcccggctgccaccccgtctgggaagtgaggagcatctctgcctggccacccatcgtctgggatgtgaggaacgcctctgcccggctgcccagtctgggaa

SEQ ID NO: 62281 - DNA, 120 bp, synthetic construct
  source 1..120: mol_type = other DNA
caagaaaaaaacaaccccatcaaaaggtgggcgaaggatatgaatagacacttctcaaaagaagacatttatgcagccaacagacacatgaaaaaatgctcatcatcactggccatcaga

SEQ ID NO: 62282 - DNA, 120 bp, synthetic construct
  source 1..120: mol_type = other DNA
ggtgacagtaaccaaaacagcatggtactggtaccaaaacagagatatagaccaatggaacagaacagagccctcagaaataatgccgcatatctacaaccgtctgatctttgacaaatc

SEQ ID NO: 62283 - DNA, 120 bp, synthetic construct
  source 1..120: mol_type = other DNA
gtatgtttattgcggcactattcacgatagcaaagacttggaaccaacccaaaggtccaacaatgatagactggattaagaaaatgtgacacataagcaccatggaatactatgcagcca

SEQ ID NO: 62284 - DNA, 120 bp, synthetic construct; identical to SEQ ID NO: 24463
  source 1..120: mol_type = other DNA

SEQ ID NO: 62285 - DNA, 120 bp, synthetic construct; identical to SEQ ID NO: 24464
  source 1..120: mol_type = other DNA

SEQ ID NO: 62286 - DNA, 120 bp, synthetic construct; identical to SEQ ID NO: 24465
  source 1..120: mol_type = other DNA

SEQ ID NO: 62287 - DNA, 120 bp, synthetic construct
  source 1..120: mol_type = other DNA
gttcctcaccaaatgaaactactataaccaagagcataatgctacaagcagatttaaaagaaaacccacatgcacacgtatgtttattgcggcactattcacaatagcaaagacttggaa

SEQ ID NO: 62288 - DNA, 120 bp, synthetic construct; identical to SEQ ID NO: 24467
  source 1..120: mol_type = other DNA

SEQ ID NO: 62289 - DNA, 120 bp, synthetic construct; identical to SEQ ID NO: 24468
  source 1..120: mol_type = other DNA

SEQ ID NO: 62290 - DNA, 120 bp, synthetic construct
  source 1..120: mol_type = other DNA
ctgttgggtacacctcccagacggggcggctgccgggcggaggggctcctcacttctcagactgggcagctgccgggcggaggggctcctcacttctcagacggggcggccgggcagaga

SEQ ID NO: 62291 - DNA, 120 bp, synthetic construct; identical to SEQ ID NO: 33070
  source 1..120: mol_type = other DNA

SEQ ID NO: 62292 - DNA, 120 bp, synthetic construct
  source 1..120: mol_type = other DNA
aacacctgcaaaggaacacttttgttgttttgagatagagtttcactcttgtcaactgggctggagtgcagtggcgcaatctccattcactgcaacctcttctcttgggttcaagcgatt

SEQ ID NO: 62293 - DNA, 120 bp, synthetic construct; identical to SEQ ID NO: 7788
  source 1..120: mol_type = other DNA

SEQ ID NO: 62294 - DNA, 120 bp, synthetic construct; identical to SEQ ID NO: 7789
  source 1..120: mol_type = other DNA

SEQ ID NO: 62295 - DNA, 120 bp, synthetic construct
  source 1..120: mol_type = other DNA
aaaaccaaacaccacatgttctcactcataggtgggaattgaacaatgaaaacacttggacacagggtggggaacatcacacaccagggcctgtcgtgaggtggcaggagcagggaggga

SEQ ID NO: 62296 - DNA, 120 bp, synthetic construct
  source 1..120: mol_type = other DNA
gggcaatggacattaacagacatttatccaagaagacatacacatggccagcaagcatatgaaaaaatgctcaacaccaaaacagagatatagatcaatggaacagaacagagccctcag

SEQ ID NO: 62297 - DNA, 120 bp, synthetic construct
  source 1..120: mol_type = other DNA
ttggaaccaacccaaatgtccaacaacgatagactggattgagaagatgtggcacatatacaccatggaatactatgcagccataaaaaatgaagagtcatgtcctttatagggacatgg

SEQ ID NO: 62298 - DNA, 120 bp, synthetic construct; identical to SEQ ID NO: 30298
  source 1..120: mol_type = other DNA

SEQ ID NO: 62299 - DNA, 120 bp, synthetic construct
  source 1..120: mol_type = other DNA
gtttaacacagtgataaatgttactggggacccagaatgggtgtaaaactgtttgccattaagttgtttgtagtccatgcctatgtcctgaatggtaatgcctaggtcttcttctagggt

SEQ ID NO: 62300 - DNA, 120 bp, synthetic construct
  source 1..120: mol_type = other DNA
tgctgggattacaggcatgagccactgcgcctggccgacacatgtcttaattctagtattcaccagatttctttcatgttctccgttgttagacatcaaatttgtctactttttaaatag

SEQ ID NO: 62301 - DNA, 120 bp, synthetic construct
  source 1..120: mol_type = other DNA
ccactacactccaacctgtgtgacagagtgagaccctgtctcagaaaaaaaaaaaacactatacagtttatcagcaaacaggaaagtcttgctagacaatgtaattgattagttccgtgc

SEQ ID NO: 62302 - DNA, 120 bp, synthetic construct
  source 1..120: mol_type = other DNA
cttttcaggtttttctgcctgctttatattcgctggtagctgattagatggtacctaccagataaagggtgggtctgccttccccagcccactgactcaaatgttaatccctttggcaac

SEQ ID NO: 62303 - DNA, 120 bp, synthetic construct; identical to SEQ ID NO: 21096
  source 1..120: mol_type = other DNA

SEQ ID NO: 62304 - DNA, 120 bp, synthetic construct; identical to SEQ ID NO: 21097
  source 1..120: mol_type = other DNA

SEQ ID NO: 62305 - DNA, 120 bp, synthetic construct; identical to SEQ ID NO: 21098
  source 1..120: mol_type = other DNA

SEQ ID NO: 62306 - DNA, 120 bp, synthetic construct; identical to SEQ ID NO: 21099
  source 1..120: mol_type = other DNA

SEQ ID NO: 62307 - DNA, 120 bp, synthetic construct; identical to SEQ ID NO: 21100
  source 1..120: mol_type = other DNA

SEQ ID NO: 62308 - DNA, 120 bp, synthetic construct
  source 1..120: mol_type = other DNA
aggttgcagtgagctgagatggtgccattgcactccagcccgagcaacaagagcaaaaccctgtctcaaaaaaaaaaaaaaaagaatgtaaactacaagatagttcaaaagaaattacac

SEQ ID NO: 62309 - DNA, 120 bp, synthetic construct
  source 1..120: mol_type = other DNA
tatgtctgcaaaaattttaaaatatcccagatctggtggcatgtgtccatagtcctagctactcaggaggctaaggcagcaggattgtttgttataaggagttcgaggctgcagtcaaac

SEQ ID NO: 62310 - DNA, 120 bp, synthetic construct; identical to SEQ ID NO: 21102
  source 1..120: mol_type = other DNA

SEQ ID NO: 62311 - DNA, 120 bp, synthetic construct; identical to SEQ ID NO: 21103
  source 1..120: mol_type = other DNA

SEQ ID NO: 62312 - DNA, 120 bp, synthetic construct; identical to SEQ ID NO: 21104
  source 1..120: mol_type = other DNA

SEQ ID NO: 62313 - DNA, 120 bp, synthetic construct; identical to SEQ ID NO: 21105
  source 1..120: mol_type = other DNA

SEQ ID NO: 62314 - DNA, 120 bp, synthetic construct
  source 1..120: mol_type = other DNA
agcaaactccaacagaccggcagctgagggtcctgactgttagaaggaaaactaacaaacaaaaaagacatccacaccaaaatcccatctgtacatcaccatcatcaaagaccaaaggta

SEQ ID NO: 62315 - DNA, 120 bp, synthetic construct
  source 1..120: mol_type = other DNA
ctgagagattttgtcaccaccacgcctgccctacaagagctcctgaaagaagcactaaacatggaaaggaacaaccggtaccagccactgaaaaaacatgccaaattgtaaagaccattg

SEQ ID NO: 62316 - DNA, 120 bp, synthetic construct
  source 1..120: mol_type = other DNA
aaactgagcaacctgctcctgaatgactactgggtacataacgaaatgaaggtagacataaagatgttctttgaaactaatgagaacaaagacacaacataccagactctctgggacaca

SEQ ID NO: 62317 - DNA, 120 bp, synthetic construct
  source 1..120: mol_type = other DNA
ctaaccgaatccagcagcacatcaaaaagcttgtccaccagatcaagtgggcttcatccctgggatgcaaggctggttcaacatatgcaaatcaataaatgtaatccagcatataaacag

SEQ ID NO: 62318 - DNA, 120 bp, synthetic construct
  source 1..120: mol_type = other DNA
tcatgccactgcactccagtctgggcaacagagcaagactccatctcaaaaaaaaaaagaaagttagggaccaaattcagtatagtggttacctctgtagtgagatgataactggatcag

SEQ ID NO: 62319 - DNA, 120 bp, synthetic construct
  source 1..120: mol_type = other DNA
atccgccctcctcagcctctcaaagtgctgggattacaggtgtgaaccaccgcgccaggccaataaaaatatttttttaaattaaggtcttcatacacatgctggcatttgttttttcta

SEQ ID NO: 62320 - DNA, 120 bp, synthetic construct; identical to SEQ ID NO: 13279
  source 1..120: mol_type = other DNA

SEQ ID NO: 62321 - DNA, 120 bp, synthetic construct; identical to SEQ ID NO: 13280
  source 1..120: mol_type = other DNA

SEQ ID NO: 62322 - DNA, 120 bp, synthetic construct; identical to SEQ ID NO: 34120
  source 1..120: mol_type = other DNA

SEQ ID NO: 62323 - DNA, 120 bp, synthetic construct
  source 1..120: mol_type = other DNA
gcaatctcttcatcctcaagtcctttcccccgaggctcttttctcaagactcactttcatgtctttattttttattttacttttttttagagacagggtcttgctgtgtcgcccacactg

SEQ ID NO: 62324 - DNA, 120 bp, synthetic construct; identical to SEQ ID NO: 34121
  source 1..120: mol_type = other DNA

SEQ ID NO: 62325 - DNA, 120 bp, synthetic construct; identical to SEQ ID NO: 34122
  source 1..120: mol_type = other DNA

SEQ ID NO: 62326 - DNA, 120 bp, synthetic construct; identical to SEQ ID NO: 34123
  source 1..120: mol_type = other DNA

SEQ ID NO: 62327 - DNA, 120 bp, synthetic construct; identical to SEQ ID NO: 34124
  source 1..120: mol_type = other DNA

SEQ ID NO: 62328 - DNA, 120 bp, synthetic construct; identical to SEQ ID NO: 34125
  source 1..120: mol_type = other DNA

SEQ ID NO: 62329 - DNA, 120 bp, synthetic construct
  source 1..120: mol_type = other DNA
taaataagaaagagcaggcagagaggaggacaggaaaaggttgtctttttgaaaaaggacaaaatgatacaaaaattagccaggcatggtggtgcatacctgtaagcccagctacttggg

SEQ ID NO: 62330 - DNA, 120 bp, synthetic construct; identical to SEQ ID NO: 26813
  source 1..120: mol_type = other DNA

SEQ ID NO: 62331 - DNA, 120 bp, synthetic construct; identical to SEQ ID NO: 16987
  source 1..120: mol_type = other DNA

SEQ ID NO: 62332 - DNA, 120 bp, synthetic construct; identical to SEQ ID NO: 16988
  source 1..120: mol_type = other DNA

SEQ ID NO: 62333 - DNA, 120 bp, synthetic construct; identical to SEQ ID NO: 16989
  source 1..120: mol_type = other DNA

SEQ ID NO: 62334 - DNA, 120 bp, synthetic construct
  source 1..120: mol_type = other DNA
ccaatgtcgcaccatcgcattccagcctgggcaacagagcaagactccgtctcaaaaaaataagaagaaaaaaaaaagaacagtttaaaaaaggctgaaaagttaacagtcttagggacc

SEQ ID NO: 62335 - DNA, 120 bp, synthetic construct; identical to SEQ ID NO: 32626
  source 1..120: mol_type = other DNA

SEQ ID NO: 62336 - DNA, 120 bp, synthetic construct
  source 1..120: mol_type = other DNA
gcggcattatttctgagggctctgttctgttccattgatgtatatctctgttttggtaccagtaccatgctgttttggttactgtagccttgtagtatagtttgaagtcaggtagcgtga

SEQ ID NO: 62337 - DNA, 120 bp, synthetic construct
  source 1..120: mol_type = other DNA
atcaagtcgcagatcttgagcaaactgcggctcaaggaggcgcccaacatcagccgcgaggtggtgaagcagctgctgcccaaggcgccgccgctgcagcagatcctggacctacacgac

SEQ ID NO: 62338 - DNA, 120 bp, synthetic construct
  source 1..120: mol_type = other DNA
aaaagagaaagtagtagatgggggagcaggaacccaggcatccgagcccctgaccaaacggaagatgaacatataatagacatgagctgctttgaaattttatggcctggaaaatccagg

SEQ ID NO: 62339 - DNA, 120 bp, synthetic construct
  source 1..120: mol_type = other DNA
gagagaggggaaaaggaaaaagagacttttatagtctaatccccagggacccgctttaataagagacttgtgctctgctaatcgggggaggtgtttgtcagcagagatggcctccgttcc

SEQ ID NO: 62340 - DNA, 120 bp, synthetic construct
  source 1..120: mol_type = other DNA
accaaagacttagatgtagccctcatcttcaaaccctggatcagcttaggtagagggagggttatgtttagagcttagtagagaatgcgaaaatagtagtagcttctcaataaatgttgg

SEQ ID NO: 62341 - DNA, 120 bp, synthetic construct
  source 1..120: mol_type = other DNA
aggagctggaatggaggcagaggcagatatttattgagaatcatctattagacccaagaaggatcaatttaaggtccagagcaaggggaaatgggtcaaaatgtaaagttgggatgttca

SEQ ID NO: 62342 - DNA, 120 bp, synthetic construct
  source 1..120: mol_type = other DNA
aacctatatattagggcaaatggattaggaaatggacacagatcagtaaggccttatagggccatcatcctaaagaggaagtgctgttttaggtaccggagacatggtataagataggca

SEQ ID NO: 62343 - DNA, 120 bp, synthetic construct
  source 1..120: mol_type = other DNA
agaagagtaagaattagagatggtgagttgaaggagagctagctagctggcaagaaaagtgggcaaaagataaattctgggggtgggagcaatggaaaagctgagaagtcagcagtctct

SEQ ID NO: 62344 - DNA, 120 bp, synthetic construct
  source 1..120: mol_type = other DNA
tttgaagtttgcagatgagaaggtttgacaaaaagacagagagatgtagagacagtgatagagacagaggaacaaaaagagcagcagtgagaaggcaaagagagaggcagaagagacaga

SEQ ID NO: 62345 - DNA, 120 bp, synthetic construct
  source 1..120: mol_type = other DNA
gagaacaaggaagcagagtgtataattattttttccttttatttttggaatctaacagtacctggcagcagggaggggaaagtacagtggggaaaagcatctgacaaggccagttagaac

SEQ ID NO: 62346 - DNA, 120 bp, synthetic construct
  source 1..120: mol_type = other DNA
attgggcaataagcatcaggtatcttccctctacagattctagagagctggggcattaaatatgggggacacttagaatacagctccttaaataccaccaaataaagacctttgtgtgtg

SEQ ID NO: 62347 - DNA, 120 bp, synthetic construct
  source 1..120: mol_type = other DNA
ctagtgtcctattctcctgcagtccctgttcctaggtttcctcaacgaagtttgacaaaaatctaaaccaacatagccaacgaacttgccttgttacacaagagtggctaaaatagcatc

SEQ ID NO: 62348 - DNA, 120 bp, synthetic construct
  source 1..120: mol_type = other DNA
tcaagatgactttttacaagtcttttctttatcctaaaacatcctccaaccgaaggcatgggaagctatcctatactctgaccttgcctatattttaaatggcaggggccccaagctaag

SEQ ID NO: 62349 - DNA, 120 bp, synthetic construct
  source 1..120: mol_type = other DNA
gaggttaaattttggggggattccaataatcagaaataagtggcattgccagaggccctcatataagagaacagcaaaaaagttatcctcccttaagttcctccctcactcctcatatca

SEQ ID NO: 62350 - DNA, 120 bp, synthetic construct
  source 1..120: mol_type = other DNA
tctcaagttacaaatcagatctattctgttttcagatgaaggcagagtagagagaggaaaagctagccccaagatcagagcctgaggtaaagaaaaggaaggcagacagaaaagagggaa

SEQ ID NO: 62351 - DNA, 120 bp, synthetic construct
  source 1..120: mol_type = other DNA
tatttatatcctttgcaacacctaaaacctcccatgttctgttttatttcagtgggtcactacaagctgctggagcaaagacttggtgggtgggtaacttaacctcttcacagaggataa

SEQ ID NO: 62352 - DNA, 120 bp, synthetic construct
  source 1..120: mol_type = other DNA
ctaagaacactccttctattcccatttctgacatcctacccacacccacattcatcgactaccatgtcttcataatgtcgtagaatgacattgtcattattgtcctggtagagcatggaa

SEQ ID NO: 62353 - DNA, 120 bp, synthetic construct
  source 1..120: mol_type = other DNA
tatttacttcatatccacctatataatagaaatgccagacacccacatatacaatataagggcagggaaagacacaagccctgtcatttgggagggtttgtttctctattcctgaaagcc

SEQ ID NO: 62354 - DNA, 120 bp, synthetic construct
  source 1..120: mol_type = other DNA
tattacatgaataaagcattatatatattactatatatacatttgtctttaaaatattttaaaagccaggcgtggtggctcatgcctgtaatcccagcactttgggaggccgaggcgggc

SEQ ID NO: 62355 - DNA, 120 bp, synthetic construct
  source 1..120: mol_type = other DNA
ttgttggccaaagtccaatcattcagattggctttaattttttttttttttttctgagacggagtcctgctctgttgcccaggctggagtgcactggcttgatctcagctcactgcaacc

SEQ ID NO: 62356 - DNA, 120 bp, synthetic construct
  source 1..120: mol_type = other DNA
cccagccttaagtaggtattttctgaggtcattcagcttagggagaaattacaactcaaaccgaaacactcttaagcaccccaccaccacacctcttcattctcaagcatcattcaaaac

SEQ ID NO: 62357 - DNA, 120 bp, synthetic construct
  source 1..120: mol_type = other DNA
aggagttcaagaccagcctggccaacatatagtgaaaccctgtctctactaaaaaattaaaaaattaaaaaattagctgggcttggtgacacacgcctgtaatcccagctacttgggaag

SEQ ID NO: 62358 - DNA, 120 bp, synthetic construct
  source 1..120: mol_type = other DNA
ctctcaggatcgtggctggaattaaatgagacaaaatatgaaaaataccagcacaaggccatcagtaattgtcatttcctattgtcctttcctttcttcacaccacccagttccagatgt

SEQ ID NO: 62359 - DNA, 120 bp, synthetic construct
  source 1..120: mol_type = other DNA
actgtattggccaagctggtctcaaactcctaggctcaagcaatcctcttgtctcgttttcccaaagtgctgagattacaggcttttttttttttttttttttttgagacggagtctcgc

SEQ ID NO: 62360 - DNA, 120 bp, synthetic construct
  source 1..120: mol_type = other DNA
cgagtagctgggactatgggcgcccgccaccacgcctggctaatttttttttatatttttagtagagacggggtttatcattttttattgtgtctatttgattcttctctcttttcttct

SEQ ID NO: 62361 - DNA, 120 bp, synthetic construct; identical to SEQ ID NO: 12109
  source 1..120: mol_type = other DNA

SEQ ID NO: 62362 - DNA, 120 bp, synthetic construct; identical to SEQ ID NO: 17270
  source 1..120: mol_type = other DNA

SEQ ID NO: 62363 - DNA, 120 bp, synthetic construct; identical to SEQ ID NO: 17271
  source 1..120: mol_type = other DNA

SEQ ID NO: 62364 - DNA, 120 bp, synthetic construct
  source 1..120: mol_type = other DNA
tctacttaatttttaacttgtatcacaaaccagcataatgctacatatacacattaaaagtaattaatacggccgggcgcggtggctcacgcctgtaatcccagcactttgggaggccga

SEQ ID NO: 62365 - DNA, 120 bp, synthetic construct
  source 1..120: mol_type = other DNA
gtatatacacacacatgtgtgtgtacatatatgtatatacacacacacgtgtacatatatgtatacacacacatgtgtgtacatatatgtatatacacacacatatatgtgtgtacatat

SEQ ID NO: 62366 - DNA, 120 bp, synthetic construct
  source 1..120: mol_type = other DNA
ccgcctcgtccttcggtctctgtctctctccggccgcctcccccgccccaccttggtctcgctctctctctctctctctctggccttctccttcttcctttgcgtctctctccccggcct

SEQ ID NO: 62367 - DNA, 120 bp, synthetic construct
  source 1..120: mol_type = other DNA
tagcctggagggcgagcgcgagcagagctggctatgctgggttaactgcacgcccctcgggactgtgaccgcttggaagttccaggctgctgcgtggcttggttgattgtcttcaggact

SEQ ID NO: 62368 - DNA, 120 bp, synthetic construct; identical to SEQ ID NO: 28692
  source 1..120: mol_type = other DNA

SEQ ID NO: 62369 - DNA, 120 bp, synthetic construct; identical to SEQ ID NO: 28693
  source 1..120: mol_type = other DNA

SEQ ID NO: 62370 - DNA, 120 bp, synthetic construct; identical to SEQ ID NO: 28694
  source 1..120: mol_type = other DNA

SEQ ID NO: 62371 - DNA, 120 bp, synthetic construct; identical to SEQ ID NO: 28695
  source 1..120: mol_type = other DNA

SEQ ID NO: 62372 - DNA, 120 bp, synthetic construct; identical to SEQ ID NO: 18029
  source 1..120: mol_type = other DNA

SEQ ID NO: 62373 - DNA, 120 bp, synthetic construct; identical to SEQ ID NO: 7800
  source 1..120: mol_type = other DNA

SEQ ID NO: 62374 - DNA, 120 bp, synthetic construct
  source 1..120: mol_type = other DNA
tcgcttatcttggaattactccattgtttttagaaaaatgacagttcattttctaaaaattaacacaggccagtgtggtggctcacgcctgtaatcccagcactttgggaggtggaggtg

SEQ ID NO: 62375 - DNA, 120 bp, synthetic construct; identical to SEQ ID NO: 5694
  source 1..120: mol_type = other DNA

SEQ ID NO: 62376 - DNA, 120 bp, synthetic construct; identical to SEQ ID NO: 16538
  source 1..120: mol_type = other DNA

SEQ ID NO: 62377 - DNA, 120 bp, synthetic construct
  source 1..120: mol_type = other DNA
ctgagatgtggggagcacctctgccccgccgccctgtctgggatgtgaggagcgcctctgctgggcgctcaagttcaagtgattttcctgcctcagcctcctgagtagctgggactacag

SEQ ID NO: 62378 - DNA, 120 bp, synthetic construct; identical to SEQ ID NO: 27378
  source 1..120: mol_type = other DNA

SEQ ID NO: 62379 - DNA, 120 bp, synthetic construct; identical to SEQ ID NO: 27379
  source 1..120: mol_type = other DNA

SEQ ID NO: 62380 - DNA, 120 bp, synthetic construct; identical to SEQ ID NO: 31392
  source 1..120: mol_type = other DNA

SEQ ID NO: 62381 - DNA, 120 bp, synthetic construct; identical to SEQ ID NO: 31393
  source 1..120: mol_type = other DNA

SEQ ID NO: 62382 - DNA, 120 bp, synthetic construct; identical to SEQ ID NO: 31394
  source 1..120: mol_type = other DNA

SEQ ID NO: 62383 - DNA, 120 bp, synthetic construct
  source 1..120: mol_type = other DNA
caaatctcatcttgaattgtagctcctatgattcccatgtgttgtgggagggaaccagtgggagataactgaatcatgggcgtgggtctcttccatgctgttctcgtggtagtgagtaag

SEQ ID NO: 62384 - DNA, 120 bp, synthetic construct; identical to SEQ ID NO: 31395
  source 1..120: mol_type = other DNA

SEQ ID NO: 62385 - DNA, 120 bp, synthetic construct
  source 1..120: mol_type = other DNA
gacgatgggcggccgggcagagacgctcctcacttcctagatgggatggtggccgggaagaggcgctcctcacttcctagatgggatggcgggcgggcagagacgctcctcactttccag

SEQ ID NO: 62386 - DNA, 120 bp, synthetic construct; identical to SEQ ID NO: 31396
  source 1..120: mol_type = other DNA

SEQ ID NO: 62387 - DNA, 120 bp, synthetic construct; identical to SEQ ID NO: 31397
  source 1..120: mol_type = other DNA

SEQ ID NO: 62388 - DNA, 120 bp, synthetic construct; identical to SEQ ID NO: 31398
  source 1..120: mol_type = other DNA

SEQ ID NO: 62389 - DNA, 120 bp, synthetic construct
  source 1..120: mol_type = other DNA
gatgttaggaagaaactgcatcaaccaacgagcaaaataaccagctaacatcataatgacaggatcaaattcacacataacaatattaaccttaaatgtaaatgggctaaatgctccaat

SEQ ID NO: 62390 - DNA, 120 bp, synthetic construct
  source 1..120: mol_type = other DNA
atatgtaaccaacctgcacgttgtgcacatgtaccctagaacttaaagtataaaagtaaaagaaaaaaaaagttgaccatatgttgagtcaaagcaaatatcaacaaatttcaagacact

SEQ ID NO: 62391 - DNA, 120 bp, synthetic construct; identical to SEQ ID NO: 27838
  source 1..120: mol_type = other DNA

SEQ ID NO: 62392 - DNA, 120 bp, synthetic construct
  source 1..120: mol_type = other DNA
gtatttccagttctagatccctgaggaatcgccacactgacttccacaatggttgaactagtttactgtcccaccaacagtgtaaaagtgttcctatttctccacatcctctccagtacc

SEQ ID NO: 62393 - DNA, 120 bp, synthetic construct
  source 1..120: mol_type = other DNA
agcgagatgcctccagctttgttcttttggctgaggattgacttggtgatgcgggctcttttttggttccatatgaactttaaagtagttttttccaattctgtgaagaaagtcattggt

SEQ ID NO: 62394 - DNA, 120 bp, synthetic construct
  source 1..120: mol_type = other DNA
tcatggtggataagcttttggatgtgctgctggattcattttgccagtattttattgaggttttttgcatcaatgttcatcaaggatattggtctaaaattctctttttttgttgtgtcc

SEQ ID NO: 62395 - DNA, 120 bp, synthetic construct
  source 1..120: mol_type = other DNA
atttctgttcttttacatttgctgaagagagctttacttccaagtatgtggtcaattttggaataggtgtggtgtggtgctgaaaaaaatgtatattctgttgatttggggtggagagtt

SEQ ID NO: 62396 - DNA, 120 bp, synthetic construct
  source 1..120: mol_type = other DNA
tgaatattggcccccactctcttctggcttgtagggtttctgccaagagatccgctcttagtctgatggcgttccctttgagggtaacccgacctttctctctggctgcccttaacattt

SEQ ID NO: 62397 - DNA, 120 bp, synthetic construct
  source 1..120: mol_type = other DNA
tacagaggcaggcaggcctccttgagctgtggtgggctccacccagttggagcttcccggctgctttgtttacctaagcaagcctgggcaatggcgggcgcccctaccccagcctggctg

SEQ ID NO: 62398 - DNA, 120 bp, synthetic construct; identical to SEQ ID NO: 4250
  source 1..120: mol_type = other DNA

SEQ ID NO: 62399 - DNA, 120 bp, synthetic construct
  source 1..120: mol_type = other DNA
aggcttctaaacctcttaaaactccccaactctggtgccaacttagacaatactcttttaagcactcgtttttagttatccccacctgcccagttcccttattaggccgagacactttaa

SEQ ID NO: 62400 - DNA, 120 bp, synthetic construct
  source 1..120: mol_type = other DNA
actcctttccttcctaggcatggttagtgtgtcagaattcttacacaagagccaggaccgcaccctgtagtctttctgcccaaacaacttgaccttactgttttagcctagccctcatgt

SEQ ID NO: 62401 - DNA, 120 bp, synthetic construct
  source 1..120: mol_type = other DNA
attcctcagtttagccttcccacctctatacagtctaacagaccagcccttattagtcaaatcagccaagcagtttctcaggctcttagtattcagtgaaacctttatatcccttacggt

SEQ ID NO: 62402 - DNA, 120 bp, synthetic construct
  source 1..120: mol_type = other DNA
acactattttgttttatttttcttattaatataagaaggcaggaatgtcaggcctgagcccaagccaagccatcgcatcccctatgacttgcacgtacacatccagatggcctgacgtaa

SEQ ID NO: 62403 - DNA, 120 bp, synthetic construct; identical to SEQ ID NO: 17949
  source 1..120: mol_type = other DNA

SEQ ID NO: 62404 - DNA, 120 bp, synthetic construct; identical to SEQ ID NO: 17950
  source 1..120: mol_type = other DNA

SEQ ID NO: 62405 - DNA, 120 bp, synthetic construct; identical to SEQ ID NO: 9475
  source 1..120: mol_type = other DNA

SEQ ID NO: 62406 - DNA, 120 bp, synthetic construct
  source 1..120: mol_type = other DNA
tctgctcagcctaaatgaggctcagttgtgtgtgtgcgcacgtgcttgcacgtgtgttggaagtgggtgatactgacaccagagtctgtgtctctgggtgagtgaggcttgcacatttct

SEQ ID NO: 62407 - DNA, 120 bp, synthetic construct
  source 1..120: mol_type = other DNA
tcattgtttaattccaacctatgagtgagaacatgcatgtcttatatgctctcaggcagagaggaaactgctgagcaggccggggcaggggacagagccctgtggctctccactttagac

SEQ ID NO: 62408 - DNA, 120 bp, synthetic construct
  source 1..120: mol_type = other DNA
cagggagagccagagggaaccagcctggggctcactggaggggctcgtgggcagacagcgccctttggagggaactgagtctgaaaggaaggaaaccctttccccggctcatagcacctg

SEQ ID NO: 62409 - DNA, 120 bp, synthetic construct
  source 1..120: mol_type = other DNA
ctcaaactcttcacctcaggtgatccacctgcctctgcctcccaaagtgctgggattataggtgtgagccactgcacccggccatgtgatgggaatgttctgtgtccataatagatgctg

SEQ ID NO: 62410 - DNA, 120 bp, synthetic construct
  source 1..120: mol_type = other DNA
ggacatacagtgagcaagagacctgtgccactcaggcctcctgggggtgtccccagtgcagccatgatgataatcacagctaccattcaccaagccctgcccacagtctaacctactcta

SEQ ID NO: 62411 - DNA, 120 bp, synthetic construct
  source 1..120: mol_type = other DNA
cgggaaggagacacaggccttgtgtttctgaggcccgactttagactgtgccctgttggggaggggccagggaatgtctgaggctaggcctgaccctgcttcttaccccgtgggtgcagc

SEQ ID NO: 62412 - DNA, 120 bp, synthetic construct
  source 1..120: mol_type = other DNA
ggcctcccaaagtgctgggattacaggcatgagccaccatgcccggccgggcttattctttttttaaggtggagtcttactctgttacccaggctggagtataggggagcgatcatagcc

SEQ ID NO: 62413 - DNA, 120 bp, synthetic construct
  source 1..120: mol_type = other DNA
agttagccgggcatggtggtgtgcgcctgtaatcccagctactcaggaggctgaggcaggggaatcacttgaacccaggaggcagaggttgcagtgagctaagatcatgccactgcactc

SEQ ID NO: 62414 - DNA, 120 bp, synthetic construct
  source 1..120: mol_type = other DNA
aggaggctgaggcaggagaatggcttgaacccgggaggcagaggttgcagtgagctgagatcgtgccactgcactccagcctggcaatagagcaagactccatctcaaaaaaaaaaaaaa

SEQ ID NO: 62415 - DNA, 120 bp, synthetic construct; identical to SEQ ID NO: 23663
  source 1..120: mol_type = other DNA

SEQ ID NO: 62416 - DNA, 120 bp, synthetic construct
  source 1..120: mol_type = other DNA
ctcacacctgtcatcccagcaccttggaaggctgaggtgggtggatgacctgaggtcaggagtttgaaaccagcctggccaacatggcaaaaccccatctgtactaaaaatacaaaaatt

SEQ ID NO: 62417 - DNA, 120 bp, synthetic construct; identical to SEQ ID NO: 23664
  source 1..120: mol_type = other DNA

SEQ ID NO: 62418 - DNA, 120 bp, synthetic construct; identical to SEQ ID NO: 23665
  source 1..120: mol_type = other DNA

SEQ ID NO: 62419 - DNA, 120 bp, synthetic construct; identical to SEQ ID NO: 23666
  source 1..120: mol_type = other DNA

SEQ ID NO: 62420 - DNA, 120 bp, synthetic construct
  source 1..120: mol_type = other DNA
ccaggagttcaaggctgtgattaagccactgcactccagcctgggtgacagagcaagatcctatctctaaaaaaaaaaaagaaaagaaaacactctgtggccacagatgagagaaggcag

SEQ ID NO: 62421 - DNA, 120 bp, synthetic construct
  source 1..120: mol_type = other DNA
aggagtcatcaggagggagagaggtgcaggagctcagggctgcagggccggtccagagggtaccccggtccagtgggtgaccctgccacttggtcattgaatggccagagctgatgcgtg

SEQ ID NO: 62422 - DNA, 120 bp, synthetic construct
  source 1..120: mol_type = other DNA
tctctctgaggggacagagccactgcagtgtgtccctctgccctcctttttggctaaggccagctccttcatctactcgctggctcggggtgctgttcctacaatgctcctttctgcctc

SEQ ID NO: 62423 - DNA, 120 bp, synthetic construct
  source 1..120: mol_type = other DNA
atcttcccacctcagcctcccaaagcgctgggattacaggtgtgtttttttttttgagacagagtctcgctctgttgcccaggctggagtgcagtggcgctatctcggctcactgtaagc

SEQ ID NO: 62424 - DNA, 120 bp, synthetic construct; identical to SEQ ID NO: 1289
  source 1..120: mol_type = other DNA

SEQ ID NO: 62425 - DNA, 120 bp, synthetic construct
  source 1..120: mol_type = other DNA
cccggagctgggcagagaagaactcggaggtcatgtcgcggaccacctgccgagaccccagagctggcctagggaggtggggagggagggtggggagggggcacaggtctcagaaggccc

SEQ ID NO: 62426 - DNA, 120 bp, synthetic construct
  source 1..120: mol_type = other DNA
aagcgggccgtggaggagccccggctgcacaaccagcttctgcccaacgtcacgacagtggagagaaacattgaccaggtgggccgggggttggagaaactgagtcacggtgtggggccc

SEQ ID NO: 62427 - DNA, 120 bp, synthetic construct
  source 1..120: mol_type = other DNA
cgaccctggcactttcttaggcagagggtggccagctgatgctgggaacccgggtgccttcttagacccgtaggcgtccagctcaccctgccgatgacactggaggtgaagctgaggtcc

SEQ ID NO: 62428 - DNA, 120 bp, synthetic construct
  source 1..120: mol_type = other DNA
gcccctccagcttcagtcttctcccctgtaaatggggccacggcctttcctctcaggccaaaataaggattgaggccgggtgcagtggctcacccctgtaatcttagcactttgggagac

SEQ ID NO: 62429 - DNA, 120 bp, synthetic construct
  source 1..120: mol_type = other DNA
agaagttgcagtgagctgagatcacgccactatactccagcctgggcgacagagcaagacaccgtctcaaaaaaaaaaaaaaagtgaaagtggaatatatatatatgtgtgtgtatatat

SEQ ID NO: 62430 - DNA, 120 bp, synthetic construct
  source 1..120: mol_type = other DNA
gagatgtttatgtatatgcacatcaaagcacagcacctttttcttaaccttgtttatgacacagagacatttgttcacatgttttcctgctgaccctctcctcactattaccatattgtc

SEQ ID NO: 62431 - DNA, 120 bp, synthetic construct; identical to SEQ ID NO: 22418
  source 1..120: mol_type = other DNA

SEQ ID NO: 62432 - DNA, 120 bp, synthetic construct; identical to SEQ ID NO: 22419
  source 1..120: mol_type = other DNA

SEQ ID NO: 62433 - DNA, 120 bp, synthetic construct
  source 1..120: mol_type = other DNA
ctgaagtcatccatttcattattgagcaggatcccgctgactggggagcgcaccttggagccaaagctatcgcccagccaggtcagacagtgcccgaccttgcctggcccagcctggtcc

SEQ ID NO: 62434 - DNA, 120 bp, synthetic construct; identical to SEQ ID NO: 22421
  source 1..120: mol_type = other DNA

SEQ ID NO: 62435 - DNA, 120 bp, synthetic construct
  source 1..120: mol_type = other DNA
gcggagcttgcggtgagccgagatcaggccactggaatccaggctgggcgacagagggagactccatctcaaaaaaaaaaaaaaaaaaaaaaagagtctggctctgttgcccaggctgga

SEQ ID NO: 62436 - DNA, 120 bp, synthetic construct
  source 1..120: mol_type = other DNA
aggcaaagtgaactgggggatgggctgaacgggctccaggcaactgagccctactggcaggtcctcggcctgggcccgaacaggaaggaggggcacagagtgcccaggtaaccgctcctg

SEQ ID NO: 62437 - DNA, 120 bp, synthetic construct; identical to SEQ ID NO: 23606
  source 1..120: mol_type = other DNA

SEQ ID NO: 62438 - DNA, 120 bp, synthetic construct
  source 1..120: mol_type = other DNA
ggggtttccccatgttggccaggctcgtgtcgaactcctgacctcaagtgatccacctgccttggcctcccaaagtgccaggattacaggcatgagccatggcgtcacttaaatgtagtg

SEQ ID NO: 62439 - DNA, 120 bp, synthetic construct
  source 1..120: mol_type = other DNA
ctcggctgcacttcagcctgggtgacagagtgagactgtctcaaaaggaataaaaaaaatacaaaataaaaaaaatgtagtaagatggcagagtcgtgccgcggaagcgtgctggtccta

SEQ ID NO: 62440 - DNA, 120 bp, synthetic construct; identical to SEQ ID NO: 23607
  source 1..120: mol_type = other DNA

SEQ ID NO: 62441 - DNA, 120 bp, synthetic construct
  source 1..120: mol_type = other DNA
tgacctccgggacccttctctgatcaccaggattctcttggactctagggtccttgtcctgctcaggcatccctgccccgctctccttgagggccctcaacactatcttccctggacaca

SEQ ID NO: 62442 - DNA, 120 bp, synthetic construct
  source 1..120: mol_type = other DNA
aggtggagattgcagtgagctgagatcgcaccattgcactccagcctgggcaacagagtcagactctctcttttttttttttttttttttttttttgagatggagtctccctctgtcgcc

SEQ ID NO: 62443 - DNA, 120 bp, synthetic construct; identical to SEQ ID NO: 22421
  source 1..120: mol_type = other DNA

SEQ ID NO: 62444 - DNA, 120 bp, synthetic construct; identical to SEQ ID NO: 23608
  source 1..120: mol_type = other DNA

SEQ ID NO: 62445 - DNA, 120 bp, synthetic construct; identical to SEQ ID NO: 23609
  source 1..120: mol_type = other DNA

SEQ ID NO: 62446 - DNA, 120 bp, synthetic construct
  source 1..120: mol_type = other DNA
aaggatagccccgacctggcctcacctggcccctggccccagtgcccctggtgatatccaggtgctgggctgtgatcaccgcctcccaccagcccacctccaccagcccttcccagaacc

SEQ ID NO: 62447 - DNA, 120 bp, synthetic construct
  source 1..120: mol_type = other DNA
gctggtggcaatactgctctttaatgcattgagatgtttatgtatatgcacatcaaagcacagcacctttttcttaaccttgtttatgacacagagacatttgttcacatgttttcctgc

SEQ ID NO: 62448 - DNA, 120 bp, synthetic construct
  source 1..120: mol_type = other DNA
ctccagcctgggcgacagagtgtgactccatttcaacaaccacaacaacaagaaaaaagtcctttctccagaacaggtagtgtggtgttactcagttatttagttattttagtttctttc

SEQ ID NO: 62449 - DNA, 120 bp, synthetic construct
  source 1..120: mol_type = other DNA
ataccatctggaagtcacaagcatcagatgcccccagggataagagcaggaaagaccaccctctccagtggtgaaatcttcccccaccctgagtttaagagcatgtagcacttgacactg

SEQ ID NO: 62450 - DNA, 120 bp, synthetic construct
  source 1..120: mol_type = other DNA
ctaacagtactgggaagttgcccactgttggggcatcacttgggtccagatccttggctcctgcaggctgagagactactcagggagagcctccacatggccagtggggagaggctgggc

SEQ ID NO: 62451 - DNA, 120 bp, synthetic construct
  source 1..120: mol_type = other DNA
agatgatcaatacttctgcgtgtccaccatgtgcttggcactctactgaccatagggatgtgagtgaggatactgaggctcaaagagatgaggtggcttgcctggagctctcccagtttc

SEQ ID NO: 62452 - DNA, 120 bp, synthetic construct
  source 1..120: mol_type = other DNA
tgatcctttctcttctggagctaacaatctactgggggcagagataatagcaaacaagtaaatatataatggttaaatagaaatttcgaatttggaacattctcatgaggaaaacagcta

SEQ ID NO: 62453 - DNA, 120 bp, synthetic construct
  source 1..120: mol_type = other DNA
ctggagtggcaacttccagggccaggagaggcactggggaggggtcacagggatgccacccgggcagctagaagccacagctgccctccacagagcggcactgcacgatgcgcaggaatg

SEQ ID NO: 62454 - DNA, 120 bp, synthetic construct
  source 1..120: mol_type = other DNA
ttacaaactcctggtaggtgtcaaaggccagctggtgcagacgatgggcgcggagcatagcgttgtcaaaaagcctggataagggaatggttgggaaggcactgccctcttgaagccagg

SEQ ID NO: 62455 - DNA, 120 bp, synthetic construct
  source 1..120: mol_type = other DNA
caacactgaccactagagagaaccaaccccacactttgctctcccctttccctgagcattgctggggctcccccaggtccctggggacgaagaacccagactcaaggtattgccccagct

SEQ ID NO: 62456 - DNA, 120 bp, synthetic construct
  source 1..120: mol_type = other DNA
ttgccgtgagccaagattgcgccactgcactccagcctgtgcagcagagcagaactccatctcaaaaaacaaaaaataataatattaaatttttttttctccagagcaggtagtgtgatg

SEQ ID NO: 62457 - DNA, 120 bp, synthetic construct
  source 1..120: mol_type = other DNA
attgcttgaacccgcgaggtggaggttgcagttagccaagatcacgccactgcactccagcctgggcgacagagcgagactctgcatccaaaaaaaaaaaaaaaaaaaagctcaggataa

SEQ ID NO: 62458 - DNA, 120 bp, synthetic construct
  source 1..120: mol_type = other DNA
tagtaaagatggtggcactactaggcatggacaaaacttgcctcagtgcaaagctagcaggacaggggtcaagtccctgcacagaggatgttcaatgaagatggggggaattgaacacaa

SEQ ID NO: 62459 - DNA, 120 bp, synthetic construct
  source 1..120: mol_type = other DNA
gccgatggacatatctagataaaccaaagacatgatcctttctcttctggagctaacaatctactgggggggcagagaaaacattttaccattacgtaatgtatatatataaaatggtaa

SEQ ID NO: 62460 - DNA, 120 bp, synthetic construct; identical to SEQ ID NO: 26541
  source 1..120: mol_type = other DNA

SEQ ID NO: 62461 - DNA, 120 bp, synthetic construct
  source 1..120: mol_type = other DNA
cacaataaacatacgtgtgcatgtgtctttatagcagcatgatttataatcctttgggtatataccccagtaatgggatggcaggttcaaatggtatttttagttctagatccctgagga

SEQ ID NO: 62462 - DNA, 120 bp, synthetic construct
  source 1..120: mol_type = other DNA
gttttggttactgtagcctagtagtatagtttgaagtcaggtagcatgatgcctccagctttgttcttttggcttaggattgacttagcgatgcaggctcttttttggttccatatgaac

SEQ ID NO: 62463 - DNA, 120 bp, synthetic construct
  source 1..120: mol_type = other DNA
caatttgccagcctgtgtcttttaattggagcatttagcccatttacattcaaagttaatatcattatgtgtgaatttgatcctgtcattatgatgtcagctggttattttgctcattag

SEQ ID NO: 62464 - DNA, 120 bp, synthetic construct
  source 1..120: mol_type = other DNA
actgcaccatatttgttttcttttatccctcatccccctcccacccttcccccaaagtccccaaattccattgtatcattcttatgcctttgcatcctcatagcttagcccccacatatc

SEQ ID NO: 62465 - DNA, 120 bp, synthetic construct; identical to SEQ ID NO: 26542
  source 1..120: mol_type = other DNA

SEQ ID NO: 62466 - DNA, 120 bp, synthetic construct
  source 1..120: mol_type = other DNA
tctgagctactgcattcatctcactagggagtgccagacagtgggcccgggacagtgggtgcagcacactttgcaggagccgaagcagggtgaggcattgcctcactcaggaagcgcaag

SEQ ID NO: 62467 - DNA, 120 bp, synthetic construct
  source 1..120: mol_type = other DNA
aacggaacaaagctggacggagaatgactttgacgagctgagagaagacttcagacgatcaaattactccgagctacaggaggaaattgaaaccaaaggcaaagaagttgaaaactctga

SEQ ID NO: 62468 - DNA, 120 bp, synthetic construct
  source 1..120: mol_type = other DNA
aagaaactgcatcaactaacgagtaaaataaccagctaacatcataatgacaggatcaaattcacacataacaatattaactttaaatgtaaatggactaaatgctccaattaaaagaca

SEQ ID NO: 62469 - DNA, 120 bp, synthetic construct
  source 1..120: mol_type = other DNA
atgttagggtgtcaattttggatctttcctgctttctcttgtgggcatttagtgctataaatttccctctacacactgctttgaatgcgtcccagagattctggtatgttgtgtctttgt

SEQ ID NO: 62470 - DNA, 120 bp, synthetic construct
  source 1..120: mol_type = other DNA
ttccaaaaggtacaaggaaatcaaactactcaataacaagaaagccaattaccctattaaaatatagggatagcattgggagatacacctaatgctagatgacgagttagtgggtgcagt

SEQ ID NO: 62471 - DNA, 120 bp, synthetic construct
  source 1..120: mol_type = other DNA
cagagtgaacaggcaacctacagaatgggagaaaatttttgcaatccgcccatctgacaaagggctaatatccagaatctacaaagaacttcaataaatttacaagaaaaaaaaaaaacc

SEQ ID NO: 62472 - DNA, 120 bp, synthetic construct; identical to SEQ ID NO: 22085
  source 1..120: mol_type = other DNA

SEQ ID NO: 62473 - DNA, 120 bp, synthetic construct; identical to SEQ ID NO: 22086
  source 1..120: mol_type = other DNA

SEQ ID NO: 62474 - DNA, 120 bp, synthetic construct; identical to SEQ ID NO: 25728
  source 1..120: mol_type = other DNA

SEQ ID NO: 62475 - DNA, 120 bp, synthetic construct
  source 1..120: mol_type = other DNA
gtacatttgaaattcttctgtaatatttgtatatatatatatatattttttttttaattgatcattcttgggtgtttctcgcaaagggggatttggcagggtcacaggacaatagtggag

SEQ ID NO: 62476 - DNA, 120 bp, synthetic construct
  source 1..120: mol_type = other DNA
ctggccgggcagaggtgctcctcacatcccagtaggggtggccgggcagaggcgcccctcacctccaggagagggcggctggctgggcggggggctgacccccccacctcccttccggac

SEQ ID NO: 62477 - DNA, 120 bp, synthetic construct; identical to SEQ ID NO: 16519
  source 1..120: mol_type = other DNA

SEQ ID NO: 62478 - DNA, 120 bp, synthetic construct; identical to SEQ ID NO: 18272
  source 1..120: mol_type = other DNA

SEQ ID NO: 62479 - DNA, 120 bp, synthetic construct; identical to SEQ ID NO: 18273
  source 1..120: mol_type = other DNA

SEQ ID NO: 62480 - DNA, 120 bp, synthetic construct
  source 1..120: mol_type = other DNA
ctatattttcttatgtaaaagggacttcctggtgcctcctatccaatggtctcttccagggggccatgctggattcagcttggccgcatccaatcttttttttttttgagatgaactctc

SEQ ID NO: 62481 - DNA, 120 bp, synthetic construct
  source 1..120: mol_type = other DNA
tccatctcaaaaaaaagaaaaaagaaaagacccctcatcatccctccaattccgccagctctacgcactgggaggcaggaaactaaaaacatgaatctggaacctggcttcatctcttaa

SEQ ID NO: 62482 - DNA, 120 bp, synthetic construct
  source 1..120: mol_type = other DNA
ctgtggtacagatggctcaggcccatgaacttaattgcatgctgccctggcagaactcttgtcttccagcttcaggctgtcatttaacttcatgtctctattttaaaacgtaaaccagat

SEQ ID NO: 62483 - DNA, 120 bp, synthetic construct
  source 1..120: mol_type = other DNA
gggtttcaccatgttgatcaggctggtctcaaactcctgacctcttgacccacctgtctcagcctcccaaagtgctgggattacaggggtgagccatgcccctagccaatttttgtattt

SEQ ID NO: 62484 - DNA, 120 bp, synthetic construct
  source 1..120: mol_type = other DNA
ggttcctgggagcacacagaagctaggggaagggggaaaccacgcccaggctccccgttccagcacagtgttgctttggagagaaggagggaaagaggcctctgattcactcttgaaaaa

SEQ ID NO: 62485 - DNA, 120 bp, synthetic construct
  source 1..120: mol_type = other DNA
gacctccagtcgcgtccacggcgccggccccaccctgcaggatcggccggatcctcgcaggcccgcgacccccgaggcccccggagcagacacatccttctcgcagaggccactcacctg

SEQ ID NO: 62486 - DNA, 120 bp, synthetic construct
  source 1..120: mol_type = other DNA
atactgcaatatcgtgggagctagtaaatcagtgtggaaaggcaagatgcaatgaaagacaagggtgagatagtttatctgcttgttggtttgtttatgtgctaggtcacagaaggtacc

SEQ ID NO: 62487 - DNA, 120 bp, synthetic construct
  source 1..120: mol_type = other DNA
ctgatgaggaagtgcccggagaaggggtgatgggattgtgggattgctcaagacacagagcagcactgggcacctcctttctgaatttttttttttttttttttgagacagtgtctagct

SEQ ID NO: 62488 - DNA, 120 bp, synthetic construct
  source 1..120: mol_type = other DNA
ccgattttatagctcaagaggaatgcctaaaagctgaggctgggaagtccaatggtgagcagcttagatgtgagcgctacctctgttcctttaaaagaaaaaagaggccgggtgcaatgg

SEQ ID NO: 62489 - DNA, 120 bp, synthetic construct
  source 1..120: mol_type = other DNA
cttcattggagggaaattcttaattttgatataatagaactcactgtgaagttatattaagaatgcttggctgggcacactagctcatgcctgtaatcccagcactttgggaggctgagg

SEQ ID NO: 62490 - DNA, 120 bp, synthetic construct
  source 1..120: mol_type = other DNA
ctgcccactttggcctcccaaagtgctgggattacaggcgtgagtcactgcgcctggccccattttcatttcttcattctacgttttttggttttgttattttatttatttatttattta

SEQ ID NO: 62491 - DNA, 120 bp, synthetic construct
  source 1..120: mol_type = other DNA
cctcagatcccggggtgccacactcccaggggccccctttgcacgctctgcgcaaaagatgggcaggtcttaggactagcggacccctagatattccagaaaatcctctgcgcagaccta

SEQ ID NO: 62492 - DNA, 120 bp, synthetic construct
  source 1..120: mol_type = other DNA
ggagggtcggggatgggacgggctggaaggttctaggtgcacccgctgcgtgccaaggagctcctggcagggtatcagaaactcgtaggtagtttctattaatagattgttatggagtca

SEQ ID NO: 62493 - DNA, 120 bp, synthetic construct
  source 1..120: mol_type = other DNA
cccaactagctgggattacaggcatgtgccaccatgcctggctaattttgtatttttagtagagatggggtttctccatgttggcaggctggtctcgaactcccgacctcaggtgatctg

SEQ ID NO: 62494 - DNA, 120 bp, synthetic construct
  source 1..120: mol_type = other DNA
agaagagggagagtgagggcatggaactgggatgttagttctaaacctgctccattacaacacctcattctggacttgtgatttagtttgctggggatgcgaagtgtggaatctcgaata

SEQ ID NO: 62495 - DNA, 120 bp, synthetic construct
  source 1..120: mol_type = other DNA
agcgtccaccatggtggagacgtccaagaagacagcgagcgcccaggagtttgcacgctgtttagactccgtcttgggcgagttcgccttccccgacgagtttgtggtggaagtgtgggc

SEQ ID NO: 62496 - DNA, 120 bp, synthetic construct
  source 1..120: mol_type = other DNA
ccgtgttctagaattcaggccacatctgaagccaagcccagctctagaactcaggtcagccctgagaccaagcccagctctagaacccagataagctctgaaaccaatcccagcattgag

SEQ ID NO: 62497 - DNA, 120 bp, synthetic construct
  source 1..120: mol_type = other DNA
actcagctcagttctggagcacaggctggttctgaaatcccagccagctccaaaacacagacagcagctgagacccagccaagttccagaatccagctaagctctggagtccaatctagt

SEQ ID NO: 62498 - DNA, 120 bp, synthetic construct
  source 1..120: mol_type = other DNA
tgatcaggtatgtggcatccaggccagccttggccccatcccaggcttaccccaagcctcctacctggccccacagtcacaggtctcctcaaccccccagaagccagccgtctctcccaa

SEQ ID NO: 62499 - DNA, 120 bp, synthetic construct; identical to SEQ ID NO: 13544
  source 1..120: mol_type = other DNA

SEQ ID NO: 62500 - DNA, 120 bp, synthetic construct; identical to SEQ ID NO: 13545
  source 1..120: mol_type = other DNA

SEQ ID NO: 62501 - DNA, 120 bp, synthetic construct
  source 1..120: mol_type = other DNA
gaaagggggcgtgtgtgatatagaaggaggaaggcaacattcaacgctttttattttcttagtctgcattgaacaggtaattttctcccacaggaaacctaggcatggaaacactttact

SEQ ID NO: 62502 - DNA, 120 bp, synthetic construct; identical to SEQ ID NO: 33666
  source 1..120: mol_type = other DNA

SEQ ID NO: 62503 - DNA, 120 bp, synthetic construct; identical to SEQ ID NO: 33667
  source 1..120: mol_type = other DNA

SEQ ID NO: 62504 - DNA, 120 bp, synthetic construct; identical to SEQ ID NO: 32686
  source 1..120: mol_type = other DNA

SEQ ID NO: 62505 - DNA, 120 bp, synthetic construct
  source 1..120: mol_type = other DNA
ggagcgtctctgcccagccgccccgtctgagaagtgaggagaccctccgcccagcatccgccccgtctgagaagtaaggagcccctctgcccggcagccaccccgtctgggaagtgagga

SEQ ID NO: 62506 - DNA, 120 bp, synthetic construct; identical to SEQ ID NO: 32687
  source 1..120: mol_type = other DNA

SEQ ID NO: 62507 - DNA, 120 bp, synthetic construct
  source 1..120: mol_type = other DNA
gtcgttcccacacttcaaagttgtctccctgaaaaaccaagaaagtgtggttgcttagcaactagtgataagtggccctgttagtttggcattcattcttaatgtcagaactatcaagca

SEQ ID NO: 62508 - DNA, 120 bp, synthetic construct
  source 1..120: mol_type = other DNA
taaaggaggcacttgtagccttctcttgagtttacagattgaacgtctccataaggaggtctaaacccttataatgaattttcactgtaagaagtttgcttcagaagtaggccatataac

SEQ ID NO: 62509 - DNA, 120 bp, synthetic construct
  source 1..120: mol_type = other DNA
tggggaggcaggcaagggctggatcagtgcagtttggtttcattccaagtgcaattggaagcgagttaagggttttaagcagggaactgatgatgacatttatattttttataactctgt

SEQ ID NO: 62510 - DNA, 120 bp, synthetic construct
  source 1..120: mol_type = other DNA
gtatattttaagaagaggctacctggaaggttcatgtttaaactagcagcagggacaggcagttgctctgtgcttaaattgtgtaaagtacctcccagactgctgggattgttctgagga

SEQ ID NO: 62511 - DNA, 120 bp, synthetic construct
  source 1..120: mol_type = other DNA
aaactaggcatgtgagctatagcccagaactgaggagaaagctagcagccatgctaatcttcctgatgggatcctgaaaattaccttttgagggaaatgatagatttaccttgacaaaga

SEQ ID NO: 62512 - DNA, 120 bp, synthetic construct
  source 1..120: mol_type = other DNA
cttcctaaaggttatatggaaatacatgcacacatatgtcaagaaccaagttcctttttcctcctagagagttcagtggttttagcaaaaggagaactccaagatgggcctcaagagcta

SEQ ID NO: 62513 - DNA, 120 bp, synthetic construct
  source 1..120: mol_type = other DNA
tcatcaatgcagaggtactcataacctgcatccttccagccttctgagaccatgagctctgccatctccatgaagagcttctcactgaaagagaaattccaataatcattacaattcatt

SEQ ID NO: 62514 - DNA, 120 bp, synthetic construct
  source 1..120: mol_type = other DNA
ccagcttccaaaagggctttttaaggaacttggcacaacattacaaaaagttcacctaaaagattacatacatgtacattcattaaaagatgaaggctgggcgtggtggctcacgcctgt

SEQ ID NO: 62515 - DNA, 120 bp, synthetic construct
  source 1..120: mol_type = other DNA
accagcttgggcaacatggtgaaacccgtctctactgaaaatacaaaaattagctggccgtggtggtgtgcctgtaatcccagctactcaggagactacgacaggagaactgcttaaacc

SEQ ID NO: 62516 - DNA, 120 bp, synthetic construct
  source 1..120: mol_type = other DNA
ttatggacacagaaatgtactgtgactgccaccttttaccaacatctatcagtgattcctaaccttttttaaatcacagagccctttgagaatttgaagaaaggtaaatatcctctctcc

SEQ ID NO: 62517 - DNA, 120 bp, synthetic construct
  source 1..120: mol_type = other DNA
aagagagaggaaagaagagaaagagaaagagaaggagaacgagagagagagagagagagaaagaaacaggggccgctggccggactcccatcccaggaaaggtcacacagagaaagttta

SEQ ID NO: 62518 - DNA, 120 bp, synthetic construct; identical to SEQ ID NO: 12521
  source 1..120: mol_type = other DNA

SEQ ID NO: 62519 - DNA, 120 bp, synthetic construct; identical to SEQ ID NO: 12522
  source 1..120: mol_type = other DNA

SEQ ID NO: 62520 - DNA, 120 bp, synthetic construct
  source 1..120: mol_type = other DNA
cctctaggctagcaaggctatggggtcaggttcactgttgagaccactgagccctgggtgtcacccttcctcctcaggcccccgatggggctgtgcagaggctctgaggctgggagcagc

SEQ ID NO: 62521 - DNA, 120 bp, synthetic construct; identical to SEQ ID NO: 12517
  source 1..120: mol_type = other DNA

SEQ ID NO: 62522 - DNA, 120 bp, synthetic construct; identical to SEQ ID NO: 12518
  source 1..120: mol_type = other DNA

SEQ ID NO: 62523 - DNA, 120 bp, synthetic construct; identical to SEQ ID NO: 12519
  source 1..120: mol_type = other DNA

SEQ ID NO: 62524 - DNA, 120 bp, synthetic construct; identical to SEQ ID NO: 12520
  source 1..120: mol_type = other DNA

SEQ ID NO: 62525 - DNA, 120 bp, synthetic construct
  source 1..120: mol_type = other DNA
actctatctgaatattatttgcatcaatctttatcctcaagtaaaatactttcaccctccaccacacacacacagacacacacacacacacacacacacacacacactccgcactccaca

SEQ ID NO: 62526 - DNA, 120 bp, synthetic construct
  source 1..120: mol_type = other DNA
ctgtcccgccaccaccccgtctgggaggtgtgcccaacagctcattgagaacgggccatgatgacaatggcggttttgtggaatagaaaagggggaaaggtggggaaaagattgagaaat

SEQ ID NO: 62527 - DNA, 120 bp, synthetic construct
  source 1..120: mol_type = other DNA
cacccatccttcctaatgagcgtgaagtaatatctcattgtggttaggatacacatttcctttttttgtttgctttttaaagagacagggtctcactatgttgcccaggctgtggcatga

SEQ ID NO: 62528 - DNA, 120 bp, synthetic construct
  source 1..120: mol_type = other DNA
taatggaaggtcattgtactctccaagggagaaagagaagacttgagagttggtgatggttggtaaaggcagggtatgagggaatcattctctggaaagtaatgtaaaatcagatgactg

SEQ ID NO: 62529 - DNA, 120 bp, synthetic construct
  source 1..120: mol_type = other DNA
aatctgaaagtatactgttattgttttggcttaagtcagttctttttttttttttttttttttgagatggagttttgctctttttgcccaggatggagtgcaatggcgctatctcggctc

SEQ ID NO: 62530 - DNA, 120 bp, synthetic construct; identical to SEQ ID NO: 16932
  source 1..120: mol_type = other DNA

SEQ ID NO: 62531 - DNA, 120 bp, synthetic construct
  source 1..120: mol_type = other DNA
agatcgcaccactgcactccggcctgggccacagagcgagactccgtctcaaaaaacaaaaaacaaaacaaaacaaaactttcaattccatgacagaaaaaaagtgtggactaggtttca

SEQ ID NO: 62532 - DNA, 120 bp, synthetic construct; identical to SEQ ID NO: 16933
  source 1..120: mol_type = other DNA

SEQ ID NO: 62533 - DNA, 120 bp, synthetic construct; identical to SEQ ID NO: 16934
  source 1..120: mol_type = other DNA

SEQ ID NO: 62534 - DNA, 120 bp, synthetic construct; identical to SEQ ID NO: 16935
  source 1..120: mol_type = other DNA

SEQ ID NO: 62535 - DNA, 120 bp, synthetic construct; identical to SEQ ID NO: 16936
  source 1..120: mol_type = other DNA

SEQ ID NO: 62536 - DNA, 120 bp, synthetic construct; identical to SEQ ID NO: 16937
  source 1..120: mol_type = other DNA

SEQ ID NO: 62537 - DNA, 120 bp, synthetic construct; identical to SEQ ID NO: 16938
  source 1..120: mol_type = other DNA

SEQ ID NO: 62538 - DNA, 120 bp, synthetic construct; identical to SEQ ID NO: 16939
  source 1..120: mol_type = other DNA

SEQ ID NO: 62539 - DNA, 120 bp, synthetic construct
  source 1..120: mol_type = other DNA
gtataaaatctaaccattttaaacaacaaaaacgttactgctatccaagaggccatgcttcatacaggcaaagaataagaattcaaaatacatgacacacatgttttattgtatgtgtat

SEQ ID NO: 62540 - DNA, 120 bp, synthetic construct
  source 1..120: mol_type = other DNA
acgtctgtaattccagcactttcggaggctgaggcgggcggatcacctgaggtcaggagttccaagaccagcgtggccaacgtggtgaaaccccatctctattaaaaatacaaaaaaatt

SEQ ID NO: 62541 - DNA, 120 bp, synthetic construct
  source 1..120: mol_type = other DNA
cttctgggtttgcaaatgttagtaatgtgcataaaaatctgataaaatcctcaaaaagtccctacatttcttcttgcttagataacatcattctacagttggtagaaaaaaggtatacat

SEQ ID NO: 62542 - DNA, 120 bp, synthetic construct
  source 1..120: mol_type = other DNA
ctaattttgttttttgttgttgtttgtttggttggttttttgaaatggagtctcactctgttgcccaggctggagtgcaatagcgtgatcacggctcactgtaacctccgcctcccaggt

SEQ ID NO: 62543 - DNA, 120 bp, synthetic construct
  source 1..120: mol_type = other DNA
agagatggggtttcaccatgttgcccaggctggtctcgcactcctaggctcaagggatccacacacctcagcctcccaaagtgctgggattaccagcatgagccacaccatgcctgaccc

SEQ ID NO: 62544 - DNA, 120 bp, synthetic construct
  source 1..120: mol_type = other DNA
gacagagtgagactccatctcaaaaaaaaaaaaaaaaaaaggatccctgactagaagtgggtaacatgtgataatttggacccaccattttaatgaagtttgaaaagagagagaagcctt

SEQ ID NO: 62545 - DNA, 120 bp, synthetic construct; identical to SEQ ID NO: 16944
  source 1..120: mol_type = other DNA

SEQ ID NO: 62546 - DNA, 120 bp, synthetic construct; identical to SEQ ID NO: 16945
  source 1..120: mol_type = other DNA

SEQ ID NO: 62547 - DNA, 120 bp, synthetic construct
  source 1..120: mol_type = other DNA
attttgtcttctccatctttttttttgatatggagtcttgctctgttgcccaggctgaagtgcagtgatgcaatctcagctcactgtaagctccgcctcctgggttcacgccattctcct

SEQ ID NO: 62548 - DNA, 120 bp, synthetic construct; identical to SEQ ID NO: 16946
  source 1..120: mol_type = other DNA

SEQ ID NO: 62549 - DNA, 120 bp, synthetic construct
  source 1..120: mol_type = other DNA
cggctcactgcaaccttagccccaacccccacctcagctcaagcaatcctcctctctcagcctcctaaatagctggggaccacaggcgcacaccaccatgtctggctatttttttttttt

SEQ ID NO: 62550 - DNA, 120 bp, synthetic construct
  source 1..120: mol_type = other DNA
ggattgccatctatgaactcctttttaaggagggagtcatggtggccaagaaggatgtccaccttcctaagtacccagacctggcagaagacaagaatgtgcccaaccttcacatcatga

SEQ ID NO: 62551 - DNA, 120 bp, synthetic construct
  source 1..120: mol_type = other DNA
agagcaaactctgtctcaaaaaaaaaaaaaaaaattttttttaaagacagggtctcgctatgttgcccatgctggtcttgaattcctggggtcaagtgatgcttctgctttagcctccca

SEQ ID NO: 62552 - DNA, 120 bp, synthetic construct; identical to SEQ ID NO: 841
  source 1..120: mol_type = other DNA

SEQ ID NO: 62553 - DNA, 120 bp, synthetic construct
  source 1..120: mol_type = other DNA
acaaaatttaaaaattaacgcaagtttccttgacattgtcaactccatcagtacatttaaaatgggattccaggctgggtgcggtggctcacacctataatcccagcattttgggaggct

SEQ ID NO: 62554 - DNA, 120 bp, synthetic construct
  source 1..120: mol_type = other DNA
tgaactcgggaggtggaggttgcagtgagcctagattgcaccactgcactccagcctgggtaagagagcaagactctgtctcaaaaaaaaaaaaaaaaaaaaaaaaaaaaaagacagaga

SEQ ID NO: 62555 - DNA, 120 bp, synthetic construct; identical to SEQ ID NO: 16951
  source 1..120: mol_type = other DNA

SEQ ID NO: 62556 - DNA, 120 bp, synthetic construct; identical to SEQ ID NO: 21397
  source 1..120: mol_type = other DNA

SEQ ID NO: 62557 - DNA, 120 bp, synthetic construct; identical to SEQ ID NO: 21398
  source 1..120: mol_type = other DNA

SEQ ID NO: 62558 - DNA, 120 bp, synthetic construct; identical to SEQ ID NO: 21399
  source 1..120: mol_type = other DNA

SEQ ID NO: 62559 - DNA, 120 bp, synthetic construct; identical to SEQ ID NO: 21400
  source 1..120: mol_type = other DNA

SEQ ID NO: 62560 - DNA, 120 bp, synthetic construct; identical to SEQ ID NO: 29092
  source 1..120: mol_type = other DNA

SEQ ID NO: 62561 - DNA, 120 bp, synthetic construct; identical to SEQ ID NO: 29093
  source 1..120: mol_type = other DNA

SEQ ID NO: 62562 - DNA, 120 bp, synthetic construct; identical to SEQ ID NO: 29094
  source 1..120: mol_type = other DNA

SEQ ID NO: 62563 - DNA, 120 bp, synthetic construct; identical to SEQ ID NO: 13065
  source 1..120: mol_type = other DNA

SEQ ID NO: 62564 - DNA, 120 bp, synthetic construct; identical to SEQ ID NO: 13066
  source 1..120: mol_type = other DNA

SEQ ID NO: 62565 - DNA, 120 bp, synthetic construct
  source 1..120: mol_type = other DNA
gcaaggggtttgtgtcttcattccaccaccatcctgggacctcaggtcagttgcctctcctctctgagtctcacctttcttctctgaaaaatggggccatctgaggtctaagggttcttc

SEQ ID NO: 62566 - DNA, 120 bp, synthetic construct
  source 1..120: mol_type = other DNA
tttgctcagtgtccctcttctcagccagggagcgacttgtctgattcatcctaggtctgagtgacccagggcaggggactcgtggctctaattgaatcccaatctctcccaaggcttcca

SEQ ID NO: 62567 - DNA, 120 bp, synthetic construct; identical to SEQ ID NO: 7625
  source 1..120: mol_type = other DNA

SEQ ID NO: 62568 - DNA, 120 bp, synthetic construct; identical to SEQ ID NO: 7626
  source 1..120: mol_type = other DNA

SEQ ID NO: 62569 - DNA, 120 bp, synthetic construct; identical to SEQ ID NO: 7627
  source 1..120: mol_type = other DNA

SEQ ID NO: 62570 - DNA, 120 bp, synthetic construct; identical to SEQ ID NO: 7628
  source 1..120: mol_type = other DNA

SEQ ID NO: 62571 - DNA, 120 bp, synthetic construct; identical to SEQ ID NO: 7629
  source 1..120: mol_type = other DNA

SEQ ID NO: 62572 - DNA, 120 bp, synthetic construct
  source 1..120: mol_type = other DNA
cgggagagtctccctcctgctgcccctcgcaagcccgggtccttccttggacctcgggaaggggcgtccctggggggtcaggactgggagtttgggacaagtcaggcacttgttactccc

SEQ ID NO: 62573 - DNA, 120 bp, synthetic construct; identical to SEQ ID NO: 32037
  source 1..120: mol_type = other DNA

SEQ ID NO: 62574 - DNA, 120 bp, synthetic construct
  source 1..120: mol_type = other DNA
ccctactgaagtaattagcagtaaagctcagtgatatctgcaaccatctgtcaaatggttctgcaacaataggcaggaaaacaaagaatcaccaaagtcagagagagagagagagagaga

SEQ ID NO: 62575 - DNA, 120 bp, synthetic construct; identical to SEQ ID NO: 32038
  source 1..120: mol_type = other DNA

SEQ ID NO: 62576 - DNA, 120 bp, synthetic construct
  source 1..120: mol_type = other DNA
gttgtttcctgactttttaatgattgccattctaactggtgtgagatggtatctcattgtggttttgatttgcatttctctgatggccagtgatgatgagctttttttcatgtgtctttt

SEQ ID NO: 62577 - DNA, 120 bp, synthetic construct
  source 1..120: mol_type = other DNA
atgttcttccatttgtttgtatcctcttttatttcactgagcagtggtttgtagttctccttgaagaggtctttcacatcccttgtaagttggattcctaggtattttattctctttgaa

SEQ ID NO: 62578 - DNA, 120 bp, synthetic construct
  source 1..120: mol_type = other DNA
tttggttggtaagctactgattattgcctcaatttcagagcctgttattggtctattcagagattcaacttcttcctggtttagtcatgggagggtgtatgtgtcgaggaatgtatccat

SEQ ID NO: 62579 - DNA, 120 bp, synthetic construct; identical to SEQ ID NO: 32039
  source 1..120: mol_type = other DNA

SEQ ID NO: 62580 - DNA, 120 bp, synthetic construct; identical to SEQ ID NO: 32040
  source 1..120: mol_type = other DNA

SEQ ID NO: 62581 - DNA, 120 bp, synthetic construct; identical to SEQ ID NO: 17272
  source 1..120: mol_type = other DNA

SEQ ID NO: 62582 - DNA, 120 bp, synthetic construct; identical to SEQ ID NO: 17273
  source 1..120: mol_type = other DNA

SEQ ID NO: 62583 - DNA, 120 bp, synthetic construct; identical to SEQ ID NO: 17274
  source 1..120: mol_type = other DNA

SEQ ID NO: 62584 - DNA, 120 bp, synthetic construct
  source 1..120: mol_type = other DNA
ttcttttctttctttccttcctttcttccttccttccttccttccttccttccttcccttctttctttctctctctctctcttcctttctttctctctcttctttctttctttccctccc

SEQ ID NO: 62585 - DNA, 120 bp, synthetic construct; identical to SEQ ID NO: 6525
  source 1..120: mol_type = other DNA

SEQ ID NO: 62586 - DNA, 120 bp, synthetic construct; identical to SEQ ID NO: 25983
  source 1..120: mol_type = other DNA

SEQ ID NO: 62587 - DNA, 120 bp, synthetic construct
  source 1..120: mol_type = other DNA
gccgcccctactgggaagtgaggagcccctcttcccggccaccaccccatctgggaggtgtacccaacagctcactgagaacgggccatgatgacaatggcggttttgtggaatagaaag

SEQ ID NO: 62588 - DNA, 120 bp, synthetic construct
  source 1..120: mol_type = other DNA
atcatgggataaaacaataacaagctaaccagatctgatgtgaggttggtaaaagaaaaaaaacacaggggggatgagccaagatggccgaataggaacagctcctgtctacagctccca

SEQ ID NO: 62589 - DNA, 120 bp, synthetic construct
  source 1..120: mol_type = other DNA
aaaagtagataaaaccacaaagatggggaaaaaacagaacagaaaaactcgaaactctaaaaagcagagtgactctcctcttccaaaggaacacagttcctaccagcaacggaacaaagc

SEQ ID NO: 62590 - DNA, 120 bp, synthetic construct
  source 1..120: mol_type = other DNA
accatcgagactaggaagaaactgcatcaactaaccagcaaaagaaccagctaacatcataatgacaggatcaaattcacacataacaatattaactttaaatgtaaatggactaaatgc

SEQ ID NO: 62591 - DNA, 120 bp, synthetic construct
  source 1..120: mol_type = other DNA
atgagaacaaagacacaacataccagaatctctgggatgcattcaaagcagtgtgtagagggaaatttatagcactaaatgcccacaagagaaagcaggaaagatccaaaattgacaccc

SEQ ID NO: 62592 - DNA, 120 bp, synthetic construct
  source 1..120: mol_type = other DNA
accacatgattatctcaatagatgcagaaaaagcctttgacaaaattcaacaacccttcatgctaaaaactctctataaattaggtattcatgggacgtatttcaaaataataagagcta

SEQ ID NO: 62593 - DNA, 120 bp, synthetic construct
  source 1..120: mol_type = other DNA
cgtatctacaactatctgatctttgacaaacctgagaaaaacaaacaatggggaaaggattccctatttaataagtggtgctgggaaaactggctagccatatgtagaaagctgaaactg

SEQ ID NO: 62594 - DNA, 120 bp, synthetic construct
  source 1..120: mol_type = other DNA
tacaccatggaatactatgcagccataaaaaatgatgagttcatgtcctttgtagggacatggatgaaattggaaatcatcattctcagtaaactatcacaagaacaaaaccaaacaccg

SEQ ID NO: 62595 - DNA, 120 bp, synthetic construct; identical to SEQ ID NO: 25984
  source 1..120: mol_type = other DNA

SEQ ID NO: 62596 - DNA, 120 bp, synthetic construct
  source 1..120: mol_type = other DNA
gggggggggggaagatgaaaaacatgacataaggagaagcaaatttctgagggtgagatgggaattaagttagcgttgaagaatatgacaggtcttttactctgcggaaaacaatgaaag

SEQ ID NO: 62597 - DNA, 120 bp, synthetic construct
  source 1..120: mol_type = other DNA
ttgtggaagtcagtgtggcgattcctcagggatctagaactagaaatgccatttgacccagccatcccattactgggtatatacacaaagaactataaatcatgctgctataaagacaca

SEQ ID NO: 62598 - DNA, 120 bp, synthetic construct
  source 1..120: mol_type = other DNA
caagttacccaagttatctcctgtgttagttagggttctctagagaaacagaactaactaataggataggtacagatagatgagaggggatttaggaggctgagaagtctcaccatctgc

SEQ ID NO: 62599 - DNA, 120 bp, synthetic construct; identical to SEQ ID NO: 13372
  source 1..120: mol_type = other DNA

SEQ ID NO: 62600 - DNA, 120 bp, synthetic construct
  source 1..120: mol_type = other DNA
agtacagtggcacagtcgtagctcactcagcctcgacctcataggctcaagcagtagtcccatctcagtctcccaagtagctaggactacaggtatgtgtcaccatgcccagtgcattaa

SEQ ID NO: 62601 - DNA, 120 bp, synthetic construct; identical to SEQ ID NO: 13373
  source 1..120: mol_type = other DNA

SEQ ID NO: 62602 - DNA, 120 bp, synthetic construct; identical to SEQ ID NO: 13374
  source 1..120: mol_type = other DNA

SEQ ID NO: 62603 - DNA, 120 bp, synthetic construct; identical to SEQ ID NO: 13375
  source 1..120: mol_type = other DNA

SEQ ID NO: 62604 - DNA, 120 bp, synthetic construct; identical to SEQ ID NO: 24333
  source 1..120: mol_type = other DNA

SEQ ID NO: 62605 - DNA, 120 bp, synthetic construct
  source 1..120: mol_type = other DNA
agccatggctgctgcactccagctgggagacagagcaaaaccctgttttaaaaaagaaaaagaaagaagacagagaagaaagaaaagaaaagaaagagagaaaggaaggaaggagaagga

SEQ ID NO: 62606 - DNA, 120 bp, synthetic construct; identical to SEQ ID NO: 13182
  source 1..120: mol_type = other DNA

SEQ ID NO: 62607 - DNA, 120 bp, synthetic construct; identical to SEQ ID NO: 13183
  source 1..120: mol_type = other DNA

SEQ ID NO: 62608 - DNA, 120 bp, synthetic construct; identical to SEQ ID NO: 13184
  source 1..120: mol_type = other DNA

SEQ ID NO: 62609 - DNA, 120 bp, synthetic construct; identical to SEQ ID NO: 10945
  source 1..120: mol_type = other DNA

SEQ ID NO: 62610 - DNA, 120 bp, synthetic construct
  source 1..120: mol_type = other DNA
cgtctgagaagtgaggagcccctccgcctggcagccgccccgtctgaggagtgaggagcccctccgcctggcagccaccccatctgggaagtgaggagcctctccgcccggcagccgacc

SEQ ID NO: 62611 - DNA, 120 bp, synthetic construct
  source 1..120: mol_type = other DNA
catgggagacttttcattttgttctgtactaagaaaaattcttctgccttgggatcctgttgatctgtgaccttaccccgcaaccctgtgctctctgtaacatgtgctgtgtccactcag

SEQ ID NO: 62612 - DNA, 120 bp, synthetic construct; identical to SEQ ID NO: 11915
  source 1..120: mol_type = other DNA

SEQ ID NO: 62613 - DNA, 120 bp, synthetic construct; identical to SEQ ID NO: 11916
  source 1..120: mol_type = other DNA

SEQ ID NO: 62614 - DNA, 120 bp, synthetic construct
  source 1..120: mol_type = other DNA
cagttttgcctacagagctcattatcatccgcttaagtgatgttttagaaaattattcacttatttagcaagacttaaaaatgcactactggccgggcgcggtggctcacgcctgtaatc

SEQ ID NO: 62615 - DNA, 120 bp, synthetic construct
  source 1..120: mol_type = other DNA
ggatggagaatgactttgacgagctgagagaaggcttcagacgatcaaattactccgagttacaagaggacattcaaaccaaaggcaaagaagttgaaaactttgaaaaaaatttagaag

SEQ ID NO: 62616 - DNA, 120 bp, synthetic construct
  source 1..120: mol_type = other DNA
acaaccggtaccagccactgcaaaatcatgccaaaatgtaaagaccattgagactaggaagaaactgcatcaactaatgagcaaaataaccagctaacatcataatgacaggatcaaatt

SEQ ID NO: 62617 - DNA, 120 bp, synthetic construct
  source 1..120: mol_type = other DNA
gaatgactactgggtacataacgaaatgaaggcagaaataaagatgttctttgaaaccaatgagaacaaagacacaacataccagaatctctgggacgcatgcaaagcagtatgtagagg

SEQ ID NO: 62618 - DNA, 120 bp, synthetic construct
  source 1..120: mol_type = other DNA
gacaaaaaccacatgattatctcaatagatgcagaaaaggcctttgacaaaactcaacaacgcttcatgctaaaaactcccaataaattaggtattgatgggacgtatttcaaaataata

SEQ ID NO: 62619 - DNA, 120 bp, synthetic construct
  source 1..120: mol_type = other DNA
atctgatctttgacaaacctgagaaaaacaagcaatggggaaaggattccctatttaataaatggtgctgggaaaactggctagccctatgtagaaagctgaaactggatcccttcctta

SEQ ID NO: 62620 - DNA, 120 bp, synthetic construct
  source 1..120: mol_type = other DNA
caaaacaccacatattctcactcataggtggcaattgaacaatgagaacacatggacacaagaaggggaacatcacactctggggcctgttgtggggtggggggaggggggagggatagc

SEQ ID NO: 62621 - DNA, 120 bp, synthetic construct
  source 1..120: mol_type = other DNA
tttatggctacatagttttccatggtgtatatgtgccacattttcttaatccagtctatcattgttggacatttgggttggttccaagtctttgctattgtgaatagtgctgcaataaac

SEQ ID NO: 62622 - DNA, 120 bp, synthetic construct; identical to SEQ ID NO: 27436
  source 1..120: mol_type = other DNA

SEQ ID NO: 62623 - DNA, 120 bp, synthetic construct; identical to SEQ ID NO: 27437
  source 1..120: mol_type = other DNA

SEQ ID NO: 62624 - DNA, 120 bp, synthetic construct; identical to SEQ ID NO: 27438
  source 1..120: mol_type = other DNA

SEQ ID NO: 62625 - DNA, 120 bp, synthetic construct
  source 1..120: mol_type = other DNA
gaagacagagcaccacatgggcatccgagatgaaccaatctaggcagtgagggcagcatgttagcagagacgtgaaggatgaagacagagcaccacatgggcatccgagatgaaaccatc

SEQ ID NO: 62626 - DNA, 120 bp, synthetic construct; identical to SEQ ID NO: 27439
  source 1..120: mol_type = other DNA

SEQ ID NO: 62627 - DNA, 120 bp, synthetic construct; identical to SEQ ID NO: 27440
  source 1..120: mol_type = other DNA

SEQ ID NO: 62628 - DNA, 120 bp, synthetic construct
  source 1..120: mol_type = other DNA
gagctaagatcagaaatcttctaagattatccttaacaggccgggtgtggtggctcatgtctgtaatcccagcactttgggaggcgaggcgggtggatcatctgaggtcaagagttcgag

SEQ ID NO: 62629 - DNA, 120 bp, synthetic construct
  source 1..120: mol_type = other DNA
tgcacacgtatgtttattgtggcactattcacaatagcaaagacttggaaccaacccaaatgtccatcaatgatagactggattaagaaaatgtggcacatatacatcatggaatacttt

SEQ ID NO: 62630 - DNA, 120 bp, synthetic construct; identical to SEQ ID NO: 27426
  source 1..120: mol_type = other DNA

SEQ ID NO: 62631 - DNA, 120 bp, synthetic construct; identical to SEQ ID NO: 27427
  source 1..120: mol_type = other DNA

SEQ ID NO: 62632 - DNA, 120 bp, synthetic construct
  source 1..120: mol_type = other DNA
gatatacatacacacatacatacacacacacgcacacaccacaaagacacaccacaaacacacacacacatacacatacacatacacacacaccacacacacagatacacatacatacac

SEQ ID NO: 62633 - DNA, 120 bp, synthetic construct; identical to SEQ ID NO: 27428
  source 1..120: mol_type = other DNA

SEQ ID NO: 62634 - DNA, 120 bp, synthetic construct; identical to SEQ ID NO: 27429
  source 1..120: mol_type = other DNA

SEQ ID NO: 62635 - DNA, 120 bp, synthetic construct; identical to SEQ ID NO: 27430
  source 1..120: mol_type = other DNA

SEQ ID NO: 62636 - DNA, 120 bp, synthetic construct; identical to SEQ ID NO: 27431
  source 1..120: mol_type = other DNA

SEQ ID NO: 62637 - DNA, 120 bp, synthetic construct; identical to SEQ ID NO: 27432
  source 1..120: mol_type = other DNA

SEQ ID NO: 62638 - DNA, 120 bp, synthetic construct; identical to SEQ ID NO: 27433
  source 1..120: mol_type = other DNA

SEQ ID NO: 62639 - DNA, 120 bp, synthetic construct
  source 1..120: mol_type = other DNA
gacaatgcttagggcttgctcaaggactcgtgaccagttactgatctatgcagatcttctgattgcaaactgatagctggattgtaacttgaagggtccgataagatgtaaacttcataa

SEQ ID NO: 62640 - DNA, 120 bp, synthetic construct
  source 1..120: mol_type = other DNA
aactacggaacagttaattttatttatttatttatttatttttttgagacggagtctccctctgttccccatgtacaaaggcacaatcttggctcacctgcaacctccgcctcctgggct

SEQ ID NO: 62641 - DNA, 120 bp, synthetic construct
  source 1..120: mol_type = other DNA
cttttacatgtgttcacatagaattccagagagagatcggccggggtggctcactcctgtaatcccagcactgtgggagacaggcgcgggcagatcacttgagaccaggagttctgacac

SEQ ID NO: 62642 - DNA, 120 bp, synthetic construct
  source 1..120: mol_type = other DNA
acccgccttggcctcccaaagtgctgagattacaagtgtgagccaccattcccggcccacatcatttttttagtcagagacacagaaacattatttgtgttctttttgtttttatttaaa

SEQ ID NO: 62643 - DNA, 120 bp, synthetic construct; identical to SEQ ID NO: 22715
  source 1..120: mol_type = other DNA

SEQ ID NO: 62644 - DNA, 120 bp, synthetic construct
  source 1..120: mol_type = other DNA
acatgcccctctgaccccacctccatttctagaaacatgcccctctgaccccacctccatttctagaaacatgcccctctgactccacctccatttctagaaattaatcctgcagacatg

SEQ ID NO: 62645 - DNA, 120 bp, synthetic construct
  source 1..120: mol_type = other DNA
acatgtccctctgaccccacatccatttctagaaacatgcccctctgaccccacctccatttctagaaacatgtccctctgaccccacatccatttctagaaacatgcccctctgacccc

SEQ ID NO: 62646 - DNA, 120 bp, synthetic construct
  source 1..120: mol_type = other DNA
cctttgacccacctccatttccagaaacatgcccctctgacccacctccatttctagaaacatgcccctctgacccacctccatttctagaaacatgcccctctgaccccacatccattt

SEQ ID NO: 62647 - DNA, 120 bp, synthetic construct; identical to SEQ ID NO: 31903
  source 1..120: mol_type = other DNA

SEQ ID NO: 62648 - DNA, 120 bp, synthetic construct; identical to SEQ ID NO: 31904
  source 1..120: mol_type = other DNA

SEQ ID NO: 62649 - DNA, 120 bp, synthetic construct
  source 1..120: mol_type = other DNA
gtgaaaatttttggggatggtatggggagataatgggcgatgtttctcagggctgcttcgagtgggattaggggcggcgtggtaacctagagtgggagagattaagccgaaggaagattt

SEQ ID NO: 62650 - DNA, 120 bp, synthetic construct; identical to SEQ ID NO: 24819
  source 1..120: mol_type = other DNA

SEQ ID NO: 62651 - DNA, 120 bp, synthetic construct
  source 1..120: mol_type = other DNA
tagtggttttgatttgcatttctctgatggccagtgatgatgagcattttttcatgtgttttttggctgcataaatgtcttcttttgagaagtattgatgggacatatctcaaaataata

SEQ ID NO: 62652 - DNA, 120 bp, synthetic construct
  source 1..120: mol_type = other DNA
aaacaagcaatggggaaaggattccctatttaataaacggtgctgggaaaactggctagccatatgtagaaagctgaaactggatcccttccttacaccttatacaaaaatcaattcaag

SEQ ID NO: 62653 - DNA, 120 bp, synthetic construct
  source 1..120: mol_type = other DNA
ccaaaattgaccacttgatagttggaagtaaagcactcctcagcaaatgtaaaagaacagaaattataacaaactgtctctcagaccacagtgcaatcaaactagaactcaggattaaga

SEQ ID NO: 62654 - DNA, 120 bp, synthetic construct
  source 1..120: mol_type = other DNA
cagcatcatcctgataccaaagcctggcagagacacaaccaaaaaagagaattttagaccaatatccttgatgaacattgatgcaaaaatcctcaataaaatactggaaaagcaaaccca

SEQ ID NO: 62655 - DNA, 120 bp, synthetic construct
  source 1..120: mol_type = other DNA
cgccaagtcaatcctaagccaaaagaacaaagctggaggcatcacgctacctgacttcaaactatactacaaggctacagtaaccaaaacagcatggtactggtaccaaaacagacacat

SEQ ID NO: 62656 - DNA, 120 bp, synthetic construct
  source 1..120: mol_type = other DNA
atctagaactagaaataccattggacccagccatcccattactgggtatatacccaaaggattataaatcatgctgctataaagacacatgcacacgtgtgtttattgcggcactattca

SEQ ID NO: 62657 - DNA, 120 bp, synthetic construct; identical to SEQ ID NO: 5908
  source 1..120: mol_type = other DNA

SEQ ID NO: 62658 - DNA, 120 bp, synthetic construct; identical to SEQ ID NO: 32657
  source 1..120: mol_type = other DNA

SEQ ID NO: 62659 - DNA, 120 bp, synthetic construct
  source 1..120: mol_type = other DNA
atggcgtcagcccaagagttcgaggttacagtgagccatgattgcaccactgcactctagcctgggtgacagagcaagaccctgttcctgaaaaaataaaaaataaaaataaaaagaggc

SEQ ID NO: 62660 - DNA, 120 bp, synthetic construct
  source 1..120: mol_type = other DNA
ggtggacacgaggtcaggagttcaagaccagcctggccaaactggtgaaaccctatctctactaaaaatacaaaaattagatgctgggcatggtggtgggtgcctgtaatcccggctact

SEQ ID NO: 62661 - DNA, 120 bp, synthetic construct
  source 1..120: mol_type = other DNA
aggtgtcttttttttttttaaactttaagttttagggtacatatgcataatgtgcagggtttttacatatttatatatgtgccatgttggtgtgctgcacccattaactcgtcatttagc

SEQ ID NO: 62662 - DNA, 120 bp, synthetic construct
  source 1..120: mol_type = other DNA
taggttttcttctagggtttttatggttttaggtctaacatttaagtctttaatccatgttgaattaatttttgtataaggtgtaaggaagggatccagtttcagctttctacatatggc

SEQ ID NO: 62663 - DNA, 120 bp, synthetic construct
  source 1..120: mol_type = other DNA
tatctatgacaaacccacagccaatatcatactgaatgggcaaaaactggaagcattccctttgaaaactggcacaagacagggatgccctctctcaccactcctattcaatatagtgtt

SEQ ID NO: 62664 - DNA, 120 bp, synthetic construct
  source 1..120: mol_type = other DNA
aatttatccatttcttctagattttctagtttatttgcatagaggtgtttgtagtattctctgatggtagtttgtatttctgtgggatcagtggtgatattccctttatcatttttttat

SEQ ID NO: 62665 - DNA, 120 bp, synthetic construct
  source 1..120: mol_type = other DNA
tgttttatcagagactaggattgcaactcctgcctttttctgttttccatttgcttggtagatcttcctccatcctttttttttgagcctatgtatgtccctgcatgtgagatgggtttc

SEQ ID NO: 62666 - DNA, 120 bp, synthetic construct
  source 1..120: mol_type = other DNA
aagcagagcccctctgagaaacagctgatttcttccccagctggggaagaattggtacaagacgagcctggggcatgttatgccagaaaacaataaaatgctcaaaaaaaaaaaaaaaaa

SEQ ID NO: 62667 - DNA, 120 bp, synthetic construct
  source 1..120: mol_type = other DNA
tcactgcagcctcaacctcctgggctcaaatgatcctcctacctcagcttcatgagtagctgtaactaccagtgtgcaccactacgtctgactaaatatatatatatatatatatatatt

SEQ ID NO: 62668 - DNA, 120 bp, synthetic construct
  source 1..120: mol_type = other DNA
cgtgctccggccttctcctctgctcccatttcctctttctgggccccaaccaagccactccttccctttttgctgccgcttgctcgatcaagtcctgcctgcaccgacccctacccccgc

SEQ ID NO: 62669 - DNA, 120 bp, synthetic construct; identical to SEQ ID NO: 18807
  source 1..120: mol_type = other DNA

SEQ ID NO: 62670 - DNA, 120 bp, synthetic construct; identical to SEQ ID NO: 18808
  source 1..120: mol_type = other DNA

SEQ ID NO: 62671 - DNA, 120 bp, synthetic construct; identical to SEQ ID NO: 18809
  source 1..120: mol_type = other DNA

SEQ ID NO: 62672 - DNA, 120 bp, synthetic construct; identical to SEQ ID NO: 18806
  source 1..120: mol_type = other DNA

SEQ ID NO: 62673 - DNA, 120 bp, synthetic construct
  source 1..120: mol_type = other DNA
atgtcctttgcccactttttgatggggttgtttgtttttttcttgtaaatttgtttgagttcattgtacattctggatattagccctttgtcagatgagtaggttgcgaaaattttctcc

SEQ ID NO: 62674 - DNA, 120 bp, synthetic construct; identical to SEQ ID NO: 32659
  source 1..120: mol_type = other DNA

SEQ ID NO: 62675 - DNA, 120 bp, synthetic construct
  source 1..120: mol_type = other DNA
ctcagtgctcaatggtgcccaagatggagtgcagtggcgtgatctcggctcgctacaacttccacctcccagccgcctgccttggcctcccaaagtgcccagagtgcagcctctgcccgg

SEQ ID NO: 62676 - DNA, 120 bp, synthetic construct
  source 1..120: mol_type = other DNA
ctactgggaagtgaggagcccctctgcccggccagccgccccttccgggagggaggttggggggtcagccccccgcctggccagtcgcccagtccgggagggaggtggggaggtcagccc

SEQ ID NO: 62677 - DNA, 120 bp, synthetic construct
  source 1..120: mol_type = other DNA
ccctctctgtgagaaacacccaagaatgatcaataaaaataaaattaaaaaaaaacaaaaaaataaacaaacaaacaaacaaaaaaaaaaaaaacaaaggaaaaggtaagtgccagaggc

SEQ ID NO: 62678 - DNA, 120 bp, synthetic construct; identical to SEQ ID NO: 32660
  source 1..120: mol_type = other DNA

SEQ ID NO: 62679 - DNA, 120 bp, synthetic construct; identical to SEQ ID NO: 32661
  source 1..120: mol_type = other DNA

SEQ ID NO: 62680 - DNA, 120 bp, synthetic construct; identical to SEQ ID NO: 32662
  source 1..120: mol_type = other DNA

SEQ ID NO: 62681 - DNA, 120 bp, synthetic construct; identical to SEQ ID NO: 32663
  source 1..120: mol_type = other DNA

SEQ ID NO: 62682 - DNA, 120 bp, synthetic construct
  source 1..120: mol_type = other DNA
aaataaaataagaccaccccccaacaccaaaaaatggatagagttagtacgagaagtgcccagtgaagccaaatgacacgtcattttacagtgtgacctttttttccccttccagacttg

SEQ ID NO: 62683 - DNA, 120 bp, synthetic construct
  source 1..120: mol_type = other DNA
agtacacagacatttattcagaaagaataaatttgtaagtataattctttgagaaaggaaagaccaaatgatttgtggaaggcctgtcgacaggcccgcacttgaccccaccgtccgtcc

SEQ ID NO: 62684 - DNA, 120 bp, synthetic construct
  source 1..120: mol_type = other DNA
cacctcggcctcccaaagtgttgggattacaggcgtgagccaccgcgcctagctcacctgttgctttctatttcgtgaatactaaagtaccctattaaatgatgactagttaattttata

SEQ ID NO: 62685 - DNA, 120 bp, synthetic construct; identical to SEQ ID NO: 32922
  source 1..120: mol_type = other DNA

SEQ ID NO: 62686 - DNA, 120 bp, synthetic construct
  source 1..120: mol_type = other DNA
tcccagaccagcacttactaacagagcctctgaaatgcaactgaggaagtaggcaacctcaccctgaacagtgtgcagtgctctgactcacagcaagttgcagatatatatatatataaa

SEQ ID NO: 62687 - DNA, 120 bp, synthetic construct
  source 1..120: mol_type = other DNA
accagcaaaataatgcacagttcctgagatcttcatattttatacataaaatagtattaagactgaagagcttctgcacagcaaaagaaactaccatcagagtgaacaggcaacctacaa

SEQ ID NO: 62688 - DNA, 120 bp, synthetic construct; identical to SEQ ID NO: 7707
  source 1..120: mol_type = other DNA

SEQ ID NO: 62689 - DNA, 120 bp, synthetic construct; identical to SEQ ID NO: 14340
  source 1..120: mol_type = other DNA

SEQ ID NO: 62690 - DNA, 120 bp, synthetic construct
  source 1..120: mol_type = other DNA
taatcagacatgaaaattttatctaccagtatgcttgctgcagtgcttccttaaaagtaggactcacaacacatgcacatgtatgtttattgtggcactattcacaatagcaaagacttg

SEQ ID NO: 62691 - DNA, 120 bp, synthetic construct; identical to SEQ ID NO: 9477
  source 1..120: mol_type = other DNA

SEQ ID NO: 62692 - DNA, 120 bp, synthetic construct; identical to SEQ ID NO: 9478
  source 1..120: mol_type = other DNA

SEQ ID NO: 62693 - DNA, 120 bp, synthetic construct; identical to SEQ ID NO: 9479
  source 1..120: mol_type = other DNA

SEQ ID NO: 62694 - DNA, 120 bp, synthetic construct; identical to SEQ ID NO: 9480
  source 1..120: mol_type = other DNA

SEQ ID NO: 62695 - DNA, 120 bp, synthetic construct
  source 1..120: mol_type = other DNA
aaagaattaaaaaaaaaaaaaaaaagcgatggcacgtgactgtagttccagctacttgggagactgaggtgggaggattgctagagcccagaagtttgaggctgcagtgagctgtgattg

SEQ ID NO: 62696 - DNA, 120 bp, synthetic construct; identical to SEQ ID NO: 19399
  source 1..120: mol_type = other DNA

SEQ ID NO: 62697 - DNA, 120 bp, synthetic construct
  source 1..120: mol_type = other DNA
cctgggcaacagagtgagactctgtctcaaaaaaaaaaaaaaagaaattaaatttaaaaaggtaaaaagcagctcaggaccgccaatgtacaatgcactccatatggctgtacgtatcta

SEQ ID NO: 62698 - DNA, 120 bp, synthetic construct
  source 1..120: mol_type = other DNA
tgcactccagcctgggcaacagagtgagactctgtttcaaaaaaaaaaaaaaaaaagaaattaaatttagaaaggtaaaaagcagctcaggactgccaatgtacaatgcgctccatattg

SEQ ID NO: 62699 - DNA, 120 bp, synthetic construct
  source 1..120: mol_type = other DNA
gaggagatgaatcccaggagctgggggtccccctgatttacaccatctgccccatcgggagtttattctggtgtccagtgtgagcagggactgaagtcagttttgaaataatgaatgggc

SEQ ID NO: 62700 - DNA, 120 bp, synthetic construct
  source 1..120: mol_type = other DNA
atcgcttgaacccggaaggaggaggtggcagtgaaccaagatcgcgccactgcactccagcctggacaacagagtgagactctgtcaaaaaaaaaaaaaattcctctttggcaaaaccca

SEQ ID NO: 62701 - DNA, 120 bp, synthetic construct
  source 1..120: mol_type = other DNA
gagggagggaaggaagcggcagagggagggagatagagataggaaggaaggagagagaagggggagagggaggaaggcgagagaaagagagagggagaaggaaagaaagagagaggaagg

SEQ ID NO: 62702 - DNA, 120 bp, synthetic construct
  source 1..120: mol_type = other DNA
tctcaaagtgctgggattacaggcgtgagccatggcgcccggccagaactgaatgtttgaagaagcccaacaccaaacctgtggcagccccaggaagcaccgggaatgcatagtctgagc

SEQ ID NO: 62703 - DNA, 120 bp, synthetic construct; identical to SEQ ID NO: 19400
  source 1..120: mol_type = other DNA

SEQ ID NO: 62704 - DNA, 120 bp, synthetic construct; identical to SEQ ID NO: 19401
  source 1..120: mol_type = other DNA

SEQ ID NO: 62705 - DNA, 120 bp, synthetic construct
  source 1..120: mol_type = other DNA
ccctcttcaaagaagctgcacccttgactcaacccctgttccccgctccaattaacctcaacccccaacaccatccccagcgtcctccccagctaactcagatttccaattccacttcca

SEQ ID NO: 62706 - DNA, 120 bp, synthetic construct; identical to SEQ ID NO: 19838
  source 1..120: mol_type = other DNA

SEQ ID NO: 62707 - DNA, 120 bp, synthetic construct
  source 1..120: mol_type = other DNA
tctttctcttcctgacccctagtcatcgaagaagccaactggatgactctggacaaagatgtgccccagtcagcagagggtggctttgatgctgtcatctgccttggaaacagtttcgct

SEQ ID NO: 62708 - DNA, 120 bp, synthetic construct
  source 1..120: mol_type = other DNA
tcaagaggacagactgagtgtggcctcagctcccacaagcctctgcccaggcactgctaggctctgtctggaagatggggaccagcagccccacaccagggccagcctctagagcagact

SEQ ID NO: 62709 - DNA, 120 bp, synthetic construct; identical to SEQ ID NO: 13164
  source 1..120: mol_type = other DNA

SEQ ID NO: 62710 - DNA, 120 bp, synthetic construct; identical to SEQ ID NO: 13165
  source 1..120: mol_type = other DNA

SEQ ID NO: 62711 - DNA, 120 bp, synthetic construct
  source 1..120: mol_type = other DNA
ggatgagtgaccctgagagttacggcccggagtctaaagcattggtttgtcagccttctaaaattaatgtggaagtacgagagaatataccagaacgttcttgtagcgaattaaattatc

SEQ ID NO: 62712 - DNA, 120 bp, synthetic construct
  source 1..120: mol_type = other DNA
ggatggaggaacaggcactgagcctgtagaattagataaaatacatagaatggccaatgatgaaaaatgccatgtagatgtgtgaagcagaggagggagtgtgtgtatgtgtgttagagt

SEQ ID NO: 62713 - DNA, 120 bp, synthetic construct
  source 1..120: mol_type = other DNA
acatggtgaaaccccgtctctactaaaaaaaaccacaaaaacaaaagttagccgggcatagtggtatcctcctgtaatcccagctgcttgggaggccgaggctggagaattgcttgaatc

SEQ ID NO: 62714 - DNA, 120 bp, synthetic construct
  source 1..120: mol_type = other DNA
tggatattctacttgttttttctgtctttgatgtagcgctccttcaacatcaacgtgtgaggcggattgtgtgcagtgggtaggagagtgtggtctgtggaatgagctgagcagaaagat

SEQ ID NO: 62715 - DNA, 120 bp, synthetic construct
  source 1..120: mol_type = other DNA
ttgggggtggtggtatttgggggtagagactcccgctcaggtatggctgtgtctggcccaagaggcgtggaggggccagcccccacctgtctcaggaggacaggctgctgaaacctgagg

SEQ ID NO: 62716 - DNA, 120 bp, synthetic construct
  source 1..120: mol_type = other DNA
agtgtggcatctggctcctgggctggccagattcccagggaacagtcacccagcacctcgtgtgtatttcgactttattattattattattattattattagagccgagtgtcgctgtgt

SEQ ID NO: 62717 - DNA, 120 bp, synthetic construct
  source 1..120: mol_type = other DNA
atagacgtcacataggtgactcataactgtgtgcgaccttttgtgtctgaccaactcctcttggcacagtgtccccaaggtcccccaggctggaggctctcagtgcttcctttttatatg

SEQ ID NO: 62718 - DNA, 120 bp, synthetic construct
  source 1..120: mol_type = other DNA
ttaacttgagtttattgttgggctgtagttctgtgttctggatgtgagtctcttacatacgtggtttgccagtgtttattttctcccattctgtgggttgtcttttcactcccttgatgg

SEQ ID NO: 62719 - DNA, 120 bp, synthetic construct
  source 1..120: mol_type = other DNA
gtagtgggtggcactgtttgtgcgtggataattgtggtgtcttggcacattgacccttttatcaatgtataacatctttgtctcttaaaatagtttcagccacttcagctctcttttgcc

SEQ ID NO: 62720 - DNA, 120 bp, synthetic construct
  source 1..120: mol_type = other DNA
cttggcctcccaaagtgctgggattacaggcatgagccacgatagcaagccttaactctaatttttgaagggctatttttagaattctcggttttgtcagtttcttccattgaatggtac

SEQ ID NO: 62721 - DNA, 120 bp, synthetic construct
  source 1..120: mol_type = other DNA
gtctccccaacccacctacccacgttccctccccaggtggagctggcgtgtggaaaaagcaaccggctggcccatgtgtccgagccgagcacctgcgtctacgcgctgacgttcgagacc

SEQ ID NO: 62722 - DNA, 120 bp, synthetic construct
  source 1..120: mol_type = other DNA
gtaggacccgcagggaccagctgaccaggcttgtgctcagagaagcagacaaaacaaagattcaaggttttaattaattcccatactgataaaaataactccatgaattctgtaaaccat

SEQ ID NO: 62723 - DNA, 120 bp, synthetic construct; identical to SEQ ID NO: 13031
  source 1..120: mol_type = other DNA

SEQ ID NO: 62724 - DNA, 120 bp, synthetic construct; identical to SEQ ID NO: 32996
  source 1..120: mol_type = other DNA

SEQ ID NO: 62725 - DNA, 120 bp, synthetic construct; identical to SEQ ID NO: 32997
  source 1..120: mol_type = other DNA

SEQ ID NO: 62726 - DNA, 120 bp, synthetic construct; identical to SEQ ID NO: 13504
  source 1..120: mol_type = other DNA

SEQ ID NO: 62727 - DNA, 120 bp, synthetic construct; identical to SEQ ID NO: 13505
  source 1..120: mol_type = other DNA

SEQ ID NO: 62728 - DNA, 120 bp, synthetic construct; identical to SEQ ID NO: 13506
  source 1..120: mol_type = other DNA

SEQ ID NO: 62729 - DNA, 120 bp, synthetic construct; identical to SEQ ID NO: 13507
  source 1..120: mol_type = other DNA

SEQ ID NO: 62730 - DNA, 120 bp, synthetic construct; identical to SEQ ID NO: 13499
  source 1..120: mol_type = other DNA

SEQ ID NO: 62731 - DNA, 120 bp, synthetic construct; identical to SEQ ID NO: 13500
  source 1..120: mol_type = other DNA

SEQ ID NO: 62732 - DNA, 120 bp, synthetic construct
  source 1..120: mol_type = other DNA
cagcctcccaaagtgctgggattacaggcatgagccaccgcgcccagccacctgccacatcttaaaattaattctatttataaagaaactttgttgtttcaccccttaaaaaaaatcaag

SEQ ID NO: 62733 - DNA, 120 bp, synthetic construct; identical to SEQ ID NO: 13502
  source 1..120: mol_type = other DNA

SEQ ID NO: 62734 - DNA, 120 bp, synthetic construct; identical to SEQ ID NO: 13503
  source 1..120: mol_type = other DNA

SEQ ID NO: 62735 - DNA, 120 bp, synthetic construct; identical to SEQ ID NO: 13508
  source 1..120: mol_type = other DNA

SEQ ID NO: 62736 - DNA, 120 bp, synthetic construct; identical to SEQ ID NO: 13509
  source 1..120: mol_type = other DNA

SEQ ID NO: 62737 - DNA, 120 bp, synthetic construct; identical to SEQ ID NO: 13510
  source 1..120: mol_type = other DNA

SEQ ID NO: 62738 - DNA, 120 bp, synthetic construct; identical to SEQ ID NO: 13511
  source 1..120: mol_type = other DNA

SEQ ID NO: 62739 - DNA, 120 bp, synthetic construct; identical to SEQ ID NO: 13512
  source 1..120: mol_type = other DNA

SEQ ID NO: 62740 - DNA, 120 bp, synthetic construct; identical to SEQ ID NO: 13513
  source 1..120: mol_type = other DNA

SEQ ID NO: 62741 - DNA, 120 bp, synthetic construct; identical to SEQ ID NO: 24191
  source 1..120: mol_type = other DNA

SEQ ID NO: 62742 - DNA, 120 bp, synthetic construct; identical to SEQ ID NO: 24192
  source 1..120: mol_type = other DNA

SEQ ID NO: 62743 - DNA, 120 bp, synthetic construct; identical to SEQ ID NO: 24193
  source 1..120: mol_type = other DNA

SEQ ID NO: 62744 - DNA, 120 bp, synthetic construct
  source 1..120: mol_type = other DNA
atgcatattttcttttcttttttttttttgagacagagttttgctctttttgcccaggctggagcgtaatggcgtgatctcagctcactgcaacctctgcctcccagattcaaacgattt

SEQ ID NO: 62745 - DNA, 120 bp, synthetic construct; identical to SEQ ID NO: 24194
  source 1..120: mol_type = other DNA

SEQ ID NO: 62746 - DNA, 120 bp, synthetic construct; identical to SEQ ID NO: 15471
  source 1..120: mol_type = other DNA

SEQ ID NO: 62747 - DNA, 120 bp, synthetic construct
  source 1..120: mol_type = other DNA
gcagtatggctaaatccatttactccaaaatgaaaagcaaaataaacgggagtcacatcaccagggagccacaaccccatccccgcctccttcctctgtcctatgctatcaataaataag

SEQ ID NO: 62748 - DNA, 120 bp, synthetic construct; identical to SEQ ID NO: 15472
  source 1..120: mol_type = other DNA

SEQ ID NO: 62749 - DNA, 120 bp, synthetic construct; identical to SEQ ID NO: 15473
  source 1..120: mol_type = other DNA

SEQ ID NO: 62750 - DNA, 120 bp, synthetic construct
  source 1..120: mol_type = other DNA
taatacctattcttcagccacattagttactctgacgtaggaatttacttcttttctttgaatggaaaacactttaaaaataataacaaccattattataaaccaatatatgtgagagta

SEQ ID NO: 62751 - DNA, 120 bp, synthetic construct
  source 1..120: mol_type = other DNA
atggcagcctgttccaaaccagccagaatagttttgtgcaaattagtgggtctttgtgtgtttgaattcccaccacctaagggcaaactcgatatgcatactaatgacctacaattatca

SEQ ID NO: 62752 - DNA, 120 bp, synthetic construct; identical to SEQ ID NO: 15474
  source 1..120: mol_type = other DNA

SEQ ID NO: 62753 - DNA, 120 bp, synthetic construct; identical to SEQ ID NO: 15475
  source 1..120: mol_type = other DNA

SEQ ID NO: 62754 - DNA, 120 bp, synthetic construct
  source 1..120: mol_type = other DNA
tagcagatggtggttggctccctctgcttttccgccagtctgtggcctacagtttaaatggtgggaagaaggacatgagatttgaggctggggaaggaggtatggggttctaggcaagag

SEQ ID NO: 62755 - DNA, 120 bp, synthetic construct
  source 1..120: mol_type = other DNA
gaacaacgagaaaaagagcgcactgcagttggagcagcaagtaaaggagctgcaggagaagctagacgaggtgaaggagatggtaacctccaccccatccaagaagggctgggaggcggg

SEQ ID NO: 62756 - DNA, 120 bp, synthetic construct
  source 1..120: mol_type = other DNA
atcagcaaagagggaggagtgcccgttgtcagccacccacagtgctctctatgtgaaagtggcttggaaattggctaccattgggtgcgaggaatgattagcagtgaggccaagtttggg

SEQ ID NO: 62757 - DNA, 120 bp, synthetic construct; identical to SEQ ID NO: 15476
  source 1..120: mol_type = other DNA

SEQ ID NO: 62758 - DNA, 120 bp, synthetic construct
  source 1..120: mol_type = other DNA
ttgaatacgctgtaaggagtattgcaggcggccagccagatccttggactcttctgtaatgagagaggttgagatggggcccaaaagactccccctaaagacctgtcaaagtgccaggtt

SEQ ID NO: 62759 - DNA, 120 bp, synthetic construct
  source 1..120: mol_type = other DNA
aggggccctgtatttctgccctgactcagtccctaatttgctttgagtctggacaagccacctgtcctccttgggcttgtgtttctggaggaggtagagcatcagagttctctgttagct

SEQ ID NO: 62760 - DNA, 120 bp, synthetic construct
  source 1..120: mol_type = other DNA
tgtgggatttgggctctttttttttttttttttttttttttttttgagacagagtctcactctgtcactcagactggagtggagtggtgcgatctcggctcactacaacctctgcctccc

SEQ ID NO: 62761 - DNA, 120 bp, synthetic construct
  source 1..120: mol_type = other DNA
gcaagagaaggtctaacttgccaccagcttgctgggtgaccacagaaaaatcacttcttctgctgggcctcagtttcctcctctgtaagatgatactggataagatcagtgtctttcaaa

SEQ ID NO: 62762 - DNA, 120 bp, synthetic construct; identical to SEQ ID NO: 15477
  source 1..120: mol_type = other DNA

SEQ ID NO: 62763 - DNA, 120 bp, synthetic construct
  source 1..120: mol_type = other DNA
caagcagcccagcctctgccctcgccaatcaccctgcggtgactttgggcggatgactactggggatacctgctccatattcagccctcacgtcctgccaccccaagcccaacctccctg

SEQ ID NO: 62764 - DNA, 120 bp, synthetic construct; identical to SEQ ID NO: 15478
  source 1..120: mol_type = other DNA

SEQ ID NO: 62765 - DNA, 120 bp, synthetic construct
  source 1..120: mol_type = other DNA
ctctcaggttttttaaaaagtgtcttcacaatgtaagtctcgggcacactagcagttctataataaaacaccaagtagatcagaatgtccaaacttactagagaagaaaagtggaatcac

SEQ ID NO: 62766 - DNA, 120 bp, synthetic construct
  source 1..120: mol_type = other DNA
ccacctcggcctcctaaagtgctgggattacaggcgtgagccacggccctggccttgaatcatttttatgtgcttattggccatttttattcttgtgggaagtgcctgtttctccattgc

SEQ ID NO: 62767 - DNA, 120 bp, synthetic construct
  source 1..120: mol_type = other DNA
ttctgttgatttgaaatgtccaaaaaaggcaagttgatagagacagaaatggtctgatttacctcaagaagtagggattcaagctcttagggtacatgtgatacatacattagaagaaat

SEQ ID NO: 62768 - DNA, 120 bp, synthetic construct; identical to SEQ ID NO: 15479
  source 1..120: mol_type = other DNA

SEQ ID NO: 62769 - DNA, 120 bp, synthetic construct; identical to SEQ ID NO: 15479
  source 1..120: mol_type = other DNA

SEQ ID NO: 62770 - DNA, 120 bp, synthetic construct
  source 1..120: mol_type = other DNA
ttgaaatgtccaaaaaaggcaagttgatagagacagaaatggtctgatttacctcaagaagtagggattcaagctcttagggtacatgtgatacatacattagaagaaataaggaaaaga

SEQ ID NO: 62771 - DNA, 120 bp, synthetic construct
  source 1..120: mol_type = other DNA
tgatcatagctaccacagcgtcgtactcctgagctgaagcagttttcatacatcagccttccaagtagctaggactacaggtgtgtgccaccacccccagctaatttttaagattttttg

SEQ ID NO: 62772 - DNA, 120 bp, synthetic construct
  source 1..120: mol_type = other DNA
gcagcagcagcagaacctgagaaccttttataagtgcaaattctcaggccccaccctggacatggtgaatcagaaactctggagtagggctcagcaatctgtgctgcagtcatccctcca

SEQ ID NO: 62773 - DNA, 120 bp, synthetic construct; identical to SEQ ID NO: 625
  source 1..120: mol_type = other DNA

SEQ ID NO: 62774 - DNA, 120 bp, synthetic construct; identical to SEQ ID NO: 626
  source 1..120: mol_type = other DNA

SEQ ID NO: 62775 - DNA, 120 bp, synthetic construct
  source 1..120: mol_type = other DNA
gatgtatgactctaaaccacacagcgtgtagttcatgcctatgtaatgtttacttttctacctctgcgtctggttttggtccccggcagctgctgattcatggcaaaaccccagagcttg

SEQ ID NO: 62776 - DNA, 120 bp, synthetic construct; identical to SEQ ID NO: 627
  source 1..120: mol_type = other DNA

SEQ ID NO: 62777 - DNA, 120 bp, synthetic construct
  source 1..120: mol_type = other DNA
aattaaaaaaaaacttacatgggaaatagttatgtatatggagaaagtataaaaacagcaaggagccgggcacagtggctcacacatgtaatcccagcagttcaggaggctgagacaagt

SEQ ID NO: 62778 - DNA, 120 bp, synthetic construct
  source 1..120: mol_type = other DNA
agtctgaatctggattctcttgaaaggacagtaacataaacccctagagagggagtctcaggaaggcccacccttctgccagcttgtgatttagaaaggtgccttcattcaacaaatatt

SEQ ID NO: 62779 - DNA, 120 bp, synthetic construct
  source 1..120: mol_type = other DNA
atagaggagtgagcctaaaggtcccttctgcaggatggagtgtcctgcccagaaggcagcatggtcatttctcactacttttgtgtatggttgttagaggcagcctggggctgagtcagc

SEQ ID NO: 62780 - DNA, 120 bp, synthetic construct; identical to SEQ ID NO: 15476
  source 1..120: mol_type = other DNA

SEQ ID NO: 62781 - DNA, 120 bp, synthetic construct; identical to SEQ ID NO: 62756
  source 1..120: mol_type = other DNA

SEQ ID NO: 62782 - DNA, 120 bp, synthetic construct
  source 1..120: mol_type = other DNA
ctggtgcccgcctcccagcccttcttggatggggtggaggttaccatctccttcacctcgtctagcttctcctgcagctcctttacttgctgctccaactgcagtgcgctctttttctcg

SEQ ID NO: 62783 - DNA, 120 bp, synthetic construct
  source 1..120: mol_type = other DNA
taggcaagagaggaagcctcttaggcctggagcaagggaccagggtcctgggcaggtgacagagccccacggtgccctcgctaccctattaatgggcccagaatctggaagccagccacc

SEQ ID NO: 62784 - DNA, 120 bp, synthetic construct
  source 1..120: mol_type = other DNA
agatcttggttcttaaaaggaaaaataaagaacagcagctcactcccctctggggagaggctggctcagggttacacagtcagggtggggacagaggtaggcccacaggaccttccttgt

SEQ ID NO: 62785 - DNA, 120 bp, synthetic construct
  source 1..120: mol_type = other DNA
agcctgatgacatcctccatctcctggtgccgcgtgtttggcactgccccctggctttcatatacggtgaaggactctcctgtgagaggacacagctcagacactagggtccctccgacg

SEQ ID NO: 62786 - DNA, 120 bp, synthetic construct; identical to SEQ ID NO: 62751
  source 1..120: mol_type = other DNA

SEQ ID NO: 62787 - DNA, 120 bp, synthetic construct; identical to SEQ ID NO: 62750
  source 1..120: mol_type = other DNA

SEQ ID NO: 62788 - DNA, 120 bp, synthetic construct
  source 1..120: mol_type = other DNA
acctttgaaataatttatcaatgtattaggtaaacccagtttcagaattataaagaaaaactgttagaccaaataaggtggctaattaacagtggtatgatttctagcccgagggtctaa

SEQ ID NO: 62789 - DNA, 120 bp, synthetic construct; identical to SEQ ID NO: 628
  source 1..120: mol_type = other DNA

SEQ ID NO: 62790 - DNA, 120 bp, synthetic construct; identical to SEQ ID NO: 629
  source 1..120: mol_type = other DNA

SEQ ID NO: 62791 - DNA, 120 bp, synthetic construct
  source 1..120: mol_type = other DNA
tttatggctgcatagtattccatggtgtatgtgtgccacattttcttaatccagtctatcattgttggacatttggattgggtccaagtctttgctattgtgaatagtgccgcaataaac

SEQ ID NO: 62792 - DNA, 120 bp, synthetic construct
  source 1..120: mol_type = other DNA
ggacgttggcgaggggctgcctggctcgccaggctcaggagtcagttacatcctcccacaagggccagctcacctggtcgccccaaagacctccctctgtgggtgggaccagagggccaa

SEQ ID NO: 62793 - DNA, 120 bp, synthetic construct
  source 1..120: mol_type = other DNA
tccccatgccatacctcttcctcctcctcctccctccgtcaatgaacagcatcccacgctctacacatctgatacaaaactgggtgtctcttcctgactcctcccttggttcacccaagt

SEQ ID NO: 62794 - DNA, 120 bp, synthetic construct; identical to SEQ ID NO: 14770
  source 1..120: mol_type = other DNA

SEQ ID NO: 62795 - DNA, 120 bp, synthetic construct; identical to SEQ ID NO: 14771
  source 1..120: mol_type = other DNA

SEQ ID NO: 62796 - DNA, 120 bp, synthetic construct
  source 1..120: mol_type = other DNA
agaaagaccaagaagaaaactaatagaaacatacatgtaaggaagaaacttttttttttgagacggagtttcgctctgtcaccaggcttgagtgcagtggcacgatctcagctcactgca

SEQ ID NO: 62797 - DNA, 120 bp, synthetic construct
  source 1..120: mol_type = other DNA
gtgtgtgcaaaccctggagatcatacagaacgacctcaccacaacttagcagatggtggttggctccctctgcttttccaccagtctgtggcctacagtttaaatggtgggaagaagggt

SEQ ID NO: 62798 - DNA, 120 bp, synthetic construct; identical to SEQ ID NO: 14772
  source 1..120: mol_type = other DNA

SEQ ID NO: 62799 - DNA, 120 bp, synthetic construct
  source 1..120: mol_type = other DNA
acttttaattcctggggtcccttccagcgccacggttctgtggttgtggggcgagggtagggggtcaatcaccaaagtggtcttttatgttcttcattcattcctttctctactgcctct

SEQ ID NO: 62800 - DNA, 120 bp, synthetic construct; identical to SEQ ID NO: 14773
  source 1..120: mol_type = other DNA

SEQ ID NO: 62801 - DNA, 120 bp, synthetic construct
  source 1..120: mol_type = other DNA
gttctgggacagtggtgccattctgggggcatgtctcttgctgtggatctctgcctacccctagtaagagctctgttttcctctttctataggaacagaaggcaagccaccaacatcagg

SEQ ID NO: 62802 - DNA, 120 bp, synthetic construct
  source 1..120: mol_type = other DNA
atccctagcagatggaggggtaggattcaaacccagaattcttagccagtacctggcagttcttccacaatcttaacaattaccctccaccaccccttgggccctctgtccccaggagcc

SEQ ID NO: 62803 - DNA, 120 bp, synthetic construct
  source 1..120: mol_type = other DNA
aagtctctctggagagtagaagcctgggagaaaaccaaaccaaacccattctcccattgccacccagagacactgtcaacgtgttgagctcatgggggaggtgtaggcttttcacactgt

SEQ ID NO: 62804 - DNA, 120 bp, synthetic construct; identical to SEQ ID NO: 14774
  source 1..120: mol_type = other DNA

SEQ ID NO: 62805 - DNA, 120 bp, synthetic construct; identical to SEQ ID NO: 14714
  source 1..120: mol_type = other DNA

SEQ ID NO: 62806 - DNA, 120 bp, synthetic construct
  source 1..120: mol_type = other DNA
cctgtagccaggcaaacttttactgtattacttcttgcttttcaatggatataaagcagagtcctggtaggcacattttgtatacctgcaaagatgcaaaactaaacagttccctcggtt

SEQ ID NO: 62807 - DNA, 120 bp, synthetic construct; identical to SEQ ID NO: 14775
  source 1..120: mol_type = other DNA

SEQ ID NO: 62808 - DNA, 120 bp, synthetic construct; identical to SEQ ID NO: 553
  source 1..120: mol_type = other DNA

SEQ ID NO: 62809 - DNA, 120 bp, synthetic construct; identical to SEQ ID NO: 14716
  source 1..120: mol_type = other DNA

SEQ ID NO: 62810 - DNA, 120 bp, synthetic construct
  source 1..120: mol_type = other DNA
ggggacccacgctctgagtcatgggttcccaggccttagtcagaactgcccctggtggcagtcccttccaaggggtaaggagcagggcctgtcgacttgctcctgacccacacactgaac

SEQ ID NO: 62811 - DNA, 120 bp, synthetic construct; identical to SEQ ID NO: 645
  source 1..120: mol_type = other DNA

SEQ ID NO: 62812 - DNA, 120 bp, synthetic construct
  source 1..120: mol_type = other DNA
atggcggtgctgtgcaggcagctgtgtggcctgacagtctctaccagtcctgctgtccctcggctgagaaacccatttctgaatgacagagaatgtgtcctctgctggctgtgttctcta

SEQ ID NO: 62813 - DNA, 120 bp, synthetic construct
  source 1..120: mol_type = other DNA
agatgggagcccccttgagggaaaagttgctttggtgagagtaagaaggccgtcagacctcctccaaacaaaccaactccaccaacctctggctcttaaataacatcatcatccagaaat

SEQ ID NO: 62814 - DNA, 120 bp, synthetic construct; identical to SEQ ID NO: 646
  source 1..120: mol_type = other DNA

SEQ ID NO: 62815 - DNA, 120 bp, synthetic construct
  source 1..120: mol_type = other DNA
agagtacttagttgaaacaaaaaggagttttagtagacagtattatactacatttgaaaatcaaggagcagtttatgcaacgtaaaacgtttacaaactgcagcacaatctactgttcgt

SEQ ID NO: 62816 - DNA, 120 bp, synthetic construct
  source 1..120: mol_type = other DNA
tatttgtgtttctaatttataatttaaatttatttgtaaaaagttaaatgagagtgggtgtttctctcatgttcactctggcatcttttagcatttttttaatttgataattataggacg

SEQ ID NO: 62817 - DNA, 120 bp, synthetic construct
  source 1..120: mol_type = other DNA
aaacaaaaaagcctccttagattcaaactggattccggcctcggttccactggtcataattcaactactttgcatctctaagtctctgtttctttaacttcaaaaggaagttagcctttt

SEQ ID NO: 62818 - DNA, 120 bp, synthetic construct; identical to SEQ ID NO: 647
  source 1..120: mol_type = other DNA

SEQ ID NO: 62819 - DNA, 120 bp, synthetic construct
  source 1..120: mol_type = other DNA
aggagctgtgcaccaaagggaggattttttttttttttttttgagaatccagaggcccttattctctgcttgctttctcagctgaacccctggccccacagcccccagcagggccatcta

SEQ ID NO: 62820 - DNA, 120 bp, synthetic construct
  source 1..120: mol_type = other DNA
tggtaagagtccagtggggtcccctgattacagctggtcaatcctggactccagtttcctcttggggccctgaagaaaggagctaggggcccctgatgccaagggcaaatggggagctgg

SEQ ID NO: 62821 - DNA, 120 bp, synthetic construct
  source 1..120: mol_type = other DNA
tcctgcctctccgtctgctaagaattgattagggattgattagcatatgatttagggcaagttgcttgaggtctttgggcctctcttttcacatctgtataatagaggtggtattttttg

SEQ ID NO: 62822 - DNA, 120 bp, synthetic construct; identical to SEQ ID NO: 648
  source 1..120: mol_type = other DNA

SEQ ID NO: 62823 - DNA, 120 bp, synthetic construct
  source 1..120: mol_type = other DNA
accccagcccctctgggctcccccaaccaaagcctagtcagtcagccccaccccttcagcaagcagcccagtccctgcccttgccaatcaccccagggtgactttgggcaggtgactcct

SEQ ID NO: 62824 - DNA, 120 bp, synthetic construct
  source 1..120: mol_type = other DNA
tagtagagacagggtttcatcatgttggccaggctggtctcgaactcctgacctcaggcaatccacccacctcggcctcccaaagtgatggcattacaggcgtgagccactgcacccggc

SEQ ID NO: 62825 - DNA, 120 bp, synthetic construct
  source 1..120: mol_type = other DNA
aaactttaatatcctgtttattgcaatttgaaaatatagccaatgattccacttttcttctccagtaagtttggacattctgatctacttggtgttttattacagaactgctagtgtgcc

SEQ ID NO: 62826 - DNA, 120 bp, synthetic construct
  source 1..120: mol_type = other DNA
aaaatccaaaatctgaaatgcttcaaaatccaaaactgtttgagtgccgacatgatgttcgaaggccagattcaaaggaaatgctcattggagcattttggatttcagattttcgaattc

SEQ ID NO: 62827 - DNA, 120 bp, synthetic construct
  source 1..120: mol_type = other DNA
ctacaggtgaaaccccatctgtataaaagatacaaaaattagccaaacgtggtagcccaaatcccagctacttgggagaccgatgtagaaggatcacttgagcccaggaggagaggttgc

SEQ ID NO: 62828 - DNA, 120 bp, synthetic construct; identical to SEQ ID NO: 2375
  source 1..120: mol_type = other DNA

SEQ ID NO: 62829 - DNA, 120 bp, synthetic construct; identical to SEQ ID NO: 14788
  source 1..120: mol_type = other DNA

SEQ ID NO: 62830 - DNA, 120 bp, synthetic construct; identical to SEQ ID NO: 14789
  source 1..120: mol_type = other DNA

SEQ ID NO: 62831 - DNA, 120 bp, synthetic construct; identical to SEQ ID NO: 14790
  source 1..120: mol_type = other DNA

SEQ ID NO: 62832 - DNA, 120 bp, synthetic construct; identical to SEQ ID NO: 14791
  source 1..120: mol_type = other DNA

SEQ ID NO: 62833 - DNA, 120 bp, synthetic construct; identical to SEQ ID NO: 14792
  source 1..120: mol_type = other DNA

SEQ ID NO: 62834 - DNA, 120 bp, synthetic construct
  source 1..120: mol_type = other DNA
gggcacatatacaatcttccatacgcagaagacagaaaacaagtgtgacaaaacattaactagtgaatccagttgaatagcatacagatgttcactgtatgattttatcaacttttctgt

SEQ ID NO: 62835 - DNA, 120 bp, synthetic construct
  source 1..120: mol_type = other DNA
gactataggcatgcaccaccatgcccagctaatttttgtatttttagtagagaggaagttttaccatcttggacaggctggtctcgaactcctgacctcaagtgatccgtctgccttggc

SEQ ID NO: 62836 - DNA, 120 bp, synthetic construct
  source 1..120: mol_type = other DNA
aaataaataaataaagtgaaatgacaaattacttactgggagaagatctttgtaaactcaatgacagattaaaggtttgtatccttagcctataaagaaatctttaaaattactcagaaa

SEQ ID NO: 62837 - DNA, 120 bp, synthetic construct
  source 1..120: mol_type = other DNA
ccaccctccagccagtgtgttttatttttatgagttcaataagaaaacgtgtggcaatcagagatttcatctaaaaaatatatctacaggtatcagttctcatccagcctgatctcatcc

SEQ ID NO: 62838 - DNA, 120 bp, synthetic construct
  source 1..120: mol_type = other DNA
acattagcgtttagtttttttaaaaaaaacaaacaaacaagaaacatgtctaatatctttaaaaatacaaagctttgagccaggcgtgatggctcatgcctgtaatcccagcactttggg

SEQ ID NO: 62839 - DNA, 120 bp, synthetic construct; identical to SEQ ID NO: 14760
  source 1..120: mol_type = other DNA

SEQ ID NO: 62840 - DNA, 120 bp, synthetic construct
  source 1..120: mol_type = other DNA
tcaaacctttacatcaatgtctcctcatggcagaaggcagcctttctgctaaatctgggaatttaacagaaagaggacaacccaagcctcatttcagagagaagtcttgtatacgcttat

SEQ ID NO: 62841 - DNA, 120 bp, synthetic construct; identical to SEQ ID NO: 14761
  source 1..120: mol_type = other DNA

SEQ ID NO: 62842 - DNA, 120 bp, synthetic construct; identical to SEQ ID NO: 14762
  source 1..120: mol_type = other DNA

SEQ ID NO: 62843 - DNA, 120 bp, synthetic construct; identical to SEQ ID NO: 14763
  source 1..120: mol_type = other DNA

SEQ ID NO: 62844 - DNA, 120 bp, synthetic construct; identical to SEQ ID NO: 525
  source 1..120: mol_type = other DNA

SEQ ID NO: 62845 - DNA, 120 bp, synthetic construct; identical to SEQ ID NO: 14764
  source 1..120: mol_type = other DNA

SEQ ID NO: 62846 - DNA, 120 bp, synthetic construct; identical to SEQ ID NO: 14765
  source 1..120: mol_type = other DNA

SEQ ID NO: 62847 - DNA, 120 bp, synthetic construct; identical to SEQ ID NO: 14766
  source 1..120: mol_type = other DNA

SEQ ID NO: 62848 - DNA, 120 bp, synthetic construct; identical to SEQ ID NO: 14711
  source 1..120: mol_type = other DNA

SEQ ID NO: 62849 - DNA, 120 bp, synthetic construct; identical to SEQ ID NO: 14710
  source 1..120: mol_type = other DNA

SEQ ID NO: 62850 - DNA, 120 bp, synthetic construct
  source 1..120: mol_type = other DNA
catgagcttctcatcctgatcctcccatccccaccctacttttctcccccagcttgctcaacaggtgaccttacaggctccctactctttgcagggaataagaaccagactgggggaact

SEQ ID NO: 62851 - DNA, 120 bp, synthetic construct
  source 1..120: mol_type = other DNA
tgggtagggaagggccctcgtccagtttgctgtagaaagatcagtctgccactgtatggcacatggatggcaggggcagagtgcaggtggagagaatagaaggtgggcagggcaggggag

SEQ ID NO: 62852 - DNA, 120 bp, synthetic construct
  source 1..120: mol_type = other DNA
gggcactctgcaggaggggcagcaggcagcaggtgcaccaggagcatgtttcacaaggtgcccaatatcgcatctgctcagataggcagcgagttggaaagtggatgcaataggcagggt

SEQ ID NO: 62853 - DNA, 120 bp, synthetic construct; identical to SEQ ID NO: 14767
  source 1..120: mol_type = other DNA

SEQ ID NO: 62854 - DNA, 120 bp, synthetic construct
  source 1..120: mol_type = other DNA
cgcctctggtcacccaccccgaggtgtggcgggcctggacagccagcttgactgagggccaggctggtgaagtcaaaactaccactcaggaagaagacctagcccttctccagacagagt

SEQ ID NO: 62855 - DNA, 120 bp, synthetic construct; identical to SEQ ID NO: 15605
  source 1..120: mol_type = other DNA

SEQ ID NO: 62856 - DNA, 120 bp, synthetic construct
  source 1..120: mol_type = other DNA
tcctggcagagctcagaaccaggctctcatgagctggggcaagtggggcctagggaacctctgggttgaggaccttgcaccccactctgcagctgccctgctgatttggctcatgcaacc

SEQ ID NO: 62857 - DNA, 120 bp, synthetic construct; identical to SEQ ID NO: 62826
  source 1..120: mol_type = other DNA

SEQ ID NO: 62858 - DNA, 120 bp, synthetic construct; identical to SEQ ID NO: 15606
  source 1..120: mol_type = other DNA

SEQ ID NO: 62859 - DNA, 120 bp, synthetic construct; identical to SEQ ID NO: 62824
  source 1..120: mol_type = other DNA

SEQ ID NO: 62860 - DNA, 120 bp, synthetic construct; identical to SEQ ID NO: 15607
  source 1..120: mol_type = other DNA

SEQ ID NO: 62861 - DNA, 120 bp, synthetic construct
  source 1..120: mol_type = other DNA
tctggtatacgcttggaaacctatgtgtctgtcatccccaagtacattaatgcattttctcaagagaatcaagggaaaatgatgcttcagaaagatgtcccgcatttatcctgtggcact

SEQ ID NO: 62862 - DNA, 120 bp, synthetic construct; identical to SEQ ID NO: 62821
  source 1..120: mol_type = other DNA

SEQ ID NO: 62863 - DNA, 120 bp, synthetic construct
  source 1..120: mol_type = other DNA
ggctagtgcttcccagagaggtgacaaccccagggcatgtgtggcaaggactagagcaggggtgtctggagaagagagagtcagcaaagagggcagtgcagaagacccatgctgcatgtt

SEQ ID NO: 62864 - DNA, 120 bp, synthetic construct
  source 1..120: mol_type = other DNA
gcctctcctcctgttcatgtagcctctcctcctgttcatgtagcctctcctcctgttcacgtagcctctcctcctgtctcctgttcaggagactcaacatctgattgttttccacctcag

SEQ ID NO: 62865 - DNA, 120 bp, synthetic construct
  source 1..120: mol_type = other DNA
ctttgtttccccacctgtaaaatggggcattgtagccttcacatgaaatggtacttctaaaggcatctgtgagccagagccctgctctgatggctgtgggagagaggggatatttttcta

SEQ ID NO: 62866 - DNA, 120 bp, synthetic construct
  source 1..120: mol_type = other DNA
agtctgtggcctacagtttaaatgctgggaaaaagggcgtgagatttgatgctagggaaggaggcatggggttctaggcaagggagacagtctcttaggcctggagcaaggggccagggg

SEQ ID NO: 62867 - DNA, 120 bp, synthetic construct
  source 1..120: mol_type = other DNA
gccatgcttttttaatgttagtacagcctgtatattcattacggaattcagataaaatttccttatgttctgctgttatgtttgatcgaatcctaatcacagtgagctcttcattagctc

SEQ ID NO: 62868 - DNA, 120 bp, synthetic construct
  source 1..120: mol_type = other DNA
aaaaggagttttagtagacagtattatactacatttgaaaatcaaggagcagtttatgcaacgtaaaatgtttacaaactgcagcgcaatctactgtttgtgactgtcaaagtgtcatga

SEQ ID NO: 62869 - DNA, 120 bp, synthetic construct; identical to SEQ ID NO: 650
  source 1..120: mol_type = other DNA

SEQ ID NO: 62870 - DNA, 120 bp, synthetic construct; identical to SEQ ID NO: 15608
  source 1..120: mol_type = other DNA

SEQ ID NO: 62871 - DNA, 120 bp, synthetic construct
  source 1..120: mol_type = other DNA
cacgtgtatatatgtatatatgtgtgtgtgtgtgtgtgtgtgtgtgtgtttgtgtatgtgtgtgtgagaatttatagctatagaacagggcaggggcataccacagaggaggcacaagtt

SEQ ID NO: 62872 - DNA, 120 bp, synthetic construct
  source 1..120: mol_type = other DNA
gggaaaagcagaagaggaaggctaacttttgtgttgtttagtagagagtgggtttcaccatggtggccaggctggtctcaaactcctgacctcaaatgacccatctctgcctcccaaagt

SEQ ID NO: 62873 - DNA, 120 bp, synthetic construct
  source 1..120: mol_type = other DNA
ctgctgtctgtctttgaatacttaagcattttttttagatgacagggatatatgtgcatttttattttaccaagtgttagaattttgactctgcttttgtgggctctgggttagctacgt

SEQ ID NO: 62874 - DNA, 120 bp, synthetic construct
  source 1..120: mol_type = other DNA
gcttgagataggggcacacattggtctcagtggaattatggagaaaaatagatacagaaagttatttctaaataagaccaaaacatccttttcttaagcagtgacaggtaaagaggttgt

SEQ ID NO: 62875 - DNA, 120 bp, synthetic construct
  source 1..120: mol_type = other DNA
ctagggtggggcccagaaatctctatggggtggtgcagcctgccccaggaccacaccaagaaacactgcaactggcccacacacatcccagtccacaaatatgtaggcaggcatcttatc

SEQ ID NO: 62876 - DNA, 120 bp, synthetic construct
  source 1..120: mol_type = other DNA
gcctctgaattgctgggggtccttgagaaagttgctatccctctctggtctcagtttcctcaggtgagaaatggggggccggccaaatggtctaaggttctgggaacctctaaatcagag

SEQ ID NO: 62877 - DNA, 120 bp, synthetic construct
  source 1..120: mol_type = other DNA
cacaagcgcaagtccctgcacctcacctttactcccagacatgggagggagatgacatgaagacccaaacgccacttagcaggagatctggggtatgcagaggggcagaacggaggctgt

SEQ ID NO: 62878 - DNA, 120 bp, synthetic construct
  source 1..120: mol_type = other DNA
cagtgggagacagctgcacaagggcccagcatgtctgtgtgtttacccaggggactgccgcatggcccatgccgagcagaaactgatggacgaccttctgaacaaaacctgttacaacaa

SEQ ID NO: 62879 - DNA, 120 bp, synthetic construct
  source 1..120: mol_type = other DNA
attagaacccctcccctggaagcagctctgaggggaacagtcacatgtagagagtgcagggcactgtgtccagccgggggaaggaggtcaccaagggggttgacccccctctggccaggt

SEQ ID NO: 62880 - DNA, 120 bp, synthetic construct
  source 1..120: mol_type = other DNA
gtgccattgcactagagcctgggcaacagcgcaatactccatctcaaaaacaacaaaaaaaggacagatgaaggttttcaactttcagtaaaggcagaggagcttgttacggattcgcct

SEQ ID NO: 62881 - DNA, 120 bp, synthetic construct
  source 1..120: mol_type = other DNA
atttttttttcaggtttgtgctcagactatattctaaacagtcacatggcggcttactcttctccaggccttgctgccggcttttacatgtttattgtctttgccttcttgtcatgtgct

SEQ ID NO: 62882 - DNA, 120 bp, synthetic construct; identical to SEQ ID NO: 524
  source 1..120: mol_type = other DNA

SEQ ID NO: 62883 - DNA, 120 bp, synthetic construct; identical to SEQ ID NO: 14772
  source 1..120: mol_type = other DNA

SEQ ID NO: 62884 - DNA, 120 bp, synthetic construct; identical to SEQ ID NO: 525
  source 1..120: mol_type = other DNA

SEQ ID NO: 62885 - DNA, 120 bp, synthetic construct
  source 1..120: mol_type = other DNA
ggggcccagagcgatcaggtaatattgttattgctattactgttagtactaccactgttcgaacctttcttgagtgcttcaccaggcactatgctaacaatcccatttaatcctcacaac

SEQ ID NO: 62886 - DNA, 120 bp, synthetic construct; identical to SEQ ID NO: 14762
  source 1..120: mol_type = other DNA

SEQ ID NO: 62887 - DNA, 120 bp, synthetic construct
  source 1..120: mol_type = other DNA
tgaagtttaaatgagatttgtcattgtgtttttatgttaatccctcgtccaggacctgctgtaaactctccttcttgggcttgcgtttcctgaggtagagttagagagtatcagaggttt

SEQ ID NO: 62888 - DNA, 120 bp, synthetic construct
  source 1..120: mol_type = other DNA
gatttataagcgtatacaagacttctctctgaaatgaggcttgggttgtcctctttctgttaaattcccagatttagcagaaaggctgccttctgccatgaggagacattgatgtaaagg

SEQ ID NO: 62889 - DNA, 120 bp, synthetic construct; identical to SEQ ID NO: 526
  source 1..120: mol_type = other DNA

SEQ ID NO: 62890 - DNA, 120 bp, synthetic construct; identical to SEQ ID NO: 62838
  source 1..120: mol_type = other DNA

SEQ ID NO: 62891 - DNA, 120 bp, synthetic construct
  source 1..120: mol_type = other DNA
ctgtctcaatatgaaacaatgacatgcaattaaaagacataaatctccttcctacttccaccctccagccagtgtgttttatttttatgagttcaataagaaaacgtgtggcaatcagag

SEQ ID NO: 62892 - DNA, 120 bp, synthetic construct; identical to SEQ ID NO: 527
  source 1..120: mol_type = other DNA

SEQ ID NO: 62893 - DNA, 120 bp, synthetic construct
  source 1..120: mol_type = other DNA
caatacacaaagctgccccatcttccctttatttttatttttatcttatttatcttatttatcttatttatttatttatttatttatttatgttgagatggagtctcactctgttgccca

SEQ ID NO: 62894 - DNA, 120 bp, synthetic construct
  source 1..120: mol_type = other DNA
gtgccctttttccctctgaatcatttcaaagtaagttggcagtatcagagcatttcactgttaagtactttcgcagatatcttctaggaaccaggacttctcctatataatcacaatacc

SEQ ID NO: 62895 - DNA, 120 bp, synthetic construct; identical to SEQ ID NO: 14890
  source 1..120: mol_type = other DNA

SEQ ID NO: 62896 - DNA, 120 bp, synthetic construct; identical to SEQ ID NO: 14891
  source 1..120: mol_type = other DNA

SEQ ID NO: 62897 - DNA, 120 bp, synthetic construct
  source 1..120: mol_type = other DNA
cagtaacacttgctcctctccgtcacacccgacatgttctcaaggcgtttccaaacccgtggtgtcatttgtttttcttttctttttttttttttttttgagatggagtttcgctcttgt

SEQ ID NO: 62898 - DNA, 120 bp, synthetic construct; identical to SEQ ID NO: 14892
  source 1..120: mol_type = other DNA

SEQ ID NO: 62899 - DNA, 120 bp, synthetic construct; identical to SEQ ID NO: 14893
  source 1..120: mol_type = other DNA

SEQ ID NO: 62900 - DNA, 120 bp, synthetic construct
  source 1..120: mol_type = other DNA
aaaggcaataatggaacttaaactcagtcttctgattctgagctctggggttttgccacaaatcgcagctgccaggggccaaaaccagaggcagaggtagaaaagtaaaaagtagacagg

SEQ ID NO: 62901 - DNA, 120 bp, synthetic construct; identical to SEQ ID NO: 15577
  source 1..120: mol_type = other DNA

SEQ ID NO: 62902 - DNA, 120 bp, synthetic construct; identical to SEQ ID NO: 15578
  source 1..120: mol_type = other DNA

SEQ ID NO: 62903 - DNA, 120 bp, synthetic construct
  source 1..120: mol_type = other DNA
gagagggattcatatcatggatagaaaaaaaaaaaaagaaagatcaaaaaaggcaatactggaacttaaactcagtcctctgactccacgctctggggttttgccatgaatcagcagctt

SEQ ID NO: 62904 - DNA, 120 bp, synthetic construct
  source 1..120: mol_type = other DNA
gcactctcatctcttggagtcagcaacaggtatctacggggagggccgtgcatcctctactaccctgcaggatctggaggtaagaggccctgggccgaggtgcagtgaccctgcaggcca

SEQ ID NO: 62905 - DNA, 120 bp, synthetic construct; identical to SEQ ID NO: 653
  source 1..120: mol_type = other DNA

SEQ ID NO: 62906 - DNA, 120 bp, synthetic construct; identical to SEQ ID NO: 15579
  source 1..120: mol_type = other DNA

SEQ ID NO: 62907 - DNA, 120 bp, synthetic construct; identical to SEQ ID NO: 62817
  source 1..120: mol_type = other DNA

SEQ ID NO: 62908 - DNA, 120 bp, synthetic construct; identical to SEQ ID NO: 15580
  source 1..120: mol_type = other DNA

SEQ ID NO: 62909 - DNA, 120 bp, synthetic construct
  source 1..120: mol_type = other DNA
aaagtcagcgttcatgttccctgttttaatcacatgactacatgtcccagtacacaaaagggcactggttggcgttctccttaatgtatttagtaaagatcagaagaaatcctttaagag

SEQ ID NO: 62910 - DNA, 120 bp, synthetic construct
  source 1..120: mol_type = other DNA
aatacctacacagagagtggtatttgagttaatatagtacatttatttttcagactgacattcagcttaaatatgccagtatgtgatttaatccacaggtacctgatgaacacattattg

SEQ ID NO: 62911 - DNA, 120 bp, synthetic construct; identical to SEQ ID NO: 15581
  source 1..120: mol_type = other DNA

SEQ ID NO: 62912 - DNA, 120 bp, synthetic construct
  source 1..120: mol_type = other DNA
gtccctccagagtgccggctgccccacaggctccttccaggctgagttcagggccctgtcccctagtggccagagccggcttcacaggataagagccagctgagctccagggactttcca

SEQ ID NO: 62913 - DNA, 120 bp, synthetic construct; identical to SEQ ID NO: 15582
  source 1..120: mol_type = other DNA

SEQ ID NO: 62914 - DNA, 120 bp, synthetic construct; identical to SEQ ID NO: 15583
  source 1..120: mol_type = other DNA

SEQ ID NO: 62915 - DNA, 120 bp, synthetic construct; identical to SEQ ID NO: 15584
  source 1..120: mol_type = other DNA

SEQ ID NO: 62916 - DNA, 120 bp, synthetic construct; identical to SEQ ID NO: 15585
  source 1..120: mol_type = other DNA

SEQ ID NO: 62917 - DNA, 120 bp, synthetic construct; identical to SEQ ID NO: 31489
  source 1..120: mol_type = other DNA

SEQ ID NO: 62918 - DNA, 120 bp, synthetic construct
  source 1..120: mol_type = other DNA
gtagtgtgatgcctccagctttgttcttttggcttaggattgacttggcatattctcactcataggtgggaattgaacaatgagatcacatggacacaggaaggggaatatcacactctg

SEQ ID NO: 62919 - DNA, 120 bp, synthetic construct
  source 1..120: mol_type = other DNA
aataacattagaaaagcacgggagcctattccaaaccagcgagaacagttttgtgcaaagagtgggtctttgtgtgtttgaactcccaccacgtaagggcaaactcgatatgcatgctaa

SEQ ID NO: 62920 - DNA, 120 bp, synthetic construct; identical to SEQ ID NO: 15097
  source 1..120: mol_type = other DNA

SEQ ID NO: 62921 - DNA, 120 bp, synthetic construct
  source 1..120: mol_type = other DNA
tagaaaaatactctcctctctcccacagccaccagagcaaagctctggctcacaggtgcctttggaagtaatatttcatgtgagggctacactgccccattttacaggtggggaaacaaa

SEQ ID NO: 62922 - DNA, 120 bp, synthetic construct; identical to SEQ ID NO: 15098
  source 1..120: mol_type = other DNA

SEQ ID NO: 62923 - DNA, 120 bp, synthetic construct; identical to SEQ ID NO: 15099
  source 1..120: mol_type = other DNA

SEQ ID NO: 62924 - DNA, 120 bp, synthetic construct
  source 1..120: mol_type = other DNA
gtgagacgagactggggcctctacatctgagtgtcccccaaacccagcagtcatgtcgccagcaaacaaagaaatcacgttacttcttccagctgatgttccacttgtttcttctgttgt

SEQ ID NO: 62925 - DNA, 120 bp, synthetic construct
  source 1..120: mol_type = other DNA
agcccaggattggcagcgtggaatcaggggaccccactggactcttaccaaagatttgatggtgtcattcagtcgactgatttttatggacctcgagttcaggactgctgcttgttcttg

SEQ ID NO: 62926 - DNA, 120 bp, synthetic construct
  source 1..120: mol_type = other DNA
cttttttttttgtattttttagtatttcaccgtgtttgcctggatggtctcgatctcctgaccttgtgatccacctgcctcggtctcccgaagtgtggggattacaggcgtgagccactg

SEQ ID NO: 62927 - DNA, 120 bp, synthetic construct
  source 1..120: mol_type = other DNA
aggaaactgatgcttcagaaagatgtcccacatttatcctgtggtactcaaagcaccccagcttgagataatatgaggaagattcaaactgtcaagttcagtctcccaagatctattcca

SEQ ID NO: 62928 - DNA, 120 bp, synthetic construct; identical to SEQ ID NO: 15100
  source 1..120: mol_type = other DNA

SEQ ID NO: 62929 - DNA, 120 bp, synthetic construct; identical to SEQ ID NO: 15101
  source 1..120: mol_type = other DNA

SEQ ID NO: 62930 - DNA, 120 bp, synthetic construct; identical to SEQ ID NO: 15102
  source 1..120: mol_type = other DNA

SEQ ID NO: 62931 - DNA, 120 bp, synthetic construct; identical to SEQ ID NO: 15103
  source 1..120: mol_type = other DNA

SEQ ID NO: 62932 - DNA, 120 bp, synthetic construct; identical to SEQ ID NO: 15104
  source 1..120: mol_type = other DNA

SEQ ID NO: 62933 - DNA, 120 bp, synthetic construct; identical to SEQ ID NO: 15105
  source 1..120: mol_type = other DNA

SEQ ID NO: 62934 - DNA, 120 bp, synthetic construct; identical to SEQ ID NO: 15106
  source 1..120: mol_type = other DNA

SEQ ID NO: 62935 - DNA, 120 bp, synthetic construct; identical to SEQ ID NO: 15107
  source 1..120: mol_type = other DNA

SEQ ID NO: 62936 - DNA, 120 bp, synthetic construct; identical to SEQ ID NO: 15108
  source 1..120: mol_type = other DNA

SEQ ID NO: 62937 - DNA, 120 bp, synthetic construct; identical to SEQ ID NO: 15109
  source 1..120: mol_type = other DNA

SEQ ID NO: 62938 - DNA, 120 bp, synthetic construct; identical to SEQ ID NO: 15110
  source 1..120: mol_type = other DNA

SEQ ID NO: 62939 - DNA, 120 bp, synthetic construct; identical to SEQ ID NO: 15111
  source 1..120: mol_type = other DNA

SEQ ID NO: 62940 - DNA, 120 bp, synthetic construct; identical to SEQ ID NO: 15112
  source 1..120: mol_type = other DNA

SEQ ID NO: 62941 - DNA, 120 bp, synthetic construct; identical to SEQ ID NO: 15113
  source 1..120: mol_type = other DNA

SEQ ID NO: 62942 - DNA, 120 bp, synthetic construct; identical to SEQ ID NO: 15114
  source 1..120: mol_type = other DNA

SEQ ID NO: 62943 - DNA, 120 bp, synthetic construct; identical to SEQ ID NO: 15115
  source 1..120: mol_type = other DNA

SEQ ID NO: 62944 - DNA, 120 bp, synthetic construct; identical to SEQ ID NO: 15116
  source 1..120: mol_type = other DNA

SEQ ID NO: 62945 - DNA, 120 bp, synthetic construct; identical to SEQ ID NO: 15117
  source 1..120: mol_type = other DNA

SEQ ID NO: 62946 - DNA, 120 bp, synthetic construct; identical to SEQ ID NO: 15118
  source 1..120: mol_type = other DNA

SEQ ID NO: 62947 - DNA, 120 bp, synthetic construct; identical to SEQ ID NO: 15119
  source 1..120: mol_type = other DNA

SEQ ID NO: 62948 - DNA, 120 bp, synthetic construct; identical to SEQ ID NO: 15120
  source 1..120: mol_type = other DNA

SEQ ID NO: 62949 - DNA, 120 bp, synthetic construct; identical to SEQ ID NO: 15121
  source 1..120: mol_type = other DNA

SEQ ID NO: 62950 - DNA, 120 bp, synthetic construct
  source 1..120: mol_type = other DNA
tctgagaagaattcatgaatgtgtgtgtgtgtgtgtgtgtgtgtgtgtgtgtgtctgtgtactgagagcttgggtttggaatggaaatcatattgactcctggattttcagcacttgtat

SEQ ID NO: 62951 - DNA, 120 bp, synthetic construct; identical to SEQ ID NO: 15122
  source 1..120: mol_type = other DNA

SEQ ID NO: 62952 - DNA, 120 bp, synthetic construct; identical to SEQ ID NO: 15123
  source 1..120: mol_type = other DNA

SEQ ID NO: 62953 - DNA, 120 bp, synthetic construct; identical to SEQ ID NO: 15124
  source 1..120: mol_type = other DNA

SEQ ID NO: 62954 - DNA, 120 bp, synthetic construct; identical to SEQ ID NO: 15125
  source 1..120: mol_type = other DNA

SEQ ID NO: 62955 - DNA, 120 bp, synthetic construct; identical to SEQ ID NO: 15126
  source 1..120: mol_type = other DNA

SEQ ID NO: 62956 - DNA, 120 bp, synthetic construct; identical to SEQ ID NO: 15127
  source 1..120: mol_type = other DNA

SEQ ID NO: 62957 - DNA, 120 bp, synthetic construct; identical to SEQ ID NO: 15128
  source 1..120: mol_type = other DNA

SEQ ID NO: 62958 - DNA, 120 bp, synthetic construct
  source 1..120: mol_type = other DNA
gtttctttctttctttctttctttcttttttttctgagacggagtttctctcttgttgcccaggctggagtgcatgttgctgtgcactttgagggcaggaactggctcctgctccagttt

SEQ ID NO: 62959 - DNA, 120 bp, synthetic construct; identical to SEQ ID NO: 15129
  source 1..120: mol_type = other DNA

SEQ ID NO: 62960 - DNA, 120 bp, synthetic construct; identical to SEQ ID NO: 15130
  source 1..120: mol_type = other DNA

SEQ ID NO: 62961 - DNA, 120 bp, synthetic construct; identical to SEQ ID NO: 15131
  source 1..120: mol_type = other DNA

SEQ ID NO: 62962 - DNA, 120 bp, synthetic construct; identical to SEQ ID NO: 15132
  source 1..120: mol_type = other DNA

SEQ ID NO: 62963 - DNA, 120 bp, synthetic construct
  source 1..120: mol_type = other DNA
tacagtcagggtgggggctcccctcaaccagtttggtccacctccatggaccctttggccactgagtcacacatgctggccccaccacctgctttgagaaccagagctgtaccctaccct

SEQ ID NO: 62964 - DNA, 120 bp, synthetic construct; identical to SEQ ID NO: 15133
  source 1..120: mol_type = other DNA

SEQ ID NO: 62965 - DNA, 120 bp, synthetic construct; identical to SEQ ID NO: 15134
  source 1..120: mol_type = other DNA

SEQ ID NO: 62966 - DNA, 120 bp, synthetic construct; identical to SEQ ID NO: 15135
  source 1..120: mol_type = other DNA

SEQ ID NO: 62967 - DNA, 120 bp, synthetic construct
  source 1..120: mol_type = other DNA
aacccagaggcgatcccaaactcagtagttgccgcccggcacggggacttgatgccggcgccaagccgggcagcggaacgcaccagcggcccgaccagcccggcgagacgcgagcgggcg

SEQ ID NO: 62968 - DNA, 120 bp, synthetic construct; identical to SEQ ID NO: 62919
  source 1..120: mol_type = other DNA

SEQ ID NO: 62969 - DNA, 120 bp, synthetic construct; identical to SEQ ID NO: 15097
  source 1..120: mol_type = other DNA

SEQ ID NO: 62970 - DNA, 120 bp, synthetic construct; identical to SEQ ID NO: 62921
  source 1..120: mol_type = other DNA

SEQ ID NO: 62971 - DNA, 120 bp, synthetic construct; identical to SEQ ID NO: 15098
  source 1..120: mol_type = other DNA

SEQ ID NO: 62972 - DNA, 120 bp, synthetic construct; identical to SEQ ID NO: 15099
  source 1..120: mol_type = other DNA

SEQ ID NO: 62973 - DNA, 120 bp, synthetic construct; identical to SEQ ID NO: 62924
  source 1..120: mol_type = other DNA

SEQ ID NO: 62974 - DNA, 120 bp, synthetic construct; identical to SEQ ID NO: 62925
  source 1..120: mol_type = other DNA

SEQ ID NO: 62975 - DNA, 120 bp, synthetic construct; identical to SEQ ID NO: 62926
  source 1..120: mol_type = other DNA

SEQ ID NO: 62976 - DNA, 120 bp, synthetic construct; identical to SEQ ID NO: 62927
  source 1..120: mol_type = other DNA

SEQ ID NO: 62977 - DNA, 120 bp, synthetic construct; identical to SEQ ID NO: 15100
  source 1..120: mol_type = other DNA

SEQ ID NO: 62978 - DNA, 120 bp, synthetic construct; identical to SEQ ID NO: 15101
  source 1..120: mol_type = other DNA

SEQ ID NO: 62979 - DNA, 120 bp, synthetic construct; identical to SEQ ID NO: 15102
  source 1..120: mol_type = other DNA

SEQ ID NO: 62980 - DNA, 120 bp, synthetic construct; identical to SEQ ID NO: 15103
  source 1..120: mol_type = other DNA

SEQ ID NO: 62981 - DNA, 120 bp, synthetic construct; identical to SEQ ID NO: 15104
  source 1..120: mol_type = other DNA

SEQ ID NO: 62982 - DNA, 120 bp, synthetic construct; identical to SEQ ID NO: 15105
  source 1..120: mol_type = other DNA

SEQ ID NO: 62983 - DNA, 120 bp, synthetic construct; identical to SEQ ID NO: 15106
  source 1..120: mol_type = other DNA

SEQ ID NO: 62984 - DNA, 120 bp, synthetic construct; identical to SEQ ID NO: 15107
  source 1..120: mol_type = other DNA

SEQ ID NO: 62985 - DNA, 120 bp, synthetic construct; identical to SEQ ID NO: 15108
  source 1..120: mol_type = other DNA

SEQ ID NO: 62986 - DNA, 120 bp, synthetic construct; identical to SEQ ID NO: 15109
  source 1..120: mol_type = other DNA

SEQ ID NO: 62987 - DNA, 120 bp, synthetic construct; identical to SEQ ID NO: 15110
  source 1..120: mol_type = other DNA

SEQ ID NO: 62988 - DNA, 120 bp, synthetic construct; identical to SEQ ID NO: 15111
  source 1..120: mol_type = other DNA

SEQ ID NO: 62989 - DNA, 120 bp, synthetic construct; identical to SEQ ID NO: 15112
  source 1..120: mol_type = other DNA

SEQ ID NO: 62990 - DNA, 120 bp, synthetic construct; identical to SEQ ID NO: 15113
  source 1..120: mol_type = other DNA

SEQ ID NO: 62991 - DNA, 120 bp, synthetic construct; identical to SEQ ID NO: 15114
  source 1..120: mol_type = other DNA

SEQ ID NO: 62992 - DNA, 120 bp, synthetic construct; identical to SEQ ID NO: 15115
  source 1..120: mol_type = other DNA

SEQ ID NO: 62993 - DNA, 120 bp, synthetic construct; identical to SEQ ID NO: 15116
  source 1..120: mol_type = other DNA

SEQ ID NO: 62994 - DNA, 120 bp, synthetic construct; identical to SEQ ID NO: 15117
  source 1..120: mol_type = other DNA

SEQ ID NO: 62995 - DNA, 120 bp, synthetic construct; identical to SEQ ID NO: 15118
  source 1..120: mol_type = other DNA

SEQ ID NO: 62996 - DNA, 120 bp, synthetic construct; identical to SEQ ID NO: 15119
  source 1..120: mol_type = other DNA

SEQ ID NO: 62997 - DNA, 120 bp, synthetic construct; identical to SEQ ID NO: 15120
  source 1..120: mol_type = other DNA

SEQ ID NO: 62998 - DNA, 120 bp, synthetic construct; identical to SEQ ID NO: 15121
  source 1..120: mol_type = other DNA

SEQ ID NO: 62999 - DNA, 120 bp, synthetic construct; identical to SEQ ID NO: 62950
  source 1..120: mol_type = other DNA

SEQ ID NO: 63000 - DNA, 120 bp, synthetic construct; identical to SEQ ID NO: 15122
  source 1..120: mol_type = other DNA

SEQ ID NO: 63001 - DNA, 120 bp, synthetic construct; identical to SEQ ID NO: 15123
  source 1..120: mol_type = other DNA

SEQ ID NO: 63002 - DNA, 120 bp, synthetic construct; identical to SEQ ID NO: 15124
  source 1..120: mol_type = other DNA

SEQ ID NO: 63003 - DNA, 120 bp, synthetic construct; identical to SEQ ID NO: 15125
  source 1..120: mol_type = other DNA

SEQ ID NO: 63004 - DNA, 120 bp, synthetic construct; identical to SEQ ID NO: 15126
  source 1..120: mol_type = other DNA

SEQ ID NO: 63005 - DNA, 120 bp, synthetic construct; identical to SEQ ID NO: 15127
  source 1..120: mol_type = other DNA

SEQ ID NO: 63006 - DNA, 120 bp, synthetic construct; identical to SEQ ID NO: 15128
  source 1..120: mol_type = other DNA

SEQ ID NO: 63007 - DNA, 120 bp, synthetic construct; identical to SEQ ID NO: 62958
  source 1..120: mol_type = other DNA

SEQ ID NO: 63008 - DNA, 120 bp, synthetic construct; identical to SEQ ID NO: 15129
  source 1..120: mol_type = other DNA

SEQ ID NO: 63009 - DNA, 120 bp, synthetic construct; identical to SEQ ID NO: 15130
  source 1..120: mol_type = other DNA

SEQ ID NO: 63010 - DNA, 120 bp, synthetic construct; identical to SEQ ID NO: 15131
  source 1..120: mol_type = other DNA

SEQ ID NO: 63011 - DNA, 120 bp, synthetic construct; identical to SEQ ID NO: 15136
  source 1..120: mol_type = other DNA

SEQ ID NO: 63012 - DNA, 120 bp, synthetic construct
  source 1..120: mol_type = other DNA
gacattgccaccaccacagccactgatagcacctgaggagaccctctgagccccctgcctgaggccaagcagcagagaaagccacatcctctaaggcccccatgggtgagtacccatgtg

SEQ ID NO: 63013 - DNA, 120 bp, synthetic construct; identical to SEQ ID NO: 15137
  source 1..120: mol_type = other DNA

SEQ ID NO: 63014 - DNA, 120 bp, synthetic construct; identical to SEQ ID NO: 15138
  source 1..120: mol_type = other DNA

SEQ ID NO: 63015 - DNA, 120 bp, synthetic construct; identical to SEQ ID NO: 15135
  source 1..120: mol_type = other DNA

SEQ ID NO: 63016 - DNA, 120 bp, synthetic construct; identical to SEQ ID NO: 14865
  source 1..120: mol_type = other DNA

SEQ ID NO: 63017 - DNA, 120 bp, synthetic construct; identical to SEQ ID NO: 14866
  source 1..120: mol_type = other DNA

SEQ ID NO: 63018 - DNA, 120 bp, synthetic construct
  source 1..120: mol_type = other DNA
tgggatgcatatagatggttaaaaaaattactacagtgaagcaaattaacgtatccttcaactcagatagttacccgttttctttttgtttggtggcaagaggagcttaaaatctcattt

SEQ ID NO: 63019 - DNA, 120 bp, synthetic construct; identical to SEQ ID NO: 14867
  source 1..120: mol_type = other DNA

SEQ ID NO: 63020 - DNA, 120 bp, synthetic construct
  source 1..120: mol_type = other DNA
ggaggtggagcttgcagtgagctcagatcgtgccactgcactcgagcctgggctacagagcgagactccttctcaaaataaataaataaataaataaaacttctatttctttcactttct

SEQ ID NO: 63021 - DNA, 120 bp, synthetic construct; identical to SEQ ID NO: 14786
  source 1..120: mol_type = other DNA

SEQ ID NO: 63022 - DNA, 120 bp, synthetic construct; identical to SEQ ID NO: 14875
  source 1..120: mol_type = other DNA

SEQ ID NO: 63023 - DNA, 120 bp, synthetic construct; identical to SEQ ID NO: 14787
  source 1..120: mol_type = other DNA

SEQ ID NO: 63024 - DNA, 120 bp, synthetic construct
  source 1..120: mol_type = other DNA
tctagtttccccttggggccctgaagaaaggggacggcggcccctggtgccaagggcgaatagggagctggggcgcccaggcctcacctggagggaccccggagcatgcagcatggctct

SEQ ID NO: 63025 - DNA, 120 bp, synthetic construct
  source 1..120: mol_type = other DNA
agtttccctttctgtatgttcaatctctggatttgaacctttgggagaaaagccaagcaagtgctgaaagagaaggaaagaaacattctccggaggacaggagaaaactgcacaccgtcc

SEQ ID NO: 63026 - DNA, 120 bp, synthetic construct
  source 1..120: mol_type = other DNA
agcaatattatctgatctctctgggcctctgttagccagctataaattcgatctctttccctgtcccttccaactttactgagttctttaaaaaccaaaccacgggcttggaaatgcctt

SEQ ID NO: 63027 - DNA, 120 bp, synthetic construct
  source 1..120: mol_type = other DNA
ttcttttcttttctttttttttttttggaatccagaggctcttattgtctgcttcctttctcagctgaacctctgcccccggagcccccagcagtgccctctgaggcggagctgcagcac

SEQ ID NO: 63028 - DNA, 120 bp, synthetic construct
  source 1..120: mol_type = other DNA
ctggccgacatggtaaaacctcatctctactaaaattacaaaaacaaaaaacaaaaaaagaaagaaaaattagtggggcatggtggtggcgcatgcctgtaatcccacctactcaggagg

SEQ ID NO: 63029 - DNA, 120 bp, synthetic construct
  source 1..120: mol_type = other DNA
gtctggaagctgcgagccagcagaaacagcagctaacggcccagttgagcctcatggctctccctggggaaggtacgggagaccgctcagaggaagaggagagagccccaggaggaaggg

SEQ ID NO: 63030 - DNA, 120 bp, synthetic construct; identical to SEQ ID NO: 14868
  source 1..120: mol_type = other DNA

SEQ ID NO: 63031 - DNA, 120 bp, synthetic construct
  source 1..120: mol_type = other DNA
aacttaaactataaattagaaacacaaataatcatgagtagctctaacattcaaatgaagtaaatgaattgtgtaggagattaaccccataactttgtttcgtttttaaaaatttcttga

SEQ ID NO: 63032 - DNA, 120 bp, synthetic construct
  source 1..120: mol_type = other DNA
aagaataggcagagtggtctagatggtaaaatcaatcttcaagcctcaaagaagctccatgaacagaggaatgccaggtgtcacacagctttccttcactctaattcattcttgactaga

SEQ ID NO: 63033 - DNA, 120 bp, synthetic construct
  source 1..120: mol_type = other DNA
tgtcgtatatttaagaaaaagctaaaaagaatggaaatcgcatgactataacttaagtctttcttcaaagtgcatgcagtcttttgcgatacctcattcagccaagtattggtattcttc

SEQ ID NO: 63034 - DNA, 120 bp, synthetic construct; identical to SEQ ID NO: 14869
  source 1..120: mol_type = other DNA

SEQ ID NO: 63035 - DNA, 120 bp, synthetic construct
  source 1..120: mol_type = other DNA
aggttgcagtgagcagagattgcaccactgcactccagcttaggcaacagaccgagactctgtcaaaaaataaaaacaaaacaaaacaccaccaccaacaacaaaacagtaataaagaga

SEQ ID NO: 63036 - DNA, 120 bp, synthetic construct; identical to SEQ ID NO: 14870
  source 1..120: mol_type = other DNA

SEQ ID NO: 63037 - DNA, 120 bp, synthetic construct
  source 1..120: mol_type = other DNA
ccaggctggtcttgaactcctgacctcaggtgatccacctgcctcggtctcccaaagtgctgagactacaggcgtgagccaccacacctggccacagccagttttgtttcatttatattc

SEQ ID NO: 63038 - DNA, 120 bp, synthetic construct
  source 1..120: mol_type = other DNA
gcaggactgtgtctcaggaaaagggaaaggaaaaaaagaataataaaaagaagtatataaaattgctaaatccaggaacagcttcacagtatattgagagaaatagaggcaaaggttagc

SEQ ID NO: 63039 - DNA, 120 bp, synthetic construct
  source 1..120: mol_type = other DNA
gagcctaggagttacacgccggcctgggcaacatggtgaaactcagtctctctctctctctctttttttttttttgagagggagtttcactcttgttgcccaggctggagtgcagtggca

SEQ ID NO: 63040 - DNA, 120 bp, synthetic construct
  source 1..120: mol_type = other DNA
cccgagtggctgggattgcaagcgtgagccaccatgccctgctaattttttttttttttttggtagagatggggtttctccatgttactcaggctggcctcaatctgacctcaggttatc

SEQ ID NO: 63041 - DNA, 120 bp, synthetic construct; identical to SEQ ID NO: 14871
  source 1..120: mol_type = other DNA

SEQ ID NO: 63042 - DNA, 120 bp, synthetic construct
  source 1..120: mol_type = other DNA
agcccagaaatcacgccacttaccaaatatgctttgtcttccaacatcagagtgtctggtagaaggtgactgttcttggaatttaaaaaatctgaacaggacaagacaagaatctggaca

SEQ ID NO: 63043 - DNA, 120 bp, synthetic construct
  source 1..120: mol_type = other DNA
tgagccactgctcctggctaagatcccatctctatttaaataaaaaaagaaaattcagaatctatggaacacagaacaccaaaggccagttatttacctctctgaggtaatctgtgtaaa

SEQ ID NO: 63044 - DNA, 120 bp, synthetic construct
  source 1..120: mol_type = other DNA
attagggtagcaggacaagacctctgtctaacgaggaaagacaaacagaccctttgccaccttgaccagagctgagtccttaaatttctggaagatattgttatttaagagccagaggct

SEQ ID NO: 63045 - DNA, 120 bp, synthetic construct
  source 1..120: mol_type = other DNA
gtattggattaaatctgataggttttccagaaatgaacaaaaatcagctctaaaaccaaagctgatttttagaaaatttgaaaatgtaaatcagccctatccatactatagtttctctaa

SEQ ID NO: 63046 - DNA, 120 bp, synthetic construct; identical to SEQ ID NO: 14872
  source 1..120: mol_type = other DNA

SEQ ID NO: 63047 - DNA, 120 bp, synthetic construct
  source 1..120: mol_type = other DNA
tggtttgccccaagtgtgcactatttaatactttgtaatatgccaccaagagtactgacatttagagttgtttaaaggccgagaactggaaacagcctttccctcattttctgtgtattg

SEQ ID NO: 63048 - DNA, 120 bp, synthetic construct
  source 1..120: mol_type = other DNA
aagtttatcaccctataacaaagccagggggcagtgccaaagatgcagcaccgggaggaggacaccatcaggctggccctggacagggaggagatgaaggtagagtgtgcaacatctctg

SEQ ID NO: 63049 - DNA, 120 bp, synthetic construct; identical to SEQ ID NO: 558
  source 1..120: mol_type = other DNA

SEQ ID NO: 63050 - DNA, 120 bp, synthetic construct
  source 1..120: mol_type = other DNA
gaaagcaaggcagtcacttaggcctgaagtaaggggccaggggcctgggcaggcgacagagccccacagtgccctcgctaccctattaatgggcccagaatctgcaaaccagccaccacg

SEQ ID NO: 63051 - DNA, 120 bp, synthetic construct
  source 1..120: mol_type = other DNA
gatggggtggaggttaccgtctccttcaccttgcctagcttctcctgcagctcctttacttgctgctccaactgtagtacgctcttgttctcattgttctggacagagagaagcaatcag

SEQ ID NO: 63052 - DNA, 120 bp, synthetic construct
  source 1..120: mol_type = other DNA
ctggaggctggacatgctaccatctccctctctgcccccacctccacaaagcccagtcccaggaccacctctggctctactattcccattttacaggtgcccagaaagatccagtgacct

SEQ ID NO: 63053 - DNA, 120 bp, synthetic construct
  source 1..120: mol_type = other DNA
ggaaacgtgtgtgtgtgtgtacatattatgataatatacataaaatatgtttgcaagtgttcataaaaactcaggagagagcaacagggtggctgggagatacttcccttctgtaccttc

SEQ ID NO: 63054 - DNA, 120 bp, synthetic construct
  source 1..120: mol_type = other DNA
atcagctggaagaagtaacatgatttctttgtttgctcgcgacatgactgctcggtttgggggacactcagatgtagaggccccgagtctcgtctcacccactcccagcctggggaagaa

SEQ ID NO: 63055 - DNA, 120 bp, synthetic construct; identical to SEQ ID NO: 14873
  source 1..120: mol_type = other DNA

SEQ ID NO: 63056 - DNA, 120 bp, synthetic construct; identical to SEQ ID NO: 14874
  source 1..120: mol_type = other DNA

SEQ ID NO: 63057 - DNA, 120 bp, synthetic construct; identical to SEQ ID NO: 14875
  source 1..120: mol_type = other DNA

SEQ ID NO: 63058 - DNA, 120 bp, synthetic construct; identical to SEQ ID NO: 14786
  source 1..120: mol_type = other DNA

SEQ ID NO: 63059 - DNA, 120 bp, synthetic construct
  source 1..120: mol_type = other DNA
atagggcagaagttggtgggcttggaggggagaggaagatcagaatgaggtccaaaatgtgtcttagtgaaatcccaggaggagatattaaaattatattagaaagtgaaagaaatagaa

SEQ ID NO: 63060 - DNA, 120 bp, synthetic construct; identical to SEQ ID NO: 14867
  source 1..120: mol_type = other DNA

SEQ ID NO: 63061 - DNA, 120 bp, synthetic construct; identical to SEQ ID NO: 63018
  source 1..120: mol_type = other DNA

SEQ ID NO: 63062 - DNA, 120 bp, synthetic construct
  source 1..120: mol_type = other DNA
cagagggattaagtatcttactcaagatcttcaagtgtttggtttgaacccaatcttttcactctgcagaactcagagtcactcttatttggaaactttttaactgatgtggatcctcta

SEQ ID NO: 63063 - DNA, 120 bp, synthetic construct; identical to SEQ ID NO: 14865
  source 1..120: mol_type = other DNA

SEQ ID NO: 63064 - DNA, 120 bp, synthetic construct
  source 1..120: mol_type = other DNA
gatgtgttccactatccagtatagtagccaccagccactgtggctattgagtgcttgaagaacagctagtctgaattgagatgatcaacttatagaaaagaatactatgggcaccctgta

SEQ ID NO: 63065 - DNA, 120 bp, synthetic construct; identical to SEQ ID NO: 15063
  source 1..120: mol_type = other DNA

SEQ ID NO: 63066 - DNA, 120 bp, synthetic construct
  source 1..120: mol_type = other DNA
ccagaaaaccaagtcttgaaagaaggacttcatgtcttatccatggacacgccatggttccagaatgtgttgtcagttgataagataggcttgatttgttactggtcttaatgagggctt

SEQ ID NO: 63067 - DNA, 120 bp, synthetic construct; identical to SEQ ID NO: 568
  source 1..120: mol_type = other DNA

SEQ ID NO: 63068 - DNA, 120 bp, synthetic construct; identical to SEQ ID NO: 569
  source 1..120: mol_type = other DNA

SEQ ID NO: 63069 - DNA, 120 bp, synthetic construct
  source 1..120: mol_type = other DNA
tggggctctcaaagtcctggaattacaggcatgagccactgcaccctgcccaaaaagctttgtgtttttacagatattagacatgtttcttgtttaagaaaaaaaatcttaacgaaaacg

SEQ ID NO: 63070 - DNA, 120 bp, synthetic construct; identical to SEQ ID NO: 570
  source 1..120: mol_type = other DNA

SEQ ID NO: 63071 - DNA, 120 bp, synthetic construct
  source 1..120: mol_type = other DNA
cagccctctctctgaaatgaggcttgggttgtcctctttctgataaattctgatttaagagaaaggctgccttctgccatgaggacacattgatataagagtttgagaggtactggtgca

SEQ ID NO: 63072 - DNA, 120 bp, synthetic construct
  source 1..120: mol_type = other DNA
caaggcaggcggatcatgaggtcaggcgatcgagaccatcctggttaacacggtgaaaccctgtctctactaaaaatacaaaaacattagccaagcgtggtggcgtgtgcctgtagtccc

SEQ ID NO: 63073 - DNA, 120 bp, synthetic construct; identical to SEQ ID NO: 14964
  source 1..120: mol_type = other DNA

SEQ ID NO: 63074 - DNA, 120 bp, synthetic construct
  source 1..120: mol_type = other DNA
gtttcctcgcaacatgactgctgggtttggggggcactcagacatacaggccccagtctcgtctcacccactcccagcctggggatgaaggctcacccttcagattccaccccatcccca

SEQ ID NO: 63075 - DNA, 120 bp, synthetic construct
  source 1..120: mol_type = other DNA
ttgggtacttctactgtgaaggtacagaagagtacctttagtatgttaccatttctgtagaaagaggaaacgtgtgtgcgtgtgtgtgtgtgtgtgtgtgtgtgtgcatactgtgataat

SEQ ID NO: 63076 - DNA, 120 bp, synthetic construct
  source 1..120: mol_type = other DNA
ttcaaggagtcatttcaacaagtccaattagaaagagatgagtattctgaacatctaaaaggagagagggcccggtggcagcagaggatgagaaaaatgtcgcaggaggtgagatctgac

SEQ ID NO: 63077 - DNA, 120 bp, synthetic construct
  source 1..120: mol_type = other DNA
cttcggaagcaggaggagaggattcaggagcagcacaagagccttcagcagctggccaagccacagagcgtcttcaaggagccggtgcgttgcccaaactggggagcttgccctcctccc

SEQ ID NO: 63078 - DNA, 120 bp, synthetic construct
  source 1..120: mol_type = other DNA
cctcagcacctctgtaaggaaaatgctaacttccttttgaagttaaagaaacagagacttagagatgcgaagtacttgaatggtgaccagtggaactgaggctggaatccagttttaatc

SEQ ID NO: 63079 - DNA, 120 bp, synthetic construct; identical to SEQ ID NO: 14961
  source 1..120: mol_type = other DNA

SEQ ID NO: 63080 - DNA, 120 bp, synthetic construct; identical to SEQ ID NO: 14912
  source 1..120: mol_type = other DNA

SEQ ID NO: 63081 - DNA, 120 bp, synthetic construct
  source 1..120: mol_type = other DNA
gtatgtccaggatagagtgtgtttcatctgttccggtgccaggaattagcagtgtattatggtggttcccttaggatttgtatgtgctctgggctcatgaagatactgcatcatgagctg

SEQ ID NO: 63082 - DNA, 120 bp, synthetic construct
  source 1..120: mol_type = other DNA
tgttgctctcctgttaatgtcatatttatagaagtatcatgaggatgccaaatgctaaaaatggagatgatctagtaactagaaatccccaccgcagggagcacacacacctatctccct

SEQ ID NO: 63083 - DNA, 120 bp, synthetic construct; identical to SEQ ID NO: 595
  source 1..120: mol_type = other DNA

SEQ ID NO: 63084 - DNA, 120 bp, synthetic construct
  source 1..120: mol_type = other DNA
tcattgagaatcataaaaatgcagattctgattcagtaggtctagggtggggcctgagttacttcttttttttttttagacggagtcttgctctgtcgcccaggctggagtgcagtggcg

SEQ ID NO: 63085 - DNA, 120 bp, synthetic construct
  source 1..120: mol_type = other DNA
tccagattttccacttcttcagttagtttttgtgactgtagaatcttaaaaaaaaaaatgaaaactttggccgggtgcaatggctcatgcctgtaatcccagcactttgggaggccgagg

SEQ ID NO: 63086 - DNA, 120 bp, synthetic construct; identical to SEQ ID NO: 63069
  source 1..120: mol_type = other DNA

SEQ ID NO: 63087 - DNA, 120 bp, synthetic construct
  source 1..120: mol_type = other DNA
agggcccagtaatggagcgggaagccccaggactcacccacccaaagtcaccctggggtgattggcgagggcaaggactgggctgcttgctgaaggggtggggctgactgacaaaacttt

SEQ ID NO: 63088 - DNA, 120 bp, synthetic construct; identical to SEQ ID NO: 63071
  source 1..120: mol_type = other DNA

SEQ ID NO: 63089 - DNA, 120 bp, synthetic construct
  source 1..120: mol_type = other DNA
tttgaatcctgcctctccatctgctctgctagggatatgatttagggcaagttgctagacctcatcgggcctctcttttcacatctgtataatagaggtgatattgtttcacttccattt

SEQ ID NO: 63090 - DNA, 120 bp, synthetic construct
  source 1..120: mol_type = other DNA
ggaaaagaacagacaagagcccttggccctgagctttccattctagggggcctttaaatctcagactctcagagctaacagagacctttgatactcactacctcctctggaaacacgagc

SEQ ID NO: 63091 - DNA, 120 bp, synthetic construct
  source 1..120: mol_type = other DNA
ttcctacaggaaaagaaagcaaacaacaagaaacagaaagccaaaagggtgctagaggtgagtggagggtgtgcagtttcctcctgtcctccggagaaggtttctttccttctctttcag

SEQ ID NO: 63092 - DNA, 120 bp, synthetic construct
  source 1..120: mol_type = other DNA
ctgagttttggactatgcaaatgttatcatcctttcaaaaagtgaacaaaagattaattttccccttcctatctgtgcccccatccccagcaagaaaaacgggcttagagaattggatag

SEQ ID NO: 63093 - DNA, 120 bp, synthetic construct
  source 1..120: mol_type = other DNA
atctgtaaaatgggaatagtagagccagaggtggtcatgggtctgggctttgtggaggtgggggcagagagggagagggcagcctgtccagccaccagcccctctctccaaggccctttc

SEQ ID NO: 63094 - DNA, 120 bp, synthetic construct; identical to SEQ ID NO: 571
  source 1..120: mol_type = other DNA

SEQ ID NO: 63095 - DNA, 120 bp, synthetic construct
  source 1..120: mol_type = other DNA
aaccagctgcagcagcaggaagcttggggcaaagcggtggctgagatggcctgccaaaagttgcaggagacccaggggagggagctgctgaggatggggctgtgagggggacgacctggc

SEQ ID NO: 63096 - DNA, 120 bp, synthetic construct
  source 1..120: mol_type = other DNA
ccagtggtcagacaccatttcacctgtggccaacaggtgcactctctgaggccccaagggaaggggttgcgctccacctctctgccccatttcttctgtgtatgcccctagaagaatgct

SEQ ID NO: 63097 - DNA, 120 bp, synthetic construct; identical to SEQ ID NO: 563
  source 1..120: mol_type = other DNA

SEQ ID NO: 63098 - DNA, 120 bp, synthetic construct; identical to SEQ ID NO: 63081
  source 1..120: mol_type = other DNA

SEQ ID NO: 63099 - DNA, 120 bp, synthetic construct
  source 1..120: mol_type = other DNA
aaatcataacttgatgatgcttgggaaagactcaacagttaaaacttcatgaagttctaatgtctgtgttccaaaacacatcacattattaggatgtagggagatatgtatgtgtgctcc

SEQ ID NO: 63100 - DNA, 120 bp, synthetic construct
  source 1..120: mol_type = other DNA
aatgttagagttcatgagaaacatagaattttaaactgtgagttccactgaatacattttaatgtctgtaggaagaatcaaaacacctatttaaagatggcaatatataataatcatttt

SEQ ID NO: 63101 - DNA, 120 bp, synthetic construct
  source 1..120: mol_type = other DNA
ccccactttctggcctcagctacctctctgaataagaagatgggagcccccctgagggaaaagttgctatggtgagagtaagggggacatcaggcctcctccaaacaaaccaactccacc

SEQ ID NO: 63102 - DNA, 120 bp, synthetic construct
  source 1..120: mol_type = other DNA
ttttcactgctcccaacagcaccctagaaatggcttggccttttccctcccctgagttccaaaaagaacacagccagcagaggacacattccctgacatacgagggactggaagactggt

SEQ ID NO: 63103 - DNA, 120 bp, synthetic construct
  source 1..120: mol_type = other DNA
caatgagaacacatggacacaggaaggggaacatcacactctggggactgttgtggggtggggggaggggggagggatagcattgggagatatacccaatgctagatgacgatttagtgg

SEQ ID NO: 63104 - DNA, 120 bp, synthetic construct
  source 1..120: mol_type = other DNA
ctcccagcctgggagtgctgagagccaaatccactgcagagcaggggtgatagtcagagtcccacctcctctatctgtcggcaatgcagtggtgagataggataaaaccttgagagtccc

SEQ ID NO: 63105 - DNA, 120 bp, synthetic construct; identical to SEQ ID NO: 567
  source 1..120: mol_type = other DNA

SEQ ID NO: 63106 - DNA, 120 bp, synthetic construct; identical to SEQ ID NO: 14915
  source 1..120: mol_type = other DNA

SEQ ID NO: 63107 - DNA, 120 bp, synthetic construct; identical to SEQ ID NO: 14914
  source 1..120: mol_type = other DNA

SEQ ID NO: 63108 - DNA, 120 bp, synthetic construct; identical to SEQ ID NO: 14913
  source 1..120: mol_type = other DNA

SEQ ID NO: 63109 - DNA, 120 bp, synthetic construct
  source 1..120: mol_type = other DNA
gagccggcttcacaggacaagagccagctaagttccaggggctttccaggaaaagtgtcccttggaaagggtatggccttttcacccctccaaacagcaccctagaaatggcttggcctt

SEQ ID NO: 63110 - DNA, 120 bp, synthetic construct
  source 1..120: mol_type = other DNA
ttccccattagacagaggtcttgtcctgctaccctcattgtaaagggctgcctgggaaggggtggtagggacatggtggcggtggagaccccagccccacttctccaggctttgctgaca

SEQ ID NO: 63111 - DNA, 120 bp, synthetic construct; identical to SEQ ID NO: 63100
  source 1..120: mol_type = other DNA

SEQ ID NO: 63112 - DNA, 120 bp, synthetic construct; identical to SEQ ID NO: 63082
  source 1..120: mol_type = other DNA

SEQ ID NO: 63113 - DNA, 120 bp, synthetic construct
  source 1..120: mol_type = other DNA
aggttcccatcattgactgtggatgtggaaatcctttcctagcttagagcatttgtatctacaatacattttaaagtcagagttcatgttacctgttttaatcacatgactacatgtccc

SEQ ID NO: 63114 - DNA, 120 bp, synthetic construct; identical to SEQ ID NO: 563
  source 1..120: mol_type = other DNA

SEQ ID NO: 63115 - DNA, 120 bp, synthetic construct
  source 1..120: mol_type = other DNA
cttctaggggcatacacagaacaaatggggcagagaggtggagcgcagccccttcccttgggcccccagagactgcacatgttggccacaggtgaaatggtgtctgaccactggctctca

SEQ ID NO: 63116 - DNA, 120 bp, synthetic construct
  source 1..120: mol_type = other DNA
ggggcctgggcagctgacagagccccacagtgccctcgctaccctattaatgggcccagaatctggaaaccagccaccacatgccctcacacccagggtcttcctgcaggtggagctgaa

SEQ ID NO: 63117 - DNA, 120 bp, synthetic construct
  source 1..120: mol_type = other DNA
gggtggaggtttccgtctccttcacctcgccaagcttctcctgtagctcctttacttgctgctccaactgcagtgtgctcttgttctcattgttctggacagagagaagcaatcagcagc

SEQ ID NO: 63118 - DNA, 120 bp, synthetic construct
  source 1..120: mol_type = other DNA
gtccagcctccagcccctctctccaaggccctttccccttgtgctttgggcagatttgcacattaaagaaagagaagcagcaagatatgcgtcgggtagagaagctggagaggagcttgt

SEQ ID NO: 63119 - DNA, 120 bp, synthetic construct
  source 1..120: mol_type = other DNA
ggggtgggggcacggttaggaaggggaaaattaatcttttgttcactttttgaaaagatgatacattcacatagtccaaaactcggaaggtatcaaagggaagtatctcccagccaccct

SEQ ID NO: 63120 - DNA, 120 bp, synthetic construct
  source 1..120: mol_type = other DNA
tcctcctgtcctccggagaaggtttctttccttctctttcagcacttgcttggcttttctcccaaaggttcaaatccagacattgaacatacagaaagggaaactaaatacggacctgta

SEQ ID NO: 63121 - DNA, 120 bp, synthetic construct
  source 1..120: mol_type = other DNA
gtcggcaaagagggcagcaaaagaagagccatgctgcatgctctggggtccctccaggtgaggcctgggcacccaagctccctatttgtcccgggcaccagggacccccagcccctttct

SEQ ID NO: 63122 - DNA, 120 bp, synthetic construct
  source 1..120: mol_type = other DNA
aggcacacgccaccacgcttggctaatgttttgtatttttagtagagacagggtttcaccgtgttaaccaggatggtctcgatctcctgacctcatgatccgcctgccttggcctcccaa

SEQ ID NO: 63123 - DNA, 120 bp, synthetic construct
  source 1..120: mol_type = other DNA
tgtggcactcaaagtacccaaagttgagataatatgaggaagattcaaggtgtcaagttcagtttcccaagatctattccacagaagatgagcaaatgtcacttcagagaccactgactg

SEQ ID NO: 63124 - DNA, 120 bp, synthetic construct; identical to SEQ ID NO: 570
  source 1..120: mol_type = other DNA

SEQ ID NO: 63125 - DNA, 120 bp, synthetic construct
  source 1..120: mol_type = other DNA
atccggccttttttgtatttttagtagagatgggatttcaccgtgttagccaggatggtctcgatctcctgacctcatgatccacccacctggggctctcaaagtcctggaattacaggc

SEQ ID NO: 63126 - DNA, 120 bp, synthetic construct
  source 1..120: mol_type = other DNA
tttcccaaaacccatttctttccagttagttttcataactgtaggttcttaaaaaaaaaaaaatgaacactttggccgggtgcgatggctcatgcctgtaatcccagcactttgggaggc

SEQ ID NO: 63127 - DNA, 120 bp, synthetic construct
  source 1..120: mol_type = other DNA
acagcccctcttcatcaaaatgaagaccttgtacgtctgaaatacagtttgtgaaagtcaaattgttatccctgtgacatagaacagccgttaaaaatgtatttcactggaatgtcattc

SEQ ID NO: 63128 - DNA, 120 bp, synthetic construct
  source 1..120: mol_type = other DNA
tctagtaagaacacaaaactgaccagcctgaccaatgtgataaaaccccctgtctctactaaaaagacaaaaattagccatgcatggtagcagatgcttgtaatcccagctactcaagag

SEQ ID NO: 63129 - DNA, 120 bp, synthetic construct
  source 1..120: mol_type = other DNA
agtaaaataaaaaataaaatgcttacaggaacttcaaccacaatttttcttgttcactgatagtaaatctaatagagaattcaggatttatcttacacttgaaattttgttactgattac

SEQ ID NO: 63130 - DNA, 120 bp, synthetic construct; identical to SEQ ID NO: 14911
  source 1..120: mol_type = other DNA

SEQ ID NO: 63131 - DNA, 120 bp, synthetic construct; identical to SEQ ID NO: 14883
  source 1..120: mol_type = other DNA

SEQ ID NO: 63132 - DNA, 120 bp, synthetic construct
  source 1..120: mol_type = other DNA
acgaccccatccccgcctccttcctctgtcctacgctagcaataaataagtttcccagccacaaataattattagaacctcctccccatgtgacagctccaacctctgctaggtatgata

SEQ ID NO: 63133 - DNA, 120 bp, synthetic construct
  source 1..120: mol_type = other DNA
atgaattttaccagtttgtgaattcttgtaaacagaatgtgtaatggaaatactgaaagatttttccctagagtggccttattgactgctggtgtgatgccactgtaatgtaataaatca

SEQ ID NO: 63134 - DNA, 120 bp, synthetic construct; identical to SEQ ID NO: 599
  source 1..120: mol_type = other DNA

SEQ ID NO: 63135 - DNA, 120 bp, synthetic construct
  source 1..120: mol_type = other DNA
ccttgattttcaaagagagtacaataccgtctactaaaactcctttttgtttcaactaagtatctcacatatattagtttataataatgtttctattattttttaaagtgttttccattc

SEQ ID NO: 63136 - DNA, 120 bp, synthetic construct
  source 1..120: mol_type = other DNA
gcagcctattccaaaccagcgagaacagttttgggcaaagagtgggtctttgtgtgtttgaacttccaccacgtaagggcaaactcgatatgcatgctaatgacctacaattatgaaatt

SEQ ID NO: 63137 - DNA, 120 bp, synthetic construct
  source 1..120: mol_type = other DNA
gctggtgaagaaacaagaacttcgcttcattcaatactggcaagagagatgccatcagtgagtgggaggccagggcacagcagggggagctacagggccgtcggaggggccccagcgtct

SEQ ID NO: 63138 - DNA, 120 bp, synthetic construct; identical to SEQ ID NO: 14884
  source 1..120: mol_type = other DNA

SEQ ID NO: 63139 - DNA, 120 bp, synthetic construct
  source 1..120: mol_type = other DNA
caacctccacctcctgggttgaagcaattctcatgcctcagcctcccgagtaggtggaattacaggcatgcaccacaatgtcctgctaattttttttttttttgtaattttagtagagat

SEQ ID NO: 63140 - DNA, 120 bp, synthetic construct
  source 1..120: mol_type = other DNA
aagagaggattcaggagcaggaagagaggcttcggaagcaggaggagaggattcaggagcagcacaagagccttcagcagctggccaagccacagagcgtcttcgaggagccggtgcgtt

SEQ ID NO: 63141 - DNA, 120 bp, synthetic construct
  source 1..120: mol_type = other DNA
gagttatgtggaaggaagatgaccccaggtggccaggagcaggtgaggaccagtgacagcccttcctaagttctgtgcccattcttgcagttcaaggagtcatttcaacaagtccaatta

SEQ ID NO: 63142 - DNA, 120 bp, synthetic construct
  source 1..120: mol_type = other DNA
gggtcactgtgtggagtgagcactggacgcagagcttggaggccaaatgcctgccccgcccttacctggctgtggtcttgagcaagtcctaggtggggtattgggtacttctactgtgaa

SEQ ID NO: 63143 - DNA, 120 bp, synthetic construct
  source 1..120: mol_type = other DNA
acacgaactggtaaactctcctcaagctcccaaggacagaggatttgggtctttgtgggcttttgcccacagccacagaactcaaagtctgaatctggaatctcttgagaggacagcaac

SEQ ID NO: 63144 - DNA, 120 bp, synthetic construct; identical to SEQ ID NO: 14885
  source 1..120: mol_type = other DNA

SEQ ID NO: 63145 - DNA, 120 bp, synthetic construct
  source 1..120: mol_type = other DNA
accgtgttaaccaggatggtctctatctcctgacgtcatgatccgcctgccttggcctcccaaagtgctaggattacaggcgtgggccaccacacccggctaaagccagaattcttaacc

SEQ ID NO: 63146 - DNA, 120 bp, synthetic construct
  source 1..120: mol_type = other DNA
aagttgagataatatgaggaagattcaaggtgtcaagttcagtttcccaagatctattccacagaagatgagcaaatgtcacttcagagaccactgactgaaggagagtctggtcccaga

SEQ ID NO: 63147 - DNA, 120 bp, synthetic construct; identical to SEQ ID NO: 14886
  source 1..120: mol_type = other DNA

SEQ ID NO: 63148 - DNA, 120 bp, synthetic construct
  source 1..120: mol_type = other DNA
cgctgtactccagcctgggctacagagcaagactccatctcaattaattaattaatttatttatttattaataaaaataaaaaattaatagtaagagcaatgtgaacaaaagatgcaata

SEQ ID NO: 63149 - DNA, 120 bp, synthetic construct; identical to SEQ ID NO: 14887
  source 1..120: mol_type = other DNA

SEQ ID NO: 63150 - DNA, 120 bp, synthetic construct; identical to SEQ ID NO: 14888
  source 1..120: mol_type = other DNA

SEQ ID NO: 63151 - DNA, 120 bp, synthetic construct; identical to SEQ ID NO: 14889
  source 1..120: mol_type = other DNA

SEQ ID NO: 63152 - DNA, 120 bp, synthetic construct
  source 1..120: mol_type = other DNA
tgaaattctaaggtaaaattatcctcaacctagaaatacataatcaagcaaactatcaatcaagtgtgagggtagaatatgagagacgtgaatactgatggggatgtgatatgcagcagg

SEQ ID NO: 63153 - DNA, 120 bp, synthetic construct
  source 1..120: mol_type = other DNA
gagacctcttgtcttgagtcttatatctcacgttatttctaaatgttttttaaattttcagttctggaatattttcttatctttcgactttcaggaaattttatttggactgtcataact

SEQ ID NO: 63154 - DNA, 120 bp, synthetic construct
  source 1..120: mol_type = other DNA
gaactgcttgaaccttggaggcagaggttgtggtgagccaagatcacatcattgtactccagcctaggcaacaagagcgaaactgggtctcaaaaaaaaaaaaaaaaagactacaaatga

SEQ ID NO: 63155 - DNA, 120 bp, synthetic construct; identical to SEQ ID NO: 611
  source 1..120: mol_type = other DNA

SEQ ID NO: 63156 - DNA, 120 bp, synthetic construct
  source 1..120: mol_type = other DNA
tattggtctccagatttcccacttcttcagttacttctcgtaactgtaggttcttaaaaaaaaatgaacactttggatgggtgcgatggctcatgcctgtaatcccagcactttgggagg

SEQ ID NO: 63157 - DNA, 120 bp, synthetic construct
  source 1..120: mol_type = other DNA
tgtcaaagtcctggaattacaggcatgagccactgcacccagcccaaaagctttgtgcttttacagatattagacatgtttcttgtttaagaaaaaaaatcttaacgaaaacgtaggaga

SEQ ID NO: 63158 - DNA, 120 bp, synthetic construct
  source 1..120: mol_type = other DNA
aaagtcacccaaggatgactggcgagggtggggcctggctccttggagatgagagcccaaagagcccacggagatcaagcttggggcggcaggagatgacagcccagtaatggagcggga

SEQ ID NO: 63159 - DNA, 120 bp, synthetic construct
  source 1..120: mol_type = other DNA
gaggacagtcacataggtttctaagagtataccagacctctctctgaaatgaggcttgggttgtcctctttctgataaattctgatttaagagaaaggctgccttctgccatgaggacac

SEQ ID NO: 63160 - DNA, 120 bp, synthetic construct
  source 1..120: mol_type = other DNA
gtgacagagcaagactctgtctcaaaaaaaaaaaaaaaggaattctgggtttgaatcctgcctctccatctgctctgctagggatatgatttagggcaagttgcttgacctcattgggcc

SEQ ID NO: 63161 - DNA, 120 bp, synthetic construct
  source 1..120: mol_type = other DNA
gcagaaatacggggaccttgacaaccagtcaggctagcacttccccaagaggcaacaaccccagggcgtgtgtagcaaggactcgagcaggggtgtctggagaggagagagtcggcaaag

SEQ ID NO: 63162 - DNA, 120 bp, synthetic construct
  source 1..120: mol_type = other DNA
atcaatgtctggatttgaacctttgggagaaaagccaagcaagtgctgaaagagaaggaaagaaacattctccggaggacaggaggaaactgcacaccctccactcacctctagctccct

SEQ ID NO: 63163 - DNA, 120 bp, synthetic construct; identical to SEQ ID NO: 612
  source 1..120: mol_type = other DNA

SEQ ID NO: 63164 - DNA, 120 bp, synthetic construct
  source 1..120: mol_type = other DNA
ccagtcctgctcccaggtcatgccagccccatcttacccatctggtttttgagtctggacaagctcctctccagctcctctacccgatgcgtatcatgcttcttctcctccttcaatgtg

SEQ ID NO: 63165 - DNA, 120 bp, synthetic construct
  source 1..120: mol_type = other DNA
ccagaggctgctgcccgcctcccagcccttcttggatggggtggaggtttccgactccttcacctcgccaagcttctcctgtagctcctttacttgctgctccaactgcagtgtgctctt

SEQ ID NO: 63166 - DNA, 120 bp, synthetic construct
  source 1..120: mol_type = other DNA
gcagtcacttaggcctggagtaaggggacaggggcctgggcagctgacagagccccacagtgccctcgctaccctattaatgggcccagaatctggaaaccagccaccacatgccctcac

SEQ ID NO: 63167 - DNA, 120 bp, synthetic construct
  source 1..120: mol_type = other DNA
tctggggaggggcaggctcagggttacacagtgagggtggaggtagaggtgggcccacagtacctcccttgttgggttgtctgaagacccgtctgaccaccccccacaggacacggagga

SEQ ID NO: 63168 - DNA, 120 bp, synthetic construct; identical to SEQ ID NO: 14912
  source 1..120: mol_type = other DNA

SEQ ID NO: 63169 - DNA, 120 bp, synthetic construct
  source 1..120: mol_type = other DNA
atgtaatcttaatcacagtgagctcttccttagctcaatatgtagtttgcccccaagtgtgcactgtttattactttgtaatacgccactatgagtactgacatttagagttgtttaaag

SEQ ID NO: 63170 - DNA, 120 bp, synthetic construct; identical to SEQ ID NO: 2365
  source 1..120: mol_type = other DNA

SEQ ID NO: 63171 - DNA, 120 bp, synthetic construct
  source 1..120: mol_type = other DNA
ttatttcaaaggtacttttatcgttgaaatcacttcacttttaccctgataaatatcagtgactaggaatgaccttcggatagcgtttagcatctgtaaccaatctgacaataatgtgtt

SEQ ID NO: 63172 - DNA, 120 bp, synthetic construct
  source 1..120: mol_type = other DNA
ctgtaatgtaataaattattaaattgtttctaagtgttgtttttgccttaaaattttattttgcgtttcttcaaaactatagttttaaaggtattgatactgtgcaaatgctgggcatgc

SEQ ID NO: 63173 - DNA, 120 bp, synthetic construct; identical to SEQ ID NO: 567
  source 1..120: mol_type = other DNA

SEQ ID NO: 63174 - DNA, 120 bp, synthetic construct
  source 1..120: mol_type = other DNA
ttatggtgtaagggctgagagcttagagggggtggtgtgtggggctgtactctgaggcggccagagtcctaggatagtcctcctgtgcacaccgcacctgttgggcagtctgagtcatgc

SEQ ID NO: 63175 - DNA, 120 bp, synthetic construct
  source 1..120: mol_type = other DNA
gcattgggagatatacccaatgctagatgacgatttagtgggtgcagcgcaccagcatggcacatgtatacatatgtaactaacctgcacattgtcacatgtaccctaaaacttaaagta

SEQ ID NO: 63176 - DNA, 120 bp, synthetic construct
  source 1..120: mol_type = other DNA
acacacacacacacacacacacacacacacacacacacacacatacacctacatgtggccgaccgcctcgcctctagcgctgggaatcagtcaccgtgctgtccttttggagtcttgtgg

SEQ ID NO: 63177 - DNA, 120 bp, synthetic construct
  source 1..120: mol_type = other DNA
tccccatgtgccggcctcaacctcagctaggtatgacacaggggtggccctaccctctggaatatacaaaaccttacacagacacaatgtgtacaccggggaacgggggccaccccagca

SEQ ID NO: 63178 - DNA, 120 bp, synthetic construct
  source 1..120: mol_type = other DNA
aaacctgataattttccagaaatgaaaaaaaaatcagctctaaaacgaaagctgattttagaaaatttgaaaatgtaaatcagccctatccataatatagtttctctaaaactttatctt

SEQ ID NO: 63179 - DNA, 120 bp, synthetic construct; identical to SEQ ID NO: 63082
  source 1..120: mol_type = other DNA

SEQ ID NO: 63180 - DNA, 120 bp, synthetic construct
  source 1..120: mol_type = other DNA
tgcaagatagagtgtgtttcatctcttccggtgccaggaattagcggtgtattatggtggtgcccttaggatttgtatgtgctctgggctcatgaagatattgcatcatgagctgcagca

SEQ ID NO: 63181 - DNA, 120 bp, synthetic construct
  source 1..120: mol_type = other DNA
aggcaggaagaggggggctcccactgtgctcagatccccgcctccctctctccaaagatcttcgtgaggtgaccctcacctcctctgcccaaggagaggccagggaggatcctctccttg

SEQ ID NO: 63182 - DNA, 120 bp, synthetic construct; identical to SEQ ID NO: 63115
  source 1..120: mol_type = other DNA

SEQ ID NO: 63183 - DNA, 120 bp, synthetic construct
  source 1..120: mol_type = other DNA
taaggggacaggggcctgggcagctgacagagccccacagtgccctcgctaccctattaatgggcccagaatctggaaaccagccaccacatgccctcacacccagggtcttcctgcagg

SEQ ID NO: 63184 - DNA, 120 bp, synthetic construct
  source 1..120: mol_type = other DNA
cttggatggggtggaggtttccgactccttcacctcgccaagcttctcctgtagctcctttacttgctgctccaactgcagtgtgctcttgttctcattgttctggacagagagaagcaa

SEQ ID NO: 63185 - DNA, 120 bp, synthetic construct; identical to SEQ ID NO: 63164
  source 1..120: mol_type = other DNA

SEQ ID NO: 63186 - DNA, 120 bp, synthetic construct
  source 1..120: mol_type = other DNA
acccaggtctatccaattctctaagcccatttttcttgctggggatgggggcacagataggaaggggaaaattaatcttttgttcactttttgacaggatgatacattcacatagtccaa

SEQ ID NO: 63187 - DNA, 120 bp, synthetic construct
  source 1..120: mol_type = other DNA
ctagctccctttcggctttctgtctctcgttgtttgctttcttttcctgtaggaagaggaagacagagctcttaccagggggaggcagagatggcacagcaagagacatgcccccagaat

SEQ ID NO: 63188 - DNA, 120 bp, synthetic construct; identical to SEQ ID NO: 63161
  source 1..120: mol_type = other DNA

SEQ ID NO: 63189 - DNA, 120 bp, synthetic construct
  source 1..120: mol_type = other DNA
aagactctgtctcaaaaaaaaaaaaaaaggaattctgggtttgaatcctgcctctccatctgctctgctagggatatgatttagggcaagttgcttgacctcattgggcctctcttttca

SEQ ID NO: 63190 - DNA, 120 bp, synthetic construct; identical to SEQ ID NO: 63159
  source 1..120: mol_type = other DNA

SEQ ID NO: 63191 - DNA, 120 bp, synthetic construct; identical to SEQ ID NO: 63158
  source 1..120: mol_type = other DNA

SEQ ID NO: 63192 - DNA, 120 bp, synthetic construct
  source 1..120: mol_type = other DNA
tcttgtttaagaaaaaaaatcttaacgaaaacgtaggagaataagagaaacatttttccaaaaaagagaaatcattgtgattattttatcttattagaatgttggataatatagtctgct

SEQ ID NO: 63193 - DNA, 120 bp, synthetic construct
  source 1..120: mol_type = other DNA
aaaaaattagccaggcgtggtggcgggcgcttgtagtcccagctactcgggaggttgaggcaggagaatgttgtgaacccaggaggcggagcttgcagtgagccaagatcacgccactgc

SEQ ID NO: 63194 - DNA, 120 bp, synthetic construct; identical to SEQ ID NO: 610
  source 1..120: mol_type = other DNA

SEQ ID NO: 63195 - DNA, 120 bp, synthetic construct
  source 1..120: mol_type = other DNA
ctcaggtgatccacccacctcggcctcccaaagtgcgggattacagacatgagccaccgtgcctgacctgtagtcttttttccattcctttatttgttcattcatatttgagagaggtac

SEQ ID NO: 63196 - DNA, 120 bp, synthetic construct; identical to SEQ ID NO: 63153
  source 1..120: mol_type = other DNA

SEQ ID NO: 63197 - DNA, 120 bp, synthetic construct; identical to SEQ ID NO: 63153
  source 1..120: mol_type = other DNA

SEQ ID NO: 63198 - DNA, 120 bp, synthetic construct; identical to SEQ ID NO: 63154
  source 1..120: mol_type = other DNA

SEQ ID NO: 63199 - DNA, 120 bp, synthetic construct; identical to SEQ ID NO: 611
  source 1..120: mol_type = other DNA

SEQ ID NO: 63200 - DNA, 120 bp, synthetic construct
  source 1..120: mol_type = other DNA
cctcggcctcccaaagtgctgggattacagacatgagccatcgcacccatccaaagtgttcatttttttttaagaacctacagttacgaaaagtaactgaagaagtgggaaatctggaga

SEQ ID NO: 63201 - DNA, 120 bp, synthetic construct; identical to SEQ ID NO: 63157
  source 1..120: mol_type = other DNA

SEQ ID NO: 63202 - DNA, 120 bp, synthetic construct; identical to SEQ ID NO: 63158
  source 1..120: mol_type = other DNA

SEQ ID NO: 63203 - DNA, 120 bp, synthetic construct
  source 1..120: mol_type = other DNA
accagacctctctctgaaatgaggcttgggttgtcctctttctgataaattctgatttaagagaaaggctgccttctgccatgaggacacattgatataaaagtttgagaggtactggtg

SEQ ID NO: 63204 - DNA, 120 bp, synthetic construct
  source 1..120: mol_type = other DNA
gcttgcagtggccaagattatgccaccgcactccagcctggtgaaagagcaagactctgtctcaaaaaaaaaaaaaaggaattctgggtttgaatcctgcctctccatctgctctgctag

SEQ ID NO: 63205 - DNA, 120 bp, synthetic construct
  source 1..120: mol_type = other DNA
aatcagtcgactgaagaacaccatcaaatctttggtaagagtccggtggggtcccctgattccacgctgccaatcctgggctccagtttccccttggggccctgaagaaaggggctgggg

SEQ ID NO: 63206 - DNA, 120 bp, synthetic construct
  source 1..120: mol_type = other DNA
atacaggccccagtctcgtctcacccactcccagcctggggaagaaggctcacccctcagattccaccccatccccacagggcccctgataacctggtcccatgggtgggcctgtcctgg

SEQ ID NO: 63207 - DNA, 120 bp, synthetic construct
  source 1..120: mol_type = other DNA
ggaaacgcgtgcatgtgtgtgtgtgtgtgtgtgtgtgtgtgtacatactgtgataatatacataaaacatgtctgcaagggttcataaaaaattcaggagagagaacaagatggctggga

SEQ ID NO: 63208 - DNA, 120 bp, synthetic construct
  source 1..120: mol_type = other DNA
gcgacattttactcatcctctgatgccaccgggccctctctccttctatatgttcagcacactcatctctttctaattggagttgttgaaatgactccttcaactgcaagaatgggcaca

SEQ ID NO: 63209 - DNA, 120 bp, synthetic construct; identical to SEQ ID NO: 14960
  source 1..120: mol_type = other DNA

SEQ ID NO: 63210 - DNA, 120 bp, synthetic construct
  source 1..120: mol_type = other DNA
ctgcactccagcctgggccacagagtgacactcttgtctgaaaacaaaacaaaaagactccttagattgaaactggattccagcctcagttccactggtcaccattcaagtactttgcat

SEQ ID NO: 63211 - DNA, 120 bp, synthetic construct; identical to SEQ ID NO: 14961
  source 1..120: mol_type = other DNA

SEQ ID NO: 63212 - DNA, 120 bp, synthetic construct; identical to SEQ ID NO: 15065
  source 1..120: mol_type = other DNA

SEQ ID NO: 63213 - DNA, 120 bp, synthetic construct; identical to SEQ ID NO: 14962
  source 1..120: mol_type = other DNA

SEQ ID NO: 63214 - DNA, 120 bp, synthetic construct; identical to SEQ ID NO: 2365
  source 1..120: mol_type = other DNA

SEQ ID NO: 63215 - DNA, 120 bp, synthetic construct; identical to SEQ ID NO: 599
  source 1..120: mol_type = other DNA

SEQ ID NO: 63216 - DNA, 120 bp, synthetic construct
  source 1..120: mol_type = other DNA
ttattttgcgtttcttgaaaactatagtattaaaggtattgatactgtgcaaatgctgggcatgcttggcatgagataatgtgtttcatttttacaaaggtgtaatataactatgcaagt

SEQ ID NO: 63217 - DNA, 120 bp, synthetic construct; identical to SEQ ID NO: 14909
  source 1..120: mol_type = other DNA

SEQ ID NO: 63218 - DNA, 120 bp, synthetic construct
  source 1..120: mol_type = other DNA
ctcactgcaacaatagactaagtcacagatgaaggggggctggctttggggctgggggagccactgccaagtcacagaacagccgcccaggcaggcttggaaagggaagtctctgagaag

SEQ ID NO: 63219 - DNA, 120 bp, synthetic construct; identical to SEQ ID NO: 14963
  source 1..120: mol_type = other DNA

SEQ ID NO: 63220 - DNA, 120 bp, synthetic construct; identical to SEQ ID NO: 63174
  source 1..120: mol_type = other DNA

SEQ ID NO: 63221 - DNA, 120 bp, synthetic construct; identical to SEQ ID NO: 567
  source 1..120: mol_type = other DNA

SEQ ID NO: 63222 - DNA, 120 bp, synthetic construct
  source 1..120: mol_type = other DNA
cctggcagggggcaagaaaggggcatactcactttccccttgtcctgggaggcccatgcaccaacactgccaccgccgccgccaccagggaacacggcaaagtagacacacacagagagg

SEQ ID NO: 63223 - DNA, 120 bp, synthetic construct; identical to SEQ ID NO: 14911
  source 1..120: mol_type = other DNA

SEQ ID NO: 63224 - DNA, 120 bp, synthetic construct
  source 1..120: mol_type = other DNA
agttcctgtaagcattttatttttattttacttatttattcatttattttttgagacagagtctcgctctgttgcccaggctgtagtgcagtggtgtgatctcggctcactgcaacctct

SEQ ID NO: 63225 - DNA, 120 bp, synthetic construct
  source 1..120: mol_type = other DNA
aggtggaggctgcagtgagtcgagatcgcacaactgcacttcaccctgggcgacaaagcaagactttgttttttaaaaaaaagaagaagaagagaaaaagaaaaagaacacaaaactctg

SEQ ID NO: 63226 - DNA, 120 bp, synthetic construct
  source 1..120: mol_type = other DNA
agcactttgggaggccgaggcggacagatcacgaggtcaggagatcgagaccatcttggctaacacgaggaaaccgcgtctctactaaaaaatacaaaaaattagctgggcgtggtggtg

SEQ ID NO: 63227 - DNA, 120 bp, synthetic construct
  source 1..120: mol_type = other DNA
gggagaaataattaagacgtcaggaaaaaggaaaaagaaaaaccactagatttaaaaaacaaaactgaaggaggattctttcaaaagactgagataataaaacagtcaagcctctgataa

SEQ ID NO: 63228 - DNA, 120 bp, synthetic construct
  source 1..120: mol_type = other DNA
aaggagaaaaacatagatacacacacacagacacacatatatataaagtatacacacatatattttttaaagttttaaagcttttaaagcaaaagccggcccctcttctcttccagagtg

SEQ ID NO: 63229 - DNA, 120 bp, synthetic construct
  source 1..120: mol_type = other DNA
caagactggcctttgaccttacgacccagtcccctaagcgttctcaccccgtttctggttcctctggtcacagcacaaatttccagctggaaggggaatggagactatgggacctaggag

SEQ ID NO: 63230 - DNA, 120 bp, synthetic construct
  source 1..120: mol_type = other DNA
agtatccctgagaaagccacttctggtggttgccagccacctagggatgtgagtcttggctgaccaggcttctggggacagggggcccaaggggcagtagagggtaattgttaagattgt

SEQ ID NO: 63231 - DNA, 120 bp, synthetic construct
  source 1..120: mol_type = other DNA
cgggggagaggtagagagaacaatcattagggctggggtgtgtgggctgtctcagctggcagaggggcacccagtccctcctggaggaggaggttggagggctgacccgaagggtcactg

SEQ ID NO: 63232 - DNA, 120 bp, synthetic construct; identical to SEQ ID NO: 63143
  source 1..120: mol_type = other DNA

SEQ ID NO: 63233 - DNA, 120 bp, synthetic construct
  source 1..120: mol_type = other DNA
gcctaaaggtcccttctgcaggatggagtgtcctgcccagaaggcagcatggccatttcttgctacttttttgtatggtttttaatggcagcctggggctgagtcagctgctgtgggtga

SEQ ID NO: 63234 - DNA, 120 bp, synthetic construct; identical to SEQ ID NO: 14908
  source 1..120: mol_type = other DNA

SEQ ID NO: 63235 - DNA, 120 bp, synthetic construct; identical to SEQ ID NO: 15062
  source 1..120: mol_type = other DNA

SEQ ID NO: 63236 - DNA, 120 bp, synthetic construct
  source 1..120: mol_type = other DNA
accagtggaaccgaggctggaatccagttttaatctaaggagtctttttgttttgttttcagacaagagtgtcactctgtggcccaggctggagtgcagtggtgcaatctcagctcactg

SEQ ID NO: 63237 - DNA, 120 bp, synthetic construct; identical to SEQ ID NO: 14961
  source 1..120: mol_type = other DNA

SEQ ID NO: 63238 - DNA, 120 bp, synthetic construct; identical to SEQ ID NO: 14912
  source 1..120: mol_type = other DNA

SEQ ID NO: 63239 - DNA, 120 bp, synthetic construct; identical to SEQ ID NO: 63169
  source 1..120: mol_type = other DNA

SEQ ID NO: 63240 - DNA, 120 bp, synthetic construct
  source 1..120: mol_type = other DNA
tatcaggaaacgtgcctatacaatcacagagttatattttctcacagacttctttacaaagtgaaatatgtttttgtatctctgggtttctgttcgggacatattttgtgcaatatttat

SEQ ID NO: 63241 - DNA, 120 bp, synthetic construct
  source 1..120: mol_type = other DNA
aggtatcacaaaagactgcatgcactttggagaaagacttaagttattgtcatacaatttccattctttttagcgttttcttaagtatatgacaaatgcctacacaaagagtggtatttc

SEQ ID NO: 63242 - DNA, 120 bp, synthetic construct
  source 1..120: mol_type = other DNA
caaggtggcaaagggtctgtttgtctttcctcgttagacagaggtcttgtcctgctaccctaattgtaaaggggtgactgggaaggggagatagggacagtgtggtggtggagaccccag

SEQ ID NO: 63243 - DNA, 120 bp, synthetic construct; identical to SEQ ID NO: 63109
  source 1..120: mol_type = other DNA

SEQ ID NO: 63244 - DNA, 120 bp, synthetic construct; identical to SEQ ID NO: 14913
  source 1..120: mol_type = other DNA

SEQ ID NO: 63245 - DNA, 120 bp, synthetic construct; identical to SEQ ID NO: 14914
  source 1..120: mol_type = other DNA

SEQ ID NO: 63246 - DNA, 120 bp, synthetic construct; identical to SEQ ID NO: 14915
  source 1..120: mol_type = other DNA

SEQ ID NO: 63247 - DNA, 120 bp, synthetic construct; identical to SEQ ID NO: 24597
  source 1..120: mol_type = other DNA

SEQ ID NO: 63248 - DNA, 120 bp, synthetic construct
  source 1..120: mol_type = other DNA
gtaataatcttttcactagagctcatcttaaaaattagaattttcgctctccctctccctctccctctctctctccccatggtctccctctccctctctttccacggtctccctctgatg

SEQ ID NO: 63249 - DNA, 120 bp, synthetic construct
  source 1..120: mol_type = other DNA
gggcacctctgcccggccgccaccccgtctgggaggtgtacccagcagctcattgagaacgggccatgatgacaatggcggttttgtggaatagaaaggggggaaaggtggggaaaagat

SEQ ID NO: 63250 - DNA, 120 bp, synthetic construct; identical to SEQ ID NO: 24598
  source 1..120: mol_type = other DNA

SEQ ID NO: 63251 - DNA, 120 bp, synthetic construct; identical to SEQ ID NO: 24599
  source 1..120: mol_type = other DNA

SEQ ID NO: 63252 - DNA, 120 bp, synthetic construct
  source 1..120: mol_type = other DNA
ctctgcagacttaaatgtccctgtctgacagcttggaagagagcagtggttctcccagcacgcagctggagatctgagaacgggcagactgcctcctcaagtgggtccctgaccccttac

SEQ ID NO: 63253 - DNA, 120 bp, synthetic construct
  source 1..120: mol_type = other DNA
aggtcgggttaccctcaaagggaagcccatcagactaacagcggatctctcggcagaaactctacaagccagaagagagtgggggccaatattcaacattcttaaagacaaaaattttca

SEQ ID NO: 63254 - DNA, 120 bp, synthetic construct
  source 1..120: mol_type = other DNA
aagcgaacctaatagacatctacagaactctccaccccaaatcaacagaatatacatttttttcagcaccacaccacacctattccaaaattgaccacatactgggaagtaaagctctcc

SEQ ID NO: 63255 - DNA, 120 bp, synthetic construct
  source 1..120: mol_type = other DNA
aggccagcatcattctgatacaaagccaggcagagacacaacaaaaaaaaagaattttagaccaatatccttgatgaacattgatgcaaaaatcctcaataaaatactggcaaaacgaat

SEQ ID NO: 63256 - DNA, 120 bp, synthetic construct
  source 1..120: mol_type = other DNA
aacaaagccggaggcatcacactacctgacttcaaactatactacaaggctacagtaaccaaaacagcatggtactggtaccaaaagagagatatagatcaatggaacagaacagagccc

SEQ ID NO: 63257 - DNA, 120 bp, synthetic construct
  source 1..120: mol_type = other DNA
ggaaccaacccaaatgtccaacaatgatagactggattaagaaaatgtggcacatatacaccatggaatactatgcagccataaaaaagtatgagttcatgtcctttgtagggacatgga

SEQ ID NO: 63258 - DNA, 120 bp, synthetic construct; identical to SEQ ID NO: 24855
  source 1..120: mol_type = other DNA

SEQ ID NO: 63259 - DNA, 120 bp, synthetic construct; identical to SEQ ID NO: 24856
  source 1..120: mol_type = other DNA

SEQ ID NO: 63260 - DNA, 120 bp, synthetic construct; identical to SEQ ID NO: 32712
  source 1..120: mol_type = other DNA

SEQ ID NO: 63261 - DNA, 120 bp, synthetic construct
  source 1..120: mol_type = other DNA
aatgttagacctaaaaccataaaaaccatggaagaaaacctaggcaataccattcaggacataggcatgggcaaggacttcgtgtctaaaacaccaaaagcaatggcaacagaagccaaa

SEQ ID NO: 63262 - DNA, 120 bp, synthetic construct; identical to SEQ ID NO: 32713
  source 1..120: mol_type = other DNA

SEQ ID NO: 63263 - DNA, 120 bp, synthetic construct; identical to SEQ ID NO: 32714
  source 1..120: mol_type = other DNA

SEQ ID NO: 63264 - DNA, 120 bp, synthetic construct
  source 1..120: mol_type = other DNA
tttgtaaaagacatatctgataaaagatctatgcaaaatatacaaagaactcttaaaacttaacaattagaggccaggcgcagtggctcatgcctgtaatcccagcactttgggaggctg

SEQ ID NO: 63265 - DNA, 120 bp, synthetic construct
  source 1..120: mol_type = other DNA
taggaagaaactgcatcaactaacgagcaaaataaccagctaacatcataatgacaggttcaaattcacacataacaatattaactttaaatgtaaatggactaaatgctccaattaaaa

SEQ ID NO: 63266 - DNA, 120 bp, synthetic construct
  source 1..120: mol_type = other DNA
gaaggaaaaagagacacaaaaaacccttcaaaaaattaatgaatcgagctggttttttgaaaagatcaacaagctagaccgctagcaagactaataaagaaaaaagagagaagaatcaaa

SEQ ID NO: 63267 - DNA, 120 bp, synthetic construct
  source 1..120: mol_type = other DNA
gcaattaggcaggagaaggaaataaagggtattcaattaggaaaagaggaagtcaaattgtccctgtttgcagacaacatgattgtatatctagaaaaccccattgtctcagcccaaaat

SEQ ID NO: 63268 - DNA, 120 bp, synthetic construct
  source 1..120: mol_type = other DNA
aatgggaaaaaatttttgcaacctgctcatctgacaaagggctaatatccagaatctacaatgaactcaaacaaatttacaagaaaaaaacaaacaaccccatcaaaaagtgggcgaagg

SEQ ID NO: 63269 - DNA, 120 bp, synthetic construct
  source 1..120: mol_type = other DNA
taggtgggaattgaacaatgagaacacatggacacaggaaggggaacatcacactctggggactgttgtggggtggggggagcggggagggatagcattgggagatatacctaatgctag

SEQ ID NO: 63270 - DNA, 120 bp, synthetic construct
  source 1..120: mol_type = other DNA
atagttctatgtttagctttttgaggaactgccaaaccattttccacaatagctgtaccattttacattcccaccagcaacgtataagagttccaatttctccacatcccctccctccct

SEQ ID NO: 63271 - DNA, 120 bp, synthetic construct; identical to SEQ ID NO: 26477
  source 1..120: mol_type = other DNA

SEQ ID NO: 63272 - DNA, 120 bp, synthetic construct
  source 1..120: mol_type = other DNA
ccccgtctgagaagtgaggagcccctccgcccagcagccaccccgtccgggaagtgaggagcgtctccgcccggcagccacctcgtccgggagggaggtgggggggtcagccccccaccc

SEQ ID NO: 63273 - DNA, 120 bp, synthetic construct; identical to SEQ ID NO: 26478
  source 1..120: mol_type = other DNA

SEQ ID NO: 63274 - DNA, 120 bp, synthetic construct
  source 1..120: mol_type = other DNA
ccattgcactccagtctgggcaacaagagcaaaactctgtctcaaaaagaaaaagaattcttagtttgttattcatgctgccacagactaatggtggttttggctttgttatggcagcca

SEQ ID NO: 63275 - DNA, 120 bp, synthetic construct
  source 1..120: mol_type = other DNA
tactggtgtactaaggggacaatacaccaaatttgttgagtttacaatcaagtctactaaggttggacttccttatcagtttggcgagtcccagggcagaataatcatccatctacaggt

SEQ ID NO: 63276 - DNA, 120 bp, synthetic construct
  source 1..120: mol_type = other DNA
agagctgcatgagttctcgaaaacggtgggaaacctaagaaaggaggagggctgtattcactggtcttttttttttgtttttgagacggagtctctctctgttgctgagactggagtgca

SEQ ID NO: 63277 - DNA, 120 bp, synthetic construct; identical to SEQ ID NO: 8867
  source 1..120: mol_type = other DNA

SEQ ID NO: 63278 - DNA, 120 bp, synthetic construct; identical to SEQ ID NO: 8868
  source 1..120: mol_type = other DNA

SEQ ID NO: 63279 - DNA, 120 bp, synthetic construct; identical to SEQ ID NO: 8869
  source 1..120: mol_type = other DNA

SEQ ID NO: 63280 - DNA, 120 bp, synthetic construct
  source 1..120: mol_type = other DNA
aaactcctagcctcaagcaatcttctagcctaggactcccaaagtgatggaattacagccaaggaggtcttttttgatcagcctatctaaagttctctgacaggaagtttcatatttcct

SEQ ID NO: 63281 - DNA, 120 bp, synthetic construct; identical to SEQ ID NO: 8870
  source 1..120: mol_type = other DNA

SEQ ID NO: 63282 - DNA, 120 bp, synthetic construct
  source 1..120: mol_type = other DNA
actcagggttaaatggattaagggcggtgcaagatgtgctttgttaaacagatgcttgaaggcagcatgctcgttaagtcatcaccactccctaatctcaaggacccagggacacaaaca

SEQ ID NO: 63283 - DNA, 120 bp, synthetic construct
  source 1..120: mol_type = other DNA
aatcgcttgaacccgggaagcagaggttgcagtgagccaaaatcatgccactgccctccagcctaaacaacagagactccatctcaaaaaaaaaaaaaaaaaaaaaaaaaaaaggggctg

SEQ ID NO: 63284 - DNA, 120 bp, synthetic construct
  source 1..120: mol_type = other DNA
caggagaatggtgtgaacccgggaggcggagctggcagtgagccgagattgcgccactgccctccagcctgggcaacagaacgagactccgtctcaaaaaaaaaaaaaaaaaaagaaaaa

SEQ ID NO: 63285 - DNA, 120 bp, synthetic construct
  source 1..120: mol_type = other DNA
tcagctacttcaaataaatattcatcttttttgtttaaaaagcttaagaggatcacgcctgtaatcccagcactttgggaggccgaagtgggtggatcacctgaggttaggagttcaaga

SEQ ID NO: 63286 - DNA, 120 bp, synthetic construct; identical to SEQ ID NO: 17855
  source 1..120: mol_type = other DNA

SEQ ID NO: 63287 - DNA, 120 bp, synthetic construct
  source 1..120: mol_type = other DNA
tttgtggaatagaaaaggcggaaaggtggggaaaagattgagaaattggatggttgccgtgtctgtgtagaaagaagtagacatgggagacttttcattttgttctgtactaagaaaaat

SEQ ID NO: 63288 - DNA, 120 bp, synthetic construct
  source 1..120: mol_type = other DNA
cacccagattcataaagcaagtccttagggacctacaaagggactgagactcccatacaataataataggagactttaacaccccactgtcaacattagacagatcaatgaagacagaaa

SEQ ID NO: 63289 - DNA, 120 bp, synthetic construct
  source 1..120: mol_type = other DNA
ctaaaccagaaagaagttgaatctctgaatagaccaataacaggagctgaaattgaggcagtaattaatagcttaccaaccaaaaaaagtccaggaccagacggattcacagccgaattc

SEQ ID NO: 63290 - DNA, 120 bp, synthetic construct
  source 1..120: mol_type = other DNA
gagcttctgcacagcaaaagaaactaccatcagagtgaacaggcaacctacagaatgggagaacatttttgcaatctactcatctgacaaaggactaatatccagaatctacaaagaact

SEQ ID NO: 63291 - DNA, 120 bp, synthetic construct
  source 1..120: mol_type = other DNA
aggtctccaaagtggccagccacctagaagtgaactgtgacaagaggaatctgacagcgctgcctccagacctgccgaaagacacaaccatcctccacctgagtgagaacctcctgtaca

SEQ ID NO: 63292 - DNA, 120 bp, synthetic construct
  source 1..120: mol_type = other DNA
ccttgcatccaacacaagaatccactaaggagcagaccacattcccacctagatggaccccaaatttcacacttcacatggaatccatcacattctccaaaactccaaaatccactactg

SEQ ID NO: 63293 - DNA, 120 bp, synthetic construct
  source 1..120: mol_type = other DNA
ctcctattggaatctagttgggggttggaggggtaaggaacacagggtgatagggaggggtcttagttcctttttctgtatcagaagccctgtcttcacaacacaggcacacaatttcag

SEQ ID NO: 63294 - DNA, 120 bp, synthetic construct; identical to SEQ ID NO: 20022
  source 1..120: mol_type = other DNA

SEQ ID NO: 63295 - DNA, 120 bp, synthetic construct; identical to SEQ ID NO: 20023
  source 1..120: mol_type = other DNA

SEQ ID NO: 63296 - DNA, 120 bp, synthetic construct
  source 1..120: mol_type = other DNA
ggcgaggctgcagtgagctatgatcactgtacactagcctgggtgacagagtgagaccttgtctcaaaaaaagacagagagagaaagcaaaagaaaggaagtaaggaagataaaaatata

SEQ ID NO: 63297 - DNA, 120 bp, synthetic construct; identical to SEQ ID NO: 20024
  source 1..120: mol_type = other DNA

SEQ ID NO: 63298 - DNA, 120 bp, synthetic construct; identical to SEQ ID NO: 20025
  source 1..120: mol_type = other DNA

SEQ ID NO: 63299 - DNA, 120 bp, synthetic construct; identical to SEQ ID NO: 20026
  source 1..120: mol_type = other DNA

SEQ ID NO: 63300 - DNA, 120 bp, synthetic construct; identical to SEQ ID NO: 8979
  source 1..120: mol_type = other DNA

SEQ ID NO: 63301 - DNA, 120 bp, synthetic construct; identical to SEQ ID NO: 8980
  source 1..120: mol_type = other DNA

SEQ ID NO: 63302 - DNA, 120 bp, synthetic construct; identical to SEQ ID NO: 20842
  source 1..120: mol_type = other DNA

SEQ ID NO: 63303 - DNA, 120 bp, synthetic construct; identical to SEQ ID NO: 20843
  source 1..120: mol_type = other DNA

SEQ ID NO: 63304 - DNA, 120 bp, synthetic construct; identical to SEQ ID NO: 20844
  source 1..120: mol_type = other DNA

SEQ ID NO: 63305 - DNA, 120 bp, synthetic construct; identical to SEQ ID NO: 20845
  source 1..120: mol_type = other DNA

SEQ ID NO: 63306 - DNA, 120 bp, synthetic construct; identical to SEQ ID NO: 20846
  source 1..120: mol_type = other DNA

SEQ ID NO: 63307 - DNA, 120 bp, synthetic construct; identical to SEQ ID NO: 20847
  source 1..120: mol_type = other DNA

SEQ ID NO: 63308 - DNA, 120 bp, synthetic construct; identical to SEQ ID NO: 20848
  source 1..120: mol_type = other DNA

SEQ ID NO: 63309 - DNA, 120 bp, synthetic construct; identical to SEQ ID NO: 20849
  source 1..120: mol_type = other DNA

SEQ ID NO: 63310 - DNA, 120 bp, synthetic construct; identical to SEQ ID NO: 20850
  source 1..120: mol_type = other DNA

SEQ ID NO: 63311 - DNA, 120 bp, synthetic construct; identical to SEQ ID NO: 20851
  source 1..120: mol_type = other DNA

SEQ ID NO: 63312 - DNA, 120 bp, synthetic construct; identical to SEQ ID NO: 20852
  source 1..120: mol_type = other DNA

SEQ ID NO: 63313 - DNA, 120 bp, synthetic construct; identical to SEQ ID NO: 20853
  source 1..120: mol_type = other DNA

SEQ ID NO: 63314 - DNA, 120 bp, synthetic construct; identical to SEQ ID NO: 20854
  source 1..120: mol_type = other DNA

SEQ ID NO: 63315 - DNA, 120 bp, synthetic construct; identical to SEQ ID NO: 20855
  source 1..120: mol_type = other DNA

SEQ ID NO: 63316 - DNA, 120 bp, synthetic construct; identical to SEQ ID NO: 20856
  source 1..120: mol_type = other DNA

SEQ ID NO: 63317 - DNA, 120 bp, synthetic construct; identical to SEQ ID NO: 20857
  source 1..120: mol_type = other DNA

SEQ ID NO: 63318 - DNA, 120 bp, synthetic construct; identical to SEQ ID NO: 20840
  source 1..120: mol_type = other DNA

SEQ ID NO: 63319 - DNA, 120 bp, synthetic construct; identical to SEQ ID NO: 20841
  source 1..120: mol_type = other DNA

SEQ ID NO: 63320 - DNA, 120 bp, synthetic construct; identical to SEQ ID NO: 25568
  source 1..120: mol_type = other DNA

SEQ ID NO: 63321 - DNA, 120 bp, synthetic construct; identical to SEQ ID NO: 9359
  source 1..120: mol_type = other DNA

SEQ ID NO: 63322 - DNA, 120 bp, synthetic construct
  source 1..120: mol_type = other DNA
gctgttgggtacacctcccagacggggtggtggccgggcagaggggctcctcacttcccagtaggggcggccgggcagaggcgcccctcacctcccggacggggcggctggccaggtggg

SEQ ID NO: 63323 - DNA, 120 bp, synthetic construct
  source 1..120: mol_type = other DNA
tggcggatcactcgcggttaggagctggagaccagccctgccaacacagcgaaaccccgtctccacccaaaaaatacgaaaaccagtcaggcgtggcagcgcgcacctgcaattgcaggc

SEQ ID NO: 63324 - DNA, 120 bp, synthetic construct
  source 1..120: mol_type = other DNA
aaaatctggttttacttattattattattattattgttagtttgagatggaattttgctcctgttgcccaggctggagtgcaatggtgcgatctcagctcatcgcaacctccgcctccca

SEQ ID NO: 63325 - DNA, 120 bp, synthetic construct; identical to SEQ ID NO: 9361
  source 1..120: mol_type = other DNA

SEQ ID NO: 63326 - DNA, 120 bp, synthetic construct
  source 1..120: mol_type = other DNA
caggttcaagcgattctcctatctcagcctcctgagtagctgggattacaggagcccactaccaagcccggctaatttaaatttggcatttttgaaagtaaataccttaaaatgaaagat

SEQ ID NO: 63327 - DNA, 120 bp, synthetic construct
  source 1..120: mol_type = other DNA
tttgcattaaaaaatggggcaaggggatatttaaaatatcatttcctgggctaggcgtggtggctcacgcctgtaatcccagcactttgggaggttgaggcgggtggatgaccttaggtt

SEQ ID NO: 63328 - DNA, 120 bp, synthetic construct
  source 1..120: mol_type = other DNA
aattttcaaaactaaactaaaaaacatgtacagagcagctctagaatacattagaagcttgtagtagaagttaactcttagaaatgggtgtctaggccgggcgcggtggctcacgcctgt

SEQ ID NO: 63329 - DNA, 120 bp, synthetic construct
  source 1..120: mol_type = other DNA
atcagtatttctgaatttcctcttagtgtaatcgctcaaattcctcttctcctgttgacaaacttaatcagcagcctcgtctaaccaaactgacacgaatgcgcactgataagaagagtg

SEQ ID NO: 63330 - DNA, 120 bp, synthetic construct
  source 1..120: mol_type = other DNA
gcttgagtccagaagttcaagagcagcctggacaacagtgagagactcttatctatacaaaaaaaaaaaaaaaaaaaaattagccaggcatgctggcacacacttgtattcccagcaggg

SEQ ID NO: 63331 - DNA, 120 bp, synthetic construct; identical to SEQ ID NO: 22209
  source 1..120: mol_type = other DNA

SEQ ID NO: 63332 - DNA, 120 bp, synthetic construct
  source 1..120: mol_type = other DNA
atctccacccgctcctcgtccccaccgcctctgtcccatcctccgctccgtcctgccccgcttggccgccgcagccccatcccctttccgcccctcctgtcgggagtccgtggcccgtcc

SEQ ID NO: 63333 - DNA, 120 bp, synthetic construct; identical to SEQ ID NO: 35312
  source 1..120: mol_type = other DNA

SEQ ID NO: 63334 - DNA, 120 bp, synthetic construct; identical to SEQ ID NO: 35313
  source 1..120: mol_type = other DNA

SEQ ID NO: 63335 - DNA, 120 bp, synthetic construct
  source 1..120: mol_type = other DNA
tcccacatcagcctcttgagtagctgggacctaatagcaccaccatgcctggctaatcttttaatttttttttttttttttttttttggtagagatggggtctccctatgttgcctaggc

SEQ ID NO: 63336 - DNA, 120 bp, synthetic construct; identical to SEQ ID NO: 35314
  source 1..120: mol_type = other DNA

SEQ ID NO: 63337 - DNA, 120 bp, synthetic construct
  source 1..120: mol_type = other DNA
ccccctttcacctccccctcctagcactatccaagagtaattactggattttccatgaatatgcatacataggctcagactgtaatgtaatgtcttagaaatctctgcctgttcatacat

SEQ ID NO: 63338 - DNA, 120 bp, synthetic construct
  source 1..120: mol_type = other DNA
ctgtagtcccagctactggggaggctgaggcaggagaatggcgtgaacctgggaggtggagcttgcagtgagccgagatcacgccactgcactccagcctgggtgacagagcaagactcc

SEQ ID NO: 63339 - DNA, 120 bp, synthetic construct
  source 1..120: mol_type = other DNA
gaatcacttgaacccgggagacagaggtttcagtgagccaagattgtgtcactgcactcactccagcctgggcaacacagtgagactgtctcaaaaaaaaaaaaaaaaaaaaaagtaaaa

SEQ ID NO: 63340 - DNA, 120 bp, synthetic construct; identical to SEQ ID NO: 35305
  source 1..120: mol_type = other DNA

SEQ ID NO: 63341 - DNA, 120 bp, synthetic construct; identical to SEQ ID NO: 35306
  source 1..120: mol_type = other DNA

SEQ ID NO: 63342 - DNA, 120 bp, synthetic construct; identical to SEQ ID NO: 35307
  source 1..120: mol_type = other DNA

SEQ ID NO: 63343 - DNA, 120 bp, synthetic construct; identical to SEQ ID NO: 35308
  source 1..120: mol_type = other DNA

SEQ ID NO: 63344 - DNA, 120 bp, synthetic construct; identical to SEQ ID NO: 35309
  source 1..120: mol_type = other DNA

SEQ ID NO: 63345 - DNA, 120 bp, synthetic construct; identical to SEQ ID NO: 6756
  source 1..120: mol_type = other DNA

SEQ ID NO: 63346 - DNA, 120 bp, synthetic construct
  source 1..120: mol_type = other DNA
agactgcagtaagccatgactgtgccactgacctccagcctgggcaacagagcaagaccatgtctcaaaacaatacaaaacaaaacaacaataacaaaaagatttgtgacaacatggaaa

SEQ ID NO: 63347 - DNA, 120 bp, synthetic construct; identical to SEQ ID NO: 35311
  source 1..120: mol_type = other DNA

SEQ ID NO: 63348 - DNA, 120 bp, synthetic construct
  source 1..120: mol_type = other DNA
cttagagagttcactatttttgaatttttattgttattattattattattattgagatggagtctcactctattgcccaggctggagtgcaatggcgtgatctcggctcactgcaacctc

SEQ ID NO: 63349 - DNA, 120 bp, synthetic construct
  source 1..120: mol_type = other DNA
ttatttgtatgttgagaagcatatgacatcccatagggagagaccaggctgtgaactgataagagaatgctgtttcatttaaaagcagacagagccttgtttgcatgacgttcttgcctc

SEQ ID NO: 63350 - DNA, 120 bp, synthetic construct; identical to SEQ ID NO: 35302
  source 1..120: mol_type = other DNA

SEQ ID NO: 63351 - DNA, 120 bp, synthetic construct; identical to SEQ ID NO: 35303
  source 1..120: mol_type = other DNA

SEQ ID NO: 63352 - DNA, 120 bp, synthetic construct
  source 1..120: mol_type = other DNA
ggagatcatgccattgcacccagccttggcaacagagcaagacttcgtctcaaaaaaaaaaaaaaaaaaaaaagaaaattaaaaaaaactaccatgggccaggcacagtggctcacgcct

SEQ ID NO: 63353 - DNA, 120 bp, synthetic construct
  source 1..120: mol_type = other DNA
ttgagcctgggaggcagaggttgcgatgaggcaagatcacgccactgcactccagtctgggcaacagtgagaccctgccttaaaaaaaaaaaaaaaaaaaaaaaaaaaaaaaaaaagtgt

SEQ ID NO: 63354 - DNA, 120 bp, synthetic construct; identical to SEQ ID NO: 35304
  source 1..120: mol_type = other DNA

SEQ ID NO: 63355 - DNA, 120 bp, synthetic construct; identical to SEQ ID NO: 13816
  source 1..120: mol_type = other DNA

SEQ ID NO: 63356 - DNA, 120 bp, synthetic construct
  source 1..120: mol_type = other DNA
tttatcattttttattgcatctatttgattcttctctcttttcttctttattagtcttgctagcggtctatcaattttgttgatcttttcaaaaaaccagctcctagattcactaatttt

SEQ ID NO: 63357 - DNA, 120 bp, synthetic construct
  source 1..120: mol_type = other DNA
agtagatcttcctccatccctttattttaagcctatgtgtgtctctgcacgtgagatgggtttcctgaatacagcacactgatgggtcttgactctttatccaatttgccagtctgtgtc

SEQ ID NO: 63358 - DNA, 120 bp, synthetic construct
  source 1..120: mol_type = other DNA
ctaacttctttgccattggtttgaatttcctcctgtagcttggagtggtttgatcatctggagccttcttctctcaactcgtcaaagtcattctccgtccagctttgttccgttgctggt

SEQ ID NO: 63359 - DNA, 120 bp, synthetic construct
  source 1..120: mol_type = other DNA
cacagaattggaaaaaactactttaaagttcatatggaaccaaaaaagagcccacaatgccaagacaatcctaagccaaaagaacaaagccggaggcatcccgctacctgacttcaaact

SEQ ID NO: 63360 - DNA, 120 bp, synthetic construct
  source 1..120: mol_type = other DNA
agtcaggaaacaacaggtgctggagaggatgtggagaaataggaacacttttacactgttggtgggactgtaaactaattcaaccattgtggaagtcagtgtggcgattcctcagggatc

SEQ ID NO: 63361 - DNA, 120 bp, synthetic construct; identical to SEQ ID NO: 13817
  source 1..120: mol_type = other DNA

SEQ ID NO: 63362 - DNA, 120 bp, synthetic construct; identical to SEQ ID NO: 13818
  source 1..120: mol_type = other DNA

SEQ ID NO: 63363 - DNA, 120 bp, synthetic construct; identical to SEQ ID NO: 13819
  source 1..120: mol_type = other DNA

SEQ ID NO: 63364 - DNA, 120 bp, synthetic construct
  source 1..120: mol_type = other DNA
caagggacacacattacaaagtgatgtaaattctgacctcagtaacataaaatgtgtgtgggaggagcaaaagtgtggagttgtatgcaagttaagttttatcagcttgaaataggctgt

SEQ ID NO: 63365 - DNA, 120 bp, synthetic construct; identical to SEQ ID NO: 13820
  source 1..120: mol_type = other DNA

SEQ ID NO: 63366 - DNA, 120 bp, synthetic construct; identical to SEQ ID NO: 13821
  source 1..120: mol_type = other DNA

SEQ ID NO: 63367 - DNA, 120 bp, synthetic construct; identical to SEQ ID NO: 13822
  source 1..120: mol_type = other DNA

SEQ ID NO: 63368 - DNA, 120 bp, synthetic construct
  source 1..120: mol_type = other DNA
cagtaaccaaaacagcatggtactggtaccaaaacagagatatagatcaatggaacagaacagagccctcagaaataacgctgaatatctacagctatctgatctttgacctgagaaaac

SEQ ID NO: 63369 - DNA, 120 bp, synthetic construct
  source 1..120: mol_type = other DNA
ctcagtgatctagaactggaaataccatttgacccagccatcccattactgggtatatacccaaaggattataaatcatgctgctataaagacacatgcacacgtatgtttactgcggca

SEQ ID NO: 63370 - DNA, 120 bp, synthetic construct
  source 1..120: mol_type = other DNA
cctttccctttccattgccagtgagatccagtagttctatttatttatttatttatttgagatgtagtctcactctgtcacccatgctagagtgcagtggtgcaatctcagctcaactgc

SEQ ID NO: 63371 - DNA, 120 bp, synthetic construct
  source 1..120: mol_type = other DNA
tcgccacactgacttccacaatggttgaactagtttacagtcccaccaacagtgtaaaagtgttcctatttctccacatcctctccagcacctgttgtttcctgactttttaatgattac

SEQ ID NO: 63372 - DNA, 120 bp, synthetic construct
  source 1..120: mol_type = other DNA
tgacttggcgatgcgggctcttttttggttccatatgaactttaaagtacttttttccaattctgtgaagaaagtcattggtagcttgatggggatggcattgaatctgtaaattacctt

SEQ ID NO: 63373 - DNA, 120 bp, synthetic construct
  source 1..120: mol_type = other DNA
atcaatgttcatcaaggatattggtctaaaattctcttttttggttgtgtctctgccctgctttggtatcagaatgatgctgggctcataaaatgagttagggaggattccctctttttc

SEQ ID NO: 63374 - DNA, 120 bp, synthetic construct
  source 1..120: mol_type = other DNA
ctgtctcgttgatctgtctaatgttgacagtggggtgttaaagtctcccattattaatgtgtgggagtctaagtctctttgtaggtcactcagaacttgctttatgaatctgggtgctcc

SEQ ID NO: 63375 - DNA, 120 bp, synthetic construct
  source 1..120: mol_type = other DNA
ccctcaaagggaagcccatcagactaacagcggatctctcggcagaaaccctacaagccagaagagagtgggggccaatattcaacattcttaaacaaaagaattttcaacccagaattt

SEQ ID NO: 63376 - DNA, 120 bp, synthetic construct
  source 1..120: mol_type = other DNA
ctcccagttaggctgctcaggggtcaggggtcagggacccacttgaggaggcagtctgcccattctcagatctccagctgagtgctgggagaaccactgctctcttcaaagctgtcagac

SEQ ID NO: 63377 - DNA, 120 bp, synthetic construct; identical to SEQ ID NO: 13828
  source 1..120: mol_type = other DNA

SEQ ID NO: 63378 - DNA, 120 bp, synthetic construct; identical to SEQ ID NO: 13829
  source 1..120: mol_type = other DNA

SEQ ID NO: 63379 - DNA, 120 bp, synthetic construct; identical to SEQ ID NO: 13824
  source 1..120: mol_type = other DNA

SEQ ID NO: 63380 - DNA, 120 bp, synthetic construct; identical to SEQ ID NO: 13825
  source 1..120: mol_type = other DNA

SEQ ID NO: 63381 - DNA, 120 bp, synthetic construct; identical to SEQ ID NO: 13826
  source 1..120: mol_type = other DNA

SEQ ID NO: 63382 - DNA, 120 bp, synthetic construct
  source 1..120: mol_type = other DNA
ctttttaatgatcgccactctaactggttgagatgatatctgatggtggttttgattcgcatttctctgatgaccagtgatgatgagcattttttcatatgtttgttgccgcataaatgt

SEQ ID NO: 63383 - DNA, 120 bp, synthetic construct
  source 1..120: mol_type = other DNA
atcattttttattgctgcatagtattccatggtgtatatgtgccacattttcttaatccagtctatcattgttggacatctgggttggttccaattctttgctattgtgaatagtgctgc

SEQ ID NO: 63384 - DNA, 120 bp, synthetic construct; identical to SEQ ID NO: 13827
  source 1..120: mol_type = other DNA

SEQ ID NO: 63385 - DNA, 120 bp, synthetic construct
  source 1..120: mol_type = other DNA
aaaaaaccaaacaccgcatattctcactcataggtgggaattgaacaatgagatcacatggacacaggaaggggaatatcacactctggggactgtggtggggtgcggggaggagggagg

SEQ ID NO: 63386 - DNA, 120 bp, synthetic construct
  source 1..120: mol_type = other DNA
caggttgaaacagtgcattaataatggaaggcaactttaggagtaaacataccaagctaaaatattttttgttttttattatactttaagttttagggtacatgtgcacaatatgcaggt

SEQ ID NO: 63387 - DNA, 120 bp, synthetic construct
  source 1..120: mol_type = other DNA
tcttgtaaatttgagttctttgtagattctggatattagccctttgtcagatgagtagattgcaaaaattttctcccatgttgtaggttgcctgttcactctgacggtagtttcttttgc

SEQ ID NO: 63388 - DNA, 120 bp, synthetic construct
  source 1..120: mol_type = other DNA
ggaaaacagaaaggacatccacaccaaaaacccatctgtacatcaccatcatcaaagaccaaaagtagataaaaccacaaagatggggaaaaaacagaacagaaaaactggaaactctaa

SEQ ID NO: 63389 - DNA, 120 bp, synthetic construct
  source 1..120: mol_type = other DNA
tcaccaccaggcctgccctaaaagagctcctgaaggaagcgctaaacatggaaatgcacaaacggtaccaactactgcaaaatcatgccaaaatgtaaagaccatcaagaataggaagaa

SEQ ID NO: 63390 - DNA, 120 bp, synthetic construct
  source 1..120: mol_type = other DNA
accagaatctctgggacgcattcaaagcagtgtgtagagggaaatttatagcactaaatgcccacaagagaaagcaggaaagatccaaaattgataccctaacatcacaattaaaagaac

SEQ ID NO: 63391 - DNA, 120 bp, synthetic construct
  source 1..120: mol_type = other DNA
aattcaacaacccttcatgctaaaaactctcaataaattaggtattgatgggacatatttaaaaataataagagctatctatgacaaacccacagccaatatcatactgaatggacaaaa

SEQ ID NO: 63392 - DNA, 120 bp, synthetic construct
  source 1..120: mol_type = other DNA
aaaggattcgtatttaataaatggtgctgggaaaactggctagccatatgtagaaagctgaaactggatcccttccttacaccttatacaaaaatcaattcaagatggattaaagactta

SEQ ID NO: 63393 - DNA, 120 bp, synthetic construct
  source 1..120: mol_type = other DNA
ctatcgcaagaacaaaaaaccaaacaccacatattctcattcataggtgggaattgaacaatgagatcacatggacacaggaaggggaacatcacactctggggactgttgtggggtggg

SEQ ID NO: 63394 - DNA, 120 bp, synthetic construct
  source 1..120: mol_type = other DNA
ggactgtttttggttggtaagccattaattattgcctgaatttcagagcctgttattggtctattcagagattcaacttcttcctggtttagtcttgggagggtgtatgtgtcgaggaat

SEQ ID NO: 63395 - DNA, 120 bp, synthetic construct
  source 1..120: mol_type = other DNA
attgatccctttaccattatgtaatggccttctttgtctcttttgatgtttgttggtttaaagtctgttttatcagagactggaattgcaacccctgcctttttttgttttccatttgct

SEQ ID NO: 63396 - DNA, 120 bp, synthetic construct; identical to SEQ ID NO: 13806
  source 1..120: mol_type = other DNA

SEQ ID NO: 63397 - DNA, 120 bp, synthetic construct; identical to SEQ ID NO: 13807
  source 1..120: mol_type = other DNA

SEQ ID NO: 63398 - DNA, 120 bp, synthetic construct; identical to SEQ ID NO: 13808
  source 1..120: mol_type = other DNA

SEQ ID NO: 63399 - DNA, 120 bp, synthetic construct; identical to SEQ ID NO: 13809
  source 1..120: mol_type = other DNA

SEQ ID NO: 63400 - DNA, 120 bp, synthetic construct
  source 1..120: mol_type = other DNA
ataaagaactacctgagactgggtcatttataaagaaagagctttaattgactgacagtttcatatggctgacaaggcctcaggaaacttacaatcatggcagaaggggaaggggaatgc

SEQ ID NO: 63401 - DNA, 120 bp, synthetic construct; identical to SEQ ID NO: 13810
  source 1..120: mol_type = other DNA

SEQ ID NO: 63402 - DNA, 120 bp, synthetic construct
  source 1..120: mol_type = other DNA
tggttgaactagtttacagtcccaccaacagtgtaaaagtgttcctatttctccacatcctctccagcacctgttgtttcctgactttttaatgatcgccattcgaactggtgtgagatg

SEQ ID NO: 63403 - DNA, 120 bp, synthetic construct
  source 1..120: mol_type = other DNA
aatgggagttcactcatgatttggctctctgtttgtctgttgttggtgtataagaatgcttgtgatttttgtacattgattttgtatcctgagactttgctaaagttgcttatcagctta

SEQ ID NO: 63404 - DNA, 120 bp, synthetic construct
  source 1..120: mol_type = other DNA
atgtgtccaggaatttatccatttcttctagattttctagtttatttgcgtagaggtgtttgtagtattccctgatggcagtttgtatttctgtgggatcggtggtgatatcccctttat

SEQ ID NO: 63405 - DNA, 120 bp, synthetic construct; identical to SEQ ID NO: 13811
  source 1..120: mol_type = other DNA

SEQ ID NO: 63406 - DNA, 120 bp, synthetic construct; identical to SEQ ID NO: 13812
  source 1..120: mol_type = other DNA

SEQ ID NO: 63407 - DNA, 120 bp, synthetic construct; identical to SEQ ID NO: 13813
  source 1..120: mol_type = other DNA

SEQ ID NO: 63408 - DNA, 120 bp, synthetic construct; identical to SEQ ID NO: 13814
  source 1..120: mol_type = other DNA

SEQ ID NO: 63409 - DNA, 120 bp, synthetic construct
  source 1..120: mol_type = other DNA
accaaagacattactgtacactactgtagactttataaacaccgtacacttaggctacaataaatttagaatacgttttcttttttttttattattatacttcaagttttagggtacatg

SEQ ID NO: 63410 - DNA, 120 bp, synthetic construct; identical to SEQ ID NO: 13815
  source 1..120: mol_type = other DNA

SEQ ID NO: 63411 - DNA, 120 bp, synthetic construct
  source 1..120: mol_type = other DNA
cctcagcctcccaaagtgttggaattacaggcatgagccatcacgcctggccggtaaacactatttcttaattaaatgaaagtaaaccccactttttgatggggttgtttgtttttttct

SEQ ID NO: 63412 - DNA, 120 bp, synthetic construct
  source 1..120: mol_type = other DNA
attactgggtatatacccaaaggactataaatcatgctgctataaagagacatgcacatgtatgtttattgcggcattattcacaatagcaaagacttggaaccaacccaaatgtccaat

SEQ ID NO: 63413 - DNA, 120 bp, synthetic construct
  source 1..120: mol_type = other DNA
atcagctcctttaagcacttctctgtattggtgattttagttataaattcttctaaaattttttcaaagttttcaacttctttgcctttggtttgaaagctggaggcatcacactacctg

SEQ ID NO: 63414 - DNA, 120 bp, synthetic construct
  source 1..120: mol_type = other DNA
tcccattactgggtatatacccaaaggactataaatcatgctgctataaagacacatgcacacgtatgtttattgcggcattattcacaatagcaaagacttggaaccaactcaaatgtc

SEQ ID NO: 63415 - DNA, 120 bp, synthetic construct; identical to SEQ ID NO: 13841
  source 1..120: mol_type = other DNA

SEQ ID NO: 63416 - DNA, 120 bp, synthetic construct
  source 1..120: mol_type = other DNA
cttgataatatttgccataattcagtattgtcaagactaaggtggtatcacactgtagttttaatttgcatttctctaatcattagtgatgttgagcattttttcatatgcttgttggcc

SEQ ID NO: 63417 - DNA, 120 bp, synthetic construct; identical to SEQ ID NO: 13842
  source 1..120: mol_type = other DNA

SEQ ID NO: 63418 - DNA, 120 bp, synthetic construct; identical to SEQ ID NO: 13843
  source 1..120: mol_type = other DNA

SEQ ID NO: 63419 - DNA, 120 bp, synthetic construct; identical to SEQ ID NO: 13844
  source 1..120: mol_type = other DNA

SEQ ID NO: 63420 - DNA, 120 bp, synthetic construct; identical to SEQ ID NO: 13845
  source 1..120: mol_type = other DNA

SEQ ID NO: 63421 - DNA, 120 bp, synthetic construct
  source 1..120: mol_type = other DNA
tgtgtttgcggggtggggcggggggcgggattggtgagaacatttaagatatactgtcttagcagatttcaagtatacgatagattattaactataatcactgtgctctatattgtagct

SEQ ID NO: 63422 - DNA, 120 bp, synthetic construct; identical to SEQ ID NO: 13847
  source 1..120: mol_type = other DNA

SEQ ID NO: 63423 - DNA, 120 bp, synthetic construct; identical to SEQ ID NO: 13848
  source 1..120: mol_type = other DNA

SEQ ID NO: 63424 - DNA, 120 bp, synthetic construct
  source 1..120: mol_type = other DNA
tcaagtgggtccctgacccctgacccccaagcagcctaactgggaggcaccccccagcaggagcacactgacacctcacacggcagggtattccaacagacctgcagctgagggtcctat

SEQ ID NO: 63425 - DNA, 120 bp, synthetic construct
  source 1..120: mol_type = other DNA
cccagaatttcatatccagccaaactaagcttcataagtgaaggagaaataaaatactttacagacaagcaaatgctgagagattttgtcaccaccagtcctgccctaaaagagctcctg

SEQ ID NO: 63426 - DNA, 120 bp, synthetic construct
  source 1..120: mol_type = other DNA
ttaagaatctcactcaaaactgctcaactacatggaaactgaacaacctgctcctgaatgactactgggtacataacgaaatgaaggcagaaataaagatgttctttgaaaccaacgaga

SEQ ID NO: 63427 - DNA, 120 bp, synthetic construct
  source 1..120: mol_type = other DNA
aggcagagacacaacaaaaaaagagaattttagaccaatatccttgatgaacattgatgcaaaaatcctcaataaaatactggcaaaatgaatccagcagcacatcaaaaagcttatcca

SEQ ID NO: 63428 - DNA, 120 bp, synthetic construct
  source 1..120: mol_type = other DNA
gacttcaaactatactacaaggctacagtaaccaaaacagcatggtactggtaccaaaacagagatatagatcaatggaacagaacagagccctcagaaataacgcagcatatctacaac

SEQ ID NO: 63429 - DNA, 120 bp, synthetic construct
  source 1..120: mol_type = other DNA
cattgtggaagtcagtgtggcgattcctcagggatctagaactggtaataccatttgacccagccatcccattactgggtatatacccaaaggactataaatcatgctgctataaagaca

SEQ ID NO: 63430 - DNA, 120 bp, synthetic construct
  source 1..120: mol_type = other DNA
tttttaatttttttttttttttttttttttttttttggagatggagtttagctcttgtggcccaggctggagtgcaatggccgtgatctcagctcaccacaacctccgcatcccaggttc

SEQ ID NO: 63431 - DNA, 120 bp, synthetic construct; identical to SEQ ID NO: 13831
  source 1..120: mol_type = other DNA

SEQ ID NO: 63432 - DNA, 120 bp, synthetic construct; identical to SEQ ID NO: 13832
  source 1..120: mol_type = other DNA

SEQ ID NO: 63433 - DNA, 120 bp, synthetic construct; identical to SEQ ID NO: 13833
  source 1..120: mol_type = other DNA

SEQ ID NO: 63434 - DNA, 120 bp, synthetic construct
  source 1..120: mol_type = other DNA
ttgtggttttgatttgcaattctctgatggccagtgatgctgagcattttttcatgtgttttttggctgcataaatgtcttcttttgagaagtgtctgttcatgtccttcacccactttt

SEQ ID NO: 63435 - DNA, 120 bp, synthetic construct; identical to SEQ ID NO: 13834
  source 1..120: mol_type = other DNA

SEQ ID NO: 63436 - DNA, 120 bp, synthetic construct
  source 1..120: mol_type = other DNA
ttaatgattgccattctaactggtgtgagatggtatctcattgtggttttgatttgcatttctctgatggccagtgatggtgagcattttttcatgtattttttggctgcataaatgtct

SEQ ID NO: 63437 - DNA, 120 bp, synthetic construct; identical to SEQ ID NO: 13835
  source 1..120: mol_type = other DNA

SEQ ID NO: 63438 - DNA, 120 bp, synthetic construct
  source 1..120: mol_type = other DNA
gccattgctcttggtgttttagtcatgaagtccttgcccatgcctatgtcctgaattgtattgcctaggttttcttctagggtttttatggttttaggtctaacatttaagtctttaatc

SEQ ID NO: 63439 - DNA, 120 bp, synthetic construct
  source 1..120: mol_type = other DNA
aaggccttttctgcctctattgagataatcatgtggtttttgtctttggttctgtttaccaaattaaaattaaattgttttgaatctgttatatttactgaaaattttagagacaaagta

SEQ ID NO: 63440 - DNA, 120 bp, synthetic construct; identical to SEQ ID NO: 63436
  source 1..120: mol_type = other DNA

SEQ ID NO: 63441 - DNA, 120 bp, synthetic construct
  source 1..120: mol_type = other DNA
ggtccttcacatcccttgtaagttggattcctaggtatttaattctctttgaagcaattgtgaatgggagttcactcatgatttggctctctgtttgtctgttgttggtgtataagaatg

SEQ ID NO: 63442 - DNA, 120 bp, synthetic construct
  source 1..120: mol_type = other DNA
ggtcctggactctttttggttggtaaactattgattattgccacaatttcagctcctgttattggtctattcagagattcaacttcttcctggtttagtcttgggagagtttatgtgtcg

SEQ ID NO: 63443 - DNA, 120 bp, synthetic construct
  source 1..120: mol_type = other DNA
gtggtggagagttctgtagatgtctattaggtccgcttggtgcagcgctgagttcaattcctgggtatccttgttgactttctgtctcgttgatctgtctaatgttgacagtggggtgtt

SEQ ID NO: 63444 - DNA, 120 bp, synthetic construct
  source 1..120: mol_type = other DNA
gttgctcttcttgaggagtatctttgtggcgttctctgtatttcctgaatctgaacgttggcctgccttgctagattggggaagttctcctggataatatcctgcagagtgttttccaac

SEQ ID NO: 63445 - DNA, 120 bp, synthetic construct
  source 1..120: mol_type = other DNA
agaaccactgctctcttcaaagctgtcagacagggacatttaagtctgcagaggttactgctgtctttttgtttgtctgtgccctgcccccagaggtggatcctacagagggaggcaggc

SEQ ID NO: 63446 - DNA, 120 bp, synthetic construct
  source 1..120: mol_type = other DNA
ctacatcctcaccaacatgttattttgtctttctaagactagctattctgaccggggtaagatgatatctcattgtggttttggtttccatttccctgatcataagtgatgttgagcagt

SEQ ID NO: 63447 - DNA, 120 bp, synthetic construct; identical to SEQ ID NO: 13837
  source 1..120: mol_type = other DNA

SEQ ID NO: 63448 - DNA, 120 bp, synthetic construct
  source 1..120: mol_type = other DNA
actgctgtgagatggtatctcattgtggttttgatttgcatttctctgacggccagtgatggtgagcattttttcatgtgttttttggctgcataaatgtcttcttttgagaagtgtctg

SEQ ID NO: 63449 - DNA, 120 bp, synthetic construct
  source 1..120: mol_type = other DNA
tacaaaaatcacaagcattcttatacaccaataacagacaaacagagagccaaatcatgagtgaactcccattcacaattgcttcaaagagaataaaatacctaggaatccaacttacaa

SEQ ID NO: 63450 - DNA, 120 bp, synthetic construct
  source 1..120: mol_type = other DNA
attactatacaatttcagaagataccaaagcaggtcaaagtaatgaagatttgaactgggctttaaaaaatggtgccagaggccaggtgcagtggctcatgcctgtaatcacagcacttt

SEQ ID NO: 63451 - DNA, 120 bp, synthetic construct
  source 1..120: mol_type = other DNA
ctaatacaatgtttttatttatttatttattttttagacagagtcttgctctcttgcccaggctggagtgtagtggcgtgatctcagctcactacaagctccgcctcctgggttcaagtg

SEQ ID NO: 63452 - DNA, 120 bp, synthetic construct
  source 1..120: mol_type = other DNA
aaagaaacaagtgaaaaagcaaaaaaataaaccaggcacagtgcctcatgcctgtaatacaaacacttaaggaggctgaggcaggaggatgacttgagcccaggagtttgagaccaattt

SEQ ID NO: 63453 - DNA, 120 bp, synthetic construct; identical to SEQ ID NO: 21701
  source 1..120: mol_type = other DNA

SEQ ID NO: 63454 - DNA, 120 bp, synthetic construct
  source 1..120: mol_type = other DNA
atgagctgctgggcacacctcccagacggggtggtggccgggcagaggggctcctcacctcccagtaggggtggccgggcagaggcgcccctcacctcccggacggggcagctggcaggg

SEQ ID NO: 63455 - DNA, 120 bp, synthetic construct
  source 1..120: mol_type = other DNA
acgatgggtggccaggcagagacgctcctcacttcccagactgggtggcggccgggcagaggctgcactcctggcactttgggaggccaaggcaggcggctgggaggtggaggttgtagc

SEQ ID NO: 63456 - DNA, 120 bp, synthetic construct; identical to SEQ ID NO: 2164
  source 1..120: mol_type = other DNA

SEQ ID NO: 63457 - DNA, 120 bp, synthetic construct; identical to SEQ ID NO: 14866
  source 1..120: mol_type = other DNA

SEQ ID NO: 63458 - DNA, 120 bp, synthetic construct; identical to SEQ ID NO: 2165
  source 1..120: mol_type = other DNA

SEQ ID NO: 63459 - DNA, 120 bp, synthetic construct
  source 1..120: mol_type = other DNA
ccaaagtgccaggattacaggcatgagccaccatgcctggctgaaaataccaggtttttaagtatcagcactgcctcttcaatcttttctattactatgttgtgctcagtggtatttttt

SEQ ID NO: 63460 - DNA, 120 bp, synthetic construct
  source 1..120: mol_type = other DNA
agactatattatccaacattccaataagataaaataatcacaatgacttctcttttttggaaaaatgtttctcttattctcctacgttattgtgaagactttttttcttaaacaagaaac

SEQ ID NO: 63461 - DNA, 120 bp, synthetic construct
  source 1..120: mol_type = other DNA
tttttgggctcacatctccaaggacctgggtcccacagccccagaccccaccctcaccagtcatccctgggtgactttaggctggtgaatcctggggctccctgctgctgactcttccct

SEQ ID NO: 63462 - DNA, 120 bp, synthetic construct
  source 1..120: mol_type = other DNA
ggttgtcctctttctgataaattcccagatttaacagaaaggctgccttctgccatgaggacacattgatataagagtttgagaggtacaggtgcacttcttcacactaacagacgtgtg

SEQ ID NO: 63463 - DNA, 120 bp, synthetic construct
  source 1..120: mol_type = other DNA
aaagggtccaagataggcagaaaagaaaattgtgccagttgatggggaagaaaagaagtcagagggcttagatactgagtgggacagaacatcttcatgtgcactctcatctcttgtagt

SEQ ID NO: 63464 - DNA, 120 bp, synthetic construct
  source 1..120: mol_type = other DNA
tcagaccttcagttctgtggctgtgggcaaaagccaacaaagacccaaatcctctgtccttgggagcttgaggagagtttaccagttcgagttcccactgggtctgagaactttgccttt

SEQ ID NO: 63465 - DNA, 120 bp, synthetic construct
  source 1..120: mol_type = other DNA
agggtgagtccaaccacctgccccgtcccctgggagcctggctttgcagacagaggagtgagcctaaaggtcccttctgcaggatggagtgtcctgcccagaaggcagcatggccatttc

SEQ ID NO: 63466 - DNA, 120 bp, synthetic construct
  source 1..120: mol_type = other DNA
aaccaaaccacgggcttggaaatgccttgatctttactgaccgagttgtatattgggcctagccctggcccttttaaggggcactgtgtggaatggcccggcctccccagattgaaactt

SEQ ID NO: 63467 - DNA, 120 bp, synthetic construct
  source 1..120: mol_type = other DNA
ttcttttcttttcttttcttttcttttcttttctttttttttttttggaatccagaggctcttattgtctgcttcctttctcagctgaacctctgcccccggagcccccagcagtgccct

SEQ ID NO: 63468 - DNA, 120 bp, synthetic construct; identical to SEQ ID NO: 63028
  source 1..120: mol_type = other DNA

SEQ ID NO: 63469 - DNA, 120 bp, synthetic construct; identical to SEQ ID NO: 63029
  source 1..120: mol_type = other DNA

SEQ ID NO: 63470 - DNA, 120 bp, synthetic construct
  source 1..120: mol_type = other DNA
actgggccctgcaggaagtcacggagaagctggcccatgccaggactcacctccaccttctccatgacttgaaaatgccacctgagggcaggtcgctgccgagatgtgactgcaatattt

SEQ ID NO: 63471 - DNA, 120 bp, synthetic construct
  source 1..120: mol_type = other DNA
acttcctttgaatgttagagtcactcatgattatttgtttttctaatttatagttttaagtttatttgtaaaaagttaaaagagagtgggtgtctgtggctctcactgatgttcactctg

SEQ ID NO: 63472 - DNA, 120 bp, synthetic construct
  source 1..120: mol_type = other DNA
caaagagagtacaataccgtctactaaaactcctttttgtttcaactaagtatctcacatatattagtttataataatgtttctattattttttaaagtgttttccattcaaggaaaaag

SEQ ID NO: 63473 - DNA, 120 bp, synthetic construct
  source 1..120: mol_type = other DNA
acactaaaaagaatggaaattgtatgacaataacttaagtctttctccaaagtgcatgcagtcttttgcgatacctcattcagccgagtatttgtactcttcctcattcagtataaggaa

SEQ ID NO: 63474 - DNA, 120 bp, synthetic construct
  source 1..120: mol_type = other DNA
ggggtgaaaaagttatgggataaaaaatgtaaaaaagttgtggcaaaaaaatcttgtgaccaaaaagtagaagaaagttttatgaaaagttaccaaaaaaagttatgaaaaagaagttat

SEQ ID NO: 63475 - DNA, 120 bp, synthetic construct; identical to SEQ ID NO: 21702
  source 1..120: mol_type = other DNA

SEQ ID NO: 63476 - DNA, 120 bp, synthetic construct; identical to SEQ ID NO: 21703
  source 1..120: mol_type = other DNA

SEQ ID NO: 63477 - DNA, 120 bp, synthetic construct
  source 1..120: mol_type = other DNA
ccattctaactggtgtgagatggtatctcattgtggttttgatttgcatttctctgatggccagtgatggtgagcattttttcatatgttttttggctgcataaatgtcttcttttgaga

SEQ ID NO: 63478 - DNA, 120 bp, synthetic construct
  source 1..120: mol_type = other DNA
ctattttccaattctgtgaagaaagtgattggtagcttgatggggatggcattgaatctgtaaattaccttgggcagtatggccattttcactatattgattcttcctacccatgagcat

SEQ ID NO: 63479 - DNA, 120 bp, synthetic construct
  source 1..120: mol_type = other DNA
caagtgattctcccacctcagtctcccaagtagctgggagtgtgggcatgcaccacggtgctttgtttaagactctattttcaaaaaaccaagcataaacattattaacacaaacataat

SEQ ID NO: 63480 - DNA, 120 bp, synthetic construct; identical to SEQ ID NO: 21704
  source 1..120: mol_type = other DNA

SEQ ID NO: 63481 - DNA, 120 bp, synthetic construct; identical to SEQ ID NO: 14420
  source 1..120: mol_type = other DNA

SEQ ID NO: 63482 - DNA, 120 bp, synthetic construct; identical to SEQ ID NO: 14421
  source 1..120: mol_type = other DNA

SEQ ID NO: 63483 - DNA, 120 bp, synthetic construct
  source 1..120: mol_type = other DNA
gaaactatcccaatcaatagaaagagagggaatcctccctaactcattttatgaggccagcatcatcctgataccaaagccgggcagagacacaaccaaaaaagagaattttagaccaat

SEQ ID NO: 63484 - DNA, 120 bp, synthetic construct; identical to SEQ ID NO: 14422
  source 1..120: mol_type = other DNA

SEQ ID NO: 63485 - DNA, 120 bp, synthetic construct; identical to SEQ ID NO: 14423
  source 1..120: mol_type = other DNA

SEQ ID NO: 63486 - DNA, 120 bp, synthetic construct
  source 1..120: mol_type = other DNA
ggtagtgatatcccctttttcattttttattgtgtctatttgattcttctctctttttttctttattagtcttgctagcggtctatcaattttgttgatcctttcaaaaaaccagctcct

SEQ ID NO: 63487 - DNA, 120 bp, synthetic construct
  source 1..120: mol_type = other DNA
tggaggcatcacactacctgacttcaaactatactacaaggctacaataaccaaaacagcgtggtactggtaccaaaacagagatatagatcaatggaacagaacagagccctcagaaat

SEQ ID NO: 63488 - DNA, 120 bp, synthetic construct
  source 1..120: mol_type = other DNA
ttggaaccaacccaaatgtccaacaatgatagactggattaagaaaatgtggcatatgtacaccatggaatactatgcagccataaaaaatgatgagttcatgtcctttgtagggacatg

SEQ ID NO: 63489 - DNA, 120 bp, synthetic construct
  source 1..120: mol_type = other DNA
gggattacaggtgtgagccactgcaccgggccttctttttttcttaattcttatcatctgaatgggtgtgaaatggcatctcattgtggttttgatttgcatttccctaatgactaagga

SEQ ID NO: 63490 - DNA, 120 bp, synthetic construct
  source 1..120: mol_type = other DNA
atcacatggacacaggaaggggaatatcacactctggggactgttgtggggtggggggaggggggagggatagcactgggagatatacctaatgctagatgacgagatagagggtgcagc

SEQ ID NO: 63491 - DNA, 120 bp, synthetic construct; identical to SEQ ID NO: 14425
  source 1..120: mol_type = other DNA

SEQ ID NO: 63492 - DNA, 120 bp, synthetic construct; identical to SEQ ID NO: 14426
  source 1..120: mol_type = other DNA

SEQ ID NO: 63493 - DNA, 120 bp, synthetic construct; identical to SEQ ID NO: 14427
  source 1..120: mol_type = other DNA

SEQ ID NO: 63494 - DNA, 120 bp, synthetic construct; identical to SEQ ID NO: 14428
  source 1..120: mol_type = other DNA

SEQ ID NO: 63495 - DNA, 120 bp, synthetic construct
  source 1..120: mol_type = other DNA
tgagttcctgtcctttgtagggacatggatgaaattggaaatgatcattctcagtaaactatcgcaaggacaaaaaaccaaacaccgcatgttctcactcataggtgggaattgaacaat

SEQ ID NO: 63496 - DNA, 120 bp, synthetic construct; identical to SEQ ID NO: 14413
  source 1..120: mol_type = other DNA

SEQ ID NO: 63497 - DNA, 120 bp, synthetic construct
  source 1..120: mol_type = other DNA
gcggccgggcagagacgctcctcacctcccagacggggttgcggccgggtagaggtgctcctcacatcccagacggggcggcggggcagaggcgctccccacatctcagacgatgggcgg

SEQ ID NO: 63498 - DNA, 120 bp, synthetic construct; identical to SEQ ID NO: 14414
  source 1..120: mol_type = other DNA

SEQ ID NO: 63499 - DNA, 120 bp, synthetic construct
  source 1..120: mol_type = other DNA
acatttggcttggttccaagtctttgctattgtgaatagtaccgcaataaacatatgtgtgcatgtgtctttatagcagcatgatttatagtcctttgggtatatacccagtaatgggat

SEQ ID NO: 63500 - DNA, 120 bp, synthetic construct
  source 1..120: mol_type = other DNA
tttggcttttgttgccattgcttttggtgttttagacatgaagtccttgcccatgtctgtgtcctgaatggtaatgcctaggtttttttctagggtttttacggttttaggtctaacatg

SEQ ID NO: 63501 - DNA, 120 bp, synthetic construct
  source 1..120: mol_type = other DNA
tccctatcttgtgccagttttcaaagggaatgcttccagtttttgcccattcggtatgatatcagctgtgggtttgtcatagatagctcttattattttgaaatacatcccatcattacc

SEQ ID NO: 63502 - DNA, 120 bp, synthetic construct
  source 1..120: mol_type = other DNA
acaaaggacatgaactcatcattttttatggcagcatggtattccatggtgtatatgtgccacattttcttaatccagtctatcattgttggatatttgggttggttccaagtctttgct

SEQ ID NO: 63503 - DNA, 120 bp, synthetic construct
  source 1..120: mol_type = other DNA
accagtaccatgctgttttggttactgtgtccttgtagtatagtttgaagtcaggtagcgtgatgcctccagctttgttcttttggcttaggattgacttggcaatgcgggctctttttt

SEQ ID NO: 63504 - DNA, 120 bp, synthetic construct
  source 1..120: mol_type = other DNA
gttttgtctttgttctcgttggtttcaaagaacatctttatttctgcctccatttcgttatgtacccagtagtcattcaggagcaggttgttcagtttccatgtagttgagcagttttga

SEQ ID NO: 63505 - DNA, 120 bp, synthetic construct
  source 1..120: mol_type = other DNA
aatttttgtgtaaggtgtaaggaagggtccagtttcagttttctgcatatggctagcctttttcccaggaccatttattgaatagggaatcctttccccattgcttgtttttgtcaggtt

SEQ ID NO: 63506 - DNA, 120 bp, synthetic construct
  source 1..120: mol_type = other DNA
agtgcagtggtgccatcttggctcactgcaacctctgcctcccaggttcaagcaattcttctgccgcagtctcccaagtagctgggattacaagcgtgtgccaccacgcccagctaattt

SEQ ID NO: 63507 - DNA, 120 bp, synthetic construct; identical to SEQ ID NO: 14415
  source 1..120: mol_type = other DNA

SEQ ID NO: 63508 - DNA, 120 bp, synthetic construct; identical to SEQ ID NO: 14416
  source 1..120: mol_type = other DNA

SEQ ID NO: 63509 - DNA, 120 bp, synthetic construct; identical to SEQ ID NO: 14417
  source 1..120: mol_type = other DNA

SEQ ID NO: 63510 - DNA, 120 bp, synthetic construct; identical to SEQ ID NO: 14418
  source 1..120: mol_type = other DNA

SEQ ID NO: 63511 - DNA, 120 bp, synthetic construct; identical to SEQ ID NO: 14419
  source 1..120: mol_type = other DNA

SEQ ID NO: 63512 - DNA, 120 bp, synthetic construct; identical to SEQ ID NO: 19694
  source 1..120: mol_type = other DNA

SEQ ID NO: 63513 - DNA, 120 bp, synthetic construct; identical to SEQ ID NO: 19695
  source 1..120: mol_type = other DNA

SEQ ID NO: 63514 - DNA, 120 bp, synthetic construct
  source 1..120: mol_type = other DNA
tgctgttgtaactacaatgccagggcacactcggctgcaggacagtgagtagggtgagtagggtagtaggacagtgagtagggtgagtaggctgcaggacagtgagtagggtgagtaggg

SEQ ID NO: 63515 - DNA, 120 bp, synthetic construct
  source 1..120: mol_type = other DNA
ccaggcctggtgctcctggaggcaggactgagtcagacccacctccaggtttctgtgaccacggcaggagcctgggcagcattgtcgcaggacgtgagtgatgatgggaagttcgccctg

SEQ ID NO: 63516 - DNA, 120 bp, synthetic construct
  source 1..120: mol_type = other DNA
gctggggatccccatcagcacagccaggcagagatgatacccaccacacacctgggggcccccacacccagtcctcacccttaacttctgccatgggaattcctccatctgcagcggtca

SEQ ID NO: 63517 - DNA, 120 bp, synthetic construct
  source 1..120: mol_type = other DNA
ttcttttccttattaataaaacacacaatgcctagctggggggtcggaaggcaaatgccctagatggtggggtcacgtctttctccttctccttcctccttctgctggctgaagtgatga

SEQ ID NO: 63518 - DNA, 120 bp, synthetic construct
  source 1..120: mol_type = other DNA
tccagcataggtgataaaatgagacccaatctcaaaaaaaaaaaaagaaaaaaaaaaaaaagaagggcctttcagctgggtgtggtggctcatgcctgtaatcccagcactttgggaggc

SEQ ID NO: 63519 - DNA, 120 bp, synthetic construct
  source 1..120: mol_type = other DNA
cttgggcacatgttgtcatccggacctcctgaggctgtatcatgggtgtgtccttaatcttggcaaaacaaacttcctaaattgattgagacttgtctcagatacttcttggtttacagt

SEQ ID NO: 63520 - DNA, 120 bp, synthetic construct
  source 1..120: mol_type = other DNA
gcacaatgtgcacatgtaccctaaaacttaaagtataataaaaaaaaaatcctcagaataaacaagataaaaaatcgcaaccaataaaatctaactttagtaggtttcttttagtaggta

SEQ ID NO: 63521 - DNA, 120 bp, synthetic construct; identical to SEQ ID NO: 5449
  source 1..120: mol_type = other DNA

SEQ ID NO: 63522 - DNA, 120 bp, synthetic construct; identical to SEQ ID NO: 33484
  source 1..120: mol_type = other DNA

SEQ ID NO: 63523 - DNA, 120 bp, synthetic construct; identical to SEQ ID NO: 33485
  source 1..120: mol_type = other DNA

SEQ ID NO: 63524 - DNA, 120 bp, synthetic construct; identical to SEQ ID NO: 33486
  source 1..120: mol_type = other DNA

SEQ ID NO: 63525 - DNA, 120 bp, synthetic construct
  source 1..120: mol_type = other DNA
caggagaatcactttaacctgggaggtggaggttgcagtgagctgagatcatgccactgcactccagcctgggtgacagggtgagactctgtctcaaaaaaagaaagaaaaaaaaccccc

SEQ ID NO: 63526 - DNA, 120 bp, synthetic construct; identical to SEQ ID NO: 33027
  source 1..120: mol_type = other DNA

SEQ ID NO: 63527 - DNA, 120 bp, synthetic construct; identical to SEQ ID NO: 16285
  source 1..120: mol_type = other DNA

SEQ ID NO: 63528 - DNA, 120 bp, synthetic construct
  source 1..120: mol_type = other DNA
ttaaataatcttactttcttctcaaacaatacacatatctcggaacacatagacagaaagtccccccaggagtggggagggatagcactgggagatatacctaatgctagatgacgagtt

SEQ ID NO: 63529 - DNA, 120 bp, synthetic construct; identical to SEQ ID NO: 6504
  source 1..120: mol_type = other DNA

SEQ ID NO: 63530 - DNA, 120 bp, synthetic construct
  source 1..120: mol_type = other DNA
cattcaggacataggcatgggcaaggacttcatgtctaaaacaccaaaaccaatggcaacaaaagccaaaattgacaaatgggatctaattaaactaaagagcttctgcacagcaaaaga

SEQ ID NO: 63531 - DNA, 120 bp, synthetic construct; identical to SEQ ID NO: 24809
  source 1..120: mol_type = other DNA

SEQ ID NO: 63532 - DNA, 120 bp, synthetic construct; identical to SEQ ID NO: 24810
  source 1..120: mol_type = other DNA

SEQ ID NO: 63533 - DNA, 120 bp, synthetic construct
  source 1..120: mol_type = other DNA
attttaaaaactggctaaattaggttgtctggtttgtaagagttctttatatattctggatataaaagtcctttatcggccgggcgcggtggctcacgcctgtaatcccagcactttggg

SEQ ID NO: 63534 - DNA, 120 bp, synthetic construct; identical to SEQ ID NO: 24812
  source 1..120: mol_type = other DNA

SEQ ID NO: 63535 - DNA, 120 bp, synthetic construct
  source 1..120: mol_type = other DNA
tgaaattggaaatcatcgttctcagtaaactatctcaagaacaaaaaaccaaacactgcatattctcactcataggtgggaattgaacaatgagatcacatggacacaggaaggggaaca

SEQ ID NO: 63536 - DNA, 120 bp, synthetic construct
  source 1..120: mol_type = other DNA
gcagagccttagggtcatggaaacttgggggcatctgggagggaatcccagggatccccctgagatcccccaacagacatatacaaggtagggggctggttagctgaaaagggaatggga

SEQ ID NO: 63537 - DNA, 120 bp, synthetic construct; identical to SEQ ID NO: 21808
  source 1..120: mol_type = other DNA

SEQ ID NO: 63538 - DNA, 120 bp, synthetic construct; identical to SEQ ID NO: 24581
  source 1..120: mol_type = other DNA

SEQ ID NO: 63539 - DNA, 120 bp, synthetic construct
  source 1..120: mol_type = other DNA
gccttgatttgtagtctttgccaacttccatgtgtaaatacttccaccatggccaatttccagccaccaacacatgtggctgggaacagatgcacatagcacaccattatatatatatta

SEQ ID NO: 63540 - DNA, 120 bp, synthetic construct
  source 1..120: mol_type = other DNA
tctcctgacctcgtgatccgcctgtcttggcctcccaaagtgctgggattacaggcgttagccaccgcgtccggccctccctaactcattttatgaggccagcatcatcctgataccaaa

SEQ ID NO: 63541 - DNA, 120 bp, synthetic construct; identical to SEQ ID NO: 10157
  source 1..120: mol_type = other DNA

SEQ ID NO: 63542 - DNA, 120 bp, synthetic construct
  source 1..120: mol_type = other DNA
atccttcgcccactttttgatggggttgtttgtttttttcttgtaaatttggttgagttcattgtagattctggatattagccctttgtcagatgagtaggttgtgaaaattttctccca

SEQ ID NO: 63543 - DNA, 120 bp, synthetic construct
  source 1..120: mol_type = other DNA
gctctctgtctgttgttggtgtataagaatgcttgtgatttttgtacattgattttgtctcctgagactttgctgaagttgcttatcagcttaaggagattttgggctgagacaatgggg

SEQ ID NO: 63544 - DNA, 120 bp, synthetic construct
  source 1..120: mol_type = other DNA
ctggtttagtcttgggagagtgtatgtgtcaaggaatttatccgtttcttctagattttctagtttatttgcatagaggtgtttgtagtattctctgatggtagtttgtatttctgtggg

SEQ ID NO: 63545 - DNA, 120 bp, synthetic construct
  source 1..120: mol_type = other DNA
gtgcatatatatttaggatagttagctcttcttgttgaattgatccctttaccattatctaatggccttctttgtctcttttgatctttgttggtttaaagtctgttttatcagagacta

SEQ ID NO: 63546 - DNA, 120 bp, synthetic construct
  source 1..120: mol_type = other DNA
cttggttccattctccctgtcactttcagatacaccaatcagacgtagatttggtcttttcacatagtcccatatttcttggaggctttgctcatttctttttattcttttttctctaaa

SEQ ID NO: 63547 - DNA, 120 bp, synthetic construct
  source 1..120: mol_type = other DNA
ccccagcctcgctgccgccttgcagtttgatcacagactgctgtgctagcaatcagcgagattccgtgggcgtaggaccctcagagccaggtgtgggatatagtctcgtggtgtgccgtt

SEQ ID NO: 63548 - DNA, 120 bp, synthetic construct
  source 1..120: mol_type = other DNA
cttatactctgttggtgggagtgtaaatttgttcggccattgtggaaagcagtgtggtgattctttaaagacctaaaaacaattctgtgaagaaagtcattggtagcttgatggggatgg

SEQ ID NO: 63549 - DNA, 120 bp, synthetic construct
  source 1..120: mol_type = other DNA
tgtgctgctggattcggtttgccagtattttattgaggatttttgcatcgatgttcatcaaggatattggtctaaaattctcttttttggttgtgtctctgcccagctttgctgtcagga

SEQ ID NO: 63550 - DNA, 120 bp, synthetic construct
  source 1..120: mol_type = other DNA
ttacttccaagtatgtggtcaattttggaataggtgtggtgtggtgctgaaaaaaatgtatattctgttgatttggggtggagagttctgtagatgtctattaggtccgcttgatgcaga

SEQ ID NO: 63551 - DNA, 120 bp, synthetic construct
  source 1..120: mol_type = other DNA
gccacatatctacaactatctgatctttgacaaacctgagaaaaacaagcaatggggaaaggattccctatttaataaatggcgctgggaaaactggctagccatatggagaaagctgaa

SEQ ID NO: 63552 - DNA, 120 bp, synthetic construct
  source 1..120: mol_type = other DNA
cacatgcacacatatgtttattgcggcattattcacaataacaaagacttggaaccaacccaaatgtccaacaatgatagactggattaagaaaatgtggcacatatacaccatggaata

SEQ ID NO: 63553 - DNA, 120 bp, synthetic construct; identical to SEQ ID NO: 10158
  source 1..120: mol_type = other DNA

SEQ ID NO: 63554 - DNA, 120 bp, synthetic construct; identical to SEQ ID NO: 10159
  source 1..120: mol_type = other DNA

SEQ ID NO: 63555 - DNA, 120 bp, synthetic construct
  source 1..120: mol_type = other DNA
aacttcttttgttagggatcaggaatgcctacgttctctggtcactgggcttttgaaatgcaagaacattgatgcaaaaatcctcaataaaatactggcaaactgaatccagcagcacat

SEQ ID NO: 63556 - DNA, 120 bp, synthetic construct
  source 1..120: mol_type = other DNA
catcgccaagtcaatcctaagccaaaagaacaaagctggaggcatcatgctacctaacttcaaactatactacaaggctacagtaaccaaaacagcatggtactggtaccaaaacagaga

SEQ ID NO: 63557 - DNA, 120 bp, synthetic construct
  source 1..120: mol_type = other DNA
catcccattactgggtatatacccaaatggctataaatcatgctgctataaagacacatgcacacgtatgtttattgtggcactattcacaatagcaaagacttggaaccaacccaaatg

SEQ ID NO: 63558 - DNA, 120 bp, synthetic construct
  source 1..120: mol_type = other DNA
tctgggctctcaattctgttccataggtttgcgtgtctggtttttatgccagtgccatgctgttttgattactatagctttgtagtatattttgaagtcaagtattgtgatgcctccaac

SEQ ID NO: 63559 - DNA, 120 bp, synthetic construct; identical to SEQ ID NO: 10160
  source 1..120: mol_type = other DNA

SEQ ID NO: 63560 - DNA, 120 bp, synthetic construct
  source 1..120: mol_type = other DNA
ccatatcctttccagcacctgttgtttcctgactttttaatgatcaccattctaactggtgtgagatggtatctcattgtggttttgatttgcatttctctgatggccagtgatggtgag

SEQ ID NO: 63561 - DNA, 120 bp, synthetic construct
  source 1..120: mol_type = other DNA
ttaggatggacttggcaatgtgggctcttttttggttccatatgaactttaaaatagttttttccatttctgtgaagaaagtcattggtagctggatggggatggcattgaatctataat

SEQ ID NO: 63562 - DNA, 120 bp, synthetic construct; identical to SEQ ID NO: 10161
  source 1..120: mol_type = other DNA

SEQ ID NO: 63563 - DNA, 120 bp, synthetic construct
  source 1..120: mol_type = other DNA
ctggggaagttttcctcaattattccctcaaatgttttccaaacttttcttccttaggaacaccaattattcttagctttggtcatttaacataatcccaaacttcttggaggctttgtt

SEQ ID NO: 63564 - DNA, 120 bp, synthetic construct
  source 1..120: mol_type = other DNA
tctcatagtggttttgatttgcatttctctgatggccagtgatgatgagcattttttcatgtgttttttggctgcataaatgtcttcttttgagaagtgtctgctcatgtcctttgccca

SEQ ID NO: 63565 - DNA, 120 bp, synthetic construct
  source 1..120: mol_type = other DNA
cctcttttgtttcattgagcagtggcttgtagttctccttgaagaggtccttcacatcccttgtaagttggattcctaggtattttattctctttgaagcaattgtgaatgggagttcac

SEQ ID NO: 63566 - DNA, 120 bp, synthetic construct
  source 1..120: mol_type = other DNA
ctgttattggtctattcagagattcaacttcttcctggtttagtcttgggagagtgtatgtgtcgaggaatgtatccatttcttctagatattctagtttatttgtgtagaggtgtttgt

SEQ ID NO: 63567 - DNA, 120 bp, synthetic construct
  source 1..120: mol_type = other DNA
atgtaatggccttctttgtctcttttgatctttgttggtttaaagtctgttttatcagagagtaggattgcaacccctgcctttttttgttttccatttgcttggtagatcttcctccat

SEQ ID NO: 63568 - DNA, 120 bp, synthetic construct
  source 1..120: mol_type = other DNA
gcatcactttcaggtacaccaatcagacgtagatttggtcttttcacatagtcccatatttcttggaggctttgctcatttctttttattcttttttctctaaacttcccttctcgcttc

SEQ ID NO: 63569 - DNA, 120 bp, synthetic construct
  source 1..120: mol_type = other DNA
ctagcaatcagcgagactctgtgggcgtaggaccctccgagccaggtgtgggatatagtctcgtggtgcgccatttcctaagcccgtcggaaaagcgcagtattcgggcgggagtgaccc

SEQ ID NO: 63570 - DNA, 120 bp, synthetic construct; identical to SEQ ID NO: 8985
  source 1..120: mol_type = other DNA

SEQ ID NO: 63571 - DNA, 120 bp, synthetic construct
  source 1..120: mol_type = other DNA
ctctggcaggcccttggtgccctcgttttgcatgaggacccccctcggatgctctgagccaccctcctcaacccggatctaaaacccgggacacggctatcaggccagcctctctctcca

SEQ ID NO: 63572 - DNA, 120 bp, synthetic construct
  source 1..120: mol_type = other DNA
tgagagcctaccatgatgtgctatgtagtgttctttcagaggagagtcagtgagtctttaactcctgcctttgtggagctttcattctgacaggacaaggcaggcaataaactaaaattt

SEQ ID NO: 63573 - DNA, 120 bp, synthetic construct; identical to SEQ ID NO: 15146
  source 1..120: mol_type = other DNA

SEQ ID NO: 63574 - DNA, 120 bp, synthetic construct
  source 1..120: mol_type = other DNA
ttgccgggcagagggtctcctcacttctcagagggggcggcaggcagagatgctcctcacctcccagacagggtcgcggccgggcagaggtgctcctcacatcccagacggggcggcagg

SEQ ID NO: 63575 - DNA, 120 bp, synthetic construct; identical to SEQ ID NO: 7406
  source 1..120: mol_type = other DNA

SEQ ID NO: 63576 - DNA, 120 bp, synthetic construct; identical to SEQ ID NO: 22213
  source 1..120: mol_type = other DNA

SEQ ID NO: 63577 - DNA, 120 bp, synthetic construct; identical to SEQ ID NO: 22214
  source 1..120: mol_type = other DNA

SEQ ID NO: 63578 - DNA, 120 bp, synthetic construct
  source 1..120: mol_type = other DNA
aacttgtaccagccactgcaaaaacatgccaaattgtaaagaccatcaaggctaggaagaaactgcatcaactaacgagcaaaataaccagctaacatcataatgacaggatcagattca

SEQ ID NO: 63579 - DNA, 120 bp, synthetic construct; identical to SEQ ID NO: 21567
  source 1..120: mol_type = other DNA

SEQ ID NO: 63580 - DNA, 120 bp, synthetic construct
  source 1..120: mol_type = other DNA
ttttaatgattgccattctaactggtgtgagatgatatctcatagtggttttgatttacatttctctgatggccagtgatgatgagcattttttcatgtgttttttggctgcataaatgt

SEQ ID NO: 63581 - DNA, 120 bp, synthetic construct; identical to SEQ ID NO: 19704
  source 1..120: mol_type = other DNA

SEQ ID NO: 63582 - DNA, 120 bp, synthetic construct; identical to SEQ ID NO: 19705
  source 1..120: mol_type = other DNA

SEQ ID NO: 63583 - DNA, 120 bp, synthetic construct; identical to SEQ ID NO: 19706
  source 1..120: mol_type = other DNA

SEQ ID NO: 63584 - DNA, 120 bp, synthetic construct; identical to SEQ ID NO: 19707
  source 1..120: mol_type = other DNA

SEQ ID NO: 63585 - DNA, 120 bp, synthetic construct; identical to SEQ ID NO: 14591
  source 1..120: mol_type = other DNA

SEQ ID NO: 63586 - DNA, 120 bp, synthetic construct; identical to SEQ ID NO: 8376
  source 1..120: mol_type = other DNA

SEQ ID NO: 63587 - DNA, 120 bp, synthetic construct; identical to SEQ ID NO: 8377
  source 1..120: mol_type = other DNA

SEQ ID NO: 63588 - DNA, 120 bp, synthetic construct; identical to SEQ ID NO: 8378
  source 1..120: mol_type = other DNA

SEQ ID NO: 63589 - DNA, 120 bp, synthetic construct; identical to SEQ ID NO: 8379
  source 1..120: mol_type = other DNA

SEQ ID NO: 63590 - DNA, 120 bp, synthetic construct; identical to SEQ ID NO: 8380
  source 1..120: mol_type = other DNA

SEQ ID NO: 63591 - DNA, 120 bp, synthetic construct; identical to SEQ ID NO: 8381
  source 1..120: mol_type = other DNA

SEQ ID NO: 63592 - DNA, 120 bp, synthetic construct; identical to SEQ ID NO: 8382
  source 1..120: mol_type = other DNA

SEQ ID NO: 63593 - DNA, 120 bp, synthetic construct
  source 1..120: mol_type = other DNA
ctcccctgaagtttttattttttaaattaatttatttttatttattttttgagacagggtctcactctgttgcccaggctggagcgcagtggtgcaatcatggctcactgcagcctcaac

SEQ ID NO: 63594 - DNA, 120 bp, synthetic construct; identical to SEQ ID NO: 8383
  source 1..120: mol_type = other DNA

SEQ ID NO: 63595 - DNA, 120 bp, synthetic construct
  source 1..120: mol_type = other DNA
agaaattataaaagtattaattttgggaactaataaatgtccatgaaacaatttatgttcttctgctgcggcttcagccagtccctccattcggggtccctgacttcccgcaacacaagg

SEQ ID NO: 63596 - DNA, 120 bp, synthetic construct; identical to SEQ ID NO: 8384
  source 1..120: mol_type = other DNA

SEQ ID NO: 63597 - DNA, 120 bp, synthetic construct; identical to SEQ ID NO: 8385
  source 1..120: mol_type = other DNA

SEQ ID NO: 63598 - DNA, 120 bp, synthetic construct; identical to SEQ ID NO: 8386
  source 1..120: mol_type = other DNA

SEQ ID NO: 63599 - DNA, 120 bp, synthetic construct; identical to SEQ ID NO: 8387
  source 1..120: mol_type = other DNA

SEQ ID NO: 63600 - DNA, 120 bp, synthetic construct; identical to SEQ ID NO: 8388
  source 1..120: mol_type = other DNA

SEQ ID NO: 63601 - DNA, 120 bp, synthetic construct; identical to SEQ ID NO: 8389
  source 1..120: mol_type = other DNA

SEQ ID NO: 63602 - DNA, 120 bp, synthetic construct; identical to SEQ ID NO: 8390
  source 1..120: mol_type = other DNA

SEQ ID NO: 63603 - DNA, 120 bp, synthetic construct; identical to SEQ ID NO: 8391
  source 1..120: mol_type = other DNA

SEQ ID NO: 63604 - DNA, 120 bp, synthetic construct; identical to SEQ ID NO: 8392
  source 1..120: mol_type = other DNA

SEQ ID NO: 63605 - DNA, 120 bp, synthetic construct; identical to SEQ ID NO: 8393
  source 1..120: mol_type = other DNA

SEQ ID NO: 63606 - DNA, 120 bp, synthetic construct; identical to SEQ ID NO: 217
  source 1..120: mol_type = other DNA

SEQ ID NO: 63607 - DNA, 120 bp, synthetic construct; identical to SEQ ID NO: 8394
  source 1..120: mol_type = other DNA

SEQ ID NO: 63608 - DNA, 120 bp, synthetic construct; identical to SEQ ID NO: 8395
  source 1..120: mol_type = other DNA

SEQ ID NO: 63609 - DNA, 120 bp, synthetic construct; identical to SEQ ID NO: 8396
  source 1..120: mol_type = other DNA

SEQ ID NO: 63610 - DNA, 120 bp, synthetic construct
  source 1..120: mol_type = other DNA
ctgtcacctcacatgtttatttttttgtggtgaaaacatttgaaatttactctcagtgattttgaaatgtgcaatacattattatttattacattcatcatgctgtacagtatgttgcaa

SEQ ID NO: 63611 - DNA, 120 bp, synthetic construct; identical to SEQ ID NO: 8397
  source 1..120: mol_type = other DNA

SEQ ID NO: 63612 - DNA, 120 bp, synthetic construct
  source 1..120: mol_type = other DNA
ccatgctcatggactggtgtataatttttgtattcaaagaatggaatattgtctattgtgttttttttttttttttaagacggagtctcactctgttgcccaggctggagtgcagtgacg

SEQ ID NO: 63613 - DNA, 120 bp, synthetic construct; identical to SEQ ID NO: 8398
  source 1..120: mol_type = other DNA

SEQ ID NO: 63614 - DNA, 120 bp, synthetic construct
  source 1..120: mol_type = other DNA
gctactttgggaggctgaggcaggaaaatcgcttgaacccgggaggcagaggttgcagtgagccgagattacaccactgcactccagcctgggggcagaacgagactctgtctcaaaaaa

SEQ ID NO: 63615 - DNA, 120 bp, synthetic construct
  source 1..120: mol_type = other DNA
cccaccctcccagcacccactcaagtgtacagattggtaagagtttaaatcagctgagtaactgaacatttaaaggggaaattttggaaatgagggaaatgcagaaggactgatatccaa

SEQ ID NO: 63616 - DNA, 120 bp, synthetic construct
  source 1..120: mol_type = other DNA
aaattttactaggtgggcttaacaggagaattgagatgacagaagaatcagatccataaaaattcaggctgggcatggtggctcacgcctgtaatcccagcactttgggaggccgaggtg

SEQ ID NO: 63617 - DNA, 120 bp, synthetic construct; identical to SEQ ID NO: 8399
  source 1..120: mol_type = other DNA

SEQ ID NO: 63618 - DNA, 120 bp, synthetic construct; identical to SEQ ID NO: 8400
  source 1..120: mol_type = other DNA

SEQ ID NO: 63619 - DNA, 120 bp, synthetic construct; identical to SEQ ID NO: 220
  source 1..120: mol_type = other DNA

SEQ ID NO: 63620 - DNA, 120 bp, synthetic construct; identical to SEQ ID NO: 8401
  source 1..120: mol_type = other DNA

SEQ ID NO: 63621 - DNA, 120 bp, synthetic construct; identical to SEQ ID NO: 221
  source 1..120: mol_type = other DNA

SEQ ID NO: 63622 - DNA, 120 bp, synthetic construct; identical to SEQ ID NO: 222
  source 1..120: mol_type = other DNA

SEQ ID NO: 63623 - DNA, 120 bp, synthetic construct; identical to SEQ ID NO: 8402
  source 1..120: mol_type = other DNA

SEQ ID NO: 63624 - DNA, 120 bp, synthetic construct; identical to SEQ ID NO: 8403
  source 1..120: mol_type = other DNA

SEQ ID NO: 63625 - DNA, 120 bp, synthetic construct; identical to SEQ ID NO: 8404
  source 1..120: mol_type = other DNA

SEQ ID NO: 63626 - DNA, 120 bp, synthetic construct
  source 1..120: mol_type = other DNA
taatcccagctactcaggaggctgaggcaggagaatcgcttgaacccgagaggcggacgttgcagtgagctaagatcacgccactgcactccagcctggggagagggtgagactccatct

SEQ ID NO: 63627 - DNA, 120 bp, synthetic construct
  source 1..120: mol_type = other DNA
ggtttcgaactcctgagctcaggcaatctgcccgtctcagcctcccaaagtgctgggactacaggcgtgagccatcacacccggcctagggaagcatgtctttttttttttttttttttt

SEQ ID NO: 63628 - DNA, 120 bp, synthetic construct; identical to SEQ ID NO: 223
  source 1..120: mol_type = other DNA

SEQ ID NO: 63629 - DNA, 120 bp, synthetic construct
  source 1..120: mol_type = other DNA
agatggtagctcattgtggttttgatttgcatttctctaatgatcagtgatactgagcttgagctttttttcatacgtttgttggccacataaatgtcttcttttgagaattgtctgttc

SEQ ID NO: 63630 - DNA, 120 bp, synthetic construct
  source 1..120: mol_type = other DNA
gaggtccttcactccccttgttagctgtattcctaggtattgtattctctttgtagcagttgtaaatgggagttcattcatgatttggctctctgcttgtctgttgttggtgtacaggaa

SEQ ID NO: 63631 - DNA, 120 bp, synthetic construct
  source 1..120: mol_type = other DNA
cagtcttgggagggtgtatgtgtccaagaatttatccatttcttctagattttctagttgatttgcatagagatgtttatagtattctctgatggttatttgtatttctgtgggatcagt

SEQ ID NO: 63632 - DNA, 120 bp, synthetic construct
  source 1..120: mol_type = other DNA
ctttattttgagcctatgtgtgtctttgcacatgagaggggcctcctgaatacagcacactgatgggtcttgattctttatccagcttgccattctgtgtcttttaattggggcatttag

SEQ ID NO: 63633 - DNA, 120 bp, synthetic construct
  source 1..120: mol_type = other DNA
cctttgtaggtgacctgtcctttctggctgcccttaacattttttccttcatttcgaccttggagaatctgatgattatgtgtcttggggttgatcttctcatggagtattttactggag

SEQ ID NO: 63634 - DNA, 120 bp, synthetic construct
  source 1..120: mol_type = other DNA
ggaggtattaccagtggaggctgcagaacagcaaagatggctgcttgctccgtcctctgggaggaagcactgacctgatgccggcaggaacgttcctgtataagatgtctggcaacccct

SEQ ID NO: 63635 - DNA, 120 bp, synthetic construct; identical to SEQ ID NO: 224
  source 1..120: mol_type = other DNA

SEQ ID NO: 63636 - DNA, 120 bp, synthetic construct; identical to SEQ ID NO: 225
  source 1..120: mol_type = other DNA

SEQ ID NO: 63637 - DNA, 120 bp, synthetic construct
  source 1..120: mol_type = other DNA
gcctgggaagttgaagctgcagtgagccgtgattgtgccaccacactccagcaggcagcagagcaagactgtcttaaaaaaaaaattcatattttctatggctgaataatatctatttca

SEQ ID NO: 63638 - DNA, 120 bp, synthetic construct
  source 1..120: mol_type = other DNA
acattcctgtcagcaggggatgcgtgctccaatttctccacatccccaccaacaattgttattaacttttttatactgttccattgatctatatctctgttttggtaccagtaccatgct

SEQ ID NO: 63639 - DNA, 120 bp, synthetic construct
  source 1..120: mol_type = other DNA
aggacatgaacagacacttctcaaaagaagacatttatgacgccaaaaaacacaagaaaaaatgctcaccatcactggccatcagagaaatgcaaatcaaaaccacaatgacataccatc

SEQ ID NO: 63640 - DNA, 120 bp, synthetic construct; identical to SEQ ID NO: 8405
  source 1..120: mol_type = other DNA

SEQ ID NO: 63641 - DNA, 120 bp, synthetic construct; identical to SEQ ID NO: 8507
  source 1..120: mol_type = other DNA

SEQ ID NO: 63642 - DNA, 120 bp, synthetic construct; identical to SEQ ID NO: 8406
  source 1..120: mol_type = other DNA

SEQ ID NO: 63643 - DNA, 120 bp, synthetic construct; identical to SEQ ID NO: 8407
  source 1..120: mol_type = other DNA

SEQ ID NO: 63644 - DNA, 120 bp, synthetic construct; identical to SEQ ID NO: 8408
  source 1..120: mol_type = other DNA

SEQ ID NO: 63645 - DNA, 120 bp, synthetic construct
  source 1..120: mol_type = other DNA
acaacgtgcaggtttgttacatttggatacatgtgccatgttggtgtgctgcacctattaacttgtcatttacattaggtatatctcctaatgctgtccctccccccttcccccacccca

SEQ ID NO: 63646 - DNA, 120 bp, synthetic construct
  source 1..120: mol_type = other DNA
ttagccctttgtcagataagtagattgcaaaaattttctcccattctgtaggttgcctgttcactctgatggtagtttcttttgctgtgcagaagctctttagtttcattagatcccatt

SEQ ID NO: 63647 - DNA, 120 bp, synthetic construct
  source 1..120: mol_type = other DNA
ctgaagttgcttatcagcttaaggagattttgggctgagacgatggggttttctatatatacagtcatgtcttctgcaaacagggacaatttgacttcctcttttcctgattgaatatcc

SEQ ID NO: 63648 - DNA, 120 bp, synthetic construct; identical to SEQ ID NO: 8409
  source 1..120: mol_type = other DNA

SEQ ID NO: 63649 - DNA, 120 bp, synthetic construct; identical to SEQ ID NO: 8410
  source 1..120: mol_type = other DNA

SEQ ID NO: 63650 - DNA, 120 bp, synthetic construct; identical to SEQ ID NO: 8411
  source 1..120: mol_type = other DNA

SEQ ID NO: 63651 - DNA, 120 bp, synthetic construct; identical to SEQ ID NO: 8412
  source 1..120: mol_type = other DNA

SEQ ID NO: 63652 - DNA, 120 bp, synthetic construct; identical to SEQ ID NO: 8413
  source 1..120: mol_type = other DNA

SEQ ID NO: 63653 - DNA, 120 bp, synthetic construct; identical to SEQ ID NO: 8414
  source 1..120: mol_type = other DNA

SEQ ID NO: 63654 - DNA, 120 bp, synthetic construct; identical to SEQ ID NO: 8415
  source 1..120: mol_type = other DNA

SEQ ID NO: 63655 - DNA, 120 bp, synthetic construct; identical to SEQ ID NO: 8485
  source 1..120: mol_type = other DNA

SEQ ID NO: 63656 - DNA, 120 bp, synthetic construct; identical to SEQ ID NO: 8377
  source 1..120: mol_type = other DNA

SEQ ID NO: 63657 - DNA, 120 bp, synthetic construct; identical to SEQ ID NO: 8378
  source 1..120: mol_type = other DNA

SEQ ID NO: 63658 - DNA, 120 bp, synthetic construct; identical to SEQ ID NO: 8379
  source 1..120: mol_type = other DNA

SEQ ID NO: 63659 - DNA, 120 bp, synthetic construct; identical to SEQ ID NO: 8380
  source 1..120: mol_type = other DNA

SEQ ID NO: 63660 - DNA, 120 bp, synthetic construct; identical to SEQ ID NO: 8381
  source 1..120: mol_type = other DNA

SEQ ID NO: 63661 - DNA, 120 bp, synthetic construct; identical to SEQ ID NO: 8382
  source 1..120: mol_type = other DNA

SEQ ID NO: 63662 - DNA, 120 bp, synthetic construct
  source 1..120: mol_type = other DNA
tcccctgaagtttttattttttaaattaatttatttttatttatttttgagacagggtctcactctgttgcccaggctggagcacagtggtgcaatcatggctcactgcagcctcaactt

SEQ ID NO: 63663 - DNA, 120 bp, synthetic construct; identical to SEQ ID NO: 8383
  source 1..120: mol_type = other DNA

SEQ ID NO: 63664 - DNA, 120 bp, synthetic construct; identical to SEQ ID NO: 63595
  source 1..120: mol_type = other DNA

SEQ ID NO: 63665 - DNA, 120 bp, synthetic construct; identical to SEQ ID NO: 8384
  source 1..120: mol_type = other DNA

SEQ ID NO: 63666 - DNA, 120 bp, synthetic construct; identical to SEQ ID NO: 8385
  source 1..120: mol_type = other DNA

SEQ ID NO: 63667 - DNA, 120 bp, synthetic construct; identical to SEQ ID NO: 8386
  source 1..120: mol_type = other DNA

SEQ ID NO: 63668 - DNA, 120 bp, synthetic construct; identical to SEQ ID NO: 8387
  source 1..120: mol_type = other DNA

SEQ ID NO: 63669 - DNA, 120 bp, synthetic construct; identical to SEQ ID NO: 8388
  source 1..120: mol_type = other DNA

SEQ ID NO: 63670 - DNA, 120 bp, synthetic construct; identical to SEQ ID NO: 8389
  source 1..120: mol_type = other DNA

SEQ ID NO: 63671 - DNA, 120 bp, synthetic construct; identical to SEQ ID NO: 8486
  source 1..120: mol_type = other DNA

SEQ ID NO: 63672 - DNA, 120 bp, synthetic construct; identical to SEQ ID NO: 8487
  source 1..120: mol_type = other DNA

SEQ ID NO: 63673 - DNA, 120 bp, synthetic construct; identical to SEQ ID NO: 8488
  source 1..120: mol_type = other DNA

SEQ ID NO: 63674 - DNA, 120 bp, synthetic construct
  source 1..120: mol_type = other DNA
attgatagtcttgtgggtggaactagacaataaagaggtaaatatataaataaataattgccaattgtgatcattgtcatcaaggagtgaacaggttgctgtgatagagaaaaatgccga

SEQ ID NO: 63675 - DNA, 120 bp, synthetic construct
  source 1..120: mol_type = other DNA
aggatcacaaggcagaagaatttttcttagtacagaacaaaatgaaaagtctcccgggtctacctctttccacacagacatggcaaccatccgatttctcaatcctttccccgcctttcc

SEQ ID NO: 63676 - DNA, 120 bp, synthetic construct
  source 1..120: mol_type = other DNA
ttggcactttgggaggccaaggcaggcggctgggaggtggaggttgtagtgagccgagatcacgccgctgcactccagcctgggcaccattgagcactgagtgaaccagactccgtctgc

SEQ ID NO: 63677 - DNA, 120 bp, synthetic construct; identical to SEQ ID NO: 8489
  source 1..120: mol_type = other DNA

SEQ ID NO: 63678 - DNA, 120 bp, synthetic construct; identical to SEQ ID NO: 8490
  source 1..120: mol_type = other DNA

SEQ ID NO: 63679 - DNA, 120 bp, synthetic construct; identical to SEQ ID NO: 8491
  source 1..120: mol_type = other DNA

SEQ ID NO: 63680 - DNA, 120 bp, synthetic construct; identical to SEQ ID NO: 8492
  source 1..120: mol_type = other DNA

SEQ ID NO: 63681 - DNA, 120 bp, synthetic construct; identical to SEQ ID NO: 8493
  source 1..120: mol_type = other DNA

SEQ ID NO: 63682 - DNA, 120 bp, synthetic construct; identical to SEQ ID NO: 184
  source 1..120: mol_type = other DNA

SEQ ID NO: 63683 - DNA, 120 bp, synthetic construct; identical to SEQ ID NO: 8494
  source 1..120: mol_type = other DNA

SEQ ID NO: 63684 - DNA, 120 bp, synthetic construct; identical to SEQ ID NO: 8495
  source 1..120: mol_type = other DNA

SEQ ID NO: 63685 - DNA, 120 bp, synthetic construct; identical to SEQ ID NO: 8496
  source 1..120: mol_type = other DNA

SEQ ID NO: 63686 - DNA, 120 bp, synthetic construct; identical to SEQ ID NO: 63616
  source 1..120: mol_type = other DNA

SEQ ID NO: 63687 - DNA, 120 bp, synthetic construct; identical to SEQ ID NO: 8497
  source 1..120: mol_type = other DNA

SEQ ID NO: 63688 - DNA, 120 bp, synthetic construct
  source 1..120: mol_type = other DNA
gcactttgggaggctgaggcaggtagatcacctgaggtcaggagtttgagaccatcctgaccaatatggcgaaaccccgtctctactaaaaatacaaaaattagctggacatggtggcat

SEQ ID NO: 63689 - DNA, 120 bp, synthetic construct
  source 1..120: mol_type = other DNA
atcacaaggtcaggagttcatgaccagcctggccaagatggtgaaaccccgtctctactaaaaatacaataattagccaggcgtggtggcgggcacctgtaatcccaactactcgggagg

SEQ ID NO: 63690 - DNA, 120 bp, synthetic construct; identical to SEQ ID NO: 8498
  source 1..120: mol_type = other DNA

SEQ ID NO: 63691 - DNA, 120 bp, synthetic construct; identical to SEQ ID NO: 8499
  source 1..120: mol_type = other DNA

SEQ ID NO: 63692 - DNA, 120 bp, synthetic construct
  source 1..120: mol_type = other DNA
ctcctaggttcaagcgattctcctgcctcagcctcccaagtagctgggattacagacatgggtcaccacgcccagctaatttttgtatttttagtagagatggggtttcaccatgttgcc

SEQ ID NO: 63693 - DNA, 120 bp, synthetic construct; identical to SEQ ID NO: 8500
  source 1..120: mol_type = other DNA

SEQ ID NO: 63694 - DNA, 120 bp, synthetic construct; identical to SEQ ID NO: 8501
  source 1..120: mol_type = other DNA

SEQ ID NO: 63695 - DNA, 120 bp, synthetic construct; identical to SEQ ID NO: 8502
  source 1..120: mol_type = other DNA

SEQ ID NO: 63696 - DNA, 120 bp, synthetic construct; identical to SEQ ID NO: 187
  source 1..120: mol_type = other DNA

SEQ ID NO: 63697 - DNA, 120 bp, synthetic construct; identical to SEQ ID NO: 8503
  source 1..120: mol_type = other DNA

SEQ ID NO: 63698 - DNA, 120 bp, synthetic construct; identical to SEQ ID NO: 189
  source 1..120: mol_type = other DNA

SEQ ID NO: 63699 - DNA, 120 bp, synthetic construct
  source 1..120: mol_type = other DNA
tgttcagttcccacttataagtgagaacatgtgatatttggttttctgttcctgtgttagtttgatgaggatgatggcttccagctccatccatgtccctgcaaaggacatgatctcatt

SEQ ID NO: 63700 - DNA, 120 bp, synthetic construct
  source 1..120: mol_type = other DNA
tttgtcaaagatcagatggctgtagatgtgcggtcttatttctgagttctctattctgttccattggtctatgtgtctgtttttgtaccagtaccatgctgttttggtcactgtaacctg

SEQ ID NO: 63701 - DNA, 120 bp, synthetic construct
  source 1..120: mol_type = other DNA
attgattcgtgtatgttgaaccagtgttgcataccggggatgaagctgacttgatcgtggtagatgagctttttgatgtgctgctggatttggtttgccagtattttattgaggattttc

SEQ ID NO: 63702 - DNA, 120 bp, synthetic construct
  source 1..120: mol_type = other DNA
ttcaggagcaggttgttcaattttcatgtagttgtgtagttttgagttagtttcttagtcttgagttctaatttgattgtcctgtggtctgagagactgttataatttcagttcttttgc

SEQ ID NO: 63703 - DNA, 120 bp, synthetic construct
  source 1..120: mol_type = other DNA
tggctcacgccggtaatcccagcactttgggaggccgaggcgggcagatcacgaggtcagaagatcgagaccatcctggctaacacggtgaaaccccatctctactaaaaatacaaaaaa

SEQ ID NO: 63704 - DNA, 120 bp, synthetic construct; identical to SEQ ID NO: 190
  source 1..120: mol_type = other DNA

SEQ ID NO: 63705 - DNA, 120 bp, synthetic construct; identical to SEQ ID NO: 8504
  source 1..120: mol_type = other DNA

SEQ ID NO: 63706 - DNA, 120 bp, synthetic construct
  source 1..120: mol_type = other DNA
atagcaagaccccatctcagcaaaacaataaaaattaactgagtgtggtggcatgcctgtgttcccagctactcaggaggctatggtgggaggatcgcttgagcccagaagtccaaggcc

SEQ ID NO: 63707 - DNA, 120 bp, synthetic construct; identical to SEQ ID NO: 8505
  source 1..120: mol_type = other DNA

SEQ ID NO: 63708 - DNA, 120 bp, synthetic construct
  source 1..120: mol_type = other DNA
gctgatttttctatttttagtagagacgaggtttgaccatgttggccaggctggtctcaactcctgacctcaggtgatccaccagcctcggcctcccaaagtgctgggattatatccgtg

SEQ ID NO: 63709 - DNA, 120 bp, synthetic construct
  source 1..120: mol_type = other DNA
actcatgatttgtctctctgtttgtctgttattggtgtataagaatgcttgtgatttttgtacattggcaccgaacagagccctcagaaatcacgccgcatatctacaaccgtctgatct

SEQ ID NO: 63710 - DNA, 120 bp, synthetic construct
  source 1..120: mol_type = other DNA
ttacactgttggtgggactgtaaactagttcaacccttgtggaagtcagtgtggcgattcttcagggatctagaactagaaataccatttgacccagccatcccattactgggtatatac

SEQ ID NO: 63711 - DNA, 120 bp, synthetic construct; identical to SEQ ID NO: 8506
  source 1..120: mol_type = other DNA

SEQ ID NO: 63712 - DNA, 120 bp, synthetic construct; identical to SEQ ID NO: 8507
  source 1..120: mol_type = other DNA

SEQ ID NO: 63713 - DNA, 120 bp, synthetic construct; identical to SEQ ID NO: 8406
  source 1..120: mol_type = other DNA

SEQ ID NO: 63714 - DNA, 120 bp, synthetic construct; identical to SEQ ID NO: 8407
  source 1..120: mol_type = other DNA

SEQ ID NO: 63715 - DNA, 120 bp, synthetic construct; identical to SEQ ID NO: 8408
  source 1..120: mol_type = other DNA

SEQ ID NO: 63716 - DNA, 120 bp, synthetic construct; identical to SEQ ID NO: 63645
  source 1..120: mol_type = other DNA

SEQ ID NO: 63717 - DNA, 120 bp, synthetic construct
  source 1..120: mol_type = other DNA
ctgaatgttattgcctaggttttcttctagggtttttatggttttacatctaacatttaagtctttaatccatcttgaattaatttttgtataaggtgtaaggaagggatccagtttcag

SEQ ID NO: 63718 - DNA, 120 bp, synthetic construct
  source 1..120: mol_type = other DNA
tctcctgtctgattgccctggccagaacttccaacactatgttgaataagagtggtgagagagggcatccctgtcttgtgccagttttcaaagggaatgcttccagtttttgcccattca

SEQ ID NO: 63719 - DNA, 120 bp, synthetic construct; identical to SEQ ID NO: 8409
  source 1..120: mol_type = other DNA

SEQ ID NO: 63720 - DNA, 120 bp, synthetic construct; identical to SEQ ID NO: 8410
  source 1..120: mol_type = other DNA

SEQ ID NO: 63721 - DNA, 120 bp, synthetic construct; identical to SEQ ID NO: 8411
  source 1..120: mol_type = other DNA

SEQ ID NO: 63722 - DNA, 120 bp, synthetic construct; identical to SEQ ID NO: 8412
  source 1..120: mol_type = other DNA

SEQ ID NO: 63723 - DNA, 120 bp, synthetic construct; identical to SEQ ID NO: 8413
  source 1..120: mol_type = other DNA

SEQ ID NO: 63724 - DNA, 120 bp, synthetic construct; identical to SEQ ID NO: 8414
  source 1..120: mol_type = other DNA

SEQ ID NO: 63725 - DNA, 120 bp, synthetic construct; identical to SEQ ID NO: 8415
  source 1..120: mol_type = other DNA

SEQ ID NO: 63726 - DNA, 120 bp, synthetic construct; identical to SEQ ID NO: 12701
  source 1..120: mol_type = other DNA

SEQ ID NO: 63727 - DNA, 120 bp, synthetic construct; identical to SEQ ID NO: 12702
  source 1..120: mol_type = other DNA

SEQ ID NO: 63728 - DNA, 120 bp, synthetic construct
  source 1..120: mol_type = other DNA
ctcacattgcagaatacaatcattccttctcaccagtctcccagtgtcttaactaattctagcattaactcaaaagtccgaagtccaaagtctcatctgagtagtcccttctgcctatga

SEQ ID NO: 63729 - DNA, 120 bp, synthetic construct
  source 1..120: mol_type = other DNA
gctggagatctgagaatgggcagactgcctcctcaagtgggtccctgacccctgacccccgagcagcctaactgggaggcaccccccagcaggggcacactgacatctcacacggcagcg

SEQ ID NO: 63730 - DNA, 120 bp, synthetic construct
  source 1..120: mol_type = other DNA
atgaaggagaaaatgttaagggcagccagagagaaaggttgggttaccctcaaagggaagcccatcagactaacagcggatctctcagcagaaaccctacaagccagaagagagtggggg

SEQ ID NO: 63731 - DNA, 120 bp, synthetic construct
  source 1..120: mol_type = other DNA
aagagctaactatcctaaatatatatgcacccaacacaggagcacccagattcataaagcaagtcctgagtgacctacaaagagacttagactcccacacattaataatgggagacttta

SEQ ID NO: 63732 - DNA, 120 bp, synthetic construct
  source 1..120: mol_type = other DNA
caccaccgatcccacagaaatacaaactaccatcagagaatactacaaacacctcatgcaaataaactagaaaatctagaagaaatggataaattccttgacacatacactctcccaaga

SEQ ID NO: 63733 - DNA, 120 bp, synthetic construct
  source 1..120: mol_type = other DNA
tgattgtatatctagaaaaccccattgtctaagcccaaaatctccttaagctgataagcaacttcagcaaagtctcaggatacaaaatcaatgtacaaaaatcacaagcattcttataca

SEQ ID NO: 63734 - DNA, 120 bp, synthetic construct
  source 1..120: mol_type = other DNA
aggtctaatatccagaatctacaatgaactcaaacaaatttacaagaaaaaaacgaacaaccccatcaaaaagtgggtgaaggacatgaacagacacttctcaaaagaagacatttatgc

SEQ ID NO: 63735 - DNA, 120 bp, synthetic construct; identical to SEQ ID NO: 28232
  source 1..120: mol_type = other DNA

SEQ ID NO: 63736 - DNA, 120 bp, synthetic construct; identical to SEQ ID NO: 33153
  source 1..120: mol_type = other DNA

SEQ ID NO: 63737 - DNA, 120 bp, synthetic construct; identical to SEQ ID NO: 33154
  source 1..120: mol_type = other DNA

SEQ ID NO: 63738 - DNA, 120 bp, synthetic construct; identical to SEQ ID NO: 33152
  source 1..120: mol_type = other DNA

SEQ ID NO: 63739 - DNA, 120 bp, synthetic construct
  source 1..120: mol_type = other DNA
tcatccccatcccccagtacccactctactcggccacgctggcagagctgggcgcagtgcaggtggattactacctggacgaggagcgtgcctgggcgctggacgtggccgagcttcacc

SEQ ID NO: 63740 - DNA, 120 bp, synthetic construct
  source 1..120: mol_type = other DNA
ctggtttcaaactcctaacttcaaatgatccgcctgcctcggcctcccaaagtgctgcgattacaggcgtgagccaccatacctggcctgttttatttatatttatatacatatatatat

SEQ ID NO: 63741 - DNA, 120 bp, synthetic construct
  source 1..120: mol_type = other DNA
tagcagttaaaatgtggcagatgctctttttcatacttcacatttctttctctttctttctttcctccttctttctttctttttctctttctttccctctcccttgcctcccctcccccc

SEQ ID NO: 63742 - DNA, 120 bp, synthetic construct; identical to SEQ ID NO: 12418
  source 1..120: mol_type = other DNA

SEQ ID NO: 63743 - DNA, 120 bp, synthetic construct; identical to SEQ ID NO: 24540
  source 1..120: mol_type = other DNA

SEQ ID NO: 63744 - DNA, 120 bp, synthetic construct; identical to SEQ ID NO: 24541
  source 1..120: mol_type = other DNA

SEQ ID NO: 63745 - DNA, 120 bp, synthetic construct; identical to SEQ ID NO: 23928
  source 1..120: mol_type = other DNA

SEQ ID NO: 63746 - DNA, 120 bp, synthetic construct; identical to SEQ ID NO: 23929
  source 1..120: mol_type = other DNA

SEQ ID NO: 63747 - DNA, 120 bp, synthetic construct; identical to SEQ ID NO: 23930
  source 1..120: mol_type = other DNA

SEQ ID NO: 63748 - DNA, 120 bp, synthetic construct; identical to SEQ ID NO: 23931
  source 1..120: mol_type = other DNA

SEQ ID NO: 63749 - DNA, 120 bp, synthetic construct; identical to SEQ ID NO: 23932
  source 1..120: mol_type = other DNA

SEQ ID NO: 63750 - DNA, 120 bp, synthetic construct; identical to SEQ ID NO: 23933
  source 1..120: mol_type = other DNA

SEQ ID NO: 63751 - DNA, 120 bp, synthetic construct; identical to SEQ ID NO: 23934
  source 1..120: mol_type = other DNA

SEQ ID NO: 63752 - DNA, 120 bp, synthetic construct; identical to SEQ ID NO: 23935
  source 1..120: mol_type = other DNA

SEQ ID NO: 63753 - DNA, 120 bp, synthetic construct; identical to SEQ ID NO: 23936
  source 1..120: mol_type = other DNA

SEQ ID NO: 63754 - DNA, 120 bp, synthetic construct
  source 1..120: mol_type = other DNA
agggtaaactcttaacacttcagactcaagatctggctccacttacatgtccagcttcatttactttatatcctctccgatgaagcaagcaggcccctttctctcatttcccgtctgtgc

SEQ ID NO: 63755 - DNA, 120 bp, synthetic construct
  source 1..120: mol_type = other DNA
cttcgggggtggctggcctgcctcacggcccaggaggagcaaattgggccctatgtttcagtttctccaccagtcatccctggggcagcttgctgctttattgatgttttaagatgaaag

SEQ ID NO: 63756 - DNA, 120 bp, synthetic construct
  source 1..120: mol_type = other DNA
aaccttagctacccttcccagctctatagccagcctgcctggacttagaccccagcccacctctctgggcctctgcgtcctggcctgccaaatgtgggcgatagtgcactccttgcaagg

SEQ ID NO: 63757 - DNA, 120 bp, synthetic construct
  source 1..120: mol_type = other DNA
gtctctactaaaaatacaaaaattagctaggcgttgtggcaggtgcctgtaatcccagctactaaaaatacaaaaattagctaggcgttgtggcaggtgcctgtaatcccagctactcag

SEQ ID NO: 63758 - DNA, 120 bp, synthetic construct
  source 1..120: mol_type = other DNA
ccgaggaggggcctgcatacaggtggccccactcctctgggtgaggggacagaaagggtgtggtgggtttgaaaatgatttcaaacccaaacgaccacaactttgaattttatggtattt

SEQ ID NO: 63759 - DNA, 120 bp, synthetic construct
  source 1..120: mol_type = other DNA
gggatgcttgtgtgtgtgtgtctgtgtgtgtctcccactgtgtggagtgactgttatgtgtgagtctctcactgagcaatcatgagtatctttgtctctctgtgtgacccctacatccac

SEQ ID NO: 63760 - DNA, 120 bp, synthetic construct
  source 1..120: mol_type = other DNA
caaagccttggtcattgtgtaagattttatacaatttcctaatcacttattgtctgtcacccagtagcacatgggcacttgagggacagagagctttgccctattttgttgctggctgaa

SEQ ID NO: 63761 - DNA, 120 bp, synthetic construct
  source 1..120: mol_type = other DNA
gattatacagcgagcagctagcaggtgtcagagctgactgttgctcaaaataccatgctcttagccacatgccccatttgagtctcagcttccaactctgacccctgcttggtggttgtc

SEQ ID NO: 63762 - DNA, 120 bp, synthetic construct
  source 1..120: mol_type = other DNA
aactcgggctccagacgtagtttgagtcccctgtgcccccactttgctgggtgaccttgggctttggggttggttccaggagccactcagccaggccagcccgcctggcggacgccattc

SEQ ID NO: 63763 - DNA, 120 bp, synthetic construct
  source 1..120: mol_type = other DNA
ctgagtctgcctttgtctgcttctttgggaccccctgactccaagccccatcaagcttgcatctccacacccagccccagtgttagctatcgacccaggcctgtatttctttgtccttta

SEQ ID NO: 63764 - DNA, 120 bp, synthetic construct
  source 1..120: mol_type = other DNA
aatcacattcccacctcagggtctttgcaaatgctattccctctgcctagaagcctctcttcccaggtcctcctcattcctgggcacctgggaagcctccacctcctagttcagatcttt

SEQ ID NO: 63765 - DNA, 120 bp, synthetic construct; identical to SEQ ID NO: 879
  source 1..120: mol_type = other DNA

SEQ ID NO: 63766 - DNA, 120 bp, synthetic construct
  source 1..120: mol_type = other DNA
gttcaagtgattctcctgtctcagcctcccgagtagctgggactacaggtgtgtgccaccgccccggctaatatacatatatacatatttttttgtatttttagtagagacagggtttca

SEQ ID NO: 63767 - DNA, 120 bp, synthetic construct
  source 1..120: mol_type = other DNA
accatgacagaatgttccccttcactccttccataaatgctcctctccctgagtcagactgagctcggcacaggtggtggaagccaggcggggcttttcctgttgtttcggatgttgatg

SEQ ID NO: 63768 - DNA, 120 bp, synthetic construct
  source 1..120: mol_type = other DNA
ttgacggatggaggcaagaagaaagcacttcctgaaactccagggcccggctccttcccccacaccagtgtcactccatttgtggccatctcgcatcattcctgttttactgatgtggaa

SEQ ID NO: 63769 - DNA, 120 bp, synthetic construct
  source 1..120: mol_type = other DNA
cactgcggtcttttgtcatcttttctcccctgcctgagcaaatgcgaccctctcagcagctgtaggccagccagccttccagccattgccaggccatttcctccacctgaaggcccctcc

SEQ ID NO: 63770 - DNA, 120 bp, synthetic construct
  source 1..120: mol_type = other DNA
cccctggaattgtggccagtgtttagtgaatgactaagtggctgtatcttggggctgcctcagctgccatttaaagcatatccagttggtttgcatagatttcttgggccccatgcctgt

SEQ ID NO: 63771 - DNA, 120 bp, synthetic construct
  source 1..120: mol_type = other DNA
agttcttgggaataaatccctcgacaccccggagctcggccttgtaccagttctggtcatcctccatgttcaggatctgtgggcaggagacacaaagccactcagtcaccgagaaggaac

SEQ ID NO: 63772 - DNA, 120 bp, synthetic construct; identical to SEQ ID NO: 880
  source 1..120: mol_type = other DNA

SEQ ID NO: 63773 - DNA, 120 bp, synthetic construct
  source 1..120: mol_type = other DNA
tcagaggactcaggaatgtcccattggttacattagctaatttctttttcttttttctttttttttttctttttgagatggagtctcactctgtcaccaggctggagtgcagtggcgcaa

SEQ ID NO: 63774 - DNA, 120 bp, synthetic construct
  source 1..120: mol_type = other DNA
tgttgggtctggaccgtcgccctttcccatggagatgtcaaggtgacatgggcttcctgagtctgggtctcatcatccaggctgctcgtgcagagatgggagtgaagccactaaccacat

SEQ ID NO: 63775 - DNA, 120 bp, synthetic construct
  source 1..120: mol_type = other DNA
tccctagtgtggtttactggcagttccagtgcacacgtcttggcatggccactcccagaatcctgggcatggctttcatatgcaaacttttaagcaaggacatttccagagacacattcc

SEQ ID NO: 63776 - DNA, 120 bp, synthetic construct
  source 1..120: mol_type = other DNA
tgcttcctctgcagtcgaggacggtcttcctttgttttgagtgcgcgtttgttcttttgaagttgagactgaaactgctcctgatgggggagaaacaggaaacagacatgtcacagagca

SEQ ID NO: 63777 - DNA, 120 bp, synthetic construct
  source 1..120: mol_type = other DNA
cctcctgcctgagattgcgccattgcactccagcctgggtgacagagcgagtctccttctcaaaaaaaaaaaaaaaaaaaagagaattgtaaataaatctctacctttccttagtgggtt

SEQ ID NO: 63778 - DNA, 120 bp, synthetic construct; identical to SEQ ID NO: 881
  source 1..120: mol_type = other DNA

SEQ ID NO: 63779 - DNA, 120 bp, synthetic construct
  source 1..120: mol_type = other DNA
atgaagcctccaggtagctggcttcagagagaatatagtgtaaatgtttcttatcagactgaaagagtccgttctaacagtaattccaaaagcgaggaggttataacaaggcatgtccag

SEQ ID NO: 63780 - DNA, 120 bp, synthetic construct
  source 1..120: mol_type = other DNA
agaaaaaaaaaaaaaaaagaaagaaagaaagaaaagaaaatgaagaaacaggccaggcatggtggctcacacctgtaatcccagcactttgggaagctggagcaggaggaatgcttgaac

SEQ ID NO: 63781 - DNA, 120 bp, synthetic construct; identical to SEQ ID NO: 17728
  source 1..120: mol_type = other DNA

SEQ ID NO: 63782 - DNA, 120 bp, synthetic construct
  source 1..120: mol_type = other DNA
aagaaaatgcaaatgaagaaacatggattcatgaacatctatgaatatttggtttaaaaaggtgaggccatggtgtttgcactgagatcatggcccctcttgcccttcctctcagctcag

SEQ ID NO: 63783 - DNA, 120 bp, synthetic construct; identical to SEQ ID NO: 17750
  source 1..120: mol_type = other DNA

SEQ ID NO: 63784 - DNA, 120 bp, synthetic construct
  source 1..120: mol_type = other DNA
gtctcaaactcctaacctcaggtgatccacctgcctcggcctcccaaagtgctgggattgcagatgtgagccaccgtgcccagcctaattttgtatttttggtagagacagggtttcacc

SEQ ID NO: 63785 - DNA, 120 bp, synthetic construct; identical to SEQ ID NO: 17751
  source 1..120: mol_type = other DNA

SEQ ID NO: 63786 - DNA, 120 bp, synthetic construct; identical to SEQ ID NO: 17747
  source 1..120: mol_type = other DNA

SEQ ID NO: 63787 - DNA, 120 bp, synthetic construct
  source 1..120: mol_type = other DNA
tctagctctcattctctccctctctcaacaattttcttttcaaactttttcctggaaaactgggggttgaactaactcctgccagacactgtggtaatatctcatcgaatcctcacaaca

SEQ ID NO: 63788 - DNA, 120 bp, synthetic construct; identical to SEQ ID NO: 17745
  source 1..120: mol_type = other DNA

SEQ ID NO: 63789 - DNA, 120 bp, synthetic construct; identical to SEQ ID NO: 17744
  source 1..120: mol_type = other DNA

SEQ ID NO: 63790 - DNA, 120 bp, synthetic construct
  source 1..120: mol_type = other DNA
tcaggaaaactttcgctcaacacaaaacaaaacaggccgggcgcagtggttcacgcctgtaatcccagcactttgggaggctgaagagggtggaccacctgaggtcaggagttcaagact

SEQ ID NO: 63791 - DNA, 120 bp, synthetic construct
  source 1..120: mol_type = other DNA
gcccacagcacttacatgccacgcactgagccttggggtgaaggtcgggggacccggcctgagcacagccaccagtggtcacctagggtccctcgcatttagacagctcaggggtgacaa

SEQ ID NO: 63792 - DNA, 120 bp, synthetic construct
  source 1..120: mol_type = other DNA
ctcagcaagagctctagaaccctccaccctgaacagattggagcatctgccctccttgagttatagataggaaaactgaggaacagagggcagggacctgcctgaggccacacagcagcc

SEQ ID NO: 63793 - DNA, 120 bp, synthetic construct
  source 1..120: mol_type = other DNA
tcggattctctcgtctctctccctcttcgcacacccccctccctctcccccttaattgacagaaagatcacagaaacctgcccaatgtcacacaaccacgcgggacatagtggggcctgg

SEQ ID NO: 63794 - DNA, 120 bp, synthetic construct
  source 1..120: mol_type = other DNA
caacctctctgtgcctctgtctgctaatctcaaagatggcgatggtggtgctcagctctcagggccttgggaggatgcatgagctgctcgtacgcgggtgtttgctgctccccccacaca

SEQ ID NO: 63795 - DNA, 120 bp, synthetic construct; identical to SEQ ID NO: 17739
  source 1..120: mol_type = other DNA

SEQ ID NO: 63796 - DNA, 120 bp, synthetic construct; identical to SEQ ID NO: 17738
  source 1..120: mol_type = other DNA

SEQ ID NO: 63797 - DNA, 120 bp, synthetic construct
  source 1..120: mol_type = other DNA
ccaacctcagtctaactttccctttgagatggtagattctttaaagtcaaaaaataaatcaggctcggtggtgcgtgaccgtagttcagctactcgggaggctgagatgggaggatcact

SEQ ID NO: 63798 - DNA, 120 bp, synthetic construct; identical to SEQ ID NO: 17737
  source 1..120: mol_type = other DNA

SEQ ID NO: 63799 - DNA, 120 bp, synthetic construct
  source 1..120: mol_type = other DNA
aggccatcatctccctcctgactccccacgggcctccctgccaccacgctctcccccaacagttctttctcctcacagcactcagagtcatctgctaaaaatggagtccaattacatctc

SEQ ID NO: 63800 - DNA, 120 bp, synthetic construct
  source 1..120: mol_type = other DNA
aagtcaaataaacgccttttctttataaattacccagcctcacgtgttcctttatcacaacactaaatggacgaacacacccctagagccgccttcctgaccataggctcctattccttg

SEQ ID NO: 63801 - DNA, 120 bp, synthetic construct
  source 1..120: mol_type = other DNA
ctctggtttgtctcctgtttcagtcctgccttgtggttttcacacagctgatgctcaataaatgcgtgctgagcaaactcacaaggctggggtgttcaggtctgatcatgtgcgtgtgcg

SEQ ID NO: 63802 - DNA, 120 bp, synthetic construct
  source 1..120: mol_type = other DNA
ggctccctaattcctccccagcttggtgtgcagtccttggagccttaatataattatgataactggcacttatcatgtgccagtcatcataaaaaacacgttacatagctgtccatttta

SEQ ID NO: 63803 - DNA, 120 bp, synthetic construct; identical to SEQ ID NO: 17732
  source 1..120: mol_type = other DNA

SEQ ID NO: 63804 - DNA, 120 bp, synthetic construct; identical to SEQ ID NO: 17752
  source 1..120: mol_type = other DNA

SEQ ID NO: 63805 - DNA, 120 bp, synthetic construct
  source 1..120: mol_type = other DNA
cctcattgcgatgctttgttcttgaaacccacttctgttggttctgaactgggattgcagcccaccaggtgttctgaccctgaacccaggctccggtggccaacccattgctctaagatg

SEQ ID NO: 63806 - DNA, 120 bp, synthetic construct
  source 1..120: mol_type = other DNA
tacctctcctgggttgtaaattgaaatctggttaaacaatttggtcgcaatacatttgcaagcttgggttcacccacagcctgagttccttcaggtctatggttctcctgaacaagaggg

SEQ ID NO: 63807 - DNA, 120 bp, synthetic construct; identical to SEQ ID NO: 17753
  source 1..120: mol_type = other DNA

SEQ ID NO: 63808 - DNA, 120 bp, synthetic construct
  source 1..120: mol_type = other DNA
tgtgcccagccttccagccagcccactatcgccaaatcgccccaagtaccttctagcccagcggaggagagagcctgctctttcttttttcttttcttttttttttttttttgaggcgta

SEQ ID NO: 63809 - DNA, 120 bp, synthetic construct
  source 1..120: mol_type = other DNA
accccgtctctactaaaaatacaaaaattagccaggcgtggtggtgcacacctgtaatcccagctactcgggaggctgaggcaggagaatcccatgaacccgggaggcagaggttgcagt

SEQ ID NO: 63810 - DNA, 120 bp, synthetic construct; identical to SEQ ID NO: 17754
  source 1..120: mol_type = other DNA

SEQ ID NO: 63811 - DNA, 120 bp, synthetic construct
  source 1..120: mol_type = other DNA
ccaggctggtcttgaactcttgacctcaggtgatccacccgcctcggcctcccaaagtgctaggattacaggcgtcagccaccacgcccaggctcttttttttttttttttttttgagtc

SEQ ID NO: 63812 - DNA, 120 bp, synthetic construct; identical to SEQ ID NO: 17755
  source 1..120: mol_type = other DNA

SEQ ID NO: 63813 - DNA, 120 bp, synthetic construct; identical to SEQ ID NO: 17756
  source 1..120: mol_type = other DNA

SEQ ID NO: 63814 - DNA, 120 bp, synthetic construct
  source 1..120: mol_type = other DNA
aaaccccgtctctactaaaaaatacaaaaattagccaggcatggtgatgggcgcctgtcccaggctgtttttatgttatgtggggatgaggcactgaccctgtgggccgggatctctctg

SEQ ID NO: 63815 - DNA, 120 bp, synthetic construct; identical to SEQ ID NO: 17757
  source 1..120: mol_type = other DNA

SEQ ID NO: 63816 - DNA, 120 bp, synthetic construct; identical to SEQ ID NO: 17758
  source 1..120: mol_type = other DNA

SEQ ID NO: 63817 - DNA, 120 bp, synthetic construct; identical to SEQ ID NO: 17759
  source 1..120: mol_type = other DNA

SEQ ID NO: 63818 - DNA, 120 bp, synthetic construct; identical to SEQ ID NO: 17760
  source 1..120: mol_type = other DNA

SEQ ID NO: 63819 - DNA, 120 bp, synthetic construct; identical to SEQ ID NO: 17761
  source 1..120: mol_type = other DNA

SEQ ID NO: 63820 - DNA, 120 bp, synthetic construct; identical to SEQ ID NO: 17762
  source 1..120: mol_type = other DNA

SEQ ID NO: 63821 - DNA, 120 bp, synthetic construct; identical to SEQ ID NO: 17763
  source 1..120: mol_type = other DNA

SEQ ID NO: 63822 - DNA, 120 bp, synthetic construct; identical to SEQ ID NO: 17764
  source 1..120: mol_type = other DNA

SEQ ID NO: 63823 - DNA, 120 bp, synthetic construct; identical to SEQ ID NO: 17765
  source 1..120: mol_type = other DNA

SEQ ID NO: 63824 - DNA, 120 bp, synthetic construct; identical to SEQ ID NO: 17766
  source 1..120: mol_type = other DNA

SEQ ID NO: 63825 - DNA, 120 bp, synthetic construct; identical to SEQ ID NO: 5965
  source 1..120: mol_type = other DNA

SEQ ID NO: 63826 - DNA, 120 bp, synthetic construct; identical to SEQ ID NO: 29150
  source 1..120: mol_type = other DNA

SEQ ID NO: 63827 - DNA, 120 bp, synthetic construct
  source 1..120: mol_type = other DNA
attacctcccaccaggtccctcccatagcatgtggaaattatgggagctacaattcaagatgagatttgggacacagccaaacgatgtaacacctattaggacagctataaggaaagaaa

SEQ ID NO: 63828 - DNA, 120 bp, synthetic construct
  source 1..120: mol_type = other DNA
cctcccgggttcatgccattctcctgcctcaacctcccaagcagctgggactacacatacaagggaatattattcagccataaaaaggaatgaagtactaatgcatgctacaacatagat

SEQ ID NO: 63829 - DNA, 120 bp, synthetic construct; identical to SEQ ID NO: 20365
  source 1..120: mol_type = other DNA

SEQ ID NO: 63830 - DNA, 120 bp, synthetic construct
  source 1..120: mol_type = other DNA
tgaaccttctaagtagctgggacttcaggtgtgcaccaccacagccagttaatttttattttttgtagagatgtggtctcattatgttgcccaggctggtttcccactcctgggctcaag

SEQ ID NO: 63831 - DNA, 120 bp, synthetic construct; identical to SEQ ID NO: 20366
  source 1..120: mol_type = other DNA

SEQ ID NO: 63832 - DNA, 120 bp, synthetic construct; identical to SEQ ID NO: 20367
  source 1..120: mol_type = other DNA

SEQ ID NO: 63833 - DNA, 120 bp, synthetic construct; identical to SEQ ID NO: 4534
  source 1..120: mol_type = other DNA

SEQ ID NO: 63834 - DNA, 120 bp, synthetic construct; identical to SEQ ID NO: 4307
  source 1..120: mol_type = other DNA

SEQ ID NO: 63835 - DNA, 120 bp, synthetic construct; identical to SEQ ID NO: 4308
  source 1..120: mol_type = other DNA

SEQ ID NO: 63836 - DNA, 120 bp, synthetic construct
  source 1..120: mol_type = other DNA
taaatctcacttagccatagcatatagtcccttttttttttttgagacggagtgtcgctgttgtcggcccgggctggagtgcaatggcatgatcgcggtttatctctttttttttttttt

SEQ ID NO: 63837 - DNA, 120 bp, synthetic construct
  source 1..120: mol_type = other DNA
cctgagtagctggaattataggtgcaaaccatggcacccagccatttgatgtctttgtctgggtaatattggccttaagaagttgagttgggaaatgctcctccttctactttttgaaaa

SEQ ID NO: 63838 - DNA, 120 bp, synthetic construct
  source 1..120: mol_type = other DNA
gtggaggttgcagtgagccaagatcgcaccactgcactccattctgggtgacaagaggaaaactctgtctcaaaaaaaaagaaagaaagagagagggaaaaaaaaagaaagaagaaagaa

SEQ ID NO: 63839 - DNA, 120 bp, synthetic construct; identical to SEQ ID NO: 9541
  source 1..120: mol_type = other DNA

SEQ ID NO: 63840 - DNA, 120 bp, synthetic construct; identical to SEQ ID NO: 9542
  source 1..120: mol_type = other DNA

SEQ ID NO: 63841 - DNA, 120 bp, synthetic construct; identical to SEQ ID NO: 20348
  source 1..120: mol_type = other DNA

SEQ ID NO: 63842 - DNA, 120 bp, synthetic construct; identical to SEQ ID NO: 31694
  source 1..120: mol_type = other DNA

SEQ ID NO: 63843 - DNA, 120 bp, synthetic construct; identical to SEQ ID NO: 31695
  source 1..120: mol_type = other DNA

SEQ ID NO: 63844 - DNA, 120 bp, synthetic construct; identical to SEQ ID NO: 31696
  source 1..120: mol_type = other DNA

SEQ ID NO: 63845 - DNA, 120 bp, synthetic construct; identical to SEQ ID NO: 7305
  source 1..120: mol_type = other DNA

SEQ ID NO: 63846 - DNA, 120 bp, synthetic construct; identical to SEQ ID NO: 7306
  source 1..120: mol_type = other DNA

SEQ ID NO: 63847 - DNA, 120 bp, synthetic construct
  source 1..120: mol_type = other DNA
ccccccagtaggggcaggctgatacctcacacggccgggtactcctctgagacaaaacttccagaggaacgatcagacagcagcatttgcggttcacgaaaatccgcggttctgcagcca

SEQ ID NO: 63848 - DNA, 120 bp, synthetic construct
  source 1..120: mol_type = other DNA
agagaatgtcacaaagatactcctcgagaagagcaactccaagacacgtaattgtcagatacaccaaagttgaaatgaaggaaaaaatgttaagggcagccagagagaaaggtcggctta

SEQ ID NO: 63849 - DNA, 120 bp, synthetic construct
  source 1..120: mol_type = other DNA
gtaaaagaacagaaattataacaaactgtctctcagaccacagtgcaatcaaactagaactcaggattaagaaactcactcaaaaccactcaactacatggaaactgaacaacctgctta

SEQ ID NO: 63850 - DNA, 120 bp, synthetic construct
  source 1..120: mol_type = other DNA
caacatccttgatgaacattgatgcaaaaatcctcaataaaatattggcaaactgaatccagcagcacatcaaaaagcttatccaccatgatcaagtgggcttcatccctgggatgcaag

SEQ ID NO: 63851 - DNA, 120 bp, synthetic construct
  source 1..120: mol_type = other DNA
ttcacagaattggaaaaactactttaaagttcatatggaaccaaaaaagagcccgcatcgccaagtcaatcctaagccaaaagaacaaagctggaggcatcacgctacctgacttcaaac

SEQ ID NO: 63852 - DNA, 120 bp, synthetic construct
  source 1..120: mol_type = other DNA
tggttggactgtaaactagttcaaccattgtggaagtcagtgtggcgattcctcagggatctagaactagaaataccatttgacccagccatcccattactgggtatatacccaaaggac

SEQ ID NO: 63853 - DNA, 120 bp, synthetic construct; identical to SEQ ID NO: 27130
  source 1..120: mol_type = other DNA

SEQ ID NO: 63854 - DNA, 120 bp, synthetic construct; identical to SEQ ID NO: 25890
  source 1..120: mol_type = other DNA

SEQ ID NO: 63855 - DNA, 120 bp, synthetic construct
  source 1..120: mol_type = other DNA
gttttttgcctgcataaatgtcttcttttgagaagtgtctgttcatatccttcgcccactttttgatgagtttgtttgtttttttcttgtaaatttgtttgagttcattgtagattctgg

SEQ ID NO: 63856 - DNA, 120 bp, synthetic construct
  source 1..120: mol_type = other DNA
taagagccagcgaattctttttctttttctattattattttgacgactcctgagttgcgcccatgctcttgtcagcttcgttttaggcgtagcatggccaggcagaagaaaatggggcaa

SEQ ID NO: 63857 - DNA, 120 bp, synthetic construct
  source 1..120: mol_type = other DNA
gtcgtatttacaagtctagaagttagaatttttgccattactgaaccaaccccctgtattgtcacgggggagggtggctatggggaacgggttggggtagcagggggaacaatattgttt

SEQ ID NO: 63858 - DNA, 120 bp, synthetic construct; identical to SEQ ID NO: 35241
  source 1..120: mol_type = other DNA

SEQ ID NO: 63859 - DNA, 120 bp, synthetic construct; identical to SEQ ID NO: 35242
  source 1..120: mol_type = other DNA

SEQ ID NO: 63860 - DNA, 120 bp, synthetic construct; identical to SEQ ID NO: 35243
  source 1..120: mol_type = other DNA

SEQ ID NO: 63861 - DNA, 120 bp, synthetic construct
  source 1..120: mol_type = other DNA
ttatgccaataattccagcactttgggaggccaaggcatgaggaacacttgagcccagaagttcaagaccagcctcagcaaaatagtgagatctccatctctacaaagaaatttttaaaa

SEQ ID NO: 63862 - DNA, 120 bp, synthetic construct
  source 1..120: mol_type = other DNA
tcccctaagctcagcaccctcatatcactctcttcaccatttctttgttcatgataaggaatccaacctggttctaagctactatttgctatttactattttaggtatttcctgaaatta

SEQ ID NO: 63863 - DNA, 120 bp, synthetic construct
  source 1..120: mol_type = other DNA
gatcaggccactgcactccagcctgggcgacagagcaagactacatctcaaaacaaaacaaaacaccaactaagcataggaaggcattattaaagattaaatcagtgttgtatagtatag

SEQ ID NO: 63864 - DNA, 120 bp, synthetic construct
  source 1..120: mol_type = other DNA
aaacaaatggaagaacattccatgctcatgggtgggaagaatcaatatcgtgaaaatggccatactgcccaaggtaatttatagattcaatgccatctccatcaagctaccaatgacttt

SEQ ID NO: 63865 - DNA, 120 bp, synthetic construct
  source 1..120: mol_type = other DNA
ggatttcaagcctgcagtgagctatgattgtgctactgaattccagcctgggtaacaagtgaaacagagtgaaaccctgtctctttaaaaacaaactaactcaggttctgaaatccaact

SEQ ID NO: 63866 - DNA, 120 bp, synthetic construct; identical to SEQ ID NO: 10924
  source 1..120: mol_type = other DNA

SEQ ID NO: 63867 - DNA, 120 bp, synthetic construct; identical to SEQ ID NO: 10925
  source 1..120: mol_type = other DNA

SEQ ID NO: 63868 - DNA, 120 bp, synthetic construct
  source 1..120: mol_type = other DNA
gtttttacagagataatcaaattaaaatgaggtcattagagtaagccctaatccaacatggctggcatcctcataagaaggagaaattgcgagacagacacagggagaaggccatgggaa

SEQ ID NO: 63869 - DNA, 120 bp, synthetic construct
  source 1..120: mol_type = other DNA
cagtgagccaagatcgtgccactgcactccagcctgggcaacagagcaaggctatgtggaaaaaataaaagagagagagagacaaaaaaagagagagaaaaaggaaaggaaagggaaggg

SEQ ID NO: 63870 - DNA, 120 bp, synthetic construct; identical to SEQ ID NO: 3132
  source 1..120: mol_type = other DNA

SEQ ID NO: 63871 - DNA, 120 bp, synthetic construct
  source 1..120: mol_type = other DNA
gatttccaatttcatccatgtccctacaaaggacatgaactcatcatttttttttggctgcatagtattccatggtgtatatgtgccacattttcttaatctagtcaatcattgttggac

SEQ ID NO: 63872 - DNA, 120 bp, synthetic construct; identical to SEQ ID NO: 10930
  source 1..120: mol_type = other DNA

SEQ ID NO: 63873 - DNA, 120 bp, synthetic construct; identical to SEQ ID NO: 10931
  source 1..120: mol_type = other DNA

SEQ ID NO: 63874 - DNA, 120 bp, synthetic construct; identical to SEQ ID NO: 10932
  source 1..120: mol_type = other DNA

SEQ ID NO: 63875 - DNA, 120 bp, synthetic construct; identical to SEQ ID NO: 10933
  source 1..120: mol_type = other DNA

SEQ ID NO: 63876 - DNA, 120 bp, synthetic construct; identical to SEQ ID NO: 10934
  source 1..120: mol_type = other DNA

SEQ ID NO: 63877 - DNA, 120 bp, synthetic construct
  source 1..120: mol_type = other DNA
aagaagaccctaagctttctctaggcacactaatctctttttgtttgtttgtttgtttgtttttgttttttattattattatactttaagttttagggtacatgtgcacaatgtgcaggt

SEQ ID NO: 63878 - DNA, 120 bp, synthetic construct
  source 1..120: mol_type = other DNA
tggcttttgttgccattgcttttggtgttttagacatgaagtccttgcccatgcctatgtcctgaatggtaatgcctaggttttcttctagggtttttatggttgtaggtctaatgttta

SEQ ID NO: 63879 - DNA, 120 bp, synthetic construct; identical to SEQ ID NO: 10935
  source 1..120: mol_type = other DNA

SEQ ID NO: 63880 - DNA, 120 bp, synthetic construct; identical to SEQ ID NO: 10936
  source 1..120: mol_type = other DNA

SEQ ID NO: 63881 - DNA, 120 bp, synthetic construct; identical to SEQ ID NO: 10918
  source 1..120: mol_type = other DNA

SEQ ID NO: 63882 - DNA, 120 bp, synthetic construct
  source 1..120: mol_type = other DNA
atggaatactatgcagccataaaaaatgatgagttcatgtcctttgtagggacatggatgaaattggaaaccatcattctcagtaaactatcgcaagaacgaaaaaccaaacaccgcata

SEQ ID NO: 63883 - DNA, 120 bp, synthetic construct; identical to SEQ ID NO: 10916
  source 1..120: mol_type = other DNA

SEQ ID NO: 63884 - DNA, 120 bp, synthetic construct; identical to SEQ ID NO: 10917
  source 1..120: mol_type = other DNA

SEQ ID NO: 63885 - DNA, 120 bp, synthetic construct
  source 1..120: mol_type = other DNA
tcaccacgaggcctgccctgaaagagctcctgaaggaagcactaaacatggaaaggaacaaccggtaccagccactgcaaaatcatgccaaattgtaaagaccatcgaggctaggaagaa

SEQ ID NO: 63886 - DNA, 120 bp, synthetic construct
  source 1..120: mol_type = other DNA
caagaacaaagacacaacatacgagaatctctgggacacattcaaagcagtgtgtagagggaaatttatagcactaaatgcccacaagagaaagcaggaaagatccaaaattgacaccct

SEQ ID NO: 63887 - DNA, 120 bp, synthetic construct
  source 1..120: mol_type = other DNA
caataaattaggtattgatgggatgtatctcaaaataataagagctatctatgacaagcccacagccaatatcatactgaatgggcaaaaactggaagcattccctttgaaaactggcac

SEQ ID NO: 63888 - DNA, 120 bp, synthetic construct
  source 1..120: mol_type = other DNA
ctagccatatgtagaaggctgaaactggatcccttccttacaccttatacaaaaattaattcaagatggattaaagacttaaatgttagacctaaaaccataaaaaccctagaagaaaac

SEQ ID NO: 63889 - DNA, 120 bp, synthetic construct
  source 1..120: mol_type = other DNA
gaacaaaaaaccaaacaccacatattctcactcataggtgggaattgaacaatgagaacacatggacacaggaaggggaacatcacactgtggggactgttgtggggtcgggggagggag

SEQ ID NO: 63890 - DNA, 120 bp, synthetic construct; identical to SEQ ID NO: 10919
  source 1..120: mol_type = other DNA

SEQ ID NO: 63891 - DNA, 120 bp, synthetic construct
  source 1..120: mol_type = other DNA
aaaaatttgggtgtctgtatgcatatatatatgtatatgtgtatatatcctgaaaattattaaaatgtgccaagtcaatcctaagccaaaagaacaaagctggaggcatcacgctacctg

SEQ ID NO: 63892 - DNA, 120 bp, synthetic construct
  source 1..120: mol_type = other DNA
cccaaatgtccaacaatgatagattggattaagaaaatgtggcacatatacaccatggaataccatgcagccataaaaaatgttgtgttcacatcctttgtagggacatggatgaagcta

SEQ ID NO: 63893 - DNA, 120 bp, synthetic construct
  source 1..120: mol_type = other DNA
ccaagaaatatgggactatgtgaaaagaccaaatctacgtctgattggtgtacctgaaagtgacggggagaatggaaccaagttggaaaacaccctgcagggtattatccaggagaactt

SEQ ID NO: 63894 - DNA, 120 bp, synthetic construct
  source 1..120: mol_type = other DNA
ttacatgatggtaaagggatcaattcaacaagaagagctaactatcctaaatatatatgcacccaatacaggagcatccagattcataaagcaagtcctgagtgacctacaaagaggctt

SEQ ID NO: 63895 - DNA, 120 bp, synthetic construct
  source 1..120: mol_type = other DNA
cacccttccaagactaaaccaggaagaagttgaatctctgaatagaccaataacaggctctgaaattgtggcaataatcaatagcttaccaaccaaaaaaagtccgggaccagatggatt

SEQ ID NO: 63896 - DNA, 120 bp, synthetic construct
  source 1..120: mol_type = other DNA
aggcaggagaaggaaataaagggtattcaattaggaaaagagtaagtcaaattgtccctgtttgcagataacatgattgtatatctagaaaacaccactgtctaagcccaaaatctcctt

SEQ ID NO: 63897 - DNA, 120 bp, synthetic construct; identical to SEQ ID NO: 10920
  source 1..120: mol_type = other DNA

SEQ ID NO: 63898 - DNA, 120 bp, synthetic construct; identical to SEQ ID NO: 10921
  source 1..120: mol_type = other DNA

SEQ ID NO: 63899 - DNA, 120 bp, synthetic construct; identical to SEQ ID NO: 10922
  source 1..120: mol_type = other DNA

SEQ ID NO: 63900 - DNA, 120 bp, synthetic construct; identical to SEQ ID NO: 10923
  source 1..120: mol_type = other DNA

SEQ ID NO: 63901 - DNA, 120 bp, synthetic construct
  source 1..120: mol_type = other DNA
tgtatttgataaaaattattgaggcctgaaatgcttttttcctactttagaaatttaaatgccattttcataatattgattcttcctacccatgagcgtggaatgttcttccatttcttt

SEQ ID NO: 63902 - DNA, 120 bp, synthetic construct
  source 1..120: mol_type = other DNA
gcagaagaaactagcatcagagtgaacaggcaacctacaaaatgggagaaaattttcacaacctactcatctgacaaagggctaatatccagaatctacaatgaactcaaacaaatttac

SEQ ID NO: 63903 - DNA, 120 bp, synthetic construct
  source 1..120: mol_type = other DNA
ggcacgtgtatacatatgtaactaacctgcacattgtgcacatgtaccctaaaacttaaagtatgataataataataataataataaagaaaaaaaagaactatacaactgattgttgga

SEQ ID NO: 63904 - DNA, 120 bp, synthetic construct
  source 1..120: mol_type = other DNA
tgaatgccctttatttccttcccctgcctaattgccctggccagaacttccaacactattttgaataggagtggtgagagagggcatccctgtcttgtgccagttttcaaagggaatgct

SEQ ID NO: 63905 - DNA, 120 bp, synthetic construct
  source 1..120: mol_type = other DNA
aatgaagtaggtagactgggggatcttgggataaggagtataacactgtttctgcagttttattttattttattttattttattttttgagacggagtctcactctgtcgcccagactgg

SEQ ID NO: 63906 - DNA, 120 bp, synthetic construct
  source 1..120: mol_type = other DNA
tctaactggtgggagatggtatctcattgtggatttgatttgcatttctctgatggccagtgatgatgagcattttttcatgtgtctgttggctgcataaatgtcttcttttgagaagtg

SEQ ID NO: 63907 - DNA, 120 bp, synthetic construct; identical to SEQ ID NO: 25637
  source 1..120: mol_type = other DNA

SEQ ID NO: 63908 - DNA, 120 bp, synthetic construct; identical to SEQ ID NO: 25638
  source 1..120: mol_type = other DNA

SEQ ID NO: 63909 - DNA, 120 bp, synthetic construct; identical to SEQ ID NO: 25639
  source 1..120: mol_type = other DNA

SEQ ID NO: 63910 - DNA, 120 bp, synthetic construct; identical to SEQ ID NO: 25640
  source 1..120: mol_type = other DNA

SEQ ID NO: 63911 - DNA, 120 bp, synthetic construct
  source 1..120: mol_type = other DNA
aaattagtggtaataaaaatactatatatcagaatctgtaaaggatacttaaaggcgtaattagtagtcttggccctccccttcccttcccttcccttcccttcccttcccttcccttcc

SEQ ID NO: 63912 - DNA, 120 bp, synthetic construct; identical to SEQ ID NO: 25642
  source 1..120: mol_type = other DNA

SEQ ID NO: 63913 - DNA, 120 bp, synthetic construct; identical to SEQ ID NO: 25643
  source 1..120: mol_type = other DNA

SEQ ID NO: 63914 - DNA, 120 bp, synthetic construct
  source 1..120: mol_type = other DNA
cagttttgtcttttgttgtcattgcttttggtgttttagacatgaagtccttgcccatgcctatgtcctgaatggtaatgcctaggttttcttctagggtttttatggttttaggtctaa

SEQ ID NO: 63915 - DNA, 120 bp, synthetic construct
  source 1..120: mol_type = other DNA
tttgtatcctgagactttgctgaagttgcttatcagcttaaggagattttgggctgagacgatggggttttctagatatacaatcatgtcatctgcaaacagggacaattggacttcctc

SEQ ID NO: 63916 - DNA, 120 bp, synthetic construct
  source 1..120: mol_type = other DNA
cattttttattgcgtctatttgattcttttctctttttttctttattagtcttgctagtgctctatcaattttgttgatcctttcaaaaaaccagctcctggattcattaattttttgaa

SEQ ID NO: 63917 - DNA, 120 bp, synthetic construct
  source 1..120: mol_type = other DNA
gcttaaagtctgtttcatcagagactaggattgcaacccctgcctttttttgttttccatttgcttggtagatcttcctccatccttttattttgagcctatgtgtgtctctgcacgtga

SEQ ID NO: 63918 - DNA, 120 bp, synthetic construct
  source 1..120: mol_type = other DNA
agatttggtcttttcacatagtcccatatttcctggaggctttgctcgtttctttttattgttttttctctaaactttccttctcgcttcatttcatttatttcatcttccattgctgat

SEQ ID NO: 63919 - DNA, 120 bp, synthetic construct
  source 1..120: mol_type = other DNA
ctaagcaagcctgggcaatggcgggcgcccctcccccagcctcgctgccaccttgcagcttgatctcagactgctgtgctagcaatcaatgagactccgtggggtaggaccctctgagcc

SEQ ID NO: 63920 - DNA, 120 bp, synthetic construct
  source 1..120: mol_type = other DNA
agtttactgagaatgatggtttccaatttcatccatgtccctacaaaggacatgaactcatcattttttatggctgcatagtattccatggtgtatatgtgccccattttcttaatctag

SEQ ID NO: 63921 - DNA, 120 bp, synthetic construct
  source 1..120: mol_type = other DNA
attatttctgagggctctgttctgttccattgatctatatctctgttttggtaccagtaccatgctgttttggttactgtagccttgtagtatagtttgaagccaggtagtgtgatgcct

SEQ ID NO: 63922 - DNA, 120 bp, synthetic construct
  source 1..120: mol_type = other DNA
gcccggctttggtatcagaatgatgctggcctcataaaatgagttagggaggattccctctttttctattgattggaatagtttcagaaggaatggtaccagttcctccttgtacttccg

SEQ ID NO: 63923 - DNA, 120 bp, synthetic construct
  source 1..120: mol_type = other DNA
tttacttccaagtatgtggtcaattttggaataggtgtggtgtggtgctgaaaaaaatgtatattctgttgatttggggtggagagttctgtagatgtctattaggtccccctggtgcag

SEQ ID NO: 63924 - DNA, 120 bp, synthetic construct
  source 1..120: mol_type = other DNA
gctagattggggaagttctccaggataatatcctgcagagtgttttccaacttggttccattctccacatcactttcaggtacaccaatcagacgtagatttggtcttttcacatactcc

SEQ ID NO: 63925 - DNA, 120 bp, synthetic construct
  source 1..120: mol_type = other DNA
ccagttcgagcttccaggctgctttgtttacctaagcaagcctgggcaatggcgggcgcccctcccccagcctagttgccgccttgcagtttgatctcagactgctgtgctagcaatccg

SEQ ID NO: 63926 - DNA, 120 bp, synthetic construct
  source 1..120: mol_type = other DNA
aaagagacttagactcccacccaataataatgggaggctttaacaccccactgtcaacattagacagatcaacgagacagaaagttaacaaggatacccaggaattgaactcagctctgc

SEQ ID NO: 63927 - DNA, 120 bp, synthetic construct
  source 1..120: mol_type = other DNA
atagaccagtaacagaatctgaaattgtggcaataatcaatagcttaccaaccaaaaagagtccaggaccagatggattcacagccgaattctaccagaggtacaaggaggaactggtac

SEQ ID NO: 63928 - DNA, 120 bp, synthetic construct
  source 1..120: mol_type = other DNA
gcattcttatacaccaataacagacaaacagagcgaaatcatgagtgaactcccattcacaattgcttcaaagagaataaaatacctaggaatccaacttacaagggacgtgaaggacct

SEQ ID NO: 63929 - DNA, 120 bp, synthetic construct
  source 1..120: mol_type = other DNA
ggagaaaattttcacaacctactcatctgacaaagggctaatatccagaatctacaatgaactcaaacaaatttacaagaaaataacaaacaaccccatcaacaagtgggcaaaggatat

SEQ ID NO: 63930 - DNA, 120 bp, synthetic construct; identical to SEQ ID NO: 25646
  source 1..120: mol_type = other DNA

SEQ ID NO: 63931 - DNA, 120 bp, synthetic construct
  source 1..120: mol_type = other DNA
tttttttttatatgtactttaagttttagagtgcatgtgcacaacgtgcaggttagttacatacgtaaacatgtgccatgttggtgtgctgcacccagtaactcgtcatttaacattagg

SEQ ID NO: 63932 - DNA, 120 bp, synthetic construct
  source 1..120: mol_type = other DNA
ttaaactaaagagcttctgcacagcaaaagaaactaccatcagagtgaacaggcaacctacagaatgggagaaaatttttgcaacctactcatctgacagagggctaatatccagaatct

SEQ ID NO: 63933 - DNA, 120 bp, synthetic construct
  source 1..120: mol_type = other DNA
tcccttcaaagaacatgaactcatcattttttatggctgcatagtattccatggtgtatatgtgccacattttcttaatccagtccatccttgttggacatttgggttggttccaagtct

SEQ ID NO: 63934 - DNA, 120 bp, synthetic construct
  source 1..120: mol_type = other DNA
tatactacaaggctacagtaaccaaaacagcatggtactggtaccaaaacagagatatagaccaatggaacagaacagagccctcagaaataatgccgcatatctacaactatcttatct

SEQ ID NO: 63935 - DNA, 120 bp, synthetic construct
  source 1..120: mol_type = other DNA
tctgccttcgtttcattatgtacccagtagtcattcagaagcaggttgttcagtttccatgtacttgagcaattttgagtgagtttcttaatcctgagttctagtttgattgctctgtgg

SEQ ID NO: 63936 - DNA, 120 bp, synthetic construct; identical to SEQ ID NO: 25644
  source 1..120: mol_type = other DNA

SEQ ID NO: 63937 - DNA, 120 bp, synthetic construct
  source 1..120: mol_type = other DNA
tatactcatttgggtatatatccagtaatgggatggctgggtcaaatggtatttctagttctagatccctgaggaatcgccacactgacttccacaatggttgaactagtttacagtccc

SEQ ID NO: 63938 - DNA, 120 bp, synthetic construct
  source 1..120: mol_type = other DNA
taggattgacttggcaatgcgggttcttttttggttccatatgaactttaaagtagttttttccaattctgtgaagaaagtcattggtagcttgatggggatggcattgaatctgtaaat

SEQ ID NO: 63939 - DNA, 120 bp, synthetic construct
  source 1..120: mol_type = other DNA
tcttttttggttgtgtctctgcccggctttggcatcagaatgatgctggcctcataaaatgagttagggaggattccctctttttctattgattggaatagtttcagaaggaatggtacc

SEQ ID NO: 63940 - DNA, 120 bp, synthetic construct
  source 1..120: mol_type = other DNA
tatccttgttgactttctgtctcgttgatctgtctaatgttgacagtggggtgttaaagtctcccattattaatgtgtgggagtctaagtctctttgtaggtcactgaggacttgcttta

SEQ ID NO: 63941 - DNA, 120 bp, synthetic construct
  source 1..120: mol_type = other DNA
ccaacttggttccattctccacatcactttcaggtacaccaatcagatgtagatttggtcttttcacatagtcccatatttcttggaggctttgctcatttctttttattcttttttctc

SEQ ID NO: 63942 - DNA, 120 bp, synthetic construct; identical to SEQ ID NO: 63925
  source 1..120: mol_type = other DNA

SEQ ID NO: 63943 - DNA, 120 bp, synthetic construct; identical to SEQ ID NO: 25645
  source 1..120: mol_type = other DNA

SEQ ID NO: 63944 - DNA, 120 bp, synthetic construct
  source 1..120: mol_type = other DNA
gaaaattacagtcaaagggggcttgttctctggcgggcaggagtgggggttgcaagttgctcagtgggggtgctttttgagccaggatgagccaggaaaaggactttcacaaggtaatgt

SEQ ID NO: 63945 - DNA, 120 bp, synthetic construct
  source 1..120: mol_type = other DNA
tgtgtttttaaaagacctttagtccgttctacttttcttgaagacggaggaccttaagggatataaaggtttcactgaatactaagagcctgaaaaactgcttggctgatttgactaata

SEQ ID NO: 63946 - DNA, 120 bp, synthetic construct
  source 1..120: mol_type = other DNA
gagagatcggtcggacaagattggcagggagagcacgtgtgtttttatgagaattatgccgagataggtaacagatgaggaagaaatttgggcttgattgaagtaatgggggctgtctgt

SEQ ID NO: 63947 - DNA, 120 bp, synthetic construct
  source 1..120: mol_type = other DNA
accttccactgtgagagttacctgaagcttggcgtccgtgatggtctagggggcttccgaggcgatcgggcggtgttagttttcagccgctaagccgagaagatctgggaaggagtcaga

SEQ ID NO: 63948 - DNA, 120 bp, synthetic construct
  source 1..120: mol_type = other DNA
aaagactcagcgaggcttggggttggtactgaggggacaggcaggagggaaagaaggaagatttgggacgagttgcactgggcacagagactaggaagggactgatgtgtaaaagaatgc

SEQ ID NO: 63949 - DNA, 120 bp, synthetic construct
  source 1..120: mol_type = other DNA
aaattttacctttcatagtttgtctcttcattcggttgattgttttaatttttttggggggggggtggaggggggagggatagcattaggagatatacctaatgctaaatgatgagttaa

SEQ ID NO: 63950 - DNA, 120 bp, synthetic construct
  source 1..120: mol_type = other DNA
agataatcacatggattttgtttttagctctctttatgtgatgaatcacatgtattgatttgccaacaaagatcaaaagagacaaagaaggccattacataatggtaaagggatcaattc

SEQ ID NO: 63951 - DNA, 120 bp, synthetic construct
  source 1..120: mol_type = other DNA
agagaagaatcaaatagatgcaataaaaaatgataaaggggatatcaccaccgatcccacagaaatacaaactaccatcagataatactataaacacctctctgcaaataaactagaaaa

SEQ ID NO: 63952 - DNA, 120 bp, synthetic construct; identical to SEQ ID NO: 25631
  source 1..120: mol_type = other DNA

SEQ ID NO: 63953 - DNA, 120 bp, synthetic construct; identical to SEQ ID NO: 25632
  source 1..120: mol_type = other DNA

SEQ ID NO: 63954 - DNA, 120 bp, synthetic construct; identical to SEQ ID NO: 25633
  source 1..120: mol_type = other DNA

SEQ ID NO: 63955 - DNA, 120 bp, synthetic construct; identical to SEQ ID NO: 25634
  source 1..120: mol_type = other DNA

SEQ ID NO: 63956 - DNA, 120 bp, synthetic construct; identical to SEQ ID NO: 25635
  source 1..120: mol_type = other DNA

SEQ ID NO: 63957 - DNA, 120 bp, synthetic construct; identical to SEQ ID NO: 25636
  source 1..120: mol_type = other DNA

SEQ ID NO: 63958 - DNA, 120 bp, synthetic construct; identical to SEQ ID NO: 23048
  source 1..120: mol_type = other DNA

SEQ ID NO: 63959 - DNA, 120 bp, synthetic construct; identical to SEQ ID NO: 23049
  source 1..120: mol_type = other DNA

SEQ ID NO: 63960 - DNA, 120 bp, synthetic construct; identical to SEQ ID NO: 23050
  source 1..120: mol_type = other DNA

SEQ ID NO: 63961 - DNA, 120 bp, synthetic construct
  source 1..120: mol_type = other DNA
aggtacagattacctatgagttccttttttttttttttttttttttttgagacaaaatctcactctgtcgcccaggcaggattgtagtggcatgacctcggctcactgcaacttccatcc

SEQ ID NO: 63962 - DNA, 120 bp, synthetic construct; identical to SEQ ID NO: 28159
  source 1..120: mol_type = other DNA

SEQ ID NO: 63963 - DNA, 120 bp, synthetic construct
  source 1..120: mol_type = other DNA
ctttggagaagtgtctgttcatatcctttgcccacttgttgatggggttgtttgtttttttcttgtcaatttgtttgagttcattgtagattctggatattagccctttgtcagatgagt

SEQ ID NO: 63964 - DNA, 120 bp, synthetic construct; identical to SEQ ID NO: 28153
  source 1..120: mol_type = other DNA

SEQ ID NO: 63965 - DNA, 120 bp, synthetic construct; identical to SEQ ID NO: 28154
  source 1..120: mol_type = other DNA

SEQ ID NO: 63966 - DNA, 120 bp, synthetic construct
  source 1..120: mol_type = other DNA
gttcctatttctccacatcctctccagcacctgttgtttcctgacttttgaatgcttgccattctaactggtgtgagatggtatctcattgtggttttgatttgcatttctctgatggcc

SEQ ID NO: 63967 - DNA, 120 bp, synthetic construct
  source 1..120: mol_type = other DNA
cattgttcaatttccacctatgagtgagaacatgcggtgtttggatttttgtccttgcaaaaatttgctgagaatgatggtttaaagcttcatctatgtccctacaaaggacatgaactc

SEQ ID NO: 63968 - DNA, 120 bp, synthetic construct
  source 1..120: mol_type = other DNA
cattgtagattctggatattagccctttatcagatgagtagattgcaaaaattgtctcccattttgtaggttgcctgttcactctgatggtagtttcttttgctgtgcagaagctcttta

SEQ ID NO: 63969 - DNA, 120 bp, synthetic construct; identical to SEQ ID NO: 28155
  source 1..120: mol_type = other DNA

SEQ ID NO: 63970 - DNA, 120 bp, synthetic construct; identical to SEQ ID NO: 28156
  source 1..120: mol_type = other DNA

SEQ ID NO: 63971 - DNA, 120 bp, synthetic construct; identical to SEQ ID NO: 28157
  source 1..120: mol_type = other DNA

SEQ ID NO: 63972 - DNA, 120 bp, synthetic construct
  source 1..120: mol_type = other DNA
ctcggcctcccaaagtgctgggattacaggcgtgagccaccgcgcccggccagcattttattttttaaacaaaaatatgtatatgtaaaatgtttaacattgttgagtgatgaaatacct

SEQ ID NO: 63973 - DNA, 120 bp, synthetic construct
  source 1..120: mol_type = other DNA
attgcagcctcaaactcctgtgctcgaatgatcctcccatctcagcctcccaagtagctgggactacaggtgggcatcatgaagcctggctaatttttttattttattattttttttaaa

SEQ ID NO: 63974 - DNA, 120 bp, synthetic construct
  source 1..120: mol_type = other DNA
ttccaattctgtgaagaaagtcattggtagattgatgggaatggcattgaatctataaattaccttgggcattatggccattttcatgatattgattcttcctacccatgagcatggaat

SEQ ID NO: 63975 - DNA, 120 bp, synthetic construct
  source 1..120: mol_type = other DNA
tcttttttggttgtgtctctgcccggctttggtatcaggatgatgcgggcctcataaaatgagttagggaggattccctctttttctattgattggaatagtttcagaaggaatggtacc

SEQ ID NO: 63976 - DNA, 120 bp, synthetic construct
  source 1..120: mol_type = other DNA
ttggtgcagagctgagttcaattcctgggtatccttgttaactttctgtctcgttgatctgtctaatgttgacagtgtggtgttaaagtctcccattattattgtgtgggagtctaagtc

SEQ ID NO: 63977 - DNA, 120 bp, synthetic construct
  source 1..120: mol_type = other DNA
ctggcttgtagagtttctgccgagagatccgctgttagtctgatgggcttccctttgagggtaacccgacctttctctctggctgccgttaacattttttccttcatttcaactttggta

SEQ ID NO: 63978 - DNA, 120 bp, synthetic construct
  source 1..120: mol_type = other DNA
gatcagacagcagcatttgcggttcacgaaaatccgcggttctgcagccaccgctgctgttacccaggcaaacagggtctggagtggtcctctagcaaactccaacagacctgcagctga

SEQ ID NO: 63979 - DNA, 120 bp, synthetic construct; identical to SEQ ID NO: 7447
  source 1..120: mol_type = other DNA

SEQ ID NO: 63980 - DNA, 120 bp, synthetic construct; identical to SEQ ID NO: 7448
  source 1..120: mol_type = other DNA

SEQ ID NO: 63981 - DNA, 120 bp, synthetic construct; identical to SEQ ID NO: 7449
  source 1..120: mol_type = other DNA

SEQ ID NO: 63982 - DNA, 120 bp, synthetic construct; identical to SEQ ID NO: 7450
  source 1..120: mol_type = other DNA

SEQ ID NO: 63983 - DNA, 120 bp, synthetic construct
  source 1..120: mol_type = other DNA
tgtgagaaatttctcattgttttatacacagcggctcccaaactcaagagatgaatgtttaggataatttgggtgaaccagtcataggagttacagatgaggccggtttgggaactctga

SEQ ID NO: 63984 - DNA, 120 bp, synthetic construct; identical to SEQ ID NO: 12399
  source 1..120: mol_type = other DNA

SEQ ID NO: 63985 - DNA, 120 bp, synthetic construct; identical to SEQ ID NO: 12400
  source 1..120: mol_type = other DNA

SEQ ID NO: 63986 - DNA, 120 bp, synthetic construct; identical to SEQ ID NO: 12401
  source 1..120: mol_type = other DNA

SEQ ID NO: 63987 - DNA, 120 bp, synthetic construct; identical to SEQ ID NO: 12402
  source 1..120: mol_type = other DNA

SEQ ID NO: 63988 - DNA, 120 bp, synthetic construct; identical to SEQ ID NO: 12403
  source 1..120: mol_type = other DNA

SEQ ID NO: 63989 - DNA, 120 bp, synthetic construct
  source 1..120: mol_type = other DNA
ctgggcgacagagcgagactctgtctcaaaaaaaaaaagaaaagaaaagaaaagaaataaagaaatgttgcttctcagccaggtgccgtggctcacacctgtaatcccagcactttggga

SEQ ID NO: 63990 - DNA, 120 bp, synthetic construct; identical to SEQ ID NO: 19792
  source 1..120: mol_type = other DNA

SEQ ID NO: 63991 - DNA, 120 bp, synthetic construct; identical to SEQ ID NO: 33180
  source 1..120: mol_type = other DNA

SEQ ID NO: 63992 - DNA, 120 bp, synthetic construct; identical to SEQ ID NO: 33181
  source 1..120: mol_type = other DNA

SEQ ID NO: 63993 - DNA, 120 bp, synthetic construct; identical to SEQ ID NO: 33182
  source 1..120: mol_type = other DNA

SEQ ID NO: 63994 - DNA, 120 bp, synthetic construct; identical to SEQ ID NO: 33183
  source 1..120: mol_type = other DNA

SEQ ID NO: 63995 - DNA, 120 bp, synthetic construct; identical to SEQ ID NO: 33184
  source 1..120: mol_type = other DNA

SEQ ID NO: 63996 - DNA, 120 bp, synthetic construct; identical to SEQ ID NO: 33185
  source 1..120: mol_type = other DNA

SEQ ID NO: 63997 - DNA, 120 bp, synthetic construct
  source 1..120: mol_type = other DNA
ccatcaaaaagtgggtgaagcatatgaacagacacttctcaaaagaagacatttatgcagtcaaaagatacatgaaaaaatgctcatcatcactggccatcagagaaatgcaaatcaaaa

SEQ ID NO: 63998 - DNA, 120 bp, synthetic construct; identical to SEQ ID NO: 15981
  source 1..120: mol_type = other DNA

SEQ ID NO: 63999 - DNA, 120 bp, synthetic construct; identical to SEQ ID NO: 15982
  source 1..120: mol_type = other DNA

SEQ ID NO: 64000 - DNA, 120 bp, synthetic construct; identical to SEQ ID NO: 15983
  source 1..120: mol_type = other DNA

SEQ ID NO: 64001 - DNA, 120 bp, synthetic construct
  source 1..120: mol_type = other DNA
aggctggtcttcaactcctgacctcaagtaatctgcccagcttggcctcccaaagtgctgagattatagatgtgaatcactgtgtccaaccatatgtatttttaatatataaaaatacga

SEQ ID NO: 64002 - DNA, 120 bp, synthetic construct; identical to SEQ ID NO: 15985
  source 1..120: mol_type = other DNA

SEQ ID NO: 64003 - DNA, 120 bp, synthetic construct; identical to SEQ ID NO: 15986
  source 1..120: mol_type = other DNA

SEQ ID NO: 64004 - DNA, 120 bp, synthetic construct; identical to SEQ ID NO: 15987
  source 1..120: mol_type = other DNA

SEQ ID NO: 64005 - DNA, 120 bp, synthetic construct
  source 1..120: mol_type = other DNA
ttgtggaagtcggtgtggcaattcctcagggatctacaactagaaataccatttgacccagccatcccattactgggtatatacccaaaggattataaatcatgctgctataaagacaca

SEQ ID NO: 64006 - DNA, 120 bp, synthetic construct; identical to SEQ ID NO: 15989
  source 1..120: mol_type = other DNA

SEQ ID NO: 64007 - DNA, 120 bp, synthetic construct; identical to SEQ ID NO: 15990
  source 1..120: mol_type = other DNA

SEQ ID NO: 64008 - DNA, 120 bp, synthetic construct; identical to SEQ ID NO: 15991
  source 1..120: mol_type = other DNA

SEQ ID NO: 64009 - DNA, 120 bp, synthetic construct
  source 1..120: mol_type = other DNA
agcagcggccctctagtaacaccccacactggcagccctgtgcatttaggccacccaaccacatctaacaggaggtaccatgcactcaaaaaaaatatatatatatataaaaaatatata

SEQ ID NO: 64010 - DNA, 120 bp, synthetic construct; identical to SEQ ID NO: 12706
  source 1..120: mol_type = other DNA

SEQ ID NO: 64011 - DNA, 120 bp, synthetic construct
  source 1..120: mol_type = other DNA
gaacagaacagagccctcagaaatagggctacatatctacaaccatctgatctttgacaaacctgacaaaaacaagaaatggagaaacgattccctatttaataaatggtgctgggaaaa

SEQ ID NO: 64012 - DNA, 120 bp, synthetic construct
  source 1..120: mol_type = other DNA
caacccaaatgtccaacagtgatagactggattaagaaaatggggcacatatataccatggcatactatgcagccataaaaaatgatgagttcatgtcctttgtagggacatggatgaag

SEQ ID NO: 64013 - DNA, 120 bp, synthetic construct; identical to SEQ ID NO: 12707
  source 1..120: mol_type = other DNA

SEQ ID NO: 64014 - DNA, 120 bp, synthetic construct; identical to SEQ ID NO: 12708
  source 1..120: mol_type = other DNA

SEQ ID NO: 64015 - DNA, 120 bp, synthetic construct
  source 1..120: mol_type = other DNA
gcactccagcctgggcaacaagagcaaaactctgtctcaagaaacaaaaacaaaaacaaacaaaaaaccacacattaaaaaaaaaaaaaaaagaaagaggagggcatggtggctcatgcc

SEQ ID NO: 64016 - DNA, 120 bp, synthetic construct; identical to SEQ ID NO: 19869
  source 1..120: mol_type = other DNA

SEQ ID NO: 64017 - DNA, 120 bp, synthetic construct
  source 1..120: mol_type = other DNA
gcgggaaggggtctcttcccaaggagaattccagaatggtagaatggaatgttgtggatgaagaaagaacacggttcacgatgagctatttaaaatattcctagggaagagggtgtccct

SEQ ID NO: 64018 - DNA, 120 bp, synthetic construct; identical to SEQ ID NO: 19870
  source 1..120: mol_type = other DNA

SEQ ID NO: 64019 - DNA, 120 bp, synthetic construct; identical to SEQ ID NO: 19871
  source 1..120: mol_type = other DNA

SEQ ID NO: 64020 - DNA, 120 bp, synthetic construct; identical to SEQ ID NO: 32878
  source 1..120: mol_type = other DNA

SEQ ID NO: 64021 - DNA, 120 bp, synthetic construct; identical to SEQ ID NO: 32879
  source 1..120: mol_type = other DNA

SEQ ID NO: 64022 - DNA, 120 bp, synthetic construct
  source 1..120: mol_type = other DNA
gagaaaatttttgcaacctactcatctgacaaagggctaatatccagcatctacaatgaactcaaacaaatttacaagaaaaaaacaaacaaccccatcaaaaagtgggcaaaggacatg

SEQ ID NO: 64023 - DNA, 120 bp, synthetic construct; identical to SEQ ID NO: 32881
  source 1..120: mol_type = other DNA

SEQ ID NO: 64024 - DNA, 120 bp, synthetic construct; identical to SEQ ID NO: 32882
  source 1..120: mol_type = other DNA

SEQ ID NO: 64025 - DNA, 120 bp, synthetic construct
  source 1..120: mol_type = other DNA
ctggtgtgagatggtatctcatagtggttttgatttgcatttctctggaatatatccctattcttataaatcacacatcccattgttttataaccatttacttacatttcgacctcattc

SEQ ID NO: 64026 - DNA, 120 bp, synthetic construct
  source 1..120: mol_type = other DNA
caatcagacaggagaaataaataaagggtattcaattaggaaaagaggaagtcaaattgtccctgtttgcagatgacatgattgtatatttagaaaaccccatcgtctcagcccaaaatc

SEQ ID NO: 64027 - DNA, 120 bp, synthetic construct
  source 1..120: mol_type = other DNA
tacaagaaaaaaacaaacaaccccatcaaaaagtgggctaaggatatgaacagacacttctcaaaagaagacatttatgcagccaacagacacatgaaaaaatgctcatcatcactggcc

SEQ ID NO: 64028 - DNA, 120 bp, synthetic construct
  source 1..120: mol_type = other DNA
aagtttcctgaggcctccccagccatgcagacttgtgggtcaattaaacctcttttctttataaattacccagtcttaggtagttctttagagcagtgtgaaaacggactaacacagaaa

SEQ ID NO: 64029 - DNA, 120 bp, synthetic construct
  source 1..120: mol_type = other DNA
agcaatggaacagagctggatggagaatgacaagttgagagaagaagacttcagacgatcaaactactctgaactacaggaggaaattcaaaccaatggcaaagaagttaaaaactttga

SEQ ID NO: 64030 - DNA, 120 bp, synthetic construct
  source 1..120: mol_type = other DNA
accatcgagactaggaagaaactgcatcaactaacgagcaaaatcaccagctaacatcataatgacaggaccaaattcacacataacaatttaactttaaatgtaaatgggctaaaagct

SEQ ID NO: 64031 - DNA, 120 bp, synthetic construct
  source 1..120: mol_type = other DNA
tgaaaccaatgagaacaaagacacaacataccagaatctctgggacacattcaaagcagtgtgtagagggaaatttatagcactaaatgcccacaagagaaagcaggaaagatccaaaat

SEQ ID NO: 64032 - DNA, 120 bp, synthetic construct
  source 1..120: mol_type = other DNA
aaccacatgattatctcaatagatgcagaaaaggcctttgacaaaattcaacaacacttcatgctaaaaactctcaataaattaggtattgatgggacatatctcaaaataataagagct

SEQ ID NO: 64033 - DNA, 120 bp, synthetic construct
  source 1..120: mol_type = other DNA
tgtagaaagctgaaactggatcccttccttacaccttatacaaaaattaattcaagatggattaaagacttaaatgttagacctaaaacaataaaaaccctagaagaaaacctaggcaat

SEQ ID NO: 64034 - DNA, 120 bp, synthetic construct
  source 1..120: mol_type = other DNA
gggaacatcacactccggggagtgttgtggggtgtggggatgggggagggatagcattaggagatatacctaatgctaaatgacaagttaatggatgcagcacaccaacatggcacatgt

SEQ ID NO: 64035 - DNA, 120 bp, synthetic construct
  source 1..120: mol_type = other DNA
aagtaacacatttttttacattgctactagatcctgaagggtttattagataaaactatcagcaaaaagtatacagtcaggccaggcgcggtggctcacgcctgtaatcccagcactttg

SEQ ID NO: 64036 - DNA, 120 bp, synthetic construct; identical to SEQ ID NO: 13040
  source 1..120: mol_type = other DNA

SEQ ID NO: 64037 - DNA, 120 bp, synthetic construct
  source 1..120: mol_type = other DNA
gccctaaatctacttgaaaggcagtctaagccacaaggactgcaactcctaggcaagtcctagtgctgtgctgggctaagagcccattgacttggtgggcatgtgacctagtaagatacc

SEQ ID NO: 64038 - DNA, 120 bp, synthetic construct
  source 1..120: mol_type = other DNA
acagcagtctgagatcaaactgcaaggtggcagcgaggctgggggaggggcgcccacgattgcccaggcttgcttaggtaaacaaagcagccgggaagctccaacggggtggagcccacc

SEQ ID NO: 64039 - DNA, 120 bp, synthetic construct
  source 1..120: mol_type = other DNA
agaagtgcttaaaggagctgatgaagctgaaagccaaggctcgagaactacgtaaagaatgcagaagcctcaggagccgatgcgatcaactggaagaaagggtatcagcaatggaagatg

SEQ ID NO: 64040 - DNA, 120 bp, synthetic construct
  source 1..120: mol_type = other DNA
ggcaaattggctaaagagtcaagacccatcagtgtgttgtactcaggaaacccatctcacatgcagagacacacataggctcaaaataaaaggatggaggaagatctaccaagcaaatgg

SEQ ID NO: 64041 - DNA, 120 bp, synthetic construct
  source 1..120: mol_type = other DNA
gttttttgaaaggatcaacaaaattgatagaccactagcaagactaataaagaaaaaaagagagaagaatcaaatagatgcaataaaaaatgataaaggggatatcaccactgatcccac

SEQ ID NO: 64042 - DNA, 120 bp, synthetic construct
  source 1..120: mol_type = other DNA
aaagggtattcaattaagaaaagaggaagtcaaattgtctctgtttgcagatgacatgattgtatatctagaaaaccccattgtctcagcccaaaatctccttaagctgataagcaactt

SEQ ID NO: 64043 - DNA, 120 bp, synthetic construct
  source 1..120: mol_type = other DNA
caaaagaaactaccatcagagtgaacaggcaacctacaaaatgggagaaaattttcgcaacctactcatctgacaaagggctaatatccagaatctacaatgaactcaaaccaatttaca

SEQ ID NO: 64044 - DNA, 120 bp, synthetic construct
  source 1..120: mol_type = other DNA
gaggcggaggttgcaatgagctgaggtcacgccattgcatgccagctggggaaataaataaaataaaatattctgggtgttataaaaatgattatggaagggagaagttagaggagagaa

SEQ ID NO: 64045 - DNA, 120 bp, synthetic construct
  source 1..120: mol_type = other DNA
ggttgcaagtctttgctattgtgaataatgccgcaataaaaatacgtgtgcatgtgtctttatagcagcatgatttatagtcctttgggtatatacccagtaatgggatggctgggtcaa

SEQ ID NO: 64046 - DNA, 120 bp, synthetic construct; identical to SEQ ID NO: 13043
  source 1..120: mol_type = other DNA

SEQ ID NO: 64047 - DNA, 120 bp, synthetic construct; identical to SEQ ID NO: 33845
  source 1..120: mol_type = other DNA

SEQ ID NO: 64048 - DNA, 120 bp, synthetic construct
  source 1..120: mol_type = other DNA
gacctcaggtgatccacccaccttggcctcccaaagtgctgggattacacctttcccaagattcttacattcatctgtgataaaacagaaacaaaactcctttttaaagaaaggttactt

SEQ ID NO: 64049 - DNA, 120 bp, synthetic construct
  source 1..120: mol_type = other DNA
ggtattgtgtgtggcgtatgtgtgtggtatctgtatggtgtggtacatggtatgtgtggtaaattgtgtggtgtgtgtgtgtgaggtgtgtatgtagtctttggttgtttttgtacagta

SEQ ID NO: 64050 - DNA, 120 bp, synthetic construct
  source 1..120: mol_type = other DNA
gagacatcaatcagcatatgtaagatgaacactggttcggtctggaaaggcgggagggggcttccaggtcataggaagatgagagacaaatggttacattcttttgagtttctgatgagt

SEQ ID NO: 64051 - DNA, 120 bp, synthetic construct; identical to SEQ ID NO: 14073
  source 1..120: mol_type = other DNA

SEQ ID NO: 64052 - DNA, 120 bp, synthetic construct; identical to SEQ ID NO: 14074
  source 1..120: mol_type = other DNA

SEQ ID NO: 64053 - DNA, 120 bp, synthetic construct; identical to SEQ ID NO: 14075
  source 1..120: mol_type = other DNA

SEQ ID NO: 64054 - DNA, 120 bp, synthetic construct; identical to SEQ ID NO: 14076
  source 1..120: mol_type = other DNA

SEQ ID NO: 64055 - DNA, 120 bp, synthetic construct; identical to SEQ ID NO: 14077
  source 1..120: mol_type = other DNA

SEQ ID NO: 64056 - DNA, 120 bp, synthetic construct; identical to SEQ ID NO: 14078
  source 1..120: mol_type = other DNA

SEQ ID NO: 64057 - DNA, 120 bp, synthetic construct; identical to SEQ ID NO: 14079
  source 1..120: mol_type = other DNA

SEQ ID NO: 64058 - DNA, 120 bp, synthetic construct; identical to SEQ ID NO: 14080
  source 1..120: mol_type = other DNA

SEQ ID NO: 64059 - DNA, 120 bp, synthetic construct; identical to SEQ ID NO: 14081
  source 1..120: mol_type = other DNA

SEQ ID NO: 64060 - DNA, 120 bp, synthetic construct; identical to SEQ ID NO: 23680
  source 1..120: mol_type = other DNA

SEQ ID NO: 64061 - DNA, 120 bp, synthetic construct; identical to SEQ ID NO: 23681
  source 1..120: mol_type = other DNA

SEQ ID NO: 64062 - DNA, 120 bp, synthetic construct; identical to SEQ ID NO: 23682
  source 1..120: mol_type = other DNA

SEQ ID NO: 64063 - DNA, 120 bp, synthetic construct; identical to SEQ ID NO: 23683
  source 1..120: mol_type = other DNA

SEQ ID NO: 64064 - DNA, 120 bp, synthetic construct; identical to SEQ ID NO: 23684
  source 1..120: mol_type = other DNA

SEQ ID NO: 64065 - DNA, 120 bp, synthetic construct; identical to SEQ ID NO: 23685
  source 1..120: mol_type = other DNA

SEQ ID NO: 64066 - DNA, 120 bp, synthetic construct; identical to SEQ ID NO: 23686
  source 1..120: mol_type = other DNA

SEQ ID NO: 64067 - DNA, 120 bp, synthetic construct; identical to SEQ ID NO: 23687
  source 1..120: mol_type = other DNA

SEQ ID NO: 64068 - DNA, 120 bp, synthetic construct; identical to SEQ ID NO: 23688
  source 1..120: mol_type = other DNA

SEQ ID NO: 64069 - DNA, 120 bp, synthetic construct; identical to SEQ ID NO: 23689
  source 1..120: mol_type = other DNA

SEQ ID NO: 64070 - DNA, 120 bp, synthetic construct; identical to SEQ ID NO: 11202
  source 1..120: mol_type = other DNA

SEQ ID NO: 64071 - DNA, 120 bp, synthetic construct; identical to SEQ ID NO: 11203
  source 1..120: mol_type = other DNA

SEQ ID NO: 64072 - DNA, 120 bp, synthetic construct
  source 1..120: mol_type = other DNA
ttttttttttttttttttttttttcctaacctgacatttttagtggacaggatctaggtgggtgctggtaggctctcctctgggttggggaatggtcctgaaagggaggaagcagagaaa

SEQ ID NO: 64073 - DNA, 120 bp, synthetic construct
  source 1..120: mol_type = other DNA
gcatctctccccttctttctctcttatgcctagaggaaagccatgattttaagtgcttccagtttcttttggctgggcctttattagagacttgagcccatatatcctaattagtgtgga

SEQ ID NO: 64074 - DNA, 120 bp, synthetic construct
  source 1..120: mol_type = other DNA
aggcccagactaactctatctatttatttacatttcagaatctcagaaaattggcaggcgacctaatgttgaaataataatgagaaggagagtttgctgagtgccttttgtgtgtttctt

SEQ ID NO: 64075 - DNA, 120 bp, synthetic construct
  source 1..120: mol_type = other DNA
attatgtcttcagaagctataactcttatagtggcttgctaaatgataccctttggatctgggctgaagacttccagaatgcccaagtgaatttcaggagcgggctcaatgtttaaccaa

SEQ ID NO: 64076 - DNA, 120 bp, synthetic construct
  source 1..120: mol_type = other DNA
aacctgggaggtggagattgcagtgagccagtattgcaccaccgtactccggactgggtgacagagtaagactctgtttcaaaaaagaaaaataaaaaattaaaatgtattatggcctta

SEQ ID NO: 64077 - DNA, 120 bp, synthetic construct
  source 1..120: mol_type = other DNA
ctccttagctgtgtagactgcattgactctactgtgcctagaatttggacaatggcctgagggaccagtatgtgatttaagcataattaaaaggttatacttgagggatagacctgaatc

SEQ ID NO: 64078 - DNA, 120 bp, synthetic construct
  source 1..120: mol_type = other DNA
attgggccatgcatatagaacattcccatcattgcagaaagctcatcgggacagagcttctctagaggattctgtgcatttagtgagtgtgataaccccatgacttctgacatgaaaaat

SEQ ID NO: 64079 - DNA, 120 bp, synthetic construct
  source 1..120: mol_type = other DNA
ttttaaaaaggtaatgatgaaatgaaccccaaggacagcttctggggcctgtgcagaaagcaagggtaaacagataagctgagataaacagataagaacatgcctctgtcctgaagtggc

SEQ ID NO: 64080 - DNA, 120 bp, synthetic construct
  source 1..120: mol_type = other DNA
agaactgtgtatcaatacaactgaatctgtgtttgaggacaaggcaggatgcctacatgccatacataagtgcctgtacacacataagcacatgtgtacgtatgtggtatgatcgcctgt

SEQ ID NO: 64081 - DNA, 120 bp, synthetic construct
  source 1..120: mol_type = other DNA
gagagaacccagccaatgtaattgctctgcaagtctgataaaaagtcttgtgaaacctcatttgaaaatggaattccatcctggcatgggtcttagcactgcttctgaaatggaaacaag

SEQ ID NO: 64082 - DNA, 120 bp, synthetic construct
  source 1..120: mol_type = other DNA
agcctccaaagtagctgggactacaggtgcgtgccaccacacttgactctttgcaacattttggattttagattttcagatttgggatgctcgaccagtataatgcaaatattccaaaat

SEQ ID NO: 64083 - DNA, 120 bp, synthetic construct
  source 1..120: mol_type = other DNA
ctccaaaccactaaccattgcttgggatggaatgcaccaggcctagatatttgccccagatgtcttcccttcagcagtatccaattagagggatttttacaaattaaagcttaattctct

SEQ ID NO: 64084 - DNA, 120 bp, synthetic construct
  source 1..120: mol_type = other DNA
gtaaaactatatctcggaaaaaaaaaaaagtccaaaggaccatgtaaagcatctctctctgtcttcccatgcacccctgctaccaatcccaccactcagaaataattagcgtcagcatgt

SEQ ID NO: 64085 - DNA, 120 bp, synthetic construct
  source 1..120: mol_type = other DNA
cctgggaattgtttttgctgttgctgttagtattattctagtttgagaaagaaggaaaacaagctcagagaggtgaagtggttttccaagatcacataccaaggagccacttccccttgt

SEQ ID NO: 64086 - DNA, 120 bp, synthetic construct
  source 1..120: mol_type = other DNA
caggctgtgtgtttcctagggatacgtaataaagtgccaccaactgggtggtttagaacaacagacatctattgtcgcacagttctggaggccagacgtttgaaatcaaggtgtgtgcag

SEQ ID NO: 64087 - DNA, 120 bp, synthetic construct
  source 1..120: mol_type = other DNA
tgttaacccattaggtcctggttctgctctttggaggtatccaggataaatgcaccactctttgcctgagggggcccttctaatattagaagacaactatgatacccactgtagaactaa

SEQ ID NO: 64088 - DNA, 120 bp, synthetic construct
  source 1..120: mol_type = other DNA
ctgcataaatgtgcagcttggccaggtgatcctggagtctcttctcacccttcaaatcttgagaatttgcaggtgcattttccactgataattcaactgtgggtacttcagaataaaatt

SEQ ID NO: 64089 - DNA, 120 bp, synthetic construct
  source 1..120: mol_type = other DNA
agcaattctcctgtctcagcctcctgagtagctgggactacaggcatgcaccactgtgcccggctaatttttgtatttttttttctttttttttttgagatggagtctcgctctgtcacc

SEQ ID NO: 64090 - DNA, 120 bp, synthetic construct
  source 1..120: mol_type = other DNA
ttcaagagattcccttgtctctgccacctgagtagctaggattacaggcgcctgctaccatgcccggcttttttttttctttttcttttttttgtatttttagtagagatggggtttcac

SEQ ID NO: 64091 - DNA, 120 bp, synthetic construct
  source 1..120: mol_type = other DNA
aacagcagcaacaaacaaacaaacatggtagccttgttacagccaggaaggatggagatagtaaatggggaggtagtttctaaggaaaaaagcaagtcctggttagacaggtagtatgta

SEQ ID NO: 64092 - DNA, 120 bp, synthetic construct
  source 1..120: mol_type = other DNA
tgatcatgccattgtgctccagcctggggtgacgagtgagaccatgtctctgagaaaaaaagaaaaaagaattatggagacctattcttattggcatggagagacgatcataacatagtg

SEQ ID NO: 64093 - DNA, 120 bp, synthetic construct
  source 1..120: mol_type = other DNA
tggggtacttcaggaatgcaaagatgtgagattctgctcttcctcttcaggaccttccagcctagttgggggaaaggcaggtacatgatcaactccattacaaagtaatctaagtacaga

SEQ ID NO: 64094 - DNA, 120 bp, synthetic construct
  source 1..120: mol_type = other DNA
cccatatattagtccattttcacactactgataaagacatacctgagactgggtaatttatgcatgaaaaagggtttaatggacttacagttctacgtggctgggaggcctcacaatcat

SEQ ID NO: 64095 - DNA, 120 bp, synthetic construct
  source 1..120: mol_type = other DNA
gaaacatttgcaaactgttcacctgacaagggattgatacccagaacatacaaggaactcaaacatctcaacaggaaaaaaacattcctattaaaaaatgggcagatgatctggacagac

SEQ ID NO: 64096 - DNA, 120 bp, synthetic construct
  source 1..120: mol_type = other DNA
tattcggccctgaagaatgaagtcttgccattcgcagcaacatggatggaactggagggcattatgctaagtgaaataaaccaggcacagaaagttaaatgctatgtgttctcacttata

SEQ ID NO: 64097 - DNA, 120 bp, synthetic construct
  source 1..120: mol_type = other DNA
agctttgaagaaatgtgggagcagacggtgtctgttgtttttctggcccacatctaccccctcttcttctggcaacagcacctccatttttcttgggggaccactcctccctgtatttaa

SEQ ID NO: 64098 - DNA, 120 bp, synthetic construct
  source 1..120: mol_type = other DNA
aggtaaatattatttttatcttaattccacagatgagaaaacagaagctcagggaggttcctaaactttcccaaggtcacagttgttgatggaagagccagggtttgaacccagcccgtt

SEQ ID NO: 64099 - DNA, 120 bp, synthetic construct
  source 1..120: mol_type = other DNA
tcagccttctgagtagctgggactagaggtgcacaccaccaggactggctaatttttttttattttttttatttttgtagagacggtttcaccatgttgcccaggctgggataagtgtaa

SEQ ID NO: 64100 - DNA, 120 bp, synthetic construct
  source 1..120: mol_type = other DNA
ttgtcctgtaatctcagcactttgggaggccgaggcaggctgatcacctgaggtcaggagttcttattgtctagcccagaggttgcaaactgacctacacactattttttttttcttttt

SEQ ID NO: 64101 - DNA, 120 bp, synthetic construct
  source 1..120: mol_type = other DNA
tttatatcacctgaccagcctctggtttcagggcctgtcttctgtagtgtatttgccttaccttttttttttttttttttgagacggagtctcactctgtcactcaggttggaatgcagc

SEQ ID NO: 64102 - DNA, 120 bp, synthetic construct
  source 1..120: mol_type = other DNA
atttcctgtctttaaacttacgaactaaagggcttgagggtgagggggtgctgatctagggaggaaggaggttgctttctgtgtgcgtgtttttctgtttcatgtcctgactatttcctg

SEQ ID NO: 64103 - DNA, 120 bp, synthetic construct
  source 1..120: mol_type = other DNA
agaagcttattttaaaagtcaagtcgggtataataaaataaatgaaataaataaaagagctccccagttaagggcctttcccatgctggggcttcgggataacaagagcttgaactgcct

SEQ ID NO: 64104 - DNA, 120 bp, synthetic construct
  source 1..120: mol_type = other DNA
gtgtgcgtgtgtctttatagtagaataatttataatcctttgggtatatacccagtaatgggactgctgggtcaaatggtatttctggctctagatccttgaggaatcaccacattgtct

SEQ ID NO: 64105 - DNA, 120 bp, synthetic construct
  source 1..120: mol_type = other DNA
ccacttgttctctccttaaccgtggactattgcaaagggtggagatcggagactggaaaaaaatccgtgttctagtcccttgttgcgtgcttcctggtggactgacctgtagcagatagc

SEQ ID NO: 64106 - DNA, 120 bp, synthetic construct
  source 1..120: mol_type = other DNA
aatgtatggtaaataagggttgtttagtaggtaagagttgtctcaggtgctaagagttgtctgcttttcttcctgctgtgggggaggagggagacatctttacaagtagaaatttatgcc

SEQ ID NO: 64107 - DNA, 120 bp, synthetic construct
  source 1..120: mol_type = other DNA
gagttcaagaccagcctggccaccatgatgaaaccctgtctctactaaaaatacaaaaattagctggacatggaggtgtgcctgtaatcccaactactcaggaggctgagacaggagaat

SEQ ID NO: 64108 - DNA, 120 bp, synthetic construct
  source 1..120: mol_type = other DNA
ctatacctaaagaaatgggcatgacagtgtgccaataaaactttatttacaagaacaggtgttgggccagatttggcccacaggccttatcttgccatccccttgatataaacatgactg

SEQ ID NO: 64109 - DNA, 120 bp, synthetic construct
  source 1..120: mol_type = other DNA
tcagctactatggaaaatagtatggaggttcctcaaaaaattaaaagtaggattaccacatggtccagcaatctcacttctgggtttttatccaaaagaattcaaggctgggcgcggtgg

SEQ ID NO: 64110 - DNA, 120 bp, synthetic construct
  source 1..120: mol_type = other DNA
gcggatcacgaggtcaggagattgagaccatcctggctaacatgatgaaaccccgtctctactaaaaaaatacaaaaaagttagctgggcatggtggcgggtgcctgtagtcccagctac

SEQ ID NO: 64111 - DNA, 120 bp, synthetic construct
  source 1..120: mol_type = other DNA
gaatttgggattagcatggcatacctagttgaggtttaaagctccctcctgcaccttccaaagcaggtgttgcttggggttgaaaaccttcactgtttggtcaacagaaggccctcacag

SEQ ID NO: 64112 - DNA, 120 bp, synthetic construct
  source 1..120: mol_type = other DNA
agagggggccacatggaaactgctcagagagctcaaagtgtgttggcaagtggtgacttgtaactagtacctcaatcattttcttttatgatacacataatagaaggatgcatttgggat

SEQ ID NO: 64113 - DNA, 120 bp, synthetic construct
  source 1..120: mol_type = other DNA
tattatctagggcttttttcatgccacagaattgagtagttgtgacagagaccatatggcccacctagaatatttaccatctggccttttacagaaaacatttgccgacctctgacctag

SEQ ID NO: 64114 - DNA, 120 bp, synthetic construct
  source 1..120: mol_type = other DNA
tctgcctacctcggcctcccaaaatgctgggattataggcgtgagccactgcgtccagctgactttgaactttttaaatgctcaaaaaagtttactattactgtgtcattgttattgtaa

SEQ ID NO: 64115 - DNA, 120 bp, synthetic construct
  source 1..120: mol_type = other DNA
actttttccttaagtcagcaccttgatgactggatcagagctacacacaaaattggaagtgaacgttggagaaagtggcttagtcatgacctgtgtttatctcctcttgctctgagtaaa

SEQ ID NO: 64116 - DNA, 120 bp, synthetic construct
  source 1..120: mol_type = other DNA
gatgaaagatgtctgggggaaagaaaataaaacaaaaaaccttctagcatctacacacctaaagcagggtttgtcaaccttgacaccgttgccatctggggctggataattctttgtcat

SEQ ID NO: 64117 - DNA, 120 bp, synthetic construct
  source 1..120: mol_type = other DNA
cagcacgatcttgtgcaaatagtgtcttccttctggtcctcatgtttctcgtaaagctgacttccaactagaacagtctacctttctatttttctcctgatttgtagaaaaagatggtgc

SEQ ID NO: 64118 - DNA, 120 bp, synthetic construct
  source 1..120: mol_type = other DNA
aaggcctgagagtgaactttgttgtgaatgatgacacaattccagaaaaatgcagtgtctcccagatacggcttctggagctttgcctggggtggggggctggaggttgtttagtgtttg

SEQ ID NO: 64119 - DNA, 120 bp, synthetic construct
  source 1..120: mol_type = other DNA
ggatgactctggactatttctccaggaggaggtgggattcacaggcagagacatatcaaaacagggaccttgggatgtatgatgtattttgtaagaaaaaaatggaaaaacaggccgggc

SEQ ID NO: 64120 - DNA, 120 bp, synthetic construct
  source 1..120: mol_type = other DNA
gttttctgcccattctcccagacacgggctccttgagggacaaggtggtgagttagccctcttgcttcgagccatcatttatcatggattgtgctagcagtcgtaggtacacagacgagc

SEQ ID NO: 64121 - DNA, 120 bp, synthetic construct
  source 1..120: mol_type = other DNA
ccgtcgcctctttattctatctctgaggtcgtgactgtgtctctggtaatgaatattttgctttggaacatcccccctctttttattgagagataattcacgtaccataatattctccac

SEQ ID NO: 64122 - DNA, 120 bp, synthetic construct
  source 1..120: mol_type = other DNA
ggagaatcatttgagcctgggaagtggaggctacaatgagccgagatcatgccattgaactccagcttgggcaacagagcgagactctgtctaaacaaaagaaaacaacccccaaaaaag

SEQ ID NO: 64123 - DNA, 120 bp, synthetic construct
  source 1..120: mol_type = other DNA
aacagtgatgcatgagcattcattatctttcattatgttctaggctctcacattgatcagaggcaatatgggcttggcgttttaattgcaaggaacaaagactctgcctcccttgcctgt

SEQ ID NO: 64124 - DNA, 120 bp, synthetic construct; identical to SEQ ID NO: 11204
  source 1..120: mol_type = other DNA

SEQ ID NO: 64125 - DNA, 120 bp, synthetic construct
  source 1..120: mol_type = other DNA
tcggcctcccaaagtgctgggattacaggcgtgagccgccgcaccggccaaggtcagttttttaaaaagccaattaatatctgatttgtgattctgaatctttaacatatttaaccgtct

SEQ ID NO: 64126 - DNA, 120 bp, synthetic construct
  source 1..120: mol_type = other DNA
gaggctcctcacttctcaaacggggcggctgccgggcggagggtctcctcacttatcagacggggcggccgggcagagacactcctcacctcccagacggggtggcggccgggcagaggc

SEQ ID NO: 64127 - DNA, 120 bp, synthetic construct; identical to SEQ ID NO: 11205
  source 1..120: mol_type = other DNA

SEQ ID NO: 64128 - DNA, 120 bp, synthetic construct
  source 1..120: mol_type = other DNA
ggagtcttgctctgccatccaggctggagtgcagtggcgcgatctcagctcactgcaacctccgtcttctgagttcaagccattctcctgcctcagcctccccagtagctgggattacag

SEQ ID NO: 64129 - DNA, 120 bp, synthetic construct
  source 1..120: mol_type = other DNA
aaaataaaaccttgttgataactaattgtgggtcttttccttttccctgacacacattctgcaagagaagacagatggcaggcaggaggcagattggagagaggttctcagcatgacttt

SEQ ID NO: 64130 - DNA, 120 bp, synthetic construct
  source 1..120: mol_type = other DNA
aagttcatgtttgttatctcaaagtgctccccaccagcctttaattttgggggcctgctcaggtgctggactctgtcctccttgctttctgttcgttagtttttatcttgttaattcctt

SEQ ID NO: 64131 - DNA, 120 bp, synthetic construct
  source 1..120: mol_type = other DNA
tgtgcccattgtcttggggagtttactggaggaagctgcaggcctggactgtgcagtctgatttctttacctattttaggaacgatgctggctggatgggcgcgaaggctcacacctgta

SEQ ID NO: 64132 - DNA, 120 bp, synthetic construct
  source 1..120: mol_type = other DNA
ctcaagtgattcttctgcctcagcctcctgagtagctagcactgcaggcgtgtgccaccatgcccagttaattaaaaaattatttttgtagggctgggagcggtgactcatgcctgtaat

SEQ ID NO: 64133 - DNA, 120 bp, synthetic construct
  source 1..120: mol_type = other DNA
tccaaaaccctacatgctgcctcataggaaatggggtcccctgaggagaaggacaaaagcagacaattcctgaggacaagaggaagaggaggacggagtctcccttgtttgtgctgattc

SEQ ID NO: 64134 - DNA, 120 bp, synthetic construct
  source 1..120: mol_type = other DNA
ttcaattaggatgtgacctccgacagcttaatttccctgagcctctgtgttttcatctgtaaaatgggtacgataatagggttgttgagatttggcaggtgataaatgctgaccaagtgt

SEQ ID NO: 64135 - DNA, 120 bp, synthetic construct
  source 1..120: mol_type = other DNA
ggagtcagggttaggtttagggtcaagactgatataatggccaggcacagtggttcacgcctgtaatcttagcactttgggaggccaaagcgggtggatcacctgaggtcaggagtttga

SEQ ID NO: 64136 - DNA, 120 bp, synthetic construct
  source 1..120: mol_type = other DNA
tagaagtaatctagagatgatgtaaagtgtataggaggatatgcatgggctttatacaaatactacaccattttatatcagggacttgagcatccatggactttgccatctgaggggggc

SEQ ID NO: 64137 - DNA, 120 bp, synthetic construct
  source 1..120: mol_type = other DNA
tttcctacagattttgtttgcctgcattgacttctttgtttagctctagtaaacagacatttagcatatacagatctgcacacttgacaaagaggaatttggagccctggacggggtggc

SEQ ID NO: 64138 - DNA, 120 bp, synthetic construct
  source 1..120: mol_type = other DNA
ctcaccagctgtgtgagcttggatgtgttacttgttactcagagcttttctcatgtgtaaagctgagtgcatgaggccgggcgtggtggctcacgcctgtaatcccagcactttaggagg

SEQ ID NO: 64139 - DNA, 120 bp, synthetic construct
  source 1..120: mol_type = other DNA
cattgagaggcccatttggatagcaggagattacatggggtcatgagtagacagaatgtggatttccagaaggtgcctcggcagctccactgtaggcataaagcaggtgattttgagatg

SEQ ID NO: 64140 - DNA, 120 bp, synthetic construct
  source 1..120: mol_type = other DNA
tggcctatgtattcttttaaacttcagctcattagagctgggtttgtgtcataagtgagagagccctgaggtgcttggtttgaagcaaagcttggttagccatcagcatctgattggaga

SEQ ID NO: 64141 - DNA, 120 bp, synthetic construct
  source 1..120: mol_type = other DNA
ctattactaccctcatgagtgtgatggttttattaccaccagagtgaagttcctgactgtgaggtttcagacgggataagcgcctggagtaaagtgtcagggcacatggttgatcagtat

SEQ ID NO: 64142 - DNA, 120 bp, synthetic construct
  source 1..120: mol_type = other DNA
gagctgggatacgctgggttttgattgtaaaggcatgcagctcagactctgttgtaaatggtgagtttttcttttttttattacactttaagttttagggtacatgtgcacaatgtgcag

SEQ ID NO: 64143 - DNA, 120 bp, synthetic construct
  source 1..120: mol_type = other DNA
tctgaatcatgtgaccacgttttagcctaatttggtgaacaaatctttaacctccatgtcttcaagtgcagcatcagtgggtcatggatccagaaggttggctgattgggattctcttgc

SEQ ID NO: 64144 - DNA, 120 bp, synthetic construct
  source 1..120: mol_type = other DNA
tttttcttattgagtagtgacccactgtatcgatagaccacagtttgtttacccactcaactgtttgcgcaggtgggttgtttctagtctctctatggacagagatttccttttctcttg

SEQ ID NO: 64145 - DNA, 120 bp, synthetic construct
  source 1..120: mol_type = other DNA
cactgcaacctctcactcctgggttcaagcaattctcccacctctgtctcccgagtagctgggattacaggcgtgtgccaccatgccaagctaattttttgtattttttttagtagagac

SEQ ID NO: 64146 - DNA, 120 bp, synthetic construct
  source 1..120: mol_type = other DNA
tttcatccttgaattcctgcctcaggaaccctacaaacccagtgcccagagtattgcactggggccagaatgggaagagccctgaatacaagagaactgtggtattggggctatacctat

SEQ ID NO: 64147 - DNA, 120 bp, synthetic construct
  source 1..120: mol_type = other DNA
attgctagatgctatggtaattccgtgtttaattttttgaggcactgccaaattatttttctcccagaatgctttggaggcaatgacttcctgtttccttccttccttccttccctccct

SEQ ID NO: 64148 - DNA, 120 bp, synthetic construct
  source 1..120: mol_type = other DNA
ttcattttggccatgtctgtgcacggctcacccctggtgcttgtatgcggatgcttgtgaccacacagcctgtatttgagccactgttctgtaatcagcctctcctgtggtggcatcttc

SEQ ID NO: 64149 - DNA, 120 bp, synthetic construct
  source 1..120: mol_type = other DNA
gctagttttccccctttccttggcagcccgtctcaccaggctgtcttgtaacagtctgttttccttgtctgtctccctcaccaacctgatgtgtctgcactgctgtgtcctcagctccta

SEQ ID NO: 64150 - DNA, 120 bp, synthetic construct
  source 1..120: mol_type = other DNA
tggcaaaaatgcaagtacccttggaggctaggccttggggtggagctagctcagacacctgccctctgggaacattgccttcttctgctttctaatgctgatggcttccctgagatccca

SEQ ID NO: 64151 - DNA, 120 bp, synthetic construct
  source 1..120: mol_type = other DNA
tatgctaagcagttacaatccagtttatcttacctcagagcacctctgaactcccaccagccacatctcaagtgctcctcagcttctgtgtccaggggctttggcgcagaacaggctgct

SEQ ID NO: 64152 - DNA, 120 bp, synthetic construct
  source 1..120: mol_type = other DNA
aaaaagcaaatcagggtttgtaacagttaagtctgtcccggggaagtgttccattgcaccttgatttatgccactggaaacattttatactgaggactgtccattggccaaacaagcctt

SEQ ID NO: 64153 - DNA, 120 bp, synthetic construct; identical to SEQ ID NO: 11206
  source 1..120: mol_type = other DNA

SEQ ID NO: 64154 - DNA, 120 bp, synthetic construct; identical to SEQ ID NO: 11207
  source 1..120: mol_type = other DNA

SEQ ID NO: 64155 - DNA, 120 bp, synthetic construct; identical to SEQ ID NO: 11208
  source 1..120: mol_type = other DNA

SEQ ID NO: 64156 - DNA, 120 bp, synthetic construct
  source 1..120: mol_type = other DNA
ttttgaagacttaggactggaccagctaagggctgtaaacaagcatttccctcccttggcaggaagtgcttaatgtctttgcttttgggaaccggtgttctgggcaggctaggaggccgc

SEQ ID NO: 64157 - DNA, 120 bp, synthetic construct
  source 1..120: mol_type = other DNA
cgtctcaaaaaaaaaaaaaaaaacaaaaaacaactctgtccccttctccctgtggccgtcacctctaacctctacggctgttattctggttcagtctcatttcttctctcggacttttgc

SEQ ID NO: 64158 - DNA, 120 bp, synthetic construct
  source 1..120: mol_type = other DNA
tggttgtacatttttctccatgatcttcatgtttcgtgtagactgatcccttctactttctgaaagctgccattggaggtgaagcagggctcctttggatttgcggtatcaccaattcgg

SEQ ID NO: 64159 - DNA, 120 bp, synthetic construct
  source 1..120: mol_type = other DNA
ctcctcttcctcttcctcctccttctcctcctcttcctctttctcctcctcttcctccttctcctcctattcctccttctcctcctcatcctcctttcttcctcttccttcacaaacaca

SEQ ID NO: 64160 - DNA, 120 bp, synthetic construct
  source 1..120: mol_type = other DNA
ggatagttgtaaaaccttgaatgcaaagcttgaatacaattgaggagcagagatggggtatacagcaagcactctgtgtattaagtgattgttgttcctcgtctgtcttttgacctccca

SEQ ID NO: 64161 - DNA, 120 bp, synthetic construct
  source 1..120: mol_type = other DNA
aaatctctgctctgccactcgagcatatttcagaacctgtcctagtctcaatttcttggtaaggtgagactataaccacttttaatgggtccacaaggcctgatccaacccagcaggtgc

SEQ ID NO: 64162 - DNA, 120 bp, synthetic construct
  source 1..120: mol_type = other DNA
aaaaaaaaaaaaaaaaaaaaaaagtcaaccagtccctccatcagatcacaggcatcttaagggcagagaacatatcctgtttgtggggccctagactcaacactggtcaggacacagttg

SEQ ID NO: 64163 - DNA, 120 bp, synthetic construct
  source 1..120: mol_type = other DNA
acccatcaggatgatttgggcttcaagaaataaggcttgattacaaatggtttaaacaatagcaaatgtttatcatcccacattagaagaagtctggagctaggtggccccaggacgagc

SEQ ID NO: 64164 - DNA, 120 bp, synthetic construct
  source 1..120: mol_type = other DNA
tctttattttctagacaagtcaattaaagctgccagaagtgaggtgactcgtccacaagcagcacgttctgtggacagagcctaggactgactgagtccaagcgcagggccccaccccca

SEQ ID NO: 64165 - DNA, 120 bp, synthetic construct
  source 1..120: mol_type = other DNA
ccttgccagatgctgaagtcatgctcttggacttcccagcctccagaaccatgaaataaataaacctctgttgtttataaattacccagtctcaggtattctgttatagcaacacaaaac

SEQ ID NO: 64166 - DNA, 120 bp, synthetic construct
  source 1..120: mol_type = other DNA
gttccagccccgcacttcctggacacccttcgttcttttcatgctctggcatgttcagctttgctttctcttcactgagcctttgcacatgctgttccctctgccaggaattccatttac

SEQ ID NO: 64167 - DNA, 120 bp, synthetic construct
  source 1..120: mol_type = other DNA
cttaagttcatctaactcagtagtttccaaacttgcttaaatgtcttagaaacctgttgtgcctcactttagtggttctgggatgggggagttgtccctagggaatcctgcagggtcctg

SEQ ID NO: 64168 - DNA, 120 bp, synthetic construct
  source 1..120: mol_type = other DNA
ttgggagatgatctcacctgcctttcatttccaagagatcagtagcacttgtattttaagaggtgagtccttctatgaatatcttgaccttgaggtttacaaaggacttccagaccatgg

SEQ ID NO: 64169 - DNA, 120 bp, synthetic construct
  source 1..120: mol_type = other DNA
ctggctctccttttgagtcactttgaccacgcctccttaccagtcaaaccgtgggttttctgaattcctggaagtgctcttttagctgcttttctgatccctgaacagcaaacacttatc

SEQ ID NO: 64170 - DNA, 120 bp, synthetic construct
  source 1..120: mol_type = other DNA
cttgttattacagttcaactggctggggtttgtcaggcctcaagccagcctacctggtggtttcaaaccagacttaatcaaaatgtaaatacttcttggggccagaaagcaggactgtcc

SEQ ID NO: 64171 - DNA, 120 bp, synthetic construct
  source 1..120: mol_type = other DNA
gcatttggacttgattctaaacctgttgggaagtcattagaggatttcaaatgagagaattccatgagttgctttgggtttgcataactctggctgctgggtggagatagtttgaaaggg

SEQ ID NO: 64172 - DNA, 120 bp, synthetic construct
  source 1..120: mol_type = other DNA
tgcatttccccgtcattcctcacaaccctaggcggcaacattgacattcttcttcccattttgtggatgcagaaactgaggctcaaagagcttttggcctaaggtcatccacctagcgag

SEQ ID NO: 64173 - DNA, 120 bp, synthetic construct
  source 1..120: mol_type = other DNA
taaaggcataagtgaaaatttgctgacaaattttgatagctgctttttcaaagccagacactgactgaggagtggtgggagagagctgtgtgggtatgacttggattgattgattgggga

SEQ ID NO: 64174 - DNA, 120 bp, synthetic construct
  source 1..120: mol_type = other DNA
gcttcttctaggattttctgaaacttggtcaggggctcctggatcatgattgcagattgagagccactgagccattccaggtcctgttttctgatgtgaaatggaagcccagagtgggga

SEQ ID NO: 64175 - DNA, 120 bp, synthetic construct
  source 1..120: mol_type = other DNA
atgcagtcttaatcactgcatgattaaggctgaatcatggtcccctaaagatgtcgtatccgaatccctgcaacttgtgaatatgttacctacctgataaaagggccttttcagatgtga

SEQ ID NO: 64176 - DNA, 120 bp, synthetic construct
  source 1..120: mol_type = other DNA
aaggctgctccccaggtccttgcaggaacataagtgcccgggtttatctttgggcactagagctgtgcccacagcagctcctgttcagatctggatcagggtcaggcccccatcactgat

SEQ ID NO: 64177 - DNA, 120 bp, synthetic construct
  source 1..120: mol_type = other DNA
tggtctctaagaagagagggttcagcccaagggtcacctccttcaggaagccttccctgattccacaggcagggttgattgtgcctcccctgtgccccctcagcccctcttcctctagta

SEQ ID NO: 64178 - DNA, 120 bp, synthetic construct
  source 1..120: mol_type = other DNA
gtgtgtacacggtcatgtccacatggtaattaatgtacctgagtgctgagcaggttttgattggccaggatctctacagcatttgtttagcttctttgaaataggggatgcaaaaattct

SEQ ID NO: 64179 - DNA, 120 bp, synthetic construct
  source 1..120: mol_type = other DNA
ttgctgggaaggtggttgtattccctttttcagagcagaaaatggaggctcagagattatggtgtgcagtgtggcttatttgttgttgtttctaagtccatttggaaatgatctcttccc

SEQ ID NO: 64180 - DNA, 120 bp, synthetic construct
  source 1..120: mol_type = other DNA
ccacctcccgggttcacgccattctcctgcctcagcctcctgagtagctgggactacatccacccgctgctaatttttgtttttgtatttttagtagagatggggtttcaccgtgttagc

SEQ ID NO: 64181 - DNA, 120 bp, synthetic construct
  source 1..120: mol_type = other DNA
taatgatgatggtggtggtgatggtggtggtggtggtgatggtggtgatggtaatgatggtagtggtgatggtgatgatggtaatgatggtagtggtgatggtggtggtaatggtagtgg

SEQ ID NO: 64182 - DNA, 120 bp, synthetic construct
  source 1..120: mol_type = other DNA
cctcacaccatccagccaagacatttcagacactcatagctgagaactgtggcacagggaactttctggggtcaggagaactgtgtctttgctccccagttccgctcctgtagaggacag

SEQ ID NO: 64183 - DNA, 120 bp, synthetic construct
  source 1..120: mol_type = other DNA
ctccctttcacagtggttgccaagtgcatcgggttggagaaagtaccctacaggctgaggtcacctcaatacacttggctggagtcatgttgcttctgaaaaggcttgagtcactcggtg

SEQ ID NO: 64184 - DNA, 120 bp, synthetic construct
  source 1..120: mol_type = other DNA
acaaggaccagacccactgaattgtttcaaactctagagtcacctgtgacatgtggcctggagagaaaagatgagttggccaatcagatttgctccttgagcctttggaatcaggattct

SEQ ID NO: 64185 - DNA, 120 bp, synthetic construct
  source 1..120: mol_type = other DNA
gactctcttttctctgggatctgtaaacaataaaggtccaagggtcaccagaaggcaaagaggcattcagtagatgggtgtgtgtgtgtgtgtgtgtgtgtgtgtgtgtgtgtgcccaaa

SEQ ID NO: 64186 - DNA, 120 bp, synthetic construct
  source 1..120: mol_type = other DNA
tttctctgatcgattgcacatttgtcaccagggaggaaaagaacattagactaagagtcagaacagcagagccctggttcaggttatgatacacactccctgattgaggcaaggttcttt

SEQ ID NO: 64187 - DNA, 120 bp, synthetic construct
  source 1..120: mol_type = other DNA
aagcaatgccctccctagagtctgtcccttctaaagggccagtggcagcccgagccatgaatcaggggacacgccatcttgctgttgtccgcctttctccaggttttgtcttggactcct

SEQ ID NO: 64188 - DNA, 120 bp, synthetic construct
  source 1..120: mol_type = other DNA
aggttgaatgagtccatgaaaatgtgctgcatgcgttgagagaatggatctgtaagctgatgtgcagttcaacacagagacagacagactgaccgaccagtgcttcctacacacttccat

SEQ ID NO: 64189 - DNA, 120 bp, synthetic construct
  source 1..120: mol_type = other DNA
ttaggaccctgttggtgacagtgggcccacctggataatccaggattatgtccctatcattatccataatctcatccacaaacttaatgctcatttgtcatggaacctaacgtattcaca

SEQ ID NO: 64190 - DNA, 120 bp, synthetic construct
  source 1..120: mol_type = other DNA
actgtgtccggcacctgcagagggcctgccgcttagtatgtgctcaacacatattggttgaacgaatcagtgaacctatgttaactttcttaatgaataaatctataagtgtgcatgtat

SEQ ID NO: 64191 - DNA, 120 bp, synthetic construct
  source 1..120: mol_type = other DNA
ggacatcagactctgctgagctagggtttaggctgatttcttgagagggtggccctatctgggcgtgcacagaagaacctctaggctgcctgaatgagggctgcggctagatgaggattg

SEQ ID NO: 64192 - DNA, 120 bp, synthetic construct
  source 1..120: mol_type = other DNA
gaggtcaggagtttgagaccggcctggccaacatggtgaaaccctgtctctactgaaaatatgaaaaattagccgggtgcggtggtgcacatctgtattcccagctactcgggaggctga

SEQ ID NO: 64193 - DNA, 120 bp, synthetic construct
  source 1..120: mol_type = other DNA
tgttttccctcctttcagctttgggaggaaggccttactgtctccacttcatggatgaggactcagagagggcgggtgcttgtccaggcttgcctaggcagcaggggatggccacagggc

SEQ ID NO: 64194 - DNA, 120 bp, synthetic construct
  source 1..120: mol_type = other DNA
gactgtgcgggatactggggctcacagcccacctgggaggaagagtgtgtgtgtttgtgtgtgtcttgggctgggggtgtgtcactggcttggcctacagcccgtccctctgtctctcag

SEQ ID NO: 64195 - DNA, 120 bp, synthetic construct
  source 1..120: mol_type = other DNA
ccttctcccctctgtgccctggggtgggtccttccccatcactgcctgagggctccccatccgcttattattgtcagaggtcatggacgtgctgaacacgtttaagaagactcaagtcca

SEQ ID NO: 64196 - DNA, 120 bp, synthetic construct
  source 1..120: mol_type = other DNA
ttttgttcttcatgctaattttggctcagagagaatagggcctgttgtgggactggggaggagaccttagttgccatggttgcaactcacccatgtgtgcccagcaagtaccccctttct

SEQ ID NO: 64197 - DNA, 120 bp, synthetic construct
  source 1..120: mol_type = other DNA
agggagtagatgcggtgtttcctgtccttcccgctaaggacagtcaaaaaccctggacattatgtataaaacaaacataagattttgaaagccgggagagaagaaggcagactggctggg

SEQ ID NO: 64198 - DNA, 120 bp, synthetic construct
  source 1..120: mol_type = other DNA
tttaacaaatacccacagactaggtggcttaaacaacagacatttatctctcattgttctggaggtggggaagtccaagatgaaaatgccagcagatctgatgtcctcatcagtttttcc

SEQ ID NO: 64199 - DNA, 120 bp, synthetic construct
  source 1..120: mol_type = other DNA
gtccttctaggtccataaactggcctcttggcagggcccactcccctgggatggtgtgaggaacgtgcgtgctggcgtgtggaaatggattcttctgttctgccggagggtattgaaaag

SEQ ID NO: 64200 - DNA, 120 bp, synthetic construct
  source 1..120: mol_type = other DNA
ctctccattccactcagtaaaacccagactccttactgtggcttgtaagcactttgccctaaggtgaagcctgtagaccccttatcagaagaatgcttttatagataaaatagaatacat

SEQ ID NO: 64201 - DNA, 120 bp, synthetic construct
  source 1..120: mol_type = other DNA
tcctcacactttttcttccaggggactttaaggtctcagtccaaatatcatctccatagagaagccttctaaaaaggaaccataccctccttctaattgcatcctttcccatagtgctgt

SEQ ID NO: 64202 - DNA, 120 bp, synthetic construct
  source 1..120: mol_type = other DNA
atccaccaaggagcatgggagaccaactgaaattaagatgagatgacaaatcaagaaagttccacagggtatggagcaggttgctgagctgcagaaccaaggcaaagatctatccccact

SEQ ID NO: 64203 - DNA, 120 bp, synthetic construct; identical to SEQ ID NO: 11212
  source 1..120: mol_type = other DNA

SEQ ID NO: 64204 - DNA, 120 bp, synthetic construct; identical to SEQ ID NO: 11213
  source 1..120: mol_type = other DNA

SEQ ID NO: 64205 - DNA, 120 bp, synthetic construct
  source 1..120: mol_type = other DNA
ttgaaagagaaggcacgagctcaggcacatgcaagatgcccagcgatactgtccgtgggtttcttgtttggacagtcttagaatggagtggtggcagggattttacagatcacctggagt

SEQ ID NO: 64206 - DNA, 120 bp, synthetic construct
  source 1..120: mol_type = other DNA
cttgattatctctgtagcaacgctctttccaaataaggtcacgttctgaggtaatggggattaggacttcagtgtatcttctttaggggatccagttgaacccataacatattcacgtgc

SEQ ID NO: 64207 - DNA, 120 bp, synthetic construct
  source 1..120: mol_type = other DNA
tgaacatctttgtacttcattgtgacattttgatctatggctcaaagtaagaaagtccactgtctttttgaaggccagaacacagcagcctgtacagtgctgtttgcttcctctggaatg

SEQ ID NO: 64208 - DNA, 120 bp, synthetic construct
  source 1..120: mol_type = other DNA
catgagctactgttggctgctagctgtggccgtttccagccagcagtagaaaggaagatgtaaaatcctgaagcattttgagtactgctttgttttttttctttcctgtttgacgattga

SEQ ID NO: 64209 - DNA, 120 bp, synthetic construct
  source 1..120: mol_type = other DNA
ctccacagtatctcctagtctgcccctctcgccccatctccaccatttccacttgatccttgtccctgcctgaactcctgtgtcagctccttgctccctccaggcgcacctacttccaac

SEQ ID NO: 64210 - DNA, 120 bp, synthetic construct
  source 1..120: mol_type = other DNA
gctaaaccaaaccggtgctgctggattgggacggagacagcagtgaggaacatgagctccagtgtcagagggacctggttttcatccaggctctattccttactggttgtgactttgagc

SEQ ID NO: 64211 - DNA, 120 bp, synthetic construct
  source 1..120: mol_type = other DNA
tctgtgtggcagggaaggtgccaagtgaacagatgagagagagagagagagagagaacacttttgggtcagcaggttcagcgttatccaaccagcaaacatttcctggatgcttactgtg

SEQ ID NO: 64212 - DNA, 120 bp, synthetic construct
  source 1..120: mol_type = other DNA
ttcccacctatgagtgagaacatgcggtgtttggttttctgtccttgcgatagttcagagtaggtttttctttgtgacgcccggtcgcaggatgtctttcagcaccacctgtcagagctc

SEQ ID NO: 64213 - DNA, 120 bp, synthetic construct
  source 1..120: mol_type = other DNA
acttgtcttcctgcatggactggtgcagtagcctcttctttggtcctctgtttctagctggtatcttttttcttccttcccatttattatgactttcttgcttgctgttcttaacactca

SEQ ID NO: 64214 - DNA, 120 bp, synthetic construct
  source 1..120: mol_type = other DNA
ctacagggtttcggcatttgcttcagttatttactgaccatgatctcctaggtcagatttatcatttactgggtcaggaaagaaaaagccccatggggccaggtttatagagattaaatc

SEQ ID NO: 64215 - DNA, 120 bp, synthetic construct
  source 1..120: mol_type = other DNA
gtgtgtgtacatgcaagtttgtgcccatgtgtgtttgcgagtgtgcatgtgtgtgcgtgtgtatacatgcaagtttgtatgtgtccgtgcatgtttgcaagtatgtgcgtgtttgtgtgt

SEQ ID NO: 64216 - DNA, 120 bp, synthetic construct
  source 1..120: mol_type = other DNA
tctttgtcttttatggaacaattgaacatgtgcctttattggaagatgctgtggatcgttttgggaagtaagcaggcaatgaataagtcagtgcgttagaaacgaaggggagaagaagct

SEQ ID NO: 64217 - DNA, 120 bp, synthetic construct
  source 1..120: mol_type = other DNA
tagtgatgctgtgtccagctctgtgtctgactctgcccagtggttctggaaggaaagcagtaccttggaagcaggcatgggttcagttccttgcccctccacttactcattagatgtcct

SEQ ID NO: 64218 - DNA, 120 bp, synthetic construct
  source 1..120: mol_type = other DNA
tgcttacttcttagcagaccaagtgcacaattttccatcaaaacttttccattgctcaaaagtgtctctgacaccgaggctggatcctgcagcatctttgtcacagctcacattttattt

SEQ ID NO: 64219 - DNA, 120 bp, synthetic construct
  source 1..120: mol_type = other DNA
ctttttccttataaattacccagtctcgggtatgtctttatcaagcagagtgaggatggactaagacactattataggtggtaggtaaaaaccatgacagcagctcatgaatgactggta

SEQ ID NO: 64220 - DNA, 120 bp, synthetic construct
  source 1..120: mol_type = other DNA
aaagcctcctctaaccagacttgcctctggagtggccccaataagctcctgggtctgttttggtttcttcaacacatttatttggtgtttaattggaggggaaagttgcagcgattatgt

SEQ ID NO: 64221 - DNA, 120 bp, synthetic construct
  source 1..120: mol_type = other DNA
ctcaatacttaccattgaaacaggtcctggagagcctctccttggcaacactgttagacattctgttcttgaaatagaaagtccatattctttggtgaaagctctaaatccaggctttcc

SEQ ID NO: 64222 - DNA, 120 bp, synthetic construct
  source 1..120: mol_type = other DNA
ctcatagtgtacattagatctctagacttatcctacataactgcaactttgtgccctacatctccttttttttttttttttttttttttgagacaaggtcttgctctgtcactcaggctg

SEQ ID NO: 64223 - DNA, 120 bp, synthetic construct
  source 1..120: mol_type = other DNA
aatacaaagtctgtacatgttcagtgcagacacaacaatccatttcctgtcaaatatttttgatccatagttagttgaatccacagatgcagaatccatggataaggaatgccaacagta

SEQ ID NO: 64224 - DNA, 120 bp, synthetic construct
  source 1..120: mol_type = other DNA
cctaatgaacaacaatggtattacaacccagctctatgaaaccagggactagcaagagtaaatgctgtattcagactaaaggacatagataagagcacattctgtcaggcagagtatttc

SEQ ID NO: 64225 - DNA, 120 bp, synthetic construct
  source 1..120: mol_type = other DNA
agcgaagtgaagtgatgccagatgccttgccctatcaaagtaatgaaagtgatctggaaatggtgttttttctcattttaatgacagagcagggctgggtaaggaataactgtaagtgca

SEQ ID NO: 64226 - DNA, 120 bp, synthetic construct
  source 1..120: mol_type = other DNA
tcctctcggggtggctgcatcaatcacacccaaaggggagaggcctcagtatggaaagtatgtgagccttggatggaatcacggatggcccgaaatggcttggccccttgtttctaaggc

SEQ ID NO: 64227 - DNA, 120 bp, synthetic construct
  source 1..120: mol_type = other DNA
ccctgaagaattcatttaaccttaattacctccccaaagccccacccccaaatatagtcacattgggggttagggcttcaacatatgaatttggggacaacacagttcagttcataacac

SEQ ID NO: 64228 - DNA, 120 bp, synthetic construct
  source 1..120: mol_type = other DNA
gaggctgaagagtctgagggggtgaaggaagttgagggaggctgaggctgaaggaggctgaaggactctgctctttgggtagaacttcctgtttctcatgtttcctctctgtagaccaca

SEQ ID NO: 64229 - DNA, 120 bp, synthetic construct
  source 1..120: mol_type = other DNA
ctccgctgatgcactgtgaccttgggcaatgcacagaccttaaactggctgtgccctggttttctgtccagcaggaccgggcagtgctgtccactctacagtggaatgaaggcagagaat

SEQ ID NO: 64230 - DNA, 120 bp, synthetic construct
  source 1..120: mol_type = other DNA
tgtgctcaccagctgcaagctgtcccacctccatactcagtgattattggaggtgatgctactacaagaaggaataatattttaaagaataaagtcagttcttaggaagccggtagtaac

SEQ ID NO: 64231 - DNA, 120 bp, synthetic construct
  source 1..120: mol_type = other DNA
agcatctgaaactcatccagatttagtagatgagactaagctggtgaacactcagttccatttaaccccttattggcagcctatgctcacactctttcctggttggcaagtgaagaaggt

SEQ ID NO: 64232 - DNA, 120 bp, synthetic construct
  source 1..120: mol_type = other DNA
ttctgttcacattccattggtcaaaatttggtcacctagccacccctagctgcagaggtggcagggaagtctttcttttggagctaaaaatgggagatctattactatagaaaacatgat

SEQ ID NO: 64233 - DNA, 120 bp, synthetic construct
  source 1..120: mol_type = other DNA
ctaattatttttttttctttttcccagttatctctcttgtgctgagtaactgaggagctacctatcaggtttagcgtcagttacagacctgtttcaagcctggcagttggagggaagaga

SEQ ID NO: 64234 - DNA, 120 bp, synthetic construct
  source 1..120: mol_type = other DNA
tcacagcctgggccagcacagggagaaatttggaaacaagtatgttatgatgcagccatcagctgcagttgatgtgttgggtcatgaattcattcattcattcactggtcaaacgttatt

SEQ ID NO: 64235 - DNA, 120 bp, synthetic construct
  source 1..120: mol_type = other DNA
aaaagttaaaagatgcagaataattgttctgctgtcagcaagagctgagttcacatcccagctctgcctcttgctagcctgtgaccttgtgccatttccttctcagtgtctcgattttag

SEQ ID NO: 64236 - DNA, 120 bp, synthetic construct
  source 1..120: mol_type = other DNA
ggatcatgttgggaggattaagggtggctgggggtcttgggaccctgagacatcaggactttcaggagaccatcagttgcctccaccttccgaggcattcatttctccagctgcttttgg

SEQ ID NO: 64237 - DNA, 120 bp, synthetic construct
  source 1..120: mol_type = other DNA
aaggtccagagagaagaatgatgggtcagaggtcatgcagggtcagacgtggagctggacacaaagcccaatctcctagccccagtcccatgcaccgatgtgctttctcgaaaggggcat

SEQ ID NO: 64238 - DNA, 120 bp, synthetic construct
  source 1..120: mol_type = other DNA
ctgtgcttttaggagagctgttttcccctcatttgtaaaaactcaaaaatatggaaaaatagaaacaaccacaggtcacgcatgggtgtgtttcctttttgccccggctcttaaagcacc

SEQ ID NO: 64239 - DNA, 120 bp, synthetic construct
  source 1..120: mol_type = other DNA
gaatggcacaggaagatggcagggcttggtttgggtgtgtttgtgtgacacaccatatgtcattttttattcacacaaaaacatctttcttgaagtaatagaaggccactcagctgttgc

SEQ ID NO: 64240 - DNA, 120 bp, synthetic construct
  source 1..120: mol_type = other DNA
cctattgggaaactctggttgccctccaagagtccacatactgcaggctcttaattaagaaagtatgttcccatttcatgtcactcgaaaagaatgaaaacagtgacagcatttatttat

SEQ ID NO: 64241 - DNA, 120 bp, synthetic construct
  source 1..120: mol_type = other DNA
gaactatgtactaatcagctatagatataggcattctagaatattcatgaggatccaacttcgtggtggaggctgaggacagaagttctttaatagtactgccccatcttgctgtggtgt

SEQ ID NO: 64242 - DNA, 120 bp, synthetic construct
  source 1..120: mol_type = other DNA
taaactggagagtatgttaaaacacagatttctgggccctaccagtggaattctgattcagtcagtaggtgatatggtttggctatgtccccacctaaatctcatgttgaattgtagctc

SEQ ID NO: 64243 - DNA, 120 bp, synthetic construct
  source 1..120: mol_type = other DNA
tctaagtccctgtaatcatctgcatttgtgaagctggcatgccaagaaggtttgcaggttgagaaggggcttagaggttattattcgaacccccttattttatggatgaggaaactgaga

SEQ ID NO: 64244 - DNA, 120 bp, synthetic construct
  source 1..120: mol_type = other DNA
ccatccctgagtgacctaccactttctgtctgttttctttaggacagtcttgaagatccactcagtgacatcctatggtggtctcagacctagcccagaattcttgtcctaattcacctt

SEQ ID NO: 64245 - DNA, 120 bp, synthetic construct
  source 1..120: mol_type = other DNA
aatgacttcctctgtaaatgtctcagacttgccgccaccccatttttgtccccttttctgtggactgcacgtgaatcatttttgctctaaattattgatttaccagtgagacactgaatc

SEQ ID NO: 64246 - DNA, 120 bp, synthetic construct
  source 1..120: mol_type = other DNA
acaggcgtaagccaccgtgcctggccactactcccaaatgtcttacataaagcagcctctttctggcttggaggaaaagatcaatgaggcacatggaaagcaggagttccatgttctaga

SEQ ID NO: 64247 - DNA, 120 bp, synthetic construct
  source 1..120: mol_type = other DNA
ggatcacaatatggcacatgaaatctcaaaactgcttttggaaaaggtgggggtagaggggtaccttgcttaaatcacataagcagcatggtgctctctcccataattgaataaaaatgg

SEQ ID NO: 64248 - DNA, 120 bp, synthetic construct
  source 1..120: mol_type = other DNA
cacccttgaacctgtcattatggccagagagagaggcctctgattggctgtgactaagtgacgtgtccatccgtgaccgtagcactgtggccaggagacagaggccttttgattggctgt

SEQ ID NO: 64249 - DNA, 120 bp, synthetic construct
  source 1..120: mol_type = other DNA
agcgcgggtgacttcctgtctctgtgcctttagtgcctaactggaaaagtcagggttttcataatttgaagcatcctaagactgggcttttctccagttgggcaaaaatgatttttaaaa

SEQ ID NO: 64250 - DNA, 120 bp, synthetic construct
  source 1..120: mol_type = other DNA
tagatctcatgggttagaagactgaggaataaactcactgcttacaaaactcccactacagactttgattaggaatgcaaaattgtctgaggatctaaacacatgggtgaccttgggtga

SEQ ID NO: 64251 - DNA, 120 bp, synthetic construct
  source 1..120: mol_type = other DNA
caagatctcgatgtgcatctctagacccacaaaccaaattgcccactggacatctccactgaagtcacaaaggcccccttaaagtcagtaagtcccaaatgcactcaggactttctccca

SEQ ID NO: 64252 - DNA, 120 bp, synthetic construct
  source 1..120: mol_type = other DNA
actctaggctcccccataaccatccatccccctttgtaatacatttgttgttcctacagaagagcttcccacagtctgaattttgtattcttatccctaaatgtcatttaacaggctcct

SEQ ID NO: 64253 - DNA, 120 bp, synthetic construct
  source 1..120: mol_type = other DNA
atcttgtactagatccattgtttctcagaggagctgtgattccttttactgggacatagcagttgcaggccacagtttggcacaagggttattaccactaggccatcgattctagcacct

SEQ ID NO: 64254 - DNA, 120 bp, synthetic construct
  source 1..120: mol_type = other DNA
tggttgtatcatgaagtaggatggtcagcattggagtctttgaaaaggcgacatttgactgaggaccaggaagtcgttggaggagttagccaagtgaatatgtggtgaaagggtgttaca

SEQ ID NO: 64255 - DNA, 120 bp, synthetic construct
  source 1..120: mol_type = other DNA
accagatccttgagtggcgaagctccaggggagatgggtgttcaagccaggcttcatgagaaagatctgggctggaaatggaaaattgggagttgtcaactttttttttttttaattttt

SEQ ID NO: 64256 - DNA, 120 bp, synthetic construct
  source 1..120: mol_type = other DNA
tctaccaagtggagcttttaaaaataacctgtcctcgttggactctgatgtagtccctgggaaaggctcctctcctgcacagtatttttttttttttaatttgagacagagtctcactgt

SEQ ID NO: 64257 - DNA, 120 bp, synthetic construct
  source 1..120: mol_type = other DNA
aaaaataaagaagattttttttttctaggaggtggaatctcactctattgcccaggctggagtgcggtggtatgattatagcttaccgtagcctcaaactcttaggcccaaagcgaatcc

SEQ ID NO: 64258 - DNA, 120 bp, synthetic construct
  source 1..120: mol_type = other DNA
aggtgatggttttgtgggtcaggaatttgggcatggctttgcgatgtgctgttggctcaaggtctctcatgaggtgagatattaagaagttggctgggctgcagtcatctgaaggcttga

SEQ ID NO: 64259 - DNA, 120 bp, synthetic construct
  source 1..120: mol_type = other DNA
taaaatgggtttatatagtgcacatctgtgggatcatccagtctcctgggtgccccacccgcattcccaaataacatggctgtcctagaagctgccatgttcttaatgatgtcaccccca

SEQ ID NO: 64260 - DNA, 120 bp, synthetic construct
  source 1..120: mol_type = other DNA
ctcagcctgtaatcctgtaatcccagcactttgggaggccaagatgggcagatcatttgaggttaggagttcgggaccagcctggccaatatggtgaaaccccatctctactaaaaatac

SEQ ID NO: 64261 - DNA, 120 bp, synthetic construct
  source 1..120: mol_type = other DNA
agcaaggccagtgcccacccatctgaagcaccgtgcagggcatcagccaggtcctggcagaaaacagatggccggccccatgtgtgaatggaggagtttaatgagggcctatttacaaag

SEQ ID NO: 64262 - DNA, 120 bp, synthetic construct
  source 1..120: mol_type = other DNA
tgtgttagagcagcatctccccgcaaaggccacccctgtgtttggcataaatcacaatgcagggagaaggctcattcagtggtgtcttccctgttggcacctggcacgtatctggattat

SEQ ID NO: 64263 - DNA, 120 bp, synthetic construct; identical to SEQ ID NO: 11217
  source 1..120: mol_type = other DNA

SEQ ID NO: 64264 - DNA, 120 bp, synthetic construct; identical to SEQ ID NO: 11218
  source 1..120: mol_type = other DNA

SEQ ID NO: 64265 - DNA, 120 bp, synthetic construct; identical to SEQ ID NO: 11219
  source 1..120: mol_type = other DNA

SEQ ID NO: 64266 - DNA, 120 bp, synthetic construct
  source 1..120: mol_type = other DNA
tttattattatttatgatgggccaggccccaggccaagagcttgatcacttccgtctgtataatcagtgtatacctaggtgctggtaccatctgcgttttatagaagggttaagcaaatt

SEQ ID NO: 64267 - DNA, 120 bp, synthetic construct
  source 1..120: mol_type = other DNA
gttctgagaggtcagcgtggaggggaagtgttgggggttgactgggagggaaagggggtgcccaacgacatcaaagaatgaagagaattctgaaacatattctggagtattctgaagggt

SEQ ID NO: 64268 - DNA, 120 bp, synthetic construct
  source 1..120: mol_type = other DNA
ctctggctagatacatttttgatctcctggccaccactcaagatagtgtggacactctgggcataaacacatgccctgagcttaaaggggtgcatgcaccctagagggcataatgatgac

SEQ ID NO: 64269 - DNA, 120 bp, synthetic construct
  source 1..120: mol_type = other DNA
tttttcccttaagttctcctcaatttaaaaaatttaagccacaccatatgttacggccagggaggcctccaggggaggtggttgatccatgccttgggtcagctgtttccctacaataaa

SEQ ID NO: 64270 - DNA, 120 bp, synthetic construct
  source 1..120: mol_type = other DNA
tcacctgggtggtctctgagcacactgttccattgttgtgattctgtgccccatgatggggattctgaggagcccaccttcagagtagggccaacacataagcagattaaccaaatgccc

SEQ ID NO: 64271 - DNA, 120 bp, synthetic construct
  source 1..120: mol_type = other DNA
gccatcttaaaattgctggaagccaggatagaaagcccctgcctaagcaatgcctatgccttgagctccgttctccctcaccacggaggacgccctacaaacccgtgcctgaagttttta

SEQ ID NO: 64272 - DNA, 120 bp, synthetic construct
  source 1..120: mol_type = other DNA
aagcttttaagtgcttgacccagaagcaacactcatcacttcctctcgcagtccatggccagtggggaggctgggaaaggcagaggagcatctggaatattaggtgagcacaccagtaag

SEQ ID NO: 64273 - DNA, 120 bp, synthetic construct
  source 1..120: mol_type = other DNA
ccctttcctcccaggccctgacagccactaatctactttctgtctccaggcctatttcagacatttcatataaatggaatatcatataatatgtggccatctgtgactggcttctttttt

SEQ ID NO: 64274 - DNA, 120 bp, synthetic construct
  source 1..120: mol_type = other DNA
ctccttagttttccaaagtgctgggattacaggcacgagccaccgtgtccaacctgcttctattttttgtttctacatttttgctcttgtggaataataatgctgtgaaaatgcaggtac

SEQ ID NO: 64275 - DNA, 120 bp, synthetic construct
  source 1..120: mol_type = other DNA
ttttacagatcaggtaactgagatttgggaagagaagaggctggtccagaatggggaagcgcctgcgtgacctgctttggcagtgttacttgtaggacattttgctgcggctcattttaa

SEQ ID NO: 64276 - DNA, 120 bp, synthetic construct
  source 1..120: mol_type = other DNA
ctacctgtgcttgtggccatcagtcattctctagcacttgcgtggttttggccatgtttgcagactacccttaacagttacctatacaacgattttctttaaatcaacttatcttttaac

SEQ ID NO: 64277 - DNA, 120 bp, synthetic construct
  source 1..120: mol_type = other DNA
tgaaaagaaaacttgagaaagggacttccaggagttttctcaagcaacagtagtgagggacaggggttgggcctcttccacttccacttctgggagcagcagagagaggaattcacaaat

SEQ ID NO: 64278 - DNA, 120 bp, synthetic construct
  source 1..120: mol_type = other DNA
cattctatcttcatgactatcctatgtagtagacactattgtccttgttttacccaggcagtcagagttctttagctcataatggtaaaacaggggaattgaaaacagggaggctgggca

SEQ ID NO: 64279 - DNA, 120 bp, synthetic construct
  source 1..120: mol_type = other DNA
agggagtagggagttgctgcttaacaggtacagagtgtctgttgggatgataaatatttttggaacaagatagaggtgatggttgccatgatgaacgtaatgaatgccactgaattgtac

SEQ ID NO: 64280 - DNA, 120 bp, synthetic construct
  source 1..120: mol_type = other DNA
ggttctcttgaatttcctggctcgtaggagattcctgccccctgccccccaacccctttattttgcagcccgaagggatgaagtcttcactggagaaaaatccaacatgatttcggattg

SEQ ID NO: 64281 - DNA, 120 bp, synthetic construct
  source 1..120: mol_type = other DNA
tgatcctcagtgcaaccctaccatctgaaaggggtctagaaaagtgtcagttctgccattaggaaaagtgaattcatccagagctctagtcttggaagagttcctagcgcacaaatggca

SEQ ID NO: 64282 - DNA, 120 bp, synthetic construct
  source 1..120: mol_type = other DNA
caaacaaaaccctaaagcttcggcctcctcagcttcattgcagatctgcttcttttttttttttttttttttttttttgagatagagtcttgctctgtcgcccagtctggggtccagtgg

SEQ ID NO: 64283 - DNA, 120 bp, synthetic construct
  source 1..120: mol_type = other DNA
ttttgattaaaaaggtggaagaatggtgctttttcttcctgtcagccaggccttaaatcaaccctcaagtgaggaaatgctctctgcgcctgctgctcagcaaacctttttctctggttg

SEQ ID NO: 64284 - DNA, 120 bp, synthetic construct
  source 1..120: mol_type = other DNA
attcctcctttcacagagctctctagggctctgtttccacatctgtgaccccggaacagtaagcccccacctcacagtgttgttctggagagcaacaggagtaaaaatttatgagaaaac

SEQ ID NO: 64285 - DNA, 120 bp, synthetic construct
  source 1..120: mol_type = other DNA
tgtctttgctcccaggccaactatgtgcccttgagcaagttacttaacttctgagcctatttctgcgcctgtgaagtgaggacagtaagaataataaaacctatcttaagaagatcaaac

SEQ ID NO: 64286 - DNA, 120 bp, synthetic construct
  source 1..120: mol_type = other DNA
gcagaaaaactcctttggggaccattgtgtcaaatgaaagagcaaagagtagcagagacctgtgaggagcctcctcaatagtccaaacaagagaagagaattctccaaaccagggtagtc

SEQ ID NO: 64287 - DNA, 120 bp, synthetic construct
  source 1..120: mol_type = other DNA
cagcttctctctccttcaaggtccaggcctgtatgacctctctagggctccctctcgaattgatcgctctctctctctcttttttttttttttaatttgagactgcttctcactctgttg

SEQ ID NO: 64288 - DNA, 120 bp, synthetic construct
  source 1..120: mol_type = other DNA
tcttctctccaaccacactgccaccccaacagtctcatcattgaaaattccaaggcctcccgtgcattgaatcgttagtggtcagcaatacatcatccacaccatgcctgaatatcccag

SEQ ID NO: 64289 - DNA, 120 bp, synthetic construct
  source 1..120: mol_type = other DNA
acacagctgtgtccccagggcgtatcttggtgtcttcagctgtcccagagagatgattacagagccctgctcagggatagctgggtgtcaccctgactgtcatcagagtggactctggca

SEQ ID NO: 64290 - DNA, 120 bp, synthetic construct
  source 1..120: mol_type = other DNA
ttaaagagtctctctttgtaagtgacttccagggaaggaccagacatcctctggttccattgatgcaaataataaatgtccgactacaactactcgcttcttacccttctggcaggtttg

SEQ ID NO: 64291 - DNA, 120 bp, synthetic construct
  source 1..120: mol_type = other DNA
tggacctcggtttcctcatctgcaaaatggacactataataatagccacctcaggatatgattcagtgaattaatgaagcaatgtgtttagcccaggacctaactagagttagccttcag

SEQ ID NO: 64292 - DNA, 120 bp, synthetic construct
  source 1..120: mol_type = other DNA
tgtttctccccatggcccaccctgctggcatctctatctggtccttgctgactcgcaccaggctcaaggtcatatcctggcacaacacattgtatcgtcttgctcacgaacagacaacca

SEQ ID NO: 64293 - DNA, 120 bp, synthetic construct
  source 1..120: mol_type = other DNA
gaagaggaggcaaggctttcagatttcagcatccttttgggagagagctgtgtccacaccccatctttctgagtccactcccagcaattttctcaattatctctttaatttattaaaaac

SEQ ID NO: 64294 - DNA, 120 bp, synthetic construct
  source 1..120: mol_type = other DNA
ctgtcattatcaatgttttgcagatgaggaatgaggctcagagaagccaagtgacctccatgaggtcacacagcctgtaagtgacacagtcagaagtctcatcctgaacctaggctcatt

SEQ ID NO: 64295 - DNA, 120 bp, synthetic construct
  source 1..120: mol_type = other DNA
acacacatacacacacacaggctcatgaaagttctccaaagccaggttaccccacatagttggatgatcttaggggctttttgtgtgcccttattcagcaccacagacatcaattgagta

SEQ ID NO: 64296 - DNA, 120 bp, synthetic construct
  source 1..120: mol_type = other DNA
atttatttcatgtttgctattcactgtttgtgtcccacatacaatgccaaccccttgctcccagctatatcccagggcctagaacagtgcccaacacttggcaggtacccaacaagtgtt

SEQ ID NO: 64297 - DNA, 120 bp, synthetic construct
  source 1..120: mol_type = other DNA
aatctttaagtacttctgcaagtacatccagagaaattcctagcagaggaatttctgggtcagaaggcacctgattttaaaccgtgagtgctgttaagctgctgtccaaaacagctgccc

SEQ ID NO: 64298 - DNA, 120 bp, synthetic construct; identical to SEQ ID NO: 11220
  source 1..120: mol_type = other DNA

SEQ ID NO: 64299 - DNA, 120 bp, synthetic construct; identical to SEQ ID NO: 11221
  source 1..120: mol_type = other DNA

SEQ ID NO: 64300 - DNA, 120 bp, synthetic construct; identical to SEQ ID NO: 11222
  source 1..120: mol_type = other DNA

SEQ ID NO: 64301 - DNA, 120 bp, synthetic construct
  source 1..120: mol_type = other DNA
agtttagtcttggagagccaagagccaattttcacgttttaagctgattatttgtagccaaacagaccagcaatgcaaaccacaagccctctgcaccgtgatgtcctttatggcaactag

SEQ ID NO: 64302 - DNA, 120 bp, synthetic construct
  source 1..120: mol_type = other DNA
aacactttcaggcagtatcgagtgctaggaaaagggggcttcggggaggtgagtgaacattcacgtttttaattgaaagttcttacattcaagtcacctttcctgtcccttctaaatcaa

SEQ ID NO: 64303 - DNA, 120 bp, synthetic construct
  source 1..120: mol_type = other DNA
ctttcttgcactgcaggtctgtgcctgccaggttcgggccacgggtaaaatgtatgcctgcaagcgcttggagaagaagaggatcaaaaagaggaaaggggagtccatggccctcaatga

SEQ ID NO: 64304 - DNA, 120 bp, synthetic construct
  source 1..120: mol_type = other DNA
ccaggatttcgaggctgcagtgaactatgatcgtgccactgcaccccagcctgggtgacacagcaagacctcatctctaaaactaaatacatgcatacattaaaaataatatatacacaa

SEQ ID NO: 64305 - DNA, 120 bp, synthetic construct
  source 1..120: mol_type = other DNA
gtctctgaagggacagtgctggcgggttctgctcagggaagaggatcatgtgattcacaaagctgggtggcacgtctttaagggccttcagttacgatggctgcaccttctttaactgtg

SEQ ID NO: 64306 - DNA, 120 bp, synthetic construct
  source 1..120: mol_type = other DNA
gcattaactcaaaagtccatacatagtccaaagtcccatctgagacaaagcaagtcctttccgcctacgagcccgtaaaatcaaaagcaagttagttacttcctagatacaatgtgggta

SEQ ID NO: 64307 - DNA, 120 bp, synthetic construct
  source 1..120: mol_type = other DNA
cccatggtcttggggattaacattcagctccttgttacttatgcaaatttaggcagccagcctgaatttctcctcagaaaatgggattttcttttctattgcattgtcaggctgcaaact

SEQ ID NO: 64308 - DNA, 120 bp, synthetic construct
  source 1..120: mol_type = other DNA
atgggagtacaattcaagatgagatttgggtggggacacagagccaaaccatatcaactaggcacatcctgcatgcaagagaaagcctttaccaggccatgttccacttcccaaagcccc

SEQ ID NO: 64309 - DNA, 120 bp, synthetic construct
  source 1..120: mol_type = other DNA
gcactgaggaagcgaggtgggccaccctctggccagtgttctccagcctccaaagtttagggaagccaagcaagtgaaatgatgttcctgaaactgactgctccttcaagtcaaggagga

SEQ ID NO: 64310 - DNA, 120 bp, synthetic construct
  source 1..120: mol_type = other DNA
cagtgagtcaagatcaccactgcactccagcctgggcaacagagtgagactccgtctcaaaataaaataaaataacttcttctgtcgagttgccattgtaattagtagtagatctcattt

SEQ ID NO: 64311 - DNA, 120 bp, synthetic construct
  source 1..120: mol_type = other DNA
taaataaggatacacaaacaccaattatcatttgatgaggctcactggctggatttgggtacattaaccactccgcatgaggacagctgccatcagttaaataaacaaagctgggtggtt

SEQ ID NO: 64312 - DNA, 120 bp, synthetic construct
  source 1..120: mol_type = other DNA
ttgaaattcagagtttttgaaattccctttgaccataaggctctaagtgttaaaataacttctggccgggcgtggtctctacagtgcactgaacaaggagtccagaatttcagagatgct

SEQ ID NO: 64313 - DNA, 120 bp, synthetic construct
  source 1..120: mol_type = other DNA
gcagaaactgggtctcctcccaccaggccccagaacctggcagcccccagtagagggaggggagaaaccgggtcgctgatgacctgaagagaggtctgcatgggatactgccctgtggag

SEQ ID NO: 64314 - DNA, 120 bp, synthetic construct
  source 1..120: mol_type = other DNA
cacattaggatctcagacctgggcttggctgtgaagatccccgagggagacctgatccgcggccgggtgggcactgttggctacatgggtgagtgctgggctgcctgtgtcaatgcacct

SEQ ID NO: 64315 - DNA, 120 bp, synthetic construct
  source 1..120: mol_type = other DNA
ttgtgtgcaaaccagcacatgtgtggatgcatttccctccagacatacgtgctgatgctgcagaactatcttttctgtatttctatggtaaatctgtaattcggtttatcaaagtggtac

SEQ ID NO: 64316 - DNA, 120 bp, synthetic construct
  source 1..120: mol_type = other DNA
ccaagggaagaggggtgaggggaacagtgtggaacaccctcacatccagcctgtgggggggtccacacagggcggagaagagatggtctgagctggtgccccagacacaaagcaaccttg

SEQ ID NO: 64317 - DNA, 120 bp, synthetic construct
  source 1..120: mol_type = other DNA
tctacatctgcaggcacttttggggcagattcagcgtgtgcattgacaacccaggcaactcccggagtttaggaagcagcagtcctgggagttgattaaaagtcgcaatgcttctgctca

SEQ ID NO: 64318 - DNA, 120 bp, synthetic construct
  source 1..120: mol_type = other DNA
aaaccactgtcctctggaagcctctggccttgctgcggcttcccttacaaatgatctttggtcttgggagtctagtcttaggcctccttcacgcccttgactgcagcatctccggcatct

SEQ ID NO: 64319 - DNA, 120 bp, synthetic construct
  source 1..120: mol_type = other DNA
agcctggtggtccgtgggggcgttaaggggcaacactgagcgactgagtgctctgctttgtcctttcaagggtggaacctggtgctggccctgatgccaccttcgattcctttgtttggg

SEQ ID NO: 64320 - DNA, 120 bp, synthetic construct
  source 1..120: mol_type = other DNA
gtacaactctgcaaattagctgagtatgtgcacgagacagagctattgatgcagtccttgccttttgttgcttaccctacacagaagaggtgacagtgactcgacacccattaatgagtg

SEQ ID NO: 64321 - DNA, 120 bp, synthetic construct
  source 1..120: mol_type = other DNA
agatttgagggtgaaatgagaactgaatggggaatgctttcaagagcattgacggccactacattcagttcatcttgaccagcatgcatgcatcgagcactactgttgacgccaggttct

SEQ ID NO: 64322 - DNA, 120 bp, synthetic construct
  source 1..120: mol_type = other DNA
tggctcatgcctataatcccagcacttgggaaggctgaggcagtcgggttaggagttcgagaccagcctgaccaacgtggtgaaaccccatctctactaaaatacaaaattaaccaggct

SEQ ID NO: 64323 - DNA, 120 bp, synthetic construct
  source 1..120: mol_type = other DNA
tggcacacaaaacagttggttgtttccagtctgaagaggagcaggggtgtcagcaaaaccccttaaatagaagtagaaatacgagtcacaagagaagagaacaggcagcctccgggaaga

SEQ ID NO: 64324 - DNA, 120 bp, synthetic construct
  source 1..120: mol_type = other DNA
aacctttccaaggaaataatagccatgaaagaggggtttgggtgtgccaggtaactttctgttccattacagatttttaaaatacgctcatttcttaacattcctctgcaagccacccag

SEQ ID NO: 64325 - DNA, 120 bp, synthetic construct
  source 1..120: mol_type = other DNA
tttgccggtaaggaaacaggacataggcctcaggggatatgagacttccccaaagttcctaagccccacagctgggactctagcccacgtctgtccagtatgggtaagggagtgatggca

SEQ ID NO: 64326 - DNA, 120 bp, synthetic construct
  source 1..120: mol_type = other DNA
tgccccagttgacggcctgtgttttgttttcacggcccctccagatgatagaaacagaatgctttaaggagctgaacgtgtttggacctaatggtaccctcccgccagatctgaacagaa

SEQ ID NO: 64327 - DNA, 120 bp, synthetic construct
  source 1..120: mol_type = other DNA
taaaaatacaacgcttcaatgcttccatcaagtaaaacggaagttccagaaagaatgacctctccctcccctgatggccaggcatgctaagaacaccctgggtcctagaaaaagaaatta

SEQ ID NO: 64328 - DNA, 120 bp, synthetic construct
  source 1..120: mol_type = other DNA
gcggccccggccggggtggattggatttgtctttggtgaacattgcaatagaaatccaattggatacgacaacttgcacgtattttaatagcgtcataactagaactgaattttgtcttt

SEQ ID NO: 64329 - DNA, 120 bp, synthetic construct
  source 1..120: mol_type = other DNA
agtctctctgggcaaatgagaggcccaaggagagaccaagccaccaaagggctcaagacaaagtcactgttccttccccaggaaggtggggcagaggcaagatctatcggacatttcaaa

SEQ ID NO: 64330 - DNA, 120 bp, synthetic construct
  source 1..120: mol_type = other DNA
aagtcttccaaggaagtagaaaactctttgaatggtatcttaagatccttaagctcttgctgaacttcctttttcaatgaaaagaaggaccatcatcctaggatggtcaccagcccaagc

SEQ ID NO: 64331 - DNA, 120 bp, synthetic construct
  source 1..120: mol_type = other DNA
tccaggataaggcatatttggacggtgaacggatttactctcgttcatgcatttgagcgcttcacagaagagtctttcttgctccaggcatgacattttttttcaccagacgttcactga

SEQ ID NO: 64332 - DNA, 120 bp, synthetic construct
  source 1..120: mol_type = other DNA
taacccaacactctgagataggatcttccaactttttagccccggctgtggaaagatagtgagtatgaagtctttgtgcatttggaagtgacatcgctgtgtggattatgaatacagaga

SEQ ID NO: 64333 - DNA, 120 bp, synthetic construct
  source 1..120: mol_type = other DNA
ctaataatgatatggaccatacaatccaggttgaggagatgatgaacttgttgggaactggagtaaggtgactcttgctatgttttagcaaagaaactggtggtattttgcccctgcaca

SEQ ID NO: 64334 - DNA, 120 bp, synthetic construct; identical to SEQ ID NO: 28378
  source 1..120: mol_type = other DNA

SEQ ID NO: 64335 - DNA, 120 bp, synthetic construct; identical to SEQ ID NO: 28379
  source 1..120: mol_type = other DNA

SEQ ID NO: 64336 - DNA, 120 bp, synthetic construct; identical to SEQ ID NO: 24324
  source 1..120: mol_type = other DNA

SEQ ID NO: 64337 - DNA, 120 bp, synthetic construct
  source 1..120: mol_type = other DNA
aatgtgagttgaggtaggtgtgagttaagtaccaacaatagttccttagagtttctttgcttgaatttcttagaactgtccagcacagctacagtatgtttctttgtggtgggcgggggg

SEQ ID NO: 64338 - DNA, 120 bp, synthetic construct
  source 1..120: mol_type = other DNA
tatacatgcccaaaggctatcttatgttcagagtaacacaggagctcaggatggaaaatgaggaaaggaagtcttgaaacctataccttaacaaataaaacaatgaaattccagaatatc

SEQ ID NO: 64339 - DNA, 120 bp, synthetic construct
  source 1..120: mol_type = other DNA
aaaaaaaacttgtataaaataactatagaagactgaagtacttgatgtgcttttctgaatttctatgtccaaaagtaagctgctactgtgtgtgtgtggtggggggtggggggagggggc

SEQ ID NO: 64340 - DNA, 120 bp, synthetic construct
  source 1..120: mol_type = other DNA
tagtcaattttggcttttgttgccattgcttttgatgttttagtcatgaagtccttgcccatgcctatgtcctgaatggtattgcctaggttttcttctagggtttttatggttttaggt

SEQ ID NO: 64341 - DNA, 120 bp, synthetic construct
  source 1..120: mol_type = other DNA
tataggaatgcttgtgatttttgcacattgattttttatcctgaggctttgctgaagttgcttatcagcttaaggggattttgggctgagatgatggggttttctaaatatacaatcatg

SEQ ID NO: 64342 - DNA, 120 bp, synthetic construct; identical to SEQ ID NO: 29684
  source 1..120: mol_type = other DNA

SEQ ID NO: 64343 - DNA, 120 bp, synthetic construct; identical to SEQ ID NO: 27699
  source 1..120: mol_type = other DNA

SEQ ID NO: 64344 - DNA, 120 bp, synthetic construct; identical to SEQ ID NO: 27700
  source 1..120: mol_type = other DNA

SEQ ID NO: 64345 - DNA, 120 bp, synthetic construct; identical to SEQ ID NO: 27701
  source 1..120: mol_type = other DNA

SEQ ID NO: 64346 - DNA, 120 bp, synthetic construct; identical to SEQ ID NO: 12183
  source 1..120: mol_type = other DNA

SEQ ID NO: 64347 - DNA, 120 bp, synthetic construct; identical to SEQ ID NO: 12184
  source 1..120: mol_type = other DNA

SEQ ID NO: 64348 - DNA, 120 bp, synthetic construct
  source 1..120: mol_type = other DNA
catatgaactttaaagtagttttttccaattctgtgaagaaagtcattggtagcttgatggggatggcattgaatctataaattaccttgggcagtatggccattttcatgatataaaga

SEQ ID NO: 64349 - DNA, 120 bp, synthetic construct
  source 1..120: mol_type = other DNA
gtccaacaatgatagactggattaagaaaatgtggcacatatacaccatggaatcctacgcagccataaaaaatgattagttcatgtcctttttagggacatggatgaaattggaaatca

SEQ ID NO: 64350 - DNA, 120 bp, synthetic construct; identical to SEQ ID NO: 12186
  source 1..120: mol_type = other DNA

SEQ ID NO: 64351 - DNA, 120 bp, synthetic construct
  source 1..120: mol_type = other DNA
tatacaccatggaatactctgcagccataaaaaatgatgagttcatgtcctttgtagggacatggatgaaattggaaatcatcattctcagtaaactatcgcaagaacaaaaaaccaaac

SEQ ID NO: 64352 - DNA, 120 bp, synthetic construct; identical to SEQ ID NO: 12187
  source 1..120: mol_type = other DNA

SEQ ID NO: 64353 - DNA, 120 bp, synthetic construct; identical to SEQ ID NO: 12188
  source 1..120: mol_type = other DNA

SEQ ID NO: 64354 - DNA, 120 bp, synthetic construct; identical to SEQ ID NO: 12189
  source 1..120: mol_type = other DNA

SEQ ID NO: 64355 - DNA, 120 bp, synthetic construct
  source 1..120: mol_type = other DNA
gtactggtaccaaaacagagatatagatcaatggaacagaacagagccctcagaaataacaccgcatatctacaactatctgatctttgacaaacttgagaaaaacaagcaatggggaaa

SEQ ID NO: 64356 - DNA, 120 bp, synthetic construct
  source 1..120: mol_type = other DNA
cgattcctcggggatctagaactagaaataccatttgacccagccatcccattactgggtatatacccaaaggactataaatcatgctgctataaagacacatgcacacgtatgtttatt

SEQ ID NO: 64357 - DNA, 120 bp, synthetic construct; identical to SEQ ID NO: 12190
  source 1..120: mol_type = other DNA

SEQ ID NO: 64358 - DNA, 120 bp, synthetic construct
  source 1..120: mol_type = other DNA
gaaataagccatatatatacataataatgagagagagaaagagaagaggagaagagaagaggggagaagaggagaagagacgagaataggggagaagaggggagaagagaagagaagaga

SEQ ID NO: 64359 - DNA, 120 bp, synthetic construct
  source 1..120: mol_type = other DNA
atttttgtatgtaagacaagagtccaggcctggcatggtggctcatgcctgtaatcccatcactttgggaggctgaggtgggtggatcaagaggtcagatcaagatcatcctatcggggg

SEQ ID NO: 64360 - DNA, 120 bp, synthetic construct
  source 1..120: mol_type = other DNA
gctgagggtcctgtctgttagaaggaaaactaacaaacagaaaggacatgcacaccaaaaacccatctgtacatcaccatcatcaaagaccaaaagtagataaaaccacaaagatgggga

SEQ ID NO: 64361 - DNA, 120 bp, synthetic construct
  source 1..120: mol_type = other DNA
agtggaggccaatactcaacattcttaaagaaaagaattttcaaccaagaatttcatatccagccaaactaagcttcataagtgaaggagaaataaaatcctttacagacaagcaaatgc

SEQ ID NO: 64362 - DNA, 120 bp, synthetic construct
  source 1..120: mol_type = other DNA
cctaatagacatctacagaactctccatcccaaatcaacagaatatacatttttttcagcaccacaccacacctattccaaaattgaccacatacttggaagtaaagctctcctcagcaa

SEQ ID NO: 64363 - DNA, 120 bp, synthetic construct
  source 1..120: mol_type = other DNA
aaccaaaaagagtccaggaccagatggattcacagctgaattctaccagaggtacaaggaggaactggtaccattccttctgaaattattccaatcaatagaaaaagagggaatcctccc

SEQ ID NO: 64364 - DNA, 120 bp, synthetic construct
  source 1..120: mol_type = other DNA
aggtaatttatagattcaatgccatccccatcaagctaccaatgcctttcttcacagaattggaaaaaactactttaaagttcatatggaaccaaaaaagagcctgcatcaccaactcaa

SEQ ID NO: 64365 - DNA, 120 bp, synthetic construct
  source 1..120: mol_type = other DNA
agaagacatttatgcagccaaaaaacacatgaaaaatttctcatcatcactggccatcagagaaatgtaaatgaaaaccacaatgagataccatctcataccagttagaatggtgatcat

SEQ ID NO: 64366 - DNA, 120 bp, synthetic construct
  source 1..120: mol_type = other DNA
aaaataaaaaataaataaaaaaaaagatcatcctatctaacatagtgaaacccacctctactgaaaatacaaaaaaattagctgggcatcctggcgggcgcctgtagtcctagctcctcc

SEQ ID NO: 64367 - DNA, 120 bp, synthetic construct
  source 1..120: mol_type = other DNA
atgaacagacacttctcaaaagaagacatttatgcagccaaaaaacacatgaaaaatttctcatcatcactggccatcagagaaatgtaaatgaaaaccacaatgagataccatctcata

SEQ ID NO: 64368 - DNA, 120 bp, synthetic construct; identical to SEQ ID NO: 12192
  source 1..120: mol_type = other DNA

SEQ ID NO: 64369 - DNA, 120 bp, synthetic construct; identical to SEQ ID NO: 24069
  source 1..120: mol_type = other DNA

SEQ ID NO: 64370 - DNA, 120 bp, synthetic construct; identical to SEQ ID NO: 24070
  source 1..120: mol_type = other DNA

SEQ ID NO: 64371 - DNA, 120 bp, synthetic construct
  source 1..120: mol_type = other DNA
tctcagtaaactatcacaagaacaaaaaaccaaacaccacatgttctcactcatagatgggaattgaacaatgagaacacatggacacaggaaggggaacatcacactctggggactgtt

SEQ ID NO: 64372 - DNA, 120 bp, synthetic construct; identical to SEQ ID NO: 24071
  source 1..120: mol_type = other DNA

SEQ ID NO: 64373 - DNA, 120 bp, synthetic construct; identical to SEQ ID NO: 24072
  source 1..120: mol_type = other DNA

SEQ ID NO: 64374 - DNA, 120 bp, synthetic construct; identical to SEQ ID NO: 24073
  source 1..120: mol_type = other DNA

SEQ ID NO: 64375 - DNA, 120 bp, synthetic construct
  source 1..120: mol_type = other DNA
taatgcttaggttttcttctagggtttttatggttttatgtctaacgtttaagtctttaatccatcttgaattaatttttgtataaggtgtaaggaagggatccagtttcagctttctac

SEQ ID NO: 64376 - DNA, 120 bp, synthetic construct
  source 1..120: mol_type = other DNA
gtcacctgcaaacagggacaatttgacttcctcttttcctaattgaatgccctttatttccttctcctgcctgattgacctggccagaacttccaacactatattgaataggagtgatga

SEQ ID NO: 64377 - DNA, 120 bp, synthetic construct
  source 1..120: mol_type = other DNA
gtttgtagtattctctgatggtagtttgtatttctgtgggatcagtggtgatatcccctttatcattttttattgcgtctatttgattcttctctcttttttctttattagtcttggtag

SEQ ID NO: 64378 - DNA, 120 bp, synthetic construct; identical to SEQ ID NO: 24059
  source 1..120: mol_type = other DNA

SEQ ID NO: 64379 - DNA, 120 bp, synthetic construct; identical to SEQ ID NO: 24060
  source 1..120: mol_type = other DNA

SEQ ID NO: 64380 - DNA, 120 bp, synthetic construct; identical to SEQ ID NO: 24061
  source 1..120: mol_type = other DNA

SEQ ID NO: 64381 - DNA, 120 bp, synthetic construct; identical to SEQ ID NO: 24062
  source 1..120: mol_type = other DNA

SEQ ID NO: 64382 - DNA, 120 bp, synthetic construct; identical to SEQ ID NO: 24063
  source 1..120: mol_type = other DNA

SEQ ID NO: 64383 - DNA, 120 bp, synthetic construct
  source 1..120: mol_type = other DNA
ttctgcccttagtaacagaaaaattttaaaaatcagacttccttgtttttttttttttttttgagatggagtcttgctgtgtcacctaggctggagtgcagtggcgcgatctgtgttcac

SEQ ID NO: 64384 - DNA, 120 bp, synthetic construct; identical to SEQ ID NO: 24065
  source 1..120: mol_type = other DNA

SEQ ID NO: 64385 - DNA, 120 bp, synthetic construct; identical to SEQ ID NO: 24066
  source 1..120: mol_type = other DNA

SEQ ID NO: 64386 - DNA, 120 bp, synthetic construct; identical to SEQ ID NO: 24067
  source 1..120: mol_type = other DNA

SEQ ID NO: 64387 - DNA, 120 bp, synthetic construct; identical to SEQ ID NO: 24068
  source 1..120: mol_type = other DNA

SEQ ID NO: 64388 - DNA, 120 bp, synthetic construct
  source 1..120: mol_type = other DNA
gcagcatgatttatagtcctttgggtatatacccagtaatgggatggctgggtcaaatggtatttctagttctagatccctgaggaatcgccacactgacttccacaatggcaaactctt

SEQ ID NO: 64389 - DNA, 120 bp, synthetic construct; identical to SEQ ID NO: 29997
  source 1..120: mol_type = other DNA

SEQ ID NO: 64390 - DNA, 120 bp, synthetic construct
  source 1..120: mol_type = other DNA
acttcaattgacaacttacaatatgaaaaacctaaacattggttaaaaaaaggaaactgaaacttttttttattattattatactttaagttttagggtacaggtgcacaatgtgcaggt

SEQ ID NO: 64391 - DNA, 120 bp, synthetic construct
  source 1..120: mol_type = other DNA
aagtgtctgttcatgtccttcgcccaatttttgatggggttgtttttttcttgtaaatttgtttgagttcattgtagattctggatattagccctttgtcagatgagtaggttgcgaaaa

SEQ ID NO: 64392 - DNA, 120 bp, synthetic construct
  source 1..120: mol_type = other DNA
tcactgagcagtggtttgtagttctccttgaagaggtccttcacgtcccttgtaaattggattcctaagtattttattctctttgaagcaattgtgaatgggagttcactcatgatttgg

SEQ ID NO: 64393 - DNA, 120 bp, synthetic construct
  source 1..120: mol_type = other DNA
agaatagtttcagaaagaatggtaccagttcctccttgtacctctggtagaattcggctgtgaatccatctggtcctggactctttttggttggtaagctattgattattgccacaattt

SEQ ID NO: 64394 - DNA, 120 bp, synthetic construct
  source 1..120: mol_type = other DNA
gcggtcaattttggaataggtgtggtgtgatgctgaaaaaaatgtatattctgttgatttggggtggagagttctgtagatgtctattaggtctgcttggtgcagagctgagttcaattc

SEQ ID NO: 64395 - DNA, 120 bp, synthetic construct
  source 1..120: mol_type = other DNA
agatcagctgttagtctgatgggcttccctttgagggtaacccgagctttctctctggctgcccttaacattttttccttcatttcaactttggtgaatctgacaattatgtgtcttgga

SEQ ID NO: 64396 - DNA, 120 bp, synthetic construct
  source 1..120: mol_type = other DNA
cggattttcgtgatccacgaatgctgctgtctgatcgttcccctggaagttttgtctcagaggagtacccggccgtgtgaggtgtcagtctgcccctactggggggtgcctcccagttag

SEQ ID NO: 64397 - DNA, 120 bp, synthetic construct; identical to SEQ ID NO: 29998
  source 1..120: mol_type = other DNA

SEQ ID NO: 64398 - DNA, 120 bp, synthetic construct; identical to SEQ ID NO: 29999
  source 1..120: mol_type = other DNA

SEQ ID NO: 64399 - DNA, 120 bp, synthetic construct; identical to SEQ ID NO: 30000
  source 1..120: mol_type = other DNA

SEQ ID NO: 64400 - DNA, 120 bp, synthetic construct; identical to SEQ ID NO: 30001
  source 1..120: mol_type = other DNA

SEQ ID NO: 64401 - DNA, 120 bp, synthetic construct
  source 1..120: mol_type = other DNA
ttacagcagcatgatttatagtcctttgggtatatacccagtaatgggttggctgggtcaaatggtatttctagttctagatccctgaggaatcaccacactgacttccacaatggttga

SEQ ID NO: 64402 - DNA, 120 bp, synthetic construct; identical to SEQ ID NO: 30003
  source 1..120: mol_type = other DNA

SEQ ID NO: 64403 - DNA, 120 bp, synthetic construct
  source 1..120: mol_type = other DNA
actgactatggtctttttcttaaaaaaatataatgggtcctctttcctaaatacatacacacacacacacacacacacacacacacacacactatatacatatatacatatatatatgta

SEQ ID NO: 64404 - DNA, 120 bp, synthetic construct; identical to SEQ ID NO: 30005
  source 1..120: mol_type = other DNA

SEQ ID NO: 64405 - DNA, 120 bp, synthetic construct; identical to SEQ ID NO: 30006
  source 1..120: mol_type = other DNA

SEQ ID NO: 64406 - DNA, 120 bp, synthetic construct; identical to SEQ ID NO: 30007
  source 1..120: mol_type = other DNA

SEQ ID NO: 64407 - DNA, 120 bp, synthetic construct; identical to SEQ ID NO: 30008
  source 1..120: mol_type = other DNA

SEQ ID NO: 64408 - DNA, 120 bp, synthetic construct; identical to SEQ ID NO: 29992
  source 1..120: mol_type = other DNA

SEQ ID NO: 64409 - DNA, 120 bp, synthetic construct
  source 1..120: mol_type = other DNA
ctcagatggaaataagaaacttattatgaactggagcaaaggtgattcttgccacactctagtaaatagactggtggcattttgcccctgccttagagatctgtggaacttttgaccttg

SEQ ID NO: 64410 - DNA, 120 bp, synthetic construct
  source 1..120: mol_type = other DNA
tggtgtgagatggtatctcattgtggttttgatttgcatttctctgatggccagtgatgatgagcattttttcatgtgttttttggctgcataaatgtcttcttttgagaagtgtctgct

SEQ ID NO: 64411 - DNA, 120 bp, synthetic construct
  source 1..120: mol_type = other DNA
gaacagtggtttgtagttctccttgaagaggtccttcacgtcccttgtgagttggattcctaggtattttattctctttgaagcaattgtgaatgggagttcactcatgatttggctctc

SEQ ID NO: 64412 - DNA, 120 bp, synthetic construct; identical to SEQ ID NO: 29993
  source 1..120: mol_type = other DNA

SEQ ID NO: 64413 - DNA, 120 bp, synthetic construct
  source 1..120: mol_type = other DNA
ttgcagtgagtcaagatcatgccaccacactccagcctgggcaacagagtgagactctgtttcaaaaaaaaaaggtagtaaaataaaaaccaatccaggatgctataccatattattacc

SEQ ID NO: 64414 - DNA, 120 bp, synthetic construct
  source 1..120: mol_type = other DNA
cttgttgcaaggaaaggaaacagaacaaagtattttcataatcaagtacaaagttaagaactagagtggcattttttttttattatactttaagttttagggtacatgtgcacattgtgc

SEQ ID NO: 64415 - DNA, 120 bp, synthetic construct
  source 1..120: mol_type = other DNA
tctgttcatgtcctttgcccactttttgatggggttgtttgtttttttcttgtaaatttgtttgagttcattgtagattctgcatattagccctttgtcagatgagtaggttgtgaaaat

SEQ ID NO: 64416 - DNA, 120 bp, synthetic construct
  source 1..120: mol_type = other DNA
ttgtctgttgatagtttaccaaccaaaaagagtccaggaccagatggattcacagctgaattctaccagaggtacaaggaggaactggtaccattccttctgaaactattccaatcaata

SEQ ID NO: 64417 - DNA, 120 bp, synthetic construct; identical to SEQ ID NO: 29994
  source 1..120: mol_type = other DNA

SEQ ID NO: 64418 - DNA, 120 bp, synthetic construct; identical to SEQ ID NO: 29995
  source 1..120: mol_type = other DNA

SEQ ID NO: 64419 - DNA, 120 bp, synthetic construct
  source 1..120: mol_type = other DNA
aagttgaaatgagggaaaaaatgttaagggcagccagagagaaatgtagggttacccacaaagggaaaccaattagactaatagcagatctctcggcagaaactctacaagccagaagag

SEQ ID NO: 64420 - DNA, 120 bp, synthetic construct
  source 1..120: mol_type = other DNA
atgtaaaagaacagaaattataacaaactatctctcagaccacagtgcaatcaaactacaactcaggattaagaatctcactcaaaactgctcaactacatggaaactgaacaacctgct

SEQ ID NO: 64421 - DNA, 120 bp, synthetic construct; identical to SEQ ID NO: 29996
  source 1..120: mol_type = other DNA

SEQ ID NO: 64422 - DNA, 120 bp, synthetic construct
  source 1..120: mol_type = other DNA
actgatcaacatgcacttcctcccctctgaggcccataaaaacccccagactcagccagactcaagcagaggacagacagatgatggggagatgaccagatgacaagctgcagagaggag

SEQ ID NO: 64423 - DNA, 120 bp, synthetic construct; identical to SEQ ID NO: 14038
  source 1..120: mol_type = other DNA

SEQ ID NO: 64424 - DNA, 120 bp, synthetic construct; identical to SEQ ID NO: 14039
  source 1..120: mol_type = other DNA

SEQ ID NO: 64425 - DNA, 120 bp, synthetic construct; identical to SEQ ID NO: 14040
  source 1..120: mol_type = other DNA

SEQ ID NO: 64426 - DNA, 120 bp, synthetic construct; identical to SEQ ID NO: 14041
  source 1..120: mol_type = other DNA

SEQ ID NO: 64427 - DNA, 120 bp, synthetic construct; identical to SEQ ID NO: 14042
  source 1..120: mol_type = other DNA

SEQ ID NO: 64428 - DNA, 120 bp, synthetic construct; identical to SEQ ID NO: 14043
  source 1..120: mol_type = other DNA

SEQ ID NO: 64429 - DNA, 120 bp, synthetic construct
  source 1..120: mol_type = other DNA
tgggattacaggcgtgagccaccacactaagtttcttgatatgttttgataacatcctgtgggaaaggagatggctccatctccattgtggagacagaagagcatgggagctttctgtct

SEQ ID NO: 64430 - DNA, 120 bp, synthetic construct
  source 1..120: mol_type = other DNA
tttgatcgccctgcgggtgagcgtgaccaggtagctggagaaaaacttctcgtaggcggcgtcgtcgaagtcctcaggccgctcgaatccgtacgggtcgatcctgcaaaaccgagagaa

SEQ ID NO: 64431 - DNA, 120 bp, synthetic construct; identical to SEQ ID NO: 25406
  source 1..120: mol_type = other DNA

SEQ ID NO: 64432 - DNA, 120 bp, synthetic construct
  source 1..120: mol_type = other DNA
ttgtaggttgcctgttcactctgatgatagtttcttttgctgtgcggaagctctttagtttaattagatcccatttgtcaattttggcttttgttgccattgcttttggtgttttagaca

SEQ ID NO: 64433 - DNA, 120 bp, synthetic construct
  source 1..120: mol_type = other DNA
ccttcatcttccaggttcaagcaattctcctgcctcagcttccctggtagctgggattacaggtgcccaccatcatgcctgaataatttttgtacctttagtagagatgggtttttgcca

SEQ ID NO: 64434 - DNA, 120 bp, synthetic construct; identical to SEQ ID NO: 29634
  source 1..120: mol_type = other DNA

SEQ ID NO: 64435 - DNA, 120 bp, synthetic construct; identical to SEQ ID NO: 29635
  source 1..120: mol_type = other DNA

SEQ ID NO: 64436 - DNA, 120 bp, synthetic construct; identical to SEQ ID NO: 29636
  source 1..120: mol_type = other DNA

SEQ ID NO: 64437 - DNA, 120 bp, synthetic construct; identical to SEQ ID NO: 29637
  source 1..120: mol_type = other DNA

SEQ ID NO: 64438 - DNA, 120 bp, synthetic construct
  source 1..120: mol_type = other DNA
taagaacgagatgggttccggaaaatagcagctcgctgggccagccagccttgtccctctccactgggactttgcttccttttcttcttgcctttttttttttttttttttttttttttt

SEQ ID NO: 64439 - DNA, 120 bp, synthetic construct; identical to SEQ ID NO: 17039
  source 1..120: mol_type = other DNA

SEQ ID NO: 64440 - DNA, 120 bp, synthetic construct; identical to SEQ ID NO: 17040
  source 1..120: mol_type = other DNA

SEQ ID NO: 64441 - DNA, 120 bp, synthetic construct
  source 1..120: mol_type = other DNA
cttgttttttgggtgtttggcatttcgtggctcagggaggcagagcggggctggtgctcttcaggagcactgcccgctgatcagcagtcgttacctgacatggccagatggaacgtgagg

SEQ ID NO: 64442 - DNA, 120 bp, synthetic construct
  source 1..120: mol_type = other DNA
cctgttctggtgggctccagggccagggccaccccaggaggtggttgggggcagaccagcaccttcggcccaggggcagtgccagcttcctttgcccctgccctccacgtgggcaccagg

SEQ ID NO: 64443 - DNA, 120 bp, synthetic construct
  source 1..120: mol_type = other DNA
gatgctcaataaacactcaccaaggaatgaaagatgaaatcgttcagactgttgccttatcaaatgggtctgatgattctttcacaaggagatgctgcttgagggggcactaggcatcag

SEQ ID NO: 64444 - DNA, 120 bp, synthetic construct
  source 1..120: mol_type = other DNA
tgtgggcactgggattggggtggggggagggctgtgggcactgggattggggtggggggagggctgtgggcactgggattgggggtggggggagggctgtgggcactgggattgggggtg

SEQ ID NO: 64445 - DNA, 120 bp, synthetic construct; identical to SEQ ID NO: 16370
  source 1..120: mol_type = other DNA

SEQ ID NO: 64446 - DNA, 120 bp, synthetic construct
  source 1..120: mol_type = other DNA
ggaagtaacttaaccatggggaaataggcacgggtaccccgatgcctggcggggttgtggttctttctttcttttcttttctccttctttctttctttctttctttctttctttctttct

SEQ ID NO: 64447 - DNA, 120 bp, synthetic construct
  source 1..120: mol_type = other DNA
gcataagccatcgtgcctggctgggaaagactttttaaataggccagagaaaaaaacaaacaaccccatcaaaaagcgggcaaggatacgaacagacacttctcaaaagaagacatttat

SEQ ID NO: 64448 - DNA, 120 bp, synthetic construct
  source 1..120: mol_type = other DNA
atatacctaatgctaaatgacgagttgatgggtgcagcacaccagcatggcacatgtatgcagatgtaactaacctgcacattgtgcgcatgtaccctaaaacttaaagtataataataa

SEQ ID NO: 64449 - DNA, 120 bp, synthetic construct; identical to SEQ ID NO: 16371
  source 1..120: mol_type = other DNA

SEQ ID NO: 64450 - DNA, 120 bp, synthetic construct
  source 1..120: mol_type = other DNA
acagaggttgcagtgagccgaaactgtgccattgcactccagcctgggccacagagcaagactctgtctcaaaaaaaagaaagaaagaaagaaagaaagaaagaaagagagagagagaga

SEQ ID NO: 64451 - DNA, 120 bp, synthetic construct; identical to SEQ ID NO: 16373
  source 1..120: mol_type = other DNA

SEQ ID NO: 64452 - DNA, 120 bp, synthetic construct
  source 1..120: mol_type = other DNA
ttccacaagtgttccctgagtccctcctgaaaacttagtccctgctgtaaagacacatgcacaggcgtgtttattgcagcactactcacaatagcaaagacttggaaccaactcaaatgt

SEQ ID NO: 64453 - DNA, 120 bp, synthetic construct; identical to SEQ ID NO: 24580
  source 1..120: mol_type = other DNA

SEQ ID NO: 64454 - DNA, 120 bp, synthetic construct
  source 1..120: mol_type = other DNA
aggggttaatattcaagatttataaaaacatcatacaactcaacagcaagaaaacatataactctatttaaaaatgggcggctgggcgcggtggctcacgcctgtaatcccagcactttg

SEQ ID NO: 64455 - DNA, 120 bp, synthetic construct; identical to SEQ ID NO: 14637
  source 1..120: mol_type = other DNA

SEQ ID NO: 64456 - DNA, 120 bp, synthetic construct
  source 1..120: mol_type = other DNA
ccaggaaggcagaggttgcagtgagccaagatcgtgccagtgcactccagcctgggcgacatagagagattcatctcaaaaacaaaaaagaaacaaaaaaccatttaaataacatttaaa

SEQ ID NO: 64457 - DNA, 120 bp, synthetic construct; identical to SEQ ID NO: 27829
  source 1..120: mol_type = other DNA

SEQ ID NO: 64458 - DNA, 120 bp, synthetic construct; identical to SEQ ID NO: 27827
  source 1..120: mol_type = other DNA

SEQ ID NO: 64459 - DNA, 120 bp, synthetic construct; identical to SEQ ID NO: 27830
  source 1..120: mol_type = other DNA

SEQ ID NO: 64460 - DNA, 120 bp, synthetic construct; identical to SEQ ID NO: 27827
  source 1..120: mol_type = other DNA

SEQ ID NO: 64461 - DNA, 120 bp, synthetic construct; identical to SEQ ID NO: 27828
  source 1..120: mol_type = other DNA

SEQ ID NO: 64462 - DNA, 120 bp, synthetic construct
  source 1..120: mol_type = other DNA
taaagttcatatggaacaaaaaagagcccgcatcatcaagtcaatcctaagccaaaagaacaaagctggaggcatcacactatctcacttcaaactatactacaaggctacagtaaccaa

SEQ ID NO: 64463 - DNA, 120 bp, synthetic construct
  source 1..120: mol_type = other DNA
tataccgaaaggactataaatcatgctgctataaagacacatgcacacgtatgtttattgtggcactattcacaatagcaaagacttggaaccaacccaaatgtccaacaatgacagact

SEQ ID NO: 64464 - DNA, 120 bp, synthetic construct; identical to SEQ ID NO: 25726
  source 1..120: mol_type = other DNA

SEQ ID NO: 64465 - DNA, 120 bp, synthetic construct
  source 1..120: mol_type = other DNA
tgtgcatgccgctgtgtgtgtgttgggggtgtgggcgggtagaggaggcaacgggtacgtgcagtgtaaactgggggcttccctggtgcagacaaagtcagggaccctccatctctgacg

SEQ ID NO: 64466 - DNA, 120 bp, synthetic construct
  source 1..120: mol_type = other DNA
tgttaagatcaggagtcttctgcccaattcctctcactcctggctgtctaaacagtccttccatgatgttctgtgtccacctgcattcgttcatgtgacagtattcttatttcagtcctg

SEQ ID NO: 64467 - DNA, 120 bp, synthetic construct
  source 1..120: mol_type = other DNA
tgcctgctcctagaatatgcagactcaagtagaagactcaggaatgtaatggcaccctcgaattgcatcttctcctcaacagttttctgagtgctgtcattgacatgcacagggatctgc

SEQ ID NO: 64468 - DNA, 120 bp, synthetic construct; identical to SEQ ID NO: 7939
  source 1..120: mol_type = other DNA

SEQ ID NO: 64469 - DNA, 120 bp, synthetic construct; identical to SEQ ID NO: 7940
  source 1..120: mol_type = other DNA

SEQ ID NO: 64470 - DNA, 120 bp, synthetic construct; identical to SEQ ID NO: 7937
  source 1..120: mol_type = other DNA

SEQ ID NO: 64471 - DNA, 120 bp, synthetic construct; identical to SEQ ID NO: 7938
  source 1..120: mol_type = other DNA

SEQ ID NO: 64472 - DNA, 120 bp, synthetic construct
  source 1..120: mol_type = other DNA
tcagatcttgtgagacttattcactaccatgagaacagtatgggggaaactgcccccacgattcagttttctgcacccggcccccacccttgatacctggggattattacaattcaaggt

SEQ ID NO: 64473 - DNA, 120 bp, synthetic construct
  source 1..120: mol_type = other DNA
cagaccttcatagtgaatgttatagctcataaaggtagttcaaacccaaagagtgagcaacagcaggatttatggtgacgagtgaaagaaaatacacttccacagcctggaagacaacct

SEQ ID NO: 64474 - DNA, 120 bp, synthetic construct; identical to SEQ ID NO: 7937
  source 1..120: mol_type = other DNA

SEQ ID NO: 64475 - DNA, 120 bp, synthetic construct; identical to SEQ ID NO: 7938
  source 1..120: mol_type = other DNA

SEQ ID NO: 64476 - DNA, 120 bp, synthetic construct
  source 1..120: mol_type = other DNA
cccatgatggagttttctgcacccggcccccacccttgacacctggggattattacaattcaaggtaagatgtgggtggggacacagccaaaccatatcagctggggatagaattctatg

SEQ ID NO: 64477 - DNA, 120 bp, synthetic construct; identical to SEQ ID NO: 7935
  source 1..120: mol_type = other DNA

SEQ ID NO: 64478 - DNA, 120 bp, synthetic construct; identical to SEQ ID NO: 7936
  source 1..120: mol_type = other DNA

SEQ ID NO: 64479 - DNA, 120 bp, synthetic construct
  source 1..120: mol_type = other DNA
gcgccttggcatcctcccccgggctccagcaaacttttctttgttcgctgcagtgccgccctacaccgtggtctatttcccagttcgaggtaggagcatgtgtctggcagggaagggagg

SEQ ID NO: 64480 - DNA, 120 bp, synthetic construct
  source 1..120: mol_type = other DNA
ggtgaatgacggcgtggaggacctccgctgcaaatacatctccctcatctacaccaactatgtgagcatctgcaccagggttgggcactgggggctgaacaaagaaaggggcttcttgtg

SEQ ID NO: 64481 - DNA, 120 bp, synthetic construct
  source 1..120: mol_type = other DNA
accttcattgtgggagaccaggtgagcatctggccccatgctgttccttcctcgccaccctctgcttccagatggacacaggtgtgagccatttgtttagcaaagcagagcagacctagg

SEQ ID NO: 64482 - DNA, 120 bp, synthetic construct
  source 1..120: mol_type = other DNA
tcatcttaaatttgagacttaggaccaaatatatgctctatactggagaatattccatgtgctctttagaagaatgcttattctgctcctgtcgggtggaacgttctgttcatgtctagt

SEQ ID NO: 64483 - DNA, 120 bp, synthetic construct
  source 1..120: mol_type = other DNA
tcctgccttcttccagggagaccccttatcccaggtgtgtatatgtggatgagggagagaactcaggttttttcctccatgtttagcctcccactgtgatcaagctcaggggctaggatg

SEQ ID NO: 64484 - DNA, 120 bp, synthetic construct
  source 1..120: mol_type = other DNA
agaatctttgtcaagtgtggagaactgtgatccttcctgattcataacattctgtgcttcctgttgccccgattgagtccaggcccccaggcctggttcccgcagcccccatggcagctc

SEQ ID NO: 64485 - DNA, 120 bp, synthetic construct
  source 1..120: mol_type = other DNA
tcccaaagtactgggattacagttgtgagccaccgtacccggccttctgtgggccttttgacgctgagattctctagttcagaatgaaatgcctcgaatgctgtcctgggtgagtcacat

SEQ ID NO: 64486 - DNA, 120 bp, synthetic construct; identical to SEQ ID NO: 21643
  source 1..120: mol_type = other DNA

SEQ ID NO: 64487 - DNA, 120 bp, synthetic construct
  source 1..120: mol_type = other DNA
ggggatcctgttgatctgtgaccttaccccgcaaccctgtgctctctgaaacatgtgctgtgcccactcagggttaaatggattaagggcagtgcaagatgtgctttgttaaacagatgc

SEQ ID NO: 64488 - DNA, 120 bp, synthetic construct; identical to SEQ ID NO: 21644
  source 1..120: mol_type = other DNA

SEQ ID NO: 64489 - DNA, 120 bp, synthetic construct
  source 1..120: mol_type = other DNA
cgcaccattgcactccaggctggacaacacagtgagactccgtctcaaaaaaaaaaaaaaaaaaaaaggaataccttaaaagtgctgcagggcatgcctgataggcactgattagttagt

SEQ ID NO: 64490 - DNA, 120 bp, synthetic construct
  source 1..120: mol_type = other DNA
tagaaataccatttgacccagccatctcattactgggtatatgcccaaaggattataaatcatgctggtataaagacacatgcacacgtatgtttattgtggcactattcacaatagcaa

SEQ ID NO: 64491 - DNA, 120 bp, synthetic construct
  source 1..120: mol_type = other DNA
tagtacctgctattcaagatgctgttcttaccggctttggtcaagggctgtaacaatgaagcacaattcaaagagttccaaaccagcctgggcaacatagcaaaacactatctctaaaaa

SEQ ID NO: 64492 - DNA, 120 bp, synthetic construct; identical to SEQ ID NO: 21645
  source 1..120: mol_type = other DNA

SEQ ID NO: 64493 - DNA, 120 bp, synthetic construct
  source 1..120: mol_type = other DNA
aaaggttgcaaaaattttctcccattctgtaggttgcctgttcactctgatggtagtttcttttgctgtgcagaagctctttagtttaattagatcccatttgtcaattttggcttttgt

SEQ ID NO: 64494 - DNA, 120 bp, synthetic construct
  source 1..120: mol_type = other DNA
tggccattttcacgatattgattcttcctacccatgagcatggaatgttcttccatttgtttgtatcctctttaagttcattgagcagtggtttgtagttgtccttgaagaggtccttca

SEQ ID NO: 64495 - DNA, 120 bp, synthetic construct; identical to SEQ ID NO: 24586
  source 1..120: mol_type = other DNA

SEQ ID NO: 64496 - DNA, 120 bp, synthetic construct; identical to SEQ ID NO: 31458
  source 1..120: mol_type = other DNA

SEQ ID NO: 64497 - DNA, 120 bp, synthetic construct
  source 1..120: mol_type = other DNA
tagttgtagatgtgtggtattatttccgagggctctgttctgttccattggtctgtatctctgttttggtaccagtaccatgctgttttggttactgtagccttgtagtatagtttgaag

SEQ ID NO: 64498 - DNA, 120 bp, synthetic construct; identical to SEQ ID NO: 13692
  source 1..120: mol_type = other DNA

SEQ ID NO: 64499 - DNA, 120 bp, synthetic construct
  source 1..120: mol_type = other DNA
taaaaccaaacctaacttagtaaaatcaattaaaatgtaaattacttcagcgtgggcaacatggtgattccccatctctactaaaaataaaaaaaattagccaggcatggtggcgcacgc

SEQ ID NO: 64500 - DNA, 120 bp, synthetic construct; identical to SEQ ID NO: 13693
  source 1..120: mol_type = other DNA

SEQ ID NO: 64501 - DNA, 120 bp, synthetic construct
  source 1..120: mol_type = other DNA
gcatgatttataatcctttgggtatatacccagtaatgggatcactgggtcaaatggtatttctagttctagatccttgaggaatcgccacactgtcttccacaatggttgaactagttt

SEQ ID NO: 64502 - DNA, 120 bp, synthetic construct; identical to SEQ ID NO: 3564
  source 1..120: mol_type = other DNA

SEQ ID NO: 64503 - DNA, 120 bp, synthetic construct
  source 1..120: mol_type = other DNA
cgggaggcagaggttgcagtgagccgacatcacgacactgcgctccagcctgggcgacagagtgagactctgtctcgaagtgtatatatacatatatatatattatatatgtattttata

SEQ ID NO: 64504 - DNA, 120 bp, synthetic construct; identical to SEQ ID NO: 29360
  source 1..120: mol_type = other DNA

SEQ ID NO: 64505 - DNA, 120 bp, synthetic construct; identical to SEQ ID NO: 29361
  source 1..120: mol_type = other DNA

SEQ ID NO: 64506 - DNA, 120 bp, synthetic construct; identical to SEQ ID NO: 29362
  source 1..120: mol_type = other DNA

SEQ ID NO: 64507 - DNA, 120 bp, synthetic construct
  source 1..120: mol_type = other DNA
ttttatctttttttttttttttttttttttttttgagacggagtctctgcattgcagtagtacaatctcggctcattgcaacctccgcctcccgggttcaagcaattctcctggctcagt

SEQ ID NO: 64508 - DNA, 120 bp, synthetic construct
  source 1..120: mol_type = other DNA
tcaggtgatccacccacctcggcctcccagagtgctgggattacaggcgtgagccgctgcgcccggcctcatgttttctattggttcattatgaagcaaaaacttcatagcatgtgctac

SEQ ID NO: 64509 - DNA, 120 bp, synthetic construct; identical to SEQ ID NO: 29363
  source 1..120: mol_type = other DNA

SEQ ID NO: 64510 - DNA, 120 bp, synthetic construct
  source 1..120: mol_type = other DNA
agtgagtcgagactgcgccattgcactccagcctgggaacaagagcaaaactccgtctcaggaaaaaaaaaaaaaagatttagttgtgctcaagcatccagattatcttttcttttcaaa

SEQ ID NO: 64511 - DNA, 120 bp, synthetic construct; identical to SEQ ID NO: 29364
  source 1..120: mol_type = other DNA

SEQ ID NO: 64512 - DNA, 120 bp, synthetic construct
  source 1..120: mol_type = other DNA
ggtacgatctcagctcactgcaacctcctcctcccgggttcaagcaattctcctgcctcagcgtcccaagtagctgggattacaggtgcccgccaccacgcctggctaacttttgtattt

SEQ ID NO: 64513 - DNA, 120 bp, synthetic construct; identical to SEQ ID NO: 29365
  source 1..120: mol_type = other DNA

SEQ ID NO: 64514 - DNA, 120 bp, synthetic construct; identical to SEQ ID NO: 29366
  source 1..120: mol_type = other DNA

SEQ ID NO: 64515 - DNA, 120 bp, synthetic construct; identical to SEQ ID NO: 29367
  source 1..120: mol_type = other DNA

SEQ ID NO: 64516 - DNA, 120 bp, synthetic construct; identical to SEQ ID NO: 29368
  source 1..120: mol_type = other DNA

SEQ ID NO: 64517 - DNA, 120 bp, synthetic construct; identical to SEQ ID NO: 29369
  source 1..120: mol_type = other DNA

SEQ ID NO: 64518 - DNA, 120 bp, synthetic construct; identical to SEQ ID NO: 29370
  source 1..120: mol_type = other DNA

SEQ ID NO: 64519 - DNA, 120 bp, synthetic construct; identical to SEQ ID NO: 29371
  source 1..120: mol_type = other DNA

SEQ ID NO: 64520 - DNA, 120 bp, synthetic construct
  source 1..120: mol_type = other DNA
cgcgccactgcgctccagcctgggcgacagagcaagactctgtctcaaaaaaataaaacaaaacaaacaaaaaagaatcactgcaaacaagagtactttctagcaaaatccattctgatt

SEQ ID NO: 64521 - DNA, 120 bp, synthetic construct; identical to SEQ ID NO: 29372
  source 1..120: mol_type = other DNA

SEQ ID NO: 64522 - DNA, 120 bp, synthetic construct; identical to SEQ ID NO: 29373
  source 1..120: mol_type = other DNA

SEQ ID NO: 64523 - DNA, 120 bp, synthetic construct; identical to SEQ ID NO: 29374
  source 1..120: mol_type = other DNA

SEQ ID NO: 64524 - DNA, 120 bp, synthetic construct; identical to SEQ ID NO: 29375
  source 1..120: mol_type = other DNA

SEQ ID NO: 64525 - DNA, 120 bp, synthetic construct; identical to SEQ ID NO: 29376
  source 1..120: mol_type = other DNA

SEQ ID NO: 64526 - DNA, 120 bp, synthetic construct; identical to SEQ ID NO: 29377
  source 1..120: mol_type = other DNA

SEQ ID NO: 64527 - DNA, 120 bp, synthetic construct
  source 1..120: mol_type = other DNA
agaatcacttgaacccagcaggcagaggttgcaatgagccaagatcgtgccactgcactccagcctgggcagcaagagcaaaactccatctcaaaaacaaaaaaaaaaaaaaaaaagaag

SEQ ID NO: 64528 - DNA, 120 bp, synthetic construct
  source 1..120: mol_type = other DNA
tttgtatttttagtagagaaggggtttcaccatgttggtcaggctagtctcaaacccctgacctcatgatccgcctgcctcggcctcccaaagtgctgggattacaggcgtgagccaccg

SEQ ID NO: 64529 - DNA, 120 bp, synthetic construct; identical to SEQ ID NO: 29378
  source 1..120: mol_type = other DNA

SEQ ID NO: 64530 - DNA, 120 bp, synthetic construct; identical to SEQ ID NO: 29379
  source 1..120: mol_type = other DNA

SEQ ID NO: 64531 - DNA, 120 bp, synthetic construct; identical to SEQ ID NO: 29380
  source 1..120: mol_type = other DNA

SEQ ID NO: 64532 - DNA, 120 bp, synthetic construct; identical to SEQ ID NO: 29381
  source 1..120: mol_type = other DNA

SEQ ID NO: 64533 - DNA, 120 bp, synthetic construct; identical to SEQ ID NO: 29382
  source 1..120: mol_type = other DNA

SEQ ID NO: 64534 - DNA, 120 bp, synthetic construct
  source 1..120: mol_type = other DNA
tgagctgagatcgtgccattgcactccagcctgggcaacaagagcaaaactctgtcccaataaataaataaataaaatgttctcttttgttcctgttcttgtgcggtagtgtggtataga

SEQ ID NO: 64535 - DNA, 120 bp, synthetic construct
  source 1..120: mol_type = other DNA
gtcgcagtgagccaagatcgtgccactgcactccagcctgggcaacagaaaggagattctgtctcaaaaaaacaaacatacgaagaaaaacaaaaaaagtaatgaaaagcttttattaaa

SEQ ID NO: 64536 - DNA, 120 bp, synthetic construct; identical to SEQ ID NO: 29383
  source 1..120: mol_type = other DNA

SEQ ID NO: 64537 - DNA, 120 bp, synthetic construct; identical to SEQ ID NO: 29384
  source 1..120: mol_type = other DNA

SEQ ID NO: 64538 - DNA, 120 bp, synthetic construct; identical to SEQ ID NO: 29385
  source 1..120: mol_type = other DNA

SEQ ID NO: 64539 - DNA, 120 bp, synthetic construct; identical to SEQ ID NO: 29386
  source 1..120: mol_type = other DNA

SEQ ID NO: 64540 - DNA, 120 bp, synthetic construct; identical to SEQ ID NO: 29387
  source 1..120: mol_type = other DNA

SEQ ID NO: 64541 - DNA, 120 bp, synthetic construct; identical to SEQ ID NO: 29388
  source 1..120: mol_type = other DNA

SEQ ID NO: 64542 - DNA, 120 bp, synthetic construct; identical to SEQ ID NO: 29389
  source 1..120: mol_type = other DNA

SEQ ID NO: 64543 - DNA, 120 bp, synthetic construct
  source 1..120: mol_type = other DNA
gcagaatggcgtgaacctgggaggccaagctggcagtgagccgagatcgcaccactgcactctagcctgggtgacagagcgagactccgtctcaaaaaaaagaaatcacaggtccctagg

SEQ ID NO: 64544 - DNA, 120 bp, synthetic construct
  source 1..120: mol_type = other DNA
tgcaatgagccaagatcacgccactgtactccagcctggggaacagagtgagaccctgtctcaaaaaaaaaagaagaaaagaaaagacattaataacagaaagatgcttgacaaatcccc

SEQ ID NO: 64545 - DNA, 120 bp, synthetic construct
  source 1..120: mol_type = other DNA
ttttttttgagatggagtctcgctctgtcacccaggctggagtgtagtggcgtgatctccgctcactgcaagctctgcctcctgggttcacgccattctcctgcctcagcctcccgagta

SEQ ID NO: 64546 - DNA, 120 bp, synthetic construct
  source 1..120: mol_type = other DNA
acccacctaacagggcataacagcaagacttgaatgcatcaaatggttcccaagtagctttttttttttttatttttttgagatggaatctcactctgtctcccgggctggagtgcagtg

SEQ ID NO: 64547 - DNA, 120 bp, synthetic construct
  source 1..120: mol_type = other DNA
tccaaaaaaaaaaaaaaaaaaaaattatttgtagagacaaggtctccctgtgttgcccaggctggtctcaaattgctgttctcaagggatcctcctgcctccttcctcagcctcccaaac

SEQ ID NO: 64548 - DNA, 120 bp, synthetic construct
  source 1..120: mol_type = other DNA
tcccctaaactccacatctatatagccaactgcctgctttgaaatctccacttgtacagcgacttaagaaaaaaaatttttatcttggagaatgaataggcatcccaagaagaacatgtc

SEQ ID NO: 64549 - DNA, 120 bp, synthetic construct; identical to SEQ ID NO: 29412
  source 1..120: mol_type = other DNA

SEQ ID NO: 64550 - DNA, 120 bp, synthetic construct
  source 1..120: mol_type = other DNA
agaggctgctggagtcttcaattgcagccgtgagcaatctccaactggccagtttccaagcttatatctagacatctgcttacttcaaattaccagcacgaaactaaaacatgatttttt

SEQ ID NO: 64551 - DNA, 120 bp, synthetic construct
  source 1..120: mol_type = other DNA
cacaaatgcagtgcctgttccatcttaactaagcacttatcacgcactgtggccgtcactttagcagttggaggtgagacagcaaaactagcacgaatttctttttccttcttcacaatt

SEQ ID NO: 64552 - DNA, 120 bp, synthetic construct
  source 1..120: mol_type = other DNA
gctaatttttgtatttttagtagagacagggtttcgccatgttggccagtccgggcaacatagtgggaccagcctggcaacataatgggacttcacctctacaaaaaaattaaaaattag

SEQ ID NO: 64553 - DNA, 120 bp, synthetic construct
  source 1..120: mol_type = other DNA
taggcgtgagccaccacactgagccgcagggcttggttttaattaataaattctaccttcttcacagctcagcctacaagtacaaacacaagagtacatgtttcaccattcaacaaaaat

SEQ ID NO: 64554 - DNA, 120 bp, synthetic construct
  source 1..120: mol_type = other DNA
aatctcattttgtcttcccagcaatgctggaggcgtttctgtccttctagtgtaatattttactaacgaaaagcaaatacctagaacaatctccagcctacaggtcaaatccagaccgca

SEQ ID NO: 64555 - DNA, 120 bp, synthetic construct
  source 1..120: mol_type = other DNA
gtttcataataattattatcatttttttgaggcagggtctcactccgtcacccaggctggaatgcagtggtgcaatcacagctcactgcagcctctgcctccctgggctcggatgatctt

SEQ ID NO: 64556 - DNA, 120 bp, synthetic construct
  source 1..120: mol_type = other DNA
gctaattctttgtatttttagtagagacagggtttcaccgtgttagccaggatggtcttaatatcctgaccttgtgatccacccgccttggtcacccaaagtgctgggattacaggcgtg

SEQ ID NO: 64557 - DNA, 120 bp, synthetic construct
  source 1..120: mol_type = other DNA
caagtagctgagattacaggcttgggtcaacatgcctggctaatttttgtatttttagtagacacagggtttcatcacgttggccaggccagtctcaaactcctgacctcaagtgatctg

SEQ ID NO: 64558 - DNA, 120 bp, synthetic construct
  source 1..120: mol_type = other DNA
cggatcacgaggtcaagagatcgagaccatcctggccaacttggtgaaactttgtctctactaaaaatacaaaaattagccgggcatggtggcgcacgcctgtagtcccagctactcggg

SEQ ID NO: 64559 - DNA, 120 bp, synthetic construct
  source 1..120: mol_type = other DNA
gcatcttgtctattgaagaagatactaaatcaactgcttatttatttatttttatatgtattttttgagacaaggtcttactctgtcacccaggctggagtgcagtggtgcgatctcggc

SEQ ID NO: 64560 - DNA, 120 bp, synthetic construct
  source 1..120: mol_type = other DNA
tcgagaccagcctggccaacatggtgagaccccccccttctctactaaaaattagctgggcatggtggcagacacctgtaatcccagctactccggaggctgaggcaggagaattgcttg

SEQ ID NO: 64561 - DNA, 120 bp, synthetic construct; identical to SEQ ID NO: 2221
  source 1..120: mol_type = other DNA

SEQ ID NO: 64562 - DNA, 120 bp, synthetic construct
  source 1..120: mol_type = other DNA
tcacttgagcctgagagttggaggatgcagtgagccatgattgtgccactgcactccagactgggtgacagagtgagatcctgtctctaaaaacaaaacaaacaaaaagctaaaaaaaaa

SEQ ID NO: 64563 - DNA, 120 bp, synthetic construct
  source 1..120: mol_type = other DNA
agcaaacctggatttatttatttatttatttattttgtagaaacagggttttgccatgttgcccatactggtcttgaactcctggtctcacgtgatccacctgcctcggcttcccaaagt

SEQ ID NO: 64564 - DNA, 120 bp, synthetic construct; identical to SEQ ID NO: 1579
  source 1..120: mol_type = other DNA

SEQ ID NO: 64565 - DNA, 120 bp, synthetic construct
  source 1..120: mol_type = other DNA
accttggcctcccaaagtgctgggattacaggcgtgagccactgcacctggcctatttacttttgaaattagatttttaaaatattctcaaacatggtaacaaaggttaccattcattac

SEQ ID NO: 64566 - DNA, 120 bp, synthetic construct
  source 1..120: mol_type = other DNA
gcagatcacaaggtcaggagttcgagaccagcctggctaacatggtgaaacctcgtctctattaaagatacaaaaaattagccaggagtggtgacacatgcctgtaatcccagctacttg

SEQ ID NO: 64567 - DNA, 120 bp, synthetic construct
  source 1..120: mol_type = other DNA
ctgggtgacagagcaagactccatctcaaaaaaaaaggtatatatgaagaggtaaccagaaagtctgcagccaaaaatgtagggaaaaggcatattggaagatccatgtcaggcagtcaa

SEQ ID NO: 64568 - DNA, 120 bp, synthetic construct
  source 1..120: mol_type = other DNA
cctattaatagccattatacaattactccttttttctttttttctttatttttttgagacagagtctcactgtgtcacccaggctggagtgcagtggtgcgatcttggctcaccgcaacc

SEQ ID NO: 64569 - DNA, 120 bp, synthetic construct; identical to SEQ ID NO: 1590
  source 1..120: mol_type = other DNA

SEQ ID NO: 64570 - DNA, 120 bp, synthetic construct
  source 1..120: mol_type = other DNA
aggagaatggcttgaactcagaaggtggaggtttcagtgagccaagatcatgccattgcactccagcctgtccgaaagggcaaaactctgtctcaaaaaacaaaaacaaaaacgaaaaac

SEQ ID NO: 64571 - DNA, 120 bp, synthetic construct
  source 1..120: mol_type = other DNA
gaagctgaggcagtagaatcgcttgaacctgggaggcagaggttgcagtgatccgagatcaagccactgcactccagcctgggcaacagagcaagactctgtctctcaaaaaaaaaaaaa

SEQ ID NO: 64572 - DNA, 120 bp, synthetic construct
  source 1..120: mol_type = other DNA
cctggcccatctttgctatttctgatcttagctatcagtctttcattgttgagtgatattagccatggactttttataaatggcctttattacattggtcatttcctaccacttctagtt

SEQ ID NO: 64573 - DNA, 120 bp, synthetic construct
  source 1..120: mol_type = other DNA
caggagaatcacttgaacccaggaggtggaggttgcagtgagccaagatcgtgccattgcactccagcctgggtgacagagcaagacaaaaaaaaaaaaaaaaaagggaaaggaaaaagg

SEQ ID NO: 64574 - DNA, 120 bp, synthetic construct
  source 1..120: mol_type = other DNA
tgcctaagctggagtgcaatggcatgatctcggctcactgcaacctctgcctcccgggttcaagcaattcttgtgcctcagccacctgagtagctgggattacaggcatgcaccaccgcc

SEQ ID NO: 64575 - DNA, 120 bp, synthetic construct
  source 1..120: mol_type = other DNA
ggcagaacttgcagtgagtggagaacatgccactgcactccagcctgggtgtcacagcgagactctgtctcaaaaaaaaaaaagaagaaagaaagaaaactatacttgtgccccttacat

SEQ ID NO: 64576 - DNA, 120 bp, synthetic construct
  source 1..120: mol_type = other DNA
tgcttttgttatggtaacgttcactttaagcattaattctattttttttttttttttgagatggagtcttgctctgccacccaggctagagtgcagtggtgcgatctcggctcactgcaa

SEQ ID NO: 64577 - DNA, 120 bp, synthetic construct; identical to SEQ ID NO: 29403
  source 1..120: mol_type = other DNA

SEQ ID NO: 64578 - DNA, 120 bp, synthetic construct; identical to SEQ ID NO: 1591
  source 1..120: mol_type = other DNA

SEQ ID NO: 64579 - DNA, 120 bp, synthetic construct
  source 1..120: mol_type = other DNA
gctattaaaaaaaaaattggccggacgcagtggctcacacctgtaatcccagcactttgggaggcagaggtgggcagatcacttgaggtcaggagttcgagaccagcctagtcaacatgg

SEQ ID NO: 64580 - DNA, 120 bp, synthetic construct
  source 1..120: mol_type = other DNA
atctttagttattgctgttaatctcctactttgcttgatttattgatttatttactgagatggatcttgctctgttgcctgggctggagtgcagtggcacgatctcggctcactgcaacg

SEQ ID NO: 64581 - DNA, 120 bp, synthetic construct
  source 1..120: mol_type = other DNA
tcaaatgccctggatctccgcagcaccaaatccccctcctcccctcaatcaaatgcaacaatgcctccattttaacattaatgtcttaataagttgttcccaaattaaacgtgtctaccg

SEQ ID NO: 64582 - DNA, 120 bp, synthetic construct
  source 1..120: mol_type = other DNA
gaactccagggttcaagcaatttgcctgcctcggcctcccaaggtgttggagttacagtcgtgagcccgcacaccctgccaaggcttgttttctagatatttgagtaaaataatggttct

SEQ ID NO: 64583 - DNA, 120 bp, synthetic construct
  source 1..120: mol_type = other DNA
aagtgatcctccaacctcagcctcccaagtagctgggattataagtgcgtgctacgatgtctggctaattttttatttataaatattttttgtagagacagggtctcgctttgttgccca

SEQ ID NO: 64584 - DNA, 120 bp, synthetic construct
  source 1..120: mol_type = other DNA
tcatcttcccagtttgtatgtggagcctgtggcttggggtattcttttaattctctgtgaccaggtaagacacaggcagaagatatctgagctctgaaaacatccaaggctaatattgag

SEQ ID NO: 64585 - DNA, 120 bp, synthetic construct
  source 1..120: mol_type = other DNA
gggcggaagttgcagtgagctgagatcacaccactgtactccagtctgggcgacagcgagactctgtctcaagaaaagaaaaaaaaattggcctggtgcggtggctcatgtctgtaatcc

SEQ ID NO: 64586 - DNA, 120 bp, synthetic construct
  source 1..120: mol_type = other DNA
cctagggtgcctccaaagggtatgaggccacaaggagagagaccctgatgtcccagccggggcctcagacacacagccatccggcccttgctgagccagtccagccaacacacagaaatg

SEQ ID NO: 64587 - DNA, 120 bp, synthetic construct
  source 1..120: mol_type = other DNA
aaaaaaaaagaaaggaaggagaggaggatgaaggaaggcatcgtgaaggcgggagagcttagttctgattctagtcctagttttgggagattttccccttcagggtggctgaatatccac

SEQ ID NO: 64588 - DNA, 120 bp, synthetic construct
  source 1..120: mol_type = other DNA
aagaatcatttgaacccaggaggcagagtttgcagtaagtggaaatagtgccactgaactccagcttgggcaacagagtgagattctgtctcaaaaaaaaaaaagagtatgtggatttag

SEQ ID NO: 64589 - DNA, 120 bp, synthetic construct
  source 1..120: mol_type = other DNA
gtgaaggttgcagtgagccatgatcacgccactgcattccagcctgggcgacagagcgagactctgtctaaaaaaaaacaaacaaaaaaaacataaaccaattaatttctctgagtttct

SEQ ID NO: 64590 - DNA, 120 bp, synthetic construct; identical to SEQ ID NO: 1592
  source 1..120: mol_type = other DNA

SEQ ID NO: 64591 - DNA, 120 bp, synthetic construct
  source 1..120: mol_type = other DNA
tgatgcgcccacctcggcctcccaaaagtgctgggattacaggtgcgagccaccgtgcccggcccagttactgtttattatcctattattattgcttataaaattaaaattatgtttata

SEQ ID NO: 64592 - DNA, 120 bp, synthetic construct
  source 1..120: mol_type = other DNA
tacggctcactgcagcctcgacttccctgggctcaggtgattggcccacctcagtctcccgaatagctgggactacaggtgtgtgccaccatgccctgctaactttttgtatttttagta

SEQ ID NO: 64593 - DNA, 120 bp, synthetic construct
  source 1..120: mol_type = other DNA
aatcacttgaacctgggaggcaaaggttgcagtgagccgagatcgcaccactgcactccagcctgggtgatagactcagtctcaaaaaaaaaaaaaaaattagccaagcatgatggtgca

SEQ ID NO: 64594 - DNA, 120 bp, synthetic construct
  source 1..120: mol_type = other DNA
tgggcgacagagtgagactctgtctcaaaaaaataaataataataataataataatcttcttttctgaatatgtgtatgtaaaatatatctggaaagatacaagagaatctaattacata

SEQ ID NO: 64595 - DNA, 120 bp, synthetic construct
  source 1..120: mol_type = other DNA
gttcacgccattctcctgcctcagcctcccgagtagctgggactacaggcgcctgccaccatgcccggctaaatttttgtatttttagtagaaacggggtttcaccgtgttagccaggat

SEQ ID NO: 64596 - DNA, 120 bp, synthetic construct
  source 1..120: mol_type = other DNA
taagcactcagtaaaacaaagatagctattattattattattgtaattagtcaatgataccatgcaaaagctcttctgtaaaaagacatattgactaatttttatcatagctctttcaca

SEQ ID NO: 64597 - DNA, 120 bp, synthetic construct; identical to SEQ ID NO: 29399
  source 1..120: mol_type = other DNA

SEQ ID NO: 64598 - DNA, 120 bp, synthetic construct
  source 1..120: mol_type = other DNA
aacgcagtggctcatgcctgtaatcccagcactttgggaggccaaggtaggtagatctcctgatgtcaggagttcaagagtagcctggccaacatggtgaaactaaaaatacaaaaaatt

SEQ ID NO: 64599 - DNA, 120 bp, synthetic construct
  source 1..120: mol_type = other DNA
actgtgatcctgagtgcagctgtgcgggtggcctcaggggagcccccaccacaaagcacacttgaatagtgtgccacatcagccatgcgtggtggctcatgcccgtaatcccagcacttt

SEQ ID NO: 64600 - DNA, 120 bp, synthetic construct
  source 1..120: mol_type = other DNA
atggagacccttctgtacaacgtggtgaaactccgtctctactagaaatacaaaaattagccgggcatggtggcgcgtgcctataatcccagctactcgggaggctgaggcaggaaaatc

SEQ ID NO: 64601 - DNA, 120 bp, synthetic construct
  source 1..120: mol_type = other DNA
tccagctaatttttaaattttttgtagagatggggtcttgctatgttgcccaggctggtctcaaactcctggcctcaagcaatcctcttgccttggcctccaaaagtcctgggattatag

SEQ ID NO: 64602 - DNA, 120 bp, synthetic construct
  source 1..120: mol_type = other DNA
agctactcaggaggctgaggcagaagaatcgcttgaacccaggaggcagaagttgcagtgagccgagattgcgccactgcactgcagcctgggcgacagagcaaaactccgtctcaaaaa

SEQ ID NO: 64603 - DNA, 120 bp, synthetic construct
  source 1..120: mol_type = other DNA
gaccagtcgatacagaagtttttcaggcttttctcaacacgcgaaaagatctcgttgccagattttgtacccgtcatgggcaccgtgtccagaagttcttcggacacatcgaaattctca

SEQ ID NO: 64604 - DNA, 120 bp, synthetic construct; identical to SEQ ID NO: 1593
  source 1..120: mol_type = other DNA

SEQ ID NO: 64605 - DNA, 120 bp, synthetic construct
  source 1..120: mol_type = other DNA
agtgcaatggggcgatctgggctcactgcagcctctgcctcccgggttcaagtgattcccctgcctcagcctcccgagtagccggggttacaggtgcccaccaccacgcccggctcattt

SEQ ID NO: 64606 - DNA, 120 bp, synthetic construct; identical to SEQ ID NO: 1594
  source 1..120: mol_type = other DNA

SEQ ID NO: 64607 - DNA, 120 bp, synthetic construct
  source 1..120: mol_type = other DNA
aaagtgaagcacatggactttggagtcacatggaccctggtttgaatcctgacaactcctataatggctgcgtgacctggagcgagccacttagccactctgagcttcagcttcccgtct

SEQ ID NO: 64608 - DNA, 120 bp, synthetic construct; identical to SEQ ID NO: 2624
  source 1..120: mol_type = other DNA

SEQ ID NO: 64609 - DNA, 120 bp, synthetic construct
  source 1..120: mol_type = other DNA
tttttttatttttatttatttatttatttatttttgagacagagtcatgctctgtcacccaggctggagtgtggtggcatgatctcggctcactgtaacctctgcctcccgggttcaagt

SEQ ID NO: 64610 - DNA, 120 bp, synthetic construct
  source 1..120: mol_type = other DNA
tcgcctgcctcagcctcccgagtagctgggattctaggcttgtgccaccacgcctggctaatttttatattttctgtagagatggggtttcaccatgttggccaggctggtctggaactc

SEQ ID NO: 64611 - DNA, 120 bp, synthetic construct
  source 1..120: mol_type = other DNA
agcactttgggagaccgaggtgggaggatccgttgagctcaggagttcgagaccagcctggccaacatggtgaaaccccatctctaccaaaaatataaaaattagctgggcgtggtggca

SEQ ID NO: 64612 - DNA, 120 bp, synthetic construct
  source 1..120: mol_type = other DNA
cgcgttctccaactcctgctccgcgctctggcctcgcctcccgcttgtgcctctccctctgactccgcctcttagggatcgctccgccccctagcgctggctcctcctctgcccccgcct

SEQ ID NO: 64613 - DNA, 120 bp, synthetic construct
  source 1..120: mol_type = other DNA
aacaattggggttagcacaggctgagaggttgcaaacaaccggacacctgcctctgtgggcctcagtttcctggtctgtgcaactgagacccttccagcaatccttccacagtctaggca

SEQ ID NO: 64614 - DNA, 120 bp, synthetic construct
  source 1..120: mol_type = other DNA
ttctcagccttttagacacacactctgttaacccccatcctgtgtctctgataatcttcttgtgatcctcccaccagccaagaattgggttttatgtgaaccttgtattatgcaaagttt

SEQ ID NO: 64615 - DNA, 120 bp, synthetic construct
  source 1..120: mol_type = other DNA
cgcgatcttggctcactgtaacctccgcctcccgggttgaagcgattctcttgtctcagactcccgagtagctgggattacaggctcccaccacaacacccggctcatgtttgtgttttt

SEQ ID NO: 64616 - DNA, 120 bp, synthetic construct
  source 1..120: mol_type = other DNA
ctactcatggctgatctcttgtcatagtgaagtgtctggacagaccttcatcgttatgggatctctggtccccagagtgggtggcaatgaatgggagtggacaagctcacctgggtgtag

SEQ ID NO: 64617 - DNA, 120 bp, synthetic construct
  source 1..120: mol_type = other DNA
gaagtgggggcatcatcactgaccagaaagggaaaactggcagtgccagggctggatggggcctgcattgagcttgaaaaaaactataatagaattggttaccattttattttattattt

SEQ ID NO: 64618 - DNA, 120 bp, synthetic construct
  source 1..120: mol_type = other DNA
gggcattgcagggcccatctgggcctccagaacaggcgctggcatcttgagtctctgctgccctgcatttcctgggcgcatagcgttctccaggcttcggcctcacacttcaaacatgtc

SEQ ID NO: 64619 - DNA, 120 bp, synthetic construct
  source 1..120: mol_type = other DNA
ggtgctgatgctgtttggtattggctgacatctgccttctcaaaattcatatgttgaagtcctaaccacccagtaccttacagcgtgggtatattaagagaaaggtactcttaagtacgt

SEQ ID NO: 64620 - DNA, 120 bp, synthetic construct
  source 1..120: mol_type = other DNA
agtttgagaccagcctggccaacatggagaaaccctgtctctactaaaaatccaaattagccaggcgtggtgacaggtgcctgtagtcccagccacttgggaggctgaggcaggagaatt

SEQ ID NO: 64621 - DNA, 120 bp, synthetic construct
  source 1..120: mol_type = other DNA
agcgtcaataagtgctggccggagcaatgctgcttgtctctgtcttggcagcctgggtgccttgacaaggggtaacgtcctgtcctcatgctccccacttcgagcttcagtgaccagaga

SEQ ID NO: 64622 - DNA, 120 bp, synthetic construct
  source 1..120: mol_type = other DNA
aaaagacaagaagacgtgaaggaatatttgtagtttacaacacttggaaaagcacgagattggaagtgacctaaatacctctcaaaaccacctaaaaggccgagcatggtggctcacgcc

SEQ ID NO: 64623 - DNA, 120 bp, synthetic construct; identical to SEQ ID NO: 29394
  source 1..120: mol_type = other DNA

SEQ ID NO: 64624 - DNA, 120 bp, synthetic construct
  source 1..120: mol_type = other DNA
ccggacaatttttgtgtttttagtagatatgggggtctcgctatgttgcccaggctggtctcaaactcttggactcaagcgatcttcccacctcggtactaaaaagtgctgggattccag

SEQ ID NO: 64625 - DNA, 120 bp, synthetic construct
  source 1..120: mol_type = other DNA
gtagagacagggttttgccatattgattctggatcagtcttttttttttttttatgagatggagtcttactctgtcacccaggctggagtgcaatggcacaatctccactcactgcatcc

SEQ ID NO: 64626 - DNA, 120 bp, synthetic construct
  source 1..120: mol_type = other DNA
acgatctcagctcactgcaacctccgccttccaggttcaactggttctcctgcctcagcctccagagtagttgggattacaggtgcccaccaccacgcctggctaatttttgtattttta

SEQ ID NO: 64627 - DNA, 120 bp, synthetic construct
  source 1..120: mol_type = other DNA
tacagaaagggctttgcttcttctttcagtttctggggactcttcaggcttgcagggtgtaaacatgggcagactcatgttcacacacacctgcagggacaaggaaaagggtttacactt

SEQ ID NO: 64628 - DNA, 120 bp, synthetic construct
  source 1..120: mol_type = other DNA
agcatctaacgcttgcatgcacactcccatgcccgcgttcattcactcattcattcattcattcactcattcattgactcattcattcattcactcactcattcattcactcagtgaatg

SEQ ID NO: 64629 - DNA, 120 bp, synthetic construct
  source 1..120: mol_type = other DNA
tattatccaagaggtgtagggtccactccacctgctctgaaagatttgcttggcaagtgcttcacttctttttttcttttttttttttttgagacagagtctctttctgtcccccaggct

SEQ ID NO: 64630 - DNA, 120 bp, synthetic construct
  source 1..120: mol_type = other DNA
tatttattttattttattttattttattttattttattttgagatggagttttgtccttgttgcccaggctggagtgcaatggtgcaatctcagctcgccgcaacttctgcctcccaggt

SEQ ID NO: 64631 - DNA, 120 bp, synthetic construct
  source 1..120: mol_type = other DNA
agcgcttcctgcctctgctcatccaacaaacttgctggatacctcctgtctgcagagcactttgagggaacataacagggtcttgggaggccacaggaggagagttgaaagatcacagcc

SEQ ID NO: 64632 - DNA, 120 bp, synthetic construct
  source 1..120: mol_type = other DNA
tttgtattgtgaaatatgtagaaaaccacatctcttacctaattattataaaggagacagctggtgaaccatcactgggtgttagaacaataccagggccccaagaattcccccacgtcc

SEQ ID NO: 64633 - DNA, 120 bp, synthetic construct; identical to SEQ ID NO: 33059
  source 1..120: mol_type = other DNA

SEQ ID NO: 64634 - DNA, 120 bp, synthetic construct; identical to SEQ ID NO: 33063
  source 1..120: mol_type = other DNA

SEQ ID NO: 64635 - DNA, 120 bp, synthetic construct
  source 1..120: mol_type = other DNA
agtaataaaagtgtttcagcctatttgtcaacttttaatttcttgaagattaaaagttgcatcctgagggccaggtgcagtggctcacgcctgtaatcacagcactttggatcccttatg

SEQ ID NO: 64636 - DNA, 120 bp, synthetic construct
  source 1..120: mol_type = other DNA
ctctggtggagatgctgggccccttcgttatcctgcacccctccatcctgactctgcctcctgcacctcttccctgtcccgacactggtggagatgctgggccccttcattctcctgcat

SEQ ID NO: 64637 - DNA, 120 bp, synthetic construct; identical to SEQ ID NO: 9942
  source 1..120: mol_type = other DNA

SEQ ID NO: 64638 - DNA, 120 bp, synthetic construct; identical to SEQ ID NO: 33278
  source 1..120: mol_type = other DNA

SEQ ID NO: 64639 - DNA, 120 bp, synthetic construct; identical to SEQ ID NO: 33279
  source 1..120: mol_type = other DNA

SEQ ID NO: 64640 - DNA, 120 bp, synthetic construct
  source 1..120: mol_type = other DNA
cggtatgtttacgacagaaagaaagagatgtggggcagacacagaagagaaggggaccttgcttggaaatggagtttttgcagatgtagttaagatgaggttaccctggatttatctagg

SEQ ID NO: 64641 - DNA, 120 bp, synthetic construct
  source 1..120: mol_type = other DNA
agacagaagaggagacacagacacagagaagaaggccacagacagaggcagagactggagtgatgcggccacaagcccagggacgcctggagcccccaggagctgggagaggcaggaagg

SEQ ID NO: 64642 - DNA, 120 bp, synthetic construct; identical to SEQ ID NO: 33282
  source 1..120: mol_type = other DNA

SEQ ID NO: 64643 - DNA, 120 bp, synthetic construct; identical to SEQ ID NO: 33283
  source 1..120: mol_type = other DNA

SEQ ID NO: 64644 - DNA, 120 bp, synthetic construct; identical to SEQ ID NO: 33284
  source 1..120: mol_type = other DNA

SEQ ID NO: 64645 - DNA, 120 bp, synthetic construct
  source 1..120: mol_type = other DNA
cacgcacctccaccaatgatatcctcccctcttccccataagccccgccctttcacccatgggctcctcccccgaaccccacccatgcacctccacctatgagatcctcccttcagagcc

SEQ ID NO: 64646 - DNA, 120 bp, synthetic construct
  source 1..120: mol_type = other DNA
acgataacagtaatggggttatactgacacagtctacaccaaataactgaagcgaatggataacaagtgggagatgatatccttagttctaggggaatgtagagtgttccttggagggag

SEQ ID NO: 64647 - DNA, 120 bp, synthetic construct; identical to SEQ ID NO: 12326
  source 1..120: mol_type = other DNA

SEQ ID NO: 64648 - DNA, 120 bp, synthetic construct; identical to SEQ ID NO: 12327
  source 1..120: mol_type = other DNA

SEQ ID NO: 64649 - DNA, 120 bp, synthetic construct; identical to SEQ ID NO: 12328
  source 1..120: mol_type = other DNA

SEQ ID NO: 64650 - DNA, 120 bp, synthetic construct; identical to SEQ ID NO: 12329
  source 1..120: mol_type = other DNA

SEQ ID NO: 64651 - DNA, 120 bp, synthetic construct; identical to SEQ ID NO: 12330
  source 1..120: mol_type = other DNA

SEQ ID NO: 64652 - DNA, 120 bp, synthetic construct
  source 1..120: mol_type = other DNA
agttcatgtcctttgtagggacgtggatgaagctggaaaccatcattctcaggaaactatcgcaaggacaaataccaaacaccgcatgttctcactcataggtgggaaatgaaaaatgag

SEQ ID NO: 64653 - DNA, 120 bp, synthetic construct; identical to SEQ ID NO: 12332
  source 1..120: mol_type = other DNA

SEQ ID NO: 64654 - DNA, 120 bp, synthetic construct; identical to SEQ ID NO: 12333
  source 1..120: mol_type = other DNA

SEQ ID NO: 64655 - DNA, 120 bp, synthetic construct; identical to SEQ ID NO: 12334
  source 1..120: mol_type = other DNA

SEQ ID NO: 64656 - DNA, 120 bp, synthetic construct; identical to SEQ ID NO: 12710
  source 1..120: mol_type = other DNA

SEQ ID NO: 64657 - DNA, 120 bp, synthetic construct
  source 1..120: mol_type = other DNA
gagaagtgtctgtttatgtccttcacccactttttgacagggttgtttttttcttgtaaatttgtttgaggtcattgtagattctggatattagccctttctcagatgagtaggttgcga

SEQ ID NO: 64658 - DNA, 120 bp, synthetic construct; identical to SEQ ID NO: 12711
  source 1..120: mol_type = other DNA

SEQ ID NO: 64659 - DNA, 120 bp, synthetic construct; identical to SEQ ID NO: 35124
  source 1..120: mol_type = other DNA

SEQ ID NO: 64660 - DNA, 120 bp, synthetic construct
  source 1..120: mol_type = other DNA
gcttaaggagattttgggctgagacaatggggttttctagatatacaatcatgccgtctgcaaacagggacaatttgacttcctcttttcctaattgaataccctttatttccttctcct

SEQ ID NO: 64661 - DNA, 120 bp, synthetic construct
  source 1..120: mol_type = other DNA
aaatgcaaatcaaagccacaatgagatatcatctcacaccagttagaatggcaatcattaaaaagtcaggaaacaacaggtgctggagaggatgtggagaaataggaacacttttacact

SEQ ID NO: 64662 - DNA, 120 bp, synthetic construct; identical to SEQ ID NO: 21867
  source 1..120: mol_type = other DNA

SEQ ID NO: 64663 - DNA, 120 bp, synthetic construct
  source 1..120: mol_type = other DNA
gccactttcatgccaactctttatttccataatagaaaatcttttatttccacctttagtgttccctgctagaatagatgaccacaaaacccaggccagaaacgttctggtctgccgtga

SEQ ID NO: 64664 - DNA, 120 bp, synthetic construct
  source 1..120: mol_type = other DNA
tatttaaataccactgctctgcccaaacacccaggttccctggtgtgttaatttctagttttctagtctgttaggggaaaaaaacccaaaacagtggccaggtgtggtggccaacgcctg

SEQ ID NO: 64665 - DNA, 120 bp, synthetic construct
  source 1..120: mol_type = other DNA
cgagcaaaactccgtctcaaaaaaaaaaaagagtctcactctattgctcaagctggagtacagtgctgtgatcttagctcattgcaacctccatctcccaggttcaacagattctcatgc

SEQ ID NO: 64666 - DNA, 120 bp, synthetic construct
  source 1..120: mol_type = other DNA
atggaataatgagtgtatcccaaaagtaaatccatgatgaggtcccgtttttcgttcctccttggctacaaaatagacaaggaaaaggcaagccagccatttccgattcactatagctga

SEQ ID NO: 64667 - DNA, 120 bp, synthetic construct
  source 1..120: mol_type = other DNA
atatatataaaaattaaattaaattaaactcaaccaaaccaggctgggcatggtacctcaggtctgtaatgccagcacttttggaggtcgagacaggaggatcacttcagcccaggattt

SEQ ID NO: 64668 - DNA, 120 bp, synthetic construct
  source 1..120: mol_type = other DNA
cagggaggtggacattgcagtgagccgagatcgcgccactgcactccagcctaggcaacgagagcgaaactctgtgtcaaaaaaaaaaaaagaattcagagctggttaccttttcaaaga

SEQ ID NO: 64669 - DNA, 120 bp, synthetic construct
  source 1..120: mol_type = other DNA
ggatcatgcctgtaattccagcacttttggaggccaaggcaggaagatcaattgagtccaggagtttgagaccagcctggacaacatagcaagaccctatatctaaaatatgaaaattaa

SEQ ID NO: 64670 - DNA, 120 bp, synthetic construct
  source 1..120: mol_type = other DNA
tagctgttcaaacagatcacatccacatacggagcctaggaccagagcagcagagcccgttcagcactcagtagacagcatgactcagcattcacacactgcgggggctcctctggcaga

SEQ ID NO: 64671 - DNA, 120 bp, synthetic construct
  source 1..120: mol_type = other DNA
attttttgtatttttggtagaaatgaagtttcaccagttggctgggctggtcttgaactcctgatctcaagtaatctgcctgcctcggcctcccaaagtgctgggatgataggtgtaagc

SEQ ID NO: 64672 - DNA, 120 bp, synthetic construct
  source 1..120: mol_type = other DNA
cctctacaaaagaaaaagaaaaactcaagttccaaccctggacgtactaaatcaggacctcagaatgcagagatctggcatttcataaaaacttcccctagagattctcatcagccaggt

SEQ ID NO: 64673 - DNA, 120 bp, synthetic construct
  source 1..120: mol_type = other DNA
cttgaggtcaggagttcaagatcagcctggccaacatggtgaaaccccaactctatctactacaaatacaaaaattagcggccaggcgcagtggctcacgcctgtaatcccagcactttg

SEQ ID NO: 64674 - DNA, 120 bp, synthetic construct
  source 1..120: mol_type = other DNA
tggatcatgaggtcaagagtttgagaccagcctggtcaacatggtaaaagtctatctctacaaaaaaatacaaaaaaaacctagctgggcatggtggcatgcgcctggaatcccagctac

SEQ ID NO: 64675 - DNA, 120 bp, synthetic construct
  source 1..120: mol_type = other DNA
gttgaagcctgttttcctcttctctttcctcagttcatttcttcttttacgccctcccccatcattgctctgcctatccgaaggctgtggctggcacagatcagaaaagaaccccctagc

SEQ ID NO: 64676 - DNA, 120 bp, synthetic construct
  source 1..120: mol_type = other DNA
cggatcatgagttcaagagatcgagaccatcctagccaaaatggtgaaaccccgtctctgctaaaaatacaaaaattagcagggtatgttggcgtgtgcctgtaatcccaactcctcagg

SEQ ID NO: 64677 - DNA, 120 bp, synthetic construct
  source 1..120: mol_type = other DNA
acttcaagtagtagccagcagattctaggtgggacgcaggctcgttggccacagaccacatcacgaccgcggggtggttcttgtccctacgcaccacttcttccatcacctgcatgtggt

SEQ ID NO: 64678 - DNA, 120 bp, synthetic construct
  source 1..120: mol_type = other DNA
ttcccacactttgggaggctaaggcaggaggatcacttgagtccaggagttgaagaccagcctgctgacagactgagaccccatctctataaaaaaaaaatgtttttcttctgagacagt

SEQ ID NO: 64679 - DNA, 120 bp, synthetic construct
  source 1..120: mol_type = other DNA
gacctgagtcacacaaacaggagcgccctgcagccaccgctgccaggcagccatttgtttctgttgctttttttaaatttaatttcttattttttttttttgagacggagtctcactctg

SEQ ID NO: 64680 - DNA, 120 bp, synthetic construct
  source 1..120: mol_type = other DNA
gaaagggagtttccccagtaataatcggtgctgtctcatccttacgagcagcctgtcctgaattctgtgtctcagggtgaactgtgcattttgcacttcactattttttttgagatgggg

SEQ ID NO: 64681 - DNA, 120 bp, synthetic construct
  source 1..120: mol_type = other DNA
ctcgtgatccccccaccttggcctcccaaagtgctgggattacaggcatgagccaccgcgcccgccctgaaaaagatatatttttaaaaagaaaaaaaacttaaaacaaaaatttttctt

SEQ ID NO: 64682 - DNA, 120 bp, synthetic construct
  source 1..120: mol_type = other DNA
taattttttaattttttgtggtgatggcctcactatgttgcccaggctgctcttgaactactggcctcaagtgatccttataccagggcctccttgcaaagtgctggatgacaggcataa

SEQ ID NO: 64683 - DNA, 120 bp, synthetic construct
  source 1..120: mol_type = other DNA
aggatggtacccacttggaggtgtcagtcaggtattggatggtccctggtggcagggtggtgggggtgagtgtgttgttgatggcgatagtgattcggagccgggagggcaggggcccca

SEQ ID NO: 64684 - DNA, 120 bp, synthetic construct
  source 1..120: mol_type = other DNA
tctttccctcctgtactgaatgctgcaaagtcagaataagaggatgtagaccaggcaaaagccgcccagacctcacccagttccacttctctgcagatcacatccaagtcaggaggggaa

SEQ ID NO: 64685 - DNA, 120 bp, synthetic construct
  source 1..120: mol_type = other DNA
ctcagaagttaggctggcgccactccgccccagcctgggaaacaggtgcaaacccagtctcaaaaaaatttttaaaaattaaaaataaatattgaaaggaaggatactgcacagactcag

SEQ ID NO: 64686 - DNA, 120 bp, synthetic construct; identical to SEQ ID NO: 12875
  source 1..120: mol_type = other DNA

SEQ ID NO: 64687 - DNA, 120 bp, synthetic construct
  source 1..120: mol_type = other DNA
agaacacatggacacaggaaggggaacatcacacatcgggaactgttgtggggtggggggaggggggagggatagcattaggagacatacctaatgtaaatgacgagttaatgggtgcag

SEQ ID NO: 64688 - DNA, 120 bp, synthetic construct
  source 1..120: mol_type = other DNA
gatcagactcacacataacaatattaaccttaaatgtaaatgggctaaatgctccaattaaaagacacagactggcaaattggataaagagtcaagacccatcagtgtgctgtattcagg

SEQ ID NO: 64689 - DNA, 120 bp, synthetic construct
  source 1..120: mol_type = other DNA
acaaagatcagaacagaactgaaggaaacagagacacaaaaaacacgtcaaaagattaatgaatccaggagctggttttttgaaaagatcaacaaaactgatagaacgctagcaagacta

SEQ ID NO: 64690 - DNA, 120 bp, synthetic construct
  source 1..120: mol_type = other DNA
caggagaaggaaataaagggcattcaattaggaaaagaggaagtcaaattgttcctgtttgcagatgacatgattgtatatctagaaaaccccatcattcagcccaaaaactcctcaagc

SEQ ID NO: 64691 - DNA, 120 bp, synthetic construct
  source 1..120: mol_type = other DNA
aaatttttgcaagctactcatctgacaaagggctaatatccagaatctacaattaactcaaaacaaatttacaagaaaaaaacaaccccatcaacaagtgggcgaaggatatcaacagac

SEQ ID NO: 64692 - DNA, 120 bp, synthetic construct; identical to SEQ ID NO: 12876
  source 1..120: mol_type = other DNA

SEQ ID NO: 64693 - DNA, 120 bp, synthetic construct; identical to SEQ ID NO: 24424
  source 1..120: mol_type = other DNA

SEQ ID NO: 64694 - DNA, 120 bp, synthetic construct; identical to SEQ ID NO: 24789
  source 1..120: mol_type = other DNA

SEQ ID NO: 64695 - DNA, 120 bp, synthetic construct; identical to SEQ ID NO: 33379
  source 1..120: mol_type = other DNA

SEQ ID NO: 64696 - DNA, 120 bp, synthetic construct; identical to SEQ ID NO: 33380
  source 1..120: mol_type = other DNA

SEQ ID NO: 64697 - DNA, 120 bp, synthetic construct
  source 1..120: mol_type = other DNA
gttcaaatatatatgtatatacacacacgtatgcatatatatgtgtatatgcacgcgtgtgcgtatatatgtgtatacgcacacgcatgcgtatatatgtgtatacgcacacgcatgcgt

SEQ ID NO: 64698 - DNA, 120 bp, synthetic construct
  source 1..120: mol_type = other DNA
tgtgtatgtatatatacacgtgtgtatgtatatttatatacacgtgtgtatgtatatttatatacacgtgtgtatgtatatttatatacacgtgtgtatgtatatttatatacacgtgtg

SEQ ID NO: 64699 - DNA, 120 bp, synthetic construct; identical to SEQ ID NO: 25835
  source 1..120: mol_type = other DNA

SEQ ID NO: 64700 - DNA, 120 bp, synthetic construct; identical to SEQ ID NO: 25836
  source 1..120: mol_type = other DNA

SEQ ID NO: 64701 - DNA, 120 bp, synthetic construct
  source 1..120: mol_type = other DNA
acccagtaatgggatggctgggtcaaatggaacctcttttctttataaattacccagtatcagttatttctttatagcagtgtgagaacaaatgggttttcagattgcatctgaatgtga

SEQ ID NO: 64702 - DNA, 120 bp, synthetic construct; identical to SEQ ID NO: 25837
  source 1..120: mol_type = other DNA

SEQ ID NO: 64703 - DNA, 120 bp, synthetic construct
  source 1..120: mol_type = other DNA
agtttctttcttcttcaacagctactgctcacagtaaaagagcacttggtggaaattttgttctgaagtgaaggctgaaaccccagagatcaaacactgtactcaagtatacaaagctgg

SEQ ID NO: 64704 - DNA, 120 bp, synthetic construct; identical to SEQ ID NO: 25838
  source 1..120: mol_type = other DNA

SEQ ID NO: 64705 - DNA, 120 bp, synthetic construct
  source 1..120: mol_type = other DNA
tggatgaaccctgaaggatgggcagagttttaggtgaagatgcagaggaggagggataaagaaatagcatgggctaacatatggagaaaggggagtataacatgcattgatgtggaggct

SEQ ID NO: 64706 - DNA, 120 bp, synthetic construct
  source 1..120: mol_type = other DNA
gtataaatgggaatcttgcctgtgctaaaagatgtttgaagaagactgttcccatgaagcaatattttaagggaacgattttgtttggctcttgaaccaaaggattggcacgttcaatct

SEQ ID NO: 64707 - DNA, 120 bp, synthetic construct; identical to SEQ ID NO: 25839
  source 1..120: mol_type = other DNA

SEQ ID NO: 64708 - DNA, 120 bp, synthetic construct
  source 1..120: mol_type = other DNA
acatgtaccctaaagcttacagtataataataataaaaaaaattaagttgtattctaggtgtggtgggtcgtgcctgtaaccccagtgctttgggaggccaaggcaggaggattgcttga

SEQ ID NO: 64709 - DNA, 120 bp, synthetic construct
  source 1..120: mol_type = other DNA
ctgcactccagcctgggcgacagaacgagactccatcttcaaaataaataaataaatacatataaaactaaacaggaataaccgtattaatcttaggcaaagtagaattaagagcaaaga

SEQ ID NO: 64710 - DNA, 120 bp, synthetic construct; identical to SEQ ID NO: 25840
  source 1..120: mol_type = other DNA

SEQ ID NO: 64711 - DNA, 120 bp, synthetic construct
  source 1..120: mol_type = other DNA
aggaattggaagtggctgctaatgggtaagaggtttccttttggagtgatgaaaatgttctggagctacataatggtgatgggtgtgcatcattttgaatgcattaaatgctaccgattg

SEQ ID NO: 64712 - DNA, 120 bp, synthetic construct; identical to SEQ ID NO: 25828
  source 1..120: mol_type = other DNA

SEQ ID NO: 64713 - DNA, 120 bp, synthetic construct; identical to SEQ ID NO: 5406
  source 1..120: mol_type = other DNA

SEQ ID NO: 64714 - DNA, 120 bp, synthetic construct; identical to SEQ ID NO: 25829
  source 1..120: mol_type = other DNA

SEQ ID NO: 64715 - DNA, 120 bp, synthetic construct; identical to SEQ ID NO: 25830
  source 1..120: mol_type = other DNA

SEQ ID NO: 64716 - DNA, 120 bp, synthetic construct; identical to SEQ ID NO: 25831
  source 1..120: mol_type = other DNA

SEQ ID NO: 64717 - DNA, 120 bp, synthetic construct; identical to SEQ ID NO: 25832
  source 1..120: mol_type = other DNA

SEQ ID NO: 64718 - DNA, 120 bp, synthetic construct
  source 1..120: mol_type = other DNA
gaatggcgtgctttggcagtccccatacaactaattggtaacacttcttcctttcctaacttggtagagaagggtgctgtatttattctatctcgaaggtgttgtggcctaggaggactg

SEQ ID NO: 64719 - DNA, 120 bp, synthetic construct
  source 1..120: mol_type = other DNA
gaaatgaacctagtttgttctcatccttgactgcatggtagaatcatctgtgatatcccaggaattggattctgatgtgcggccagcagtgagaacaactgctccagttggtaatataga

SEQ ID NO: 64720 - DNA, 120 bp, synthetic construct
  source 1..120: mol_type = other DNA
ggtggattgcctgagctcagagttggagaccagcctgggcaacacggtgaaaccccgtgtctactgaaatacaaaaaattaactgggcgtggtggtgtgcgcctgtattgtcagctactt

SEQ ID NO: 64721 - DNA, 120 bp, synthetic construct
  source 1..120: mol_type = other DNA
ggaactgcctaggctcaaactaattcctctagcaactacctgagaccttgcaaaatttacttaatctctatatttttgttccatcattatacatggattagtctctaccttatagagtta

SEQ ID NO: 64722 - DNA, 120 bp, synthetic construct
  source 1..120: mol_type = other DNA
cagtgtggcgattccttagggatctagaactggaaataccatttgacccagccatccaattactgggtatatacccaaaggaccataaatcatgctgctataaaaacacatgcacacgta

SEQ ID NO: 64723 - DNA, 120 bp, synthetic construct; identical to SEQ ID NO: 21418
  source 1..120: mol_type = other DNA

SEQ ID NO: 64724 - DNA, 120 bp, synthetic construct; identical to SEQ ID NO: 21419
  source 1..120: mol_type = other DNA

SEQ ID NO: 64725 - DNA, 120 bp, synthetic construct; identical to SEQ ID NO: 25817
  source 1..120: mol_type = other DNA

SEQ ID NO: 64726 - DNA, 120 bp, synthetic construct
  source 1..120: mol_type = other DNA
acagcaactgagaggctgaagaggtggtgaggcaccaaatgctgtgggccatgttctagaatttggactttatctttaaggcagtggaaagacaatgaatggtttgaagcagttttttat

SEQ ID NO: 64727 - DNA, 120 bp, synthetic construct; identical to SEQ ID NO: 25818
  source 1..120: mol_type = other DNA

SEQ ID NO: 64728 - DNA, 120 bp, synthetic construct; identical to SEQ ID NO: 25819
  source 1..120: mol_type = other DNA

SEQ ID NO: 64729 - DNA, 120 bp, synthetic construct; identical to SEQ ID NO: 25820
  source 1..120: mol_type = other DNA

SEQ ID NO: 64730 - DNA, 120 bp, synthetic construct
  source 1..120: mol_type = other DNA
gtttttcttttttggaagtttttattaagccaaagcagccaactacaatttagaaaaattgaacttaaggataaagtgctttgtgtgatagcatctgagcctactgttttgggtagccta

SEQ ID NO: 64731 - DNA, 120 bp, synthetic construct; identical to SEQ ID NO: 25821
  source 1..120: mol_type = other DNA

SEQ ID NO: 64732 - DNA, 120 bp, synthetic construct; identical to SEQ ID NO: 25815
  source 1..120: mol_type = other DNA

SEQ ID NO: 64733 - DNA, 120 bp, synthetic construct; identical to SEQ ID NO: 25816
  source 1..120: mol_type = other DNA

SEQ ID NO: 64734 - DNA, 120 bp, synthetic construct
  source 1..120: mol_type = other DNA
aacttagccttggtcagacaactagttaaaagtagaattataactataatgcaggtcatctatattctaagctttattccttccacagtattcttatgcatagtctccaatatagtcact

SEQ ID NO: 64735 - DNA, 120 bp, synthetic construct
  source 1..120: mol_type = other DNA
ctcatattcctgggctcaagcgattagccaggcttggcctctgaaaattctgggattataggcatgagccactgcccctggcccccaaaatgtttttaaaaataagaaatgcctatttta

SEQ ID NO: 64736 - DNA, 120 bp, synthetic construct; identical to SEQ ID NO: 25822
  source 1..120: mol_type = other DNA

SEQ ID NO: 64737 - DNA, 120 bp, synthetic construct
  source 1..120: mol_type = other DNA
ttacttccaactatgtggtcagttttggaataggtgtggtgtggtgctgaaaaaagtgtatattctgttgatttggggtggagagttctgtagatgtctattaggtccacttggtgcaga

SEQ ID NO: 64738 - DNA, 120 bp, synthetic construct
  source 1..120: mol_type = other DNA
agcattttttccttcatttcaactttggtgaatctgacaattacgtgtcttggagttgcttttctcgaggagtatctttgtggcgttctctgtatttcctgaatctgaatgttggcctgc

SEQ ID NO: 64739 - DNA, 120 bp, synthetic construct
  source 1..120: mol_type = other DNA
atgaacattgatgcaaaaatcctcaataaaatcctggcaaaccgaatccagcagcacatcaaaaagcttatccaccatgatcaagtgggcttcatccctgggatgcaaggctggttcaat

SEQ ID NO: 64740 - DNA, 120 bp, synthetic construct
  source 1..120: mol_type = other DNA
caaactatactacaaggctacagtaaccaaaacagcatggtactggtaccaaaacagagatatagatcaatggaacagaacagagccctcagaaataacgccgcacatctacaactctct

SEQ ID NO: 64741 - DNA, 120 bp, synthetic construct
  source 1..120: mol_type = other DNA
atgatagactggattaagaaaatgtggcacatatacaccatggaataatatgcggccataaaaaaggatgagttcatgtcctttgtagggacatggatgaaactggaaatcatcattctc

SEQ ID NO: 64742 - DNA, 120 bp, synthetic construct
  source 1..120: mol_type = other DNA
ttagattgagtcaaaagagataggttacaactggtgcaatggctcatgcctgtaatcccaacactttgggaggccgaggcaggtggattgcctgagctcaggagttggagaccagcctgg

SEQ ID NO: 64743 - DNA, 120 bp, synthetic construct; identical to SEQ ID NO: 25823
  source 1..120: mol_type = other DNA

SEQ ID NO: 64744 - DNA, 120 bp, synthetic construct
  source 1..120: mol_type = other DNA
ccatttcataccctctgaaatggctataattaaaaaaatgaaaaagtacaatttctggcaagattgtggagaaattggcacctcatacaccctggtgaaaaggtcaaaaggtgcagctcc

SEQ ID NO: 64745 - DNA, 120 bp, synthetic construct; identical to SEQ ID NO: 25824
  source 1..120: mol_type = other DNA

SEQ ID NO: 64746 - DNA, 120 bp, synthetic construct; identical to SEQ ID NO: 25825
  source 1..120: mol_type = other DNA

SEQ ID NO: 64747 - DNA, 120 bp, synthetic construct; identical to SEQ ID NO: 25826
  source 1..120: mol_type = other DNA

SEQ ID NO: 64748 - DNA, 120 bp, synthetic construct; identical to SEQ ID NO: 25827
  source 1..120: mol_type = other DNA

SEQ ID NO: 64749 - DNA, 120 bp, synthetic construct
  source 1..120: mol_type = other DNA
aacggagatcgtgccactgcactccagcctgggcgacagagcgagactccatttcaaaaacagagaaagagagaaagaagacaaactatttttacacaagcactctacacttttcttttt

SEQ ID NO: 64750 - DNA, 120 bp, synthetic construct; identical to SEQ ID NO: 12747
  source 1..120: mol_type = other DNA

SEQ ID NO: 64751 - DNA, 120 bp, synthetic construct
  source 1..120: mol_type = other DNA
gtttttaaaaaaaagtttgtaaagatactctaatttggggaaacattaataaaaagagtaggccgggcacagtggcttacacctgtaatcccagcactttgggaggccaaggcaggtgga

SEQ ID NO: 64752 - DNA, 120 bp, synthetic construct; identical to SEQ ID NO: 26570
  source 1..120: mol_type = other DNA

SEQ ID NO: 64753 - DNA, 120 bp, synthetic construct
  source 1..120: mol_type = other DNA
tgggtgacagagcgagactctgtctcaaaaaaaaagaaaaaaaaagttttttttaagagactgggtcttgctgtgtcgcccaggctggtctcgaactcctggcctcaagtgatcctccct

SEQ ID NO: 64754 - DNA, 120 bp, synthetic construct
  source 1..120: mol_type = other DNA
tttcatgtactcctccccatgccccccagcccccctctgcccaaggctggcctcccccacatcatgcccacagcccggattccagagtcctcgagacaaattgctgtaacagtgtttatt

SEQ ID NO: 64755 - DNA, 120 bp, synthetic construct
  source 1..120: mol_type = other DNA
cgattcctgagtcaggtagtgcagtggttgtaaagtgcagcatattcatttccaagctagagggttttgtgtccggattcaaaggcccaggcttgagctgggtagcaccatttctgtgga

SEQ ID NO: 64756 - DNA, 120 bp, synthetic construct
  source 1..120: mol_type = other DNA
tcccctggatgctgtactgtctgccaagccagccccaggggctgagcggtgagggcatacagcgtcaccaagtccactgtgggccctctccgcaccagaccctgggccgcagtgcctcgt

SEQ ID NO: 64757 - DNA, 120 bp, synthetic construct
  source 1..120: mol_type = other DNA
cccgtcatcactcctgccagactccagatgtccaaggtgctccttggctcccacaagctctcctccagcaccccatcttcccctggttgcccctcggttccccacttccccagtttcccc

SEQ ID NO: 64758 - DNA, 120 bp, synthetic construct
  source 1..120: mol_type = other DNA
gcctttggtgagggttgttggggccctgcagtccctggggttcacctcaagtctcgagtgtcaaagccgtgaaggggagcaccagggccaagggacccagagttcacgggtccaatcacc

SEQ ID NO: 64759 - DNA, 120 bp, synthetic construct
  source 1..120: mol_type = other DNA
catcttaagctcctgaattagcacctcaaacctgcattgaatgagaatgttaatgtctggccacttagggctgaggagatcagagtgttcactggggaggcaattgtcagttcagtaaaa

SEQ ID NO: 64760 - DNA, 120 bp, synthetic construct
  source 1..120: mol_type = other DNA
agaatggggacacttcattgtcccccaagtatctcctctcatctccccaaccctcaatagtgcaccctggggtgaatcagacacatagcccgatgtggctcccatgaatgtcctatccct

SEQ ID NO: 64761 - DNA, 120 bp, synthetic construct
  source 1..120: mol_type = other DNA
catgatcacctcagaacacagggatccctcattttggaagtctctgctctcctgtcccagcttcagtgcctgacccaggtgatacggggccatggtcctctgatgaggtccttgagtctg

SEQ ID NO: 64762 - DNA, 120 bp, synthetic construct
  source 1..120: mol_type = other DNA
gccacttttgagtccacacttacaaccgattctgtgccatccgggtggtgagacagaaggggaagcgtccacaaatacccatgtgctacgcaagagcccccagtttctgtgcctgccaga

SEQ ID NO: 64763 - DNA, 120 bp, synthetic construct
  source 1..120: mol_type = other DNA
gggctcctagacagccccagggttctcccattgggaaatgccgctctactacacatcagccacagcgcattaatgcttggttctcctggtgaaaccgcctctgcaaaaattattacagaa

SEQ ID NO: 64764 - DNA, 120 bp, synthetic construct
  source 1..120: mol_type = other DNA
gccccctacccaccaaatgatccttaaaaactttgatccccaaatttcctgggagactgatttgagtaataataaaactctggtctcctgcacggccgactctgtgtgaattaaacttta

SEQ ID NO: 64765 - DNA, 120 bp, synthetic construct
  source 1..120: mol_type = other DNA
tgatgtcacatggacaggtatataaccacagtgatgtcaccaagacaggacgtgggcacagtgctgtcaccgggataaagatgtgggcacggtgctgtcatctagatagacacatgagca

SEQ ID NO: 64766 - DNA, 120 bp, synthetic construct
  source 1..120: mol_type = other DNA
tcgattgcgtctataatgaccctatttccaaatgagttcgtgctctgagatgctggtggtcagggcttcaacttgtcttttctggagaggcactaaacagactccatgaggaactgagga

SEQ ID NO: 64767 - DNA, 120 bp, synthetic construct
  source 1..120: mol_type = other DNA
tcccctgtgttttgggattggaggggtttgattcctggggctgctgtgacagtgatcacagactgggtggctttagccataggaatggactctctcacagctctggagcccagaggttca

SEQ ID NO: 64768 - DNA, 120 bp, synthetic construct
  source 1..120: mol_type = other DNA
catgccaggaggatggatctatttcccctcccctgaaatctgggtgcattttgaccaataaaatgcagtgggatgttgctctgggacttcaaagctgaccgttaagaagccttagttttt

SEQ ID NO: 64769 - DNA, 120 bp, synthetic construct
  source 1..120: mol_type = other DNA
tttggaggcctggagttttaatggggccggtcctggctgtcagtcacattgaggatgtcatgcatggtgttggtgacttgccatcttggcaacacacagctggctcctggcctctctgct

SEQ ID NO: 64770 - DNA, 120 bp, synthetic construct
  source 1..120: mol_type = other DNA
caggaaggctggagaagtctctcggtaggaaaggtggctggccctcctcttcctcgccaggctcctaggggtcgtgagtagagggatgtggacagaggggacaaatggcccagactttgt

SEQ ID NO: 64771 - DNA, 120 bp, synthetic construct
  source 1..120: mol_type = other DNA
tctttaccactaggtccctttctgcccagcatccactgcacatggttcaggctggccaccaaggctgcactcagagtctcagggactgggtcaacatggccccctgtggtggggttgcct

SEQ ID NO: 64772 - DNA, 120 bp, synthetic construct
  source 1..120: mol_type = other DNA
cacactttagtgctttccaatgctgcgtgctgcaggcaaacacagcgtgcactcagattaaactcagggagacttccctccatggagatggggtgtggcaggtgcaggctggtagaggga

SEQ ID NO: 64773 - DNA, 120 bp, synthetic construct
  source 1..120: mol_type = other DNA
tgtgtgtttctggacctcactcttggcggccacccgcgccctcacccacattctccctccgtggcctcgtggcctggtacacttgggctctgggctgctgtttccaggacccatgggaca

SEQ ID NO: 64774 - DNA, 120 bp, synthetic construct; identical to SEQ ID NO: 27533
  source 1..120: mol_type = other DNA

SEQ ID NO: 64775 - DNA, 120 bp, synthetic construct; identical to SEQ ID NO: 27534
  source 1..120: mol_type = other DNA

SEQ ID NO: 64776 - DNA, 120 bp, synthetic construct; identical to SEQ ID NO: 27550
  source 1..120: mol_type = other DNA

SEQ ID NO: 64777 - DNA, 120 bp, synthetic construct
  source 1..120: mol_type = other DNA
gaagaaactgaactcagggtcacacaagtgataaggggtggcagagatctgaagctgtgcgcggaggcgtggccagcgtgtgcgctccgacttctaaatccctactctggatattgaaga

SEQ ID NO: 64778 - DNA, 120 bp, synthetic construct; identical to SEQ ID NO: 7048
  source 1..120: mol_type = other DNA

SEQ ID NO: 64779 - DNA, 120 bp, synthetic construct
  source 1..120: mol_type = other DNA
ctgggctcaagtgatcctcctgccttggcctcccagagtgccgggattataggcatgagccactgtgcctggcctaattagctgacttaattagatcacgaagttaggcagtggtcttga

SEQ ID NO: 64780 - DNA, 120 bp, synthetic construct
  source 1..120: mol_type = other DNA
ttttccaccagaaaccttcacagcaacctccaaaggtatcattaaccccaatcagcagaaaacaaagaaagaaaaacaaggctcagagggtaaaacagctggcctaaggtcacatagctg

SEQ ID NO: 64781 - DNA, 120 bp, synthetic construct; identical to SEQ ID NO: 24614
  source 1..120: mol_type = other DNA

SEQ ID NO: 64782 - DNA, 120 bp, synthetic construct; identical to SEQ ID NO: 24615
  source 1..120: mol_type = other DNA

SEQ ID NO: 64783 - DNA, 120 bp, synthetic construct; identical to SEQ ID NO: 24616
  source 1..120: mol_type = other DNA

SEQ ID NO: 64784 - DNA, 120 bp, synthetic construct
  source 1..120: mol_type = other DNA
ctgagatcgcaccactgcactccagcctgggcaatagagagagactctgtctcaaaaaaaaaaaaaaaaagaattatgctaaatctactctgcctatgctctgtaagtggaacaacgact

SEQ ID NO: 64785 - DNA, 120 bp, synthetic construct
  source 1..120: mol_type = other DNA
atctgagaacgggcagactgcctcaagtgggtccctgacccccgagcagcctaactgggaggcaccccccagcaggggcacactgacacctcacacggcagggtattccaacagacctgc

SEQ ID NO: 64786 - DNA, 120 bp, synthetic construct
  source 1..120: mol_type = other DNA
aaagggaagcccatcagactaacagcggatctctcggcagaaaccctacaagccagaaaagagtgggggccaatattcaacattcttaaagaaaagaattttcaacccagaatttcatat

SEQ ID NO: 64787 - DNA, 120 bp, synthetic construct
  source 1..120: mol_type = other DNA
cagctctgcaccaagcggacctaatagacatctacagaactctccaccccaaatcaacagaatatacatttttttcagcaccacactacacctattccaaaattgaccacatacttggaa

SEQ ID NO: 64788 - DNA, 120 bp, synthetic construct
  source 1..120: mol_type = other DNA
acgaatccagcagcacatcaaaaagcttatccaccatgatcaagtgggcttcatccctgggatgcaaggctggttcaatatacgcaaatcaataaatgtaatccagcacataaacagaac

SEQ ID NO: 64789 - DNA, 120 bp, synthetic construct
  source 1..120: mol_type = other DNA
actatacgacaaggctacagtaaccaaaacagcatggtactgggaccaaaacagaaatatagatcaatggaacagaacagagccctcagaaataacgccacgtatctacaactatctgat

SEQ ID NO: 64790 - DNA, 120 bp, synthetic construct
  source 1..120: mol_type = other DNA
ttcatgttcttcgtagggacatggatgaaattggaaatcatcgttctcagtaaactatcgcaagaacaaaaaaccaaacaccgcgtattctcattcataggtgggaattgaacaatgaga

SEQ ID NO: 64791 - DNA, 120 bp, synthetic construct
  source 1..120: mol_type = other DNA
gcgccactgcactccagcctggggaacagagtgagactccatcaaaaaaaagagagagaaagaaaagagaaagaagagaagagaagagaagagaagagaagagaagagaagagaagagaa

SEQ ID NO: 64792 - DNA, 120 bp, synthetic construct; identical to SEQ ID NO: 24119
  source 1..120: mol_type = other DNA

SEQ ID NO: 64793 - DNA, 120 bp, synthetic construct
  source 1..120: mol_type = other DNA
tatatatacacacatatatatgtgcgtgtgtgtatatatatacacactttttttttgagatagcatctcactctgttgctcaggctggagtgcagtggcatgatcagggctcactgcagc

SEQ ID NO: 64794 - DNA, 120 bp, synthetic construct; identical to SEQ ID NO: 24118
  source 1..120: mol_type = other DNA

SEQ ID NO: 64795 - DNA, 120 bp, synthetic construct
  source 1..120: mol_type = other DNA
tgtctaatgattttatttatgtatttatttttgagatggagtttcactcttgtcacccagactggagtacagtggtacgatctcggctcactgtaacctctgcctcctgggttcaagtga

SEQ ID NO: 64796 - DNA, 120 bp, synthetic construct; identical to SEQ ID NO: 24120
  source 1..120: mol_type = other DNA

SEQ ID NO: 64797 - DNA, 120 bp, synthetic construct; identical to SEQ ID NO: 15751
  source 1..120: mol_type = other DNA

SEQ ID NO: 64798 - DNA, 120 bp, synthetic construct
  source 1..120: mol_type = other DNA
tcttttattcccacccccttcacaccctttctcccttagtccccaaagtacatggtgtcactcttatgcctttgcatcctcatagcttagctcccacttatgagtgagaatatatgatgt

SEQ ID NO: 64799 - DNA, 120 bp, synthetic construct
  source 1..120: mol_type = other DNA
tgggattacaggtgtgagccactgtgcctggcctgtttcctctattttctagaatagtttgtgaaggatcatcgttatgtcttcttcaggttgtttcatggaatttaccagtaaagccat

SEQ ID NO: 64800 - DNA, 120 bp, synthetic construct; identical to SEQ ID NO: 21799
  source 1..120: mol_type = other DNA

SEQ ID NO: 64801 - DNA, 120 bp, synthetic construct
  source 1..120: mol_type = other DNA
atccgccagctttggcttcccaaagtgctgggattacaggcgtgaactaccgcacctggcctttcattttcctttgttctttttttctctgttctttggcttccatatatatataatata

SEQ ID NO: 64802 - DNA, 120 bp, synthetic construct; identical to SEQ ID NO: 27137
  source 1..120: mol_type = other DNA

SEQ ID NO: 64803 - DNA, 120 bp, synthetic construct; identical to SEQ ID NO: 15711
  source 1..120: mol_type = other DNA

SEQ ID NO: 64804 - DNA, 120 bp, synthetic construct; identical to SEQ ID NO: 15709
  source 1..120: mol_type = other DNA

SEQ ID NO: 64805 - DNA, 120 bp, synthetic construct; identical to SEQ ID NO: 15708
  source 1..120: mol_type = other DNA

SEQ ID NO: 64806 - DNA, 120 bp, synthetic construct; identical to SEQ ID NO: 15709
  source 1..120: mol_type = other DNA

SEQ ID NO: 64807 - DNA, 120 bp, synthetic construct; identical to SEQ ID NO: 15710
  source 1..120: mol_type = other DNA

SEQ ID NO: 64808 - DNA, 120 bp, synthetic construct
  source 1..120: mol_type = other DNA
ccttggggaggggacagtgaggagggaaccgtggagaggggacagtgaggaagggacagtgaggacagatagcgttccctctcagtgaggagagcagggtaaggagggaacgattaggag

SEQ ID NO: 64809 - DNA, 120 bp, synthetic construct
  source 1..120: mol_type = other DNA
cggctccaaggtggtggccgccgtgggcgacgcggtgaagagcatcgacgacatcggcggcgccctgtccaagctgagcgagctgcacgcctacatcctgcgcgtggacccggtcaactt

SEQ ID NO: 64810 - DNA, 120 bp, synthetic construct; identical to SEQ ID NO: 13305
  source 1..120: mol_type = other DNA

SEQ ID NO: 64811 - DNA, 120 bp, synthetic construct; identical to SEQ ID NO: 13306
  source 1..120: mol_type = other DNA

SEQ ID NO: 64812 - DNA, 120 bp, synthetic construct
  source 1..120: mol_type = other DNA
aaaagtgctgagattacaggggtgagccactgtgcccagcctggtgtgtgttcctgtagtctgttgttccatacacaagtacacagatacacgtattttaaaagaaaatggatatcatat

SEQ ID NO: 64813 - DNA, 120 bp, synthetic construct; identical to SEQ ID NO: 13307
  source 1..120: mol_type = other DNA

SEQ ID NO: 64814 - DNA, 120 bp, synthetic construct; identical to SEQ ID NO: 13308
  source 1..120: mol_type = other DNA

SEQ ID NO: 64815 - DNA, 120 bp, synthetic construct; identical to SEQ ID NO: 13309
  source 1..120: mol_type = other DNA

SEQ ID NO: 64816 - DNA, 120 bp, synthetic construct; identical to SEQ ID NO: 13306
  source 1..120: mol_type = other DNA

SEQ ID NO: 64817 - DNA, 120 bp, synthetic construct
  source 1..120: mol_type = other DNA
cttatggaaaatgaatcagcagatatgcaatagaaccaaaagaaactccagaaatgaaaatatctgatgtggtggctcatgcctgtaatcccagcactttgggaggccaaggcagaagga

SEQ ID NO: 64818 - DNA, 120 bp, synthetic construct
  source 1..120: mol_type = other DNA
gtatatcattgttggacatttgggttggttcccagtctttgctattgtgaatagtgccacaataaacatacgtgtgcatgtgtctttatagcagcatgatttatagtcctttgggtatat

SEQ ID NO: 64819 - DNA, 120 bp, synthetic construct
  source 1..120: mol_type = other DNA
tatatctctgttttggtaccagtaacatgccgttttggttgctgtagccttgtagtatagtttgaagtcaggtagcgtgatgcctcccgctttgttcttttggcttaggattgacttggc

SEQ ID NO: 64820 - DNA, 120 bp, synthetic construct
  source 1..120: mol_type = other DNA
ttggttctgtttatatgctggattacatttattgatttgcgtacattgaaccagccttacatcccagggatgaagcccagttgatcatcttttcattagcaaattgagaaaaaaattatt

SEQ ID NO: 64821 - DNA, 120 bp, synthetic construct; identical to SEQ ID NO: 26552
  source 1..120: mol_type = other DNA

SEQ ID NO: 64822 - DNA, 120 bp, synthetic construct; identical to SEQ ID NO: 26553
  source 1..120: mol_type = other DNA

SEQ ID NO: 64823 - DNA, 120 bp, synthetic construct
  source 1..120: mol_type = other DNA
ctcaaacaaatttacaagaaaaaagcaaacaaccccatcaaaaagtgggcgaaggatacgaacagacacttctcaaaagaagacatttatgcagccaacagacacatgaaaaaatgctca

SEQ ID NO: 64824 - DNA, 120 bp, synthetic construct
  source 1..120: mol_type = other DNA
gaaaccatcattctcagcaaactatcgcaaggacaagaaaccaaacaccacatgttctcattcataggtgggaattgaacaatgagaacacgtggacacaggaaggggaacatcacacac

SEQ ID NO: 64825 - DNA, 120 bp, synthetic construct
  source 1..120: mol_type = other DNA
cctgagactttgctgaagttgcctatcaccttaaggagattttgggctgagatgatggggttttctagatatacaatcatgtcatctgcaaacagggacaatttgacttcctcttttcct

SEQ ID NO: 64826 - DNA, 120 bp, synthetic construct
  source 1..120: mol_type = other DNA
gctgcagagctgagttcaattcctggatatccttgttaactttctgtctcgttgatctgtttaatgttgacagtggggtgttaaagtctcccattattattgtgtgggagtctaagtctc

SEQ ID NO: 64827 - DNA, 120 bp, synthetic construct
  source 1..120: mol_type = other DNA
caacccagaatttcatatccagccaaactaagcttcataagtgaaggagaaataaaatcctttacagacaagcaaatgctgagagattttgtcaccaccaggcctgccctaaaagagctc

SEQ ID NO: 64828 - DNA, 120 bp, synthetic construct; identical to SEQ ID NO: 26554
  source 1..120: mol_type = other DNA

SEQ ID NO: 64829 - DNA, 120 bp, synthetic construct; identical to SEQ ID NO: 26555
  source 1..120: mol_type = other DNA

SEQ ID NO: 64830 - DNA, 120 bp, synthetic construct
  source 1..120: mol_type = other DNA
cctaggcattaccattcaggacataggcatgggcaaggacttcatgtctaaaacaccaaaagcaatggtaatgaaagtcagaattgacaaatgggatctaattaaactaaagagcttctg

SEQ ID NO: 64831 - DNA, 120 bp, synthetic construct
  source 1..120: mol_type = other DNA
aggacatctacaccgaaaacccatctgtacatcaacatcatcaaagaccaaaagtagataaaaccacaaagatggggaaaaaacagaacagaaaaactggaaactctaaaacgcagagcg

SEQ ID NO: 64832 - DNA, 120 bp, synthetic construct
  source 1..120: mol_type = other DNA
agaagagagtgggggccaatattcaacattcttaaagaaaagaattttcaacccagaatttcatagccagccaaactaagcttcataagtgaaggagaaataaaatactttatagacaag

SEQ ID NO: 64833 - DNA, 120 bp, synthetic construct
  source 1..120: mol_type = other DNA
caaactgtctctcagaccacggtgcaatcaaactagaactcaggattaagaatctcactcaaagccgctcaactacatggaaactgaacaacctgctcctgaatgactactgggtacata

SEQ ID NO: 64834 - DNA, 120 bp, synthetic construct
  source 1..120: mol_type = other DNA
aaaatcctcaataaaatactggcaaaacgaatccagcagcacatcaaaaagcttatccaccatgatcaagtgggcttcatccctgggatgcaaggctggttcaatatatgcaaatcaata

SEQ ID NO: 64835 - DNA, 120 bp, synthetic construct
  source 1..120: mol_type = other DNA
catatggaaccaaaaaagagcccgcatcgccaagtcaatcctaagccaaaagaacaaagctggaggcatcacactacctgacttcaaactatattacaaggctacagtaaccaaaacagc

SEQ ID NO: 64836 - DNA, 120 bp, synthetic construct
  source 1..120: mol_type = other DNA
ccaaatgactataaatcatgctgctataaagacacatgcacacgtatgtctattgcggcattattcacaatagcaaagacttggaaccaacccaaatgtccaacaatgatagactggatt

SEQ ID NO: 64837 - DNA, 120 bp, synthetic construct
  source 1..120: mol_type = other DNA
cccaaatgtccaacaatgatagactggattaagaaaatgtggcacatattcaccgtggaatactatgtagccataaaaaatgatgagttcatgtactttgtagggacatggatgaaattg

SEQ ID NO: 64838 - DNA, 120 bp, synthetic construct
  source 1..120: mol_type = other DNA
acctcccagtaggggcagactgacacctcacagggctggctacttctctgacacaaaaactccagaggaacgatcagacagcagaatttgtggttcacgaaaatctgctgttctgcagcc

SEQ ID NO: 64839 - DNA, 120 bp, synthetic construct
  source 1..120: mol_type = other DNA
aaagatactccttgagaagagcaactccaagacacataattgtcagattcaccaaagttgaaatgaaggaaaaaatgttcagggcagccagagagaaaggtcggattacccacaaaggga

SEQ ID NO: 64840 - DNA, 120 bp, synthetic construct
  source 1..120: mol_type = other DNA
cgaatccagcagcacatctaaaaggttatccaccgcgatcaagtgggcttcatccctgggatgcaaggctggttcaatatatacaaatcaataaatgtaatccagcaaataaacagaacc

SEQ ID NO: 64841 - DNA, 120 bp, synthetic construct
  source 1..120: mol_type = other DNA
tgataccaaaacagagatatagatcaatggaacagaacagagccttcagaaataatgccgcatatctacaactatctgatctttgacaaacctgagaaaaacaagcaatggggaaaggat

SEQ ID NO: 64842 - DNA, 120 bp, synthetic construct
  source 1..120: mol_type = other DNA
gtggcacatatacaccatggaatactatgcagccataaaaatgatgagttcatgtcctttgtagggacatggatgaaattggaaatcatcattctcagtaaactatcggaaggacaaaaa

SEQ ID NO: 64843 - DNA, 120 bp, synthetic construct
  source 1..120: mol_type = other DNA
gaggcgaaggttgcagtgagccaagatagcaccatttcactccagcctgggtgacagtgagagactccatctcaaaaaaaaaaatatatatatatatgtacacacacacatacacacaca

SEQ ID NO: 64844 - DNA, 120 bp, synthetic construct
  source 1..120: mol_type = other DNA
gaaagttgaactatactatagtttgtcgacagcagtgtgggatttctctaagaacttaaaacaggatcaccatttgactctggaatcctattattcagtatatactcaaaggaatggaat

SEQ ID NO: 64845 - DNA, 120 bp, synthetic construct
  source 1..120: mol_type = other DNA
aaaggacatgcacaccaaaaacccatctgtacatcaccatcatcaaagaacaaaagtagataaaaccacaaagatggggaaaaaacagagcagaaaaactggaaactctaaaaagcagag

SEQ ID NO: 64846 - DNA, 120 bp, synthetic construct
  source 1..120: mol_type = other DNA
actctacaagtcagaagagagtgggggccaatattcaacattcttaaagaaaagaattttcaacccagaatttcatatccagccaaactaagcttcataagtgaaggagaaataaaatcc

SEQ ID NO: 64847 - DNA, 120 bp, synthetic construct; identical to SEQ ID NO: 26550
  source 1..120: mol_type = other DNA

SEQ ID NO: 64848 - DNA, 120 bp, synthetic construct; identical to SEQ ID NO: 26551
  source 1..120: mol_type = other DNA

SEQ ID NO: 64849 - DNA, 120 bp, synthetic construct
  source 1..120: mol_type = other DNA
ccacctccccccaccccacaacagtccccagagtgtgatgttccccttcctgtgtccatgagttctcattgttcaattcccacctatgagtgagaatatgcggtgtttggttttttgttc

SEQ ID NO: 64850 - DNA, 120 bp, synthetic construct
  source 1..120: mol_type = other DNA
agttttctcagcaccatttattaaatagggaattctttccccattgcttgtttttctcaggtttgtcaaagatcagatagttgtagatatgtggcattatttctgagggctctgttctgt

SEQ ID NO: 64851 - DNA, 120 bp, synthetic construct
  source 1..120: mol_type = other DNA
gtcaaaggcattttctgcatctattgagataatcatgtggttttggtctttggttctgtttatatgctggattacatttattgatttgcgtatattgaaccagccttgcatcccagggat

SEQ ID NO: 64852 - DNA, 120 bp, synthetic construct
  source 1..120: mol_type = other DNA
tcgtgatgttagggtgtaaattttggatctttcctgctttctcttgtgggcatttagtgcataaatttccctctacacactgctttgaatgtgtcccagagattctggtatactctgtct

SEQ ID NO: 64853 - DNA, 120 bp, synthetic construct
  source 1..120: mol_type = other DNA
ctctttatccaattcgccagtctgtgtcttttaattggagcatttagtacatttacatgaatttgcagcagctggtactggttgttcctttccatgtttagcacttccttcaggagctct

SEQ ID NO: 64854 - DNA, 120 bp, synthetic construct
  source 1..120: mol_type = other DNA
ttttccgtccagcttccttccgttgctggtgaggagctgcgttcctttggaggaggagaggtgctctgctttttagagtttccagtttttctgctgttttttccccatctttgtggtttt

SEQ ID NO: 64855 - DNA, 120 bp, synthetic construct
  source 1..120: mol_type = other DNA
ccattaactcgtcatttacattaggtatatctcctaatgctttccctcccctctcccctcaccccacaacaggccccggtgtgtgatgttccccttcctgtgtccaagtgttctcattgt

SEQ ID NO: 64856 - DNA, 120 bp, synthetic construct; identical to SEQ ID NO: 64819
  source 1..120: mol_type = other DNA

SEQ ID NO: 64857 - DNA, 120 bp, synthetic construct
  source 1..120: mol_type = other DNA
actcaagggtctctgtccagggcccacaggcgacccagcaagggctcctgtgacctttagaaacaccctttcgtcgtggaagtcttcaaacctcacagaaagcaaggaggcgctggccgt

SEQ ID NO: 64858 - DNA, 120 bp, synthetic construct; identical to SEQ ID NO: 19320
  source 1..120: mol_type = other DNA

SEQ ID NO: 64859 - DNA, 120 bp, synthetic construct; identical to SEQ ID NO: 19321
  source 1..120: mol_type = other DNA

SEQ ID NO: 64860 - DNA, 120 bp, synthetic construct; identical to SEQ ID NO: 19322
  source 1..120: mol_type = other DNA

SEQ ID NO: 64861 - DNA, 120 bp, synthetic construct; identical to SEQ ID NO: 19323
  source 1..120: mol_type = other DNA

SEQ ID NO: 64862 - DNA, 120 bp, synthetic construct
  source 1..120: mol_type = other DNA
cttatggaggggaggactcgggccctttcagaggtggggacccaggcgcccccttatggaggggaggactcgggccctttcagaggtggggacccaggcgcccccttatggaggggagga

SEQ ID NO: 64863 - DNA, 120 bp, synthetic construct
  source 1..120: mol_type = other DNA
gagtggggtccgcagcggacccagccctgcctcccccctgcaggagatcgtcaacttcaactgccggaagctggtggcctccatgccgctgttcgccaacgccgaccccaacttcgtcac

SEQ ID NO: 64864 - DNA, 120 bp, synthetic construct
  source 1..120: mol_type = other DNA
ctgtatatggcaggtactcaatatccatactataggccagagatgctacatatgtgcttattgtatacagtaggtggtaaatgcatgcttgctctacacggcaagcactgtgtgcgcacc

SEQ ID NO: 64865 - DNA, 120 bp, synthetic construct
  source 1..120: mol_type = other DNA
ccgatccccaaatctgggcctgagcctaagaggaggcaccttgggacgctgctccagcctacggtcaacaagttctcccttcgggtgttcggcagccacaaagcagtggaaatcgagcag

SEQ ID NO: 64866 - DNA, 120 bp, synthetic construct
  source 1..120: mol_type = other DNA
acctaacctggggaactaaagaagcagagaggaagaggtgtgaatctggagcctcgaaatacagttgtagacccagacattatcttgaatccacatatatacacactccctctatgtctc

SEQ ID NO: 64867 - DNA, 120 bp, synthetic construct
  source 1..120: mol_type = other DNA
aagcagcagccttttcagaaatctggggataaagagtgagtgagtcataataccaactagtgcctgtaccacactgtcacatctattgtctccatgtaaatgttttcagcaatgctgtga

SEQ ID NO: 64868 - DNA, 120 bp, synthetic construct
  source 1..120: mol_type = other DNA
gcgtgagccaccacgcccagctatttttttttttttttttttttttttttttttttgagacagagtttcactcttgttgcccaggctggagtgcaatggcgcaatctcggctcatggcaa

SEQ ID NO: 64869 - DNA, 120 bp, synthetic construct
  source 1..120: mol_type = other DNA
cccaaagtgctgggattacaggcatgagtcaccaggcctggcctaatttttaacttttgtagagataggatcttactatgttgcccaggctggtcttgaactcctggactcaagtgatcc

SEQ ID NO: 64870 - DNA, 120 bp, synthetic construct
  source 1..120: mol_type = other DNA
ttgacctcatctcttctatccctgtggattacatcttcctagtggtggagctggagccacggttggacgctgaggtctacaaaacggcacgggccctacgcatcgttcgcttcaccaaga

SEQ ID NO: 64871 - DNA, 120 bp, synthetic construct
  source 1..120: mol_type = other DNA
ctgggcagcttgtgcaatagatttgtttgattctctgctgtgacacttactatgtggttctgggcacatgactgacctcagctttcctatctataagatgagagaaataagaaactgctt

SEQ ID NO: 64872 - DNA, 120 bp, synthetic construct
  source 1..120: mol_type = other DNA
ctcagcatgatcgtaggtgccacatgctacgccatgttcatcggccatgccacggcactcatccagtccctggactcttcccggcgtcagtaccaggagaaggtcagcagggacaggaga

SEQ ID NO: 64873 - DNA, 120 bp, synthetic construct
  source 1..120: mol_type = other DNA
ctgtccaggagatcattaacttcacctgtcggggcctggtggcccacatgccgctgtttgcccatgccgaccccagcttcgtcactgcagttctcaccaagctgcgctttgaggtcttcc

SEQ ID NO: 64874 - DNA, 120 bp, synthetic construct
  source 1..120: mol_type = other DNA
gagctctgtagtttttaaagcttctcaggagattctaatgcacagccaggttgcaaactactgggccagagggccttttagaacccttagacagtgaaatccaaggatcctatgagatga

SEQ ID NO: 64875 - DNA, 120 bp, synthetic construct
  source 1..120: mol_type = other DNA
agggctccagggtcatatcccaatccattcagtcccaacaaatgctccctaacaggactttcaacactgtggcccactgtccctatccctcagcatgtccttcccaggagagatagcatc

SEQ ID NO: 64876 - DNA, 120 bp, synthetic construct
  source 1..120: mol_type = other DNA
gggtctccagctttctgccaacatgtaaaacctttgagtacatccagccttagttcttggggtgcagtagtatgtacccaagggcagatgcctcttggggaaggccatggggacctgaaa

SEQ ID NO: 64877 - DNA, 120 bp, synthetic construct
  source 1..120: mol_type = other DNA
ttgtatttattcatttactaactttatgtgttaccaattaattttgtttacccattcctttatccatccctcccctccttttcaggtaaggagacaggaggagtaggaggaggcagggcc

SEQ ID NO: 64878 - DNA, 120 bp, synthetic construct; identical to SEQ ID NO: 22197
  source 1..120: mol_type = other DNA

SEQ ID NO: 64879 - DNA, 120 bp, synthetic construct; identical to SEQ ID NO: 22198
  source 1..120: mol_type = other DNA

SEQ ID NO: 64880 - DNA, 120 bp, synthetic construct; identical to SEQ ID NO: 22199
  source 1..120: mol_type = other DNA

SEQ ID NO: 64881 - DNA, 120 bp, synthetic construct; identical to SEQ ID NO: 22200
  source 1..120: mol_type = other DNA

SEQ ID NO: 64882 - DNA, 120 bp, synthetic construct; identical to SEQ ID NO: 22201
  source 1..120: mol_type = other DNA

SEQ ID NO: 64883 - DNA, 120 bp, synthetic construct
  source 1..120: mol_type = other DNA
ctctccacacaatgtacacacctctacaatgtacacaccactctccacacaatgtacacaccactctacaatgtacacaccactctccacacaatgtacacaccactctacaatgtacac

SEQ ID NO: 64884 - DNA, 120 bp, synthetic construct; identical to SEQ ID NO: 22202
  source 1..120: mol_type = other DNA

SEQ ID NO: 64885 - DNA, 120 bp, synthetic construct; identical to SEQ ID NO: 22182
  source 1..120: mol_type = other DNA

SEQ ID NO: 64886 - DNA, 120 bp, synthetic construct; identical to SEQ ID NO: 22183
  source 1..120: mol_type = other DNA

SEQ ID NO: 64887 - DNA, 120 bp, synthetic construct; identical to SEQ ID NO: 22184
  source 1..120: mol_type = other DNA

SEQ ID NO: 64888 - DNA, 120 bp, synthetic construct; identical to SEQ ID NO: 22185
  source 1..120: mol_type = other DNA

SEQ ID NO: 64889 - DNA, 120 bp, synthetic construct; identical to SEQ ID NO: 22186
  source 1..120: mol_type = other DNA

SEQ ID NO: 64890 - DNA, 120 bp, synthetic construct; identical to SEQ ID NO: 22187
  source 1..120: mol_type = other DNA

SEQ ID NO: 64891 - DNA, 120 bp, synthetic construct; identical to SEQ ID NO: 22188
  source 1..120: mol_type = other DNA

SEQ ID NO: 64892 - DNA, 120 bp, synthetic construct; identical to SEQ ID NO: 22189
  source 1..120: mol_type = other DNA

SEQ ID NO: 64893 - DNA, 120 bp, synthetic construct; identical to SEQ ID NO: 22190
  source 1..120: mol_type = other DNA

SEQ ID NO: 64894 - DNA, 120 bp, synthetic construct; identical to SEQ ID NO: 22191
  source 1..120: mol_type = other DNA

SEQ ID NO: 64895 - DNA, 120 bp, synthetic construct; identical to SEQ ID NO: 22192
  source 1..120: mol_type = other DNA

SEQ ID NO: 64896 - DNA, 120 bp, synthetic construct; identical to SEQ ID NO: 22193
  source 1..120: mol_type = other DNA

SEQ ID NO: 64897 - DNA, 120 bp, synthetic construct; identical to SEQ ID NO: 22194
  source 1..120: mol_type = other DNA

SEQ ID NO: 64898 - DNA, 120 bp, synthetic construct; identical to SEQ ID NO: 22195
  source 1..120: mol_type = other DNA

SEQ ID NO: 64899 - DNA, 120 bp, synthetic construct; identical to SEQ ID NO: 22196
  source 1..120: mol_type = other DNA

SEQ ID NO: 64900 - DNA, 120 bp, synthetic construct
  source 1..120: mol_type = other DNA
gcaatcattaaaaagtcaggaaacaacaggtgctggagaggatgtggagaaataggaacacttttacactgttgctgggactgtaaactagttcaaccattgtggaaatcagtgtggcga

SEQ ID NO: 64901 - DNA, 120 bp, synthetic construct
  source 1..120: mol_type = other DNA
attcatttttgcaatcggcccatttctgtttgtctgctcagacgcagctccaggcatctgcacaagccagatggaggaggctgctatttctagaaaaaaaaaaaaaaaaaaaaagagagg

SEQ ID NO: 64902 - DNA, 120 bp, synthetic construct; identical to SEQ ID NO: 34144
  source 1..120: mol_type = other DNA

SEQ ID NO: 64903 - DNA, 120 bp, synthetic construct
  source 1..120: mol_type = other DNA
actcctgacctcaggtgatccacccgccttggcctcccaaagtgttgtttttacaggtgtgagccactatgcccggccaccatttagttatttttaatataatttctatttattgatatt

SEQ ID NO: 64904 - DNA, 120 bp, synthetic construct
  source 1..120: mol_type = other DNA
aataaccagctaacatcataatgacaggatcaaattcacacataacaatattaactttaaatgtaaatggactcaatgctccaattaaaagacacagactggcaaattggataaagaatc

SEQ ID NO: 64905 - DNA, 120 bp, synthetic construct
  source 1..120: mol_type = other DNA
ccacaagagaaagtaggaaagatccaaaattgacaccctaacatcacaattaaaagaactagaaaagcaagagcaaacacattcaaaagctagcagaaggcaagaaataactaaaatcag

SEQ ID NO: 64906 - DNA, 120 bp, synthetic construct
  source 1..120: mol_type = other DNA
attcaacacccttcatgctaaaaactctcaataaattaggtattgatgggacgtatctcaaaataataagagctatctatgacaaacccacagccaatatcatactgaatgggcaaaaac

SEQ ID NO: 64907 - DNA, 120 bp, synthetic construct
  source 1..120: mol_type = other DNA
tagagctaaaaccataaaaaccctagaggaaaacctaggcattaccattcaggacataggcatgggcaaggacttcatgtctaaaacaccaaaagcaatggcaacaaaagccaaaattga

SEQ ID NO: 64908 - DNA, 120 bp, synthetic construct; identical to SEQ ID NO: 34145
  source 1..120: mol_type = other DNA

SEQ ID NO: 64909 - DNA, 120 bp, synthetic construct
  source 1..120: mol_type = other DNA
caccaaaagcaatggcaacaaaagccaaaattgacaaatgggatctaattaaactaaagagcttctgtacagcaaaagaaactaccatcagagtgaacaggcaacctatagaatgggaaa

SEQ ID NO: 64910 - DNA, 120 bp, synthetic construct; identical to SEQ ID NO: 34146
  source 1..120: mol_type = other DNA

SEQ ID NO: 64911 - DNA, 120 bp, synthetic construct; identical to SEQ ID NO: 6653
  source 1..120: mol_type = other DNA

SEQ ID NO: 64912 - DNA, 120 bp, synthetic construct; identical to SEQ ID NO: 34148
  source 1..120: mol_type = other DNA

SEQ ID NO: 64913 - DNA, 120 bp, synthetic construct
  source 1..120: mol_type = other DNA
caaaattggcataggagggacgtaccttaaggtaataaaaggtaataatctacaacaaacccacggccaacattatactgaacgggcaaaagttgaaagcattccccccaagaactggaa

SEQ ID NO: 64914 - DNA, 120 bp, synthetic construct
  source 1..120: mol_type = other DNA
gggaagtgaggagcgtctctgcctggccgcccatcgtctgggatgtgaggagcccctctgccccgccgcccagtctgggaagtgaggagtgcctcttcccggccgccatcccatctagga

SEQ ID NO: 64915 - DNA, 120 bp, synthetic construct
  source 1..120: mol_type = other DNA
ccgtgtagagggaagtagacgtaggagactccattttgttctgtactaagaaaaattcttctgccttgggatgctgttaatctataaccttacccccaaccccgtgctctctgaaacatg

SEQ ID NO: 64916 - DNA, 120 bp, synthetic construct
  source 1..120: mol_type = other DNA
tgtgtatatacacacacgtgtatatgtgtgcatatgtgtatatatacacacacacgtgtatatgtgtgcgtatgtgtacacacacacacgtgtatgtgtgcgtatgtgtacacacacaca

SEQ ID NO: 64917 - DNA, 120 bp, synthetic construct
  source 1..120: mol_type = other DNA
gtctctgcaggtgagatgggtctcctgaatacagcacactgatggatcttgactcattgtccaatttgccagtctgtgtcttttaattggggcagttagcccatttaaatttaaggttaa

SEQ ID NO: 64918 - DNA, 120 bp, synthetic construct
  source 1..120: mol_type = other DNA
atttggctctctgtctgttgttggtgtataagaatgcttgtgatttttacacattgattttgtatcctgagactttgctgaagttgcttatcagcttaaggagattttgggctgagacaa

SEQ ID NO: 64919 - DNA, 120 bp, synthetic construct
  source 1..120: mol_type = other DNA
tgctatccctacccccccaaccccacaacagaccccagagtgcgatgttccccttcctgtgtccatgtgttctcattgttcaattcccacctatgagtgagaatatgcggtgtttggttt

SEQ ID NO: 64920 - DNA, 120 bp, synthetic construct
  source 1..120: mol_type = other DNA
taaatagggaatcctttccccattgcttgtttttctcaggtttgtcaaagatcagatagttgtagatatgtggcattatttctgagggctctgttctgttccattgatctatatctctgt

SEQ ID NO: 64921 - DNA, 120 bp, synthetic construct
  source 1..120: mol_type = other DNA
ttggaatacgtcccatcaatacctaatttattgggagtttttagcatgaaggttgttgaattttgtcagaggccttttctgcatctattgagattatcatgtggcttttgtctttggttc

SEQ ID NO: 64922 - DNA, 120 bp, synthetic construct
  source 1..120: mol_type = other DNA
gtgtcaattttggatctttcctgctttctcttgtgggcatttagtgctgtaaattttcctctacatactgctttgaatgcttcccagagattcgggtatgttgtgtctttgttctcgttg

SEQ ID NO: 64923 - DNA, 120 bp, synthetic construct
  source 1..120: mol_type = other DNA
tgttatgtgtgaatttgatcctgtcattatgatgttagctggtgattttgctcgttcgttgatgcagtttcttcctagtctcgatggtctttacattttggcatgattttgcagtggctg

SEQ ID NO: 64924 - DNA, 120 bp, synthetic construct
  source 1..120: mol_type = other DNA
gaactgagttcctttggaggaggagaggcactctgcgttttagagtttccagtttttctgctctgttttttccccatctttgtggttttatctacttttggtctttgatgatggtgatgt

SEQ ID NO: 64925 - DNA, 120 bp, synthetic construct; identical to SEQ ID NO: 28287
  source 1..120: mol_type = other DNA

SEQ ID NO: 64926 - DNA, 120 bp, synthetic construct; identical to SEQ ID NO: 28288
  source 1..120: mol_type = other DNA

SEQ ID NO: 64927 - DNA, 120 bp, synthetic construct
  source 1..120: mol_type = other DNA
tggggagacagggtggatgggaatgcgctgagacacacccaggagaaggggtggggccctgggcatgaatctgaggggcatcttgctccagacttggaatcttcaggcttttgggcacct

SEQ ID NO: 64928 - DNA, 120 bp, synthetic construct; identical to SEQ ID NO: 19436
  source 1..120: mol_type = other DNA

SEQ ID NO: 64929 - DNA, 120 bp, synthetic construct
  source 1..120: mol_type = other DNA
atacctgtagtatatgaggggtttctgagccaaggaaggattatttcttttttttctcttttttttttttggcgggtgggggatggagtttcactcttgtcacccaggctggagtgtgat

SEQ ID NO: 64930 - DNA, 120 bp, synthetic construct
  source 1..120: mol_type = other DNA
tgtgtccatgtgtatggtttgtggtatgtgtgttgtctgtgtgttatctgtgtatggtgtgtgttttgtttgtgtgtgttgtctgtgtggtgtgtgtgtctggtatgtgtgttgtctgtg

SEQ ID NO: 64931 - DNA, 120 bp, synthetic construct
  source 1..120: mol_type = other DNA
agatgtccccactgggaaacccgggcttctgatgtacccggttcactgaggaagatgaggggaagggccagcagctgcccggcgtgcccagggccgcctgggatcccggttttcacttgg

SEQ ID NO: 64932 - DNA, 120 bp, synthetic construct; identical to SEQ ID NO: 15592
  source 1..120: mol_type = other DNA

SEQ ID NO: 64933 - DNA, 120 bp, synthetic construct; identical to SEQ ID NO: 15593
  source 1..120: mol_type = other DNA

SEQ ID NO: 64934 - DNA, 120 bp, synthetic construct; identical to SEQ ID NO: 15594
  source 1..120: mol_type = other DNA

SEQ ID NO: 64935 - DNA, 120 bp, synthetic construct
  source 1..120: mol_type = other DNA
caaaagaacaaaatcatgtcctctgcagcaacatggatgcagctggaggccattatcttaagcaaattaatgcaggaacgaaaaacaaaataccgcatgttcttacttgtaagtgggagc

SEQ ID NO: 64936 - DNA, 120 bp, synthetic construct; identical to SEQ ID NO: 23421
  source 1..120: mol_type = other DNA

SEQ ID NO: 64937 - DNA, 120 bp, synthetic construct; identical to SEQ ID NO: 23422
  source 1..120: mol_type = other DNA

SEQ ID NO: 64938 - DNA, 120 bp, synthetic construct; identical to SEQ ID NO: 23423
  source 1..120: mol_type = other DNA

SEQ ID NO: 64939 - DNA, 120 bp, synthetic construct
  source 1..120: mol_type = other DNA
tgatcaagagggcttcatccctgggatgaaggctggtttaatatacgcaaatcaacaaatgtaatccagcatataaacagaaccaaagacaaaaaccacatgattatctcaatagatgca

SEQ ID NO: 64940 - DNA, 120 bp, synthetic construct
  source 1..120: mol_type = other DNA
acagtaaccaaaacagcatgggactggtaccaaaacagaacagaacagagcccttggaaataacgccacatatctacaactatctgatctttgactaacctgagaaaaacaagcaatggg

SEQ ID NO: 64941 - DNA, 120 bp, synthetic construct
  source 1..120: mol_type = other DNA
tataaatcatgctgctataaagacacatgcacatgtatgtttattgcggcattattcacaatagcaaaggcttggaaccaacccaaatgtccaaaacgatagactggattaagaaaatgt

SEQ ID NO: 64942 - DNA, 120 bp, synthetic construct; identical to SEQ ID NO: 34266
  source 1..120: mol_type = other DNA

SEQ ID NO: 64943 - DNA, 120 bp, synthetic construct
  source 1..120: mol_type = other DNA
ctagaaataccatttgacccagccatcccattactgggtatatacccaaaggattataaatcatgctgctataaagacacatgcacatgtatgttaattgcggcactattcacaatagca

SEQ ID NO: 64944 - DNA, 120 bp, synthetic construct; identical to SEQ ID NO: 34267
  source 1..120: mol_type = other DNA

SEQ ID NO: 64945 - DNA, 120 bp, synthetic construct
  source 1..120: mol_type = other DNA
ctgatctttattatttctttccttctactaattttggatctggcttgttcttgattttctacttacttaagaaaaatgcttgccattctaactggtgtgagatgatatctcatagtggtt

SEQ ID NO: 64946 - DNA, 120 bp, synthetic construct
  source 1..120: mol_type = other DNA
gaacaaaaaaccaaacaccgcatattctcactcataggtgggaattgaacaatgagatcacatggacacaggaaggggaatgtcacactctggggactgtggtggggtggggggaggggg

SEQ ID NO: 64947 - DNA, 120 bp, synthetic construct; identical to SEQ ID NO: 14476
  source 1..120: mol_type = other DNA

SEQ ID NO: 64948 - DNA, 120 bp, synthetic construct; identical to SEQ ID NO: 14477
  source 1..120: mol_type = other DNA

SEQ ID NO: 64949 - DNA, 120 bp, synthetic construct
  source 1..120: mol_type = other DNA
attgactaagtcaatcctggcataactgcagaccaggccctggaatgagcaacccaccagcattatctgcatttctaggaacttgggctagaaggggaggaatggggttggaagggttag

SEQ ID NO: 64950 - DNA, 120 bp, synthetic construct; identical to SEQ ID NO: 14478
  source 1..120: mol_type = other DNA

SEQ ID NO: 64951 - DNA, 120 bp, synthetic construct
  source 1..120: mol_type = other DNA
attgattatttattgaatggtagtttcatggagtttttcgtctttttttttttttttgcgagggagtctcactctgtcgcccaggctggagtgcagtggtgtgatcttggctcactgcaa

SEQ ID NO: 64952 - DNA, 120 bp, synthetic construct
  source 1..120: mol_type = other DNA
ctcacgctcataatcctagcactttgggaggccaaggtgggcagatcacaaggtcaggagattgaaaccatcctagctaacacagtaaaaccccatctctactaaaacatacaaaaaaat

SEQ ID NO: 64953 - DNA, 120 bp, synthetic construct
  source 1..120: mol_type = other DNA
gatcccaggagacggaggtttcagtgagctgagaccgcgccactgcactccagcctggggggacagagcaagactccaaaagttctggaaatggataatggtgatagttgtacaacaatg

SEQ ID NO: 64954 - DNA, 120 bp, synthetic construct
  source 1..120: mol_type = other DNA
agtaacaaaatgtcttataccgggtaatttataaacaacagaaatgtattgctcacagttttggaggctaggaaatccaagatcaaggcaccagcagatctggtgtctgctgagggcctg

SEQ ID NO: 64955 - DNA, 120 bp, synthetic construct
  source 1..120: mol_type = other DNA
tcctttatgagagtggccaagatcccactgaaaccttccctatcaactttataaaattaatcaggggagaagggaggggcgaaatggaaatcagcccagcttgcagcacacacagcattg

SEQ ID NO: 64956 - DNA, 120 bp, synthetic construct
  source 1..120: mol_type = other DNA
tctcttgtttaaattcttttaaaccaagaagacaagaaccgaggtgtcacatcagccgccaaagaaactgctgatgccagcctgaatgaaagaccccacaggaactcactcactaaagaa

SEQ ID NO: 64957 - DNA, 120 bp, synthetic construct; identical to SEQ ID NO: 14484
  source 1..120: mol_type = other DNA

SEQ ID NO: 64958 - DNA, 120 bp, synthetic construct; identical to SEQ ID NO: 14485
  source 1..120: mol_type = other DNA

SEQ ID NO: 64959 - DNA, 120 bp, synthetic construct; identical to SEQ ID NO: 14478
  source 1..120: mol_type = other DNA

SEQ ID NO: 64960 - DNA, 120 bp, synthetic construct
  source 1..120: mol_type = other DNA
ttgattatttattgaatggtagtttcatggagtttttggtcttttttcttttttgagacagtctcactcagttgcctaggctggagtgcagtggtgcgatctcggctcactgcaacctgt

SEQ ID NO: 64961 - DNA, 120 bp, synthetic construct
  source 1..120: mol_type = other DNA
gacccgattcagtgatccacctgcctcagcttcccaaagtgctaggattacaggtgaaagccactgcgcctgacctactttagttattcttaatctgaaaagtttattacaacacaaatt

SEQ ID NO: 64962 - DNA, 120 bp, synthetic construct; identical to SEQ ID NO: 14270
  source 1..120: mol_type = other DNA

SEQ ID NO: 64963 - DNA, 120 bp, synthetic construct; identical to SEQ ID NO: 20465
  source 1..120: mol_type = other DNA

SEQ ID NO: 64964 - DNA, 120 bp, synthetic construct; identical to SEQ ID NO: 18343
  source 1..120: mol_type = other DNA

SEQ ID NO: 64965 - DNA, 120 bp, synthetic construct; identical to SEQ ID NO: 18344
  source 1..120: mol_type = other DNA

SEQ ID NO: 64966 - DNA, 120 bp, synthetic construct
  source 1..120: mol_type = other DNA
tgccctttctttctcttgcctgactgccctggccaaaatttccaataatatgttgaataagagtagtgagagagagcatccttgtcttgtgtcagttttaaaagggaatgcttccagctt

SEQ ID NO: 64967 - DNA, 120 bp, synthetic construct
  source 1..120: mol_type = other DNA
caacgtaccagaatctctgggacacagctaaagcagtgttcagagggaaatttatagcaccaaatgcccacaggagaaagtgggaaagatctaagattgacaccctaacatcataattaa

SEQ ID NO: 64968 - DNA, 120 bp, synthetic construct
  source 1..120: mol_type = other DNA
tgagatgggtctcctgaatacagcacaccaatgggtcttgactctttttccaatttgctagtgtgtgtctttcaactggggcatttagcccatttacatttaaggttaatattgttatgt

SEQ ID NO: 64969 - DNA, 120 bp, synthetic construct
  source 1..120: mol_type = other DNA
ttagttcccttgctagtgaggagttgtgatcctttggaggggaagaggcgttctggtttttggaattttcagcctttttgcactggtttttcttcatcttcgtggatttatctatgtttg

SEQ ID NO: 64970 - DNA, 120 bp, synthetic construct
  source 1..120: mol_type = other DNA
ggattcaagcacaaaactgggtggccatttgagcagacaccgaacttgctgcaggaatttttttttttataacccagtggcgcctagaacaccagtgacagactgcctcctcaagtgggt

SEQ ID NO: 64971 - DNA, 120 bp, synthetic construct
  source 1..120: mol_type = other DNA
gtgttttccaacttggttccattcctcccgtcactttcagatacaccaaaaaaacgtaggtttggtctcttcacatagtcccacatttcttggaggctttgttcgttccttttcattcct

SEQ ID NO: 64972 - DNA, 120 bp, synthetic construct
  source 1..120: mol_type = other DNA
ccactatcattgtgtgggagtctaagtctctttgtaggtctctaagaattgctttatgactctgggtactcctgtattgggtgcatatgtatttaggatagttaattcttcttgttgcat

SEQ ID NO: 64973 - DNA, 120 bp, synthetic construct
  source 1..120: mol_type = other DNA
gtggaatggtaacagctcctctttgtatctctggtagaattcacctgtcaatctgtctggtcctgggctttttttggttggtaggctattaattactgcctccatttcagaacttgttat

SEQ ID NO: 64974 - DNA, 120 bp, synthetic construct; identical to SEQ ID NO: 11020
  source 1..120: mol_type = other DNA

SEQ ID NO: 64975 - DNA, 120 bp, synthetic construct
  source 1..120: mol_type = other DNA
agatggtatctcattgtggttttgatttgcatttctctgatggccagtgatgatcattttttcatgtgttttttggcagcataaatgtcttcttttgagaagtgtctgctcatatccttt

SEQ ID NO: 64976 - DNA, 120 bp, synthetic construct
  source 1..120: mol_type = other DNA
tattggtgtataagaatgcttgtgatttttgtacattgattttgtatcctgagactttgctgaagttgcttatcagcttaaggagattttgggctgagacaatagggttttctagatata

SEQ ID NO: 64977 - DNA, 120 bp, synthetic construct
  source 1..120: mol_type = other DNA
gtaagctattgattattgccacaatttcagatcctgttattggcctattcagagattcaaattcttcctggtttagtcttggcagagtgtatgtgtcgaggaatttatccatttcttcta

SEQ ID NO: 64978 - DNA, 120 bp, synthetic construct
  source 1..120: mol_type = other DNA
ttcaattcctgggtatccttgttaactttctgtttcgttgatctgtctaatgttgacagtggggtgttaaagtctcccattattaatgtgtgggagtctaagtctctttgtaggtcactc

SEQ ID NO: 64979 - DNA, 120 bp, synthetic construct
  source 1..120: mol_type = other DNA
acctgaaagtgacggggagaatggaaccaagttggaaaacactctgcaggatattatccaggagaacttccccaatctagcaaggcaggccaacattcagattcaggaaatacagagaac

SEQ ID NO: 64980 - DNA, 120 bp, synthetic construct
  source 1..120: mol_type = other DNA
tggttttgatttgcatttctctgatggccaatgatgatgagcatttttttcatgtgtctgttggctgcataaatgtcttcttttgagaagtgtctgttcatatccttcacccacttgttg

SEQ ID NO: 64981 - DNA, 120 bp, synthetic construct
  source 1..120: mol_type = other DNA
agcagtggtttgtagttctccttgaagagttccttcacatcccttgtaagttggattcctaagtattttattctctttgaagcaattgtgaatgggagttcactcatgatttggctctct

SEQ ID NO: 64982 - DNA, 120 bp, synthetic construct
  source 1..120: mol_type = other DNA
accacgagattatatcccgcacttggctcggagggtcctaccccacggagtctcgctgatggctagcgcagcagtctgagatcaaactgcaaggcggcagcgaggctgggggaggggcgc

SEQ ID NO: 64983 - DNA, 120 bp, synthetic construct
  source 1..120: mol_type = other DNA
tgatggagctgaaaaccaaggctcgagaaccacgtgaagaatgcagaagcctcaggagccaatgcgataaactggaagaaagggtatcagcaatggaagatgaaatgaatgaaatgaagc

SEQ ID NO: 64984 - DNA, 120 bp, synthetic construct
  source 1..120: mol_type = other DNA
aaatgctccaattaaaagacacagactggcaaattggataaagagtcaagacccatcagtgtgctgtattcaggaaacccatctcacatgcagggacacacataggctcaaaataaaggg

SEQ ID NO: 64985 - DNA, 120 bp, synthetic construct
  source 1..120: mol_type = other DNA
cccttcaataaactaatgaatccaggagctggttttttgaaaggatcaacaaaattgatagaccgctagcaagactaataaagaaaaaaagagagaagaatcaaatagatgcaataaaaa

SEQ ID NO: 64986 - DNA, 120 bp, synthetic construct
  source 1..120: mol_type = other DNA
ttgtatatctagaaaaccccattgtctcagcccaaaatctccttaagctgataagcaacttcagcaaagtctcaggatacaaaatcagtgtgcaaaaatcacaagcattcttatacacca

SEQ ID NO: 64987 - DNA, 120 bp, synthetic construct
  source 1..120: mol_type = other DNA
ttcacaacctactcatctgacaaagggctaatatccagaatctacaatgaactcaaaacaaatttacaagaaaaaaacaaacaaccccatcaaaaagtgggcgaaggacatgaacagaca

SEQ ID NO: 64988 - DNA, 120 bp, synthetic construct
  source 1..120: mol_type = other DNA
tgcagagaaaagagaatgcttatacactgctggtgggaatgtaaattattttagccattgtggaaagcagtatggaggtttcttaaagaacttagaactatcattcaacccagcaatgcc

SEQ ID NO: 64989 - DNA, 120 bp, synthetic construct; identical to SEQ ID NO: 13235
  source 1..120: mol_type = other DNA

SEQ ID NO: 64990 - DNA, 120 bp, synthetic construct; identical to SEQ ID NO: 13236
  source 1..120: mol_type = other DNA

SEQ ID NO: 64991 - DNA, 120 bp, synthetic construct
  source 1..120: mol_type = other DNA
ccaacccccaacactggggattataattcaacgtgagatttggtagggacatatattcaaactacatcaccatataggataacatttacaggttgcagggactagcctacaatccatcaa

SEQ ID NO: 64992 - DNA, 120 bp, synthetic construct; identical to SEQ ID NO: 29095
  source 1..120: mol_type = other DNA

SEQ ID NO: 64993 - DNA, 120 bp, synthetic construct; identical to SEQ ID NO: 29096
  source 1..120: mol_type = other DNA

SEQ ID NO: 64994 - DNA, 120 bp, synthetic construct; identical to SEQ ID NO: 29097
  source 1..120: mol_type = other DNA

SEQ ID NO: 64995 - DNA, 120 bp, synthetic construct
  source 1..120: mol_type = other DNA
agtgctgggattacaggtgtgagccactgcaccccgcctcctttccatctcttatcacaagttacaatcaaacatttattcctttgcttagtgtttacagtctgtcttctcaattgtttg

SEQ ID NO: 64996 - DNA, 120 bp, synthetic construct; identical to SEQ ID NO: 5953
  source 1..120: mol_type = other DNA

SEQ ID NO: 64997 - DNA, 120 bp, synthetic construct; identical to SEQ ID NO: 29099
  source 1..120: mol_type = other DNA

SEQ ID NO: 64998 - DNA, 120 bp, synthetic construct; identical to SEQ ID NO: 29100
  source 1..120: mol_type = other DNA

SEQ ID NO: 64999 - DNA, 120 bp, synthetic construct; identical to SEQ ID NO: 29101
  source 1..120: mol_type = other DNA

SEQ ID NO: 65000 - DNA, 120 bp, synthetic construct
  source 1..120: mol_type = other DNA
gtttacagtcccaccaacagtgtaaaagtgttcctatttctccgcatcctctccagcacctgttgtttcctgactttttaatgattgccattctaactggtgtgagatggtatctcatag

SEQ ID NO: 65001 - DNA, 120 bp, synthetic construct
  source 1..120: mol_type = other DNA
atgttcttccatttgtttgtatcctcttttatttcattgagcagtggtttctagttctccttgaagaggtccttcacatcccttgtaagttggattcctaggtattttattctctttgaa

SEQ ID NO: 65002 - DNA, 120 bp, synthetic construct
  source 1..120: mol_type = other DNA
tgtgtcttttaattggagcatttagcccatttacatttaaagttaatattgttatgtgtgaatttgatcctgtcattatgatgttagctggttattttgctcgttagttgatgcagtttc

SEQ ID NO: 65003 - DNA, 120 bp, synthetic construct
  source 1..120: mol_type = other DNA
atagctcagagtaatttgatcgtctgaagccttcttctctcagctcgtcaaagtcattctccatccagctttgttccgttgctggtgaagaactgcgttcctttggaggaggagagatgc

SEQ ID NO: 65004 - DNA, 120 bp, synthetic construct
  source 1..120: mol_type = other DNA
cccaggtgaggcaatgctcgccctgcttcggctcgagcacggtgtgcgcacccactggcctgcacccactgcctggcactccctagtgagatgcacccagtacctcagatggaaatgcag

SEQ ID NO: 65005 - DNA, 120 bp, synthetic construct
  source 1..120: mol_type = other DNA
acatggcacatgtatacaaatgtaacaaacctgcacattgtgcacgtgtaccctagaacttaaagtataattaaaaaatatatatatatatatataaagaaattccacatttaaccaagt

SEQ ID NO: 65006 - DNA, 120 bp, synthetic construct; identical to SEQ ID NO: 21884
  source 1..120: mol_type = other DNA

SEQ ID NO: 65007 - DNA, 120 bp, synthetic construct; identical to SEQ ID NO: 21885
  source 1..120: mol_type = other DNA

SEQ ID NO: 65008 - DNA, 120 bp, synthetic construct
  source 1..120: mol_type = other DNA
gtgaataatgccacaataaacatacatgtgcctgtgtctttatagcagcatgatttatagtcctttgggtatatacccagtaatgggatggctgggtcaaatggtatttctagttctaga

SEQ ID NO: 65009 - DNA, 120 bp, synthetic construct
  source 1..120: mol_type = other DNA
tcaaagatcagatagttgtagatatgcggcgttatttctgagggctctgttctgttccattgatctatatctcagttttggtaccagtacatgctgttttggttactgtagccttgtagt

SEQ ID NO: 65010 - DNA, 120 bp, synthetic construct
  source 1..120: mol_type = other DNA
ttttgatgtgctgctggattcgttttgccagtattttattgaggatttctgcatgaatgttcatcaaggatattggtctaaaattgtcttttttgattgtgtctctgcccggctttggta

SEQ ID NO: 65011 - DNA, 120 bp, synthetic construct
  source 1..120: mol_type = other DNA
gattctggtatgttgtgtctttgttctcattggtttcaaagaacatctttatttctgccttcattttgttatgtaccccgtagtcattcaggagcaggttgttcagtttccatgcagttg

SEQ ID NO: 65012 - DNA, 120 bp, synthetic construct
  source 1..120: mol_type = other DNA
caaaatctctcagcatttgcttgtctgtgaagtattttatttctccttgacttatgaagcttagtttggctggatatgaaattctgggttgaaaattcttttctttaagaatgttgaata

SEQ ID NO: 65013 - DNA, 120 bp, synthetic construct
  source 1..120: mol_type = other DNA
gttttcggtgtggatgtcctttctgtttgttagttttccttctaacagacaggaccctcagctgcaggtctgttggaataccctgccctgtgaggtgtcagtgtgcccctgctgggggat

SEQ ID NO: 65014 - DNA, 120 bp, synthetic construct; identical to SEQ ID NO: 21886
  source 1..120: mol_type = other DNA

SEQ ID NO: 65015 - DNA, 120 bp, synthetic construct; identical to SEQ ID NO: 24638
  source 1..120: mol_type = other DNA

SEQ ID NO: 65016 - DNA, 120 bp, synthetic construct; identical to SEQ ID NO: 22711
  source 1..120: mol_type = other DNA

SEQ ID NO: 65017 - DNA, 120 bp, synthetic construct; identical to SEQ ID NO: 22712
  source 1..120: mol_type = other DNA

SEQ ID NO: 65018 - DNA, 120 bp, synthetic construct; identical to SEQ ID NO: 22713
  source 1..120: mol_type = other DNA

SEQ ID NO: 65019 - DNA, 120 bp, synthetic construct; identical to SEQ ID NO: 22714
  source 1..120: mol_type = other DNA

SEQ ID NO: 65020 - DNA, 120 bp, synthetic construct
  source 1..120: mol_type = other DNA
taaggagactgacatataaacctaaagaccaatttttaaatgaacagacatacaaagtcacatagtagaaaatacctggactggctgggcacagtggctcacgcctgtaatcccagcact

SEQ ID NO: 65021 - DNA, 120 bp, synthetic construct; identical to SEQ ID NO: 32853
  source 1..120: mol_type = other DNA

SEQ ID NO: 65022 - DNA, 120 bp, synthetic construct
  source 1..120: mol_type = other DNA
tatttccaccccttgactttaagtttatgtgagtccttatgtgttaggtgagtctcctgaagcaggagatggttggtgacttcttttccattctgcatttttgtattttttaagtggggc

SEQ ID NO: 65023 - DNA, 120 bp, synthetic construct
  source 1..120: mol_type = other DNA
atatgcggtatttggtttttttgttcttgcgatagtttactgagaatgatggtttccagtttcatccatgtccctacaaaggacatgaactcatcattttttatggctgcatagtattcc

SEQ ID NO: 65024 - DNA, 120 bp, synthetic construct
  source 1..120: mol_type = other DNA
tccttttcccattgcttgtttttctcaggtttgtcaaagataagatagttgtagatatgcggcattatttctgagggctctgttctgttccattgatctatatctctgttttggtaccag

SEQ ID NO: 65025 - DNA, 120 bp, synthetic construct
  source 1..120: mol_type = other DNA
gctctgtttatatgctggattacatttattgatttgcgtatattgaaccagccttgcatcccagggatgaagcccacttgatcatggtggataagctttttgatgtgctgctggattcag

SEQ ID NO: 65026 - DNA, 120 bp, synthetic construct
  source 1..120: mol_type = other DNA
tgtcaattttggatctttcctgctttctcttgtaggcatttagtgctataaatttccctctacacactgctttgaatgcgtcccagagattctggtatgtggtgtctttgttctcgttgg

SEQ ID NO: 65027 - DNA, 120 bp, synthetic construct
  source 1..120: mol_type = other DNA
catgattttgcagcagctggtaccggttgttcctttccatgtttagcgcttccttcaggagctcttttagggcaggcctggtggtgacaaaatctctcagcatttgcttgtctataaagt

SEQ ID NO: 65028 - DNA, 120 bp, synthetic construct
  source 1..120: mol_type = other DNA
cttctttgcctttggtttgaatgtcctcccgtagctcagagtaatttgatcgtctgaagccttcttctctcagctcgtcaaaatcattctccatccagctttgttctgttgctggtgcag

SEQ ID NO: 65029 - DNA, 120 bp, synthetic construct; identical to SEQ ID NO: 34046
  source 1..120: mol_type = other DNA

SEQ ID NO: 65030 - DNA, 120 bp, synthetic construct; identical to SEQ ID NO: 34047
  source 1..120: mol_type = other DNA

SEQ ID NO: 65031 - DNA, 120 bp, synthetic construct; identical to SEQ ID NO: 34048
  source 1..120: mol_type = other DNA

SEQ ID NO: 65032 - DNA, 120 bp, synthetic construct; identical to SEQ ID NO: 34049
  source 1..120: mol_type = other DNA

SEQ ID NO: 65033 - DNA, 120 bp, synthetic construct
  source 1..120: mol_type = other DNA
gtgggagggaggtgagggataaaagactacacattgaatacagtgtacactgctcaggtgatgggtgcacaaaagtatcagaaatcaccactaaagaactcattcatgtaaccaaatacc

SEQ ID NO: 65034 - DNA, 120 bp, synthetic construct
  source 1..120: mol_type = other DNA
tttacagtcccaccaacagtgtaagagtgttcctatttctccacatcctctccagcacctgttgtttcctgacttttgaatgattgccattctaactggtgtgagatggtatctcatagt

SEQ ID NO: 65035 - DNA, 120 bp, synthetic construct
  source 1..120: mol_type = other DNA
tgttcttccatttgtttgtatcctcttttatttccttgagcagtggtttgtagttctccttgaagaggtccttcacatcccttgtatgttggattcctaggtattttattttctttgaag

SEQ ID NO: 65036 - DNA, 120 bp, synthetic construct
  source 1..120: mol_type = other DNA
cctcataaaatgagttagggaggattccctctttttctattgattggaatagaaaatttactctaagtgttgttacaataatactgcagaaggcatacagcttctcctgtatttagtttt

SEQ ID NO: 65037 - DNA, 120 bp, synthetic construct; identical to SEQ ID NO: 6636
  source 1..120: mol_type = other DNA

SEQ ID NO: 65038 - DNA, 120 bp, synthetic construct
  source 1..120: mol_type = other DNA
agaattaccctgacactcactgtggatctggaatgaacaaaactgcatgaattggaggtcaggagattgagaccatcctggctaacatggtgaaaccccatctctactaaacaaaataca

SEQ ID NO: 65039 - DNA, 120 bp, synthetic construct
  source 1..120: mol_type = other DNA
aagtgggtccctgacccctgacccccaagcagcctaactgggaggcacccccccaacaggggcatactgacacctcacacagcagggtattccaacagacctgcagctgagggtcctgtc

SEQ ID NO: 65040 - DNA, 120 bp, synthetic construct
  source 1..120: mol_type = other DNA
gtcgggttaccctcaaagggaagcccatcagactaacagcagatctctcggcagaaaccctacaagccagaagagagtgggggccaatattcaacattcttaaagaaaagaattttcaac

SEQ ID NO: 65041 - DNA, 120 bp, synthetic construct
  source 1..120: mol_type = other DNA
aattataacaaactatctctcagaccacagtgcaatcaaactacaactcaggattaagaatctcactcaaagccgctcaactacatggaaactgaacaacctgctcctgaatgacaactg

SEQ ID NO: 65042 - DNA, 120 bp, synthetic construct
  source 1..120: mol_type = other DNA
attctgataccaaagccgggcagggacacaaccaaaaaagagaattttagaccaatatccttgatgaacattgatgcaaaaatcctcaataaaatactggcaaaccgaatccagcagcac

SEQ ID NO: 65043 - DNA, 120 bp, synthetic construct
  source 1..120: mol_type = other DNA
gatacaaacaaatggaagaacattccatgctcatgggtaggaagaatcaatatcgtgaaaatggccatactgcccaaggtaatttacagattcaatgccgtccccatcaagctaccaatg

SEQ ID NO: 65044 - DNA, 120 bp, synthetic construct
  source 1..120: mol_type = other DNA
gtgggcgaaggacatgaacagacacttctcaaaagaagacatttatgcagccaaaaaacacatgaaaaaatgctcatcatcactggccatcagagaaatgcaaatcaaaaccactatgag

SEQ ID NO: 65045 - DNA, 120 bp, synthetic construct; identical to SEQ ID NO: 12269
  source 1..120: mol_type = other DNA

SEQ ID NO: 65046 - DNA, 120 bp, synthetic construct
  source 1..120: mol_type = other DNA
cccattctgtgggtcgcctgttcactctgatggtagtttcttttgctgtgcagaagctctttagtttaattagatcccatttgtcaattttggcttttgttgccattgcttttggtgttt

SEQ ID NO: 65047 - DNA, 120 bp, synthetic construct
  source 1..120: mol_type = other DNA
gttattggtgtataagaatgtttgtgatttttgcacattgattttgtatcctgatactttgctgaagttgcctatcagcttaaggagattttgggatgagatgatggggttttctagata

SEQ ID NO: 65048 - DNA, 120 bp, synthetic construct
  source 1..120: mol_type = other DNA
ttaattattgcctcaatttcagagcctgtttggtctattcagagattcaacttcttcctggtttagtcttgggagagtgtatgtgtcgaggaatttatccatttcttctagattttctag

SEQ ID NO: 65049 - DNA, 120 bp, synthetic construct
  source 1..120: mol_type = other DNA
ttaactttctatctcgttgatctgtctaatgttgacagtggggtgttaaagtctcccattattattgtgtgggagtctaagtctctttgtaggtcactaaggacttggtttatcaatctg

SEQ ID NO: 65050 - DNA, 120 bp, synthetic construct
  source 1..120: mol_type = other DNA
gccttgttagactggggaagttctcctggatactatcctgcagagtgttttccaacttggttccattctcccactttcaggtacaccaatcagatgtagatttggtcttttcacatagtc

SEQ ID NO: 65051 - DNA, 120 bp, synthetic construct; identical to SEQ ID NO: 15381
  source 1..120: mol_type = other DNA

SEQ ID NO: 65052 - DNA, 120 bp, synthetic construct; identical to SEQ ID NO: 15382
  source 1..120: mol_type = other DNA

SEQ ID NO: 65053 - DNA, 120 bp, synthetic construct
  source 1..120: mol_type = other DNA
tgcactccagcctgggtaacagagcaagactccgtctcaaaaaaaaaaaaaaaaaaatttagcaatgaaaatgagaaagtacattaataggagttcattccaggaatataatgatggctc

SEQ ID NO: 65054 - DNA, 120 bp, synthetic construct
  source 1..120: mol_type = other DNA
ggaaggcagcttttaagttagttcaagaaacatttctcaatttttctttttttttttagagaagggctctcactgtgtttcccaggctggtctaaaactcctgggttcaagtgattctcc

SEQ ID NO: 65055 - DNA, 120 bp, synthetic construct
  source 1..120: mol_type = other DNA
ggcactcatacacatttacacaaatgctcgcactcaatcgcacacttacacacttgtgctgccacccactcatacttcctcacactcaccaaccctcactgacttacactgacttacact

SEQ ID NO: 65056 - DNA, 120 bp, synthetic construct
  source 1..120: mol_type = other DNA
tgaagacgcaggcagagactggcacaatgcgtcccaacaccaaggaagcctggagctcccagaagctggacaaagtaaggaaggaccttcccctagagcctgtggaagaagcatggccct

SEQ ID NO: 65057 - DNA, 120 bp, synthetic construct; identical to SEQ ID NO: 14834
  source 1..120: mol_type = other DNA

SEQ ID NO: 65058 - DNA, 120 bp, synthetic construct; identical to SEQ ID NO: 14835
  source 1..120: mol_type = other DNA

SEQ ID NO: 65059 - DNA, 120 bp, synthetic construct; identical to SEQ ID NO: 14836
  source 1..120: mol_type = other DNA

SEQ ID NO: 65060 - DNA, 120 bp, synthetic construct; identical to SEQ ID NO: 14837
  source 1..120: mol_type = other DNA

SEQ ID NO: 65061 - DNA, 120 bp, synthetic construct; identical to SEQ ID NO: 14838
  source 1..120: mol_type = other DNA

SEQ ID NO: 65062 - DNA, 120 bp, synthetic construct; identical to SEQ ID NO: 14839
  source 1..120: mol_type = other DNA

SEQ ID NO: 65063 - DNA, 120 bp, synthetic construct; identical to SEQ ID NO: 14840
  source 1..120: mol_type = other DNA

SEQ ID NO: 65064 - DNA, 120 bp, synthetic construct; identical to SEQ ID NO: 14841
  source 1..120: mol_type = other DNA

SEQ ID NO: 65065 - DNA, 120 bp, synthetic construct
  source 1..120: mol_type = other DNA
aggcttgcagtgagccaagatggcaccactgcactccagcctgggagacagagtcagactccatctcaaaaaaaaaaaaagtattgtacaattaaactgtttatatgtaataaccacata

SEQ ID NO: 65066 - DNA, 120 bp, synthetic construct
  source 1..120: mol_type = other DNA
tcggaaggctgaggcgggagaatcacttgcattcgggaggcggaagttgcagtgagccaagattgcgccactgcacgccagcctgggcgacagagcaagactgcgtctcaaaaaaaaaaa

SEQ ID NO: 65067 - DNA, 120 bp, synthetic construct
  source 1..120: mol_type = other DNA
ggcaataacacttcagtgtaagtatccatgatcaactactgcttaacagcctacacgacttttgatgaacagtcaaggcacattacttaatacttaaaatggttaaccttagggagtagg

SEQ ID NO: 65068 - DNA, 120 bp, synthetic construct
  source 1..120: mol_type = other DNA
cacatacgctgaagacctaacgctttttaatagtttacaaagacactcccgaaagccagaaaagaaaaaagagagagagaacagaaaggggggagagaagagctggtggaggggagagaa

SEQ ID NO: 65069 - DNA, 120 bp, synthetic construct
  source 1..120: mol_type = other DNA
cgcttccagcaatcccgcttatcttcctacttggagcgccctggctgcggccaaggccaacagcgggcgccggaaggcgggatttccgccacacgcacgcactcccgcactcccacggga

SEQ ID NO: 65070 - DNA, 120 bp, synthetic construct
  source 1..120: mol_type = other DNA
cagccttgacttaccgggttcaggtggttctccacctcagccttgccactagctgggactgcaggcacatggaaccacacctggctaatttttgtagtttttgtagacgggattttgcca

SEQ ID NO: 65071 - DNA, 120 bp, synthetic construct
  source 1..120: mol_type = other DNA
aatagtaaccaaaaaagagctgaaggggctgtactaatatcaaatgtaatacactttaaattaaagcagggctgggcatggtagctcaggcctgcaatcccagcactttgggaggtggag

SEQ ID NO: 65072 - DNA, 120 bp, synthetic construct
  source 1..120: mol_type = other DNA
agtgagacgccatctcaaaaaataaataaaggctgggtgccagatgtggtgcataggcctagtttgttgactcctgtacttaacatataaaactctaaagaacagtgggaaggagcttcc

SEQ ID NO: 65073 - DNA, 120 bp, synthetic construct
  source 1..120: mol_type = other DNA
caccacacccacctaatttttgtatttttggtaaagatggggtttcaccatgttggccaggctggtctcgaacttctgggatcaaggaatcctccaaccttggctttccaaagtgctggt

SEQ ID NO: 65074 - DNA, 120 bp, synthetic construct
  source 1..120: mol_type = other DNA
tttgggaggccaaggcaggcggatcacctgaggtcaggagctcgagaccagcctgacaaaaatgaagaaacactgtctctactaaaaatataaaattaaccaggcatgtggtgcatgtct

SEQ ID NO: 65075 - DNA, 120 bp, synthetic construct
  source 1..120: mol_type = other DNA
gggtgcccatcctgctcagccacccttcacaccctgtaggctttgcacccatgtcaccttctcattgcagccccacatccctgtaatgtgccctcactcctacccctttactgtagtctg

SEQ ID NO: 65076 - DNA, 120 bp, synthetic construct
  source 1..120: mol_type = other DNA
cagtagatatagttaattctttcaagggacagagaaagccaaggtgtaagactgttagagcgctagacggacagcggcccaggtgcgggcggtcacatgggaggcactgaccatggagta

SEQ ID NO: 65077 - DNA, 120 bp, synthetic construct
  source 1..120: mol_type = other DNA
cggccacaggcacctgtgttttagacaggccagaaatgacacaggactctcatgtaccattaaaacaaccctcaactattcaagggttaaataaccacagtgaggttaaacaaggtatta

SEQ ID NO: 65078 - DNA, 120 bp, synthetic construct
  source 1..120: mol_type = other DNA
tggtggcaggcacctgtagtcctagctactcgggaggctgaggcaggagaatcacttgaacccaagagtcagaggttgcagtgagctgagatcacgccactgcactccagcctggagaca

SEQ ID NO: 65079 - DNA, 120 bp, synthetic construct
  source 1..120: mol_type = other DNA
gtccagatttttaatgtattacacagcaagaaagattttggaatgaacatctctaatcctctatgttgccagccatgaaagctcccatccctcttacactcaatcacgtcgcctcctcta

SEQ ID NO: 65080 - DNA, 120 bp, synthetic construct
  source 1..120: mol_type = other DNA
gcgtgtaatccctgcacttcgggaggccaaggcgggtggatcacaaggtcaggatatcaagaccatcctgggtaacacggtgaaaccccatctctactaaaaatacaaaacattagctgg

SEQ ID NO: 65081 - DNA, 120 bp, synthetic construct
  source 1..120: mol_type = other DNA
tctcgaactcctgacctcaggtgatccacccgcctcggcatcccaaagtgttgggattacaggcataagccaccatgcctgacctacacactctctttcgtgttcactcacggcttcagt

SEQ ID NO: 65082 - DNA, 120 bp, synthetic construct
  source 1..120: mol_type = other DNA
tgcatatttttttcaaacgcaccactcactattctcccctcaattcaagcttgaaacagcagagtcaccttccactttttgctggttccccataaagttatcatctacaagactacacca

SEQ ID NO: 65083 - DNA, 120 bp, synthetic construct
  source 1..120: mol_type = other DNA
attttaaaaagaatagcaataacaactatttacatatcatttattttatttttatttatttattttttttgagacagagtctcgctctgtcacccaggctggagtgcagtgacacgatct

SEQ ID NO: 65084 - DNA, 120 bp, synthetic construct
  source 1..120: mol_type = other DNA
atttaaaagaaaaaaaaaaccttaatttattattattttctttccttttttttttttggaggcagggtctcattctgttgcccaggctggagtgcagtggcacagtcacggctcactgca

SEQ ID NO: 65085 - DNA, 120 bp, synthetic construct
  source 1..120: mol_type = other DNA
acccagctaaattttgtatttttagtagagatggggttttgccatgttggtcagctggtctcgaactcctgacctcaggtgatacacccggcttggcctcccaaagtgccaggattatag

SEQ ID NO: 65086 - DNA, 120 bp, synthetic construct
  source 1..120: mol_type = other DNA
ggaccatcacttgagtctggaaggtcgagactgcagtgagccatgattgcaccaatgcactccagcctggggaacagagcaaggctttgtctcaaaaaaaaaaaaaaaaaaaaaaaaaaa

SEQ ID NO: 65087 - DNA, 120 bp, synthetic construct; identical to SEQ ID NO: 26770
  source 1..120: mol_type = other DNA

SEQ ID NO: 65088 - DNA, 120 bp, synthetic construct; identical to SEQ ID NO: 26771
  source 1..120: mol_type = other DNA

SEQ ID NO: 65089 - DNA, 120 bp, synthetic construct
  source 1..120: mol_type = other DNA
tcctgttactctgatcagtgtgtgtgtgtgtgtgtgtgtgtgtgtgtgtgtgtgtattaaaaatgaatattcctgggctcccaataaactctccagggtgggattacgttgtctttactg

SEQ ID NO: 65090 - DNA, 120 bp, synthetic construct; identical to SEQ ID NO: 26772
  source 1..120: mol_type = other DNA

SEQ ID NO: 65091 - DNA, 120 bp, synthetic construct
  source 1..120: mol_type = other DNA
tgcccacctcagcctcccaaagtgttgggattacaggtgtgagccacagcgcccagcctaatttcataagtattgataaattttcatcttacactgaatttacattcagacttaactttc

SEQ ID NO: 65092 - DNA, 120 bp, synthetic construct; identical to SEQ ID NO: 26773
  source 1..120: mol_type = other DNA

SEQ ID NO: 65093 - DNA, 120 bp, synthetic construct; identical to SEQ ID NO: 26774
  source 1..120: mol_type = other DNA

SEQ ID NO: 65094 - DNA, 120 bp, synthetic construct; identical to SEQ ID NO: 26775
  source 1..120: mol_type = other DNA

SEQ ID NO: 65095 - DNA, 120 bp, synthetic construct; identical to SEQ ID NO: 26776
  source 1..120: mol_type = other DNA

SEQ ID NO: 65096 - DNA, 120 bp, synthetic construct; identical to SEQ ID NO: 26777
  source 1..120: mol_type = other DNA

SEQ ID NO: 65097 - DNA, 120 bp, synthetic construct
  source 1..120: mol_type = other DNA
tgttgaactcctgacctcaggtgatctgcctgccttggcctccaaaagtgctgggattacaggtatgagccaccatgtccagctttttttttcttttttaagagacagtgtctcactatg

SEQ ID NO: 65098 - DNA, 120 bp, synthetic construct; identical to SEQ ID NO: 26778
  source 1..120: mol_type = other DNA

SEQ ID NO: 65099 - DNA, 120 bp, synthetic construct
  source 1..120: mol_type = other DNA
ttgaattcctagcctcaagtgatccacctgccttagcttcccaaagtgctgggattataggtgtgagccaccatgcctggtctaaaagtctattttaaaatctgtgagtatgtcttataa

SEQ ID NO: 65100 - DNA, 120 bp, synthetic construct; identical to SEQ ID NO: 26779
  source 1..120: mol_type = other DNA

SEQ ID NO: 65101 - DNA, 120 bp, synthetic construct; identical to SEQ ID NO: 26780
  source 1..120: mol_type = other DNA

SEQ ID NO: 65102 - DNA, 120 bp, synthetic construct; identical to SEQ ID NO: 26781
  source 1..120: mol_type = other DNA

SEQ ID NO: 65103 - DNA, 120 bp, synthetic construct
  source 1..120: mol_type = other DNA
ataaatgtaataaattttcattgtaacatttttgtaaaatagaagaaaataacattttaaaaaagtgatccaaggccgggcacagtggctcaagcctgtaatcccagcactctgggaggc

SEQ ID NO: 65104 - DNA, 120 bp, synthetic construct
  source 1..120: mol_type = other DNA
tccagctctgcctcccgggttcatgccattctcctgcctcagcctcccgaggagctgggattacaggcgcccgccaccacgcctggctaattttttgtatttttagtagagatggggttt

SEQ ID NO: 65105 - DNA, 120 bp, synthetic construct; identical to SEQ ID NO: 26782
  source 1..120: mol_type = other DNA

SEQ ID NO: 65106 - DNA, 120 bp, synthetic construct; identical to SEQ ID NO: 26783
  source 1..120: mol_type = other DNA

SEQ ID NO: 65107 - DNA, 120 bp, synthetic construct; identical to SEQ ID NO: 26784
  source 1..120: mol_type = other DNA

SEQ ID NO: 65108 - DNA, 120 bp, synthetic construct; identical to SEQ ID NO: 26785
  source 1..120: mol_type = other DNA

SEQ ID NO: 65109 - DNA, 120 bp, synthetic construct
  source 1..120: mol_type = other DNA
gaagcagcactttgaatttccattatttttttcttattttgagacaggatcttgctctatcatacaagctggagtacagtagcacaatcgtagctcactgcagcctcaaactactgggct

SEQ ID NO: 65110 - DNA, 120 bp, synthetic construct; identical to SEQ ID NO: 26786
  source 1..120: mol_type = other DNA

SEQ ID NO: 65111 - DNA, 120 bp, synthetic construct
  source 1..120: mol_type = other DNA
gaaaccccatctgtactaaaaatacaaaaattggctgggcatggtggcacacacctgtaatcccagcactagggaggctgaggcacaagaatcacttgaacccagaggtggaggttgtag

SEQ ID NO: 65112 - DNA, 120 bp, synthetic construct; identical to SEQ ID NO: 26787
  source 1..120: mol_type = other DNA

SEQ ID NO: 65113 - DNA, 120 bp, synthetic construct
  source 1..120: mol_type = other DNA
tatattatttatatttagattatatatatatctgttgccaggctggagtgcaatggggcaattttggctcaatgcaacttccacctcccaggctcaaaccatcctcccacctcaacctcc

SEQ ID NO: 65114 - DNA, 120 bp, synthetic construct; identical to SEQ ID NO: 26788
  source 1..120: mol_type = other DNA

SEQ ID NO: 65115 - DNA, 120 bp, synthetic construct; identical to SEQ ID NO: 26789
  source 1..120: mol_type = other DNA

SEQ ID NO: 65116 - DNA, 120 bp, synthetic construct
  source 1..120: mol_type = other DNA
ctctagcctggcgacagagcaagactccatctccaaaaaaaaaaaaaaaaaaaaggaaagaaaaaaaatttcaggataagcacatatagattttaaataaaaacatttatattcaatgta

SEQ ID NO: 65117 - DNA, 120 bp, synthetic construct; identical to SEQ ID NO: 26790
  source 1..120: mol_type = other DNA

SEQ ID NO: 65118 - DNA, 120 bp, synthetic construct; identical to SEQ ID NO: 26791
  source 1..120: mol_type = other DNA

SEQ ID NO: 65119 - DNA, 120 bp, synthetic construct; identical to SEQ ID NO: 26792
  source 1..120: mol_type = other DNA

SEQ ID NO: 65120 - DNA, 120 bp, synthetic construct
  source 1..120: mol_type = other DNA
ccatagtggctgaactaatttacattcctaccaacagtggataagcattcccttttcttcacaaccttgccaacatctgttattttttgactttttaataatatccattctaactggtgg

SEQ ID NO: 65121 - DNA, 120 bp, synthetic construct
  source 1..120: mol_type = other DNA
ccctgtaatccctgcacttttgagaggacaaggtgcggatcacctgaggtcaggagttcgagaccagtcaggccaacatggcaacacccgtctctactaaaaatacataaattagttggg

SEQ ID NO: 65122 - DNA, 120 bp, synthetic construct
  source 1..120: mol_type = other DNA
tgattctcctgtctcagcctcccaaggagctgggattgcaggcgcgtgccaccatgcccagctaatttttgtatttttagtacagtcagggttttgccatgttttatatttttgtagagc

SEQ ID NO: 65123 - DNA, 120 bp, synthetic construct; identical to SEQ ID NO: 26793
  source 1..120: mol_type = other DNA

SEQ ID NO: 65124 - DNA, 120 bp, synthetic construct; identical to SEQ ID NO: 26794
  source 1..120: mol_type = other DNA

SEQ ID NO: 65125 - DNA, 120 bp, synthetic construct; identical to SEQ ID NO: 26795
  source 1..120: mol_type = other DNA

SEQ ID NO: 65126 - DNA, 120 bp, synthetic construct; identical to SEQ ID NO: 26796
  source 1..120: mol_type = other DNA

SEQ ID NO: 65127 - DNA, 120 bp, synthetic construct; identical to SEQ ID NO: 26797
  source 1..120: mol_type = other DNA

SEQ ID NO: 65128 - DNA, 120 bp, synthetic construct; identical to SEQ ID NO: 26798
  source 1..120: mol_type = other DNA

SEQ ID NO: 65129 - DNA, 120 bp, synthetic construct; identical to SEQ ID NO: 26799
  source 1..120: mol_type = other DNA

SEQ ID NO: 65130 - DNA, 120 bp, synthetic construct
  source 1..120: mol_type = other DNA
attattattatttttatcatcatcagctgtgttgaatccgcctctccttttgagacggagtctcgctcttgtcaccaaggctggagtgcagtggcgcgatctcggctcactgcaacctcc

SEQ ID NO: 65131 - DNA, 120 bp, synthetic construct; identical to SEQ ID NO: 14842
  source 1..120: mol_type = other DNA

SEQ ID NO: 65132 - DNA, 120 bp, synthetic construct; identical to SEQ ID NO: 14843
  source 1..120: mol_type = other DNA

SEQ ID NO: 65133 - DNA, 120 bp, synthetic construct
  source 1..120: mol_type = other DNA
cctcagcctcccaaagtgctgggattacaggcgtgagccaccacgcccggcctaaggaaactaactcttatgtcaatgtgaaagcaaatcagacaggacatgggaacacggaggggagga

SEQ ID NO: 65134 - DNA, 120 bp, synthetic construct; identical to SEQ ID NO: 14844
  source 1..120: mol_type = other DNA

SEQ ID NO: 65135 - DNA, 120 bp, synthetic construct
  source 1..120: mol_type = other DNA
tgatccacccacctcagcctcccaaagtgctgggattaggcgtgagccactgctcccagccacttattcctactttatacatgagaggcccaaggtgagacaaagtgatttgtgtagagt

SEQ ID NO: 65136 - DNA, 120 bp, synthetic construct; identical to SEQ ID NO: 14845
  source 1..120: mol_type = other DNA

SEQ ID NO: 65137 - DNA, 120 bp, synthetic construct; identical to SEQ ID NO: 14846
  source 1..120: mol_type = other DNA

SEQ ID NO: 65138 - DNA, 120 bp, synthetic construct; identical to SEQ ID NO: 14847
  source 1..120: mol_type = other DNA

SEQ ID NO: 65139 - DNA, 120 bp, synthetic construct; identical to SEQ ID NO: 14848
  source 1..120: mol_type = other DNA

SEQ ID NO: 65140 - DNA, 120 bp, synthetic construct; identical to SEQ ID NO: 14849
  source 1..120: mol_type = other DNA

SEQ ID NO: 65141 - DNA, 120 bp, synthetic construct; identical to SEQ ID NO: 14850
  source 1..120: mol_type = other DNA

SEQ ID NO: 65142 - DNA, 120 bp, synthetic construct; identical to SEQ ID NO: 14851
  source 1..120: mol_type = other DNA

SEQ ID NO: 65143 - DNA, 120 bp, synthetic construct; identical to SEQ ID NO: 14852
  source 1..120: mol_type = other DNA

SEQ ID NO: 65144 - DNA, 120 bp, synthetic construct; identical to SEQ ID NO: 14853
  source 1..120: mol_type = other DNA

SEQ ID NO: 65145 - DNA, 120 bp, synthetic construct; identical to SEQ ID NO: 14854
  source 1..120: mol_type = other DNA

SEQ ID NO: 65146 - DNA, 120 bp, synthetic construct; identical to SEQ ID NO: 14855
  source 1..120: mol_type = other DNA

SEQ ID NO: 65147 - DNA, 120 bp, synthetic construct; identical to SEQ ID NO: 14856
  source 1..120: mol_type = other DNA

SEQ ID NO: 65148 - DNA, 120 bp, synthetic construct
  source 1..120: mol_type = other DNA
cagacacccgccaccacgcctagctaatttttatatttttagtagagacagggtatcaccgtgttggccaggcttcaaactcctgacctcaagtgatccactcacctcagcctcccaaag

SEQ ID NO: 65149 - DNA, 120 bp, synthetic construct
  source 1..120: mol_type = other DNA
acgccgcatacctacaactatctgatctttgacaaacctgagaaaaacaagcaatggggaaaggattccctatttaataaatggtgctgggaaaactggctagccatatgtagaaagctg

SEQ ID NO: 65150 - DNA, 120 bp, synthetic construct
  source 1..120: mol_type = other DNA
taaccagttttttgggggtttttatcatgaaaggatgttgaattttatcaaatgccttttcagcatgaatttaaatgatcatatggttttttatccttcattctattgatatgatgtatc

SEQ ID NO: 65151 - DNA, 120 bp, synthetic construct
  source 1..120: mol_type = other DNA
gatgatctgatctgtccaatgctgaaagtggagtgttgaagcctccatctattaatgtgttaaggcctatctctctctttagctgtaatatttgttttatgtatctgggtgctctagtgt

SEQ ID NO: 65152 - DNA, 120 bp, synthetic construct
  source 1..120: mol_type = other DNA
gctgagcatggtggctcacacctgtaatcccagcacttgggaggccaaggcaggtgaattgtttgagctcaggagtacaagaccagcctgaacaacatggcaaaaccacatttctaccaa

SEQ ID NO: 65153 - DNA, 120 bp, synthetic construct
  source 1..120: mol_type = other DNA
accagccaaagcaacacggtgaaactcggtctctacaaaaaatacaaaaattaaccaggcgtggtggtacgcacctgtagtcccactactcagggggctgaggtgggaggatcacctgag

SEQ ID NO: 65154 - DNA, 120 bp, synthetic construct
  source 1..120: mol_type = other DNA
ctccagatcacagacagtacaggatcctgactgaggaagcagcagcctgggaacaactggaagacagccgtggcactgagaagaatggagactacaggcagggcgtggtggcccacgccg

SEQ ID NO: 65155 - DNA, 120 bp, synthetic construct
  source 1..120: mol_type = other DNA
ctctgtcgcccaggctggagtgcagtggcgccatcttggctccccgggttcatgccattctcctgcctcagcctcccgagtagctgggactacaggcgcacgccaccacgcccggctaat

SEQ ID NO: 65156 - DNA, 120 bp, synthetic construct
  source 1..120: mol_type = other DNA
aaaccagcccagtttcgcattctctcaatttccaaagggactgcagtgacctgggattgcctagaacatcctctctgggggaagttattgttacccagagcctcgacttattgctacaat

SEQ ID NO: 65157 - DNA, 120 bp, synthetic construct; identical to SEQ ID NO: 14819
  source 1..120: mol_type = other DNA

SEQ ID NO: 65158 - DNA, 120 bp, synthetic construct; identical to SEQ ID NO: 14820
  source 1..120: mol_type = other DNA

SEQ ID NO: 65159 - DNA, 120 bp, synthetic construct
  source 1..120: mol_type = other DNA
gtaatagcttcaagtttaaaaatgcttttctgggccagatgtagtggtacactcctgtaatcttagcacttcgggaggccgaggcaggcagcttgtttgagctcaggagttaaagacagg

SEQ ID NO: 65160 - DNA, 120 bp, synthetic construct; identical to SEQ ID NO: 14821
  source 1..120: mol_type = other DNA

SEQ ID NO: 65161 - DNA, 120 bp, synthetic construct
  source 1..120: mol_type = other DNA
gtagatgtctattaggttggcttgatgcagagctgagttcagttcctggatatccttgttaactttctgtctcatggatctgtctaatgttgacagtggggtgttaaagtctcccattat

SEQ ID NO: 65162 - DNA, 120 bp, synthetic construct
  source 1..120: mol_type = other DNA
tccaagacacataattgtcagattcaccaaagttgaaatgaaggaaaaaatgttaagggcagccagagagaaaggtcgggttacccacaaagggaagcccatcagactaacagcggatct

SEQ ID NO: 65163 - DNA, 120 bp, synthetic construct
  source 1..120: mol_type = other DNA
cggagcttgcagtgagccgagattgcaccactgcactccagcctaggtgacggagcaagactccgtctcaaaaaataaataaataataattttatttgtccaattcattttagtagctac

SEQ ID NO: 65164 - DNA, 120 bp, synthetic construct; identical to SEQ ID NO: 25603
  source 1..120: mol_type = other DNA

SEQ ID NO: 65165 - DNA, 120 bp, synthetic construct; identical to SEQ ID NO: 25604
  source 1..120: mol_type = other DNA

SEQ ID NO: 65166 - DNA, 120 bp, synthetic construct
  source 1..120: mol_type = other DNA
gagaaaattgacgggttgatgtggttgagtgtccctatccataaatgtggttttcatttgctcaagttttttgtgctcctcagtaatgctttcaagtcttcatcatataggtcttgcaca

SEQ ID NO: 65167 - DNA, 120 bp, synthetic construct
  source 1..120: mol_type = other DNA
ccaagatcacgccattgcactccagcctgggcgacagagtgagactccgtcccaaaaaaaaaagaacatggaatcctgtattaccctggcatcattatcatatctaagaaaattaatcat

SEQ ID NO: 65168 - DNA, 120 bp, synthetic construct
  source 1..120: mol_type = other DNA
atgataagtgatgaaaagctactttaaaatggtttttgttttttaaaatgctgaaatatgttttctgtaagagttaaacacctcagactggaagcacaaaaagaaagttgtgcattcacg

SEQ ID NO: 65169 - DNA, 120 bp, synthetic construct
  source 1..120: mol_type = other DNA
ctcgcctgcgcggttctacctggagaaggcagcctgaccttacaaacgtggtttgtgggtcagacacctgtatctcccttagaaatacactggggcattaaaaaatatatatatataaaa

SEQ ID NO: 65170 - DNA, 120 bp, synthetic construct; identical to SEQ ID NO: 25602
  source 1..120: mol_type = other DNA

SEQ ID NO: 65171 - DNA, 120 bp, synthetic construct
  source 1..120: mol_type = other DNA
gctgggattacaggcgtcagcgcagcgcccggcctaacattatcttttagcttgattaaaaacccatttccacccggctaaaacggtgaaaccccgtctctactaaaaatacaaaaaatt

SEQ ID NO: 65172 - DNA, 120 bp, synthetic construct
  source 1..120: mol_type = other DNA
ctagtgacgaatagagcaattcaaaggttgtgggttcgaatcccaccagagtcgattttatttcaatttttcctttttatccgtttttttcttaaaggcccccatcccttctccccctac

SEQ ID NO: 65173 - DNA, 120 bp, synthetic construct
  source 1..120: mol_type = other DNA
cggtttggggcgcagatagccgtgcagcgcggagaagagctgggcgcgggcggccgggctggcgtcgtgcgcgaaggccgccaagcgaagcaggcactcgcggaaaccggacaagtagca

SEQ ID NO: 65174 - DNA, 120 bp, synthetic construct
  source 1..120: mol_type = other DNA
aatttacagaaccaggcgtgaaacttacagacccgaggggtggcgaagaagatcgcgttctgagagcgagtgggggtctgggatggaattccaaaggcgggactcgggtgaggatgcctt

SEQ ID NO: 65175 - DNA, 120 bp, synthetic construct
  source 1..120: mol_type = other DNA
cccattaccgaggcccctagtcctatgttcccgccgcccactcaggtctggctctgacccctgtccccttcttcatattttgcagcttcctctccagcttctggctcctggagttctgga

SEQ ID NO: 65176 - DNA, 120 bp, synthetic construct
  source 1..120: mol_type = other DNA
ttaaggatggctggactgaggaggatcttcaaggcagagggagcaagtctttgaaacataggtatgagtggagaggtctttccacttacagtacaagtatttgattcaaaactagtcata

SEQ ID NO: 65177 - DNA, 120 bp, synthetic construct
  source 1..120: mol_type = other DNA
ccacgcgggaggcccgggttcgattcccggccaatgcacgagtacagttttcttttctcccctccaaaaaaaggataatatatttggtagcatttctaagaaacatcttcacttaaatat

SEQ ID NO: 65178 - DNA, 120 bp, synthetic construct; identical to SEQ ID NO: 15450
  source 1..120: mol_type = other DNA

SEQ ID NO: 65179 - DNA, 120 bp, synthetic construct
  source 1..120: mol_type = other DNA
gggaagctccacctgggtggagcccaccacagctcaaggaggcctgcctgcctctgtaggctccacctctgggggcagggcacagacaaacaaaaagacagcagtaacctctgcagactt

SEQ ID NO: 65180 - DNA, 120 bp, synthetic construct
  source 1..120: mol_type = other DNA
atgcaggaaatacagagaatgccacaaacatactcctcgagaagagcaactccaagacacataattgtcagattcaccaaagttgaaatgaaggaaaaaatgttaagggcagccagagag

SEQ ID NO: 65181 - DNA, 120 bp, synthetic construct
  source 1..120: mol_type = other DNA
aaattgaccacatagttggaagtaaagctctcctcagcaaatgtaaaagaacagaaattataacaaactatctctcagaccacagtgcaatcaagctagaactcaggattaaggaactca

SEQ ID NO: 65182 - DNA, 120 bp, synthetic construct
  source 1..120: mol_type = other DNA
tgatgaacattgatgcaaaaatcctcaataaaatactggcaaaccaaatccagcagcacatcaaaaagcttatccaccatgatcaagtgggcttcatccctgggacgcaagcctggttca

SEQ ID NO: 65183 - DNA, 120 bp, synthetic construct
  source 1..120: mol_type = other DNA
aaccaaaaaagagcccacattaccaagtcaatcctaagccaaaagaacaaagctggaggcatcacgctacctgacttcaaactatactacaaggctacagtaaccaaaacagcatggtac

SEQ ID NO: 65184 - DNA, 120 bp, synthetic construct
  source 1..120: mol_type = other DNA
gaactagaaataccatttgacccagccatcccattactgggtatatacccaaaggactataaatcatgctgctgtaaagacacatgcacacgtatgtttattgtggcactattcacaata

SEQ ID NO: 65185 - DNA, 120 bp, synthetic construct
  source 1..120: mol_type = other DNA
tgaacctgggaggcagagcttgtagtgagccgagatcatgccactgcactccagactgggcggcagagcaagactccatctcaaaaaaaaaaagaaaaaaaaaaaaaaatatatatatat

SEQ ID NO: 65186 - DNA, 120 bp, synthetic construct
  source 1..120: mol_type = other DNA
caactagaatgcttttaaataaatctcgtagttcctcacttgagctgagctaagcctggggctccttgaacctggaactcgggtttatttccaatgtcagctgtgcagttttttccccag

SEQ ID NO: 65187 - DNA, 120 bp, synthetic construct
  source 1..120: mol_type = other DNA
cggcctgcttcctggcaaatttattcaatggtacactgggctttggtggcagagctcatgtctccacttcatagctatgattcttaaacatcacactgcattagaggttgaataataaaa

SEQ ID NO: 65188 - DNA, 120 bp, synthetic construct
  source 1..120: mol_type = other DNA
tgtagtagctcatgccaaggaggaggccaaggagagcagattcctgagctcaggagttcaagaccagcctgggcaacacagcaaaaccccttctctacaaaaaatacaaaaattagctgg

SEQ ID NO: 65189 - DNA, 120 bp, synthetic construct
  source 1..120: mol_type = other DNA
gagaaaagcacacaaggaaagagcacccaggactgtcatatggaagaaagacaggactgcaactcacccttcacaaaatgaggaccagacacagctgatggtatgagttgatgcaggtgt

SEQ ID NO: 65190 - DNA, 120 bp, synthetic construct
  source 1..120: mol_type = other DNA
aatccctggttggagtttcagaggtggctgaggctgtgtgcctctccaaattctgggaagggactttctcaatcctagagtctctaccttataattgagatgtatgagacagccacaagt

SEQ ID NO: 65191 - DNA, 120 bp, synthetic construct
  source 1..120: mol_type = other DNA
agtccaatcttaggacacaaaatggtgtctctcctgtagcttgtttttttctgaaaagggtatttccttcctccaacctatagaaggaagtgaaagttccagtcttcctggcaagggtaa

SEQ ID NO: 65192 - DNA, 120 bp, synthetic construct
  source 1..120: mol_type = other DNA
ctattctcagaacccaaatctggtagggaatgaaattgatagcaagtaaatgtagttaaagaagaccccatgaggtcctaaagcaggcaggaagcaaatgcttagggtgtcaaaggaaag

SEQ ID NO: 65193 - DNA, 120 bp, synthetic construct
  source 1..120: mol_type = other DNA
atgaacctcaagctgcatctagaggcttccttcatttcctccgtcacctcagagacatacacctatgtcatttcatttcctatttttggaagaggactccttaaatttgggggacttaca

SEQ ID NO: 65194 - DNA, 120 bp, synthetic construct
  source 1..120: mol_type = other DNA
atgaacccaggaggcagagcttgcagtgagccgagtttgcgccactgcactccagcctaggtgacagagtgagactccatctcaaaaaaataaaaataaaaataaaaaaatgaaaaaaaa

SEQ ID NO: 65195 - DNA, 120 bp, synthetic construct
  source 1..120: mol_type = other DNA
gagccaccctgcccagccgtcaaaagagtcttaatatatatatccagatggcatgtgtttactttatgttactacatgcacttggctgcataaatgtggtacaagcattctgtcttgaag

SEQ ID NO: 65196 - DNA, 120 bp, synthetic construct
  source 1..120: mol_type = other DNA
gggttttcctgaaggtaaaggaataaagaatgggtggaggggcgtgcactggaaatcacttgtagagaaaagcccctgaaaatttgagaaaacaaacaagaaactacttaccagctattt

SEQ ID NO: 65197 - DNA, 120 bp, synthetic construct
  source 1..120: mol_type = other DNA
ctgcctcctcaagtgggtcccttacccccaagtaggctaactgggaggcgtcccccagtaggggcagactgacaactcacacagccgggtacccctctgagacaaaacttccagaggaac

SEQ ID NO: 65198 - DNA, 120 bp, synthetic construct
  source 1..120: mol_type = other DNA
aggatattatccaggagaacttccccaatctagcaaggcaggccacattcaaattcaggaaatacaaagaatgccacaaagatactcctcaagaagagcaactccaagacacaaagttgt

SEQ ID NO: 65199 - DNA, 120 bp, synthetic construct
  source 1..120: mol_type = other DNA
aaattcactcaaaaccgctcaactacatggaaactgaacatcctgctcctgaatgactactgggtacataacgaaatgaaggcagaaataaagatgttctttgaaaccaatgagaacaaa

SEQ ID NO: 65200 - DNA, 120 bp, synthetic construct
  source 1..120: mol_type = other DNA
atgatcaagtgggcttcatccctgggatgcaaggctagttcaacatatgcaaatcaataaacttaatccagcatataaacagaatcaacaacaaaaaccacacgattatctcaatagatg

SEQ ID NO: 65201 - DNA, 120 bp, synthetic construct
  source 1..120: mol_type = other DNA
ctttcttcacagaattggaaaaaactactttaaagttcacatggaaccgaaaaagagcccgcattgccaagtcaattctatgccaaaagaacaaagctggaggcatcacactacctgact

SEQ ID NO: 65202 - DNA, 120 bp, synthetic construct
  source 1..120: mol_type = other DNA
gattcctcagggatctagaactagaaataccatttgacccaacaatcccattattgggtatatatccaaaggattataaaacatgctgctataaagacacatgcacacgtatgtttattg

SEQ ID NO: 65203 - DNA, 120 bp, synthetic construct; identical to SEQ ID NO: 7792
  source 1..120: mol_type = other DNA

SEQ ID NO: 65204 - DNA, 120 bp, synthetic construct
  source 1..120: mol_type = other DNA
catcaccatcagcaaagaccaaaagtagataaaaccacaaagatagggaaaaaacagagcagaaaaactggaaactaaaaagcagagcacctctcctcctctaaaggaacgcagttcctc

SEQ ID NO: 65205 - DNA, 120 bp, synthetic construct
  source 1..120: mol_type = other DNA
gccttccctagtgtttgtgtccctgggtacttgagattagggagtggtgatgactcttaaggagtatgctgccttcaagcatctgtttaacaaagcacatcttgcaccgcccttaatcca

SEQ ID NO: 65206 - DNA, 120 bp, synthetic construct
  source 1..120: mol_type = other DNA
gcatcagagggagaccgtgcaaagagggagagggagacgagagggagagggagagggagagggtcaacattcttaaagaaaataattttcagcccagaatttcatatccagccaaactaa

SEQ ID NO: 65207 - DNA, 120 bp, synthetic construct
  source 1..120: mol_type = other DNA
ctctcagaccacagtgcaatcaaactagaactcaggattaagaatctcattcagaaccgctcaactacatggaaattgaacaacctgctcctaaatgactactgggtacataacgaaatg

SEQ ID NO: 65208 - DNA, 120 bp, synthetic construct
  source 1..120: mol_type = other DNA
atccctgggatgcaaggctggttcaatatacgcaaatcaataaatgtaatccagcatataaacagaaccaagacaaaaaccacatgattatctcaatagatgcagaaaaggtctttgaca

SEQ ID NO: 65209 - DNA, 120 bp, synthetic construct
  source 1..120: mol_type = other DNA
gctcgtatcaccaagtcaatcctaagccaaaagaagaaagctggaggcatcacactacctgacttcaaactatactacaaggctacagtaaccaaaacagcatggtactggtaccaaaac

SEQ ID NO: 65210 - DNA, 120 bp, synthetic construct
  source 1..120: mol_type = other DNA
gacatggatgaaactggaaatcatcattctcagcaaactatcgcaagaacaaaaaaccaaacaccgcatattctcactcataggtgggaaatgaacaatgagaacacatggacacaggaa

SEQ ID NO: 65211 - DNA, 120 bp, synthetic construct; identical to SEQ ID NO: 7793
  source 1..120: mol_type = other DNA

SEQ ID NO: 65212 - DNA, 120 bp, synthetic construct
  source 1..120: mol_type = other DNA
aaggaaatagagacacaaaaaacccttccaaaaatcaatgaatccaggaactggttttttgagaagatcaacaaaattgataaaccactagcaagactaataaagaagaaaagagagaag

SEQ ID NO: 65213 - DNA, 120 bp, synthetic construct
  source 1..120: mol_type = other DNA
gatagataacttcagcaaagtctcaggatacaaaatcaatgtacaaaaatcacaagcattcttatacaccaataacagacaaacagagagccaaatcatgagtgaactcccattcacaat

SEQ ID NO: 65214 - DNA, 120 bp, synthetic construct
  source 1..120: mol_type = other DNA
agacacatgaaaaaatgctcatcatcactggccatcagagaaatgaaaatcaaaaccacaatgagataccatctcacaccagttagaatggtgatcattaaaaagtcaggaaacaacagg

SEQ ID NO: 65215 - DNA, 120 bp, synthetic construct; identical to SEQ ID NO: 7794
  source 1..120: mol_type = other DNA

SEQ ID NO: 65216 - DNA, 120 bp, synthetic construct; identical to SEQ ID NO: 7795
  source 1..120: mol_type = other DNA

SEQ ID NO: 65217 - DNA, 120 bp, synthetic construct
  source 1..120: mol_type = other DNA
taacacaacatgcatgaaccttaaaaatattaagtgcagccattcatgctaaaaactctcaataaactaggaattcatgggatatacctcaaaataataagagctatttatgacagaccc

SEQ ID NO: 65218 - DNA, 120 bp, synthetic construct
  source 1..120: mol_type = other DNA
agaaaagaacagagccctcagaaataatatcacacatctacaaccatctgatctttgacaaacctgacaaaaacaagaaatggggaaaggattccctatttaataaatggtgctgggaaa

SEQ ID NO: 65219 - DNA, 120 bp, synthetic construct; identical to SEQ ID NO: 31495
  source 1..120: mol_type = other DNA

SEQ ID NO: 65220 - DNA, 120 bp, synthetic construct; identical to SEQ ID NO: 31496
  source 1..120: mol_type = other DNA

SEQ ID NO: 65221 - DNA, 120 bp, synthetic construct
  source 1..120: mol_type = other DNA
ctgcggcccagcagaggcactcctcacatcccagacagggcggcggggcagaggtgctccccacatctcagacgatgggcggccgggcagagacgctcctcacttcctagatgggatggc

SEQ ID NO: 65222 - DNA, 120 bp, synthetic construct; identical to SEQ ID NO: 31497
  source 1..120: mol_type = other DNA

SEQ ID NO: 65223 - DNA, 120 bp, synthetic construct; identical to SEQ ID NO: 31498
  source 1..120: mol_type = other DNA

SEQ ID NO: 65224 - DNA, 120 bp, synthetic construct; identical to SEQ ID NO: 9313
  source 1..120: mol_type = other DNA

SEQ ID NO: 65225 - DNA, 120 bp, synthetic construct
  source 1..120: mol_type = other DNA
tgaataatgccgcagtaaacatacgtgtgcatgtgtctttatagcagcatgatttatagtcctttgggtatatacccagtaatgggatggctgggtcaaatggtatttccagttctagat

SEQ ID NO: 65226 - DNA, 120 bp, synthetic construct
  source 1..120: mol_type = other DNA
gcattgaatctgtaaattaccttgggcagtatggccattttcatgatatggattcttcctacccatgagcatggaatgttcttccatttgtttgtatcctcttttatttccttgagcagt

SEQ ID NO: 65227 - DNA, 120 bp, synthetic construct
  source 1..120: mol_type = other DNA
tcttgggagagtgtatgtgtccaggaatttatccatttcttctagattttctagtttaattgcgtagaggtgtttgtagtattctctgatggtagtttgtatttctgcacacacacacat

SEQ ID NO: 65228 - DNA, 120 bp, synthetic construct; identical to SEQ ID NO: 9314
  source 1..120: mol_type = other DNA

SEQ ID NO: 65229 - DNA, 120 bp, synthetic construct; identical to SEQ ID NO: 9315
  source 1..120: mol_type = other DNA

SEQ ID NO: 65230 - DNA, 120 bp, synthetic construct; identical to SEQ ID NO: 9312
  source 1..120: mol_type = other DNA

SEQ ID NO: 65231 - DNA, 120 bp, synthetic construct; identical to SEQ ID NO: 9316
  source 1..120: mol_type = other DNA

SEQ ID NO: 65232 - DNA, 120 bp, synthetic construct; identical to SEQ ID NO: 9317
  source 1..120: mol_type = other DNA

SEQ ID NO: 65233 - DNA, 120 bp, synthetic construct; identical to SEQ ID NO: 9318
  source 1..120: mol_type = other DNA

SEQ ID NO: 65234 - DNA, 120 bp, synthetic construct; identical to SEQ ID NO: 9319
  source 1..120: mol_type = other DNA

SEQ ID NO: 65235 - DNA, 120 bp, synthetic construct; identical to SEQ ID NO: 9320
  source 1..120: mol_type = other DNA

SEQ ID NO: 65236 - DNA, 120 bp, synthetic construct; identical to SEQ ID NO: 9321
  source 1..120: mol_type = other DNA

SEQ ID NO: 65237 - DNA, 120 bp, synthetic construct
  source 1..120: mol_type = other DNA
aaaaataggaaggaacagtgtgtgtagtacttaggttcaaaaacaatacatattttagaatgaaaagtcaactaccagctgggtgcagtggctcacacctgtaatcccagcactttggga

SEQ ID NO: 65238 - DNA, 120 bp, synthetic construct
  source 1..120: mol_type = other DNA
tggaatagtgtgacgggagtagtgtgacaggaatagtgtgacagcagaatagtgtgacagcagaatagtgtgatgggaatagtgtgacagtggaatagtgtgacagcagaatagtgtgat

SEQ ID NO: 65239 - DNA, 120 bp, synthetic construct; identical to SEQ ID NO: 25841
  source 1..120: mol_type = other DNA

SEQ ID NO: 65240 - DNA, 120 bp, synthetic construct; identical to SEQ ID NO: 3813
  source 1..120: mol_type = other DNA

SEQ ID NO: 65241 - DNA, 120 bp, synthetic construct
  source 1..120: mol_type = other DNA
aagggtctgagctcagtgattttggaagtgagttctggccacagttggtttcagggcttggtgagtttttcatttactcattcagcagtttctggcacttttgttagttactggctccat

SEQ ID NO: 65242 - DNA, 120 bp, synthetic construct
  source 1..120: mol_type = other DNA
ctttctcagctctctctcagtggttttcaaagtgggactggctgaagtggggcgggattaaagaggtttggcctggtggccccaggatcctccccatagtaattgaacagtcttgggctg

SEQ ID NO: 65243 - DNA, 120 bp, synthetic construct
  source 1..120: mol_type = other DNA
ctcagtttctgaggctatttctgattcacctctagatccccatggcttgggacagagcatcacagatatacagcagagactcaatacacattgttggttaagttaatgagtaaaggatct

SEQ ID NO: 65244 - DNA, 120 bp, synthetic construct; identical to SEQ ID NO: 31780
  source 1..120: mol_type = other DNA

SEQ ID NO: 65245 - DNA, 120 bp, synthetic construct
  source 1..120: mol_type = other DNA
atttacttcaagagttaagagtggcagtttggggatagcaccagtagatatcagctgtgatggcttgcaaaaaaacagtgtaaaccggcagtgtaaacaagagcagggcatgtatgagta

SEQ ID NO: 65246 - DNA, 120 bp, synthetic construct
  source 1..120: mol_type = other DNA
gcttgtactatagcataacctgcctttgctggtgtgtggcgattaggcctggtggaactgccatcaataaatcaagcgtgatcagggtgaggaacaggaaagaaggaaatttggggaaat

SEQ ID NO: 65247 - DNA, 120 bp, synthetic construct
  source 1..120: mol_type = other DNA
aatgagatggtaaggggtgcatgattggtcgccaaggagggagtagaggtatcttatacttgtgggttaaggtgggggggatacaagaggaggacgcaaaggaggctttggattgggaag

SEQ ID NO: 65248 - DNA, 120 bp, synthetic construct
  source 1..120: mol_type = other DNA
ggagttttatttaatgtcgggagcagattgggtgataaaatgtattttgagaataagacggccttttgaccttttagggtctagggctataaagtgtctcagggttgctgccaaacaagt

SEQ ID NO: 65249 - DNA, 120 bp, synthetic construct
  source 1..120: mol_type = other DNA
ggtctgtctgaggacctgaggtcgtaggtggatctttctcatggagcaaagaacaggaggacggggattgatttcccaagggaggtcccccgatccgagtgacggcaccaaatttcatgc

SEQ ID NO: 65250 - DNA, 120 bp, synthetic construct; identical to SEQ ID NO: 24517
  source 1..120: mol_type = other DNA

SEQ ID NO: 65251 - DNA, 120 bp, synthetic construct
  source 1..120: mol_type = other DNA
caaaattaagggatggaggaagatctaccaagcaaatgacaaacaaaaaaatgcaggagttgcaatcctagtctctgataaaacagactttaaaccaacaaagatcaaaagagacaaaga

SEQ ID NO: 65252 - DNA, 120 bp, synthetic construct
  source 1..120: mol_type = other DNA
tgaaaagatcaacaaaattgatagaccgctagcaagactaataaagaagaaaagagagaagaatcaaatagatgcaataaaaaatgataaaggggatatcaccactgatcccacagaaat

SEQ ID NO: 65253 - DNA, 120 bp, synthetic construct
  source 1..120: mol_type = other DNA
attccctttgaaaactggtacaagacagggatgccctctcaccactcctattcaacatagtgttggaagttctggccagggcaatcaggcaggagaaggaaataaagggtattcaattag

SEQ ID NO: 65254 - DNA, 120 bp, synthetic construct
  source 1..120: mol_type = other DNA
aaaattttcgcaacctactcatctgacaaagggctaataaccagaatctacaatgaactcaaacaaatttacaagaaaaaaacaaacaaccccatcaaaaagtgggcaaaggatatgaac

SEQ ID NO: 65255 - DNA, 120 bp, synthetic construct
  source 1..120: mol_type = other DNA
taaaaattcccatacagtaaaacctgctgacactttttttttttttttttttacaagacccagggaggggggtggaatcttgccacatggtggggggcggggatttgaaatatttgtgag

SEQ ID NO: 65256 - DNA, 120 bp, synthetic construct
  source 1..120: mol_type = other DNA
atctcagccccaaatctccttaagctgataagcaacttcagcaaagtctccggatacaaaaatcaatgtgcaaatatcacacgcattcctatacaccattaacagacaaacagagggcca

SEQ ID NO: 65257 - DNA, 120 bp, synthetic construct
  source 1..120: mol_type = other DNA
aaaaggatgagttcatgtcctttgtagggacatggatgaagctggaaatcatcattctcagcaaattatcgcaaggacagaaaaccaaataccacatgttctcactcataggtgggaatt

SEQ ID NO: 65258 - DNA, 120 bp, synthetic construct
  source 1..120: mol_type = other DNA
gctaatttttttgtacaaaaaatacaattttttttaagacagggtctagctctgttgaccaggctggagtgtgcagtggtgtgattttggttcactgaaacgtccacctcctgggttcaa

SEQ ID NO: 65259 - DNA, 120 bp, synthetic construct
  source 1..120: mol_type = other DNA
tcccaaagtgctgggattacaggagtgagccaccgtgcccatcctattaatttaattaattaatttatttatttattttctgagaccgagtctcactctgtcgcccagactggagtgcag

SEQ ID NO: 65260 - DNA, 120 bp, synthetic construct
  source 1..120: mol_type = other DNA
ctctcaagtagctgggattacaggcatacgccaccatgcccagctaattttgtattttcagtagagacggggttttaccatgttggccaggctggtctcaaactcctgacctcaggtgat

SEQ ID NO: 65261 - DNA, 120 bp, synthetic construct; identical to SEQ ID NO: 23558
  source 1..120: mol_type = other DNA

SEQ ID NO: 65262 - DNA, 120 bp, synthetic construct; identical to SEQ ID NO: 23559
  source 1..120: mol_type = other DNA

SEQ ID NO: 65263 - DNA, 120 bp, synthetic construct; identical to SEQ ID NO: 23560
  source 1..120: mol_type = other DNA

SEQ ID NO: 65264 - DNA, 120 bp, synthetic construct; identical to SEQ ID NO: 23561
  source 1..120: mol_type = other DNA

SEQ ID NO: 65265 - DNA, 120 bp, synthetic construct; identical to SEQ ID NO: 23562
  source 1..120: mol_type = other DNA

SEQ ID NO: 65266 - DNA, 120 bp, synthetic construct; identical to SEQ ID NO: 23563
  source 1..120: mol_type = other DNA

SEQ ID NO: 65267 - DNA, 120 bp, synthetic construct; identical to SEQ ID NO: 23564
  source 1..120: mol_type = other DNA

SEQ ID NO: 65268 - DNA, 120 bp, synthetic construct; identical to SEQ ID NO: 23565
  source 1..120: mol_type = other DNA

SEQ ID NO: 65269 - DNA, 120 bp, synthetic construct; identical to SEQ ID NO: 23566
  source 1..120: mol_type = other DNA

SEQ ID NO: 65270 - DNA, 120 bp, synthetic construct; identical to SEQ ID NO: 23567
  source 1..120: mol_type = other DNA

SEQ ID NO: 65271 - DNA, 120 bp, synthetic construct; identical to SEQ ID NO: 23568
  source 1..120: mol_type = other DNA

SEQ ID NO: 65272 - DNA, 120 bp, synthetic construct; identical to SEQ ID NO: 23569
  source 1..120: mol_type = other DNA

SEQ ID NO: 65273 - DNA, 120 bp, synthetic construct
  source 1..120: mol_type = other DNA
agtgtaaagcaatgctatccttctttttttcttttcttttcttttttttttttttgagacagtctcgctctgtcgccaggctagagtgcagtggcgcgatctctgctcactgcaaccccc

SEQ ID NO: 65274 - DNA, 120 bp, synthetic construct
  source 1..120: mol_type = other DNA
ccatgttggccaggctggtctcgaactccagacctcaagtgatccacctacctcagcctcccaaagtgctgggactacaggcgtgagccactgtgctcagcctttaaaaaaaattttttt

SEQ ID NO: 65275 - DNA, 120 bp, synthetic construct; identical to SEQ ID NO: 23570
  source 1..120: mol_type = other DNA

SEQ ID NO: 65276 - DNA, 120 bp, synthetic construct; identical to SEQ ID NO: 23571
  source 1..120: mol_type = other DNA

SEQ ID NO: 65277 - DNA, 120 bp, synthetic construct; identical to SEQ ID NO: 23572
  source 1..120: mol_type = other DNA

SEQ ID NO: 65278 - DNA, 120 bp, synthetic construct; identical to SEQ ID NO: 23573
  source 1..120: mol_type = other DNA

SEQ ID NO: 65279 - DNA, 120 bp, synthetic construct; identical to SEQ ID NO: 23574
  source 1..120: mol_type = other DNA

SEQ ID NO: 65280 - DNA, 120 bp, synthetic construct
  source 1..120: mol_type = other DNA
gcactccagcttgggtgacagagcaagactctctctcaaaaaaataaaaaattataaagtatgtgagacttctggttgccttactgcctggccaacatttggtgttacctttttcctgat

SEQ ID NO: 65281 - DNA, 120 bp, synthetic construct; identical to SEQ ID NO: 23575
  source 1..120: mol_type = other DNA

SEQ ID NO: 65282 - DNA, 120 bp, synthetic construct; identical to SEQ ID NO: 23576
  source 1..120: mol_type = other DNA

SEQ ID NO: 65283 - DNA, 120 bp, synthetic construct; identical to SEQ ID NO: 23577
  source 1..120: mol_type = other DNA

SEQ ID NO: 65284 - DNA, 120 bp, synthetic construct; identical to SEQ ID NO: 23578
  source 1..120: mol_type = other DNA

SEQ ID NO: 65285 - DNA, 120 bp, synthetic construct; identical to SEQ ID NO: 23579
  source 1..120: mol_type = other DNA

SEQ ID NO: 65286 - DNA, 120 bp, synthetic construct
  source 1..120: mol_type = other DNA
ggagaatggcatgaacctgggaggcagagtttgcagtgagcccagatcgccatggcactccagcctgggggacagaatgagattccatcaaaaaaaaaaaaaaggtaatactttttaaaa

SEQ ID NO: 65287 - DNA, 120 bp, synthetic construct; identical to SEQ ID NO: 23580
  source 1..120: mol_type = other DNA

SEQ ID NO: 65288 - DNA, 120 bp, synthetic construct; identical to SEQ ID NO: 23581
  source 1..120: mol_type = other DNA

SEQ ID NO: 65289 - DNA, 120 bp, synthetic construct; identical to SEQ ID NO: 23582
  source 1..120: mol_type = other DNA

SEQ ID NO: 65290 - DNA, 120 bp, synthetic construct; identical to SEQ ID NO: 14380
  source 1..120: mol_type = other DNA

SEQ ID NO: 65291 - DNA, 120 bp, synthetic construct
  source 1..120: mol_type = other DNA
gatgatgagcattttttcatgtgtcttttggcagcataaatgtcgtcttttgagaagtgtctgttcatatcgtttgcccactttttgatggggttgtttttttcttgtaaatttgtttga

SEQ ID NO: 65292 - DNA, 120 bp, synthetic construct
  source 1..120: mol_type = other DNA
tagacagagctgatttaccaagacaggggaattgcaatagagaaagagcaattcacccaaagccagctgtgtgggagaccaggatttttattattagtcaaatcagtctcttggagcatt

SEQ ID NO: 65293 - DNA, 120 bp, synthetic construct
  source 1..120: mol_type = other DNA
cctctgcccggccgcccagtctgggaagtgaggagcgtctccgcccggccgccatcccatctaggaagtgaggagcgcctcttcccagccgccatcacatctaggaagtgaggagcgtct

SEQ ID NO: 65294 - DNA, 120 bp, synthetic construct
  source 1..120: mol_type = other DNA
aatcttataacttccagctgcacgactcctaaaccataatttctaatctgtggctaattcattaaacctacaaaggcagtctagtccccaggcaagaagggggtttgttttaggaaaggg

SEQ ID NO: 65295 - DNA, 120 bp, synthetic construct; identical to SEQ ID NO: 12172
  source 1..120: mol_type = other DNA

SEQ ID NO: 65296 - DNA, 120 bp, synthetic construct
  source 1..120: mol_type = other DNA
cgagggctctattctgttccattggtctatatctctgttttggttcccatgctgttttggttactgtagccttgtagtacagtttgaagtcaggtagcgtgatgtctccagctttgttct

SEQ ID NO: 65297 - DNA, 120 bp, synthetic construct; identical to SEQ ID NO: 28290
  source 1..120: mol_type = other DNA

SEQ ID NO: 65298 - DNA, 120 bp, synthetic construct; identical to SEQ ID NO: 28291
  source 1..120: mol_type = other DNA

SEQ ID NO: 65299 - DNA, 120 bp, synthetic construct; identical to SEQ ID NO: 29516
  source 1..120: mol_type = other DNA

SEQ ID NO: 65300 - DNA, 120 bp, synthetic construct
  source 1..120: mol_type = other DNA
gtgtctcatgcctgtaattccagcactttgagaggccaaggtgggagttcagaagtttgggaccatcctgggcaatagagtgagacctcgtctctaccaaaaattaaaaaattagccaag

SEQ ID NO: 65301 - DNA, 120 bp, synthetic construct; identical to SEQ ID NO: 29517
  source 1..120: mol_type = other DNA

SEQ ID NO: 65302 - DNA, 120 bp, synthetic construct; identical to SEQ ID NO: 29518
  source 1..120: mol_type = other DNA

SEQ ID NO: 65303 - DNA, 120 bp, synthetic construct; identical to SEQ ID NO: 29519
  source 1..120: mol_type = other DNA

SEQ ID NO: 65304 - DNA, 120 bp, synthetic construct; identical to SEQ ID NO: 29520
  source 1..120: mol_type = other DNA

SEQ ID NO: 65305 - DNA, 120 bp, synthetic construct
  source 1..120: mol_type = other DNA
agcaacggtcctgctaaggcaagattacaggggatcagaacacagggaggtgtcagcctctagcaggggaacagctaccttccattattttatgtatgtgtgtatatatatatatacaca

SEQ ID NO: 65306 - DNA, 120 bp, synthetic construct
  source 1..120: mol_type = other DNA
tgctgggattacaggtgtgagccaccatgcctggcctatcatttcttcttttctttccaaaatgtgttaaaataccctatttgataatgatccctctctcattttctttgtccttgtggg

SEQ ID NO: 65307 - DNA, 120 bp, synthetic construct; identical to SEQ ID NO: 29521
  source 1..120: mol_type = other DNA

SEQ ID NO: 65308 - DNA, 120 bp, synthetic construct
  source 1..120: mol_type = other DNA
cgccacactgacttccacaatggttgaactagtttacagtcccaccaacagtgtaaaagtgttcctgtttctccacatcctctccagcacctgttgtttcctgactttttaatgattgcc

SEQ ID NO: 65309 - DNA, 120 bp, synthetic construct
  source 1..120: mol_type = other DNA
aactaaagagcttctgcacagcaaaagaaactaccatatatcttctttagagaaatgtttattcaagtcctttgcccatttctgaattgggtttttcatcgctgagttttaggagttctc

SEQ ID NO: 65310 - DNA, 120 bp, synthetic construct; identical to SEQ ID NO: 13310
  source 1..120: mol_type = other DNA

SEQ ID NO: 65311 - DNA, 120 bp, synthetic construct; identical to SEQ ID NO: 13311
  source 1..120: mol_type = other DNA

SEQ ID NO: 65312 - DNA, 120 bp, synthetic construct; identical to SEQ ID NO: 13312
  source 1..120: mol_type = other DNA

SEQ ID NO: 65313 - DNA, 120 bp, synthetic construct; identical to SEQ ID NO: 13313
  source 1..120: mol_type = other DNA

SEQ ID NO: 65314 - DNA, 120 bp, synthetic construct; identical to SEQ ID NO: 30106
  source 1..120: mol_type = other DNA

SEQ ID NO: 65315 - DNA, 120 bp, synthetic construct; identical to SEQ ID NO: 30107
  source 1..120: mol_type = other DNA

SEQ ID NO: 65316 - DNA, 120 bp, synthetic construct
  source 1..120: mol_type = other DNA
gagatgtgttgaaatatttgtgatgtttgggcatgtctttttttttttgtacttatggaaaaatttgttccttaatccccccctctgcctcccgccccccgccccaaggggatctctttt

SEQ ID NO: 65317 - DNA, 120 bp, synthetic construct; identical to SEQ ID NO: 23521
  source 1..120: mol_type = other DNA

SEQ ID NO: 65318 - DNA, 120 bp, synthetic construct
  source 1..120: mol_type = other DNA
ccacaacacctggataatttttctggtagagatacgggtctcactatgttgcccaggctggtctcaaactcctggcctcaagcgatcctcctgtcttggcctcccaaagcatttgggatt

SEQ ID NO: 65319 - DNA, 120 bp, synthetic construct; identical to SEQ ID NO: 27488
  source 1..120: mol_type = other DNA

SEQ ID NO: 65320 - DNA, 120 bp, synthetic construct; identical to SEQ ID NO: 27489
  source 1..120: mol_type = other DNA

SEQ ID NO: 65321 - DNA, 120 bp, synthetic construct; identical to SEQ ID NO: 28370
  source 1..120: mol_type = other DNA

SEQ ID NO: 65322 - DNA, 120 bp, synthetic construct; identical to SEQ ID NO: 28369
  source 1..120: mol_type = other DNA

SEQ ID NO: 65323 - DNA, 120 bp, synthetic construct; identical to SEQ ID NO: 7501
  source 1..120: mol_type = other DNA

SEQ ID NO: 65324 - DNA, 120 bp, synthetic construct; identical to SEQ ID NO: 7502
  source 1..120: mol_type = other DNA

SEQ ID NO: 65325 - DNA, 120 bp, synthetic construct; identical to SEQ ID NO: 7503
  source 1..120: mol_type = other DNA

SEQ ID NO: 65326 - DNA, 120 bp, synthetic construct; identical to SEQ ID NO: 7504
  source 1..120: mol_type = other DNA

SEQ ID NO: 65327 - DNA, 120 bp, synthetic construct; identical to SEQ ID NO: 7505
  source 1..120: mol_type = other DNA

SEQ ID NO: 65328 - DNA, 120 bp, synthetic construct; identical to SEQ ID NO: 7506
  source 1..120: mol_type = other DNA

SEQ ID NO: 65329 - DNA, 120 bp, synthetic construct; identical to SEQ ID NO: 7507
  source 1..120: mol_type = other DNA

SEQ ID NO: 65330 - DNA, 120 bp, synthetic construct; identical to SEQ ID NO: 7508
  source 1..120: mol_type = other DNA

SEQ ID NO: 65331 - DNA, 120 bp, synthetic construct; identical to SEQ ID NO: 7509
  source 1..120: mol_type = other DNA

SEQ ID NO: 65332 - DNA, 120 bp, synthetic construct
  source 1..120: mol_type = other DNA
ttttgttgatcttttaaaaacaccaggtcctggattcattgattttttctgaagagtttttgtgtgtctctatctctttcagttctgctctgatcttagctatttcttgccttctgctag

SEQ ID NO: 65333 - DNA, 120 bp, synthetic construct
  source 1..120: mol_type = other DNA
tatatacccagtaatgggatggctgggtcaaatggtatttctagttctagatccctgaactcacaccagttagaatggcaatcattgagtgagtttcttaatgctgagttctaatttgat

SEQ ID NO: 65334 - DNA, 120 bp, synthetic construct; identical to SEQ ID NO: 7510
  source 1..120: mol_type = other DNA

SEQ ID NO: 65335 - DNA, 120 bp, synthetic construct; identical to SEQ ID NO: 7511
  source 1..120: mol_type = other DNA

SEQ ID NO: 65336 - DNA, 120 bp, synthetic construct
  source 1..120: mol_type = other DNA
cttctgcccatgccgatccctgtgtctggagcactgctcagggctccctcttggcatattcttgctgcacttttttttttttttttttttttatactctaagttttagggtacatgtgca

SEQ ID NO: 65337 - DNA, 120 bp, synthetic construct; identical to SEQ ID NO: 7512
  source 1..120: mol_type = other DNA

SEQ ID NO: 65338 - DNA, 120 bp, synthetic construct; identical to SEQ ID NO: 7513
  source 1..120: mol_type = other DNA

SEQ ID NO: 65339 - DNA, 120 bp, synthetic construct; identical to SEQ ID NO: 10811
  source 1..120: mol_type = other DNA

SEQ ID NO: 65340 - DNA, 120 bp, synthetic construct
  source 1..120: mol_type = other DNA
aacaccatttgtaagcaatgattggtaatgcaaattgagaaccatttttctttctttctctttattaagagacgaggtctcgctatgttgcccaggcaggcctggaactcctggcctcaa

SEQ ID NO: 65341 - DNA, 120 bp, synthetic construct; identical to SEQ ID NO: 23069
  source 1..120: mol_type = other DNA

SEQ ID NO: 65342 - DNA, 120 bp, synthetic construct; identical to SEQ ID NO: 23070
  source 1..120: mol_type = other DNA

SEQ ID NO: 65343 - DNA, 120 bp, synthetic construct; identical to SEQ ID NO: 23071
  source 1..120: mol_type = other DNA

SEQ ID NO: 65344 - DNA, 120 bp, synthetic construct
  source 1..120: mol_type = other DNA
ttaaacaatatgtttgaactatgtgatgcacttacatgcaaatttttgttaaccaaacgtggattaaaaatacagaatgggccgggcgcggtggctcacgcctgtaatcccagcactttg

SEQ ID NO: 65345 - DNA, 120 bp, synthetic construct; identical to SEQ ID NO: 31438
  source 1..120: mol_type = other DNA

SEQ ID NO: 65346 - DNA, 120 bp, synthetic construct; identical to SEQ ID NO: 9106
  source 1..120: mol_type = other DNA

SEQ ID NO: 65347 - DNA, 120 bp, synthetic construct
  source 1..120: mol_type = other DNA
caaagatcagatggctatagatgtgtggtattattactgagagctctgttctgttccattggcctatatctctgttttgataccagtaccatgctgttttggttactgtagccttgtagt

SEQ ID NO: 65348 - DNA, 120 bp, synthetic construct
  source 1..120: mol_type = other DNA
actattccaatcaatagaaaaagagggaatcctccctaactcattttatgaggccagcatcatcctgataccaaagcctggcagagacacaacaaaaaaagagaattttagaccaatatc

SEQ ID NO: 65349 - DNA, 120 bp, synthetic construct; identical to SEQ ID NO: 9107
  source 1..120: mol_type = other DNA

SEQ ID NO: 65350 - DNA, 120 bp, synthetic construct
  source 1..120: mol_type = other DNA
cctctccagcacctgttgtttcctgactttttaatgattgccattctaactggtgtgagatggtatctcattgtggttttgatttgcatttcactgatggccagtgatgatgagcatttt

SEQ ID NO: 65351 - DNA, 120 bp, synthetic construct
  source 1..120: mol_type = other DNA
ctttaaagtagttttttccaattctgtgaagaaaggcattggtagcttgatggggatggcattgaatctgtaaattaccttaggcagtatggccattttcacgatattgattctttctac

SEQ ID NO: 65352 - DNA, 120 bp, synthetic construct
  source 1..120: mol_type = other DNA
gaatccatctggtctttgacactttttggttggtaagctattgattattgccacaatttcagatcctgttattggtctattcagagattcaacttcttcctggtttagtcttgggagagt

SEQ ID NO: 65353 - DNA, 120 bp, synthetic construct
  source 1..120: mol_type = other DNA
caacaagaagagctaactatcctaaatatatatgcacccaatacaggagcacccagattcataaagcaagtcctgagtgacctacaaagagacttagactcccacacattaataatggga

SEQ ID NO: 65354 - DNA, 120 bp, synthetic construct
  source 1..120: mol_type = other DNA
ttctctctatttcctgaatctgaacgttggcctgccttgctagattggggaaattctccaggataataccctgcagactgttttccaacttggttccattctccccatcacttttaggta

SEQ ID NO: 65355 - DNA, 120 bp, synthetic construct
  source 1..120: mol_type = other DNA
caggcaggcctccttgagctgtggtgggctccacccagttcgagcttccaggctgctttgtttacctacggaagcctggtcaatggcgggcgcccctcccccagcctcgctgccgccttg

SEQ ID NO: 65356 - DNA, 120 bp, synthetic construct
  source 1..120: mol_type = other DNA
ttctcatgtagcattgcttgatgttagagcattggacattttcaggaatatattacccatttcatgcgtgtccatgtgaacagaccaccaaacaggctttgtgtgagcaacatggctgtt

SEQ ID NO: 65357 - DNA, 120 bp, synthetic construct
  source 1..120: mol_type = other DNA
aaaaacagtgtaaaccggcagtgtaaacaagagcagggcatgtatgagtagttgagaacggtgaatatgagtatgactagacagaagatagtagggatgacaagtttttttgggcacagt

SEQ ID NO: 65358 - DNA, 120 bp, synthetic construct
  source 1..120: mol_type = other DNA
ggtcaggtgtggtatcgggaataatgtgggaggccggattgaagtctgggccagggacaacggtaattgtgggagactcaacaaagagtgagtacagctgaaggagccgggaagcagaaa

SEQ ID NO: 65359 - DNA, 120 bp, synthetic construct
  source 1..120: mol_type = other DNA
aggcgagtgataacaggctttaatctttttaaagcgtgctgcgggatgggatattggtgtcgagtggggtaagggtgattaggttttaatgagatggtaaggggtgcatgatcggtcacc

SEQ ID NO: 65360 - DNA, 120 bp, synthetic construct
  source 1..120: mol_type = other DNA
ttttatttaatgtcgggagcagattgggtaataaaatgtattttgagaataagacggcctttagaccttttagggtccagggctgtaaagcgtttcagggttgctgccaaacgagccatg

SEQ ID NO: 65361 - DNA, 120 bp, synthetic construct
  source 1..120: mol_type = other DNA
aaattttagggtacatgtgcacaatgtgcaggttagttacatatgtatacatgtgacatgctggtgcgctgcacccactaactccccccaccccaaaacagtccccagagtgtgatgttc

SEQ ID NO: 65362 - DNA, 120 bp, synthetic construct
  source 1..120: mol_type = other DNA
ggatattagcccattgtcagataagtaggttgcgaaaattttctcccatgctgtaggttgcctgttcactcatggtagtttcttttgctgtgcagaagctctttagcttaattagatccc

SEQ ID NO: 65363 - DNA, 120 bp, synthetic construct
  source 1..120: mol_type = other DNA
cttgaagaggtccttcacatcccttgtaagttggattcctaggtattttattctctttgaagcaattgtgaatgggagttcactcatgatttggctctctgtctgttattggtgtgcttg

SEQ ID NO: 65364 - DNA, 120 bp, synthetic construct
  source 1..120: mol_type = other DNA
attattgccacaatttcagatcctgttattggtctattcagagttcaacttcttcctggtttagtcttgggagagtgtatgtgtccaggaatttatccatttcttctagattttctagtt

SEQ ID NO: 65365 - DNA, 120 bp, synthetic construct
  source 1..120: mol_type = other DNA
tgactttctgtctcgttgatctgtctaatgtttacagggggtgttaaagtctcccattattaatgtgtgggagtctaagtctctttctaggtctctaaggacttgctttatgaatctggg

SEQ ID NO: 65366 - DNA, 120 bp, synthetic construct
  source 1..120: mol_type = other DNA
ggggaagttctcctggataatatcctgcagagtgttttccaacttggttcccttctccccatcactttcaggtacaccaatcagacgtagatttggtctttacacgtagtcccatatttc

SEQ ID NO: 65367 - DNA, 120 bp, synthetic construct
  source 1..120: mol_type = other DNA
cgtcaaatgcttagaacaaaacttggtgcttagtaaacatcaaaacaatggtaacatcactattaccaccatcatcatcaccaccaccaccatcatcatcaccaccaccaccaccatcat

SEQ ID NO: 65368 - DNA, 120 bp, synthetic construct
  source 1..120: mol_type = other DNA
atagggtgctccagggagggtgtaccttgtgttgtgatgggcattgtcatcctttgctcagcatctgacttatttgaagcagacccatatttatttatttatttcctttctttctctctc

SEQ ID NO: 65369 - DNA, 120 bp, synthetic construct
  source 1..120: mol_type = other DNA
tgataaggagtcctagagctgtaaggtaccaggaccaaggtgaaaatagagttaccgccttccagatggataaactgaggcccagagtgaggatgggactcattcctgcatgcccagtga

SEQ ID NO: 65370 - DNA, 120 bp, synthetic construct; identical to SEQ ID NO: 33030
  source 1..120: mol_type = other DNA

SEQ ID NO: 65371 - DNA, 120 bp, synthetic construct; identical to SEQ ID NO: 15526
  source 1..120: mol_type = other DNA

SEQ ID NO: 65372 - DNA, 120 bp, synthetic construct; identical to SEQ ID NO: 13036
  source 1..120: mol_type = other DNA

SEQ ID NO: 65373 - DNA, 120 bp, synthetic construct
  source 1..120: mol_type = other DNA
aaaaaatgttttggttgtttgttgttgttattgttgttgtttttgagacggagtcttgtttttgttgctcaggctggagtgcagtggtacaatctcggctcattgcaacctccacctccc

SEQ ID NO: 65374 - DNA, 120 bp, synthetic construct; identical to SEQ ID NO: 13626
  source 1..120: mol_type = other DNA

SEQ ID NO: 65375 - DNA, 120 bp, synthetic construct; identical to SEQ ID NO: 13627
  source 1..120: mol_type = other DNA

SEQ ID NO: 65376 - DNA, 120 bp, synthetic construct; identical to SEQ ID NO: 13628
  source 1..120: mol_type = other DNA

SEQ ID NO: 65377 - DNA, 120 bp, synthetic construct; identical to SEQ ID NO: 13629
  source 1..120: mol_type = other DNA

SEQ ID NO: 65378 - DNA, 120 bp, synthetic construct
  source 1..120: mol_type = other DNA
ccgccgctgcgggtctctgttgggcagcctcctgggcggctgctgccaaggggagctctttagttttacatgatgaccttgggtgtgggaaaaggaaaagatggcgggaagctggggggt

SEQ ID NO: 65379 - DNA, 120 bp, synthetic construct; identical to SEQ ID NO: 7294
  source 1..120: mol_type = other DNA

SEQ ID NO: 65380 - DNA, 120 bp, synthetic construct
  source 1..120: mol_type = other DNA
ttcttttcttgtaataatcttgtaggatttgtgatcaaggttatactggactcaggaaatgaattaggagggggcagaacagtggaactcagaatgactgcatctaacatcacacggggc

SEQ ID NO: 65381 - DNA, 120 bp, synthetic construct; identical to SEQ ID NO: 27839
  source 1..120: mol_type = other DNA

SEQ ID NO: 65382 - DNA, 120 bp, synthetic construct; identical to SEQ ID NO: 27840
  source 1..120: mol_type = other DNA

SEQ ID NO: 65383 - DNA, 120 bp, synthetic construct
  source 1..120: mol_type = other DNA
tcttgagacagtgggaacaagcttatataatgaagcaaacaataatttttttaaatagatgtttcaatcaatagatcaagaaaaccaaacaccacatgttctcactcataagtgggagct

SEQ ID NO: 65384 - DNA, 120 bp, synthetic construct
  source 1..120: mol_type = other DNA
ctaacataggaatagaaaaccaaatactgcatgttctcatacataagtgggagctaaatgatgaggacacacggacacatagagaggaacaacacacactggagcgtatggaagagttga

SEQ ID NO: 65385 - DNA, 120 bp, synthetic construct
  source 1..120: mol_type = other DNA
agagacatgagtgtgctccctgtctctgctctccaccatatgaggatagaatgagaaggtgaccatctgcaaataaggaagtgggtgttcaccagacactggatctgccagcacctaaat

SEQ ID NO: 65386 - DNA, 120 bp, synthetic construct
  source 1..120: mol_type = other DNA
caggaggcggaggttgcagtgagctgagatcgtgccattgcactccagccttggtgacagtgcggaattccatctcaaaaaatatatatacctatatttatatatatatattacatatat

SEQ ID NO: 65387 - DNA, 120 bp, synthetic construct
  source 1..120: mol_type = other DNA
ctttaatccagtagacaatgagaaacgctgatttgggtctatggcataataggaagtagtatgccacatactgcatgtgggagttctgcaggacagattgggaagtgcatgcgtgtaaga

SEQ ID NO: 65388 - DNA, 120 bp, synthetic construct
  source 1..120: mol_type = other DNA
caatcgaacgatcctctcttattggtcgaaggctcgtccagctccgagcgtgcgtaaggtgagggctccttccgctccgcgactgcgttaactggagccaggctgagcgtcggcgccggg

SEQ ID NO: 65389 - DNA, 120 bp, synthetic construct
  source 1..120: mol_type = other DNA
gaaatatttcaggatttgaggatattccttcttagacatggtcctgcagagtcgtaggaagcatttgtttctgggctatactaaatgtgcatgatttcggcgtcccacaaggtagagaat

SEQ ID NO: 65390 - DNA, 120 bp, synthetic construct
  source 1..120: mol_type = other DNA
atttgagaacactgtgagatagtatataatcaaatactggaatgtgtaatgcaggcggagtgctgagtaggaggaagtaagatgccaaaacatccttttctgcagttggccatggtaggt

SEQ ID NO: 65391 - DNA, 120 bp, synthetic construct
  source 1..120: mol_type = other DNA
ccttctgggttgcagctaagattttaactcaaatgaattaactttttaaaacaatgaatctgattgacataatgaggaataatctgagctgaagagtttttttttcagggaaagagggtt

SEQ ID NO: 65392 - DNA, 120 bp, synthetic construct
  source 1..120: mol_type = other DNA
gcagttgttgtggatcaacagtttgaaaactgtttagctagtggtgtggtatgtctgaaatgtagagaacatggagtgatgcagtgagagatgacacttggtatttgctttggttcctta

SEQ ID NO: 65393 - DNA, 120 bp, synthetic construct
  source 1..120: mol_type = other DNA
gatacttaacatgcattttatatctaggtaattagaaaatgtgaatagctgtttctcacttgtgttttctgcttgattgctcttctacttgcaaggcttaggtaataaggtcgagatact

SEQ ID NO: 65394 - DNA, 120 bp, synthetic construct
  source 1..120: mol_type = other DNA
tgcctgtaatcccagcactttgggaggccaaagcaggagaattgtttgagcctaggagttcaagaccagcctgggcaacctggacaacatagtaagacccagtctttaaaaaaaaattaa

SEQ ID NO: 65395 - DNA, 120 bp, synthetic construct
  source 1..120: mol_type = other DNA
attgctgaaagtgtgctgcatgcattgaatagtttccttattattggcaattagacattctgaaatttgagaccttaataatttggagtaaactagtattatctcagaatgctgtgtgac

SEQ ID NO: 65396 - DNA, 120 bp, synthetic construct
  source 1..120: mol_type = other DNA
acagtggttttgctttttttagagctttgcttttttttttttaagagctttttagtgctattattgccaatttagtttacagaaagtttgtttagtttatccttccacaggtagtgatca

SEQ ID NO: 65397 - DNA, 120 bp, synthetic construct
  source 1..120: mol_type = other DNA
acacatcagagagcagaacaagatctaatggaagagaaacccagggtagattgattgattgattgatttgagatgtagtctcactctgtcacccaggctggagtgcagtggcgagatctt

SEQ ID NO: 65398 - DNA, 120 bp, synthetic construct
  source 1..120: mol_type = other DNA
caggagaattgcttgaacccaggaggcagaggttgcagtgaaccaagatcacaccattgcacattgcactccagcctgggaaacaaagtgagactacatctcaaaaaaaaattttttaaa

SEQ ID NO: 65399 - DNA, 120 bp, synthetic construct
  source 1..120: mol_type = other DNA
acgctgtgtgaaggtctcctaatcattaggattatattttatggctttcttataaagaccatacttggttaactactgtgtatttcctggtaccttagagccctcaatgagatgcctcat

SEQ ID NO: 65400 - DNA, 120 bp, synthetic construct
  source 1..120: mol_type = other DNA
aatattgtgcagagagaaatagtagatagtcaagtcatgaaagcattggtcaagtatggttttaatggcctcaagtttgaaaagattatattcagctactatttaaaatgtagtttgatt

SEQ ID NO: 65401 - DNA, 120 bp, synthetic construct
  source 1..120: mol_type = other DNA
ttatcaattgtgtattaaacactaccattctgcctggcattgtgatatggggacatgagagaaggcaagagctttgctcttgagggacttagagttctgttgttattcctgctgtttcct

SEQ ID NO: 65402 - DNA, 120 bp, synthetic construct
  source 1..120: mol_type = other DNA
tcgttgaaagcctgttctttggggtgttttcagtagttcagtggggtcactactttagttagttgcatagcaagcttggggctttttttttttcatggtaaggggaagctatgagagata

SEQ ID NO: 65403 - DNA, 120 bp, synthetic construct
  source 1..120: mol_type = other DNA
gaatgcagaggtgaggatgataacataaactccaatgtggcatttttcattacaaaggagctttttcaaggaagaaaaatctagtatctgctgaacactacagctaagttctgggcacgg

SEQ ID NO: 65404 - DNA, 120 bp, synthetic construct
  source 1..120: mol_type = other DNA
gggattacaggtatgagccactgcatgcccggcctgcattcttcaatcatatgctttttagctaaacttagtcattgttctttaaatacagttcccaactctgggttcctattcttgtca

SEQ ID NO: 65405 - DNA, 120 bp, synthetic construct
  source 1..120: mol_type = other DNA
gtagggaaaggtcttttcttgtttttttgggtttttttttggtttggtttttttttttttgagaaggagttttgctattgttgcccaggctggagtgcaatggcatgatcttggctcacc

SEQ ID NO: 65406 - DNA, 120 bp, synthetic construct
  source 1..120: mol_type = other DNA
aattccttagtgatgctgagatcatccagttagtcaatgctaagcatatcccagcctacaagttggaaactctgatggaaactcatgagcgtggtgtatctattcgccgacagttacttt

SEQ ID NO: 65407 - DNA, 120 bp, synthetic construct
  source 1..120: mol_type = other DNA
ctggctcgaaacatctgaagggttcgcagtgataaaggaggcatttgacagcactagcaggtgtgtgagtggatttgtatgtacagttatatctatttgtttattttagaaccagtgtca

SEQ ID NO: 65408 - DNA, 120 bp, synthetic construct
  source 1..120: mol_type = other DNA
aaacacagtctttgcatcttttatttatagatttgcacgtctacagaaacttcatacaagtatagctggacgcaacctttatatccgtttccagtccaggtcaggggatgccatggggat

SEQ ID NO: 65409 - DNA, 120 bp, synthetic construct
  source 1..120: mol_type = other DNA
tatcatgggtttggggaaggggaaaatgggtggttgttatttagtaagtacagagtttttgttttgtgagatgaaaagagttctgggagcaaagacatggaaccaacccaaatgcccatc

SEQ ID NO: 65410 - DNA, 120 bp, synthetic construct
  source 1..120: mol_type = other DNA
tgactacaaagaacttggttttcataccgagaaagaaacacattaggaatttatacctgaccaagaaagtaattgtgatggttaacaaaacagctgttacttttgtgctcagtttctttg

SEQ ID NO: 65411 - DNA, 120 bp, synthetic construct
  source 1..120: mol_type = other DNA
agcacagaatgttggtagttcaaactgtattactttaatggaagcaagtggtcccacaaatgaagatttatatatcagctgcaccatgccatctatagagataggaacggtgggtggtgg

SEQ ID NO: 65412 - DNA, 120 bp, synthetic construct
  source 1..120: mol_type = other DNA
agatcaatttacaagacctccaaggagcttgcaccaagaagacagcctgaatagcccgacagttctgaactggaacatgggcattgggttctaaaggactaacataaaatctgtgaatta

SEQ ID NO: 65413 - DNA, 120 bp, synthetic construct
  source 1..120: mol_type = other DNA
aataaaaatcaacttgtgtactgataaaatactctagcctgggccagagaagataatgttctttaatgttgtccaggaaaccctggcttgcttgccgagcctaatgaaagggaaagtcag

SEQ ID NO: 65414 - DNA, 120 bp, synthetic construct
  source 1..120: mol_type = other DNA
tgggattacaggcacctgccaccacacctggctaatttttttttgcatttttagtagggacagggtttcaccatgttggccaggctcaaatgtggaaattctgtaaataaaatttaaacc

SEQ ID NO: 65415 - DNA, 120 bp, synthetic construct; identical to SEQ ID NO: 4920
  source 1..120: mol_type = other DNA

SEQ ID NO: 65416 - DNA, 120 bp, synthetic construct; identical to SEQ ID NO: 7401
  source 1..120: mol_type = other DNA

SEQ ID NO: 65417 - DNA, 120 bp, synthetic construct; identical to SEQ ID NO: 7402
  source 1..120: mol_type = other DNA

SEQ ID NO: 65418 - DNA, 120 bp, synthetic construct; identical to SEQ ID NO: 34262
  source 1..120: mol_type = other DNA

SEQ ID NO: 65419 - DNA, 120 bp, synthetic construct
  source 1..120: mol_type = other DNA
aactaaagagcttctgcacagcaaaagaaactaccatcagagtggacaggcaagctacaaaatgggagaaaattttcacaaccgactcatctgacaaagggctaatattcagaatctaca

SEQ ID NO: 65420 - DNA, 120 bp, synthetic construct
  source 1..120: mol_type = other DNA
agaaaactataggccaatatctctcttgaatattgatgcaaaaatcctcaacgaaatacttcaaaactgagttcaataatacactaaaaagatcaggctgggcttggtggctcacacctg

SEQ ID NO: 65421 - DNA, 120 bp, synthetic construct; identical to SEQ ID NO: 34263
  source 1..120: mol_type = other DNA

SEQ ID NO: 65422 - DNA, 120 bp, synthetic construct
  source 1..120: mol_type = other DNA
gctacaaatagaataaaatacccaggaatccaacttacaagggatgtgaaggacctcttcaaggagaactacaaaccactgctcaatgaaataaaagaggacacaaacaaatggaagaac

SEQ ID NO: 65423 - DNA, 120 bp, synthetic construct
  source 1..120: mol_type = other DNA
caacactgcaccctctgctcaatgcccccttttatttttccacgtctgatgctactttgtctccctttccctccatctcttcctcctcttttctctctcggatcactcttgggtttcttt

SEQ ID NO: 65424 - DNA, 120 bp, synthetic construct
  source 1..120: mol_type = other DNA
acatagctcaaaaaataaaaaaataaatttgcacctgaggcaagtgtcacactcatcccaactcagtctcaccttgcatgttttctgccttgctggctgtatgaccctggacaagttact

SEQ ID NO: 65425 - DNA, 120 bp, synthetic construct
  source 1..120: mol_type = other DNA
gacgagacggacgacgatggggaagacttcacgccacccatcctcaaagagctggagaacctcagccctgaggaggcggcccaccagaaagccgtggtggagacccttctgcagtaagga

SEQ ID NO: 65426 - DNA, 120 bp, synthetic construct
  source 1..120: mol_type = other DNA
atttctcttttgttttataaatttataaatggcaaaaggctctgataaggtctgtgatcattaacttgtaggaatggtggcctggaaagatctgggccaacccacctcccacctagtggg

SEQ ID NO: 65427 - DNA, 120 bp, synthetic construct
  source 1..120: mol_type = other DNA
aggcttgatccacagcatttgaaggggaagcagaggtcaaagtgcttcctagggaccagcagagacctggaagctgaggcagagagtgtagagagaggccattgggggagatggacagag

SEQ ID NO: 65428 - DNA, 120 bp, synthetic construct
  source 1..120: mol_type = other DNA
ggaataaagtccaaactccctgccttggtttcgttcccctccctccaccccaccaaattcctggatctcttcccaggtctttctcttcctctcggcctttgctgcagtcattttggcttt

SEQ ID NO: 65429 - DNA, 120 bp, synthetic construct
  source 1..120: mol_type = other DNA
ttctgagcctcagtttcgtctgcagggtagagatgacaatagcccttgtccacagggttaaatggcatggcacttgtagagtaaacatgtagtaactgcaatatacagcagttattatta

SEQ ID NO: 65430 - DNA, 120 bp, synthetic construct
  source 1..120: mol_type = other DNA
acccattagagtcaaagcaggagatgcctggagacttgtcctcttagttctttcctttttctttctttctttttttttttttgagatggagtctcactctgttgctgggggtggagtgca

SEQ ID NO: 65431 - DNA, 120 bp, synthetic construct
  source 1..120: mol_type = other DNA
tggctctaggatcagataaacatgtttgccacagagcaccaggctggactttgtactgcccttccttctgagctctgactggcactcagcaaagcagggagatgaaggagagaggatcct

SEQ ID NO: 65432 - DNA, 120 bp, synthetic construct
  source 1..120: mol_type = other DNA
gcccaggagtttgagaccagcctggccaacatagcaagaccctgtctctatgaaaaaaaaaaaatagaaaaaagaagaaaaagtacaaaaattagctgggcatgttggcatgtgcctgtg

SEQ ID NO: 65433 - DNA, 120 bp, synthetic construct
  source 1..120: mol_type = other DNA
caagttcaaatcccagtctgcctgtttcagtgctgctgtattgagctgtatttatctgtaactttttgtttgtttgtttgttttttgagacggagtctcactctgttgcccaggctggaa

SEQ ID NO: 65434 - DNA, 120 bp, synthetic construct
  source 1..120: mol_type = other DNA
atatatacacatatatatatatacagagagagagaagccactgaggcccacagaatttgcatcattttattccttgtccaaggtcacaggacaagcagagtcccacccacctgaaaggat

SEQ ID NO: 65435 - DNA, 120 bp, synthetic construct
  source 1..120: mol_type = other DNA
taggcctgtgtccacgtttgtcatgtgtgtgcgtctacaagtctctgtcctcatgaccatgtgtctgtgtccctgtgtcctggcataaatgaccatacctcaccgtccctgagtctatgt

SEQ ID NO: 65436 - DNA, 120 bp, synthetic construct
  source 1..120: mol_type = other DNA
gactggggagtaacctgttcttcctcaggaaggcagaggtatcaggaagcctcacattgcaaatatgacctttagaatatgacctttagactaggtcttaaagtgggagttgaattttga

SEQ ID NO: 65437 - DNA, 120 bp, synthetic construct
  source 1..120: mol_type = other DNA
caacatggcaaggttcctcctctaaaaaagaaagaaaggaaagatgataggaaagggaggaaagataggaaagggaggaaagataggaaagggaggaaaggtaggaaagggaggaaaggt

SEQ ID NO: 65438 - DNA, 120 bp, synthetic construct
  source 1..120: mol_type = other DNA
caagatcacgccactgcactccagcctgggtgacagagggagactctgtcaaataaatgtatgtatgtatgtatgtatgtatgtatgatgtatgtatgtatgcatgcatgcatgcatgca

SEQ ID NO: 65439 - DNA, 120 bp, synthetic construct
  source 1..120: mol_type = other DNA
aagtgatccctgcctcagcctcttaagtagctggaatggcaggcacacatcactgtgtctgctataacagaaacttttaaatgaagtctaacataaaaagtgcccaaatccaaagcatac

SEQ ID NO: 65440 - DNA, 120 bp, synthetic construct
  source 1..120: mol_type = other DNA
atgatttctaagttctagctgtaagctcctctggttcagcgccatggcaatgagaaagaatcaagggcaaggtcaggggaatggacgtgggaaggtgagagtggccagtaccccactcac

SEQ ID NO: 65441 - DNA, 120 bp, synthetic construct
  source 1..120: mol_type = other DNA
cctaaacctctttgcacttcagtttggttccattccattcatgccactccttatcactctacttcactctgttcattcatccattccactctatctcattccattcactctactcctttc

SEQ ID NO: 65442 - DNA, 120 bp, synthetic construct
  source 1..120: mol_type = other DNA
tacataccattttattctatctgtcccatccactcaactccattcactccacatgactccacatttcatccattccactctacttcatccactcactccactctataccattccactcca

SEQ ID NO: 65443 - DNA, 120 bp, synthetic construct
  source 1..120: mol_type = other DNA
ctggagcccagccacagcctgctgagtacagaagccaagctggtgagtgtccttgcttgtaaggaaaacccaacctcatctttccttggcagggagattctggagcagtccctagggagg

SEQ ID NO: 65444 - DNA, 120 bp, synthetic construct
  source 1..120: mol_type = other DNA
caacttttgaacaagtcaccgcctgcctctcccactagcctagacaaagagctaaaggctcagagagggggaatgacttgccagagccacttaaattagtggcaggtcccagtggagggc

SEQ ID NO: 65445 - DNA, 120 bp, synthetic construct
  source 1..120: mol_type = other DNA
agctgagattgtgccactgcactgcactccagcctgggcaacagagtgagtactctgccaaaaaaaaaaaaaagaaaaagaaaagtaatttggtggatatgccagctatcacataacact

SEQ ID NO: 65446 - DNA, 120 bp, synthetic construct
  source 1..120: mol_type = other DNA
aagcccgaggtggcccagtacacccacacgggcctgctcccgcagactatgctcatcaccgacaccaccaacctgagcgccctggccagcctcacgcccaccaagcaggtaaggtccagg

SEQ ID NO: 65447 - DNA, 120 bp, synthetic construct
  source 1..120: mol_type = other DNA
cacagctaccagatggcagggccaggactcgaacccaggtcccacctcaaagcccattctcttaaccattgccatcagtcagggttctccaggaacacagaaccaacagatttatttgaa

SEQ ID NO: 65448 - DNA, 120 bp, synthetic construct
  source 1..120: mol_type = other DNA
ggtcgtggagagctaggagcaaagcctgttcatggcagatgtaggagggactgtcgctgcttcgtgggatacagtcttcttacttggaactgaagggggcggcctatgacttgggcaccc

SEQ ID NO: 65449 - DNA, 120 bp, synthetic construct
  source 1..120: mol_type = other DNA
tgtaccgcgtctaccctgggattcaggaaaaggcctggggtgacccggcaccccctgcagcttgtagccagccggggcgagtggcacgtttatttaacttttagtaaagtcaaggagaaa

SEQ ID NO: 65450 - DNA, 120 bp, synthetic construct
  source 1..120: mol_type = other DNA
ttgaacctgggaggcggaggttgcagcaagccgagatcgtgccattgctctccagcctgagtgacaagagcgaaacttcatcttaaaaaaaaaaaaaaaaaaaaaaaaagaagtattcca

SEQ ID NO: 65451 - DNA, 120 bp, synthetic construct
  source 1..120: mol_type = other DNA
tgctaccctgggaactggttttaaaatcttacgttctgattgctgccgtggccatgtgctggtgtgtgatggggagatgttcttttaggtaactaaatccaacgagctgtgattggtgat

SEQ ID NO: 65452 - DNA, 120 bp, synthetic construct; identical to SEQ ID NO: 22536
  source 1..120: mol_type = other DNA

SEQ ID NO: 65453 - DNA, 120 bp, synthetic construct; identical to SEQ ID NO: 22537
  source 1..120: mol_type = other DNA

SEQ ID NO: 65454 - DNA, 120 bp, synthetic construct
  source 1..120: mol_type = other DNA
ctatggcggttccagcagcagcagtagctatggcagtggcagaagattttaattaggtaagtaagcacctttttgtgtgttgacataattttttaaattgctgatgaacccaataaccct

SEQ ID NO: 65455 - DNA, 120 bp, synthetic construct; identical to SEQ ID NO: 12964
  source 1..120: mol_type = other DNA

SEQ ID NO: 65456 - DNA, 120 bp, synthetic construct
  source 1..120: mol_type = other DNA
gaggtcgaaggggttctggaaactttggtggtggtcgtggagatggtttcggtgggaatgacaactttggtcgtggaggaaacttcagtggtcgtggtggctttggtggcagctgtggtg

SEQ ID NO: 65457 - DNA, 120 bp, synthetic construct; identical to SEQ ID NO: 16468
  source 1..120: mol_type = other DNA

SEQ ID NO: 65458 - DNA, 120 bp, synthetic construct
  source 1..120: mol_type = other DNA
ctttggtggcagctgtggtggtggtggatatggtggcagtggggatggctataatggatttggtaatgatggaagcaattttggaggtggtggaagctacaatgattttggcaattacaa

SEQ ID NO: 65459 - DNA, 120 bp, synthetic construct; identical to SEQ ID NO: 14218
  source 1..120: mol_type = other DNA

SEQ ID NO: 65460 - DNA, 120 bp, synthetic construct; identical to SEQ ID NO: 14219
  source 1..120: mol_type = other DNA

SEQ ID NO: 65461 - DNA, 120 bp, synthetic construct; identical to SEQ ID NO: 7085
  source 1..120: mol_type = other DNA

SEQ ID NO: 65462 - DNA, 120 bp, synthetic construct; identical to SEQ ID NO: 7086
  source 1..120: mol_type = other DNA

SEQ ID NO: 65463 - DNA, 120 bp, synthetic construct; identical to SEQ ID NO: 7085
  source 1..120: mol_type = other DNA

SEQ ID NO: 65464 - DNA, 120 bp, synthetic construct; identical to SEQ ID NO: 7086
  source 1..120: mol_type = other DNA

SEQ ID NO: 65465 - DNA, 120 bp, synthetic construct; identical to SEQ ID NO: 19520
  source 1..120: mol_type = other DNA

SEQ ID NO: 65466 - DNA, 120 bp, synthetic construct; identical to SEQ ID NO: 26852
  source 1..120: mol_type = other DNA

SEQ ID NO: 65467 - DNA, 120 bp, synthetic construct; identical to SEQ ID NO: 26853
  source 1..120: mol_type = other DNA

SEQ ID NO: 65468 - DNA, 120 bp, synthetic construct; identical to SEQ ID NO: 26854
  source 1..120: mol_type = other DNA

SEQ ID NO: 65469 - DNA, 120 bp, synthetic construct; identical to SEQ ID NO: 15586
  source 1..120: mol_type = other DNA

SEQ ID NO: 65470 - DNA, 120 bp, synthetic construct
  source 1..120: mol_type = other DNA
catttgggtatatacccagtaatgggatggctgggtcaagtggtatttctagttctagatccctgaggaatcgccacactgacttccacaatggttgaactagtttacagtcccaccaac

SEQ ID NO: 65471 - DNA, 120 bp, synthetic construct
  source 1..120: mol_type = other DNA
ggcttaggattgacttggcaatgcgggctcttttttggttccatatgaactttaaagtagttttttccaattctgtgaagaaagtcattggtagcttgatggggatggcattgaatctgt

SEQ ID NO: 65472 - DNA, 120 bp, synthetic construct
  source 1..120: mol_type = other DNA
ggtatcagaatgatgctggcctcataaaatgagttagggaggattccctctttttctattgattggaatagtttcagaaggaatggtaccagttcctccatgtacctctggtagaattcg

SEQ ID NO: 65473 - DNA, 120 bp, synthetic construct
  source 1..120: mol_type = other DNA
gttgagcggctttgagtgagattcttaatcctgagttctagtttgactgcactgtggtctgagagatagtttgttataatttctgttcttttacatttgctgaggagagctttacttcca

SEQ ID NO: 65474 - DNA, 120 bp, synthetic construct
  source 1..120: mol_type = other DNA
aatattggcccccactctcttctggcttgtagggtttctgccgagagatccgctgttagtctgatgggctttcctttgagggtaacccgacctttctctctggctgcccttaacattttt

SEQ ID NO: 65475 - DNA, 120 bp, synthetic construct
  source 1..120: mol_type = other DNA
cagctgcgtcctgggagaaccactgctctcttcaaagctgtcagacagggacacttaagtctgcagaggttactgctgtctttttgtttgtctgtgccctgcccccagaggtggagccta

SEQ ID NO: 65476 - DNA, 120 bp, synthetic construct; identical to SEQ ID NO: 15587
  source 1..120: mol_type = other DNA

SEQ ID NO: 65477 - DNA, 120 bp, synthetic construct; identical to SEQ ID NO: 7657
  source 1..120: mol_type = other DNA

SEQ ID NO: 65478 - DNA, 120 bp, synthetic construct; identical to SEQ ID NO: 7658
  source 1..120: mol_type = other DNA

SEQ ID NO: 65479 - DNA, 120 bp, synthetic construct; identical to SEQ ID NO: 19570
  source 1..120: mol_type = other DNA

SEQ ID NO: 65480 - DNA, 120 bp, synthetic construct
  source 1..120: mol_type = other DNA
gagcaaggggttgggggtaaggttatagattaacagcatcccaaggcagaagaatttttcttagtacagaacaaaatggagtctcctatgtctacttctacacagacacagtaacaatct

SEQ ID NO: 65481 - DNA, 120 bp, synthetic construct
  source 1..120: mol_type = other DNA
tatttctccttcacttgtgaagcttagtttggctgggtatgaaattctgggttgaaaatgcttttcttttatttatttatttatttatttatttatttatttttattgatcattcttggg

SEQ ID NO: 65482 - DNA, 120 bp, synthetic construct
  source 1..120: mol_type = other DNA
tgacccccccacctccctcccggacggggtggctgccgggcagagacgctcctcactccccagactgggtggctgctgggcggaggggctcctcacttctcagacggggcggctgccggg

SEQ ID NO: 65483 - DNA, 120 bp, synthetic construct
  source 1..120: mol_type = other DNA
gccaccttcatagctgagactacaggcgtgagccaccgtgcccggcctcattttcttatttatttaattttattctgcttatatattgaacattcatgttctagaggtggactgctatga

SEQ ID NO: 65484 - DNA, 120 bp, synthetic construct; identical to SEQ ID NO: 18266
  source 1..120: mol_type = other DNA

SEQ ID NO: 65485 - DNA, 120 bp, synthetic construct; identical to SEQ ID NO: 18267
  source 1..120: mol_type = other DNA

SEQ ID NO: 65486 - DNA, 120 bp, synthetic construct; identical to SEQ ID NO: 16914
  source 1..120: mol_type = other DNA

SEQ ID NO: 65487 - DNA, 120 bp, synthetic construct; identical to SEQ ID NO: 16915
  source 1..120: mol_type = other DNA

SEQ ID NO: 65488 - DNA, 120 bp, synthetic construct; identical to SEQ ID NO: 16916
  source 1..120: mol_type = other DNA

SEQ ID NO: 65489 - DNA, 120 bp, synthetic construct; identical to SEQ ID NO: 16917
  source 1..120: mol_type = other DNA

SEQ ID NO: 65490 - DNA, 120 bp, synthetic construct; identical to SEQ ID NO: 16918
  source 1..120: mol_type = other DNA

SEQ ID NO: 65491 - DNA, 120 bp, synthetic construct; identical to SEQ ID NO: 16919
  source 1..120: mol_type = other DNA

SEQ ID NO: 65492 - DNA, 120 bp, synthetic construct; identical to SEQ ID NO: 20349
  source 1..120: mol_type = other DNA

SEQ ID NO: 65493 - DNA, 120 bp, synthetic construct; identical to SEQ ID NO: 20350
  source 1..120: mol_type = other DNA

SEQ ID NO: 65494 - DNA, 120 bp, synthetic construct; identical to SEQ ID NO: 20351
  source 1..120: mol_type = other DNA

SEQ ID NO: 65495 - DNA, 120 bp, synthetic construct; identical to SEQ ID NO: 20352
  source 1..120: mol_type = other DNA

SEQ ID NO: 65496 - DNA, 120 bp, synthetic construct; identical to SEQ ID NO: 20353
  source 1..120: mol_type = other DNA

SEQ ID NO: 65497 - DNA, 120 bp, synthetic construct; identical to SEQ ID NO: 20354
  source 1..120: mol_type = other DNA

SEQ ID NO: 65498 - DNA, 120 bp, synthetic construct
  source 1..120: mol_type = other DNA
tgattcttctgcctcagcctcccgagtagctgggattacaggcgcctgtcatgcccagctaatttttgtatatttagtaaagacagggttttgccacgttggccaggctggtctcgaact

SEQ ID NO: 65499 - DNA, 120 bp, synthetic construct; identical to SEQ ID NO: 25647
  source 1..120: mol_type = other DNA

SEQ ID NO: 65500 - DNA, 120 bp, synthetic construct
  source 1..120: mol_type = other DNA
catgtgtcttttggctgcataaatgtcttcttttgagaagtgtctgttcatatctttcgcccacttgttaatggggttgtttgcttttttcatgcaaatatgtttgagttctttatagat

SEQ ID NO: 65501 - DNA, 120 bp, synthetic construct
  source 1..120: mol_type = other DNA
gttaaaatctcccattattgtatgggaatctcagtctctttgtaggtctctaaggacttggtttatgaaactgggtgctcctgtattgggtgcatatatatttaggatagttagctcttc

SEQ ID NO: 65502 - DNA, 120 bp, synthetic construct
  source 1..120: mol_type = other DNA
tcatttcaactttggtgaatctgacaattatgtgtcttggagttgctcttctcgaggagtatctttgtggcgttctctgtatttcctgaatttgaatgttggcctgctttgctggattgg

SEQ ID NO: 65503 - DNA, 120 bp, synthetic construct
  source 1..120: mol_type = other DNA
aagtagctaggattataggtgtgcgccaccacatacagctaatttttgtattttattttttagtggagatggggtttcaccatgttggccaggatggtctcgatcatctgaccttgtgat

SEQ ID NO: 65504 - DNA, 120 bp, synthetic construct
  source 1..120: mol_type = other DNA
cgtctcaccgcagcctctgcctcccgggttcaagcgattctcctgccgcagccaccagagtagctgggattacaggcaccaaccaccacgcccggcaaatttttttctttttttttttct

SEQ ID NO: 65505 - DNA, 120 bp, synthetic construct; identical to SEQ ID NO: 16920
  source 1..120: mol_type = other DNA

SEQ ID NO: 65506 - DNA, 120 bp, synthetic construct; identical to SEQ ID NO: 16921
  source 1..120: mol_type = other DNA

SEQ ID NO: 65507 - DNA, 120 bp, synthetic construct
  source 1..120: mol_type = other DNA
gagccctgggaaaagaggactgcgtgtgggaagagaaggtggaaatggcgttttggttgacatgtgccgcctgcgagcgtgctgcggggaggggccgagggcagattcgggaatgatggc

SEQ ID NO: 65508 - DNA, 120 bp, synthetic construct
  source 1..120: mol_type = other DNA
cctcttggagttattgagaggattataagacagtctatgtgaatcagcaacccttgcatggcccctggcggggaacagtaataatagccatcatcatgtttacttacatagtcctaatta

SEQ ID NO: 65509 - DNA, 120 bp, synthetic construct
  source 1..120: mol_type = other DNA
caccgtgcctggcctaggtagacgcttttagctttggggtgtgatgcctgccccagtatatagtgaatttaattattgctagagctggctgtttgttagttttctttgaacataagatac

SEQ ID NO: 65510 - DNA, 120 bp, synthetic construct
  source 1..120: mol_type = other DNA
actgtgacctgcatactacaagtctactttgttttctatccattgtttgtatctgggtattgcaaaaggtaggaaaaggaccaaccagatcagcagagaagagttgccttggagttttct

SEQ ID NO: 65511 - DNA, 120 bp, synthetic construct
  source 1..120: mol_type = other DNA
ctcttttaattcacatagctcatttttatcttttatttttgtttgttttttttgagatggagtcttgctctgtcaccaggcaggagtgcagtgatgcaatctcggctcactctagccacc

SEQ ID NO: 65512 - DNA, 120 bp, synthetic construct
  source 1..120: mol_type = other DNA
gaactgtgttctagatctctgaggagatgcagtcagatttctgaactgtctcagcaaatggtaagtaacttagagctagtaattaataacctgtcctttgatttctgattcagccaagaa

SEQ ID NO: 65513 - DNA, 120 bp, synthetic construct
  source 1..120: mol_type = other DNA
caacaccaagtcacaaataataaaacagatgtaacttatattcatacagaaagttgggcactgccattgccttgttggtttacacggctgtgctagttcagtagcagaaaggtgctggtc

SEQ ID NO: 65514 - DNA, 120 bp, synthetic construct
  source 1..120: mol_type = other DNA
ccccaactctctccaactgttcctgtcaaagcagccactggattgttaactaatccatattagatggggttaattaatatcagatgggacaagtaagggctaataagattataggccacc

SEQ ID NO: 65515 - DNA, 120 bp, synthetic construct
  source 1..120: mol_type = other DNA
gtgggtgcctgtagtcccagctactgctttgtgaggctgaggcaggcagatcacctgaggtgggaaattcaagaccagcctgaccaacatggagaaaccccatctctactaaaaatacaa

SEQ ID NO: 65516 - DNA, 120 bp, synthetic construct
  source 1..120: mol_type = other DNA
ctgcatatctgggatgaactctgggcagaattcacatgggcttcctttgaaataaacaagacttttcaaattcttagtcgatctgcagaacctgtagccaggcactgaaccattttgata

SEQ ID NO: 65517 - DNA, 120 bp, synthetic construct
  source 1..120: mol_type = other DNA
tacaatgcttaggttgtaaaaggagatgctcaataggtactaactgatatattgagatttaattatggtttgaccaatatttattggaaaccgccaaagcttaaatcatcagcttcttga

SEQ ID NO: 65518 - DNA, 120 bp, synthetic construct
  source 1..120: mol_type = other DNA
aataatcttagacttctaagagtttgggttttcaaaagatcacttagcttttttgggtgatttttcccccttactgtgagatgagagaggctgtttggatttgggattggggtagcgggg

SEQ ID NO: 65519 - DNA, 120 bp, synthetic construct
  source 1..120: mol_type = other DNA
atcactttacttctacattcttgactaagatgactaagacatatagttacatggttttttgttttgttttttgttttttaaagacgaaatctcgctcttgtcccccaggctggagtgcaa

SEQ ID NO: 65520 - DNA, 120 bp, synthetic construct
  source 1..120: mol_type = other DNA
ttcagattagtgatgatgaaccaggttatgaccttgatttattttgcatacctaatcattatgctgaggatttggaaagggtgtttattcctcatggactaattatggacaggtaagtaa

SEQ ID NO: 65521 - DNA, 120 bp, synthetic construct
  source 1..120: mol_type = other DNA
taaccagtccactattgatagacactattttgttcttaccgactgtactagaagaaacattcttttacatgtttggtacttgttcagctttattcaagtggaatttctgggtcaagggga

SEQ ID NO: 65522 - DNA, 120 bp, synthetic construct
  source 1..120: mol_type = other DNA
gggactacaggtacatgctaccatgcctggctaatttttttttttttgcaggcatggggtctcactatattgcccaggttggtgtggaagtttaatgactaagaggtgtttgttataaag

SEQ ID NO: 65523 - DNA, 120 bp, synthetic construct
  source 1..120: mol_type = other DNA
agaccacttatctacatttaactatcaacctcatcctctccattaatcatctattttagtgacccaagtttttgaccttttccatgtttacatcaatcctgtaggtgattgggcagccat

SEQ ID NO: 65524 - DNA, 120 bp, synthetic construct
  source 1..120: mol_type = other DNA
tttttgagacagagtctcactctgttgcccaggctggagtgcagtggcatgatcgtagctcactgcaacctccacctcccgggttcaagcaattcttctgtctcagcctcccgagtagct

SEQ ID NO: 65525 - DNA, 120 bp, synthetic construct
  source 1..120: mol_type = other DNA
cctcagcctctaaaattgctgggattacaggcttgagtcaccatgcccagcctgaagtagcatttctaccctgtttaataattcagcagcttgtcatgtaagatattcatatatgcatat

SEQ ID NO: 65526 - DNA, 120 bp, synthetic construct
  source 1..120: mol_type = other DNA
ctaaagaattctctctctgtgtacacacacacatatgcgtactcttaatccaagtagcttggtaggattttatttacctagtgcctagatgggaaattgcctggggattccaaataccta

SEQ ID NO: 65527 - DNA, 120 bp, synthetic construct
  source 1..120: mol_type = other DNA
gttttttgttgttgttgttgttgttgttttgtttttgtttttgtttttgttttgagacaggatcttgctctgtcacccaggctggagtgcagtggtgccatcttggttcactgcaacctc

SEQ ID NO: 65528 - DNA, 120 bp, synthetic construct
  source 1..120: mol_type = other DNA
aactataactctttatctttaattagaaatgtttttttttttgagacaaggtcttgctctgttgcccagactggaatgcagtggcatagtggcccattgcagctttgaactcctgggctc

SEQ ID NO: 65529 - DNA, 120 bp, synthetic construct
  source 1..120: mol_type = other DNA
tatctatctatctatctaaagcaaattcatgcccttctcctatttattgaatcgagaccatagacaggggtgagagaaagaatttggcaggaatggggatgtgtattatctgtggcataa

SEQ ID NO: 65530 - DNA, 120 bp, synthetic construct
  source 1..120: mol_type = other DNA
tgtggcttttgagcgcttgacacatcttgtgcaacacaggaactgaatttttaagtaatttatattgccacatgtggctaccgtatgggacagtgtagtactagatgatctgtaagggct

SEQ ID NO: 65531 - DNA, 120 bp, synthetic construct
  source 1..120: mol_type = other DNA
agacaaaatagaaataaagacattaagggtatgtgtttgtagtcccaaagagcttctctggcaattttatgtagttgacagtgacgctctgagttcaggacagattggactccttggctg

SEQ ID NO: 65532 - DNA, 120 bp, synthetic construct
  source 1..120: mol_type = other DNA
gttagttagaataagggatgtctgtaatttccctaaattgagaagtaatatgcaaaggttgatatcagaagtcatatgctcaccttgcaacaccaaataatactggcccatttgtgattt

SEQ ID NO: 65533 - DNA, 120 bp, synthetic construct
  source 1..120: mol_type = other DNA
gttcattctccattttcctatgggttcttattgttggagcccaatatataaaagggggtatttgttacagaacctcttcagttttggttcatgtcatgcctgggtttttaccctttctac

SEQ ID NO: 65534 - DNA, 120 bp, synthetic construct
  source 1..120: mol_type = other DNA
catatcatttagaatatcataatgctatggatattagctagctaacttctcaaatcttctagttctcatttaatttgaagtttgtgtgtgtacataaggatatacatatacatatgtgtg

SEQ ID NO: 65535 - DNA, 120 bp, synthetic construct
  source 1..120: mol_type = other DNA
gaatgctactgctttttttttttgaagctgccagttattgtttacttacactatgccaaatataaaggcattaatctcataaaagtttcacaacaatcctgtgagggagacgatatcccc

SEQ ID NO: 65536 - DNA, 120 bp, synthetic construct
  source 1..120: mol_type = other DNA
cgggattacgggtgtgagccaccctgcctggcctcattttgtcttttgggggtatttttgtgtgcagatatatatgtatataaatatttttccctcttttccccagttagtatttgagca

SEQ ID NO: 65537 - DNA, 120 bp, synthetic construct
  source 1..120: mol_type = other DNA
cagataaacaacacatcatgaatcttcttgtggcagtgtttataaccattatgtgaaatgctgcctcattcttataactagcataagaacagataggactttctcgattttgaggggtaa

SEQ ID NO: 65538 - DNA, 120 bp, synthetic construct
  source 1..120: mol_type = other DNA
tttctaacttagtatgcaccatcctaaaggtaagccagggagagaaattcctctgcatcagttttaatggtgggcttgtgttctaaaggagtgagattggttttttgtaaagactactta

SEQ ID NO: 65539 - DNA, 120 bp, synthetic construct
  source 1..120: mol_type = other DNA
cccttagccatcactccccatttccccttcccccagcacctagcaaactgatcatctacctacttgctgtctataagatttgcctattctggacattttgtataaatagaatcatacaat

SEQ ID NO: 65540 - DNA, 120 bp, synthetic construct
  source 1..120: mol_type = other DNA
tcccacctcggcctcgcaaagtgctggtattataggcatgagccactgtgcctggcctgcatttcattttaattataaaatattttgaactcagaaaaaagggtatgctgaatacctacg

SEQ ID NO: 65541 - DNA, 120 bp, synthetic construct
  source 1..120: mol_type = other DNA
tgggtgcctttaaaaatagtataaagcatgtttctcgagtgtagtctgttagccacctatattggagagttgggaggagagagtctctatcttgaatttatgggaaaaattctaaaatac

SEQ ID NO: 65542 - DNA, 120 bp, synthetic construct
  source 1..120: mol_type = other DNA
gtttcatctctcaacaactctggggtggcattattattcccacttttcagataaggttactgaggcatagggaattgtccaaaggtacagagctagtccgctatagagatgagatttgaa

SEQ ID NO: 65543 - DNA, 120 bp, synthetic construct
  source 1..120: mol_type = other DNA
cccagttccagttttcatgttctaggcagagcagtaaagtgagaaacacatggacttgggagtttagtctcgcatttcactgccacttaatctgagcgactattccatatttaatctctc

SEQ ID NO: 65544 - DNA, 120 bp, synthetic construct
  source 1..120: mol_type = other DNA
gcccgactatttaacaaggtatatgtactgttttacaccagtaacatatgagggttccaatatctccacatccttgacaacacttgttactgtcctttttattgtagccatcctagtggc

SEQ ID NO: 65545 - DNA, 120 bp, synthetic construct
  source 1..120: mol_type = other DNA
ccaaaaataaatactggttcttttggcacactagttgttttaccctaaagttcctctttgtaagccagttattaaaagttgtgatgcagccagggcgaagtggtacacatctgtagtccc

SEQ ID NO: 65546 - DNA, 120 bp, synthetic construct
  source 1..120: mol_type = other DNA
caactcattgctgccccttcctagtaatccccataatttagctctccatttcatagtctttccttgggtgtgttaaaagtgaccatggtacactcagcacggatgaaatgaaacagtgtt

SEQ ID NO: 65547 - DNA, 120 bp, synthetic construct
  source 1..120: mol_type = other DNA
tttgatatgcttgaaattatctccttgatttgtctttcaaaactacatattgaggctggttgcggtggctcacacctgtaatcctagcactttgggaggccaagccggacagatcacttg

SEQ ID NO: 65548 - DNA, 120 bp, synthetic construct
  source 1..120: mol_type = other DNA
aatacaaagcctaagatgagagttcaagttgagtttggaaacatctggagtcctattgacatcgccagtaaaattatcaatgttctagttctgtggccatctgcttagtagagctttttg

SEQ ID NO: 65549 - DNA, 120 bp, synthetic construct; identical to SEQ ID NO: 23693
  source 1..120: mol_type = other DNA

SEQ ID NO: 65550 - DNA, 120 bp, synthetic construct
  source 1..120: mol_type = other DNA
catgcacacgtatgtttatagcggcactattcacaatagcaaagatttggaaccaacctaaatgtccaacaacgatagactggattaagaaaatgtggcacatatacaccatggaatact

SEQ ID NO: 65551 - DNA, 120 bp, synthetic construct; identical to SEQ ID NO: 11738
  source 1..120: mol_type = other DNA

SEQ ID NO: 65552 - DNA, 120 bp, synthetic construct; identical to SEQ ID NO: 11739
  source 1..120: mol_type = other DNA

SEQ ID NO: 65553 - DNA, 120 bp, synthetic construct
  source 1..120: mol_type = other DNA
agttttcttacagttccttaaatacattttcattttattcatttacatcccattacacaaacatttgttcattcaaccattgtggaagtcagtgtggcgattcctcagggatctagaact

SEQ ID NO: 65554 - DNA, 120 bp, synthetic construct
  source 1..120: mol_type = other DNA
ttgacagtggggtgttacagtctcccattattaatgtgtgggagtctaagcctctttgtaggtcactcaggacttgctttatgaatctgggtgctcctgtattgggtgcatatatattta

SEQ ID NO: 65555 - DNA, 120 bp, synthetic construct
  source 1..120: mol_type = other DNA
tttcgcaacctactcatctgacaaagggctaatatccagaatctacaatgaactctaacaaatttacaagaaaaaaacaaacaaccccatcaaaaagtgggcaaaggacatgaacagaca

SEQ ID NO: 65556 - DNA, 120 bp, synthetic construct; identical to SEQ ID NO: 11079
  source 1..120: mol_type = other DNA

SEQ ID NO: 65557 - DNA, 120 bp, synthetic construct
  source 1..120: mol_type = other DNA
aaactgcaaggcagcagccaggctgggggaggggtgcccaccattgcccaggctttcttaggtaaacaaagcagcctggaagctcgaactgggtggagcccaccacagctcaaggaggcc

SEQ ID NO: 65558 - DNA, 120 bp, synthetic construct
  source 1..120: mol_type = other DNA
aatgtataactagaataaccaatacagagaagtgcttaaagtagctgatggagctgaaagccaaggctcgagaactacgtgaagaatgcagaagcctcaggagccaatgtgatcaactgg

SEQ ID NO: 65559 - DNA, 120 bp, synthetic construct
  source 1..120: mol_type = other DNA
aacctgctcctgaatgactactgggtacacaacgaaatgaaggcagaaataaagatgtcctttgaaaccaacgagaacaaagacacaacataccagaatctctgggacacattcaaagca

SEQ ID NO: 65560 - DNA, 120 bp, synthetic construct
  source 1..120: mol_type = other DNA
acaaatcaataaatgtaatccagcatataaacagaaccaaagacaaaaaccacatgattatctcaatagatgcagaaaaggcctttcacaaaattcaacaacccttcatgctaaaactct

SEQ ID NO: 65561 - DNA, 120 bp, synthetic construct
  source 1..120: mol_type = other DNA
acagctatctgatctttgacaaacctgagaaaaacaagcaatggggaaaggattccctatttaataaatggtgctgggaaaactggctagccataggtagaaagctgaaactggatccca

SEQ ID NO: 65562 - DNA, 120 bp, synthetic construct
  source 1..120: mol_type = other DNA
atggaatactatgcagccataaaaaatgatgagttcatgtcctttgtagggacatggatgaaattggaaatcatcattctcagtaaactatcgcaaggacaaaaaaccaaacgctgcatg

SEQ ID NO: 65563 - DNA, 120 bp, synthetic construct; identical to SEQ ID NO: 11081
  source 1..120: mol_type = other DNA

SEQ ID NO: 65564 - DNA, 120 bp, synthetic construct
  source 1..120: mol_type = other DNA
ttcttcatgtgttttttggctgcataaatgtcttcttttgagaagtgtctgttcatgtccttcgcccactttttgatggagttgtttgtttttttcttgtaaatttgtttgagttcattg

SEQ ID NO: 65565 - DNA, 120 bp, synthetic construct
  source 1..120: mol_type = other DNA
ggaagttctggccagagcaatcaggcaggagaaggaaataaagggtattcaattaggaaaagaggaagtcaaattgtccctgtttgcagacgacatgattgtttatctagaaaaccccat

SEQ ID NO: 65566 - DNA, 120 bp, synthetic construct
  source 1..120: mol_type = other DNA
gaaaagaatttttaaccaagaatttcatatccagccaaactaagcttcataagtgaaggagaaataaaatactttacagacaagcaaatgctgagagattttgtcaccaccaggcctgcc

SEQ ID NO: 65567 - DNA, 120 bp, synthetic construct
  source 1..120: mol_type = other DNA
tttagctcttcaccaagtggacctaatagacatctacagaactctgcaccccaaatcaacagaataaacattcttttcagcaccacaccacacctattccaaaactgaccacatagttgg

SEQ ID NO: 65568 - DNA, 120 bp, synthetic construct
  source 1..120: mol_type = other DNA
tgataccaaagcctggcagagagacaacaaaaaaaaaagagaattttagaccaatatacctaatgaacatcgacgcaaaaatcctcaataaaatactggcaaaccaaatccagcagcaca

SEQ ID NO: 65569 - DNA, 120 bp, synthetic construct
  source 1..120: mol_type = other DNA
aaataatgccacatatctacagctatctgatctttgacaaacctgagaaaaacaagcaatcgggaaaggattccctatttaataaatggtgctgggaaaactggctagccatatgtagaa

SEQ ID NO: 65570 - DNA, 120 bp, synthetic construct
  source 1..120: mol_type = other DNA
tatacaccatcgaatactaggcagccataaaaaatgatgagttcatgtcctttgtagggacatggatgaaactggaaaccatcattctcagcaaactatcgcaaggacaaaaaaccaaac

SEQ ID NO: 65571 - DNA, 120 bp, synthetic construct
  source 1..120: mol_type = other DNA
atgcgtttctctagtgattggtgatgttgagcttttcttcacgactgtcggttgcatgtatgtcttcttttaaacatgggcaaggacttcatgtctaaaacaccaaaagcaatggcaaca

SEQ ID NO: 65572 - DNA, 120 bp, synthetic construct
  source 1..120: mol_type = other DNA
tagcattaggagatatacctaatgttaaaggacgagttaatgggtgcagcacaccaacatggcacatgtatacatatgtaacaaacctgcacggtgtgcacatgtaccctaatacttaaa

SEQ ID NO: 65573 - DNA, 120 bp, synthetic construct
  source 1..120: mol_type = other DNA
cagcaccacatctcacttattccaaaactgaccacatagttggaagtaaagcactcctcagcaaatgtaaaagaacagaaattatgacaaactctctctcagaccacagtgcaatcaaac

SEQ ID NO: 65574 - DNA, 120 bp, synthetic construct
  source 1..120: mol_type = other DNA
aaaaagagaattttagaccaatatccctgatgaacaacgatgcaaaaatcctcaataaaatactggcaaaccgaatccagcagcacatcaaaaagcttacccaccatgatcaagtgggct

SEQ ID NO: 65575 - DNA, 120 bp, synthetic construct
  source 1..120: mol_type = other DNA
cttaaattgactgtgctaaattaagatgcatagtaaatcccttgagcaactaagaaaacaactgaaaatgagggggaggagccaagatggccgaataggaacagctccagtctacagctc

SEQ ID NO: 65576 - DNA, 120 bp, synthetic construct
  source 1..120: mol_type = other DNA
cagcaacagaacaaagctggacggagaatgactttgacgagctgagagaagaaggcttcagacgatcaaattactctgagctacgggaggacattcaaaccaaaggtaaagaagttgaaa

SEQ ID NO: 65577 - DNA, 120 bp, synthetic construct
  source 1..120: mol_type = other DNA
catgccaaaatataaagaccatcgaaactaggaagaaactgcataaactaacgagcaaaatcaccagctaacatcataatgacaggatcaaattcacacataacaatattaactttaaat

SEQ ID NO: 65578 - DNA, 120 bp, synthetic construct
  source 1..120: mol_type = other DNA
catcacaattaaaagaactagaaacgcaagagcaaacacattcaaaagctagcagaaggcaagaaataactaaaatcagagcagaactgaaggaaatagagacacaaaaaacccttcaaa

SEQ ID NO: 65579 - DNA, 120 bp, synthetic construct
  source 1..120: mol_type = other DNA
aaagcctttgacaaaattcaacaacccttcatgctaaaaactctcaatacattaggtattgatgggacgtatttcaaaataataagagctatctatgacaaacccacagcgaatatcata

SEQ ID NO: 65580 - DNA, 120 bp, synthetic construct
  source 1..120: mol_type = other DNA
ttccctatttaataaatggtgctgggaaaactggctagccatatgtagaaagctgaaactggatcccttccttataccttatacaaaaatcaattcaagatggattaaagacttaaacat

SEQ ID NO: 65581 - DNA, 120 bp, synthetic construct
  source 1..120: mol_type = other DNA
gcagccataaaaaatgatgagttcaggtcctttgtagggacatggatgaaattggaaatcatcattctcagtaaactatcgcaagaacaaaaaaccaaacaccgcatattctcactaata

SEQ ID NO: 65582 - DNA, 120 bp, synthetic construct
  source 1..120: mol_type = other DNA
cagcctgggcgacagagcgagactccgtctcaaaaaaaaaaaaaaaaaaaaaaaagacacacgcacatgtatgtttatggcactgtccacaatagcaaagacttggaaccaaccaaaacg

SEQ ID NO: 65583 - DNA, 120 bp, synthetic construct; identical to SEQ ID NO: 11075
  source 1..120: mol_type = other DNA

SEQ ID NO: 65584 - DNA, 120 bp, synthetic construct; identical to SEQ ID NO: 11076
  source 1..120: mol_type = other DNA

SEQ ID NO: 65585 - DNA, 120 bp, synthetic construct
  source 1..120: mol_type = other DNA
gggactgtcaactagttcaaccattgtggaagtcagtgtggcgattcctcagggatctagaactagaaataccatttgacccagccatcccattactgggtatatacccaaaggactata

SEQ ID NO: 65586 - DNA, 120 bp, synthetic construct
  source 1..120: mol_type = other DNA
tatgcggcattatttctgagggctctgttctgttccattgatctatatctctgttttggtaccagtaccatgctgttttggttactgtagccttgtagtatagtttgaagtcaggtagtg

SEQ ID NO: 65587 - DNA, 120 bp, synthetic construct
  source 1..120: mol_type = other DNA
acttgatcatggtggataagctttttgatgtgctgctggatttgttttgccagtattttattgaggatttttgcatcaatgttcatcaaggatattggtctaaaattctcttttttggtt

SEQ ID NO: 65588 - DNA, 120 bp, synthetic construct
  source 1..120: mol_type = other DNA
actgctttgaatgcgtcccagagattctggtatgtggtgtctttgttctcgttggtttcaaagaacatctttatttctgccttcatttcgttatgtacccagtagtcattcaggagcagg

SEQ ID NO: 65589 - DNA, 120 bp, synthetic construct
  source 1..120: mol_type = other DNA
ttttgcagcggctggtaccggttgttcctttccatgtttagcgcttccttcaggagctcttttagggcaggcctggtggtgacaaaatctctcagcatttgcttgtctataaagtatttt

SEQ ID NO: 65590 - DNA, 120 bp, synthetic construct
  source 1..120: mol_type = other DNA
cgttcctttggaggaggagaggcgctctgcgttttagagtttccagtttttctgttctgttttttccccatctttgtggttttatctacttttggtctttgatggtggtgatgtacagat

SEQ ID NO: 65591 - DNA, 120 bp, synthetic construct; identical to SEQ ID NO: 11077
  source 1..120: mol_type = other DNA

SEQ ID NO: 65592 - DNA, 120 bp, synthetic construct; identical to SEQ ID NO: 11071
  source 1..120: mol_type = other DNA

SEQ ID NO: 65593 - DNA, 120 bp, synthetic construct
  source 1..120: mol_type = other DNA
gcatgttctcactcatagatgggaattgaacaatgagaacacatggacacaggaaggggaacatcacactctggggactgttgtggggtggggggaggggagggatagcattaggagata

SEQ ID NO: 65594 - DNA, 120 bp, synthetic construct
  source 1..120: mol_type = other DNA
gaagaataatatttattaaaacatcgcaattgccttaacaaaccacttaaaaaaaaactcgggggaggagccaagatggctgaataggaatagctccggtctacagctcccagcctgagc

SEQ ID NO: 65595 - DNA, 120 bp, synthetic construct
  source 1..120: mol_type = other DNA
ggaatgatcagacagcagcattcgcggttcacgaaaatccgctcttctgcagccacctctgctgatacccgggcaaacagggtctggagtggacctctagcaaactccaacagacctgca

SEQ ID NO: 65596 - DNA, 120 bp, synthetic construct
  source 1..120: mol_type = other DNA
gttaccctcaaagggaagcccatcagactaacagtggatctcttggcagaaactctacaagccagaagagagtgggggccaatattcaacattcttaaagaaaagaattttcaatctaga

SEQ ID NO: 65597 - DNA, 120 bp, synthetic construct
  source 1..120: mol_type = other DNA
aaaattgaccacatagttggaagtaaagctctcctcagcaaatgcaaaagaatagaaattttaacaaactgtctctcagaccacagtgcaatcaaactagaactcaggattaagaaactc

SEQ ID NO: 65598 - DNA, 120 bp, synthetic construct
  source 1..120: mol_type = other DNA
atctagaagaaatggataaattcctcgacacatacactctgccaagagtaaaccaggaagaagttgaatctctgaatagaccaataacaggatctgaaattgtggcaataatcaatagct

SEQ ID NO: 65599 - DNA, 120 bp, synthetic construct
  source 1..120: mol_type = other DNA
aacagacaaacagagagccaaatcatgagtgaactcccattaacaattgcttcaaagagaataaaatacctaggaatccaacttacaagggatgtgaaggacctcttcaaggagaactac

SEQ ID NO: 65600 - DNA, 120 bp, synthetic construct
  source 1..120: mol_type = other DNA
aaatttacaagaaaaaaacaaacaaccctatcaaaaagtgggcaaaggatatgaacagacacttctcaaaagaagacatttatgcagccaaaagacacatgaaaaaatgctcatcatcac

SEQ ID NO: 65601 - DNA, 120 bp, synthetic construct; identical to SEQ ID NO: 11072
  source 1..120: mol_type = other DNA

SEQ ID NO: 65602 - DNA, 120 bp, synthetic construct
  source 1..120: mol_type = other DNA
aaagaccaaacatatgactgactggagtacctgaaagagacggggaaaatgaaaccaagttggaaaacacacttcaggatattatccagaaaaacttcctcaacctagcaagataggcca

SEQ ID NO: 65603 - DNA, 120 bp, synthetic construct
  source 1..120: mol_type = other DNA
gcccacaagagaaagcgggaaagatccaaaattgacaccctaacatcccaattaaaagaactagaaaagcaagagcaaacacattcaaaagctagcagaaggcaagaaataactaaaatc

SEQ ID NO: 65604 - DNA, 120 bp, synthetic construct
  source 1..120: mol_type = other DNA
gggacatatctcaaaataataagagctatctatgacaaacccacagccaatatcatactgaatgggcaaaaactggaagcattccctttgaaaactggcacaagacagagatgccctctc

SEQ ID NO: 65605 - DNA, 120 bp, synthetic construct
  source 1..120: mol_type = other DNA
ctgaaactggatcccttccttacaccttatacaaaaattaattcaagatggattaaagacttaaacattagacctaaaaccataaaaaccctggaagaaaacctaggcattactatccag

SEQ ID NO: 65606 - DNA, 120 bp, synthetic construct
  source 1..120: mol_type = other DNA
ggatagctttaggagatatacctaatgctaaatgatgagtcaatgggtgcagcacaccagcatggcacatgtatacatatgtaactaacctgcacattgtgcacatgtaccctaaaactt

SEQ ID NO: 65607 - DNA, 120 bp, synthetic construct
  source 1..120: mol_type = other DNA
gtgtcccagagattctggtatgttgtgtctttgttctcgttgggttcaaagaacatctttatttctgccttcatttcgttatgtacccagtagtcattcaggagcaggttgttcagtttc

SEQ ID NO: 65608 - DNA, 120 bp, synthetic construct
  source 1..120: mol_type = other DNA
tgagtagacagtacaaagagtacccatataatttgtcccttacacacacacacacacacacacaaacacacacaaacacacacaatttcccattattatcttgccttggtctgatacagt

SEQ ID NO: 65609 - DNA, 120 bp, synthetic construct
  source 1..120: mol_type = other DNA
cgatttgactgccctgcttgatttcagacttgcatgtggccattagcccctttattttggctaatttctcccatttggaacagctgtatttatccaatgcctgttctaccatttatctag

SEQ ID NO: 65610 - DNA, 120 bp, synthetic construct; identical to SEQ ID NO: 11073
  source 1..120: mol_type = other DNA

SEQ ID NO: 65611 - DNA, 120 bp, synthetic construct; identical to SEQ ID NO: 11074
  source 1..120: mol_type = other DNA

SEQ ID NO: 65612 - DNA, 120 bp, synthetic construct
  source 1..120: mol_type = other DNA
cctatctctcacaaaaataaaatcaaaatggattaaagacttaaatgttagacctcaaactataaaactaccaagagaaaacattgggaaaactctccaggacagtggactaggcaaaat

SEQ ID NO: 65613 - DNA, 120 bp, synthetic construct
  source 1..120: mol_type = other DNA
atggtgagcattttttcatgtgttttttggctgcatatatgtcttcttttgagaagtgtttgttcatgtcctttgcccactttttgatggcgttgtttgtttttttcttgcaaatttgtt

SEQ ID NO: 65614 - DNA, 120 bp, synthetic construct
  source 1..120: mol_type = other DNA
tatcctgagactttgctgaagttgcttatcagcttaaggagattttggcaaaatttcttaagcaataccccgcaagcacaggcaaccaaagcaaaaatggacaaatgggatcacaccaag

SEQ ID NO: 65615 - DNA, 120 bp, synthetic construct; identical to SEQ ID NO: 11078
  source 1..120: mol_type = other DNA

SEQ ID NO: 65616 - DNA, 120 bp, synthetic construct; identical to SEQ ID NO: 24092
  source 1..120: mol_type = other DNA

SEQ ID NO: 65617 - DNA, 120 bp, synthetic construct; identical to SEQ ID NO: 24093
  source 1..120: mol_type = other DNA

SEQ ID NO: 65618 - DNA, 120 bp, synthetic construct; identical to SEQ ID NO: 24094
  source 1..120: mol_type = other DNA

SEQ ID NO: 65619 - DNA, 120 bp, synthetic construct; identical to SEQ ID NO: 24095
  source 1..120: mol_type = other DNA

SEQ ID NO: 65620 - DNA, 120 bp, synthetic construct
  source 1..120: mol_type = other DNA
accttacgtgttgttttttagtcactgtagacttaactctcaatgtagaaaactttgaataaagaaatgtgctggctgggtgcggtggctcatgtctgtaattccagcattttgggaggc

SEQ ID NO: 65621 - DNA, 120 bp, synthetic construct; identical to SEQ ID NO: 8817
  source 1..120: mol_type = other DNA

SEQ ID NO: 65622 - DNA, 120 bp, synthetic construct; identical to SEQ ID NO: 8818
  source 1..120: mol_type = other DNA

SEQ ID NO: 65623 - DNA, 120 bp, synthetic construct; identical to SEQ ID NO: 8819
  source 1..120: mol_type = other DNA

SEQ ID NO: 65624 - DNA, 120 bp, synthetic construct; identical to SEQ ID NO: 8820
  source 1..120: mol_type = other DNA

SEQ ID NO: 65625 - DNA, 120 bp, synthetic construct
  source 1..120: mol_type = other DNA
gtgacctaagccagaagagtgaccggagccagactcatatgggccacggctggaagaccaccctgagccagacccatatgggctgtagctggaagactgcccagaaccagacccatgtcg

SEQ ID NO: 65626 - DNA, 120 bp, synthetic construct; identical to SEQ ID NO: 8819
  source 1..120: mol_type = other DNA

SEQ ID NO: 65627 - DNA, 120 bp, synthetic construct
  source 1..120: mol_type = other DNA
acccatgtcggccatagctgggagactgccttgacccagacccacgctggccgtggcctggagactggccagatccagagccctgtcggccatagccagaagactgacttgagccagagc

SEQ ID NO: 65628 - DNA, 120 bp, synthetic construct
  source 1..120: mol_type = other DNA
aggaaattaaaaagatatatcagactcccatagtaccctaaacgtttatatccatttattctgttttggccaggcgcggtggctcatgcctgtaatcccaacactttgggaggctgaggt

SEQ ID NO: 65629 - DNA, 120 bp, synthetic construct; identical to SEQ ID NO: 7785
  source 1..120: mol_type = other DNA

SEQ ID NO: 65630 - DNA, 120 bp, synthetic construct; identical to SEQ ID NO: 7786
  source 1..120: mol_type = other DNA

SEQ ID NO: 65631 - DNA, 120 bp, synthetic construct; identical to SEQ ID NO: 16347
  source 1..120: mol_type = other DNA

SEQ ID NO: 65632 - DNA, 120 bp, synthetic construct; identical to SEQ ID NO: 16348
  source 1..120: mol_type = other DNA

SEQ ID NO: 65633 - DNA, 120 bp, synthetic construct; identical to SEQ ID NO: 17432
  source 1..120: mol_type = other DNA

SEQ ID NO: 65634 - DNA, 120 bp, synthetic construct; identical to SEQ ID NO: 17433
  source 1..120: mol_type = other DNA

SEQ ID NO: 65635 - DNA, 120 bp, synthetic construct; identical to SEQ ID NO: 4149
  source 1..120: mol_type = other DNA

SEQ ID NO: 65636 - DNA, 120 bp, synthetic construct; identical to SEQ ID NO: 17463
  source 1..120: mol_type = other DNA

SEQ ID NO: 65637 - DNA, 120 bp, synthetic construct; identical to SEQ ID NO: 17464
  source 1..120: mol_type = other DNA

SEQ ID NO: 65638 - DNA, 120 bp, synthetic construct
  source 1..120: mol_type = other DNA
acacattcctgttgagtatattcacatagtggaattccttggtcataatgtgtacttaccttcaaattttggctggatgccatggttcatgcctgtaatcccagcactttgggatgccaa

SEQ ID NO: 65639 - DNA, 120 bp, synthetic construct; identical to SEQ ID NO: 16365
  source 1..120: mol_type = other DNA

SEQ ID NO: 65640 - DNA, 120 bp, synthetic construct; identical to SEQ ID NO: 16366
  source 1..120: mol_type = other DNA

SEQ ID NO: 65641 - DNA, 120 bp, synthetic construct
  source 1..120: mol_type = other DNA
tttttttttaaaagctatgttgttagcacacagaacacttcattgttgtttttgggggaaggggcatatgtcactaatagaatgtctccaaagctggattgatgtggagaaaacaccttt

SEQ ID NO: 65642 - DNA, 120 bp, synthetic construct; identical to SEQ ID NO: 16367
  source 1..120: mol_type = other DNA

SEQ ID NO: 65643 - DNA, 120 bp, synthetic construct; identical to SEQ ID NO: 5818
  source 1..120: mol_type = other DNA

SEQ ID NO: 65644 - DNA, 120 bp, synthetic construct; identical to SEQ ID NO: 28219
  source 1..120: mol_type = other DNA

SEQ ID NO: 65645 - DNA, 120 bp, synthetic construct; identical to SEQ ID NO: 28220
  source 1..120: mol_type = other DNA

SEQ ID NO: 65646 - DNA, 120 bp, synthetic construct; identical to SEQ ID NO: 21438
  source 1..120: mol_type = other DNA

SEQ ID NO: 65647 - DNA, 120 bp, synthetic construct; identical to SEQ ID NO: 21439
  source 1..120: mol_type = other DNA

SEQ ID NO: 65648 - DNA, 120 bp, synthetic construct; identical to SEQ ID NO: 21440
  source 1..120: mol_type = other DNA

SEQ ID NO: 65649 - DNA, 120 bp, synthetic construct; identical to SEQ ID NO: 21441
  source 1..120: mol_type = other DNA

SEQ ID NO: 65650 - DNA, 120 bp, synthetic construct
  source 1..120: mol_type = other DNA
gagaaaacccgggcgctgcgcagtcaagccggcagtagggcagcacaaggcaaggaagagagtgagagcgaggtcagaaagcgcggtgacagccggctcacccagaggagctgggagcct

SEQ ID NO: 65651 - DNA, 120 bp, synthetic construct; identical to SEQ ID NO: 35300
  source 1..120: mol_type = other DNA

SEQ ID NO: 65652 - DNA, 120 bp, synthetic construct
  source 1..120: mol_type = other DNA
ctacaagccagaagagaatgggggccaatattcaacattcttaaagaaaacaattttttttattattattatactttaaattttagggtacatgtgcaccatgtgcagcttacttacata

SEQ ID NO: 65653 - DNA, 120 bp, synthetic construct
  source 1..120: mol_type = other DNA
ctcccattttgtaggttgcctgttcactctgatggtaatttctttttctgtgcagaagctcttgagtttaattagatcccatttgtcaattttggcttttgttgcagttgcttttggtgt

SEQ ID NO: 65654 - DNA, 120 bp, synthetic construct
  source 1..120: mol_type = other DNA
ataccctttatttccttctcctgcctgattgccctggccagaacttccaacactatgttgaataggagtggtgagagagggcatccctgtcttgtgtcagttttcaaagggaatgcttcc

SEQ ID NO: 65655 - DNA, 120 bp, synthetic construct
  source 1..120: mol_type = other DNA
tcaaagatcagatggttgtagatgtgtggtattatttctgagggccctgttctgttccattggtctatatctctgttttggtaccagtaccatgctgttttggttactgtagccttgtag

SEQ ID NO: 65656 - DNA, 120 bp, synthetic construct
  source 1..120: mol_type = other DNA
acaccctcccaagactaaaccaggaagaagttgaatccctgaatagaccaataacaggctctgaaattgaggcaataattaataccctaccaaccaaaaaaaggccaggaccagatggat

SEQ ID NO: 65657 - DNA, 120 bp, synthetic construct; identical to SEQ ID NO: 35301
  source 1..120: mol_type = other DNA

SEQ ID NO: 65658 - DNA, 120 bp, synthetic construct
  source 1..120: mol_type = other DNA
catgatttatagtcctttgggtatatacccagtaatgggatggctgggtcaaatggtatttctagttctagatccctgaggaatcaccacactgacttccacaatggttgaactagttta

SEQ ID NO: 65659 - DNA, 120 bp, synthetic construct
  source 1..120: mol_type = other DNA
aagagaatgcgaggttggcttactacctgtgagtaaattaatgtaaaacactatatcaatagaataaagaggtagggtgtggtgactcacacctgtaatcccagcatgtaggaggccaag

SEQ ID NO: 65660 - DNA, 120 bp, synthetic construct
  source 1..120: mol_type = other DNA
ggctacagcatgaaaccagtcatgccaacattttgatcttggacttccagcctctagaactgtgggagattaaatttctgttgcttaagctaccaagtttgtagtgctttgtaatggcaa

SEQ ID NO: 65661 - DNA, 120 bp, synthetic construct; identical to SEQ ID NO: 13863
  source 1..120: mol_type = other DNA

SEQ ID NO: 65662 - DNA, 120 bp, synthetic construct
  source 1..120: mol_type = other DNA
gagatggtatctcattgtggttttgatttgcatttctctgatggccagtgatgatgagcattttttcatgtgtcttttggctgcataaatgtcttcttttgagaagtgtctgttatatcc

SEQ ID NO: 65663 - DNA, 120 bp, synthetic construct
  source 1..120: mol_type = other DNA
tacagccttaattttctgaatgtgtataggttacaaatataacttttccaccatagagcaaattggtctgtaatatactttttccagccgggcgcggtggctcatgcctgtaatcccagc

SEQ ID NO: 65664 - DNA, 120 bp, synthetic construct
  source 1..120: mol_type = other DNA
ttttgtaatcctttgggtatttacccagtaatgggatggctgggtcaaatggtatttctagttctagatccctgaggaatcaccacactgtcttccacaatggttgaactagtttacagt

SEQ ID NO: 65665 - DNA, 120 bp, synthetic construct
  source 1..120: mol_type = other DNA
tgatctatatctctgttttggtactagtaccatgctgttttggttactgtagccttgtagtatagtttgaagtcaggtagcgtgatgcctccagctttgttcttttggcttaggattgac

SEQ ID NO: 65666 - DNA, 120 bp, synthetic construct
  source 1..120: mol_type = other DNA
acctaatttattgagagtttttagcatgaagggttgttgaattttgtccaaggccttttctgcatctattgagataatcatgtggtttttgtctttggctctgtttatatgctggattac

SEQ ID NO: 65667 - DNA, 120 bp, synthetic construct
  source 1..120: mol_type = other DNA
ctagttcttttaattgtgatgtcagggtgtcaattttggatctttcctgctttctcttgtgggcatttagtgctataaatttccctctacacactgctttgaatgcgtcccagagattct

SEQ ID NO: 65668 - DNA, 120 bp, synthetic construct
  source 1..120: mol_type = other DNA
ttagttgatgcagtttcttcctagtcttgatggtctttacattttggcatgagtttgcagcggccggtaccggttgttcctttccatgtttagcgcttccttcaggagctcttttagggc

SEQ ID NO: 65669 - DNA, 120 bp, synthetic construct
  source 1..120: mol_type = other DNA
aggaggagaggtgctctgcgttttagagtttccagtttttctgctctgttttttccccatctttgtggttttatctacttttggtctttgatgatggtgatgtacagatgggtttttggt

SEQ ID NO: 65670 - DNA, 120 bp, synthetic construct; identical to SEQ ID NO: 13865
  source 1..120: mol_type = other DNA

SEQ ID NO: 65671 - DNA, 120 bp, synthetic construct
  source 1..120: mol_type = other DNA
tgcggtgctgggggtgccctgcggtcttcgtggggccctgaggtcctggggggcctgcgatcctgaggactcctgtggtcctgaggagtcctgagtgcctgggaggcctgtggtcctggg

SEQ ID NO: 65672 - DNA, 120 bp, synthetic construct
  source 1..120: mol_type = other DNA
atgctgaatgtaaacatgccacaaaagaatgctaggatcagaggcatgtttaaagccattagtaaaaataacagaaaaaatgattcagaagccaggcgcggtggctcagcctgtaatccc

SEQ ID NO: 65673 - DNA, 120 bp, synthetic construct
  source 1..120: mol_type = other DNA
tagttcatttttttcaccaattaaaagcaggcggatcacgaggtcaagagatcaagaccatcctggccaacacagtaaagccccatctctactaaaaacacaaaaattagccaggcatag

SEQ ID NO: 65674 - DNA, 120 bp, synthetic construct
  source 1..120: mol_type = other DNA
ctcgagggcgggactggacactcaacaggactgactccccatgggcacagccaaggcgggctcctcagcgcaagagtgggagagttctccacccctgggtgcagggagcgagccaaatag

SEQ ID NO: 65675 - DNA, 120 bp, synthetic construct
  source 1..120: mol_type = other DNA
agaattttccggaggaggaaatccttgagtggggccttggagcatgagtggagataagtggagtatgaaagggatctcggatcagagaaaggatgtgggacaaaggcttaaggcaggagt

SEQ ID NO: 65676 - DNA, 120 bp, synthetic construct
  source 1..120: mol_type = other DNA
cctgtgtgcacacatgtgcacatgtgtgtgccaatgggtggtagggattgagcccgttgtgagaacatccagccaggttggaagtgtgtacaggtatctgagggtgtgcacgtgagcaag

SEQ ID NO: 65677 - DNA, 120 bp, synthetic construct
  source 1..120: mol_type = other DNA
acagagggatattgtcatttttggaaagatccctttggctgcttaggtagagaagggcttcaagagggcaggaagggacaggactacagaaggggctgcttcagagtccagattaaggaa

SEQ ID NO: 65678 - DNA, 120 bp, synthetic construct
  source 1..120: mol_type = other DNA
agtcaggcagatgacagctgtcacagagttactgcccagggctcagctagagggacacagcctgccagggatgggcctagggaaggagttagggttgttgactgctggtggcttggtttg

SEQ ID NO: 65679 - DNA, 120 bp, synthetic construct
  source 1..120: mol_type = other DNA
tttgatgaatggtcatggttttggttgggggtgtagttttggctgcagacctggcgcgggttaaacagtcctaattggctttggctcccctagctgatcccactctgaccttgccactcc

SEQ ID NO: 65680 - DNA, 120 bp, synthetic construct
  source 1..120: mol_type = other DNA
agtgtctcttgactggctcaagaattagggccccaactacacacccccaagccacagggaagcatgtactgtacttcccaattgccacattttaaataaagacaaatttttatttcttct

SEQ ID NO: 65681 - DNA, 120 bp, synthetic construct; identical to SEQ ID NO: 25595
  source 1..120: mol_type = other DNA

SEQ ID NO: 65682 - DNA, 120 bp, synthetic construct
  source 1..120: mol_type = other DNA
cacaatggttgaactagtttacagtcccaccaacagtgtaaaagtgttcctatttctccgcatcctctccagcacctgttgtttcctgactttttaatgattgccattctaactggtgtg

SEQ ID NO: 65683 - DNA, 120 bp, synthetic construct
  source 1..120: mol_type = other DNA
gtagcttgatggggatggcattgaatctgtaaattaccttgggcagtatggccattttcacgatattgattcttcctacccatgagcatggaatgttcttccatttgtttgtctcctctt

SEQ ID NO: 65684 - DNA, 120 bp, synthetic construct
  source 1..120: mol_type = other DNA
agttcctccttgtacctctggtagaattcggctgtgaatccatctggtcctggactctttttggttggtaaactattgattattgccacaatttcagagcctgttattggtcgattcaga

SEQ ID NO: 65685 - DNA, 120 bp, synthetic construct; identical to SEQ ID NO: 63940
  source 1..120: mol_type = other DNA

SEQ ID NO: 65686 - DNA, 120 bp, synthetic construct
  source 1..120: mol_type = other DNA
acatcactttcaggtacaccaatcagacgtagatttggtcttttcacatagtcccatatttcttggaggctttgctcatttctttttattcttttttctctaaacttcccttctcgcttc

SEQ ID NO: 65687 - DNA, 120 bp, synthetic construct
  source 1..120: mol_type = other DNA
tgggcgtaggaccctccgagccaggtgtgggatatagtctcgtggtgcgccgtttcttaagccggtctgaaaagcgcaatattcgggtgggagtgacccgattttccaggtgcgtccgtc

SEQ ID NO: 65688 - DNA, 120 bp, synthetic construct
  source 1..120: mol_type = other DNA
ccctacttcttccctacaccacctctacccttcccagcctctggtaaccatccttctactctctatctccaagagttcgattattttaatttttagctctctcaaataagagagaatatg

SEQ ID NO: 65689 - DNA, 120 bp, synthetic construct; identical to SEQ ID NO: 11864
  source 1..120: mol_type = other DNA

SEQ ID NO: 65690 - DNA, 120 bp, synthetic construct
  source 1..120: mol_type = other DNA
agtgctgcagtaaacatacgtgtgcatgtgtctttatagcagcatgatttgtaatcctttgggtatatccagttatgggatagctgggtcaaatggtatttctagttctagatccctgag

SEQ ID NO: 65691 - DNA, 120 bp, synthetic construct; identical to SEQ ID NO: 11865
  source 1..120: mol_type = other DNA

SEQ ID NO: 65692 - DNA, 120 bp, synthetic construct
  source 1..120: mol_type = other DNA
ctctgatggtagtttcttttgctgtgcagaagctctttagtttaattagatcctatttgttgattttggcttttattgccattgcttttggtgttttagacatgaagtccttgcccatgc

SEQ ID NO: 65693 - DNA, 120 bp, synthetic construct
  source 1..120: mol_type = other DNA
gttggtgtataaggatgcttgtgatttttgcacattgattttgtatcctgagactttgctgaagttgcttatcagcttaaggagattttgggctgagacaatggggttttctagatatac

SEQ ID NO: 65694 - DNA, 120 bp, synthetic construct
  source 1..120: mol_type = other DNA
ctctcccaagactaaaccaggaagaagttgaatctctgaacagaccaataacaggatctgaaattgtggcaataatcaatagcttaccaaccaaaaggagtccaggaccagatggattca

SEQ ID NO: 65695 - DNA, 120 bp, synthetic construct; identical to SEQ ID NO: 11866
  source 1..120: mol_type = other DNA

SEQ ID NO: 65696 - DNA, 120 bp, synthetic construct; identical to SEQ ID NO: 25594
  source 1..120: mol_type = other DNA

SEQ ID NO: 65697 - DNA, 120 bp, synthetic construct
  source 1..120: mol_type = other DNA
ggagaatggcttgaacccaggaaggcagaggttgcagtgagccaagatcatgccattgcactccagcctgggcaacatagcaagacctcctctctactgaaactaaaaaaaaaaaaaatt

SEQ ID NO: 65698 - DNA, 120 bp, synthetic construct
  source 1..120: mol_type = other DNA
ccagcctcagtgacacttacaaaaaaaagagacagaaaaatcagttccagttgacccactttgagggacttattcatttccatccacatgttaaatgtgctaagagccttggagaggtgt

SEQ ID NO: 65699 - DNA, 120 bp, synthetic construct
  source 1..120: mol_type = other DNA
gaggggctgaggtctggactcctgggtctgaggaagtagggcctgggggcctggactccggggtctgagggaggaggtgctaggggtctggacctctgggtctgagggaggaagggccaa

SEQ ID NO: 65700 - DNA, 120 bp, synthetic construct
  source 1..120: mol_type = other DNA
cttgacacatactctccttgccttgtttctgctgaggctcctgaacccccgttcgtggcttccggagcaaactccacgactgacagagccattcctcaaaccactggttttgtagctaca

SEQ ID NO: 65701 - DNA, 120 bp, synthetic construct
  source 1..120: mol_type = other DNA
aattctcaatatttattttttatttttgagacagggtctcactctgttgctcaagctggagtgcaattgtgtgatcatcatggttcattgcagcctcaacctcctgggctcaaacgatcc

SEQ ID NO: 65702 - DNA, 120 bp, synthetic construct
  source 1..120: mol_type = other DNA
ctcccggagggggtggctgccgggcggagacgctcctcacttcccagacggggtggcagccaggtggaggggctcctcacttctcaaacggggcggttgccaggcggagggtctcctcac

SEQ ID NO: 65703 - DNA, 120 bp, synthetic construct; identical to SEQ ID NO: 8960
  source 1..120: mol_type = other DNA

SEQ ID NO: 65704 - DNA, 120 bp, synthetic construct; identical to SEQ ID NO: 8961
  source 1..120: mol_type = other DNA

SEQ ID NO: 65705 - DNA, 120 bp, synthetic construct; identical to SEQ ID NO: 8962
  source 1..120: mol_type = other DNA

SEQ ID NO: 65706 - DNA, 120 bp, synthetic construct; identical to SEQ ID NO: 8963
  source 1..120: mol_type = other DNA

SEQ ID NO: 65707 - DNA, 120 bp, synthetic construct; identical to SEQ ID NO: 8964
  source 1..120: mol_type = other DNA

SEQ ID NO: 65708 - DNA, 120 bp, synthetic construct
  source 1..120: mol_type = other DNA
acatttagcagtcatgtctccttaggctcttcttggttgtgacagcttctcagactttccttgtttttgatgaccttgacagttttgaggagtactgcttaggtgttttgtagactctct

SEQ ID NO: 65709 - DNA, 120 bp, synthetic construct; identical to SEQ ID NO: 8965
  source 1..120: mol_type = other DNA

SEQ ID NO: 65710 - DNA, 120 bp, synthetic construct; identical to SEQ ID NO: 8966
  source 1..120: mol_type = other DNA

SEQ ID NO: 65711 - DNA, 120 bp, synthetic construct; identical to SEQ ID NO: 8967
  source 1..120: mol_type = other DNA

SEQ ID NO: 65712 - DNA, 120 bp, synthetic construct
  source 1..120: mol_type = other DNA
ctctgatggccagtgatgatgagcattttttcatgtgtcttttgcttgcataaatgtcttcttttgagaagtgtctgttcatatcctttgcccacttgttgatggggttgtttgtttttt

SEQ ID NO: 65713 - DNA, 120 bp, synthetic construct
  source 1..120: mol_type = other DNA
ggtttgtagttctccttgaagaggtccttcacatctcttgtaagttgaattcctagatattttattctctttgaagcaattgtgaatgggagttcactcatgatttggctctctgtttgt

SEQ ID NO: 65714 - DNA, 120 bp, synthetic construct
  source 1..120: mol_type = other DNA
ccctcatttcgttatgtacccagtagtcattcaggagcaagttgttcagtttccatgtagttgagtggttttgagtgagtttcttaatcctgagttctagtttgattgcactgtggtctg

SEQ ID NO: 65715 - DNA, 120 bp, synthetic construct
  source 1..120: mol_type = other DNA
tgtgaatttgatcctgtcattatgatgttagctggttattttgtttgttagttgatgcagtttcttcctagcatcgctggtctttacaatttggcatgtttttgcagtggctggtaccgg

SEQ ID NO: 65716 - DNA, 120 bp, synthetic construct; identical to SEQ ID NO: 7987
  source 1..120: mol_type = other DNA

SEQ ID NO: 65717 - DNA, 120 bp, synthetic construct; identical to SEQ ID NO: 17030
  source 1..120: mol_type = other DNA

SEQ ID NO: 65718 - DNA, 120 bp, synthetic construct; identical to SEQ ID NO: 17031
  source 1..120: mol_type = other DNA

SEQ ID NO: 65719 - DNA, 120 bp, synthetic construct
  source 1..120: mol_type = other DNA
acttttcaaatgtacgtggctcacagtttcagtctatctatctatctatctatctatctatctatctatctatctatctatcagacagagtctcaccctgtcgcccaggctggagtgcag

SEQ ID NO: 65720 - DNA, 120 bp, synthetic construct; identical to SEQ ID NO: 17033
  source 1..120: mol_type = other DNA

SEQ ID NO: 65721 - DNA, 120 bp, synthetic construct
  source 1..120: mol_type = other DNA
tttcacctctttctttctttcctcctttctttctttccttctttctctctctttttatttttttattgagacggagtcttgctccgttgcccaggctggagtgcagcggcattttcttct

SEQ ID NO: 65722 - DNA, 120 bp, synthetic construct
  source 1..120: mol_type = other DNA
gatagctacttatattgggtgaattgtctattcagtctttgctcattttaaaattgagttgtcagccaggcatggtggctcatgcctataatcccaacactttggggggccaaagaaaga

SEQ ID NO: 65723 - DNA, 120 bp, synthetic construct
  source 1..120: mol_type = other DNA
gcccagttttgataggattagccaacaaagacagtaaacaattataaaaatgttccctgtgctcaaagaaataacacaaaaatgtgactgagggctgggcgtggtggctcacacctgtaa

SEQ ID NO: 65724 - DNA, 120 bp, synthetic construct
  source 1..120: mol_type = other DNA
ctgagcagagccccacctgttttcccagtgcaacgggaaacctcaccaaccctgaacactgaaatccctgatccttgtgctggagctgaatacgccccttgtctcctgggtccactgcca

SEQ ID NO: 65725 - DNA, 120 bp, synthetic construct
  source 1..120: mol_type = other DNA
cagcgggagtgctcacaataccgtctccaccccacagatccaagagctcctgtctccccaggagccccccaggcctcccgaggcagagaacagcagcccggattcaggtgagccaagtcc

SEQ ID NO: 65726 - DNA, 120 bp, synthetic construct; identical to SEQ ID NO: 23222
  source 1..120: mol_type = other DNA

SEQ ID NO: 65727 - DNA, 120 bp, synthetic construct; identical to SEQ ID NO: 23223
  source 1..120: mol_type = other DNA

SEQ ID NO: 65728 - DNA, 120 bp, synthetic construct; identical to SEQ ID NO: 23224
  source 1..120: mol_type = other DNA

SEQ ID NO: 65729 - DNA, 120 bp, synthetic construct; identical to SEQ ID NO: 23225
  source 1..120: mol_type = other DNA

SEQ ID NO: 65730 - DNA, 120 bp, synthetic construct; identical to SEQ ID NO: 23226
  source 1..120: mol_type = other DNA

SEQ ID NO: 65731 - DNA, 120 bp, synthetic construct; identical to SEQ ID NO: 23227
  source 1..120: mol_type = other DNA

SEQ ID NO: 65732 - DNA, 120 bp, synthetic construct; identical to SEQ ID NO: 23228
  source 1..120: mol_type = other DNA

SEQ ID NO: 65733 - DNA, 120 bp, synthetic construct; identical to SEQ ID NO: 23229
  source 1..120: mol_type = other DNA

SEQ ID NO: 65734 - DNA, 120 bp, synthetic construct; identical to SEQ ID NO: 23230
  source 1..120: mol_type = other DNA

SEQ ID NO: 65735 - DNA, 120 bp, synthetic construct
  source 1..120: mol_type = other DNA
gggggtagagtctgttacagagaaaggagaggtgctgagtggagccaccgtgacaggctctatcaatactttttttcgtgctttaatgactcatttttcttagagaactaaagtatatag

SEQ ID NO: 65736 - DNA, 120 bp, synthetic construct
  source 1..120: mol_type = other DNA
aaaggagggctctattctgatgcctgtggtgggggcgggggaggaggggcagaagagttattttttttttttacaagtgtttcacttctgtttacaaaagtataaccttctaaattgtta

SEQ ID NO: 65737 - DNA, 120 bp, synthetic construct
  source 1..120: mol_type = other DNA
ccggctactttttgtatttttagtagagacggggtttcaccatgttggccaggatggactccatctcttgacctcgtgatccccccgcctcagcctcccaaagtgctgggattacaggca

SEQ ID NO: 65738 - DNA, 120 bp, synthetic construct
  source 1..120: mol_type = other DNA
gtttaccagatgtcatgatttcttgttggtttcttatgatttctttataggagatcataagacccaagggtagatagttttactttttttatttttatttttccacatatgaatggccaa

SEQ ID NO: 65739 - DNA, 120 bp, synthetic construct
  source 1..120: mol_type = other DNA
ttacaattgcagaaaaaaggttagattgagggttaggtctggggttgacttaaaggttcgtgtggtggtaggattagggttatggttaggattagaatttgggaccgttgtcgaggttaa

SEQ ID NO: 65740 - DNA, 120 bp, synthetic construct
  source 1..120: mol_type = other DNA
ggggtgggtgtaatattttgggttaactttaggtttaggtttactggtagaggttttagcttagggttagtgttaattgtgagggctaggttgagggtttagtgtgtatgcttaggttta

SEQ ID NO: 65741 - DNA, 120 bp, synthetic construct
  source 1..120: mol_type = other DNA
ttttttgttttggttaaggtcggctcagcactacttttgcatcagtgtcagtgtcatgtttagggttatgggttggaattgggtttagtgttatggcttaaggtctgggttgtttttggc

SEQ ID NO: 65742 - DNA, 120 bp, synthetic construct
  source 1..120: mol_type = other DNA
acatctgtctaattttgtatatttattagagacagggtttctccatgttggtcaggctggtctcgaactttcaacctcaacctgacttaacgtagatttaccaagtgtgtgccacctctc

SEQ ID NO: 65743 - DNA, 120 bp, synthetic construct
  source 1..120: mol_type = other DNA
atctctatggatattttaaggcaactctaaatattttttaaaaatatgaccagggcactgttatcacacataatacaaattagtttacaagcttgggaaaaggggcagaaccctgtcctt

SEQ ID NO: 65744 - DNA, 120 bp, synthetic construct
  source 1..120: mol_type = other DNA
agagtttactgttctttcaagaaggtagttcttagatagctcagagacaggaagaaaaagggatcttctgatttctgggctgccttctgtttcactcacagcagttccacttctatgtac

SEQ ID NO: 65745 - DNA, 120 bp, synthetic construct
  source 1..120: mol_type = other DNA
acatacgtgtgcatgtgtctttatagcagcatgacttagacatttatgcagccaaaagacacatgaaaaaatgctcatcatcactggccatcaaagaaatgcaaatcaaaaccacaacga

SEQ ID NO: 65746 - DNA, 120 bp, synthetic construct
  source 1..120: mol_type = other DNA
acttacagaaagtggatctcaggcagtaatatgcaccatacatagtggtttaaatagagataaagcttccgtacttgttcaccgctcacctgctgatgtgtagcccagttcctaagaaga

SEQ ID NO: 65747 - DNA, 120 bp, synthetic construct
  source 1..120: mol_type = other DNA
tgaccttcataacatctgacctccaagctgcctgcattatttcgcacttacctgccatttaaattgtggtttatttttaacatcatactgcttgctatttacacctctgagacttgaaac

SEQ ID NO: 65748 - DNA, 120 bp, synthetic construct
  source 1..120: mol_type = other DNA
gtttgttcaggaaatgagaacatttgtacctgttctctgtttatggtatgttaacacagttaagcacttgctatttaaataattttcttttgtttctgtggccaacacaaatgatttgag

SEQ ID NO: 65749 - DNA, 120 bp, synthetic construct
  source 1..120: mol_type = other DNA
ctgaagcatgagcttgaaatgcgggttagtgaagcggcaggataatcactgaaaattggtcttacctagcaaaaattttattaagaaagagcttgaaaatacaaatgtttttgactgtat

SEQ ID NO: 65750 - DNA, 120 bp, synthetic construct
  source 1..120: mol_type = other DNA
tataaaatttcttattttcttgcttttttatgactaaaagtaggcttccagtttggagtcaggggacacctttagctgagccatctccccctgaacacaccaaggcattcttcctcccta

SEQ ID NO: 65751 - DNA, 120 bp, synthetic construct
  source 1..120: mol_type = other DNA
tcccactctttgggatccccttacaagtaagtcacccgcttttaaaatctctttcatctttaacatttgtcagatatttagagacataccaaattaaatcattatatattcttctgatat

SEQ ID NO: 65752 - DNA, 120 bp, synthetic construct
  source 1..120: mol_type = other DNA
cctggggactcagacttacggtcaatgattgaagaacatgcttttcaggttttgtcacaaggatccttgttagaaagtccaagttacacagtttgtgtctctgagccagataaagatgat

SEQ ID NO: 65753 - DNA, 120 bp, synthetic construct
  source 1..120: mol_type = other DNA
agcgtggctatccccaacttttagtaagagtgaagagaagaattggtgttaaaaatgcttcacctatatctactttattcaacgaagatttcaacaagaagcattttagagcaggggcta

SEQ ID NO: 65754 - DNA, 120 bp, synthetic construct
  source 1..120: mol_type = other DNA
gaaataataaagttttgtggtccattttctgctgaaacaacacaataccactgcctgggtaatttgtaaagcaaacttattttgctcactttcctggaggtggggaagtccaaggggttg

SEQ ID NO: 65755 - DNA, 120 bp, synthetic construct
  source 1..120: mol_type = other DNA
tgtgttacccccgctggagagcagtggcattatttgagctcactgatacctcaacctctaggttcaagcaattcttgtacctccatcttttgagtaagtaaaattatatttgcccaagat

SEQ ID NO: 65756 - DNA, 120 bp, synthetic construct
  source 1..120: mol_type = other DNA
cgtacctcacagtatccttcactagagatgcaatattttggacttactgaggctagcgtccctgcttatccctttgactatcatgctttctttttacatctagttatgattttcccctgc

SEQ ID NO: 65757 - DNA, 120 bp, synthetic construct
  source 1..120: mol_type = other DNA
caacagtaaaataagcacagagaggaggagagagagtgtgaaggaggaaaaagagtaagcaaatgcaaaacataaagtgatcagcatgattagaaaatctgtccattcccaccctcggaa

SEQ ID NO: 65758 - DNA, 120 bp, synthetic construct
  source 1..120: mol_type = other DNA
ttccctctgttagggtggtatcagacaaagccagctacagatgaacaaataggatgtcaaaatatggtccggagtctcctaacggtcccccaaatgtttaactttcaagtaaaaatctga

SEQ ID NO: 65759 - DNA, 120 bp, synthetic construct
  source 1..120: mol_type = other DNA
ctcctcccatggtctgcagggatcagcaggaagggtacccctttctgcagcagactggctttttagtgtcttcataagaactttcacagagcaatagtttttaattttgatttgatccag

SEQ ID NO: 65760 - DNA, 120 bp, synthetic construct
  source 1..120: mol_type = other DNA
ctttggagcagctgtagatgatacagtttctaatctggggaaatggcagagtgctaactagtttagatttactttgtctgttcagttcctaggagggtggtttgtggtagatggttaact

SEQ ID NO: 65761 - DNA, 120 bp, synthetic construct
  source 1..120: mol_type = other DNA
attggaaacttctacagtccatcatctgcgatatacggaagacactaggaaaaccaagtaaagtgaccatgataccactctgcaagtccttatgtccccagacaaactgtcttccttttt

SEQ ID NO: 65762 - DNA, 120 bp, synthetic construct
  source 1..120: mol_type = other DNA
aggtggctttatcacggtgaactacgtctcacaggacttgggatctgcatctgcagactatacaaagacaaacaacacagatttaaagcacaatcatctttaaatcagagtctccaagtg

SEQ ID NO: 65763 - DNA, 120 bp, synthetic construct
  source 1..120: mol_type = other DNA
atcaccagtatcatagctatcattatatgggggactcattgtcctactttcctcaggttttcttttgccatctgtggcagcttcttgatctgtccccaggtaggtggctgtgttcaatgc

SEQ ID NO: 65764 - DNA, 120 bp, synthetic construct
  source 1..120: mol_type = other DNA
taggtggtcagccatttgattccctgcagtcaaaggtcctggaagagatgtatgagctctaatatgagtaatgtaaaaagggtgcattctactcctagctgctctttgtaattgggtaaa

SEQ ID NO: 65765 - DNA, 120 bp, synthetic construct
  source 1..120: mol_type = other DNA
gagttgaaaaaaaaaaatctgtaaatctagaactggagcccacacttgtcccattgtaaccctgatgcttccgaacttctctacttactcaccatggggatttcttaagagtagccaggt

SEQ ID NO: 65766 - DNA, 120 bp, synthetic construct
  source 1..120: mol_type = other DNA
ttgagattaaacttggtcgttcattgaaacagtcaacagagcagtaaatttagatatattcccaggaaagagaccatttctgtgttcagcggggttgggctccctgcctaaatacttggt

SEQ ID NO: 65767 - DNA, 120 bp, synthetic construct
  source 1..120: mol_type = other DNA
gggtgataataatacatttgaaatgtcacctttcaatttaaatttaattacttgtggctgggcatggaggctcacacctgtaatcccagcgctttgtgaggtggaggcaggcagatcagg

SEQ ID NO: 65768 - DNA, 120 bp, synthetic construct
  source 1..120: mol_type = other DNA
tatgtataaattttcaacatctaaaagtgaatcaacattttcaatccttgaatcccagcatttttgggaggctgaggtgcatgggtcatgaggtcaggagatcgagaccatcctggcgaa

SEQ ID NO: 65769 - DNA, 120 bp, synthetic construct
  source 1..120: mol_type = other DNA
atgcaaatttctaatagtttctcttggctgactaaaggaaccattcagggtttgtgtatggaacacgctgtgttgggaaaccaggtacattttgactttgtcactagattgaagcatgcc

SEQ ID NO: 65770 - DNA, 120 bp, synthetic construct
  source 1..120: mol_type = other DNA
ccaggagtcttgggaacatcatatgttggtgtaattcaagcaagacttagaatgtgtgttaactggacagagaaatgtatctgctaagccagaatcagaacacagaagggaagcagaggt

SEQ ID NO: 65771 - DNA, 120 bp, synthetic construct
  source 1..120: mol_type = other DNA
tcctcaacctgtggcactctcattctgtcataaagcctgatatgctgttggagacccaaatgaaatttcatctcctccttatttctgaattgaaaagtaaccactccagcaccttacttg

SEQ ID NO: 65772 - DNA, 120 bp, synthetic construct
  source 1..120: mol_type = other DNA
attatttttattattcttatttttttttagatggactctcaccaacttgcccaggctggagtacagttgagtggtcagctcaatgcaacctctgcctcctgggttcaagtgatgcttctg

SEQ ID NO: 65773 - DNA, 120 bp, synthetic construct
  source 1..120: mol_type = other DNA
aaatctcctactgttgtgggaattaaggaacaggagagaccaatgagtggaacaggaggattttattggatgtagcttgacttagtggaatagcatttaaaggctgagccctgaacaaag

SEQ ID NO: 65774 - DNA, 120 bp, synthetic construct
  source 1..120: mol_type = other DNA
aattttttagactgaactttccacatgcccctccttcctggactaggaggtagtttaaggccagtcgattttgatgagtagcattcttcatttttgtggcttgttgggccagcagattta

SEQ ID NO: 65775 - DNA, 120 bp, synthetic construct
  source 1..120: mol_type = other DNA
aatagacttctgagtctgttttctggccactaccttgtatttccagcagagtctttaaacctgcattccatatgggcagatccggtttaagatggtgagatttacaagattgcaacagct

SEQ ID NO: 65776 - DNA, 120 bp, synthetic construct
  source 1..120: mol_type = other DNA
cattattttattattattttactccagctttgaccgtacgtagactagtcaacttccaggatgactagagcagggctgttgactcctcagattttagctgagcagagactggtcagcttt

SEQ ID NO: 65777 - DNA, 120 bp, synthetic construct
  source 1..120: mol_type = other DNA
cacaagttagacattgtttgcagatggatcaagtgatggcaggcagccgcagcacataaacatggtgtcctaatagtgttttcagtgacgttttacccatatgggttccttgatagaatt

SEQ ID NO: 65778 - DNA, 120 bp, synthetic construct
  source 1..120: mol_type = other DNA
ggtaccgagtcattctcggacttgataactaatggtgccctgtctaatccattaaagttagaactgaatgcggtacctggatggtcagttgttgtcttagagtcagttttttagcttctt

SEQ ID NO: 65779 - DNA, 120 bp, synthetic construct
  source 1..120: mol_type = other DNA
tcatgtaagttttgcactggcttatatttaccagaccctggattttgtatcggtaggagtagagtgttccaggttgactggcgccagacgaagtttctgtgtttgaaaagtcactttaaa

SEQ ID NO: 65780 - DNA, 120 bp, synthetic construct
  source 1..120: mol_type = other DNA
aatcagcctccctttgtgcctcctggtcacagttaatgtacaccttggtggccacttctaaaagctgggttgcctttatgcttgcaaaaccatctagcttcagcagtttttacctgatat

SEQ ID NO: 65781 - DNA, 120 bp, synthetic construct
  source 1..120: mol_type = other DNA
tgtactttaagctcggctcaagccacaagtgttttgcaacaagccatcaggtaggactgtagccatcctgctcaagtttggaggatatttagccatgagtgaagataagaaaattagtct

SEQ ID NO: 65782 - DNA, 120 bp, synthetic construct
  source 1..120: mol_type = other DNA
atgctctcctggtattttgactgggagagaagaggatttcctcgaagccctttttatctgtgcctattggagattctcaactaaaagctcttacagtccatcatctgggatattgtatgg

SEQ ID NO: 65783 - DNA, 120 bp, synthetic construct
  source 1..120: mol_type = other DNA
atttctttgttcagtggggctggacacccttcctaaataattgttgaaagtaggtgttgttcagacattcagtgggaacatttcagtcaataccaaaagccatgcccacagatactagga

SEQ ID NO: 65784 - DNA, 120 bp, synthetic construct
  source 1..120: mol_type = other DNA
ttttatctggtgaccatctatgaaagagaagttatgaaagtcaagctcagagtaggaagctttcatctacattcatgaaaaacaccgtaagacaaaaatgtgtagaaagggcagcaggca

SEQ ID NO: 65785 - DNA, 120 bp, synthetic construct
  source 1..120: mol_type = other DNA
aaatgtctatttaggtagacaaatcccagttgtagtgagaggtgtttattatattactcaccgagactgatgagtacacagacatttaagagttaatagaaagactttgcaatgtttgtg

SEQ ID NO: 65786 - DNA, 120 bp, synthetic construct
  source 1..120: mol_type = other DNA
ctagctttctctcccaagtccgtgttccattaatttcctcagccaataagaaaatatttttcaataatgctaaaattagctccatttgctgaccctactactaaagaatctggattcgga

SEQ ID NO: 65787 - DNA, 120 bp, synthetic construct
  source 1..120: mol_type = other DNA
aactgggagaagcgctcttctgtacagaatggctattctaaaaatagctacgtgttttattttcctcttgcatgacagatttaactattctttccagcaatggtggtgccttcagagtcc

SEQ ID NO: 65788 - DNA, 120 bp, synthetic construct
  source 1..120: mol_type = other DNA
tgctgactctggatcatcaccctttattctggcatgacagaaaaaccgtcagcagttcaattagtgtgctatctgtcacactgcttactgcctattgtttaagtagcgttttgtgcaatt

SEQ ID NO: 65789 - DNA, 120 bp, synthetic construct
  source 1..120: mol_type = other DNA
cagaaatatgctgggaaaaacgacgtctcgttgtaaagatcacagcccaactcttcggaggaaaaaacacagcttacccttctcaaatgtaagcctagatttgaggaatatagtaggtta

SEQ ID NO: 65790 - DNA, 120 bp, synthetic construct
  source 1..120: mol_type = other DNA
ctctaagaaccatttttgaaacatatatgtcatttaaaagcctaaaaacgttgtgactgataaatacaaaatttagcaagcacatcaaaataaacgatcaggtatgcatttaacaccatg

SEQ ID NO: 65791 - DNA, 120 bp, synthetic construct
  source 1..120: mol_type = other DNA
cacaaaaattaccttcaaaaacagtcatatactatgaaactcctaagctccatattctgtgcagcctttcttactgcttgtaagacaagaagagaacaggggtgcctttcagggcacatg

SEQ ID NO: 65792 - DNA, 120 bp, synthetic construct
  source 1..120: mol_type = other DNA
ctgggtttttcacgattactcagatatggatcctttccgtatcttttcttctactgctggtctctctacctgccctcacatccacagttctgacagtttcctgccatatacatgtgaaat

SEQ ID NO: 65793 - DNA, 120 bp, synthetic construct
  source 1..120: mol_type = other DNA
actctgaaccttcttgctctgccttgttttaaactcatccgcagtgactgagttaatttcatgaataagagagaagcaacacagtttttcctctctctccaccccccatctcttctcaat

SEQ ID NO: 65794 - DNA, 120 bp, synthetic construct
  source 1..120: mol_type = other DNA
tggtttaacttgagaaattttctttcgtgtttgagaattaaacactttgatcccaaaacaaaagagcctggctgtttgcttagccctagagcaaagtgcaaagctcccacagctctcttc

SEQ ID NO: 65795 - DNA, 120 bp, synthetic construct
  source 1..120: mol_type = other DNA
aactggctggagcatgggaactgcagccaaagtaactaggtggactttttcctgagcggattttgtgaatttccaaacataaccacttgccaatgtattagcttgtcagagtcttcttgt

SEQ ID NO: 65796 - DNA, 120 bp, synthetic construct
  source 1..120: mol_type = other DNA
ccttgaagttcaatctgtctctgggaaagactagattggaagaataaaattcaagaatgtgatgttttagtaatggaaaagccaagagcgtcaggtggcaaaagtccttctgttactcaa

SEQ ID NO: 65797 - DNA, 120 bp, synthetic construct
  source 1..120: mol_type = other DNA
gtgccacattttcttaatccagtctatccttatcagacatttggggtggttccaagtctttgctgttgtgaatagtaccgcaatgaacatatgtgtgcatgtgtctttatggcagcatga

SEQ ID NO: 65798 - DNA, 120 bp, synthetic construct; identical to SEQ ID NO: 8915
  source 1..120: mol_type = other DNA

SEQ ID NO: 65799 - DNA, 120 bp, synthetic construct; identical to SEQ ID NO: 8916
  source 1..120: mol_type = other DNA

SEQ ID NO: 65800 - DNA, 120 bp, synthetic construct; identical to SEQ ID NO: 8917
  source 1..120: mol_type = other DNA

SEQ ID NO: 65801 - DNA, 120 bp, synthetic construct; identical to SEQ ID NO: 24607
  source 1..120: mol_type = other DNA

SEQ ID NO: 65802 - DNA, 120 bp, synthetic construct
  source 1..120: mol_type = other DNA
gctttgttaaacagacgcttgaaggcagcgtgctcgttgagagtcatcaccactccctaatctcaagtacccagggacacaaacactgcggaaggccgcagggtcctctgcctaggaaaa

SEQ ID NO: 65803 - DNA, 120 bp, synthetic construct
  source 1..120: mol_type = other DNA
tccatattgatccttaatgtgatagatttcattttctttctttttcttttttttttgtgagacagagtctcgctctgtcgctctgttgcccaggctggagtgcagtggcgcagtctcggc

SEQ ID NO: 65804 - DNA, 120 bp, synthetic construct
  source 1..120: mol_type = other DNA
caaccatccgatttctcaatcttttccccacctttcccccctttccattccacaaaaccgccattgtcatcatggcccgttctcaatgagctgctgggtacacctcccagatggggtggc

SEQ ID NO: 65805 - DNA, 120 bp, synthetic construct; identical to SEQ ID NO: 24608
  source 1..120: mol_type = other DNA

SEQ ID NO: 65806 - DNA, 120 bp, synthetic construct; identical to SEQ ID NO: 20043
  source 1..120: mol_type = other DNA

SEQ ID NO: 65807 - DNA, 120 bp, synthetic construct; identical to SEQ ID NO: 20044
  source 1..120: mol_type = other DNA

SEQ ID NO: 65808 - DNA, 120 bp, synthetic construct; identical to SEQ ID NO: 7275
  source 1..120: mol_type = other DNA

SEQ ID NO: 65809 - DNA, 120 bp, synthetic construct; identical to SEQ ID NO: 28119
  source 1..120: mol_type = other DNA

SEQ ID NO: 65810 - DNA, 120 bp, synthetic construct
  source 1..120: mol_type = other DNA
caggatcccacggcagaggaatttttcttagtgcagaacaaaatgaaaagtctcccatgtctacttctctccacacagacacggcaaccatccgatttctcaatcttttccccacctttc

SEQ ID NO: 65811 - DNA, 120 bp, synthetic construct; identical to SEQ ID NO: 28120
  source 1..120: mol_type = other DNA

SEQ ID NO: 65812 - DNA, 120 bp, synthetic construct; identical to SEQ ID NO: 24477
  source 1..120: mol_type = other DNA

SEQ ID NO: 65813 - DNA, 120 bp, synthetic construct
  source 1..120: mol_type = other DNA
ccatcagctgttgtttcctgactttttaatgattgccattctaactggtgtgagatgatatctcattgtggttttgatttgcgtttctctgatggccagtgatggtgagcattttttcat

SEQ ID NO: 65814 - DNA, 120 bp, synthetic construct
  source 1..120: mol_type = other DNA
cctattcaacatagtgttggaagttctggccagagcaattaggcaggagaaggaaataaagggtattcaattaggaaaagaggaagtcaaattgtacctgtttgcagatgacatgattgt

SEQ ID NO: 65815 - DNA, 120 bp, synthetic construct; identical to SEQ ID NO: 24478
  source 1..120: mol_type = other DNA

SEQ ID NO: 65816 - DNA, 120 bp, synthetic construct
  source 1..120: mol_type = other DNA
aaccataaaaaccctataagaaaatctaggcaataccattcaggacataggcatgggcaaggacttcatgtataaaacaccaaaagcaatggcaacaaaagacaaaattgacaaatggga

SEQ ID NO: 65817 - DNA, 120 bp, synthetic construct
  source 1..120: mol_type = other DNA
cagcaaggcctactgcctctgttgactccacctctgggggcagggaatggctgaaaaaaaggcagcagacagaacagagccctcagaaataactccgcatatctacaactatctgatctt

SEQ ID NO: 65818 - DNA, 120 bp, synthetic construct
  source 1..120: mol_type = other DNA
gagttcatgtcctttgtagggacatggatgaaattggaaatcatcattctcagtaaactatcaagaacaaaaaactaaacaccgcatattctcactcataggtgggaattgaacaatgag

SEQ ID NO: 65819 - DNA, 120 bp, synthetic construct
  source 1..120: mol_type = other DNA
tagtggttttgatttgcatttctctgatggccagtgatggtgagcatttcttcatgtgtcttttggctgcataaatgtcttcttttgagaagtgtctgttcatatcctttgcccactttt

SEQ ID NO: 65820 - DNA, 120 bp, synthetic construct
  source 1..120: mol_type = other DNA
cttggcaatgtgggctcttttttggttccatatgaactttaaagtagttttttccaattctgtgaagaaagtcattggtagcttgatggggatggcaaaaaattcctcaacacatacact

SEQ ID NO: 65821 - DNA, 120 bp, synthetic construct
  source 1..120: mol_type = other DNA
tacttaggaatccaacttgcaagggacatgaaggacctcttcaaggagaattacaaaccactgctcaatgaaataaaagaggatacaaagaaatggaagaacattccatgctcatgggta

SEQ ID NO: 65822 - DNA, 120 bp, synthetic construct
  source 1..120: mol_type = other DNA
caggatttttataggcttcagaagggaagaagtgagtgctgattggtttatgggtgggcctagaaggagagagggagagagggaaagaaagagagagatgggaaagactgaaggtcctat

SEQ ID NO: 65823 - DNA, 120 bp, synthetic construct; identical to SEQ ID NO: 35177
  source 1..120: mol_type = other DNA

SEQ ID NO: 65824 - DNA, 120 bp, synthetic construct; identical to SEQ ID NO: 35178
  source 1..120: mol_type = other DNA

SEQ ID NO: 65825 - DNA, 120 bp, synthetic construct
  source 1..120: mol_type = other DNA
tatgagtgagaacatgcagtgtttggttttctgtccttgcaatactttgctcagaatgatggtttccagtttcatccatgtccctacgaaggacatgaactcatcattttttatggctgc

SEQ ID NO: 65826 - DNA, 120 bp, synthetic construct; identical to SEQ ID NO: 35179
  source 1..120: mol_type = other DNA

SEQ ID NO: 65827 - DNA, 120 bp, synthetic construct
  source 1..120: mol_type = other DNA
catgtgttttttggctgcataaaggtcttcttttgagaagtgtctgttcatgtcctttgcccactttttgatggggttgtttgtttttttcttgtaaatttgtttgagttcattgtagat

SEQ ID NO: 65828 - DNA, 120 bp, synthetic construct; identical to SEQ ID NO: 35180
  source 1..120: mol_type = other DNA

SEQ ID NO: 65829 - DNA, 120 bp, synthetic construct; identical to SEQ ID NO: 35181
  source 1..120: mol_type = other DNA

SEQ ID NO: 65830 - DNA, 120 bp, synthetic construct; identical to SEQ ID NO: 35182
  source 1..120: mol_type = other DNA

SEQ ID NO: 65831 - DNA, 120 bp, synthetic construct; identical to SEQ ID NO: 35166
  source 1..120: mol_type = other DNA

SEQ ID NO: 65832 - DNA, 120 bp, synthetic construct
  source 1..120: mol_type = other DNA
gcatagtcctgccagcaaagattatttatttacttcaagagttaagagtggcagtttggggatagcaccaggagatatcagctgtgatggcttcgagaaacagtgtaaaccggcagtgta

SEQ ID NO: 65833 - DNA, 120 bp, synthetic construct
  source 1..120: mol_type = other DNA
gtgggagactcaacaaagagtgagtatagctgaaggagccgggaagcagaaagtatatgcgtcaggtatgaggaagaaaatagattttggaagttatgagaactgtagagagagatttga

SEQ ID NO: 65834 - DNA, 120 bp, synthetic construct
  source 1..120: mol_type = other DNA
gattgggaagaagggcggcaatgagatttagctgtagtccaggaatagtcagggaagcaggtaatttagttaaagtgtctcagcctaataagggaactgggcaggtggggataactaaaa

SEQ ID NO: 65835 - DNA, 120 bp, synthetic construct
  source 1..120: mol_type = other DNA
ggagggctagtcatggaacgaaactgtaagccggaccaggtgtgaggaggggaggtgataaaaagattatagggtggaggagcagaggctgaggaagaattgggacctagctcggcatgg

SEQ ID NO: 65836 - DNA, 120 bp, synthetic construct; identical to SEQ ID NO: 35183
  source 1..120: mol_type = other DNA

SEQ ID NO: 65837 - DNA, 120 bp, synthetic construct
  source 1..120: mol_type = other DNA
tggtatttctagttctagatccctgaggaatcgccacactgacttccacaatggttgaactagtttacagtcccaccaacagtgtaaaagtgttcctatttctccacattctctccagca

SEQ ID NO: 65838 - DNA, 120 bp, synthetic construct
  source 1..120: mol_type = other DNA
ttctgtgaagaaaggcattggtagcttgatgggtatggcattgaatctgtaaattaccttgggcagtatggccattttcacgatattgattcttcctacccatgagcatggaatgttctt

SEQ ID NO: 65839 - DNA, 120 bp, synthetic construct
  source 1..120: mol_type = other DNA
gataagctttttgatgtgctgctggattcgttttgccagtattttattgaggatttttgcatcaatgttcatcaaggatattggtctaaaattctcctttttggttgtgtctctacccgg

SEQ ID NO: 65840 - DNA, 120 bp, synthetic construct
  source 1..120: mol_type = other DNA
ttgcagtgtggtctgagagatagtttattataatctctgttcttttacatttgctgaggagagctttacttccaagtatgtggtcaattttggaataggtgtggtgtggtgctgaaaaaa

SEQ ID NO: 65841 - DNA, 120 bp, synthetic construct
  source 1..120: mol_type = other DNA
ttttctttaagaatgttgaatattggccctcactctcttctggcttgtagggtttctgccgagagatccgctgttagtctgatgggcttccctttgaggataacccgacctttctctctg

SEQ ID NO: 65842 - DNA, 120 bp, synthetic construct
  source 1..120: mol_type = other DNA
atgtacagatgggtttttggtgtggatgtcctttctgtctgttagttttccttctaacagacaggaccctcagctgcaggtctgttggaataccctgccgtgtgaggtgtcagtgtgccc

SEQ ID NO: 65843 - DNA, 120 bp, synthetic construct; identical to SEQ ID NO: 35184
  source 1..120: mol_type = other DNA

SEQ ID NO: 65844 - DNA, 120 bp, synthetic construct; identical to SEQ ID NO: 35167
  source 1..120: mol_type = other DNA

SEQ ID NO: 65845 - DNA, 120 bp, synthetic construct; identical to SEQ ID NO: 35168
  source 1..120: mol_type = other DNA

SEQ ID NO: 65846 - DNA, 120 bp, synthetic construct
  source 1..120: mol_type = other DNA
actatgtttttcctgacagttttaaggtataaacaattaatatctttggaactgcctcagattttagaattgccccacttagcttttccctgggaaaataatattgctcatctaaaggaa

SEQ ID NO: 65847 - DNA, 120 bp, synthetic construct
  source 1..120: mol_type = other DNA
aaaaaaatttagacgaatgtataactagaataaccaatacagagaagtccttaaaggagctgatggagctgaaagccaaggctcaagaactacgtgaagaatgcagaagcctcaggagcc

SEQ ID NO: 65848 - DNA, 120 bp, synthetic construct
  source 1..120: mol_type = other DNA
acacacataggctcacaataaagggacggaggaagatctaccaagcaaatggaaaaccaaagaggcaggggttgcaatcctagtctctgataaaacagactttaaaccaacaaagataaa

SEQ ID NO: 65849 - DNA, 120 bp, synthetic construct
  source 1..120: mol_type = other DNA
ggcaagaaataacttaaatcagagcagaactgaaggaaatagagacacaaaaaacccttcaaaaaattattgaatccgggagctggttttttgaaaggatcaacaaaattgatagaccgc

SEQ ID NO: 65850 - DNA, 120 bp, synthetic construct
  source 1..120: mol_type = other DNA
tttggggctgagacaatggggttttctaaatatacaatcatgtcatctgcaaacagggacaatttgacgtcctcttttcctaattgaataccctttatttccttctcctgcctgatcgcc

SEQ ID NO: 65851 - DNA, 120 bp, synthetic construct
  source 1..120: mol_type = other DNA
tcagcacataggcatgggcaaggacttcatgtctaaaacaccaaaagcaatggaaacaaaagacaaaattgacaaatgggatctaattaaactaaagagcttctgcacagcaaaagaaac

SEQ ID NO: 65852 - DNA, 120 bp, synthetic construct
  source 1..120: mol_type = other DNA
cacactctggggactgtggtggggtggggggaggggggagggatagcattagtagatatacctaatgctaaatgacgagttaatgggtgcagcacaccagcatggcacatgtatacatat

SEQ ID NO: 65853 - DNA, 120 bp, synthetic construct; identical to SEQ ID NO: 35170
  source 1..120: mol_type = other DNA

SEQ ID NO: 65854 - DNA, 120 bp, synthetic construct
  source 1..120: mol_type = other DNA
tgccacattttcttagtccagtctatcattgttggacatttgggttggttccaagtctttgctattgtgaataatgccgcaataaacatacgtgtgcgtgtgtctttatagcagcatgat

SEQ ID NO: 65855 - DNA, 120 bp, synthetic construct
  source 1..120: mol_type = other DNA
gtatagtttgaagtcaggtagtgtgatgcctccagctttgttcttttggcttaggattgacttggcgatgcaggctcttttttggttccatatgaactttaaagtatttttttccaatat

SEQ ID NO: 65856 - DNA, 120 bp, synthetic construct
  source 1..120: mol_type = other DNA
catcctgataccaaagctgggcagagacacaaccaaaaaagagaattttagaccgatatccttgatgaacattgatgcaaaaatcctcaataaaatactggcaaactgaatccagcagca

SEQ ID NO: 65857 - DNA, 120 bp, synthetic construct
  source 1..120: mol_type = other DNA
agttaacaaggatacccaggaattgaactcagctctgcaccaagaggacctaatagacatctacagaactctccaccccaaatcaacagaatatacatttttttcagcaccacaccacac

SEQ ID NO: 65858 - DNA, 120 bp, synthetic construct
  source 1..120: mol_type = other DNA
ctgacaagtgtgtgtcttagagttgctcttctcgaggagtatctttgtggcgttctctgtatttcctgaatctgaatgttggcctgccttgctagattggggaagttctcctggataata

SEQ ID NO: 65859 - DNA, 120 bp, synthetic construct
  source 1..120: mol_type = other DNA
ctatcttcaatgctgtcagacagggacatttaagtctgcagaggttactgctgtctttttgtttgtctgtgccctgcccccagaggtggagcctacagaggcaggcaggcctccttgagc

SEQ ID NO: 65860 - DNA, 120 bp, synthetic construct; identical to SEQ ID NO: 35171
  source 1..120: mol_type = other DNA

SEQ ID NO: 65861 - DNA, 120 bp, synthetic construct; identical to SEQ ID NO: 35172
  source 1..120: mol_type = other DNA

SEQ ID NO: 65862 - DNA, 120 bp, synthetic construct; identical to SEQ ID NO: 35173
  source 1..120: mol_type = other DNA

SEQ ID NO: 65863 - DNA, 120 bp, synthetic construct; identical to SEQ ID NO: 35174
  source 1..120: mol_type = other DNA

SEQ ID NO: 65864 - DNA, 120 bp, synthetic construct; identical to SEQ ID NO: 35175
  source 1..120: mol_type = other DNA

SEQ ID NO: 65865 - DNA, 120 bp, synthetic construct; identical to SEQ ID NO: 35176
  source 1..120: mol_type = other DNA

SEQ ID NO: 65866 - DNA, 120 bp, synthetic construct
  source 1..120: mol_type = other DNA
tgaccatacataattttttgtcacacacatagagtattctcaaaaactgaccacatttttaaccacaaaaaggtatgaacgccaggcagagtggcgcatgcctgtaatcccagcactttg

SEQ ID NO: 65867 - DNA, 120 bp, synthetic construct
  source 1..120: mol_type = other DNA
atccaggatcagatggattcacagtcgaattctaccagaggtacaaggaggagctggtaccattccaatatccctgatgaacactgatgcaaaaatcctcaataaaatactggcaaacca

SEQ ID NO: 65868 - DNA, 120 bp, synthetic construct
  source 1..120: mol_type = other DNA
tactgcccaaggtaatttataaattcaatgccatccccatcaagctaccaatgactttctccagagaattggaaaaaactactttaaaattcatatggaaccaaaaaagagcccgcattg

SEQ ID NO: 65869 - DNA, 120 bp, synthetic construct
  source 1..120: mol_type = other DNA
ggtgggaattgaacaataagaacatttggacacaggaaggggaacatcacactctggggcctgtcgtggggtggggggaggggggagggataacattaggagatatacctaatgtaaatg

SEQ ID NO: 65870 - DNA, 120 bp, synthetic construct; identical to SEQ ID NO: 27110
  source 1..120: mol_type = other DNA

SEQ ID NO: 65871 - DNA, 120 bp, synthetic construct; identical to SEQ ID NO: 27111
  source 1..120: mol_type = other DNA

SEQ ID NO: 65872 - DNA, 120 bp, synthetic construct; identical to SEQ ID NO: 27112
  source 1..120: mol_type = other DNA

SEQ ID NO: 65873 - DNA, 120 bp, synthetic construct
  source 1..120: mol_type = other DNA
actggaagaaagggtatcagcaatggaagatgaaatgaatgaaatgaagcaagaaggaaagtttagagaaaaaagaataaaaagaaatgagcaaagcctccaagaaatatgggactatgt

SEQ ID NO: 65874 - DNA, 120 bp, synthetic construct
  source 1..120: mol_type = other DNA
caagtcctgagtgacctacaaagagacttagactcccacgcattaataatgggagaatttaacaccccactgtcaacattagacagatcaacgagacagaaagtcaacaaggatacccag

SEQ ID NO: 65875 - DNA, 120 bp, synthetic construct
  source 1..120: mol_type = other DNA
taaaggggatatcaccaccgatcccacagaaatacaaactaccatcagagaatactacaaacacctctacgcaaataaacgagaaaatctagaagaaatggataaattccttgacacata

SEQ ID NO: 65876 - DNA, 120 bp, synthetic construct
  source 1..120: mol_type = other DNA
ataccaacaacagacaaacagagagccaaaccatgagtgaactcccattcacaattgcttcaaagagaataaaatacctaggaatccaacttacaagggatgtgaaggacctcttcaagg

SEQ ID NO: 65877 - DNA, 120 bp, synthetic construct
  source 1..120: mol_type = other DNA
aaaccacaatgagataccatctcacaccagttagaatggcaatcattaaaagtcaggaaacaacaggtgctggagaggatgtggagaaataggaacacttttacactgttggtgggactg

SEQ ID NO: 65878 - DNA, 120 bp, synthetic construct; identical to SEQ ID NO: 27113
  source 1..120: mol_type = other DNA

SEQ ID NO: 65879 - DNA, 120 bp, synthetic construct; identical to SEQ ID NO: 11018
  source 1..120: mol_type = other DNA

SEQ ID NO: 65880 - DNA, 120 bp, synthetic construct
  source 1..120: mol_type = other DNA
tagtacaagccactagcccgcctcttagaacctctcatttcctttccattgtggaaatctatcctcgaggaaataacttctcagtattccatctgctatgctactactcctcagggatta

SEQ ID NO: 65881 - DNA, 120 bp, synthetic construct
  source 1..120: mol_type = other DNA
aaaccatatccaggccatcaccaatcattctatacaacaaatgtttcttctaacaaccccacaatatcaccccttaccacaaaatcttccttcagcttaatctctcccactctaggttcc

SEQ ID NO: 65882 - DNA, 120 bp, synthetic construct
  source 1..120: mol_type = other DNA
cctgggctcctctcatttgggctgctctttagttgtcaggtgtttctttccttctatccgtccgtccgtccgtccatccatccatccatccatccatccatccatccatccatccatcca

SEQ ID NO: 65883 - DNA, 120 bp, synthetic construct
  source 1..120: mol_type = other DNA
agattaagatataaaccgccctcaattcccctgcccagagagagtcactgctatgacttggtgactaggaaccttatttctctctcgctcttttttttttttttgagacagagtcttgct

SEQ ID NO: 65884 - DNA, 120 bp, synthetic construct
  source 1..120: mol_type = other DNA
atgtaaagtcccgatgatccattgcctccctggatgggttggaataatttggtttgggagcatataacagaatgacctggagtcacagcagctcagacggaagtgtatttctcccttaca

SEQ ID NO: 65885 - DNA, 120 bp, synthetic construct
  source 1..120: mol_type = other DNA
tttgttatggcagcccaagtaaacaaatacagtcatctgctgctggaacaaatcaccccagcactgtggcttggcagcacacatgtctagtcatagagttatatgtagttacgtgtagag

SEQ ID NO: 65886 - DNA, 120 bp, synthetic construct
  source 1..120: mol_type = other DNA
aatttttttagagacagtgtcgctctatcacccaagctggagtgcagtggtgcaatcctagctcacttgcagcctcaaattcctgggttcaggtgatcctcccacatcagcctcccaaga

SEQ ID NO: 65887 - DNA, 120 bp, synthetic construct
  source 1..120: mol_type = other DNA
gctctggccacgggccagtgtggcgggagggcaaaccccaaggccacctcggctcagagtccacggccggctgtcgccccgctccaggcgtcggcgggggatcctttccgcatgggcctg

SEQ ID NO: 65888 - DNA, 120 bp, synthetic construct
  source 1..120: mol_type = other DNA
gggagaccgccatggcgaccctggaaaagctgatgaaggccttcgagtccctcaagtccttccagcagcagcagcagcagcagcagcagcagcagcagcagcagcagcagcagcagcagc

SEQ ID NO: 65889 - DNA, 120 bp, synthetic construct
  source 1..120: mol_type = other DNA
ggaagagttgattgaagttttttgcctatgtgtgttgggaataaaaccaacacgttgctgatggggaggttaattgccgagggatgaatgaggtgtacattttaccagtattccagtcag

SEQ ID NO: 65890 - DNA, 120 bp, synthetic construct
  source 1..120: mol_type = other DNA
ttaaggtaatatatgattaccttatttaaaaaatttaatcaggactggcaaggtggcttacacctttaatccgagcactttgggaggcctaggtggacgaatcacctgaggtcaggagtt

SEQ ID NO: 65891 - DNA, 120 bp, synthetic construct
  source 1..120: mol_type = other DNA
taagattgatgaaagcaatttagaaagtatctgttctgtttttatggctcttgctctttggtgtggaactgtggtgtcacgccatgcatgggcctcagtttatgagtgtttgtgctctgc

SEQ ID NO: 65892 - DNA, 120 bp, synthetic construct
  source 1..120: mol_type = other DNA
tgctctgtcgcccaggctggagtgcagtggcgcgatctcagctcactgcaagctccgcttcccgagttcacgccattctcctgcctcagtctcccaagtagctgggactacaggcgcctg

SEQ ID NO: 65893 - DNA, 120 bp, synthetic construct
  source 1..120: mol_type = other DNA
ggagtgccatatcagaccaatactacttgccttgtagatggaataaagatattggcatttatgtgagtgagatgggatgtcactggaggattagagcagaggagtagcatgatctgaatt

SEQ ID NO: 65894 - DNA, 120 bp, synthetic construct; identical to SEQ ID NO: 25194
  source 1..120: mol_type = other DNA

SEQ ID NO: 65895 - DNA, 120 bp, synthetic construct; identical to SEQ ID NO: 25195
  source 1..120: mol_type = other DNA

SEQ ID NO: 65896 - DNA, 120 bp, synthetic construct; identical to SEQ ID NO: 23055
  source 1..120: mol_type = other DNA

SEQ ID NO: 65897 - DNA, 120 bp, synthetic construct; identical to SEQ ID NO: 23056
  source 1..120: mol_type = other DNA

SEQ ID NO: 65898 - DNA, 120 bp, synthetic construct; identical to SEQ ID NO: 33968
  source 1..120: mol_type = other DNA

SEQ ID NO: 65899 - DNA, 120 bp, synthetic construct
  source 1..120: mol_type = other DNA
cgccccgtctgagaagtgaggagcccctccgtccggcagccaccccgtctgggaagtgaggagcgtctccgcccggcagccaccccgtctgggagggaggtgggggggggtcagcccccc

SEQ ID NO: 65900 - DNA, 120 bp, synthetic construct; identical to SEQ ID NO: 33969
  source 1..120: mol_type = other DNA

SEQ ID NO: 65901 - DNA, 120 bp, synthetic construct; identical to SEQ ID NO: 33970
  source 1..120: mol_type = other DNA

SEQ ID NO: 65902 - DNA, 120 bp, synthetic construct; identical to SEQ ID NO: 33971
  source 1..120: mol_type = other DNA

SEQ ID NO: 65903 - DNA, 120 bp, synthetic construct; identical to SEQ ID NO: 33972
  source 1..120: mol_type = other DNA

SEQ ID NO: 65904 - DNA, 120 bp, synthetic construct; identical to SEQ ID NO: 33973
  source 1..120: mol_type = other DNA

SEQ ID NO: 65905 - DNA, 120 bp, synthetic construct; identical to SEQ ID NO: 33974
  source 1..120: mol_type = other DNA

SEQ ID NO: 65906 - DNA, 120 bp, synthetic construct; identical to SEQ ID NO: 33975
  source 1..120: mol_type = other DNA

SEQ ID NO: 65907 - DNA, 120 bp, synthetic construct; identical to SEQ ID NO: 33976
  source 1..120: mol_type = other DNA

SEQ ID NO: 65908 - DNA, 120 bp, synthetic construct; identical to SEQ ID NO: 33977
  source 1..120: mol_type = other DNA

SEQ ID NO: 65909 - DNA, 120 bp, synthetic construct
  source 1..120: mol_type = other DNA
ttgaatctcaacttctcccttttcttgctgtgcaaccttgggcaacgtgcttactctcaatgtgagtgactcagtttcctcatagcctcattgtgaggaatgaataagtccacataaaac

SEQ ID NO: 65910 - DNA, 120 bp, synthetic construct
  source 1..120: mol_type = other DNA
caggactttgcaggtagaaagggtaagtcagggtctaccccgtcagcttaatggccccacccctcccccacccccaccctcatgccaggcctaagctcaccttggttcttgtattttccc

SEQ ID NO: 65911 - DNA, 120 bp, synthetic construct
  source 1..120: mol_type = other DNA
tttgggaggccgaggcggatggatcacgaggtcaggagattgagaccatcctggctaacacagtgaaaccctgactctactaaaaaatacaaaaaattagctgggtgtggtggcgggcgc

SEQ ID NO: 65912 - DNA, 120 bp, synthetic construct
  source 1..120: mol_type = other DNA
agctatagaaaattgtcatgtcagggccgcggaaggtctgccctgggttggctaccacatcgaagacactgacatccacgtccacaccgtgcctctccaggcaccactgggtgtttgcat

SEQ ID NO: 65913 - DNA, 120 bp, synthetic construct
  source 1..120: mol_type = other DNA
gcagggctttgtggccttacctaggctggaggaggtgggcaggggcagaccctgctgggcaggcctgtttgtgacactggagaccgggttctttcgtgtcttgtgctcagggagtgttct

SEQ ID NO: 65914 - DNA, 120 bp, synthetic construct
  source 1..120: mol_type = other DNA
ttcttctgattaaaaaaacattttgtgggcccctgaaagtactgtggccctaggccttgggtctattgtgcttagtggataagtcatccctgttgtagggacctgtttctgaaaggcact

SEQ ID NO: 65915 - DNA, 120 bp, synthetic construct
  source 1..120: mol_type = other DNA
tgtgatctgcctgcctcagcttcccaaagtgctgggattacaggtgtgagccaccgcgcctggcctaatttttttttagatgaagtctcactctgtcgcccaggctggagtgcaatggca

SEQ ID NO: 65916 - DNA, 120 bp, synthetic construct
  source 1..120: mol_type = other DNA
tcattgttactttagcagcattttgttctagctgaaatatggtaataagattaaaaaaattttttttggctgggagtggtggctcacacccgtaatcccaacactttgggaggccgaggt

SEQ ID NO: 65917 - DNA, 120 bp, synthetic construct
  source 1..120: mol_type = other DNA
tccagcctgggtgacagagcaagactccatctgaaaaaaaaaaaaaaaaaaaaaaaacccaaaataaataaaaaggagggatgttcagaacaaattggaaagtccaaccatgtcatgaac

SEQ ID NO: 65918 - DNA, 120 bp, synthetic construct
  source 1..120: mol_type = other DNA
agctccacctcccaggttcatgccattctcctgcctcagcctcctgagtagctggggctacaggcgcccaccaccgcgcccggctaattttttgtatttttggtagagacagggtttcac

SEQ ID NO: 65919 - DNA, 120 bp, synthetic construct
  source 1..120: mol_type = other DNA
aggtggcagtgagctgagattgcaccattgcactccagcctgggcaacagagccagactccaccaaaaaaaaaaaaaaaaaaaagaatctgttttcatttgtaacaggacacaattggag

SEQ ID NO: 65920 - DNA, 120 bp, synthetic construct
  source 1..120: mol_type = other DNA
ttttcctaatttggagtcactgaaaactaagctgtgtgtttttttttttttttttgagacagagtcccgctctgtcactcaggctggagtgcagtggcagggtctcagctcactgaacct

SEQ ID NO: 65921 - DNA, 120 bp, synthetic construct
  source 1..120: mol_type = other DNA
cacaaaaccgccattgtcatcatggcccgttctcaatgagctgttgggtacacctcccagacggggtggtggccgggcagaggggctcctcacttcccagtaggggcagccgggcagagg

SEQ ID NO: 65922 - DNA, 120 bp, synthetic construct
  source 1..120: mol_type = other DNA
atctcggcactttgggaggccaaggcaggctgctgggaggtggatgttgtagcgagccgagatcacgccactgcactccagcctgggcaccattgagagactccgtctgcaatcccagca

SEQ ID NO: 65923 - DNA, 120 bp, synthetic construct; identical to SEQ ID NO: 16701
  source 1..120: mol_type = other DNA

SEQ ID NO: 65924 - DNA, 120 bp, synthetic construct; identical to SEQ ID NO: 16702
  source 1..120: mol_type = other DNA

SEQ ID NO: 65925 - DNA, 120 bp, synthetic construct
  source 1..120: mol_type = other DNA
tgcccggctttggtatcaggatgatgctggcctcataaaatgagttagggaggattccctctttttctattgattggaatagtttcagaaggaatggtaccagttcctctttgtacctct

SEQ ID NO: 65926 - DNA, 120 bp, synthetic construct
  source 1..120: mol_type = other DNA
tgttagtcctaaaaccataacaaccctagaaaaaaacctaggcattaccattcaggacataggcatgggcaaggacttcatatctaaaacaccaaaagcaatggcaacaaaagccaaaat

SEQ ID NO: 65927 - DNA, 120 bp, synthetic construct
  source 1..120: mol_type = other DNA
catgtcacatgtatacatatgtaactaacctgcacattgtgcacatgtaccctaaaacttaaagtataataataaaaaaaacaaaaacaagaaacaaaaaaacccaaaagatcaggattt

SEQ ID NO: 65928 - DNA, 120 bp, synthetic construct
  source 1..120: mol_type = other DNA
ggtttcatcacgttggccaggctggccttgaactcctggcctaaagtgatccacccacctcagcctcccgaagtgctgggattacaggtgtaagccactgcacccggcctaaggacctac

SEQ ID NO: 65929 - DNA, 120 bp, synthetic construct; identical to SEQ ID NO: 16703
  source 1..120: mol_type = other DNA

SEQ ID NO: 65930 - DNA, 120 bp, synthetic construct; identical to SEQ ID NO: 16704
  source 1..120: mol_type = other DNA

SEQ ID NO: 65931 - DNA, 120 bp, synthetic construct; identical to SEQ ID NO: 16705
  source 1..120: mol_type = other DNA

SEQ ID NO: 65932 - DNA, 120 bp, synthetic construct
  source 1..120: mol_type = other DNA
gctatgatggtgccactgtactccagcttgggtgacagagagataccttgtctcaaaaaaaaaaaaaaaaaaagaaagaaagaaagaaaacaacccccctcccccaaacccaacccaatt

SEQ ID NO: 65933 - DNA, 120 bp, synthetic construct; identical to SEQ ID NO: 16706
  source 1..120: mol_type = other DNA

SEQ ID NO: 65934 - DNA, 120 bp, synthetic construct; identical to SEQ ID NO: 16707
  source 1..120: mol_type = other DNA

SEQ ID NO: 65935 - DNA, 120 bp, synthetic construct; identical to SEQ ID NO: 16708
  source 1..120: mol_type = other DNA

SEQ ID NO: 65936 - DNA, 120 bp, synthetic construct; identical to SEQ ID NO: 16709
  source 1..120: mol_type = other DNA

SEQ ID NO: 65937 - DNA, 120 bp, synthetic construct; identical to SEQ ID NO: 16710
  source 1..120: mol_type = other DNA

SEQ ID NO: 65938 - DNA, 120 bp, synthetic construct; identical to SEQ ID NO: 16711
  source 1..120: mol_type = other DNA

SEQ ID NO: 65939 - DNA, 120 bp, synthetic construct; identical to SEQ ID NO: 16712
  source 1..120: mol_type = other DNA

SEQ ID NO: 65940 - DNA, 120 bp, synthetic construct; identical to SEQ ID NO: 16713
  source 1..120: mol_type = other DNA

SEQ ID NO: 65941 - DNA, 120 bp, synthetic construct; identical to SEQ ID NO: 16714
  source 1..120: mol_type = other DNA

SEQ ID NO: 65942 - DNA, 120 bp, synthetic construct; identical to SEQ ID NO: 16715
  source 1..120: mol_type = other DNA

SEQ ID NO: 65943 - DNA, 120 bp, synthetic construct; identical to SEQ ID NO: 16716
  source 1..120: mol_type = other DNA

SEQ ID NO: 65944 - DNA, 120 bp, synthetic construct; identical to SEQ ID NO: 16717
  source 1..120: mol_type = other DNA

SEQ ID NO: 65945 - DNA, 120 bp, synthetic construct
  source 1..120: mol_type = other DNA
tggtttactgcagcctcgacctcccaggctcaactgaactcccacctcagcccctcgagtagctggaactataagcatgtgtcaccatgtccagctaaattattttgtattttttttttt

SEQ ID NO: 65946 - DNA, 120 bp, synthetic construct; identical to SEQ ID NO: 16718
  source 1..120: mol_type = other DNA

SEQ ID NO: 65947 - DNA, 120 bp, synthetic construct; identical to SEQ ID NO: 16719
  source 1..120: mol_type = other DNA

SEQ ID NO: 65948 - DNA, 120 bp, synthetic construct; identical to SEQ ID NO: 16720
  source 1..120: mol_type = other DNA

SEQ ID NO: 65949 - DNA, 120 bp, synthetic construct; identical to SEQ ID NO: 16721
  source 1..120: mol_type = other DNA

SEQ ID NO: 65950 - DNA, 120 bp, synthetic construct; identical to SEQ ID NO: 16722
  source 1..120: mol_type = other DNA

SEQ ID NO: 65951 - DNA, 120 bp, synthetic construct; identical to SEQ ID NO: 16723
  source 1..120: mol_type = other DNA

SEQ ID NO: 65952 - DNA, 120 bp, synthetic construct; identical to SEQ ID NO: 16724
  source 1..120: mol_type = other DNA

SEQ ID NO: 65953 - DNA, 120 bp, synthetic construct; identical to SEQ ID NO: 16725
  source 1..120: mol_type = other DNA

SEQ ID NO: 65954 - DNA, 120 bp, synthetic construct; identical to SEQ ID NO: 16726
  source 1..120: mol_type = other DNA

SEQ ID NO: 65955 - DNA, 120 bp, synthetic construct; identical to SEQ ID NO: 16727
  source 1..120: mol_type = other DNA

SEQ ID NO: 65956 - DNA, 120 bp, synthetic construct; identical to SEQ ID NO: 16728
  source 1..120: mol_type = other DNA

SEQ ID NO: 65957 - DNA, 120 bp, synthetic construct; identical to SEQ ID NO: 16729
  source 1..120: mol_type = other DNA

SEQ ID NO: 65958 - DNA, 120 bp, synthetic construct
  source 1..120: mol_type = other DNA
caagaccagcctgggcaacatgacaaaaccccgtctctacaaaaaattagctgggcatggtggtgtgtggctgtaatcccagctactggggagcctgaggcatgagaatcgcttgagccc

SEQ ID NO: 65959 - DNA, 120 bp, synthetic construct; identical to SEQ ID NO: 16730
  source 1..120: mol_type = other DNA

SEQ ID NO: 65960 - DNA, 120 bp, synthetic construct; identical to SEQ ID NO: 16731
  source 1..120: mol_type = other DNA

SEQ ID NO: 65961 - DNA, 120 bp, synthetic construct; identical to SEQ ID NO: 16732
  source 1..120: mol_type = other DNA

SEQ ID NO: 65962 - DNA, 120 bp, synthetic construct; identical to SEQ ID NO: 16733
  source 1..120: mol_type = other DNA

SEQ ID NO: 65963 - DNA, 120 bp, synthetic construct; identical to SEQ ID NO: 16734
  source 1..120: mol_type = other DNA

SEQ ID NO: 65964 - DNA, 120 bp, synthetic construct; identical to SEQ ID NO: 16735
  source 1..120: mol_type = other DNA

SEQ ID NO: 65965 - DNA, 120 bp, synthetic construct; identical to SEQ ID NO: 16736
  source 1..120: mol_type = other DNA

SEQ ID NO: 65966 - DNA, 120 bp, synthetic construct; identical to SEQ ID NO: 16737
  source 1..120: mol_type = other DNA

SEQ ID NO: 65967 - DNA, 120 bp, synthetic construct; identical to SEQ ID NO: 16738
  source 1..120: mol_type = other DNA

SEQ ID NO: 65968 - DNA, 120 bp, synthetic construct
  source 1..120: mol_type = other DNA
ggctggtcttgaactcgtggcctcaagccatcctcctgccttggctcccaaagtactggggttacaggcgtgaaccactgtttctggcctattcttgagttttctatgacacgcatcttt

SEQ ID NO: 65969 - DNA, 120 bp, synthetic construct
  source 1..120: mol_type = other DNA
caggaggtggaggttgcagtgggtcaagatggtaccacttcactctggcctgggcaacagagtgagactctgcctcaaaaaaaaaaaaaaaaaaaaaaaaaaaaaaaaaaaaagcttagg

SEQ ID NO: 65970 - DNA, 120 bp, synthetic construct; identical to SEQ ID NO: 16739
  source 1..120: mol_type = other DNA

SEQ ID NO: 65971 - DNA, 120 bp, synthetic construct; identical to SEQ ID NO: 16740
  source 1..120: mol_type = other DNA

SEQ ID NO: 65972 - DNA, 120 bp, synthetic construct; identical to SEQ ID NO: 16741
  source 1..120: mol_type = other DNA

SEQ ID NO: 65973 - DNA, 120 bp, synthetic construct; identical to SEQ ID NO: 16742
  source 1..120: mol_type = other DNA

SEQ ID NO: 65974 - DNA, 120 bp, synthetic construct; identical to SEQ ID NO: 16743
  source 1..120: mol_type = other DNA

SEQ ID NO: 65975 - DNA, 120 bp, synthetic construct; identical to SEQ ID NO: 16744
  source 1..120: mol_type = other DNA

SEQ ID NO: 65976 - DNA, 120 bp, synthetic construct
  source 1..120: mol_type = other DNA
aagcacattacacttattgtgcactttatttctattattattacattgtaatatatgatgaaacaattatacaactcaccatcatgtagaatcagtgggagccctgagcttgttttcctg

SEQ ID NO: 65977 - DNA, 120 bp, synthetic construct; identical to SEQ ID NO: 16745
  source 1..120: mol_type = other DNA

SEQ ID NO: 65978 - DNA, 120 bp, synthetic construct; identical to SEQ ID NO: 16746
  source 1..120: mol_type = other DNA

SEQ ID NO: 65979 - DNA, 120 bp, synthetic construct; identical to SEQ ID NO: 16747
  source 1..120: mol_type = other DNA

SEQ ID NO: 65980 - DNA, 120 bp, synthetic construct; identical to SEQ ID NO: 16748
  source 1..120: mol_type = other DNA

SEQ ID NO: 65981 - DNA, 120 bp, synthetic construct; identical to SEQ ID NO: 16749
  source 1..120: mol_type = other DNA

SEQ ID NO: 65982 - DNA, 120 bp, synthetic construct; identical to SEQ ID NO: 16750
  source 1..120: mol_type = other DNA

SEQ ID NO: 65983 - DNA, 120 bp, synthetic construct; identical to SEQ ID NO: 16751
  source 1..120: mol_type = other DNA

SEQ ID NO: 65984 - DNA, 120 bp, synthetic construct
  source 1..120: mol_type = other DNA
gcttgaacctgggaggcggaggttgtagtgagccgagatcatgccattgcactccatcctgggcaacaagagcgaaactccatttcaaaaaaaaaaaaaaaaaaggaactcttgttttat

SEQ ID NO: 65985 - DNA, 120 bp, synthetic construct; identical to SEQ ID NO: 16752
  source 1..120: mol_type = other DNA

SEQ ID NO: 65986 - DNA, 120 bp, synthetic construct; identical to SEQ ID NO: 16753
  source 1..120: mol_type = other DNA

SEQ ID NO: 65987 - DNA, 120 bp, synthetic construct; identical to SEQ ID NO: 16754
  source 1..120: mol_type = other DNA

SEQ ID NO: 65988 - DNA, 120 bp, synthetic construct; identical to SEQ ID NO: 16755
  source 1..120: mol_type = other DNA

SEQ ID NO: 65989 - DNA, 120 bp, synthetic construct; identical to SEQ ID NO: 16756
  source 1..120: mol_type = other DNA

SEQ ID NO: 65990 - DNA, 120 bp, synthetic construct; identical to SEQ ID NO: 16757
  source 1..120: mol_type = other DNA

SEQ ID NO: 65991 - DNA, 120 bp, synthetic construct
  source 1..120: mol_type = other DNA
cttttggtccaggaacagtggctcacacttgtaatcctagcacttcgggagactgaggtaggaggatcacttgagcctaggagattgagactagcctgggaaacatagaaagaccctgtc

SEQ ID NO: 65992 - DNA, 120 bp, synthetic construct; identical to SEQ ID NO: 16758
  source 1..120: mol_type = other DNA

SEQ ID NO: 65993 - DNA, 120 bp, synthetic construct; identical to SEQ ID NO: 16759
  source 1..120: mol_type = other DNA

SEQ ID NO: 65994 - DNA, 120 bp, synthetic construct; identical to SEQ ID NO: 16760
  source 1..120: mol_type = other DNA

SEQ ID NO: 65995 - DNA, 120 bp, synthetic construct; identical to SEQ ID NO: 16761
  source 1..120: mol_type = other DNA

SEQ ID NO: 65996 - DNA, 120 bp, synthetic construct; identical to SEQ ID NO: 16762
  source 1..120: mol_type = other DNA

SEQ ID NO: 65997 - DNA, 120 bp, synthetic construct
  source 1..120: mol_type = other DNA
tctctcctgctatcatgaaagatatgccttgcttccccttcactttctgccatgattgtaaatttcctgaggcctccccagctatgtagaactgtgagtcaattaaaacttttttcttca

SEQ ID NO: 65998 - DNA, 120 bp, synthetic construct; identical to SEQ ID NO: 16763
  source 1..120: mol_type = other DNA

SEQ ID NO: 65999 - DNA, 120 bp, synthetic construct; identical to SEQ ID NO: 16764
  source 1..120: mol_type = other DNA

SEQ ID NO: 66000 - DNA, 120 bp, synthetic construct; identical to SEQ ID NO: 16765
  source 1..120: mol_type = other DNA

SEQ ID NO: 66001 - DNA, 120 bp, synthetic construct; identical to SEQ ID NO: 16766
  source 1..120: mol_type = other DNA

SEQ ID NO: 66002 - DNA, 120 bp, synthetic construct; identical to SEQ ID NO: 16767
  source 1..120: mol_type = other DNA

SEQ ID NO: 66003 - DNA, 120 bp, synthetic construct; identical to SEQ ID NO: 16768
  source 1..120: mol_type = other DNA

SEQ ID NO: 66004 - DNA, 120 bp, synthetic construct; identical to SEQ ID NO: 16769
  source 1..120: mol_type = other DNA

SEQ ID NO: 66005 - DNA, 120 bp, synthetic construct; identical to SEQ ID NO: 16770
  source 1..120: mol_type = other DNA

SEQ ID NO: 66006 - DNA, 120 bp, synthetic construct; identical to SEQ ID NO: 16771
  source 1..120: mol_type = other DNA

SEQ ID NO: 66007 - DNA, 120 bp, synthetic construct; identical to SEQ ID NO: 16772
  source 1..120: mol_type = other DNA

SEQ ID NO: 66008 - DNA, 120 bp, synthetic construct; identical to SEQ ID NO: 16773
  source 1..120: mol_type = other DNA

SEQ ID NO: 66009 - DNA, 120 bp, synthetic construct; identical to SEQ ID NO: 16774
  source 1..120: mol_type = other DNA

SEQ ID NO: 66010 - DNA, 120 bp, synthetic construct; identical to SEQ ID NO: 16775
  source 1..120: mol_type = other DNA

SEQ ID NO: 66011 - DNA, 120 bp, synthetic construct; identical to SEQ ID NO: 16776
  source 1..120: mol_type = other DNA

SEQ ID NO: 66012 - DNA, 120 bp, synthetic construct; identical to SEQ ID NO: 16777
  source 1..120: mol_type = other DNA

SEQ ID NO: 66013 - DNA, 120 bp, synthetic construct; identical to SEQ ID NO: 16778
  source 1..120: mol_type = other DNA

SEQ ID NO: 66014 - DNA, 120 bp, synthetic construct
  source 1..120: mol_type = other DNA
aaacactacatgttctcactcataagtgggagctgaacaatgagaacacatggacacagggaggggaacatcacacaccagggcgtgtcaggggtcggggggcaggggggagagcatcag

SEQ ID NO: 66015 - DNA, 120 bp, synthetic construct; identical to SEQ ID NO: 16779
  source 1..120: mol_type = other DNA

SEQ ID NO: 66016 - DNA, 120 bp, synthetic construct; identical to SEQ ID NO: 16780
  source 1..120: mol_type = other DNA

SEQ ID NO: 66017 - DNA, 120 bp, synthetic construct; identical to SEQ ID NO: 16781
  source 1..120: mol_type = other DNA

SEQ ID NO: 66018 - DNA, 120 bp, synthetic construct; identical to SEQ ID NO: 16782
  source 1..120: mol_type = other DNA

SEQ ID NO: 66019 - DNA, 120 bp, synthetic construct; identical to SEQ ID NO: 16783
  source 1..120: mol_type = other DNA

SEQ ID NO: 66020 - DNA, 120 bp, synthetic construct; identical to SEQ ID NO: 16784
  source 1..120: mol_type = other DNA

SEQ ID NO: 66021 - DNA, 120 bp, synthetic construct; identical to SEQ ID NO: 16785
  source 1..120: mol_type = other DNA

SEQ ID NO: 66022 - DNA, 120 bp, synthetic construct; identical to SEQ ID NO: 16786
  source 1..120: mol_type = other DNA

SEQ ID NO: 66023 - DNA, 120 bp, synthetic construct; identical to SEQ ID NO: 16787
  source 1..120: mol_type = other DNA

SEQ ID NO: 66024 - DNA, 120 bp, synthetic construct; identical to SEQ ID NO: 16788
  source 1..120: mol_type = other DNA

SEQ ID NO: 66025 - DNA, 120 bp, synthetic construct; identical to SEQ ID NO: 16789
  source 1..120: mol_type = other DNA

SEQ ID NO: 66026 - DNA, 120 bp, synthetic construct; identical to SEQ ID NO: 16790
  source 1..120: mol_type = other DNA

SEQ ID NO: 66027 - DNA, 120 bp, synthetic construct; identical to SEQ ID NO: 16791
  source 1..120: mol_type = other DNA

SEQ ID NO: 66028 - DNA, 120 bp, synthetic construct; identical to SEQ ID NO: 16792
  source 1..120: mol_type = other DNA

SEQ ID NO: 66029 - DNA, 120 bp, synthetic construct; identical to SEQ ID NO: 16793
  source 1..120: mol_type = other DNA

SEQ ID NO: 66030 - DNA, 120 bp, synthetic construct; identical to SEQ ID NO: 16794
  source 1..120: mol_type = other DNA

SEQ ID NO: 66031 - DNA, 120 bp, synthetic construct; identical to SEQ ID NO: 16795
  source 1..120: mol_type = other DNA

SEQ ID NO: 66032 - DNA, 120 bp, synthetic construct; identical to SEQ ID NO: 16796
  source 1..120: mol_type = other DNA

SEQ ID NO: 66033 - DNA, 120 bp, synthetic construct; identical to SEQ ID NO: 16797
  source 1..120: mol_type = other DNA

SEQ ID NO: 66034 - DNA, 120 bp, synthetic construct
  source 1..120: mol_type = other DNA
ccagcctgggtgacagagtaagaacctgaaaaaaaaagacagtaagaaaagaacaaaacaaagaaagaaagagaaagaaggaaagaaagaaagaaagaaaatggatacagtgaagaaaat

SEQ ID NO: 66035 - DNA, 120 bp, synthetic construct; identical to SEQ ID NO: 16798
  source 1..120: mol_type = other DNA

SEQ ID NO: 66036 - DNA, 120 bp, synthetic construct; identical to SEQ ID NO: 16799
  source 1..120: mol_type = other DNA

SEQ ID NO: 66037 - DNA, 120 bp, synthetic construct; identical to SEQ ID NO: 16800
  source 1..120: mol_type = other DNA

SEQ ID NO: 66038 - DNA, 120 bp, synthetic construct; identical to SEQ ID NO: 16801
  source 1..120: mol_type = other DNA

SEQ ID NO: 66039 - DNA, 120 bp, synthetic construct; identical to SEQ ID NO: 16802
  source 1..120: mol_type = other DNA

SEQ ID NO: 66040 - DNA, 120 bp, synthetic construct
  source 1..120: mol_type = other DNA
cctcccccctccccccaccccaccacagtccccagagtgtgatgttccccttcctgtgtccatgtgatctcattgttcaattcccacctatgagtgagaatatgtgctgtttggtttttt

SEQ ID NO: 66041 - DNA, 120 bp, synthetic construct; identical to SEQ ID NO: 16803
  source 1..120: mol_type = other DNA

SEQ ID NO: 66042 - DNA, 120 bp, synthetic construct; identical to SEQ ID NO: 16804
  source 1..120: mol_type = other DNA

SEQ ID NO: 66043 - DNA, 120 bp, synthetic construct; identical to SEQ ID NO: 16805
  source 1..120: mol_type = other DNA

SEQ ID NO: 66044 - DNA, 120 bp, synthetic construct; identical to SEQ ID NO: 16806
  source 1..120: mol_type = other DNA

SEQ ID NO: 66045 - DNA, 120 bp, synthetic construct; identical to SEQ ID NO: 16807
  source 1..120: mol_type = other DNA

SEQ ID NO: 66046 - DNA, 120 bp, synthetic construct; identical to SEQ ID NO: 16808
  source 1..120: mol_type = other DNA

SEQ ID NO: 66047 - DNA, 120 bp, synthetic construct; identical to SEQ ID NO: 16809
  source 1..120: mol_type = other DNA

SEQ ID NO: 66048 - DNA, 120 bp, synthetic construct; identical to SEQ ID NO: 16810
  source 1..120: mol_type = other DNA

SEQ ID NO: 66049 - DNA, 120 bp, synthetic construct; identical to SEQ ID NO: 16811
  source 1..120: mol_type = other DNA

SEQ ID NO: 66050 - DNA, 120 bp, synthetic construct; identical to SEQ ID NO: 16812
  source 1..120: mol_type = other DNA

SEQ ID NO: 66051 - DNA, 120 bp, synthetic construct; identical to SEQ ID NO: 16813
  source 1..120: mol_type = other DNA

SEQ ID NO: 66052 - DNA, 120 bp, synthetic construct
  source 1..120: mol_type = other DNA
agtgcagtggtacaatcttaactcacctcaacctccacctcccaggttcaagtgattctcctgcctcagcctcctgagtagctgggattacaggtgtgcgccaccatgcaccaccacgcc

SEQ ID NO: 66053 - DNA, 120 bp, synthetic construct; identical to SEQ ID NO: 16814
  source 1..120: mol_type = other DNA

SEQ ID NO: 66054 - DNA, 120 bp, synthetic construct; identical to SEQ ID NO: 16815
  source 1..120: mol_type = other DNA

SEQ ID NO: 66055 - DNA, 120 bp, synthetic construct; identical to SEQ ID NO: 16816
  source 1..120: mol_type = other DNA

SEQ ID NO: 66056 - DNA, 120 bp, synthetic construct; identical to SEQ ID NO: 16817
  source 1..120: mol_type = other DNA

SEQ ID NO: 66057 - DNA, 120 bp, synthetic construct; identical to SEQ ID NO: 16818
  source 1..120: mol_type = other DNA

SEQ ID NO: 66058 - DNA, 120 bp, synthetic construct; identical to SEQ ID NO: 16819
  source 1..120: mol_type = other DNA

SEQ ID NO: 66059 - DNA, 120 bp, synthetic construct; identical to SEQ ID NO: 16820
  source 1..120: mol_type = other DNA

SEQ ID NO: 66060 - DNA, 120 bp, synthetic construct; identical to SEQ ID NO: 16821
  source 1..120: mol_type = other DNA

SEQ ID NO: 66061 - DNA, 120 bp, synthetic construct; identical to SEQ ID NO: 16822
  source 1..120: mol_type = other DNA

SEQ ID NO: 66062 - DNA, 120 bp, synthetic construct; identical to SEQ ID NO: 16823
  source 1..120: mol_type = other DNA

SEQ ID NO: 66063 - DNA, 120 bp, synthetic construct; identical to SEQ ID NO: 16824
  source 1..120: mol_type = other DNA

SEQ ID NO: 66064 - DNA, 120 bp, synthetic construct; identical to SEQ ID NO: 16825
  source 1..120: mol_type = other DNA

SEQ ID NO: 66065 - DNA, 120 bp, synthetic construct; identical to SEQ ID NO: 16826
  source 1..120: mol_type = other DNA

SEQ ID NO: 66066 - DNA, 120 bp, synthetic construct; identical to SEQ ID NO: 16827
  source 1..120: mol_type = other DNA

SEQ ID NO: 66067 - DNA, 120 bp, synthetic construct; identical to SEQ ID NO: 16828
  source 1..120: mol_type = other DNA

SEQ ID NO: 66068 - DNA, 120 bp, synthetic construct; identical to SEQ ID NO: 16829
  source 1..120: mol_type = other DNA

SEQ ID NO: 66069 - DNA, 120 bp, synthetic construct; identical to SEQ ID NO: 16830
  source 1..120: mol_type = other DNA

SEQ ID NO: 66070 - DNA, 120 bp, synthetic construct; identical to SEQ ID NO: 16831
  source 1..120: mol_type = other DNA

SEQ ID NO: 66071 - DNA, 120 bp, synthetic construct; identical to SEQ ID NO: 16832
  source 1..120: mol_type = other DNA

SEQ ID NO: 66072 - DNA, 120 bp, synthetic construct; identical to SEQ ID NO: 16833
  source 1..120: mol_type = other DNA

SEQ ID NO: 66073 - DNA, 120 bp, synthetic construct; identical to SEQ ID NO: 16834
  source 1..120: mol_type = other DNA

SEQ ID NO: 66074 - DNA, 120 bp, synthetic construct; identical to SEQ ID NO: 16835
  source 1..120: mol_type = other DNA

SEQ ID NO: 66075 - DNA, 120 bp, synthetic construct; identical to SEQ ID NO: 16836
  source 1..120: mol_type = other DNA

SEQ ID NO: 66076 - DNA, 120 bp, synthetic construct; identical to SEQ ID NO: 16837
  source 1..120: mol_type = other DNA

SEQ ID NO: 66077 - DNA, 120 bp, synthetic construct; identical to SEQ ID NO: 16838
  source 1..120: mol_type = other DNA

SEQ ID NO: 66078 - DNA, 120 bp, synthetic construct; identical to SEQ ID NO: 16839
  source 1..120: mol_type = other DNA

SEQ ID NO: 66079 - DNA, 120 bp, synthetic construct; identical to SEQ ID NO: 16840
  source 1..120: mol_type = other DNA

SEQ ID NO: 66080 - DNA, 120 bp, synthetic construct; identical to SEQ ID NO: 16841
  source 1..120: mol_type = other DNA

SEQ ID NO: 66081 - DNA, 120 bp, synthetic construct
  source 1..120: mol_type = other DNA
gcctcagcctcccaaagtgctgggattacaggcgtgagccaccgcgcccggccaataaaactttcaaagggcccaaactgcattaccctactctattatttttgaggtctagactattgg

SEQ ID NO: 66082 - DNA, 120 bp, synthetic construct; identical to SEQ ID NO: 16842
  source 1..120: mol_type = other DNA

SEQ ID NO: 66083 - DNA, 120 bp, synthetic construct; identical to SEQ ID NO: 16843
  source 1..120: mol_type = other DNA

SEQ ID NO: 66084 - DNA, 120 bp, synthetic construct; identical to SEQ ID NO: 16844
  source 1..120: mol_type = other DNA

SEQ ID NO: 66085 - DNA, 120 bp, synthetic construct; identical to SEQ ID NO: 16845
  source 1..120: mol_type = other DNA

SEQ ID NO: 66086 - DNA, 120 bp, synthetic construct; identical to SEQ ID NO: 16846
  source 1..120: mol_type = other DNA

SEQ ID NO: 66087 - DNA, 120 bp, synthetic construct; identical to SEQ ID NO: 16847
  source 1..120: mol_type = other DNA

SEQ ID NO: 66088 - DNA, 120 bp, synthetic construct; identical to SEQ ID NO: 16848
  source 1..120: mol_type = other DNA

SEQ ID NO: 66089 - DNA, 120 bp, synthetic construct; identical to SEQ ID NO: 16849
  source 1..120: mol_type = other DNA

SEQ ID NO: 66090 - DNA, 120 bp, synthetic construct; identical to SEQ ID NO: 16850
  source 1..120: mol_type = other DNA

SEQ ID NO: 66091 - DNA, 120 bp, synthetic construct
  source 1..120: mol_type = other DNA
tggtgaggttgtaaagaaaagggaacacttatacactgttggtgggagtgtaaattagttcaaccattatggaaagcagtgtggtgattcttcaaaaaacaaaaaatagaactaccattt

SEQ ID NO: 66092 - DNA, 120 bp, synthetic construct; identical to SEQ ID NO: 16851
  source 1..120: mol_type = other DNA

SEQ ID NO: 66093 - DNA, 120 bp, synthetic construct; identical to SEQ ID NO: 16852
  source 1..120: mol_type = other DNA

SEQ ID NO: 66094 - DNA, 120 bp, synthetic construct; identical to SEQ ID NO: 16853
  source 1..120: mol_type = other DNA

SEQ ID NO: 66095 - DNA, 120 bp, synthetic construct; identical to SEQ ID NO: 16854
  source 1..120: mol_type = other DNA

SEQ ID NO: 66096 - DNA, 120 bp, synthetic construct; identical to SEQ ID NO: 16855
  source 1..120: mol_type = other DNA

SEQ ID NO: 66097 - DNA, 120 bp, synthetic construct
  source 1..120: mol_type = other DNA
gtctctctagtctccttcaacctggaacagttcttcgggatttcttgactttcatgatcttgattttttttttttttttttttgagacagggtctcactctgtcacccaggctggtgtcc

SEQ ID NO: 66098 - DNA, 120 bp, synthetic construct; identical to SEQ ID NO: 16856
  source 1..120: mol_type = other DNA

SEQ ID NO: 66099 - DNA, 120 bp, synthetic construct; identical to SEQ ID NO: 16857
  source 1..120: mol_type = other DNA

SEQ ID NO: 66100 - DNA, 120 bp, synthetic construct; identical to SEQ ID NO: 16858
  source 1..120: mol_type = other DNA

SEQ ID NO: 66101 - DNA, 120 bp, synthetic construct; identical to SEQ ID NO: 16859
  source 1..120: mol_type = other DNA

SEQ ID NO: 66102 - DNA, 120 bp, synthetic construct; identical to SEQ ID NO: 16860
  source 1..120: mol_type = other DNA

SEQ ID NO: 66103 - DNA, 120 bp, synthetic construct; identical to SEQ ID NO: 16861
  source 1..120: mol_type = other DNA

SEQ ID NO: 66104 - DNA, 120 bp, synthetic construct; identical to SEQ ID NO: 16862
  source 1..120: mol_type = other DNA

SEQ ID NO: 66105 - DNA, 120 bp, synthetic construct; identical to SEQ ID NO: 16863
  source 1..120: mol_type = other DNA

SEQ ID NO: 66106 - DNA, 120 bp, synthetic construct; identical to SEQ ID NO: 16864
  source 1..120: mol_type = other DNA

SEQ ID NO: 66107 - DNA, 120 bp, synthetic construct; identical to SEQ ID NO: 16865
  source 1..120: mol_type = other DNA

SEQ ID NO: 66108 - DNA, 120 bp, synthetic construct
  source 1..120: mol_type = other DNA
aatctcaacttgaattgtgctcccataattaccacatgttgtgggagggacctggtgggagataattgaatcacaggggtggtttcccccatactgttctcatggtagtgaataagtctc

SEQ ID NO: 66109 - DNA, 120 bp, synthetic construct; identical to SEQ ID NO: 16866
  source 1..120: mol_type = other DNA

SEQ ID NO: 66110 - DNA, 120 bp, synthetic construct; identical to SEQ ID NO: 16867
  source 1..120: mol_type = other DNA

SEQ ID NO: 66111 - DNA, 120 bp, synthetic construct; identical to SEQ ID NO: 16868
  source 1..120: mol_type = other DNA

SEQ ID NO: 66112 - DNA, 120 bp, synthetic construct; identical to SEQ ID NO: 16869
  source 1..120: mol_type = other DNA

SEQ ID NO: 66113 - DNA, 120 bp, synthetic construct; identical to SEQ ID NO: 16870
  source 1..120: mol_type = other DNA

SEQ ID NO: 66114 - DNA, 120 bp, synthetic construct; identical to SEQ ID NO: 16871
  source 1..120: mol_type = other DNA

SEQ ID NO: 66115 - DNA, 120 bp, synthetic construct; identical to SEQ ID NO: 16872
  source 1..120: mol_type = other DNA

SEQ ID NO: 66116 - DNA, 120 bp, synthetic construct; identical to SEQ ID NO: 16873
  source 1..120: mol_type = other DNA

SEQ ID NO: 66117 - DNA, 120 bp, synthetic construct; identical to SEQ ID NO: 16874
  source 1..120: mol_type = other DNA

SEQ ID NO: 66118 - DNA, 120 bp, synthetic construct; identical to SEQ ID NO: 16875
  source 1..120: mol_type = other DNA

SEQ ID NO: 66119 - DNA, 120 bp, synthetic construct; identical to SEQ ID NO: 16876
  source 1..120: mol_type = other DNA

SEQ ID NO: 66120 - DNA, 120 bp, synthetic construct; identical to SEQ ID NO: 16877
  source 1..120: mol_type = other DNA

SEQ ID NO: 66121 - DNA, 120 bp, synthetic construct; identical to SEQ ID NO: 16878
  source 1..120: mol_type = other DNA

SEQ ID NO: 66122 - DNA, 120 bp, synthetic construct; identical to SEQ ID NO: 16879
  source 1..120: mol_type = other DNA

SEQ ID NO: 66123 - DNA, 120 bp, synthetic construct; identical to SEQ ID NO: 16880
  source 1..120: mol_type = other DNA

SEQ ID NO: 66124 - DNA, 120 bp, synthetic construct; identical to SEQ ID NO: 16881
  source 1..120: mol_type = other DNA

SEQ ID NO: 66125 - DNA, 120 bp, synthetic construct; identical to SEQ ID NO: 16882
  source 1..120: mol_type = other DNA

SEQ ID NO: 66126 - DNA, 120 bp, synthetic construct; identical to SEQ ID NO: 16883
  source 1..120: mol_type = other DNA

SEQ ID NO: 66127 - DNA, 120 bp, synthetic construct; identical to SEQ ID NO: 16884
  source 1..120: mol_type = other DNA

SEQ ID NO: 66128 - DNA, 120 bp, synthetic construct; identical to SEQ ID NO: 16885
  source 1..120: mol_type = other DNA

SEQ ID NO: 66129 - DNA, 120 bp, synthetic construct; identical to SEQ ID NO: 16886
  source 1..120: mol_type = other DNA

SEQ ID NO: 66130 - DNA, 120 bp, synthetic construct; identical to SEQ ID NO: 16887
  source 1..120: mol_type = other DNA

SEQ ID NO: 66131 - DNA, 120 bp, synthetic construct; identical to SEQ ID NO: 16888
  source 1..120: mol_type = other DNA

SEQ ID NO: 66132 - DNA, 120 bp, synthetic construct; identical to SEQ ID NO: 16889
  source 1..120: mol_type = other DNA

SEQ ID NO: 66133 - DNA, 120 bp, synthetic construct; identical to SEQ ID NO: 16890
  source 1..120: mol_type = other DNA

SEQ ID NO: 66134 - DNA, 120 bp, synthetic construct
  source 1..120: mol_type = other DNA
ggctggtcttgaactcctgacctcgtgatccattcaccttggcctcccaaagtgctgggattacaggccaccatgcccggccaagaatatattttttaaaactacaagtcaacaacaaaa

SEQ ID NO: 66135 - DNA, 120 bp, synthetic construct; identical to SEQ ID NO: 16891
  source 1..120: mol_type = other DNA

SEQ ID NO: 66136 - DNA, 120 bp, synthetic construct; identical to SEQ ID NO: 16892
  source 1..120: mol_type = other DNA

SEQ ID NO: 66137 - DNA, 120 bp, synthetic construct; identical to SEQ ID NO: 16893
  source 1..120: mol_type = other DNA

SEQ ID NO: 66138 - DNA, 120 bp, synthetic construct; identical to SEQ ID NO: 16894
  source 1..120: mol_type = other DNA

SEQ ID NO: 66139 - DNA, 120 bp, synthetic construct; identical to SEQ ID NO: 16895
  source 1..120: mol_type = other DNA

SEQ ID NO: 66140 - DNA, 120 bp, synthetic construct
  source 1..120: mol_type = other DNA
tcccacctccagtaaccattctactctctatgtccgtgagttcaattgttttgatttttagatcccatgaataagtggatctcctctcctttcacttcctgattttcctgcttcctttcc

SEQ ID NO: 66141 - DNA, 120 bp, synthetic construct; identical to SEQ ID NO: 16896
  source 1..120: mol_type = other DNA

SEQ ID NO: 66142 - DNA, 120 bp, synthetic construct; identical to SEQ ID NO: 16897
  source 1..120: mol_type = other DNA

SEQ ID NO: 66143 - DNA, 120 bp, synthetic construct; identical to SEQ ID NO: 16898
  source 1..120: mol_type = other DNA

SEQ ID NO: 66144 - DNA, 120 bp, synthetic construct; identical to SEQ ID NO: 16899
  source 1..120: mol_type = other DNA

SEQ ID NO: 66145 - DNA, 120 bp, synthetic construct; identical to SEQ ID NO: 16900
  source 1..120: mol_type = other DNA

SEQ ID NO: 66146 - DNA, 120 bp, synthetic construct; identical to SEQ ID NO: 16901
  source 1..120: mol_type = other DNA

SEQ ID NO: 66147 - DNA, 120 bp, synthetic construct; identical to SEQ ID NO: 16902
  source 1..120: mol_type = other DNA

SEQ ID NO: 66148 - DNA, 120 bp, synthetic construct; identical to SEQ ID NO: 16903
  source 1..120: mol_type = other DNA

SEQ ID NO: 66149 - DNA, 120 bp, synthetic construct; identical to SEQ ID NO: 16904
  source 1..120: mol_type = other DNA

SEQ ID NO: 66150 - DNA, 120 bp, synthetic construct; identical to SEQ ID NO: 16905
  source 1..120: mol_type = other DNA

SEQ ID NO: 66151 - DNA, 120 bp, synthetic construct; identical to SEQ ID NO: 16906
  source 1..120: mol_type = other DNA

SEQ ID NO: 66152 - DNA, 120 bp, synthetic construct; identical to SEQ ID NO: 16907
  source 1..120: mol_type = other DNA

SEQ ID NO: 66153 - DNA, 120 bp, synthetic construct; identical to SEQ ID NO: 16908
  source 1..120: mol_type = other DNA

SEQ ID NO: 66154 - DNA, 120 bp, synthetic construct; identical to SEQ ID NO: 16909
  source 1..120: mol_type = other DNA

SEQ ID NO: 66155 - DNA, 120 bp, synthetic construct; identical to SEQ ID NO: 2170
  source 1..120: mol_type = other DNA

SEQ ID NO: 66156 - DNA, 120 bp, synthetic construct
  source 1..120: mol_type = other DNA
attggatgccagtctttctcctgaacatagtgaattttagaagatggttgggtacaaagtcattatacaaaataaatgaattgtagccaggcgtggtggctcacgcctgtaatcccagca

SEQ ID NO: 66157 - DNA, 120 bp, synthetic construct
  source 1..120: mol_type = other DNA
ggcttctattcttgtgcactctttctcttagatctctcatcctaggggaagtgagcgagctgccatgttgaaagcagctctagggagaggcccgcatagtgaggaactgaagcctccagc

SEQ ID NO: 66158 - DNA, 120 bp, synthetic construct
  source 1..120: mol_type = other DNA
aagaacacatggccacgatttataacaaaactcagtgaaaaggtaacccctcaaatcccaaaatactagtgggtaggaccaaattactaacagctagcagatggatgcggtatcagccac

SEQ ID NO: 66159 - DNA, 120 bp, synthetic construct
  source 1..120: mol_type = other DNA
aataatataaagactccagtgaaaagtaaagattgctaggatggattaaaaaaacaaatctggctggacgtggtggctcacacctgtaactcttgggctcaagcaatccacccgcctcgg

SEQ ID NO: 66160 - DNA, 120 bp, synthetic construct
  source 1..120: mol_type = other DNA
aacaacaacaacaaaaaaccaccccacaaaaccacacactgggccataaaaacaagtctaaacacattctagagaactgaaataatatagaatatgttctcagatcacaaagtaatttaa

SEQ ID NO: 66161 - DNA, 120 bp, synthetic construct
  source 1..120: mol_type = other DNA
aaaatgcctgactctatatggcttgcaaaactttgatatgcaaactggacagagacagtacgagagaggaaaacggtggtctaagctcactcatgaacacagatgcagatctcctatata

SEQ ID NO: 66162 - DNA, 120 bp, synthetic construct
  source 1..120: mol_type = other DNA
tagagatggggtttcaccatgttagccaggctagtctcaaactcctgacctcaagtgatctgccgtccctggcctcccaaagcggtgggattataggtgtgagccactgcacctggactc

SEQ ID NO: 66163 - DNA, 120 bp, synthetic construct
  source 1..120: mol_type = other DNA
ggaaaacaagcgagacctttgaggtaactttcaatgggctttctttctttctttctttcgagaaggagtctcactctgttgcccaggctggagtgcaatggcatgactcggctcactgca

SEQ ID NO: 66164 - DNA, 120 bp, synthetic construct
  source 1..120: mol_type = other DNA
tgcaagctctgcctcccgggttcacgccattctcctgcctcagcctcccaagcagctgggactacaggcgtccgccatcacgcctggctaatttttttttttttttttttgtatttttag

SEQ ID NO: 66165 - DNA, 120 bp, synthetic construct
  source 1..120: mol_type = other DNA
atcacttcccacttgacaatggatgcttcctggtccctacctcacacttaataataaccttgccttagcatcacttcatttgcctgtccaccccatcttttgtgcttttgttatcatatc

SEQ ID NO: 66166 - DNA, 120 bp, synthetic construct; identical to SEQ ID NO: 771
  source 1..120: mol_type = other DNA

SEQ ID NO: 66167 - DNA, 120 bp, synthetic construct; identical to SEQ ID NO: 772
  source 1..120: mol_type = other DNA

SEQ ID NO: 66168 - DNA, 120 bp, synthetic construct
  source 1..120: mol_type = other DNA
ttgcttggactctagctcactgaattgtagtcaggaaattgtccttaggcagagaaccaggataatcatggggattcgtcatgagttttccttccttttcgaggattgcagtattgtgct

SEQ ID NO: 66169 - DNA, 120 bp, synthetic construct
  source 1..120: mol_type = other DNA
tctgttgtccaggtggagtgcagtggtgtcacctcagctcactgcaacctcaatctcctgggctcaatcagtcctcctacctcagcctcctgagtagctgagactataggcgcgtgccag

SEQ ID NO: 66170 - DNA, 120 bp, synthetic construct
  source 1..120: mol_type = other DNA
cacccggagtcatacaatatgtgaatggcttctttcacctatatttcaaagcatacattcactttcatttcaaatcatacatttgttactggcttcattcacttagcataatgttttata

SEQ ID NO: 66171 - DNA, 120 bp, synthetic construct
  source 1..120: mol_type = other DNA
tctctctctctctctctctctctgtgtgtgtgttcctagatactttctttttttctttttctttttactttaaaatgtttccccaagtgattctatcccacatcttagctccaaatgcta

SEQ ID NO: 66172 - DNA, 120 bp, synthetic construct
  source 1..120: mol_type = other DNA
ctgtaggaggtattaatacatatcactatcatgtccacatcactaaatacaggccaagagaaggaagataagatgctccaagagaaggaaggtaagatgactggttactggcagaaccag

SEQ ID NO: 66173 - DNA, 120 bp, synthetic construct
  source 1..120: mol_type = other DNA
ggaggataatggaggctctggaaagaaacataatacttttgaagacatcttggtgatatagttcaggagatagaaaaatgttcatatgtatccgagccaggaatcctatcccagagagcc

SEQ ID NO: 66174 - DNA, 120 bp, synthetic construct
  source 1..120: mol_type = other DNA
tcagcctcccaaagtgctgggattacaggcatgagccaccacgcccagccccaaagtgtcttttaacctcattcacatagtgccaccttcaactatgccaggaaaccaatgggggtgggg

SEQ ID NO: 66175 - DNA, 120 bp, synthetic construct
  source 1..120: mol_type = other DNA
gtgacaggggacagcacgcagggtcttggagtcatggtagacactttttttttttttttttagttgaaaaaggaggacttacgagtattttgagtagagtgacctgatcggatctatgct

SEQ ID NO: 66176 - DNA, 120 bp, synthetic construct
  source 1..120: mol_type = other DNA
atgccactgcactccagcctggggaacagagtgagactctgtctcagaaaaaaaaaaaaaaaaaccaaaaaaaaaaaaaacaagaaacaaacagaagatgagaaggagaagccggtgagt

SEQ ID NO: 66177 - DNA, 120 bp, synthetic construct
  source 1..120: mol_type = other DNA
acattgctggtggcattgtaaaaggacacaaccactttggaaaatagtttggcagtttcttacaaaggtaaacatacgcctaccacatgacccagccattccacaactaggtatttatcc

SEQ ID NO: 66178 - DNA, 120 bp, synthetic construct
  source 1..120: mol_type = other DNA
cacctcccttgagtctatcctagcacctaggaggagaaagatctctgccagacagagcagaagcactggggaatgtgggccaaggtcacttcctgggtaggtggacttggctcctttgca

SEQ ID NO: 66179 - DNA, 120 bp, synthetic construct; identical to SEQ ID NO: 773
  source 1..120: mol_type = other DNA

SEQ ID NO: 66180 - DNA, 120 bp, synthetic construct
  source 1..120: mol_type = other DNA
acacatatatatatacacacacatatatatatgttttttttttttttgagatggagtgccgtggtgcgatctcgactcactgcaacctccgcctcctgggttcaaacaattctctgcctc

SEQ ID NO: 66181 - DNA, 120 bp, synthetic construct
  source 1..120: mol_type = other DNA
catttaagtgcctcaagtgcccactgaactcctcatcacacaattatacaagtacaactgggtcaaaatatatgtaggaaaatctcagggcaccttgagagcatattacatggggctgaa

SEQ ID NO: 66182 - DNA, 120 bp, synthetic construct
  source 1..120: mol_type = other DNA
caaaaccttctattaaaatacagataatcccaccagacaagcaccttacacatttactagacacaagaaggaaatgaatgagcagcagaatatgaccattccctttctatccagagtgcc

SEQ ID NO: 66183 - DNA, 120 bp, synthetic construct
  source 1..120: mol_type = other DNA
tagagtcacagaagtcatttaagagctagaagggagctcagcaatgacccagcccatgctctcttaggcacaaccaagttgctccaagtcacatcctgagatcctggctgaactgggttt

SEQ ID NO: 66184 - DNA, 120 bp, synthetic construct
  source 1..120: mol_type = other DNA
tcagggtactaataataatcataacagcagcagcagcagctaacaataactgggcatttcttatgttccaggcagtgttctaagcactgttcctaggtgaactaatgtaatcatcctaat

SEQ ID NO: 66185 - DNA, 120 bp, synthetic construct
  source 1..120: mol_type = other DNA
cagctagagaatcatttggaggctctggaagcctgcttacctcataggtgtttcttccttgttggtaattaccagggtttgtttgtatgggggcatcccagcttgatagataaagcaggt

SEQ ID NO: 66186 - DNA, 120 bp, synthetic construct
  source 1..120: mol_type = other DNA
agcagtcattggtacaagctatcataaacaactttatacatttaaaaacattttcttattcaaagcttttatttttcttttctttcaacttttaagttcaggggtacatgtgcaggatat

SEQ ID NO: 66187 - DNA, 120 bp, synthetic construct; identical to SEQ ID NO: 774
  source 1..120: mol_type = other DNA

SEQ ID NO: 66188 - DNA, 120 bp, synthetic construct; identical to SEQ ID NO: 775
  source 1..120: mol_type = other DNA

SEQ ID NO: 66189 - DNA, 120 bp, synthetic construct
  source 1..120: mol_type = other DNA
ttgagaagtgtctgttcatgtccttcgcccactttttgatggggttgtttgtttttttcttgtaaatttgtttgagttcattgtagatgctggatattagccctttgtcagatgagtagg

SEQ ID NO: 66190 - DNA, 120 bp, synthetic construct
  source 1..120: mol_type = other DNA
cttgtaagttggattcctaggtattttattctctttgaagcaattgtgaatgggagttcactcatgatttggctctctgtctgttgttggtgtacaagaatgcttgtgatttctgtacat

SEQ ID NO: 66191 - DNA, 120 bp, synthetic construct
  source 1..120: mol_type = other DNA
tcaacttattcctgttttagtcttgggagagtgtatgtgtcgaggaatttatccatttcttctagattttctagtttatttgcgtagaggtgtttgtagtattctctgatggtagtttgt

SEQ ID NO: 66192 - DNA, 120 bp, synthetic construct
  source 1..120: mol_type = other DNA
ccattggcttggtagatcttcctccatccttttattttgagcctatgtgtgtctctgcacgtgagatgggtttcctgaatacagcacactgatgggtcttgactctttatccaatttgcc

SEQ ID NO: 66193 - DNA, 120 bp, synthetic construct
  source 1..120: mol_type = other DNA
attttctctcttctctccttctgagattcccattacatgtattttgctatgcttgataatctcttatgggaatctgaacttctgttcatttttcttcattctttttcctttttgttcttc

SEQ ID NO: 66194 - DNA, 120 bp, synthetic construct
  source 1..120: mol_type = other DNA
atatgctgaagcttttcagagccccccatgaatatcttcttcccagtctctccttttaaatttttaaatgaacttcttgtttgctcctaaggtcaatgctccctcagtcagctgcagtgt

SEQ ID NO: 66195 - DNA, 120 bp, synthetic construct
  source 1..120: mol_type = other DNA
tttggagtttggacaatgttaaatggactcaccttgattatgagttccaggtctgtcaagacacacttctttaatggttgaaaagacagggtggcatgtacactctgtcctacatccaca

SEQ ID NO: 66196 - DNA, 120 bp, synthetic construct
  source 1..120: mol_type = other DNA
ctacgaggaaaaggaaactccaaattatgatgacattttaagatttgtggctatagtaaccaaaacagcgtggtactggcataaaaacagacacacagactaatggaaaaagatagagat

SEQ ID NO: 66197 - DNA, 120 bp, synthetic construct
  source 1..120: mol_type = other DNA
agtcattctaccaaaaagacaacatgcactctcatgttcattgcagcactattcacaatagcaaagacatggaatcaatctaggtgcctatcaactgtagactggataaagaaagtgtgg

SEQ ID NO: 66198 - DNA, 120 bp, synthetic construct; identical to SEQ ID NO: 776
  source 1..120: mol_type = other DNA

SEQ ID NO: 66199 - DNA, 120 bp, synthetic construct; identical to SEQ ID NO: 777
  source 1..120: mol_type = other DNA

SEQ ID NO: 66200 - DNA, 120 bp, synthetic construct
  source 1..120: mol_type = other DNA
catgcctcagcctcccaagtagctgggattacaggtgtgtgccaccacacccggctaattattgtatttatttattaattttttttttgagagggagtttcgctcttgtcaccctggcca

SEQ ID NO: 66201 - DNA, 120 bp, synthetic construct
  source 1..120: mol_type = other DNA
ggagtctctcagcagacaccgcttcacaggcaagacatttagaagacattccccaacctcttccgcctttgtctacctctcttctttccttttcctctacaagtcaccttccttctttcg

SEQ ID NO: 66202 - DNA, 120 bp, synthetic construct
  source 1..120: mol_type = other DNA
gtctctaagcaagtgttcaataataagggtgataatgaacacccttacctaattcctcattttaattgaagcagttttagtcatttattgcaggatcatatctgcctcttgattttggtt

SEQ ID NO: 66203 - DNA, 120 bp, synthetic construct
  source 1..120: mol_type = other DNA
caggaaggatgggccaacttgaggctctagaaataaacagtcagcccatgccttaaaggaatctgccaagtaggatctttaacaaggctcctaaatttccttaagctattaattgtaggt

SEQ ID NO: 66204 - DNA, 120 bp, synthetic construct
  source 1..120: mol_type = other DNA
aggtgagctgggccacggcatgccataaccaactagctaagtgatattacaaagtaactgaagaataaatcaatcaatcaagagtgaagaaactggtcagtggagagagaatggagtaga

SEQ ID NO: 66205 - DNA, 120 bp, synthetic construct
  source 1..120: mol_type = other DNA
gcactccagcctgggggacagagcaagactctgtctcaaaaacaaaaacaaaaaaaagaaatttggaattttgtcttttccacagtttgggtgagttggcccccttggcccccgttgtct

SEQ ID NO: 66206 - DNA, 120 bp, synthetic construct
  source 1..120: mol_type = other DNA
tgtaaggcatgtgaatgctgcagggttctggagactttcaatttcttcagagatccagcagaaggagtaggtgctattggttgggtttaggatggtaaaggtcctggccagggtggagag

SEQ ID NO: 66207 - DNA, 120 bp, synthetic construct
  source 1..120: mol_type = other DNA
cataagcagcctgaatttggctccttctgtgtacctaagtatggccgcaggttacttcccccatcaatgttgagaaaatattcctgctgcaaaatgagcacagtcttaccctctggtctc

SEQ ID NO: 66208 - DNA, 120 bp, synthetic construct
  source 1..120: mol_type = other DNA
ccacagagctttgtgcctgccaagaagggtgttgtggcgagcacattttcttactggcagaaaaggttgctctcgaagtctccaatgtccaacggggagaattttactttgaacttctga

SEQ ID NO: 66209 - DNA, 120 bp, synthetic construct
  source 1..120: mol_type = other DNA
catttggctctgcagacaccacaaggtctctgctttgcttttctttagctacttaggagaccctctgagcagtgctggcctctccatgaacaaggctcttctaattggtgactcaggcca

SEQ ID NO: 66210 - DNA, 120 bp, synthetic construct
  source 1..120: mol_type = other DNA
ttcctgactgaggcacagatttgaattttagttacttcaaactcaaattctaaatcagcagaggcttttcctgcctcaaattttcctgctttaagacaagaacagggctgggtgcggtgg

SEQ ID NO: 66211 - DNA, 120 bp, synthetic construct
  source 1..120: mol_type = other DNA
ataggtcataaatgaatgggcatagctgcatgccggcaaaactttatctacaaaaacaggctacaggccacagtttgctgacccctgctttaggtgaaatgatcatcagcagaagatcac

SEQ ID NO: 66212 - DNA, 120 bp, synthetic construct
  source 1..120: mol_type = other DNA
tggtcttttgggtctgggcttctaagcttagatggatcctatacccaccagtgtggatattgtctgggttaccacttggtgcatgggcaaaaagaacagatcctgggtggctgtgtagat

SEQ ID NO: 66213 - DNA, 120 bp, synthetic construct
  source 1..120: mol_type = other DNA
taaaattaataacagaaaagataaactaggccaggcatggtggctcacggcccataatcccagcactttgggagaccgaggtgggtggatcacttgaggctaggagtttgagaccagcct

SEQ ID NO: 66214 - DNA, 120 bp, synthetic construct
  source 1..120: mol_type = other DNA
gttttatttttattttttgagaaagagtctcacactgtgtattccaggttggagtacagtggtgcgatcacggcccactgcagcctcgacctcccagagctcagatgatcctctcacctc

SEQ ID NO: 66215 - DNA, 120 bp, synthetic construct
  source 1..120: mol_type = other DNA
aaagagcctggtattagtatttttgagaatccgatcttgaggactcttgatacctgctggtgatattctagagaagggaaggagccaaaggtcttggcaaaaaatgcatgttaagcctgt

SEQ ID NO: 66216 - DNA, 120 bp, synthetic construct
  source 1..120: mol_type = other DNA
tttgccttctgccatgattgtgaggcatccccagctatgtggaactgtgagtccattagcctctttataaattacccagtctcgggtatgtctttatcagcaacgtgaaaatgaacaaat

SEQ ID NO: 66217 - DNA, 120 bp, synthetic construct
  source 1..120: mol_type = other DNA
aaagcagattaccctattatattatactgtgtttgtttcttcacaggcaaaatgcagataatagtagtatctatggctgggcacagtggctcatgcctataatcccagcattttgggagg

SEQ ID NO: 66218 - DNA, 120 bp, synthetic construct
  source 1..120: mol_type = other DNA
tgggataggaagactaggacctgtattcatctatacaggcctccacagggcccgttgacagcagcctagcaacagttttggtcaacttcattctccgtcttcccctcttaaccaggagag

SEQ ID NO: 66219 - DNA, 120 bp, synthetic construct
  source 1..120: mol_type = other DNA
atccatatatccatccatcatccacccacccatccatccatccatcatccacccatccatccattaattcatctatcatctacctacccactcacccatcatccacctacccactcacct

SEQ ID NO: 66220 - DNA, 120 bp, synthetic construct
  source 1..120: mol_type = other DNA
ggctgtgcagagtgatgttctagaagtgcccaaacctatactctctctaataaacagacaatgccaacacaagccagctaataaatgcagacaggaaaaactgcaaggcatttatttgct

SEQ ID NO: 66221 - DNA, 120 bp, synthetic construct
  source 1..120: mol_type = other DNA
ttttcctctgtgatgtagatatacgcggtggtgggcctccctttcagggagaagactcctagctcatcctgcaggtcaacatgcagctggcagaaggaaagcagggatgagtgctaggct

SEQ ID NO: 66222 - DNA, 120 bp, synthetic construct
  source 1..120: mol_type = other DNA
gctggcaccatcatgaaaaagattgaataatacaaaatatgaggcatggagaaggcagaaatagtgatatcacacgggaagcttctgagataaaaaattatgtatttagaaacaacttta

SEQ ID NO: 66223 - DNA, 120 bp, synthetic construct
  source 1..120: mol_type = other DNA
catctgggtaatccagaaaatctcaaaccctaacactggcttaaagtgatcctgaatttctagtgcccccaagtgttgggcagaagcaaatgaaaattgcctctgaagaaaaatatgatc

SEQ ID NO: 66224 - DNA, 120 bp, synthetic construct
  source 1..120: mol_type = other DNA
tgcagttcaaaatagggtttgcactcctatgagaatctaatgccgctgctgatctgagaggaagggagctcaggtggtaatgtgagtgatggggtgtggctgtaaatacagatgagcttt

SEQ ID NO: 66225 - DNA, 120 bp, synthetic construct; identical to SEQ ID NO: 778
  source 1..120: mol_type = other DNA

SEQ ID NO: 66226 - DNA, 120 bp, synthetic construct; identical to SEQ ID NO: 779
  source 1..120: mol_type = other DNA

SEQ ID NO: 66227 - DNA, 120 bp, synthetic construct; identical to SEQ ID NO: 780
  source 1..120: mol_type = other DNA

SEQ ID NO: 66228 - DNA, 120 bp, synthetic construct
  source 1..120: mol_type = other DNA
atgtttttagtacagaagaggaagaaagctgccccttagtatcccaaataagattagagaataggccgggtgcggtggctcatgcccgtaatcccagcactttgggaggccgaggcgggt

SEQ ID NO: 66229 - DNA, 120 bp, synthetic construct
  source 1..120: mol_type = other DNA
caaagtcggaagagttgttgtgagggcaaaaggaggcagtaaatataaatcacttagcacagtgcttgtcacatgggaagggctaaaacatgctcatcatttcaccttatcctcagaatc

SEQ ID NO: 66230 - DNA, 120 bp, synthetic construct; identical to SEQ ID NO: 781
  source 1..120: mol_type = other DNA

SEQ ID NO: 66231 - DNA, 120 bp, synthetic construct; identical to SEQ ID NO: 782
  source 1..120: mol_type = other DNA

SEQ ID NO: 66232 - DNA, 120 bp, synthetic construct
  source 1..120: mol_type = other DNA
atgaatatgagtcttctgttggttcttgctacctatccgtgagtgataacttgctttgcgtgacttgtgtgagtgttctgctgcactggactcataccctggcagttggatttgtgcaaa

SEQ ID NO: 66233 - DNA, 120 bp, synthetic construct
  source 1..120: mol_type = other DNA
tatgccatatttgtttaaaccactaatgttggattttctgctatctgcagccaaacgtgattctgatacacaaatcaagcacctcctcctctgtgaagccttcaatgactcttcacagct

SEQ ID NO: 66234 - DNA, 120 bp, synthetic construct; identical to SEQ ID NO: 783
  source 1..120: mol_type = other DNA

SEQ ID NO: 66235 - DNA, 120 bp, synthetic construct; identical to SEQ ID NO: 784
  source 1..120: mol_type = other DNA

SEQ ID NO: 66236 - DNA, 120 bp, synthetic construct
  source 1..120: mol_type = other DNA
gtctggtttcttctctctacctttcagagtctgaagtctgttttatacatgatgcccagggtttttagttgtacttagttgggaagaatagggaaaagtacatctagttgatcttaccag

SEQ ID NO: 66237 - DNA, 120 bp, synthetic construct
  source 1..120: mol_type = other DNA
tacttgtggatgtcaaatgttttacttaatctgattttaaaaaatgaaatggcaaataaattaagctcttttctgtatcttcacatttatagttgtgatgtttttaaggtttagtataag

SEQ ID NO: 66238 - DNA, 120 bp, synthetic construct
  source 1..120: mol_type = other DNA
aagatctactggtgatttcgtgtatagtatttaaaaaaaaatttttttattttttatttttttgagacagagtctcgttctgtcgcccagactggagtgcagtggcgcgatctcggctca

SEQ ID NO: 66239 - DNA, 120 bp, synthetic construct
  source 1..120: mol_type = other DNA
gctcatcctttgcacttgatgatgggactcagcttccctgcctctgatgctccccaaagacctgggggcacatttcctcactggatctaattctgatgactttgcctgatagttaggaca

SEQ ID NO: 66240 - DNA, 120 bp, synthetic construct; identical to SEQ ID NO: 785
  source 1..120: mol_type = other DNA

SEQ ID NO: 66241 - DNA, 120 bp, synthetic construct; identical to SEQ ID NO: 786
  source 1..120: mol_type = other DNA

SEQ ID NO: 66242 - DNA, 120 bp, synthetic construct
  source 1..120: mol_type = other DNA
atgctgcaataaaagatctttgtacatgagactcatgacatctaaacacgtggctctaacattctatgagttttgctgaggagacctcttggggaaaggagggaaatgcagagctgtagg

SEQ ID NO: 66243 - DNA, 120 bp, synthetic construct; identical to SEQ ID NO: 787
  source 1..120: mol_type = other DNA

SEQ ID NO: 66244 - DNA, 120 bp, synthetic construct; identical to SEQ ID NO: 788
  source 1..120: mol_type = other DNA

SEQ ID NO: 66245 - DNA, 120 bp, synthetic construct
  source 1..120: mol_type = other DNA
gctttgttcagagccctaatcaggctgctgtttggctgggacacatggagatggtcacaacagttgtgaaaatacaaaaatgtggccggttgcagtggctcacgcctataatcccagcac

SEQ ID NO: 66246 - DNA, 120 bp, synthetic construct
  source 1..120: mol_type = other DNA
ctcctgacctcaagtgatctacccacctaggcctcccaaaatgatgggattacaggcgttagccaccatgcccggcctagttcaagtactaaaactcaatggcattcattcattcattag

SEQ ID NO: 66247 - DNA, 120 bp, synthetic construct; identical to SEQ ID NO: 789
  source 1..120: mol_type = other DNA

SEQ ID NO: 66248 - DNA, 120 bp, synthetic construct
  source 1..120: mol_type = other DNA
actggggatatcgaaaggggatcagataggagcatgtaacagggagacctctgtgtgtgtgtgtgtgtgtgtgtgtgtgtgtgtgtgtgtgtgtgtgtacatgctttgataaccaagtct

SEQ ID NO: 66249 - DNA, 120 bp, synthetic construct; identical to SEQ ID NO: 790
  source 1..120: mol_type = other DNA

SEQ ID NO: 66250 - DNA, 120 bp, synthetic construct
  source 1..120: mol_type = other DNA
tcacccaggctagagtgtagtggcatgatcatgactcactggaggtaagaaaaagcacttttggttacttcagttattacttagttctttaattagtatttatcaggaaatggggctggt

SEQ ID NO: 66251 - DNA, 120 bp, synthetic construct; identical to SEQ ID NO: 791
  source 1..120: mol_type = other DNA

SEQ ID NO: 66252 - DNA, 120 bp, synthetic construct; identical to SEQ ID NO: 792
  source 1..120: mol_type = other DNA

SEQ ID NO: 66253 - DNA, 120 bp, synthetic construct
  source 1..120: mol_type = other DNA
accatagtcactgtccttcccacatcagtgtcatctcgcccaacatcctggttaattccaatgctgccccaaacatgtgcctctttgaacaaccatcatttccctgactcctactcccag

SEQ ID NO: 66254 - DNA, 120 bp, synthetic construct
  source 1..120: mol_type = other DNA
ctccaaagagttatcttcttcacatctgacttctcacttcactttgcttgggcacagaactcttgctaaggcccctagtgacctccatgttgttgaaccctgtggacatctatgccctca

SEQ ID NO: 66255 - DNA, 120 bp, synthetic construct
  source 1..120: mol_type = other DNA
aacattcctgagaatccctatggaaaattggttctgggagatatgaattagcttctgagtcccttggtctaatatggccagttgctcagccaggtgcttttctgtagtgtaggagctcta

SEQ ID NO: 66256 - DNA, 120 bp, synthetic construct
  source 1..120: mol_type = other DNA
tggtgaatttctcctgggagtgctgcccgttgaagttgtccaggtctgtatctgacagctgggaaatggttccagcaggttccccagaaaggaccttcctgtttaaggccatgtgacgct

SEQ ID NO: 66257 - DNA, 120 bp, synthetic construct; identical to SEQ ID NO: 793
  source 1..120: mol_type = other DNA

SEQ ID NO: 66258 - DNA, 120 bp, synthetic construct
  source 1..120: mol_type = other DNA
catatcagtgagaacatacgatgtttcccattcctgagttacttcacttagaataatagtctccgatatcattcaggtagctgtgaatgccgttaattcattccttcttatggctgagta

SEQ ID NO: 66259 - DNA, 120 bp, synthetic construct
  source 1..120: mol_type = other DNA
ggatccagtttcattctcctacatgtggctagccaattatcccagcactatttgttgaaaaggatgtcctttccccactttatgtttttgtttgctttgtcgaagaccagttggctgtaa

SEQ ID NO: 66260 - DNA, 120 bp, synthetic construct
  source 1..120: mol_type = other DNA
tgttggatttgattagctaaatgttaaggattttggttagctaaatgttaaggattttagcatctatgttcatcaggcatatcggcctgcagttttctttttttggttgtgtcccttcct

SEQ ID NO: 66261 - DNA, 120 bp, synthetic construct
  source 1..120: mol_type = other DNA
agttagtgctctttcagtctttttgatgtgggcatttagggctgtgaactttctgcttggcatcacctttgctgtatcccagaggttttgataggttgtgtcattcagttctatgaagtt

SEQ ID NO: 66262 - DNA, 120 bp, synthetic construct
  source 1..120: mol_type = other DNA
gatgcttagttttgctggatacaaaattcttggctgatacttcttttgtttgaggagtctgaagatagggccccaatcccttctatcttgtagggtttctgctgagaaatctgctgttaa

SEQ ID NO: 66263 - DNA, 120 bp, synthetic construct; identical to SEQ ID NO: 794
  source 1..120: mol_type = other DNA

SEQ ID NO: 66264 - DNA, 120 bp, synthetic construct
  source 1..120: mol_type = other DNA
tgccatgatctgttatgtttctttagtatctttcaatctagaccctcctgccccctctcccaatcacactgcctttttagagagaccagatttgtgttcttacaaaatactccatagtct

SEQ ID NO: 66265 - DNA, 120 bp, synthetic construct
  source 1..120: mol_type = other DNA
ccagctggaatgtattttactgtattgtgtcacaaacagtgactttaccccaaacatccaatcttcccatcctaatttctttaataatttatcctttctgcagtggcgcatgtcccctta

SEQ ID NO: 66266 - DNA, 120 bp, synthetic construct
  source 1..120: mol_type = other DNA
ctttttgcgttaaatgttccttccttccaaggtgaaagaaagttgggataggagcaagtcaaatgcagcaaagaaaataataaagcaaaggttctgggactggggatgagaatgggaatg

SEQ ID NO: 66267 - DNA, 120 bp, synthetic construct
  source 1..120: mol_type = other DNA
gaaaaaaagaaaaaaagttgcatctagtttgtcatgaacgaaaccagagggcagcaaactgtggtgccctggctgaatctggcctgctactttttctaaataaacttgaattggaacacg

SEQ ID NO: 66268 - DNA, 120 bp, synthetic construct
  source 1..120: mol_type = other DNA
tccttcttcccttcgtggtcctcctccccttccccctcccagtcgctccgctcctccagggctcgcagcttctccaggcgctcccgctccgccttctccctctccaggcgctccttctcc

SEQ ID NO: 66269 - DNA, 120 bp, synthetic construct
  source 1..120: mol_type = other DNA
agaggactcagcctctctctgcctcatctgtataacggagatagcaacattaatacctactccagaggactcctgaagattaaatgtgtgaatgcatgtaaaaagcttacaacagtgcct

SEQ ID NO: 66270 - DNA, 120 bp, synthetic construct; identical to SEQ ID NO: 795
  source 1..120: mol_type = other DNA

SEQ ID NO: 66271 - DNA, 120 bp, synthetic construct
  source 1..120: mol_type = other DNA
atctccaaaaaaaaaaaaaaaaaaaagaaagaaggatattattaaaaaataagaacaggccaggtgtggtggctcaagcctgtaatcccagcactttgggaggccgaggtgggcggatca

SEQ ID NO: 66272 - DNA, 120 bp, synthetic construct
  source 1..120: mol_type = other DNA
gtaaatcccctggcctttgggttaggtctccgaaaggctccatattaggaataagggtcaacctgtcctttgcagggacatggatgaagctggaaggctattatcctcagcaaactaatg

SEQ ID NO: 66273 - DNA, 120 bp, synthetic construct
  source 1..120: mol_type = other DNA
gacttaaacgttagacccaaaaccataaaaaccctaggagaaaacctaggcattaccattcaggacataggcatgggcaagggcttcatgtctaaaacaccaaaagcaatggcaacaaaa

SEQ ID NO: 66274 - DNA, 120 bp, synthetic construct; identical to SEQ ID NO: 796
  source 1..120: mol_type = other DNA

SEQ ID NO: 66275 - DNA, 120 bp, synthetic construct; identical to SEQ ID NO: 797
  source 1..120: mol_type = other DNA

SEQ ID NO: 66276 - DNA, 120 bp, synthetic construct; identical to SEQ ID NO: 798
  source 1..120: mol_type = other DNA

SEQ ID NO: 66277 - DNA, 120 bp, synthetic construct; identical to SEQ ID NO: 799
  source 1..120: mol_type = other DNA

SEQ ID NO: 66278 - DNA, 120 bp, synthetic construct; identical to SEQ ID NO: 800
  source 1..120: mol_type = other DNA

SEQ ID NO: 66279 - DNA, 120 bp, synthetic construct
  source 1..120: mol_type = other DNA
cacttgaggtcaggagttcaagaccagcctggccaatatggtgaaatcctgtctctacaaaaaatactaaaattagccaggcatggtggtgggtgcctataatcccagctacttgggaag

SEQ ID NO: 66280 - DNA, 120 bp, synthetic construct; identical to SEQ ID NO: 801
  source 1..120: mol_type = other DNA

SEQ ID NO: 66281 - DNA, 120 bp, synthetic construct
  source 1..120: mol_type = other DNA
ctttggagttggacaaattgggcctgcccccaccgccttctggccatgtgaccttgggtgcatcacttaactgtgctgcattccagcttcctcatctccaaaatgatggtgatgatcata

SEQ ID NO: 66282 - DNA, 120 bp, synthetic construct
  source 1..120: mol_type = other DNA
tagggaacatgattgattgtgttttgtactaagctcaagtgatacacaagcctgtctccaaatggatgactgtcataaggtccttatcacctccatccaaggtcaacagagcacatacaa

SEQ ID NO: 66283 - DNA, 120 bp, synthetic construct
  source 1..120: mol_type = other DNA
aggataggctcatgccgaagcatctccttgacggttgccaagggtatgctcctgattggacacatgggctcactggctttgtggcttcctgggaacacatctttaatagtagcctatttg

SEQ ID NO: 66284 - DNA, 120 bp, synthetic construct
  source 1..120: mol_type = other DNA
ctcctctcatgggagagtgagaaaaaggctgaaaataagcttgatattagcacttaaaaaaagcaactttcaaagattgttctggtattagtgcagatgaggcccgcctcccatagctga

SEQ ID NO: 66285 - DNA, 120 bp, synthetic construct
  source 1..120: mol_type = other DNA
ctctactaaaaatacaaaaaaattggccgggcatggtggtacatgcctgtaatcctagctacttgggagagtgaggcaggagaattgcttgaacccaggaggtggaggttgcagtgaact

SEQ ID NO: 66286 - DNA, 120 bp, synthetic construct
  source 1..120: mol_type = other DNA
ggccagcccttggccctgacctcttcttccgctcgcggagcgcctgctgaatcccccgatcgaatgtgagtttctcctcctcagtcagggcatcatattcttcctcatccatgttttgga

SEQ ID NO: 66287 - DNA, 120 bp, synthetic construct
  source 1..120: mol_type = other DNA
cttctcccctaaatcatctgcatttgaaatgtcctaaggtagcatactgtcatactactattacattaaaatctcatgtttgttaacatgtatgaacatgccaggcactggggaaggcac

SEQ ID NO: 66288 - DNA, 120 bp, synthetic construct
  source 1..120: mol_type = other DNA
cacagttgaactgggagaaatttcattctgaagataagtgggaaaaggagaagtggtaattattttcaagtggatcagtatggagaaatgagctttctggaaaactaggcagctggaggc

SEQ ID NO: 66289 - DNA, 120 bp, synthetic construct; identical to SEQ ID NO: 802
  source 1..120: mol_type = other DNA

SEQ ID NO: 66290 - DNA, 120 bp, synthetic construct; identical to SEQ ID NO: 803
  source 1..120: mol_type = other DNA

SEQ ID NO: 66291 - DNA, 120 bp, synthetic construct
  source 1..120: mol_type = other DNA
cctagttacttctttttcacttaataacattgaaaatgggtttttgaagcaattaacatagctccaaattctaacttttagaatggctccacattgtaatttttaacaacatcactctct

SEQ ID NO: 66292 - DNA, 120 bp, synthetic construct
  source 1..120: mol_type = other DNA
aacagacaaacagagagccaaatcatgagtgaactcccattcacaattgcttcaaagagaataaaatacctaggaatccaccttacaagggatgtgaaggaactcttcaaggagaagtac

SEQ ID NO: 66293 - DNA, 120 bp, synthetic construct
  source 1..120: mol_type = other DNA
aagggctaatatccagaatctacaaagaactcaatcaaatttacaagaaaaaaacaaacccatcaaaaagtgggcaaaggatatgaacagacacttctcaaaagaagacatttatgcagc

SEQ ID NO: 66294 - DNA, 120 bp, synthetic construct; identical to SEQ ID NO: 16910
  source 1..120: mol_type = other DNA

SEQ ID NO: 66295 - DNA, 120 bp, synthetic construct; identical to SEQ ID NO: 15532
  source 1..120: mol_type = other DNA

SEQ ID NO: 66296 - DNA, 120 bp, synthetic construct; identical to SEQ ID NO: 15533
  source 1..120: mol_type = other DNA

SEQ ID NO: 66297 - DNA, 120 bp, synthetic construct
  source 1..120: mol_type = other DNA
accccttgcacttcccaagtgaggcaatgcctcgccctgcttcggctcgcgcacggtgcgtgcacccactgacctgcgcccactgtctggcactccctagtgagatgaagccggtatctc

SEQ ID NO: 66298 - DNA, 120 bp, synthetic construct
  source 1..120: mol_type = other DNA
tacgtgaagaatgcagaagcctcaggagccgatgcgatcaactggaagaaagaatatcagcgatggaagatgaaatgaatgaaatgaagcgagaagggaagtttagagaaaaaagaataa

SEQ ID NO: 66299 - DNA, 120 bp, synthetic construct
  source 1..120: mol_type = other DNA
gctcaaaataaaaggatggaggaagatctaccaagcaaatggaaaacaaaaaaaggcaggggttgcaatcctagtctcggataaaacagactttaaaccaacaaagatcaaaagagacaa

SEQ ID NO: 66300 - DNA, 120 bp, synthetic construct
  source 1..120: mol_type = other DNA
tttgaaaggatcaacaaaattgacagaccactagcaagactaataaagaaaaaaagagagcagaatcaaatagacgcaatacaaaatgataaaggggatatcaccaccgatcccacagaa

SEQ ID NO: 66301 - DNA, 120 bp, synthetic construct
  source 1..120: mol_type = other DNA
ctcagcccaaaatctccttaagctgataagcaacttcagcaaagtctcaggatacaaaatcaatgtacaaaaatcacaagcattcttatacaccaataacagacaaacagccaaatcatg

SEQ ID NO: 66302 - DNA, 120 bp, synthetic construct
  source 1..120: mol_type = other DNA
gggagaaaattttcgcaacctactcatctgacaaagggctaatatccagaatctacaatgaactcaaacaaatttacaagaaaaaacaaacaaccccatcaaaaagtgggcaaaggacat

SEQ ID NO: 66303 - DNA, 120 bp, synthetic construct
  source 1..120: mol_type = other DNA
ataataataataaaaataataatcataaaaaaataataaaataaaattacaaaaattatctgcacatggtggcacatgcctgtaattccagctactcgggaggctgaggcaggagaatcg

SEQ ID NO: 66304 - DNA, 120 bp, synthetic construct; identical to SEQ ID NO: 32753
  source 1..120: mol_type = other DNA

SEQ ID NO: 66305 - DNA, 120 bp, synthetic construct
  source 1..120: mol_type = other DNA
tggcccgttctcaatgagctgttgggtacacctcccagacggggtggtggccgggcagaggtgctcctcacttcccagtaggggcggccgggcagaggcgcccctcacctcccggacagg

SEQ ID NO: 66306 - DNA, 120 bp, synthetic construct; identical to SEQ ID NO: 32754
  source 1..120: mol_type = other DNA

SEQ ID NO: 66307 - DNA, 120 bp, synthetic construct; identical to SEQ ID NO: 9429
  source 1..120: mol_type = other DNA

SEQ ID NO: 66308 - DNA, 120 bp, synthetic construct; identical to SEQ ID NO: 9430
  source 1..120: mol_type = other DNA

SEQ ID NO: 66309 - DNA, 120 bp, synthetic construct; identical to SEQ ID NO: 28897
  source 1..120: mol_type = other DNA

SEQ ID NO: 66310 - DNA, 120 bp, synthetic construct; identical to SEQ ID NO: 28898
  source 1..120: mol_type = other DNA

SEQ ID NO: 66311 - DNA, 120 bp, synthetic construct
  source 1..120: mol_type = other DNA
ccatcactctgagcaaactatcacaaggacagaaatccaagcaccacatgttctcactcataggtgggaatagaacaatgagaacacttggtcactgggtagaaacatcacacactgggg

SEQ ID NO: 66312 - DNA, 120 bp, synthetic construct
  source 1..120: mol_type = other DNA
tccaagcactttgggaggcagagagaccagcctgaccaacatggtgaaaatccgtctctattaaaaatacaaaaatgagccgggcgtggtggcagcgcctgtagtcccacctactcggta

SEQ ID NO: 66313 - DNA, 120 bp, synthetic construct; identical to SEQ ID NO: 20699
  source 1..120: mol_type = other DNA

SEQ ID NO: 66314 - DNA, 120 bp, synthetic construct
  source 1..120: mol_type = other DNA
acatttgtggcctactttttcattatgcagttctaaatttctctctctttttttttaattcaaacggagtctcgctctgtcgcccatcttgcacagtcaaatgaatctccctccccctaa

SEQ ID NO: 66315 - DNA, 120 bp, synthetic construct; identical to SEQ ID NO: 20700
  source 1..120: mol_type = other DNA

SEQ ID NO: 66316 - DNA, 120 bp, synthetic construct
  source 1..120: mol_type = other DNA
tagtagaaaggaggtttctgcatgttggccaggctggtctcgaactcttggcttcaagtgatccacccgcctcagtctccgaaagtgctgggattacaggtgtgagccaccgcacccagc

SEQ ID NO: 66317 - DNA, 120 bp, synthetic construct
  source 1..120: mol_type = other DNA
gctgggattacaggcacccgccatcatgcctggctaatttttctatttttgtagagacggagtttcaccatgttataacgccaggctggtctcaaactcctgacctcaggtgatccgccc

SEQ ID NO: 66318 - DNA, 120 bp, synthetic construct
  source 1..120: mol_type = other DNA
gctgaggtgggaagatctcttgagcccagaaggcagaggttacagtgagcaaagatggagccagctgctgcactccagcctgagcaagagagacagatactgactaaaaaaaaaaaaaaa

SEQ ID NO: 66319 - DNA, 120 bp, synthetic construct; identical to SEQ ID NO: 20701
  source 1..120: mol_type = other DNA

SEQ ID NO: 66320 - DNA, 120 bp, synthetic construct; identical to SEQ ID NO: 20702
  source 1..120: mol_type = other DNA

SEQ ID NO: 66321 - DNA, 120 bp, synthetic construct
  source 1..120: mol_type = other DNA
cttatttttgtatttttgcagaaacggggtttcaccatgttggcctggctggtctcgaactcctgacctcatgtgatctgcccaccccagcctcccaaagtgctaggattacaggcgtga

SEQ ID NO: 66322 - DNA, 120 bp, synthetic construct; identical to SEQ ID NO: 20703
  source 1..120: mol_type = other DNA

SEQ ID NO: 66323 - DNA, 120 bp, synthetic construct
  source 1..120: mol_type = other DNA
ggggtcttgccgtgttgcccaagctgactactcagttccttaatcacctcatctccagtcatgttatcctctactccaacctcaaccatccacttgccactgacacaggtcttcaaaatc

SEQ ID NO: 66324 - DNA, 120 bp, synthetic construct
  source 1..120: mol_type = other DNA
aaccttataaatgaaaacaccaaaaatatatacatttatcatagttatctccccaactttcccattataaatttaactgatcctggtaaaaatttcattttataactgttctacctaaat

SEQ ID NO: 66325 - DNA, 120 bp, synthetic construct; identical to SEQ ID NO: 20704
  source 1..120: mol_type = other DNA

SEQ ID NO: 66326 - DNA, 120 bp, synthetic construct
  source 1..120: mol_type = other DNA
ggtgggactacaggtgcccgacaccacacctggctaattttttttttttttgagacagagtctcgctctgtcacccagcctggagtagagtggcgcaatctcggctcactgcaagcttca

SEQ ID NO: 66327 - DNA, 120 bp, synthetic construct
  source 1..120: mol_type = other DNA
ctgtaatcccagcactctgggaggctgaggcaggcggatcacaaggtcaggatatcaagaccatcctggctaacacagtgaaaccccatctctactaaaaatacaaaaaattagctgggt

SEQ ID NO: 66328 - DNA, 120 bp, synthetic construct
  source 1..120: mol_type = other DNA
gtatgtagagctgagtttttttgtttttgtttttggagacagaatctcactctgtcacaaggctggagtgcagtggcacaatcttggcttaatgcaacctctgactcccaggttcaagcg

SEQ ID NO: 66329 - DNA, 120 bp, synthetic construct
  source 1..120: mol_type = other DNA
atttccacccaaagaagattttgcagactgaagagcactatcaaaactgtaatatgaaaatatcaaacagatgatacacacttactgcactgtgaataatcatggttcatttaattcaaa

SEQ ID NO: 66330 - DNA, 120 bp, synthetic construct
  source 1..120: mol_type = other DNA
ctcttgacctcgtgatctacctgccttggtctcccaaagtgctgggattacaggcccgaggcactgtgcctggcgtgcctggcctttttttttttttgagacggagtctcgctctgtcgc

SEQ ID NO: 66331 - DNA, 120 bp, synthetic construct
  source 1..120: mol_type = other DNA
taatagagatggggtttcaccatgttagccaggatggtctcgatcttctgacctcgtgatccacccgactcggcctctcaaagtgctgggattacaggcatgagccattgagcctggcct

SEQ ID NO: 66332 - DNA, 120 bp, synthetic construct
  source 1..120: mol_type = other DNA
ccaaagtgctgagattacaggtatgagccaccacacctgactgtgaacttttaatcataataagttagtttccctcttaatccattcactcaggtctcctttcctagatgacagctactg

SEQ ID NO: 66333 - DNA, 120 bp, synthetic construct
  source 1..120: mol_type = other DNA
attcatatcgcctatccttttactcacaagttttctaaacatcatgtcaaagtttgtcatctatatgttgaaaagagcacacaaagtaagaaacaaaatgttgacatcattctttttgtt

SEQ ID NO: 66334 - DNA, 120 bp, synthetic construct; identical to SEQ ID NO: 20705
  source 1..120: mol_type = other DNA

SEQ ID NO: 66335 - DNA, 120 bp, synthetic construct
  source 1..120: mol_type = other DNA
ggtctcgaactcctgacctcaagtgatcagcccaccttggcctcccagagtgttgggattacaggtgtgagccaccacgcctgtacctggcctatctttcataggttatataaattcctt

SEQ ID NO: 66336 - DNA, 120 bp, synthetic construct; identical to SEQ ID NO: 20706
  source 1..120: mol_type = other DNA

SEQ ID NO: 66337 - DNA, 120 bp, synthetic construct
  source 1..120: mol_type = other DNA
tgggaacaaggcctggaaataattctttttttttttttcctgagacagtcttactctgtcgcccaggctggagtgcagtggcgtgatctcggctcactgcaagctccgcctcccgggttc

SEQ ID NO: 66338 - DNA, 120 bp, synthetic construct
  source 1..120: mol_type = other DNA
gactgaggcagtagaattacttgaacccgggaggcagaggttacagtgagccgagatcgcaccactgcactccagcatgggcgacaagagcaaaacttggtctcaaaaacaacaacaaca

SEQ ID NO: 66339 - DNA, 120 bp, synthetic construct
  source 1..120: mol_type = other DNA
ctctatggaaataacttgcaatgaagacactttttgttgaagtttttatcagagtatgattattaacagtggaaaagttgagaaaacttggatgcccaataacagaaagttgcaagcaaa

SEQ ID NO: 66340 - DNA, 120 bp, synthetic construct
  source 1..120: mol_type = other DNA
aattccactgtaagccaagccaagtaaggtgctgaagactaccattatgtgcttgaatagcacctgaaataaaataaaaaaattggcttaagggttcgaaatttttctttgtgccattag

SEQ ID NO: 66341 - DNA, 120 bp, synthetic construct
  source 1..120: mol_type = other DNA
ccaccgcacccggcctctacactcaacttttaaacacttctaatgataccaccctaatgtagcaatcccaactactttttaacagttgccatttttagatagctgaaacctgcctcttct

SEQ ID NO: 66342 - DNA, 120 bp, synthetic construct
  source 1..120: mol_type = other DNA
tagattcaaaagcagtcacagcatcttctatatttccatgtactgcatccaatatagcaaaagttatgtgtgcatcttcttcatactcaacaatttctgatgcctaaacacacagaatag

SEQ ID NO: 66343 - DNA, 120 bp, synthetic construct
  source 1..120: mol_type = other DNA
accatgataattgtagaggaatgttaacttggaaagcttttccaagtgaacaaaataagttactgatgttttctaactgattttcaatggtgacagaaatacagatgctacaatacacca

SEQ ID NO: 66344 - DNA, 120 bp, synthetic construct
  source 1..120: mol_type = other DNA
agagtcacacgccactaggcccagctaattgtattttttgtagagatgggatttttccatgttgcccagggtggccttgaactcctggctcaaacaatcctcctgcttcagcctcccaaa

SEQ ID NO: 66345 - DNA, 120 bp, synthetic construct; identical to SEQ ID NO: 20707
  source 1..120: mol_type = other DNA

SEQ ID NO: 66346 - DNA, 120 bp, synthetic construct; identical to SEQ ID NO: 20708
  source 1..120: mol_type = other DNA

SEQ ID NO: 66347 - DNA, 120 bp, synthetic construct
  source 1..120: mol_type = other DNA
ccatgaaatgtctgtgacccctgatatccatcaggcaccgagtctggtccataattctctgtgggccaacgatgacgggatgctgacttactgctatttagtttctattggaagaaaaaa

SEQ ID NO: 66348 - DNA, 120 bp, synthetic construct; identical to SEQ ID NO: 20709
  source 1..120: mol_type = other DNA

SEQ ID NO: 66349 - DNA, 120 bp, synthetic construct
  source 1..120: mol_type = other DNA
atataacttttgttcctacaaattggcaaaggattttataaactagtaagtcagcattagcaaaagtgcgaaaatggcactatcagatactagtggtaagagcataaactgaatattttg

SEQ ID NO: 66350 - DNA, 120 bp, synthetic construct; identical to SEQ ID NO: 20710
  source 1..120: mol_type = other DNA

SEQ ID NO: 66351 - DNA, 120 bp, synthetic construct
  source 1..120: mol_type = other DNA
attattattaccctcatttcacatatgaggcaactgatgcattgagaggttaagaaacttgcctgtggtcaaaataagcagaagaacaagggtctaaatgcaccccaacactctgtcctc

SEQ ID NO: 66352 - DNA, 120 bp, synthetic construct; identical to SEQ ID NO: 20711
  source 1..120: mol_type = other DNA

SEQ ID NO: 66353 - DNA, 120 bp, synthetic construct
  source 1..120: mol_type = other DNA
ttgccacatggtgactctctgggagtgcttgaccgagaaacatgaggtgttatcaaagaatctttttcctgggctgtttttgcttcatcaaaaattttcttaaatgagtctgcaacatcc

SEQ ID NO: 66354 - DNA, 120 bp, synthetic construct
  source 1..120: mol_type = other DNA
gagtagctgctaattataggcacgcaccaccacgcccggctcatttttgtattttcagtagaaacagggtttcaccacattggccaggctggtctcgaactcctgagctcaagtgatctg

SEQ ID NO: 66355 - DNA, 120 bp, synthetic construct
  source 1..120: mol_type = other DNA
ttaagagctaccttagctggtaataaaactggtatacttaaaaaaaaatcagagattgttattttatcattgtacttgtttggcatggctaagatgtgttactggtcactaagggtgagg

SEQ ID NO: 66356 - DNA, 120 bp, synthetic construct; identical to SEQ ID NO: 20712
  source 1..120: mol_type = other DNA

SEQ ID NO: 66357 - DNA, 120 bp, synthetic construct
  source 1..120: mol_type = other DNA
tttttttgactggtgttacagcaaaagagaagaaaaaacctgaagattctccctcagatagtctcggtctcctgacctcgtgatccacccgcctcggcctcccaaagtgctgggattaca

SEQ ID NO: 66358 - DNA, 120 bp, synthetic construct; identical to SEQ ID NO: 20713
  source 1..120: mol_type = other DNA

SEQ ID NO: 66359 - DNA, 120 bp, synthetic construct
  source 1..120: mol_type = other DNA
ctcgaaggttcttcaaagactgctgagaggaaactgggcctattagattttttttaaaggttaagtgtgagattgttcaaaatctattgattcggccttacagagatacacaataaaatg

SEQ ID NO: 66360 - DNA, 120 bp, synthetic construct
  source 1..120: mol_type = other DNA
atcaggcggggtaggtatcattattcaaactttacagacgatgaaacaggctcacagttgacaggtaattttttcagaaatcacaaagtcaaattggcttctggagtctgctgctctatc

SEQ ID NO: 66361 - DNA, 120 bp, synthetic construct
  source 1..120: mol_type = other DNA
aaataatctttatgtaataggtgtaaaagaagtattttggctggatgcggtggctcttgcctgtaatacccacactttgggaggccaaggcaggtggatcacgaggtcaggagatcgaga

SEQ ID NO: 66362 - DNA, 120 bp, synthetic construct
  source 1..120: mol_type = other DNA
gcccagtaaacctaaatgacttatttaaatgttatattttcttttttttttttttttgagatagtcttgctctgtcaccaggtttggagtgcagtggtgcaatctcagctcactgcaatc

SEQ ID NO: 66363 - DNA, 120 bp, synthetic construct
  source 1..120: mol_type = other DNA
aaagctgcatttgcctagaaagtggattgctgcatatgaaccaagtgttgggctatatgactccattgtcctaagctatttggggttggaaggaagaggggtgaagtagaaaagcaacaa

SEQ ID NO: 66364 - DNA, 120 bp, synthetic construct
  source 1..120: mol_type = other DNA
tatacagcagtccactttctaggcaaatgcagttttaaaactgtgccataggccaggcactggtggttcatgcctataatcccaccactttgggaggccgaggcaggcggatcacaagat

SEQ ID NO: 66365 - DNA, 120 bp, synthetic construct
  source 1..120: mol_type = other DNA
ccggattcaagcgattctcctgcgtcagcctcccaagtagctgggactacagatgcacgccagctaatttttctatttttagtagagacgaggtttcaccatgttggccaggatggtctc

SEQ ID NO: 66366 - DNA, 120 bp, synthetic construct; identical to SEQ ID NO: 20714
  source 1..120: mol_type = other DNA

SEQ ID NO: 66367 - DNA, 120 bp, synthetic construct; identical to SEQ ID NO: 20715
  source 1..120: mol_type = other DNA

SEQ ID NO: 66368 - DNA, 120 bp, synthetic construct; identical to SEQ ID NO: 20716
  source 1..120: mol_type = other DNA

SEQ ID NO: 66369 - DNA, 120 bp, synthetic construct; identical to SEQ ID NO: 20717
  source 1..120: mol_type = other DNA

SEQ ID NO: 66370 - DNA, 120 bp, synthetic construct
  source 1..120: mol_type = other DNA
tggctttattaaagcaatccagctatgaaaattatgcagaaatgattatctacaatcttaccagcacataagaaattcttcctctattctgaaataccatcttctcacaatatactttga

SEQ ID NO: 66371 - DNA, 120 bp, synthetic construct; identical to SEQ ID NO: 20718
  source 1..120: mol_type = other DNA

SEQ ID NO: 66372 - DNA, 120 bp, synthetic construct; identical to SEQ ID NO: 20719
  source 1..120: mol_type = other DNA

SEQ ID NO: 66373 - DNA, 120 bp, synthetic construct
  source 1..120: mol_type = other DNA
ttgttgttgttgttgttgttgttttgagatggatactcactgtgtcacccaggctagagtgcagcggcatgatctctgctcagtgcaacctccaactcctgggttcaagcgattctcctg

SEQ ID NO: 66374 - DNA, 120 bp, synthetic construct
  source 1..120: mol_type = other DNA
gtccttgtgttgtctcccctgtcttctctggggagctccctagaggcttctttgtaaagtagctctgagtcttgcagtgtctatccctaatcatgggaaaacatcaaacaaacccataca

SEQ ID NO: 66375 - DNA, 120 bp, synthetic construct; identical to SEQ ID NO: 20720
  source 1..120: mol_type = other DNA

SEQ ID NO: 66376 - DNA, 120 bp, synthetic construct
  source 1..120: mol_type = other DNA
gaagctaagcaaggaaccagtttttaaatcagcaatccgttattttaatggactgagcaatttaatagtgcacctcaaaggtcaatgataaaaactaaaaaaaaaaaatacctactgaaa

SEQ ID NO: 66377 - DNA, 120 bp, synthetic construct; identical to SEQ ID NO: 20721
  source 1..120: mol_type = other DNA

SEQ ID NO: 66378 - DNA, 120 bp, synthetic construct; identical to SEQ ID NO: 20722
  source 1..120: mol_type = other DNA

SEQ ID NO: 66379 - DNA, 120 bp, synthetic construct; identical to SEQ ID NO: 20723
  source 1..120: mol_type = other DNA

SEQ ID NO: 66380 - DNA, 120 bp, synthetic construct
  source 1..120: mol_type = other DNA
gatgtactggcaatcataataggtagtattgggttaaaagcattagtttgctgtaggtacgttaggagtactccccatgtgattgatcagtgaatttaaaaatggctaaagtgggtaacc

SEQ ID NO: 66381 - DNA, 120 bp, synthetic construct; identical to SEQ ID NO: 20724
  source 1..120: mol_type = other DNA

SEQ ID NO: 66382 - DNA, 120 bp, synthetic construct; identical to SEQ ID NO: 20725
  source 1..120: mol_type = other DNA

SEQ ID NO: 66383 - DNA, 120 bp, synthetic construct
  source 1..120: mol_type = other DNA
aacgatttaagaggaaagagaaatttatggagccagagtttggaactatatttgctcatagcatgtgaagccatactaacagcttcttgttaaggtttactggagtcttcattagaaaaa

SEQ ID NO: 66384 - DNA, 120 bp, synthetic construct; identical to SEQ ID NO: 20726
  source 1..120: mol_type = other DNA

SEQ ID NO: 66385 - DNA, 120 bp, synthetic construct
  source 1..120: mol_type = other DNA
tgaactcaccgtaggacacactttgtggatttattgtgtgttttgaagtcacactgcgagctatagaattaaccaaaacacaactcttcttggaaatgagagttcaagttggcagaaagt

SEQ ID NO: 66386 - DNA, 120 bp, synthetic construct; identical to SEQ ID NO: 20727
  source 1..120: mol_type = other DNA

SEQ ID NO: 66387 - DNA, 120 bp, synthetic construct; identical to SEQ ID NO: 20728
  source 1..120: mol_type = other DNA

SEQ ID NO: 66388 - DNA, 120 bp, synthetic construct; identical to SEQ ID NO: 20729
  source 1..120: mol_type = other DNA

SEQ ID NO: 66389 - DNA, 120 bp, synthetic construct
  source 1..120: mol_type = other DNA
cggtcagtgtgccaagcccccaagttgttcaagggtcaactgtaatcctaaaagaatctaatacaatattgtacacagtaagtggtcagtaaataaggaattgaactaaataagaataca

SEQ ID NO: 66390 - DNA, 120 bp, synthetic construct
  source 1..120: mol_type = other DNA
tgagtgcgaaagtttcctgtagttcctttagcatggagaggctggggaaggttacagactgatttgtactctttagacatatagttgatcattgaacaacacacgtctgaactgttacac

SEQ ID NO: 66391 - DNA, 120 bp, synthetic construct; identical to SEQ ID NO: 20730
  source 1..120: mol_type = other DNA

SEQ ID NO: 66392 - DNA, 120 bp, synthetic construct; identical to SEQ ID NO: 20731
  source 1..120: mol_type = other DNA

SEQ ID NO: 66393 - DNA, 120 bp, synthetic construct
  source 1..120: mol_type = other DNA
ttgatcccttccttacaccttatacaaaaatcaattcaagatggattaaagatttaaacgttagacctaaaaccataaaaaccctagaagaaaacctaggcattaccattcaggacatag

SEQ ID NO: 66394 - DNA, 120 bp, synthetic construct
  source 1..120: mol_type = other DNA
gaaagaaaggaaggaaggaaggaaggaaggaaggaaggaaggaaggaaggaaatacagattgggaagaaaaaataaaattgtgtttgttcacacatgacatgattgtgtagaaaatccaa

SEQ ID NO: 66395 - DNA, 120 bp, synthetic construct
  source 1..120: mol_type = other DNA
tcgagtaattcatggctagcaggcatgacttaaaggaaaaactaacggaaaccctgtaggccaaaggaacgtaacactagacagtaactctaactctaattcaagagagaatgtgcagga

SEQ ID NO: 66396 - DNA, 120 bp, synthetic construct
  source 1..120: mol_type = other DNA
ctgggcaacataacatagcgagactctctgtataaaaaattaaaaatagccaggcatggtggtgcacacctgtagtcccagctcctcgggaggctgaggtgggagaattgcttgagccca

SEQ ID NO: 66397 - DNA, 120 bp, synthetic construct
  source 1..120: mol_type = other DNA
agaaaatcatttttactgtttttattttttggtttgttcgtttttttcctgtgagatggagtttcactcttgttgcccatcctggtgtacaatggcgcgatctcggctcacttcaacctc

SEQ ID NO: 66398 - DNA, 120 bp, synthetic construct
  source 1..120: mol_type = other DNA
gtctcgctagcttcaggagtgaagcttcagaccttcacggtgagtgttacagccgttaacgtggcgcgtctggagttgttcgttccttctggtgggtttgtggtctcgctagcttcagga

SEQ ID NO: 66399 - DNA, 120 bp, synthetic construct
  source 1..120: mol_type = other DNA
attggctgtgggtttgtcatagatagctcttattattttgaaatacgtcccatcaatacctaatttattgagagtttttagcatgaagagttgttgaattttgtcaaaggctttttctgc

SEQ ID NO: 66400 - DNA, 120 bp, synthetic construct
  source 1..120: mol_type = other DNA
cttctgctagcttttgaatgtgtttgctcttgcttttctagttcttttaattgtgatgttagggtgtcaattttggatctttcctgcttgctcttgtaggcatttagtgctataaatttc
